United States Patent Application Publication US 2022/0211838 A1 - sequence listing, part 15

SEQ ID NO: 25507 - RNA, 4005 nt, Artificial Sequence
  SARS-CoV-2/Wuhan/WIV05/2019__EPI_ISL_402128 spike protein mRNA gc (1-1273)(K986P_V987P_H69del_V70del_A222V_Y453F_S477N_D614G_I692V)
aggagaaagcuuaccauguucguguuccugguccuccugccccuggugagcucccagugcgugaaccucaccacccgcacgcagcugccgcccgccuacaccaacagcuucacccggggcgucuacuaccccgacaagguguuccgcuccagcgugcugcacuccacccaggaccucuuccugcccuucuucagcaacgucacgugguuccacgccaucuccgggaccaacggcaccaagcgguucgacaacccggugcugcccuucaacgacggggucuacuucgcgagcaccgagaaguccaacaucauccgcggcuggaucuucgggacgacccucgacagcaagacccagucccugcugaucgugaacaacgccaccaacguggucaucaaggugugcgaguuccaguucugcaacgaccccuuccucggcguguacuaccacaagaacaacaagagcuggauggaguccgaguuccgggucuacagcuccgccaacaacugcacguucgaguacgugagccagcccuuccugauggaccuggagggcaagcaggggaacuucaagaaccuccgcgaguucguguucaagaacaucgacggcuacuucaagaucuacuccaagcacaccccgaucaaccugguccgggaccugccccagggguucagcguccucgagccccugguggaccugcccaucggcaucaacaucacccgcuuccagacccuccuggcccugcaccgguccuaccucacgccgggggacagcagcuccggcuggaccgcgggcgccgccgccuacuacgugggguaccugcagccccgcaccuuccugcucaaguacaacgagaacggcaccaucacggacgcggucgacugcgcccuggacccccugagcgagaccaagugcacccucaaguccuucaccguggagaaggggaucuaccagacgagcaacuuccgggugcagcccaccgaguccaucguccgcuucccgaacaucaccaaccugugccccuucggcgagguguucaacgccacccgguucgccagcgucuacgccuggaaccgcaagcggaucuccaacugcguggcggacuacagcgugcuguacaacuccgccagcuucuccacguucaagugcuacggcgucagccccaccaagcucaacgaccugugcuucaccaacguguacgccgacuccuucgugauccgcggggacgagguccggcagaucgcccccggccagaccgggaagaucgccgacuacaacuacaagcugccggacgacuucacgggcugcgugaucgcguggaacagcaacaaccucgacuccaaggucgggggcaacuacaacuaccuguuccgccuguuccgcaagagcaaccucaagcccuucgagcgggacaucuccaccgagaucuaccaggccggcaacacccccugcaacgggguggagggcuucaacugcuacuucccccugcaguccuacggguuccagccgaccaacggcgugggguaccagcccuaccggguggucgugcugagcuucgagcuccugcacgcccccgccacggugugcggccccaagaaguccaccaaccuggucaagaacaagugcgugaacuucaacuucaacggccucaccgggaccggcgugcugaccgagagcaacaagaaguuccugccguuccagcaguucgggcgcgacaucgccgacacgaccgacgcgguccgcgacccccagacccuggagauccucgacaucacccccugcagcuucggcgggguguccgugaucacgccgggcaccaacaccagcaaccaggucgccgugcuguaccagggcgugaacugcaccgagguccccguggccauccacgccgaccagcugacgcccaccuggcggguguacuccaccggcagcaacgucuuccagacccgcgccgggugccucaucggcgcggagcacgugaacaacuccuacgagugcgacauccccaucggggccggcaucugcgccagcuaccagacgcagaccaacuccccgcggcgcgcccggagcguggcgucccagagcgucaucgccuacaccaugucccugggcgccgagaacagcgucgccuacuccaacaacagcaucgccauccccaccaacuucacgaucuccgugaccaccgagauccugcccgugagcaugaccaagacgagcgucgacugcaccauguacaucugcggggacuccaccgagugcagcaaccuccugcugcaguacggcuccuucugcacccagcucaaccgcgcgcugacggggaucgccguggagcaggacaagaacacccaggagguguucgcccaggucaagcagaucuacaagacgcccccgaucaaggacuucggcggguucaacuucagccagauccugcccgaccccuccaagcccagcaagcgguccuucaucgaggaccuccuguucaacaaggugacccuggccgacgccggcuucaucaagcaguacggcgacugccucggggacaucgcggcccgcgaccugaucugcgcccagaaguucaacggccugaccgugcucccgccccugcugaccgacgagaugaucgcccaguacaccagcgcccuccuggcggggaccaucacguccggcuggaccuucggggccggcgccgcccugcagauccccuucgcgaugcagauggccuaccgguucaacggcaucggggucacccagaacgugcucuacgagaaccagaagcugaucgccaaccaguucaacagcgccaucggcaagauccaggacucccugagcuccaccgccagcgcgcucgggaagcugcaggacguggucaaccagaacgcccaggcccugaacacgcucgugaagcagcuguccagcaacuucggcgccaucuccagcgugcugaacgacauccucucccgccuggacccgcccgaggccgaggugcagaucgaccggcugaucaccgggcgccuccagagccugcagaccuacgugacccagcagcugauccgggcggccgagauccgcgccagcgccaaccucgccgcgaccaagauguccgagugcguccugggccagagcaagcggguggacuucugcggcaagggguaccaccugauguccuucccccagagcgccccgcacggcguggucuuccuccacgugacguacguccccgcccaggagaagaacuucaccaccgcccccgcgaucugccacgacgggaaggcccacuucccccgcgagggcguguucguguccaacgggacccacugguucgucacgcagcggaacuucuacgagccgcagaucaucaccaccgacaacaccuucgugagcggcaacugcgacguggucaucggcaucgugaacaacacgguguacgacccccugcagcccgagcuggacuccuucaaggaggagcucgacaaguacuucaagaaccacaccagccccgacgucgaccugggggacaucuccggcaucaacgccagcguggugaacauccagaaggagaucgaccgccugaacgaggucgccaagaaccucaacgagucccugaucgaccugcaggagcucgggaaguacgagcaguacaucaaguggccgugguacaucuggcugggcuucaucgccggccugaucgcgaucgugauggugaccaucaugcucugcugcaugaccagcugcugcuccugccugaaggggugcugcagcugcggcuccugcugcaaguucgacgaggacgacagcgagcccguccugaagggggugaagcuccacuacacgugaggacuaguuauaagacugacuagcccgaugggccucccaacgggcccuccuccccuccuugcaccgagauuaauaaaaaaaaaaaaaaaaaaaaaaaaaaaaaaaaaaaaaaaaaaaaaaaaaaaaaaaaaaaaaaaaaaaaaaaaaaaaaaaaaaaaaaaaaaaaaaaaaaaa

SEQ ID NO: 25508 - RNA, 4005 nt, Artificial Sequence
  SARS-CoV-2/Wuhan/WIV05/2019__EPI_ISL_402128 spike protein mRNA gc (1-1273)(K986P_V987P_H69del_V70del_Y453F_D614G_I692V_M1229I)
aggagaaagcuuaccauguucguguuccugguccuccugccccuggugagcucccagugcgugaaccucaccacccgcacgcagcugccgcccgccuacaccaacagcuucacccggggcgucuacuaccccgacaagguguuccgcuccagcgugcugcacuccacccaggaccucuuccugcccuucuucagcaacgucacgugguuccacgccaucuccgggaccaacggcaccaagcgguucgacaacccggugcugcccuucaacgacggggucuacuucgcgagcaccgagaaguccaacaucauccgcggcuggaucuucgggacgacccucgacagcaagacccagucccugcugaucgugaacaacgccaccaacguggucaucaaggugugcgaguuccaguucugcaacgaccccuuccucggcguguacuaccacaagaacaacaagagcuggauggaguccgaguuccgggucuacagcuccgccaacaacugcacguucgaguacgugagccagcccuuccugauggaccuggagggcaagcaggggaacuucaagaaccuccgcgaguucguguucaagaacaucgacggcuacuucaagaucuacuccaagcacaccccgaucaaccugguccgggaccugccccagggguucagcgcccucgagccccugguggaccugcccaucggcaucaacaucacccgcuuccagacccuccuggcccugcaccgguccuaccucacgccgggggacagcagcuccggcuggaccgcgggcgccgccgccuacuacgugggguaccugcagccccgcaccuuccugcucaaguacaacgagaacggcaccaucacggacgcggucgacugcgcccuggacccccugagcgagaccaagugcacccucaaguccuucaccguggagaaggggaucuaccagacgagcaacuuccgggugcagcccaccgaguccaucguccgcuucccgaacaucaccaaccugugccccuucggcgagguguucaacgccacccgguucgccagcgucuacgccuggaaccgcaagcggaucuccaacugcguggcggacuacagcgugcuguacaacuccgccagcuucuccacguucaagugcuacggcgucagccccaccaagcucaacgaccugugcuucaccaacguguacgccgacuccuucgugauccgcggggacgagguccggcagaucgcccccggccagaccgggaagaucgccgacuacaacuacaagcugccggacgacuucacgggcugcgugaucgcguggaacagcaacaaccucgacuccaaggucgggggcaacuacaacuaccuguuccgccuguuccgcaagagcaaccucaagcccuucgagcgggacaucuccaccgagaucuaccaggccggcagcacccccugcaacgggguggagggcuucaacugcuacuucccccugcaguccuacggguuccagccgaccaacggcgugggguaccagcccuaccggguggucgugcugagcuucgagcuccugcacgcccccgccacggugugcggccccaagaaguccaccaaccuggucaagaacaagugcgugaacuucaacuucaacggccucaccgggaccggcgugcugaccgagagcaacaagaaguuccugccguuccagcaguucgggcgcgacaucgccgacacgaccgacgcgguccgcgacccccagacccuggagauccucgacaucacccccugcagcuucggcgggguguccgugaucacgccgggcaccaacaccagcaaccaggucgccgugcuguaccagggcgugaacugcaccgagguccccguggccauccacgccgaccagcugacgcccaccuggcggguguacuccaccggcagcaacgucuuccagacccgcgccgggugccucaucggcgcggagcacgugaacaacuccuacgagugcgacauccccaucggggccggcaucugcgccagcuaccagacgcagaccaacuccccgcggcgcgcccggagcguggcgucccagagcgugaucgccuacaccaugucccugggcgccgagaacagcgucgccuacuccaacaacagcaucgccauccccaccaacuucacgaucuccgugaccaccgagauccugcccgugagcaugaccaagacgagcgucgacugcaccauguacaucugcggggacuccaccgagugcagcaaccuccugcugcaguacggcuccuucugcacccagcucaaccgcgcgcugacggggaucgccguggagcaggacaagaacacccaggagguguucgcccaggucaagcagaucuacaagacgcccccgaucaaggacuucggcggguucaacuucagccagauccugcccgaccccuccaagcccagcaagcgguccuucaucgaggaccuccuguucaacaaggugacccuggccgacgccggcuucaucaagcaguacggcgacugccucggggacaucgcggcccgcgaccugaucugcgcccagaaguucaacggccugaccgugcucccgccccugcugaccgacgagaugaucgcccaguacaccagcgcccuccuggcggggaccaucacguccggcuggaccuucggggccggcgccgcccugcagauccccuucgcgaugcagauggccuaccgguucaacggcaucggggucacccagaacgugcucuacgagaaccagaagcugaucgccaaccaguucaacagcgccaucggcaagauccaggacucccugagcuccaccgccagcgcgcucgggaagcugcaggacguggucaaccagaacgcccaggcccugaacacgcucgugaagcagcuguccagcaacuucggcgccaucuccagcgugcugaacgacauccucucccgccuggacccgcccgaggccgaggugcagaucgaccggcugaucaccgggcgccuccagagccugcagaccuacgugacccagcagcugauccgggcggccgagauccgcgccagcgccaaccucgccgcgaccaagauguccgagugcguccugggccagagcaagcggguggacuucugcggcaagggguaccaccugauguccuucccccagagcgccccgcacggcguggucuuccuccacgugacguacguccccgcccaggagaagaacuucaccaccgcccccgcgaucugccacgacgggaaggcccacuucccccgcgagggcguguucguguccaacgggacccacugguucgucacgcagcggaacuucuacgagccgcagaucaucaccaccgacaacaccuucgugagcggcaacugcgacguggucaucggcaucgugaacaacacgguguacgacccccugcagcccgagcuggacuccuucaaggaggagcucgacaaguacuucaagaaccacaccagccccgacgucgaccugggggacaucuccggcaucaacgccagcguggugaacauccagaaggagaucgaccgccugaacgaggucgccaagaaccucaacgagucccugaucgaccugcaggagcucgggaaguacgagcaguacaucaaguggccgugguacaucuggcugggcuucaucgccggccugaucgcgaucgugaucgugaccaucaugcucugcugcaugaccagcugcugcuccugccugaaggggugcugcagcugcggcuccugcugcaaguucgacgaggacgacagcgagcccguccugaagggggugaagcuccacuacacgugaggacuaguuauaagacugacuagcccgaugggccucccaacgggcccuccuccccuccuugcaccgagauuaauaaaaaaaaaaaaaaaaaaaaaaaaaaaaaaaaaaaaaaaaaaaaaaaaaaaaaaaaaaaaaaaaaaaaaaaaaaaaaaaaaaaaaaaaaaaaaaaaaaaa

SEQ ID NO: 25509 - RNA, 4002 nt, Artificial Sequence
  SARS-CoV-2/Wuhan/WIV05/2019__EPI_ISL_402128 spike protein mRNA gc (1-1273)(K986P_V987P_K986P_V987P_H69del_V70del_Y144del_N501Y_A570 D_D614G_P681H_T716I_S982A_D1118H)
aggagaaagcuuaccauguucguguuccugguccuccugccccuggugagcucccagugcgugaaccucaccacccgcacgcagcugccgcccgccuacaccaacagcuucacccggggcgucuacuaccccgacaagguguuccgcuccagcgugcugcacuccacccaggaccucuuccugcccuucuucagcaacgucacgugguuccacgccaucuccgggaccaacggcaccaagcgguucgacaacccggugcugcccuucaacgacggggucuacuucgcgagcaccgagaaguccaacaucauccgcggcuggaucuucgggacgacccucgacagcaagacccagucccugcugaucgugaacaacgccaccaacguggucaucaaggugugcgaguuccaguucugcaacgaccccuuccucggcguguaccacaagaacaacaagagcuggauggaguccgaguuccgggucuacagcuccgccaacaacugcacguucgaguacgugagccagcccuuccugauggaccuggagggcaagcaggggaacuucaagaaccuccgcgaguucguguucaagaacaucgacggcuacuucaagaucuacuccaagcacaccccgaucaaccugguccgggaccugccccagggguucagcgcccucgagccccugguggaccugcccaucggcaucaacaucacccgcuuccagacccuccuggcccugcaccgguccuaccucacgccgggggacagcagcuccggcuggaccgcgggcgccgccgccuacuacgugggguaccugcagccccgcaccuuccugcucaaguacaacgagaacggcaccaucacggacgcggucgacugcgcccuggacccccugagcgagaccaagugcacccucaaguccuucaccguggagaaggggaucuaccagacgagcaacuuccgggugcagcccaccgaguccaucguccgcuucccgaacaucaccaaccugugccccuucggcgagguguucaacgccacccgguucgccagcgucuacgccuggaaccgcaagcggaucuccaacugcguggcggacuacagcgugcuguacaacuccgccagcuucuccacguucaagugcuacggcgucagccccaccaagcucaacgaccugugcuucaccaacguguacgccgacuccuucgugauccgcggggacgagguccggcagaucgcccccggccagaccgggaagaucgccgacuacaacuacaagcugccggacgacuucacgggcugcgugaucgcguggaacagcaacaaccucgacuccaaggucgggggcaacuacaacuaccuguaccgccuguuccgcaagagcaaccucaagcccuucgagcgggacaucuccaccgagaucuaccaggccggcagcacccccugcaacgggguggagggcuucaacugcuacuucccccugcaguccuacggguuccagccgaccuacggcgugggguaccagcccuaccggguggucgugcugagcuucgagcuccugcacgcccccgccacggugugcggccccaagaaguccaccaaccuggucaagaacaagugcgugaacuucaacuucaacggccucaccgggaccggcgugcugaccgagagcaacaagaaguuccugccguuccagcaguucgggcgcgacaucgacgacacgaccgacgcgguccgcgacccccagacccuggagauccucgacaucacccccugcagcuucggcgggguguccgugaucacgccgggcaccaacaccagcaaccaggucgccgugcuguaccagggcgugaacugcaccgagguccccguggccauccacgccgaccagcugacgcccaccuggcggguguacuccaccggcagcaacgucuuccagacccgcgccgggugccucaucggcgcggagcacgugaacaacuccuacgagugcgacauccccaucggggccggcaucugcgccagcuaccagacgcagaccaacucccaccggcgcgcccggagcguggcgucccagagcaucaucgccuacaccaugucccugggcgccgagaacagcgucgccuacuccaacaacagcaucgccauccccaucaacuucacgaucuccgugaccaccgagauccugcccgugagcaugaccaagacgagcgucgacugcaccauguacaucugcggggacuccaccgagugcagcaaccuccugcugcaguacggcuccuucugcacccagcucaaccgcgcgcugacggggaucgccguggagcaggacaagaacacccaggagguguucgcccaggucaagcagaucuacaagacgcccccgaucaaggacuucggcggguucaacuucagccagauccugcccgaccccuccaagcccagcaagcgguccuucaucgaggaccuccuguucaacaaggugacccuggccgacgccggcuucaucaagcaguacggcgacugccucggggacaucgcggcccgcgaccugaucugcgcccagaaguucaacggccugaccgugcucccgccccugcugaccgacgagaugaucgcccaguacaccagcgcccuccuggcggggaccaucacguccggcuggaccuucggggccggcgccgcccugcagauccccuucgcgaugcagauggccuaccgguucaacggcaucggggucacccagaacgugcucuacgagaaccagaagcugaucgccaaccaguucaacagcgccaucggcaagauccaggacucccugagcuccaccgccagcgcgcucgggaagcugcaggacguggucaaccagaacgcccaggcccugaacacgcucgugaagcagcuguccagcaacuucggcgccaucuccagcgugcugaacgacauccucgcccgccuggacccgcccgaggccgaggugcagaucgaccggcugaucaccgggcgccuccagagccugcagaccuacgugacccagcagcugauccgggcggccgagauccgcgccagcgccaaccucgccgcgaccaagauguccgagugcguccugggccagagcaagcggguggacuucugcggcaagggguaccaccugauguccuucccccagagcgccccgcacggcguggucuuccuccacgugacguacguccccgcccaggagaagaacuucaccaccgcccccgcgaucugccacgacgggaaggcccacuucccccgcgagggcguguucguguccaacgggacccacugguucgucacgcagcggaacuucuacgagccgcagaucaucaccacccacaacaccuucgugagcggcaacugcgacguggucaucggcaucgugaacaacacgguguacgacccccugcagcccgagcuggacuccuucaaggaggagcucgacaaguacuucaagaaccacaccagccccgacgucgaccugggggacaucuccggcaucaacgccagcguggugaacauccagaaggagaucgaccgccugaacgaggucgccaagaaccucaacgagucccugaucgaccugcaggagcucgggaaguacgagcaguacaucaaguggccgugguacaucuggcugggcuucaucgccggccugaucgcgaucgugauggugaccaucaugcucugcugcaugaccagcugcugcuccugccugaaggggugcugcagcugcggcuccugcugcaaguucgacgaggacgacagcgagcccguccugaagggggugaagcuccacuacacgugaggacuaguuauaagacugacuagcccgaugggccucccaacgggcccuccuccccuccuugcaccgagauuaauaaaaaaaaaaaaaaaaaaaaaaaaaaaaaaaaaaaaaaaaaaaaaaaaaaaaaaaaaaaaaaaaaaaaaaaaaaaaaaaaaaaaaaaaaaaaaaaaaaaa

SEQ ID NO: 25510 - RNA, 4011 nt, Artificial Sequence
  SARS-CoV-2/Wuhan/WIV05/2019__EPI_ISL_402128 spike protein mRNA gc (1-1273)(K986P_V987P_K986P_V987P_K417N_E484K_N501Y_D614G)
aggagaaagcuuaccauguucguguuccugguccuccugccccuggugagcucccagugcgugaaccucaccacccgcacgcagcugccgcccgccuacaccaacagcuucacccggggcgucuacuaccccgacaagguguuccgcuccagcgugcugcacuccacccaggaccucuuccugcccuucuucagcaacgucacgugguuccacgccauccacguguccgggaccaacggcaccaagcgguucgacaacccggugcugcccuucaacgacggggucuacuucgcgagcaccgagaaguccaacaucauccgcggcuggaucuucgggacgacccucgacagcaagacccagucccugcugaucgugaacaacgccaccaacguggucaucaaggugugcgaguuccaguucugcaacgaccccuuccucggcguguacuaccacaagaacaacaagagcuggauggaguccgaguuccgggucuacagcuccgccaacaacugcacguucgaguacgugagccagcccuuccugauggaccuggagggcaagcaggggaacuucaagaaccuccgcgaguucguguucaagaacaucgacggcuacuucaagaucuacuccaagcacaccccgaucaaccugguccgggaccugccccagggguucagcgcccucgagccccugguggaccugcccaucggcaucaacaucacccgcuuccagacccuccuggcccugcaccgguccuaccucacgccgggggacagcagcuccggcuggaccgcgggcgccgccgccuacuacgugggguaccugcagccccgcaccuuccugcucaaguacaacgagaacggcaccaucacggacgcggucgacugcgcccuggacccccugagcgagaccaagugcacccucaaguccuucaccguggagaaggggaucuaccagacgagcaacuuccgggugcagcccaccgaguccaucguccgcuucccgaacaucaccaaccugugccccuucggcgagguguucaacgccacccgguucgccagcgucuacgccuggaaccgcaagcggaucuccaacugcguggcggacuacagcgugcuguacaacuccgccagcuucuccacguucaagugcuacggcgucagccccaccaagcucaacgaccugugcuucaccaacguguacgccgacuccuucgugauccgcggggacgagguccggcagaucgcccccggccagaccgggaacaucgccgacuacaacuacaagcugccggacgacuucacgggcugcgugaucgcguggaacagcaacaaccucgacuccaaggucgggggcaacuacaacuaccuguaccgccuguuccgcaagagcaaccucaagcccuucgagcgggacaucuccaccgagaucuaccaggccggcagcacccccugcaacggggugaagggcuucaacugcuacuucccccugcaguccuacggguuccagccgaccuacggcgugggguaccagcccuaccggguggucgugcugagcuucgagcuccugcacgcccccgccacggugugcggccccaagaaguccaccaaccuggucaagaacaagugcgugaacuucaacuucaacggccucaccgggaccggcgugcugaccgagagcaacaagaaguuccugccguuccagcaguucgggcgcgacaucgccgacacgaccgacgcgguccgcgacccccagacccuggagauccucgacaucacccccugcagcuucggcgggguguccgugaucacgccgggcaccaacaccagcaaccaggucgccgugcuguaccagggcgugaacugcaccgagguccccguggccauccacgccgaccagcugacgcccaccuggcggguguacuccaccggcagcaacgucuuccagacccgcgccgggugccucaucggcgcggagcacgugaacaacuccuacgagugcgacauccccaucggggccggcaucugcgccagcuaccagacgcagaccaacuccccgcggcgcgcccggagcguggcgucccagagcaucaucgccuacaccaugucccugggcgccgagaacagcgucgccuacuccaacaacagcaucgccauccccaccaacuucacgaucuccgugaccaccgagauccugcccgugagcaugaccaagacgagcgucgacugcaccauguacaucugcggggacuccaccgagugcagcaaccuccugcugcaguacggcuccuucugcacccagcucaaccgcgcgcugacggggaucgccguggagcaggacaagaacacccaggagguguucgcccaggucaagcagaucuacaagacgcccccgaucaaggacuucggcggguucaacuucagccagauccugcccgaccccuccaagcccagcaagcgguccuucaucgaggaccuccuguucaacaaggugacccuggccgacgccggcuucaucaagcaguacggcgacugccucggggacaucgcggcccgcgaccugaucugcgcccagaaguucaacggccugaccgugcucccgccccugcugaccgacgagaugaucgcccaguacaccagcgcccuccuggcggggaccaucacguccggcuggaccuucggggccggcgccgcccugcagauccccuucgcgaugcagauggccuaccgguucaacggcaucggggucacccagaacgugcucuacgagaaccagaagcugaucgccaaccaguucaacagcgccaucggcaagauccaggacucccugagcuccaccgccagcgcgcucgggaagcugcaggacguggucaaccagaacgcccaggcccugaacacgcucgugaagcagcuguccagcaacuucggcgccaucuccagcgugcugaacgacauccucucccgccuggacccgcccgaggccgaggugcagaucgaccggcugaucaccgggcgccuccagagccugcagaccuacgugacccagcagcugauccgggcggccgagauccgcgccagcgccaaccucgccgcgaccaagauguccgagugcguccugggccagagcaagcggguggacuucugcggcaagggguaccaccugauguccuucccccagagcgccccgcacggcguggucuuccuccacgugacguacguccccgcccaggagaagaacuucaccaccgcccccgcgaucugccacgacgggaaggcccacuucccccgcgagggcguguucguguccaacgggacccacugguucgucacgcagcggaacuucuacgagccgcagaucaucaccaccgacaacaccuucgugagcggcaacugcgacguggucaucggcaucgugaacaacacgguguacgacccccugcagcccgagcuggacuccuucaaggaggagcucgacaaguacuucaagaaccacaccagccccgacgucgaccugggggacaucuccggcaucaacgccagcguggugaacauccagaaggagaucgaccgccugaacgaggucgccaagaaccucaacgagucccugaucgaccugcaggagcucgggaaguacgagcaguacaucaaguggccgugguacaucuggcugggcuucaucgccggccugaucgcgaucgugauggugaccaucaugcucugcugcaugaccagcugcugcuccugccugaaggggugcugcagcugcggcuccugcugcaaguucgacgaggacgacagcgagcccguccugaagggggugaagcuccacuacacgugaggacuaguuauaagacugacuagcccgaugggccucccaacgggcccuccuccccuccuugcaccgagauuaauaaaaaaaaaaaaaaaaaaaaaaaaaaaaaaaaaaaaaaaaaaaaaaaaaaaaaaaaaaaaaaaaaaaaaaaaaaaaaaaaaaaaaaaaaaaaaaaaaaaa

SEQ ID NO: 25511 - RNA, 4002 nt, Artificial Sequence
  SARS-CoV-2/Wuhan/WIV05/2019__EPI_ISL_402128 spike protein mRNA gc (1-1273)(K986P_V987P_K986P_V987P_L18F_D80A_D215G_L242del_A243del_ L244del_R246I_K417N_E484K_N501Y_D614G_A701V)
aggagaaagcuuaccauguucguguuccugguccuccugccccuggugagcucccagugcgugaacuucaccacccgcacgcagcugccgcccgccuacaccaacagcuucacccggggcgucuacuaccccgacaagguguuccgcuccagcgugcugcacuccacccaggaccucuuccugcccuucuucagcaacgucacgugguuccacgccauccacguguccgggaccaacggcaccaagcgguucgccaacccggugcugcccuucaacgacggggucuacuucgcgagcaccgagaaguccaacaucauccgcggcuggaucuucgggacgacccucgacagcaagacccagucccugcugaucgugaacaacgccaccaacguggucaucaaggugugcgaguuccaguucugcaacgaccccuuccucggcguguacuaccacaagaacaacaagagcuggauggaguccgaguuccgggucuacagcuccgccaacaacugcacguucgaguacgugagccagcccuuccugauggaccuggagggcaagcaggggaacuucaagaaccuccgcgaguucguguucaagaacaucgacggcuacuucaagaucuacuccaagcacaccccgaucaaccugguccggggccugccccagggguucagcgcccucgagccccugguggaccugcccaucggcaucaacaucacccgcuuccagacccuccacaucuccuaccucacgccgggggacagcagcuccggcuggaccgcgggcgccgccgccuacuacgugggguaccugcagccccgcaccuuccugcucaaguacaacgagaacggcaccaucacggacgcggucgacugcgcccuggacccccugagcgagaccaagugcacccucaaguccuucaccguggagaaggggaucuaccagacgagcaacuuccgggugcagcccaccgaguccaucguccgcuucccgaacaucaccaaccugugccccuucggcgagguguucaacgccacccgguucgccagcgucuacgccuggaaccgcaagcggaucuccaacugcguggcggacuacagcgugcuguacaacuccgccagcuucuccacguucaagugcuacggcgucagccccaccaagcucaacgaccugugcuucaccaacguguacgccgacuccuucgugauccgcggggacgagguccggcagaucgcccccggccagaccgggaacaucgccgacuacaacuacaagcugccggacgacuucacgggcugcgugaucgcguggaacagcaacaaccucgacuccaaggucgggggcaacuacaacuaccuguaccgccuguuccgcaagagcaaccucaagcccuucgagcgggacaucuccaccgagaucuaccaggccggcagcacccccugcaacggggugaagggcuucaacugcuacuucccccugcaguccuacggguuccagccgaccuacggcgugggguaccagcccuaccggguggucgugcugagcuucgagcuccugcacgcccccgccacggugugcggccccaagaaguccaccaaccuggucaagaacaagugcgugaacuucaacuucaacggccucaccgggaccggcgugcugaccgagagcaacaagaaguuccugccguuccagcaguucgggcgcgacaucgccgacacgaccgacgcgguccgcgacccccagacccuggagauccucgacaucacccccugcagcuucggcgggguguccgugaucacgccgggcaccaacaccagcaaccaggucgccgugcuguaccagggcgugaacugcaccgagguccccguggccauccacgccgaccagcugacgcccaccuggcggguguacuccaccggcagcaacgucuuccagacccgcgccgggugccucaucggcgcggagcacgugaacaacuccuacgagugcgacauccccaucggggccggcaucugcgccagcuaccagacgcagaccaacuccccgcggcgcgcccggagcguggcgucccagagcaucaucgccuacaccaugucccugggcguggagaacagcgucgccuacuccaacaacagcaucgccauccccaccaacuucacgaucuccgugaccaccgagauccugcccgugagcaugaccaagacgagcgucgacugcaccauguacaucugcggggacuccaccgagugcagcaaccuccugcugcaguacggcuccuucugcacccagcucaaccgcgcgcugacggggaucgccguggagcaggacaagaacacccaggagguguucgcccaggucaagcagaucuacaagacgcccccgaucaaggacuucggcggguucaacuucagccagauccugcccgaccccuccaagcccagcaagcgguccuucaucgaggaccuccuguucaacaaggugacccuggccgacgccggcuucaucaagcaguacggcgacugccucggggacaucgcggcccgcgaccugaucugcgcccagaaguucaacggccugaccgugcucccgccccugcugaccgacgagaugaucgcccaguacaccagcgcccuccuggcggggaccaucacguccggcuggaccuucggggccggcgccgcccugcagauccccuucgcgaugcagauggccuaccgguucaacggcaucggggucacccagaacgugcucuacgagaaccagaagcugaucgccaaccaguucaacagcgccaucggcaagauccaggacucccugagcuccaccgccagcgcgcucgggaagcugcaggacguggucaaccagaacgcccaggcccugaacacgcucgugaagcagcuguccagcaacuucggcgccaucuccagcgugcugaacgacauccucucccgccuggacccgcccgaggccgaggugcagaucgaccggcugaucaccgggcgccuccagagccugcagaccuacgugacccagcagcugauccgggcggccgagauccgcgccagcgccaaccucgccgcgaccaagauguccgagugcguccugggccagagcaagcggguggacuucugcggcaagggguaccaccugauguccuucccccagagcgccccgcacggcguggucuuccuccacgugacguacguccccgcccaggagaagaacuucaccaccgcccccgcgaucugccacgacgggaaggcccacuucccccgcgagggcguguucguguccaacgggacccacugguucgucacgcagcggaacuucuacgagccgcagaucaucaccaccgacaacaccuucgugagcggcaacugcgacguggucaucggcaucgugaacaacacgguguacgacccccugcagcccgagcuggacuccuucaaggaggagcucgacaaguacuucaagaaccacaccagccccgacgucgaccugggggacaucuccggcaucaacgccagcguggugaacauccagaaggagaucgaccgccugaacgaggucgccaagaaccucaacgagucccugaucgaccugcaggagcucgggaaguacgagcaguacaucaaguggccgugguacaucuggcugggcuucaucgccggccugaucgcgaucgugauggugaccaucaugcucugcugcaugaccagcugcugcuccugccugaaggggugcugcagcugcggcuccugcugcaaguucgacgaggacgacagcgagcccguccugaagggggugaagcuccacuacacgugaggacuaguuauaagacugacuagcccgaugggccucccaacgggcccuccuccccuccuugcaccgagauuaauaaaaaaaaaaaaaaaaaaaaaaaaaaaaaaaaaaaaaaaaaaaaaaaaaaaaaaaaaaaaaaaaaaaaaaaaaaaaaaaaaaaaaaaaaaaaaaaaaaaa

SEQ ID NO: 25512 - RNA, 4011 nt, Artificial Sequence
  SARS-CoV-2/Wuhan/WIV05/2019__EPI_ISL_402128 spike protein mRNA gc (1-1273)(K986P_V987P_K986P_V987P_E484K_D614G)
aggagaaagcuuaccauguucguguuccugguccuccugccccuggugagcucccagugcgugaaccucaccacccgcacgcagcugccgcccgccuacaccaacagcuucacccggggcgucuacuaccccgacaagguguuccgcuccagcgugcugcacuccacccaggaccucuuccugcccuucuucagcaacgucacgugguuccacgccauccacguguccgggaccaacggcaccaagcgguucgacaacccggugcugcccuucaacgacggggucuacuucgcgagcaccgagaaguccaacaucauccgcggcuggaucuucgggacgacccucgacagcaagacccagucccugcugaucgugaacaacgccaccaacguggucaucaaggugugcgaguuccaguucugcaacgaccccuuccucggcguguacuaccacaagaacaacaagagcuggauggaguccgaguuccgggucuacagcuccgccaacaacugcacguucgaguacgugagccagcccuuccugauggaccuggagggcaagcaggggaacuucaagaaccuccgcgaguucguguucaagaacaucgacggcuacuucaagaucuacuccaagcacaccccgaucaaccugguccgggaccugccccagggguucagcgcccucgagccccugguggaccugcccaucggcaucaacaucacccgcuuccagacccuccuggcccugcaccgguccuaccucacgccgggggacagcagcuccggcuggaccgcgggcgccgccgccuacuacgugggguaccugcagccccgcaccuuccugcucaaguacaacgagaacggcaccaucacggacgcggucgacugcgcccuggacccccugagcgagaccaagugcacccucaaguccuucaccguggagaaggggaucuaccagacgagcaacuuccgggugcagcccaccgaguccaucguccgcuucccgaacaucaccaaccugugccccuucggcgagguguucaacgccacccgguucgccagcgucuacgccuggaaccgcaagcggaucuccaacugcguggcggacuacagcgugcuguacaacuccgccagcuucuccacguucaagugcuacggcgucagccccaccaagcucaacgaccugugcuucaccaacguguacgccgacuccuucgugauccgcggggacgagguccggcagaucgcccccggccagaccgggaagaucgccgacuacaacuacaagcugccggacgacuucacgggcugcgugaucgcguggaacagcaacaaccucgacuccaaggucgggggcaacuacaacuaccuguaccgccuguuccgcaagagcaaccucaagcccuucgagcgggacaucuccaccgagaucuaccaggccggcagcacccccugcaacggggugaagggcuucaacugcuacuucccccugcaguccuacggguuccagccgaccaacggcgugggguaccagcccuaccggguggucgugcugagcuucgagcuccugcacgcccccgccacggugugcggccccaagaaguccaccaaccuggucaagaacaagugcgugaacuucaacuucaacggccucaccgggaccggcgugcugaccgagagcaacaagaaguuccugccguuccagcaguucgggcgcgacaucgccgacacgaccgacgcgguccgcgacccccagacccuggagauccucgacaucacccccugcagcuucggcgggguguccgugaucacgccgggcaccaacaccagcaaccaggucgccgugcuguaccagggcgugaacugcaccgagguccccguggccauccacgccgaccagcugacgcccaccuggcggguguacuccaccggcagcaacgucuuccagacccgcgccgggugccucaucggcgcggagcacgugaacaacuccuacgagugcgacauccccaucggggccggcaucugcgccagcuaccagacgcagaccaacuccccgcggcgcgcccggagcguggcgucccagagcaucaucgccuacaccaugucccugggcgccgagaacagcgucgccuacuccaacaacagcaucgccauccccaccaacuucacgaucuccgugaccaccgagauccugcccgugagcaugaccaagacgagcgucgacugcaccauguacaucugcggggacuccaccgagugcagcaaccuccugcugcaguacggcuccuucugcacccagcucaaccgcgcgcugacggggaucgccguggagcaggacaagaacacccaggagguguucgcccaggucaagcagaucuacaagacgcccccgaucaaggacuucggcggguucaacuucagccagauccugcccgaccccuccaagcccagcaagcgguccuucaucgaggaccuccuguucaacaaggugacccuggccgacgccggcuucaucaagcaguacggcgacugccucggggacaucgcggcccgcgaccugaucugcgcccagaaguucaacggccugaccgugcucccgccccugcugaccgacgagaugaucgcccaguacaccagcgcccuccuggcggggaccaucacguccggcuggaccuucggggccggcgccgcccugcagauccccuucgcgaugcagauggccuaccgguucaacggcaucggggucacccagaacgugcucuacgagaaccagaagcugaucgccaaccaguucaacagcgccaucggcaagauccaggacucccugagcuccaccgccagcgcgcucgggaagcugcaggacguggucaaccagaacgcccaggcccugaacacgcucgugaagcagcuguccagcaacuucggcgccaucuccagcgugcugaacgacauccucucccgccuggacccgcccgaggccgaggugcagaucgaccggcugaucaccgggcgccuccagagccugcagaccuacgugacccagcagcugauccgggcggccgagauccgcgccagcgccaaccucgccgcgaccaagauguccgagugcguccugggccagagcaagcggguggacuucugcggcaagggguaccaccugauguccuucccccagagcgccccgcacggcguggucuuccuccacgugacguacguccccgcccaggagaagaacuucaccaccgcccccgcgaucugccacgacgggaaggcccacuucccccgcgagggcguguucguguccaacgggacccacugguucgucacgcagcggaacuucuacgagccgcagaucaucaccaccgacaacaccuucgugagcggcaacugcgacguggucaucggcaucgugaacaacacgguguacgacccccugcagcccgagcuggacuccuucaaggaggagcucgacaaguacuucaagaaccacaccagccccgacgucgaccugggggacaucuccggcaucaacgccagcguggugaacauccagaaggagaucgaccgccugaacgaggucgccaagaaccucaacgagucccugaucgaccugcaggagcucgggaaguacgagcaguacaucaaguggccgugguacaucuggcugggcuucaucgccggccugaucgcgaucgugauggugaccaucaugcucugcugcaugaccagcugcugcuccugccugaaggggugcugcagcugcggcuccugcugcaaguucgacgaggacgacagcgagcccguccugaagggggugaagcuccacuacacgugaggacuaguuauaagacugacuagcccgaugggccucccaacgggcccuccuccccuccuugcaccgagauuaauaaaaaaaaaaaaaaaaaaaaaaaaaaaaaaaaaaaaaaaaaaaaaaaaaaaaaaaaaaaaaaaaaaaaaaaaaaaaaaaaaaaaaaaaaaaaaaaaaaaa

SEQ ID NO: 25513 - RNA, 4011 nt, Artificial Sequence
  SARS-CoV-2/Wuhan/WIV05/2019__EPI_ISL_402128 spike protein mRNA gc (1-1273)(K986P_V987P_K986P_V987P_L18F_T20N_P26S_D138Y_R190S_K417T _E484K_N501Y_D614G_H655Y_T1027I)
aggagaaagcuuaccauguucguguuccugguccuccugccccuggugagcucccagugcgugaacuucaccaaccgcacgcagcugccgagcgccuacaccaacagcuucacccggggcgucuacuaccccgacaagguguuccgcuccagcgugcugcacuccacccaggaccucuuccugcccuucuucagcaacgucacgugguuccacgccauccacguguccgggaccaacggcaccaagcgguucgacaacccggugcugcccuucaacgacggggucuacuucgcgagcaccgagaaguccaacaucauccgcggcuggaucuucgggacgacccucgacagcaagacccagucccugcugaucgugaacaacgccaccaacguggucaucaaggugugcgaguuccaguucugcaacuaccccuuccucggcguguacuaccacaagaacaacaagagcuggauggaguccgaguuccgggucuacagcuccgccaacaacugcacguucgaguacgugagccagcccuuccugauggaccuggagggcaagcaggggaacuucaagaaccucagcgaguucguguucaagaacaucgacggcuacuucaagaucuacuccaagcacaccccgaucaaccugguccgggaccugccccagggguucagcgcccucgagccccugguggaccugcccaucggcaucaacaucacccgcuuccagacccuccuggcccugcaccgguccuaccucacgccgggggacagcagcuccggcuggaccgcgggcgccgccgccuacuacgugggguaccugcagccccgcaccuuccugcucaaguacaacgagaacggcaccaucacggacgcggucgacugcgcccuggacccccugagcgagaccaagugcacccucaaguccuucaccguggagaaggggaucuaccagacgagcaacuuccgggugcagcccaccgaguccaucguccgcuucccgaacaucaccaaccugugccccuucggcgagguguucaacgccacccgguucgccagcgucuacgccuggaaccgcaagcggaucuccaacugcguggcggacuacagcgugcuguacaacuccgccagcuucuccacguucaagugcuacggcgucagccccaccaagcucaacgaccugugcuucaccaacguguacgccgacuccuucgugauccgcggggacgagguccggcagaucgcccccggccagaccgggaccaucgccgacuacaacuacaagcugccggacgacuucacgggcugcgugaucgcguggaacagcaacaaccucgacuccaaggucgggggcaacuacaacuaccuguaccgccuguuccgcaagagcaaccucaagcccuucgagcgggacaucuccaccgagaucuaccaggccggcagcacccccugcaacggggugaagggcuucaacugcuacuucccccugcaguccuacggguuccagccgaccuacggcgugggguaccagcccuaccggguggucgugcugagcuucgagcuccugcacgcccccgccacggugugcggccccaagaaguccaccaaccuggucaagaacaagugcgugaacuucaacuucaacggccucaccgggaccggcgugcugaccgagagcaacaagaaguuccugccguuccagcaguucgggcgcgacaucgccgacacgaccgacgcgguccgcgacccccagacccuggagauccucgacaucacccccugcagcuucggcgggguguccgugaucacgccgggcaccaacaccagcaaccaggucgccgugcuguaccagggcgugaacugcaccgagguccccguggccauccacgccgaccagcugacgcccaccuggcggguguacuccaccggcagcaacgucuuccagacccgcgccgggugccucaucggcgcggaguacgugaacaacuccuacgagugcgacauccccaucggggccggcaucugcgccagcuaccagacgcagaccaacuccccgcggcgcgcccggagcguggcgucccagagcaucaucgccuacaccaugucccugggcgccgagaacagcgucgccuacuccaacaacagcaucgccauccccaccaacuucacgaucuccgugaccaccgagauccugcccgugagcaugaccaagacgagcgucgacugcaccauguacaucugcggggacuccaccgagugcagcaaccuccugcugcaguacggcuccuucugcacccagcucaaccgcgcgcugacggggaucgccguggagcaggacaagaacacccaggagguguucgcccaggucaagcagaucuacaagacgcccccgaucaaggacuucggcggguucaacuucagccagauccugcccgaccccuccaagcccagcaagcgguccuucaucgaggaccuccuguucaacaaggugacccuggccgacgccggcuucaucaagcaguacggcgacugccucggggacaucgcggcccgcgaccugaucugcgcccagaaguucaacggccugaccgugcucccgccccugcugaccgacgagaugaucgcccaguacaccagcgcccuccuggcggggaccaucacguccggcuggaccuucggggccggcgccgcccugcagauccccuucgcgaugcagauggccuaccgguucaacggcaucggggucacccagaacgugcucuacgagaaccagaagcugaucgccaaccaguucaacagcgccaucggcaagauccaggacucccugagcuccaccgccagcgcgcucgggaagcugcaggacguggucaaccagaacgcccaggcccugaacacgcucgugaagcagcuguccagcaacuucggcgccaucuccagcgugcugaacgacauccucucccgccuggacccgcccgaggccgaggugcagaucgaccggcugaucaccgggcgccuccagagccugcagaccuacgugacccagcagcugauccgggcggccgagauccgcgccagcgccaaccucgccgcgaucaagauguccgagugcguccugggccagagcaagcggguggacuucugcggcaagggguaccaccugauguccuucccccagagcgccccgcacggcguggucuuccuccacgugacguacguccccgcccaggagaagaacuucaccaccgcccccgcgaucugccacgacgggaaggcccacuucccccgcgagggcguguucguguccaacgggacccacugguucgucacgcagcggaacuucuacgagccgcagaucaucaccaccgacaacaccuucgugagcggcaacugcgacguggucaucggcaucgugaacaacacgguguacgacccccugcagcccgagcuggacuccuucaaggaggagcucgacaaguacuucaagaaccacaccagccccgacgucgaccugggggacaucuccggcaucaacgccagcguggugaacauccagaaggagaucgaccgccugaacgaggucgccaagaaccucaacgagucccugaucgaccugcaggagcucgggaaguacgagcaguacaucaaguggccgugguacaucuggcugggcuucaucgccggccugaucgcgaucgugauggugaccaucaugcucugcugcaugaccagcugcugcuccugccugaaggggugcugcagcugcggcuccugcugcaaguucgacgaggacgacagcgagcccguccugaagggggugaagcuccacuacacgugaggacuaguuauaagacugacuagcccgaugggccucccaacgggcccuccuccccuccuugcaccgagauuaauaaaaaaaaaaaaaaaaaaaaaaaaaaaaaaaaaaaaaaaaaaaaaaaaaaaaaaaaaaaaaaaaaaaaaaaaaaaaaaaaaaaaaaaaaaaaaaaaaaaa

SEQ ID NO: 25514 - RNA, 4011 nt, Artificial Sequence
  SARS-CoV-2/Wuhan/WIV05/2019__EPI_ISL_402128 spike protein mRNA gc (1-1273)(K986P_V987P_K986P_V987P_S13I_W152C_L452R_D614G)
aggagaaagcuuaccauguucguguuccugguccuccugccccuggugagcauccagugcgugaaccucaccacccgcacgcagcugccgcccgccuacaccaacagcuucacccggggcgucuacuaccccgacaagguguuccgcuccagcgugcugcacuccacccaggaccucuuccugcccuucuucagcaacgucacgugguuccacgccauccacguguccgggaccaacggcaccaagcgguucgacaacccggugcugcccuucaacgacggggucuacuucgcgagcaccgagaaguccaacaucauccgcggcuggaucuucgggacgacccucgacagcaagacccagucccugcugaucgugaacaacgccaccaacguggucaucaaggugugcgaguuccaguucugcaacgaccccuuccucggcguguacuaccacaagaacaacaagagcugcauggaguccgaguuccgggucuacagcuccgccaacaacugcacguucgaguacgugagccagcccuuccugauggaccuggagggcaagcaggggaacuucaagaaccuccgcgaguucguguucaagaacaucgacggcuacuucaagaucuacuccaagcacaccccgaucaaccugguccgggaccugccccagggguucagcgcccucgagccccugguggaccugcccaucggcaucaacaucacccgcuuccagacccuccuggcccugcaccgguccuaccucacgccgggggacagcagcuccggcuggaccgcgggcgccgccgccuacuacgugggguaccugcagccccgcaccuuccugcucaaguacaacgagaacggcaccaucacggacgcggucgacugcgcccuggacccccugagcgagaccaagugcacccucaaguccuucaccguggagaaggggaucuaccagacgagcaacuuccgggugcagcccaccgaguccaucguccgcuucccgaacaucaccaaccugugccccuucggcgagguguucaacgccacccgguucgccagcgucuacgccuggaaccgcaagcggaucuccaacugcguggcggacuacagcgugcuguacaacuccgccagcuucuccacguucaagugcuacggcgucagccccaccaagcucaacgaccugugcuucaccaacguguacgccgacuccuucgugauccgcggggacgagguccggcagaucgcccccggccagaccgggaagaucgccgacuacaacuacaagcugccggacgacuucacgggcugcgugaucgcguggaacagcaacaaccucgacuccaaggucgggggcaacuacaacuaccgcuaccgccuguuccgcaagagcaaccucaagcccuucgagcgggacaucuccaccgagaucuaccaggccggcagcacccccugcaacgggguggagggcuucaacugcuacuucccccugcaguccuacggguuccagccgaccaacggcgugggguaccagcccuaccggguggucgugcugagcuucgagcuccugcacgcccccgccacggugugcggccccaagaaguccaccaaccuggucaagaacaagugcgugaacuucaacuucaacggccucaccgggaccggcgugcugaccgagagcaacaagaaguuccugccguuccagcaguucgggcgcgacaucgccgacacgaccgacgcgguccgcgacccccagacccuggagauccucgacaucacccccugcagcuucggcgggguguccgugaucacgccgggcaccaacaccagcaaccaggucgccgugcuguaccagggcgugaacugcaccgagguccccguggccauccacgccgaccagcugacgcccaccuggcggguguacuccaccggcagcaacgucuuccagacccgcgccgggugccucaucggcgcggagcacgugaacaacuccuacgagugcgacauccccaucggggccggcaucugcgccagcuaccagacgcagaccaacuccccgcggcgcgcccggagcguggcgucccagagcaucaucgccuacaccaugucccugggcgccgagaacagcgucgccuacuccaacaacagcaucgccauccccaccaacuucacgaucuccgugaccaccgagauccugcccgugagcaugaccaagacgagcgucgacugcaccauguacaucugcggggacuccaccgagugcagcaaccuccugcugcaguacggcuccuucugcacccagcucaaccgcgcgcugacggggaucgccguggagcaggacaagaacacccaggagguguucgcccaggucaagcagaucuacaagacgcccccgaucaaggacuucggcggguucaacuucagccagauccugcccgaccccuccaagcccagcaagcgguccuucaucgaggaccuccuguucaacaaggugacccuggccgacgccggcuucaucaagcaguacggcgacugccucggggacaucgcggcccgcgaccugaucugcgcccagaaguucaacggccugaccgugcucccgccccugcugaccgacgagaugaucgcccaguacaccagcgcccuccuggcggggaccaucacguccggcuggaccuucggggccggcgccgcccugcagauccccuucgcgaugcagauggccuaccgguucaacggcaucggggucacccagaacgugcucuacgagaaccagaagcugaucgccaaccaguucaacagcgccaucggcaagauccaggacucccugagcuccaccgccagcgcgcucgggaagcugcaggacguggucaaccagaacgcccaggcccugaacacgcucgugaagcagcuguccagcaacuucggcgccaucuccagcgugcugaacgacauccucucccgccuggacccgcccgaggccgaggugcagaucgaccggcugaucaccgggcgccuccagagccugcagaccuacgugacccagcagcugauccgggcggccgagauccgcgccagcgccaaccucgccgcgaccaagauguccgagugcguccugggccagagcaagcggguggacuucugcggcaagggguaccaccugauguccuucccccagagcgccccgcacggcguggucuuccuccacgugacguacguccccgcccaggagaagaacuucaccaccgcccccgcgaucugccacgacgggaaggcccacuucccccgcgagggcguguucguguccaacgggacccacugguucgucacgcagcggaacuucuacgagccgcagaucaucaccaccgacaacaccuucgugagcggcaacugcgacguggucaucggcaucgugaacaacacgguguacgacccccugcagcccgagcuggacuccuucaaggaggagcucgacaaguacuucaagaaccacaccagccccgacgucgaccugggggacaucuccggcaucaacgccagcguggugaacauccagaaggagaucgaccgccugaacgaggucgccaagaaccucaacgagucccugaucgaccugcaggagcucgggaaguacgagcaguacaucaaguggccgugguacaucuggcugggcuucaucgccggccugaucgcgaucgugauggugaccaucaugcucugcugcaugaccagcugcugcuccugccugaaggggugcugcagcugcggcuccugcugcaaguucgacgaggacgacagcgagcccguccugaagggggugaagcuccacuacacgugaggacuaguuauaagacugacuagcccgaugggccucccaacgggcccuccuccccuccuugcaccgagauuaauaaaaaaaaaaaaaaaaaaaaaaaaaaaaaaaaaaaaaaaaaaaaaaaaaaaaaaaaaaaaaaaaaaaaaaaaaaaaaaaaaaaaaaaaaaaaaaaaaaaa

SEQ ID NO: 25515 - RNA, 4011 nt, Artificial Sequence
  SARS-CoV-2/Wuhan/WIV05/2019__EPI_ISL_402128 spike protein mRNA gc (1-1273)(K986P_V987P)
aggagaaagcuuaccauguucguguuccugguccuccugccccuggugagcucccagugcgugaaccucaccacccgcacgcagcugccgcccgccuacaccaacagcuucacccggggcgucuacuaccccgacaagguguuccgcuccagcgugcugcacuccacccaggaccucuuccugcccuucuucagcaacgucacgugguuccacgccauccacguguccgggaccaacggcaccaagcgguucgacaacccggugcugcccuucaacgacggggucuacuucgcgagcaccgagaaguccaacaucauccgcggcuggaucuucgggacgacccucgacagcaagacccagucccugcugaucgugaacaacgccaccaacguggucaucaaggugugcgaguuccaguucugcaacgaccccuuccucggcguguacuaccacaagaacaacaagagcuggauggaguccgaguuccgggucuacagcuccgccaacaacugcacguucgaguacgugagccagcccuuccugauggaccuggagggcaagcaggggaacuucaagaaccuccgcgaguucguguucaagaacaucgacggcuacuucaagaucuacuccaagcacaccccgaucaaccugguccgggaccugccccagggguucagcgcccucgagccccugguggaccugcccaucggcaucaacaucacccgcuuccagacccuccuggcccugcaccgguccuaccucacgccgggggacagcagcuccggcuggaccgcgggcgccgccgccuacuacgugggguaccugcagccccgcaccuuccugcucaaguacaacgagaacggcaccaucacggacgcggucgacugcgcccuggacccccugagcgagaccaagugcacccucaaguccuucaccguggagaaggggaucuaccagacgagcaacuuccgggugcagcccaccgaguccaucguccgcuucccgaacaucaccaaccugugccccuucggcgagguguucaacgccacccgguucgccagcgucuacgccuggaaccgcaagcggaucuccaacugcguggcggacuacagcgugcuguacaacuccgccagcuucuccacguucaagugcuacggcgucagccccaccaagcucaacgaccugugcuucaccaacguguacgccgacuccuucgugauccgcggggacgagguccggcagaucgcccccggccagaccgggaagaucgccgacuacaacuacaagcugccggacgacuucacgggcugcgugaucgcguggaacagcaacaaccucgacuccaaggucgggggcaacuacaacuaccuguaccgccuguuccgcaagagcaaccucaagcccuucgagcgggacaucuccaccgagaucuaccaggccggcagcacccccugcaacgggguggagggcuucaacugcuacuucccccugcaguccuacggguuccagccgaccaacggcgugggguaccagcccuaccggguggucgugcugagcuucgagcuccugcacgcccccgccacggugugcggccccaagaaguccaccaaccuggucaagaacaagugcgugaacuucaacuucaacggccucaccgggaccggcgugcugaccgagagcaacaagaaguuccugccguuccagcaguucgggcgcgacaucgccgacacgaccgacgcgguccgcgacccccagacccuggagauccucgacaucacccccugcagcuucggcgggguguccgugaucacgccgggcaccaacaccagcaaccaggucgccgugcuguaccaggacgugaacugcaccgagguccccguggccauccacgccgaccagcugacgcccaccuggcggguguacuccaccggcagcaacgucuuccagacccgcgccgggugccucaucggcgcggagcacgugaacaacuccuacgagugcgacauccccaucggggccggcaucugcgccagcuaccagacgcagaccaacuccccgcggcgcgcccggagcguggcgucccagagcaucaucgccuacaccaugucccugggcgccgagaacagcgucgccuacuccaacaacagcaucgccauccccaccaacuucacgaucuccgugaccaccgagauccugcccgugagcaugaccaagacgagcgucgacugcaccauguacaucugcggggacuccaccgagugcagcaaccuccugcugcaguacggcuccuucugcacccagcucaaccgcgcgcugacggggaucgccguggagcaggacaagaacacccaggagguguucgcccaggucaagcagaucuacaagacgcccccgaucaaggacuucggcggguucaacuucagccagauccugcccgaccccuccaagcccagcaagcgguccuucaucgaggaccuccuguucaacaaggugacccuggccgacgccggcuucaucaagcaguacggcgacugccucggggacaucgcggcccgcgaccugaucugcgcccagaaguucaacggccugaccgugcucccgccccugcugaccgacgagaugaucgcccaguacaccagcgcccuccuggcggggaccaucacguccggcuggaccuucggggccggcgccgcccugcagauccccuucgcgaugcagauggccuaccgguucaacggcaucggggucacccagaacgugcucuacgagaaccagaagcugaucgccaaccaguucaacagcgccaucggcaagauccaggacucccugagcuccaccgccagcgcgcucgggaagcugcaggacguggucaaccagaacgcccaggcccugaacacgcucgugaagcagcuguccagcaacuucggcgccaucuccagcgugcugaacgacauccucucccgccuggacccgcccgaggccgagguccagaucgaccggcugaucaccgggcgccuccagagccugcagaccuacgugacccagcagcugauccgggcggccgagauccgcgccagcgccaaccucgccgcgaccaagauguccgagugcgugcugggccagagcaagcgggucgacuucugcggcaagggguaccaccugauguccuucccccagagcgcgccccacggcgugguguuccuccacgucacguacgugcccgcccaggagaagaacuucaccaccgccccggccaucugccacgacgggaaggcccacuucccccgcgagggcgucuucguguccaacgggacccacugguucgugacgcagcggaacuucuacgagccccagaucaucaccaccgacaacaccuucgucagcggcaacugcgacguggugaucggcaucgucaacaacacgguguacgacccccugcagccggagcuggacuccuucaaggaggagcucgacaaguacuucaagaaccacaccagccccgacguggaccugggggacaucuccggcaucaacgccagcgucgugaacauccagaaggagaucgaccgccugaacgagguggccaagaaccucaacgagucccugaucgaccugcaggagcucgggaaguacgagcaguacaucaaguggcccugguacaucuggcugggcuucaucgccggccugaucgcgaucgucauggugaccaucaugcucugcugcaugaccagcugcugcuccugccugaaggggugcugcagcugcggcuccugcugcaaguucgacgaggacgacagcgagccggugcugaagggggucaagcuccacuacacgugaggacuaguuauaagacugacuagcccgaugggccucccaacgggcccuccuccccuccuugcaccgagauuaauaaaaaaaaaaaaaaaaaaaaaaaaaaaaaaaaaaaaaaaaaaaaaaaaaaaaaaaaaaaaaaaaaaaaaaaaaaaaaaaaaaaaaaaaaaaaaaaaaaaa

SEQ ID NO: 25516 - RNA, 4011 nt, Artificial Sequence
  SARS-CoV-2/Wuhan/WIV05/2019__EPI_ISL_402128 spike protein mRNA gc (1-1273)(K986P_V987P_ D614G)
aggagaaagcuuaccauguucguguuccugguccuccugccccuggugagcucccagugcgugaaccucaccacccgcacgcagcugccgcccgccuacaccaacagcuucacccggggcgucuacuaccccgacaagguguuccgcuccagcgugcugcacuccacccaggaccucuuccugcccuucuucagcaacgucacgugguuccacgccauccacguguccgggaccaacggcaccaagcgguucgacaacccggugcugcccuucaacgacggggucuacuucgcgagcaccgagaaguccaacaucauccgcggcuggaucuucgggacgacccucgacagcaagacccagucccugcugaucgugaacaacgccaccaacguggucaucaaggugugcgaguuccaguucugcaacgaccccuuccucggcguguacuaccacaagaacaacaagagcuggauggaguccgaguuccgggucuacagcuccgccaacaacugcacguucgaguacgugagccagcccuuccugauggaccuggagggcaagcaggggaacuucaagaaccuccgcgaguucguguucaagaacaucgacggcuacuucaagaucuacuccaagcacaccccgaucaaccugguccgggaccugccccagggguucagcgcccucgagccccugguggaccugcccaucggcaucaacaucacccgcuuccagacccuccuggcccugcaccgguccuaccucacgccgggggacagcagcuccggcuggaccgcgggcgccgccgccuacuacgugggguaccugcagccccgcaccuuccugcucaaguacaacgagaacggcaccaucacggacgcggucgacugcgcccuggacccccugagcgagaccaagugcacccucaaguccuucaccguggagaaggggaucuaccagacgagcaacuuccgggugcagcccaccgaguccaucguccgcuucccgaacaucaccaaccugugccccuucggcgagguguucaacgccacccgguucgccagcgucuacgccuggaaccgcaagcggaucuccaacugcguggcggacuacagcgugcuguacaacuccgccagcuucuccacguucaagugcuacggcgucagccccaccaagcucaacgaccugugcuucaccaacguguacgccgacuccuucgugauccgcggggacgagguccggcagaucgcccccggccagaccgggaagaucgccgacuacaacuacaagcugccggacgacuucacgggcugcgugaucgcguggaacagcaacaaccucgacuccaaggucgggggcaacuacaacuaccuguaccgccuguuccgcaagagcaaccucaagcccuucgagcgggacaucuccaccgagaucuaccaggccggcagcacccccugcaacgggguggagggcuucaacugcuacuucccccugcaguccuacggguuccagccgaccaacggcgugggguaccagcccuaccggguggucgugcugagcuucgagcuccugcacgcccccgccacggugugcggccccaagaaguccaccaaccuggucaagaacaagugcgugaacuucaacuucaacggccucaccgggaccggcgugcugaccgagagcaacaagaaguuccugccguuccagcaguucgggcgcgacaucgccgacacgaccgacgcgguccgcgacccccagacccuggagauccucgacaucacccccugcagcuucggcgggguguccgugaucacgccgggcaccaacaccagcaaccaggucgccgugcuguaccagggcgugaacugcaccgagguccccguggccauccacgccgaccagcugacgcccaccuggcggguguacuccaccgggagcaacgucuuccagacccgcgccggcugccucaucggggcggagcacgugaacaacuccuacgagugcgacauccccaucggcgccggcaucugcgccagcuaccagacgcagaccaacuccccgcggcgcgcccggagcguggcgucccagagcaucaucgccuacaccaugucccugggggccgagaacagcgucgccuacuccaacaacagcaucgccauccccaccaacuucacgaucuccgugaccaccgagauccugcccgugagcaugaccaagacgagcgucgacugcaccauguacaucugcggcgacuccaccgagugcagcaaccuccugcugcaguacggguccuucugcacccagcucaaccgcgcgcugacgggcaucgccguggagcaggacaagaacacccaggagguguucgcccaggucaagcagaucuacaagacgcccccgaucaaggacuucgggggcuucaacuucagccagauccugcccgaccccuccaagcccagcaagcgguccuucaucgaggaccuccuguucaacaaggugacccuggccgacgccggcuucaucaagcaguacggggacugccucggcgacaucgcggcccgcgaccugaucugcgcccagaaguucaacgggcugaccgugcucccgccccugcugaccgacgagaugaucgcccaguacaccagcgcccuccuggcgggcaccaucacguccggguggaccuucggcgccggcgccgcccugcagauccccuucgcgaugcagauggccuaccgguucaacgggaucggcgucacccagaacgugcucuacgagaaccagaagcugaucgccaaccaguucaacagcgccaucgggaagauccaggacucccugagcuccaccgccagcgcgcucggcaagcugcaggacguggucaaccagaacgcccaggcccugaacacgcucgugaagcagcuguccagcaacuucggggccaucuccagcgugcugaacgacauccucucccgccuggacccgcccgaggccgagguccagaucgaccggcugaucaccggccgccuccagagccugcagaccuacgugacccagcagcugauccgggcggccgagauccgcgccagcgccaaccucgccgcgaccaagauguccgagugcgugcugggccagagcaagcgggucgacuucugcgggaagggcuaccaccugauguccuucccccagagcgcgccccacggggugguguuccuccacgucacguacgugcccgcccaggagaagaacuucaccaccgccccggccaucugccacgacggcaaggcccacuucccccgcgagggggucuucguguccaacggcacccacugguucgugacgcagcggaacuucuacgagccccagaucaucaccaccgacaacaccuucgucagcggcaacugcgacguggugaucgggaucgucaacaacacgguguacgacccccugcagccggagcuggacuccuucaaggaggagcucgacaaguacuucaagaaccacaccagccccgacguggaccugggcgacaucuccgggaucaacgccagcgucgugaacauccagaaggagaucgaccgccugaacgagguggccaagaaccucaacgagucccugaucgaccugcaggagcucggcaaguacgagcaguacaucaaguggcccugguacaucuggcugggcuucaucgccgggcugaucgcgaucgucauggugaccaucaugcucugcugcaugaccagcugcugcuccugccugaagggcugcugcagcugcggguccugcugcaaguucgacgaggacgacagcgagccggugcugaagggcgucaagcuccacuacacgugaggacuaguuauaagacugacuagcccgaugggccucccaacgggcccuccuccccuccuugcaccgagauuaauaaaaaaaaaaaaaaaaaaaaaaaaaaaaaaaaaaaaaaaaaaaaaaaaaaaaaaaaaaaaaaaaaaaaaaaaaaaaaaaaaaaaaaaaaaaaaaaaaaaa

SEQ ID NO: 25517 - RNA, 4011 nt, Artificial Sequence
  SARS-CoV-2/Wuhan/WIV05/2019__EPI_ISL_402128 spike protein mRNA gc (1-1273)(K986P_V987P_A222V_D614G)
aggagaaagcuuaccauguucguguuccugguccuccugccccuggugagcucccagugcgugaaccucaccacccgcacgcagcugccgcccgccuacaccaacagcuucacccggggcgucuacuaccccgacaagguguuccgcuccagcgugcugcacuccacccaggaccucuuccugcccuucuucagcaacgucacgugguuccacgccauccacguguccgggaccaacggcaccaagcgguucgacaacccggugcugcccuucaacgacggggucuacuucgcgagcaccgagaaguccaacaucauccgcggcuggaucuucgggacgacccucgacagcaagacccagucccugcugaucgugaacaacgccaccaacguggucaucaaggugugcgaguuccaguucugcaacgaccccuuccucggcguguacuaccacaagaacaacaagagcuggauggaguccgaguuccgggucuacagcuccgccaacaacugcacguucgaguacgugagccagcccuuccugauggaccuggagggcaagcaggggaacuucaagaaccuccgcgaguucguguucaagaacaucgacggcuacuucaagaucuacuccaagcacaccccgaucaaccugguccgggaccugccccagggguucagcgugcucgagccccugguggaccugcccaucggcaucaacaucacccgcuuccagacccuccuggcccugcaccgguccuaccucacgccgggggacagcagcuccggcuggaccgccggcgcggccgccuacuacgucggguaccugcagccccgcaccuuccugcucaaguacaacgagaacggcaccaucacggacgccguggacugcgcgcuggacccccugagcgagaccaagugcacccucaaguccuucaccguggagaaggggaucuaccagacgagcaacuuccggguccagcccaccgaguccaucgugcgcuucccgaacaucaccaaccugugccccuucggcgaggucuucaacgccacccgguucgccagcguguacgccuggaaccgcaagcggaucuccaacugcguggccgacuacagcguccuguacaacuccgcgagcuucuccacguucaagugcuacggcgugagccccaccaagcucaacgaccugugcuucaccaacguguacgccgacuccuucgucauccgcggggacgaggugcggcagaucgcccccggccagaccgggaagaucgccgacuacaacuacaagcugccggacgacuucacgggcugcgugaucgccuggaacagcaacaaccucgacuccaaggucgggggcaacuacaacuaccuguaccgccuguuccgcaagagcaaccucaagcccuucgagcgggacaucuccaccgagaucuaccaggcgggcagcacccccugcaacgggguggagggcuucaacugcuacuucccccugcaguccuacggguuccagccgaccaacggcgugggguaccagcccuaccgggucguggugcugagcuucgagcuccugcacgcccccgccacggucugcggccccaagaaguccaccaaccuggugaagaacaagugcgugaacuucaacuucaacggccucaccgggaccggcguccugaccgagagcaacaagaaguuccugccguuccagcaguucgggcgcgacaucgccgacacgaccgacgccgugcgcgacccccagacccuggagauccucgacaucacccccugcagcuucggcgggguguccgucaucacgccgggcaccaacaccagcaaccagguggcggugcuguaccagggcgucaacugcaccgaggugcccguggccauccacgccgaccagcugacgcccaccuggcgggucuacuccaccgggagcaacguguuccagacccgcgccggcugccucaucggggccgagcacgugaacaacuccuacgagugcgacauccccaucggcgcgggcaucugcgccagcuaccagacgcagaccaacuccccgcggcgcgcccggagcgucgccucccagagcaucaucgcguacaccaugucccugggggccgagaacagcguggccuacuccaacaacagcaucgccauccccaccaacuucacgaucuccgugaccaccgagauccugcccgucagcaugaccaagacgagcguggacugcaccauguacaucugcggcgacuccaccgagugcagcaaccuccugcugcaguacggguccuucugcacccagcucaaccgcgcccugacgggcaucgcgguggagcaggacaagaacacccaggaggucuucgcccaggugaagcagaucuacaagacgcccccgaucaaggacuucgggggcuucaacuucagccagauccugcccgaccccuccaagcccagcaagcgguccuucaucgaggaccuccuguucaacaaggugacccuggccgacgccggcuucaucaagcaguacggggacugccucggcgacaucgccgcgcgcgaccugaucugcgcccagaaguucaacgggcugaccguccucccgccccugcugaccgacgagaugaucgcccaguacaccagcgcccuccuggccggcaccaucacguccggguggaccuucggcgcgggcgccgcccugcagauccccuucgccaugcagauggcguaccgguucaacgggaucggcgugacccagaacgugcucuacgagaaccagaagcugaucgccaaccaguucaacagcgccaucgggaagauccaggacucccugagcuccaccgccagcgcccucggcaagcugcaggacgucgugaaccagaacgcgcaggcccugaacacgcucgugaagcagcuguccagcaacuucggggccaucuccagcguccugaacgacauccucucccgccuggacccgcccgaggccgaggugcagaucgaccggcugaucaccggccgccuccagagccugcagaccuacgugacccagcagcugauccgggccgcggagauccgcgccagcgccaaccucgccgccaccaagauguccgagugcguccugggccagagcaagcggguggacuucugcgggaagggcuaccaccugauguccuucccccagagcgcgccccacgggguggucuuccuccacgugacguacguccccgcccaggagaagaacuucaccaccgccccggccaucugccacgacggcaaggcgcacuucccccgcgaggggguguucguguccaacggcacccacugguucgucacgcagcggaacuucuacgagccccagaucaucaccaccgacaacaccuucgugagcggcaacugcgacguggucaucgggaucgugaacaacacgguguacgacccccugcagccggagcuggacuccuucaaggaggagcucgacaaguacuucaagaaccacaccagccccgacgucgaccugggcgacaucuccgggaucaacgccagcguggugaacauccagaaggagaucgaccgccugaacgaggucgccaagaaccucaacgagucccugaucgaccugcaggagcucggcaaguacgagcaguacaucaaguggcccugguacaucuggcugggcuucaucgccgggcugaucgccaucgugauggugaccaucaugcucugcugcaugaccagcugcugcuccugccugaagggcugcugcagcugcggguccugcugcaaguucgacgaggacgacagcgagccgguccugaagggcgugaagcuccacuacacgugaggacuaguuauaagacugacuagcccgaugggccucccaacgggcccuccuccccuccuugcaccgagauuaauaaaaaaaaaaaaaaaaaaaaaaaaaaaaaaaaaaaaaaaaaaaaaaaaaaaaaaaaaaaaaaaaaaaaaaaaaaaaaaaaaaaaaaaaaaaaaaaaaaaa

SEQ ID NO: 25518 - RNA, 4011 nt, Artificial Sequence
  SARS-CoV-2/Wuhan/WIV05/2019__EPI_ISL_402128 spike protein mRNA gc (1-1273)(K986P_V987P_N439K_D614G)
aggagaaagcuuaccauguucguguuccugguccuccugccccuggugagcucccagugcgugaaccucaccacccgcacgcagcugccgcccgccuacaccaacagcuucacccggggcgucuacuaccccgacaagguguuccgcuccagcgugcugcacuccacccaggaccucuuccugcccuucuucagcaacgucacgugguuccacgccauccacguguccgggaccaacggcaccaagcgguucgacaacccggugcugcccuucaacgacggggucuacuucgcgagcaccgagaaguccaacaucauccgcggcuggaucuucgggacgacccucgacagcaagacccagucccugcugaucgugaacaacgccaccaacguggucaucaaggugugcgaguuccaguucugcaacgaccccuuccucggcguguacuaccacaagaacaacaagagcuggauggaguccgaguuccgggucuacagcuccgccaacaacugcacguucgaguacgugagccagcccuuccugauggaccuggagggcaagcaggggaacuucaagaaccuccgcgaguucguguucaagaacaucgacggcuacuucaagaucuacuccaagcacaccccgaucaaccugguccgggaccugccccagggguucagcgcccucgagccccugguggaccugcccaucggcaucaacaucacccgcuuccagacccuccuggcccugcaccgguccuaccucacgccgggggacagcagcuccggcuggaccgcgggcgccgccgccuacuacgugggguaccugcagccccgcaccuuccugcucaaguacaacgagaacggcaccaucacggacgcggucgacugcgcccuggacccccugagcgagaccaagugcacccucaaguccuucaccguggagaaggggaucuaccagacgagcaacuuccgggugcagcccaccgaguccaucguccgcuucccgaacaucaccaaccugugccccuucggcgagguguucaacgccacccgguucgccagcgucuacgccuggaaccgcaagcggaucuccaacugcguggcggacuacagcgugcuguacaacuccgccagcuucuccacguucaagugcuacggcgucagccccaccaagcucaacgaccugugcuucaccaacguguacgccgacuccuucgugauccgcggggacgagguccggcagaucgcccccggccagaccgggaagaucgccgacuacaacuacaagcugccggacgacuucacgggcugcgugaucgcguggaacagcaagaaccucgacuccaaggucgggggcaacuacaacuaccuguaccgccuguuccgcaagagcaaccucaagcccuucgagcgggacaucuccaccgagaucuaccaggccggcagcacccccugcaacgggguggagggcuucaacugcuacuucccccugcaguccuacggguuccagccgaccaacggcgugggguaccagcccuaccggguggucgugcugagcuucgagcuccugcacgcccccgccacggugugcggccccaagaaguccaccaaccuggucaagaacaagugcgugaacuucaacuucaacggccucaccgggaccggcgugcugaccgagagcaacaagaaguuccugccguuccagcaguucgggcgcgacaucgccgacacgaccgacgcgguccgcgacccccagacccuggagauccucgacaucacccccugcagcuucggcgggguguccgugaucacgccgggcaccaacaccagcaaccaggucgccgugcuguaccagggcgugaacugcaccgagguccccguggccauccacgccgaccagcugacgcccaccuggcggguguacuccaccgggagcaacgucuuccagacccgcgccggcugccucaucggggcggagcacgugaacaacuccuacgagugcgacauccccaucggcgccggcaucugcgccagcuaccagacgcagaccaacuccccgcggcgcgcccggagcguggcgucccagagcaucaucgccuacaccaugucccugggggccgagaacagcgucgccuacuccaacaacagcaucgccauccccaccaacuucacgaucuccgugaccaccgagauccugcccgugagcaugaccaagacgagcgucgacugcaccauguacaucugcggcgacuccaccgagugcagcaaccuccugcugcaguacggguccuucugcacccagcucaaccgcgcgcugacgggcaucgccguggagcaggacaagaacacccaggagguguucgcccaggucaagcagaucuacaagacgcccccgaucaaggacuucgggggcuucaacuucagccagauccugcccgaccccuccaagcccagcaagcgguccuucaucgaggaccuccuguucaacaaggugacccuggccgacgccggcuucaucaagcaguacggggacugccucggcgacaucgcggcccgcgaccugaucugcgcccagaaguucaacgggcugaccgugcucccgccccugcugaccgacgagaugaucgcccaguacaccagcgcccuccuggcgggcaccaucacguccggguggaccuucggcgccggcgccgcccugcagauccccuucgcgaugcagauggccuaccgguucaacgggaucggcgucacccagaacgugcucuacgagaaccagaagcugaucgccaaccaguucaacagcgccaucgggaagauccaggacucccugagcuccaccgccagcgcgcucggcaagcugcaggacguggucaaccagaacgcccaggcccugaacacgcucgugaagcagcuguccagcaacuucggggccaucuccagcgugcugaacgacauccucucccgccuggacccgcccgaggccgagguccagaucgaccggcugaucaccggccgccuccagagccugcagaccuacgugacccagcagcugauccgggcggccgagauccgcgccagcgccaaccucgccgcgaccaagauguccgagugcgugcugggccagagcaagcgggucgacuucugcgggaagggcuaccaccugauguccuucccccagagcgcgccccacggggugguguuccuccacgucacguacgugcccgcccaggagaagaacuucaccaccgccccggccaucugccacgacggcaaggcccacuucccccgcgagggggucuucguguccaacggcacccacugguucgugacgcagcggaacuucuacgagccccagaucaucaccaccgacaacaccuucgucagcggcaacugcgacguggugaucgggaucgucaacaacacgguguacgacccccugcagccggagcuggacuccuucaaggaggagcucgacaaguacuucaagaaccacaccagccccgacguggaccugggcgacaucuccgggaucaacgccagcgucgugaacauccagaaggagaucgaccgccugaacgagguggccaagaaccucaacgagucccugaucgaccugcaggagcucggcaaguacgagcaguacaucaaguggcccugguacaucuggcugggcuucaucgccgggcugaucgcgaucgucauggugaccaucaugcucugcugcaugaccagcugcugcuccugccugaagggcugcugcagcugcggguccugcugcaaguucgacgaggacgacagcgagccggugcugaagggcgucaagcuccacuacacgugaggacuaguuauaagacugacuagcccgaugggccucccaacgggcccuccuccccuccuugcaccgagauuaauaaaaaaaaaaaaaaaaaaaaaaaaaaaaaaaaaaaaaaaaaaaaaaaaaaaaaaaaaaaaaaaaaaaaaaaaaaaaaaaaaaaaaaaaaaaaaaaaaaaa

SEQ ID NO: 25519 - RNA, 4011 nt, Artificial Sequence
  SARS-CoV-2/Wuhan/WIV05/2019__EPI_ISL_402128 spike protein mRNA gc (1-1273)(K986P_V987P_S477N_D614G)
aggagaaagcuuaccauguucguguuccugguccuccugccccuggugagcucccagugcgugaaccucaccacccgcacgcagcugccgcccgccuacaccaacagcuucacccggggcgucuacuaccccgacaagguguuccgcuccagcgugcugcacuccacccaggaccucuuccugcccuucuucagcaacgucacgugguuccacgccauccacguguccgggaccaacggcaccaagcgguucgacaacccggugcugcccuucaacgacggggucuacuucgcgagcaccgagaaguccaacaucauccgcggcuggaucuucgggacgacccucgacagcaagacccagucccugcugaucgugaacaacgccaccaacguggucaucaaggugugcgaguuccaguucugcaacgaccccuuccucggcguguacuaccacaagaacaacaagagcuggauggaguccgaguuccgggucuacagcuccgccaacaacugcacguucgaguacgugagccagcccuuccugauggaccuggagggcaagcaggggaacuucaagaaccuccgcgaguucguguucaagaacaucgacggcuacuucaagaucuacuccaagcacaccccgaucaaccugguccgggaccugccccagggguucagcgcccucgagccccugguggaccugcccaucggcaucaacaucacccgcuuccagacccuccuggcccugcaccgguccuaccucacgccgggggacagcagcuccggcuggaccgcgggcgccgccgccuacuacgugggguaccugcagccccgcaccuuccugcucaaguacaacgagaacggcaccaucacggacgcggucgacugcgcccuggacccccugagcgagaccaagugcacccucaaguccuucaccguggagaaggggaucuaccagacgagcaacuuccgggugcagcccaccgaguccaucguccgcuucccgaacaucaccaaccugugccccuucggcgagguguucaacgccacccgguucgccagcgucuacgccuggaaccgcaagcggaucuccaacugcguggcggacuacagcgugcuguacaacuccgccagcuucuccacguucaagugcuacggcgucagccccaccaagcucaacgaccugugcuucaccaacguguacgccgacuccuucgugauccgcggggacgagguccggcagaucgcccccggccagaccgggaagaucgccgacuacaacuacaagcugccggacgacuucacgggcugcgugaucgcguggaacagcaacaaccucgacuccaaggucgggggcaacuacaacuaccuguaccgccuguuccgcaagagcaaccucaagcccuucgagcgggacaucuccaccgagaucuaccaggccggcaacacccccugcaacgggguggagggcuucaacugcuacuucccccugcagagcuacggguuccagccgaccaacggcgugggguaccagcccuaccggguggucgugcuguccuucgagcuccugcacgcccccgccacggugugcggccccaagaaguccaccaaccuggucaagaacaagugcgugaacuucaacuucaacggccucaccgggaccggcgugcugaccgagagcaacaagaaguuccugccguuccagcaguucgggcgcgacaucgccgacacgaccgacgcgguccgcgacccccagacccuggagauccucgacaucacccccugcagcuucggcggggugagcgugaucacgccgggcaccaacaccuccaaccaggucgccgugcuguaccagggcgugaacugcaccgagguccccguggccauccacgccgaccagcugacgcccaccuggcggguguacagcaccggguccaacgucuuccagacccgcgccggcugccucaucggggcggagcacgugaacaacagcuacgagugcgacauccccaucggcgccggcaucugcgccuccuaccagacgcagaccaacagcccgcggcgcgcccgguccguggcgagccaguccaucaucgccuacaccaugagccugggggccgagaacuccgucgccuacagcaacaacuccaucgccauccccaccaacuucacgaucagcgugaccaccgagauccugcccguguccaugaccaagacgagcgucgacugcaccauguacaucugcggcgacagcaccgagugcuccaaccuccugcugcaguacgggagcuucugcacccagcucaaccgcgcgcugacgggcaucgccguggagcaggacaagaacacccaggagguguucgcccaggucaagcagaucuacaagacgcccccgaucaaggacuucgggggcuucaacuucucccagauccugcccgaccccagcaagcccuccaagcggagcuucaucgaggaccuccuguucaacaaggugacccuggccgacgccggcuucaucaagcaguacggggacugccucggcgacaucgcggcccgcgaccugaucugcgcccagaaguucaacgggcugaccgugcucccgccccugcugaccgacgagaugaucgcccaguacaccuccgcccuccuggcgggcaccaucacgagcggguggaccuucggcgccggcgccgcccugcagauccccuucgcgaugcagauggccuaccgguucaacgggaucggcgucacccagaacgugcucuacgagaaccagaagcugaucgccaaccaguucaacuccgccaucgggaagauccaggacagccuguccagcaccgccuccgcgcucggcaagcugcaggacguggucaaccagaacgcccaggcccugaacacgcucgugaagcagcugagcuccaacuucggggccaucagcuccgugcugaacgacauccucagccgccuggacccgcccgaggccgagguccagaucgaccggcugaucaccggccgccuccagucccugcagaccuacgugacccagcagcugauccgggcggccgagauccgcgccagcgccaaccucgccgcgaccaagaugagcgagugcgugcugggccaguccaagcgggucgacuucugcgggaagggcuaccaccugaugagcuucccccaguccgcgccccacggggugguguuccuccacgucacguacgugcccgcccaggagaagaacuucaccaccgccccggccaucugccacgacggcaaggcccacuucccccgcgagggggucuucgugagcaacggcacccacugguucgugacgcagcggaacuucuacgagccccagaucaucaccaccgacaacaccuucgucuccggcaacugcgacguggugaucgggaucgucaacaacacgguguacgacccccugcagccggagcuggacagcuucaaggaggagcucgacaaguacuucaagaaccacaccucccccgacguggaccugggcgacaucagcgggaucaacgccuccgucgugaacauccagaaggagaucgaccgccugaacgagguggccaagaaccucaacgagagccugaucgaccugcaggagcucggcaaguacgagcaguacaucaaguggcccugguacaucuggcugggcuucaucgccgggcugaucgcgaucgucauggugaccaucaugcucugcugcaugaccuccugcugcagcugccugaagggcugcugcuccugcgggagcugcugcaaguucgacgaggacgacuccgagccggugcugaagggcgucaagcuccacuacacgugaggacuaguuauaagacugacuagcccgaugggccucccaacgggcccuccuccccuccuugcaccgagauuaauaaaaaaaaaaaaaaaaaaaaaaaaaaaaaaaaaaaaaaaaaaaaaaaaaaaaaaaaaaaaaaaaaaaaaaaaaaaaaaaaaaaaaaaaaaaaaaaaaaaa

SEQ ID NO: 25520 - RNA, 4011 nt, Artificial Sequence
  SARS-CoV-2/Wuhan/WIV05/2019__EPI_ISL_402128 spike protein mRNA gc (1-1273)(K986P_V987P_N501Y_D614G)
aggagaaagcuuaccauguucguguuccugguccuccugccccuggugagcucccagugcgugaaccucaccacccgcacgcagcugccgcccgccuacaccaacagcuucacccggggcgucuacuaccccgacaagguguuccgcuccagcgugcugcacuccacccaggaccucuuccugcccuucuucagcaacgucacgugguuccacgccauccacguguccgggaccaacggcaccaagcgguucgacaacccggugcugcccuucaacgacggggucuacuucgcgagcaccgagaaguccaacaucauccgcggcuggaucuucgggacgacccucgacagcaagacccagucccugcugaucgugaacaacgccaccaacguggucaucaaggugugcgaguuccaguucugcaacgaccccuuccucggcguguacuaccacaagaacaacaagagcuggauggaguccgaguuccgggucuacagcuccgccaacaacugcacguucgaguacgugagccagcccuuccugauggaccuggagggcaagcaggggaacuucaagaaccuccgcgaguucguguucaagaacaucgacggcuacuucaagaucuacuccaagcacaccccgaucaaccugguccgggaccugccccagggguucagcgcccucgagccccugguggaccugcccaucggcaucaacaucacccgcuuccagacccuccuggcccugcaccgguccuaccucacgccgggggacagcagcuccggcuggaccgcgggcgccgccgccuacuacgugggguaccugcagccccgcaccuuccugcucaaguacaacgagaacggcaccaucacggacgcggucgacugcgcccuggacccccugagcgagaccaagugcacccucaaguccuucaccguggagaaggggaucuaccagacgagcaacuuccgggugcagcccaccgaguccaucguccgcuucccgaacaucaccaaccugugccccuucggcgagguguucaacgccacccgguucgccagcgucuacgccuggaaccgcaagcggaucuccaacugcguggcggacuacagcgugcuguacaacuccgccagcuucuccacguucaagugcuacggcgucagccccaccaagcucaacgaccugugcuucaccaacguguacgccgacuccuucgugauccgcggggacgagguccggcagaucgcccccggccagaccgggaagaucgccgacuacaacuacaagcugccggacgacuucacgggcugcgugaucgcguggaacagcaacaaccucgacuccaaggucgggggcaacuacaacuaccuguaccgccuguuccgcaagagcaaccucaagcccuucgagcgggacaucuccaccgagaucuaccaggccggcagcacccccugcaacgggguggagggcuucaacugcuacuucccccugcaguccuacggguuccagccgaccuacggcgugggguaccagcccuaccggguggucgugcugagcuucgagcuccugcacgcccccgccacggugugcggccccaagaaguccaccaaccuggucaagaacaagugcgugaacuucaacuucaacggccucaccgggaccggcgugcugaccgagagcaacaagaaguuccugccguuccagcaguucgggcgcgacaucgccgacacgaccgacgcgguccgcgacccccagacccuggagauccucgacaucacccccugcagcuucggcgggguguccgugaucacgccgggcaccaacaccagcaaccaggucgccgugcuguaccagggcgugaacugcaccgagguccccguggccauccacgccgaccagcugacgcccaccuggcggguguacuccaccgggagcaacgucuuccagacccgcgccggcugccucaucggggcggagcacgugaacaacuccuacgagugcgacauccccaucggcgccggcaucugcgccagcuaccagacgcagaccaacuccccgcggcgcgcccggagcguggcgucccagagcaucaucgccuacaccaugucccugggggccgagaacagcgucgccuacuccaacaacagcaucgccauccccaccaacuucacgaucuccgugaccaccgagauccugcccgugagcaugaccaagacgagcgucgacugcaccauguacaucugcggcgacuccaccgagugcagcaaccuccugcugcaguacggguccuucugcacccagcucaaccgcgcgcugacgggcaucgccguggagcaggacaagaacacccaggagguguucgcccaggucaagcagaucuacaagacgcccccgaucaaggacuucgggggcuucaacuucagccagauccugcccgaccccuccaagcccagcaagcgguccuucaucgaggaccuccuguucaacaaggugacccuggccgacgccggcuucaucaagcaguacggggacugccucggcgacaucgcggcccgcgaccugaucugcgcccagaaguucaacgggcugaccgugcucccgccccugcugaccgacgagaugaucgcccaguacaccagcgcccuccuggcgggcaccaucacguccggguggaccuucggcgccggcgccgcccugcagauccccuucgcgaugcagauggccuaccgguucaacgggaucggcgucacccagaacgugcucuacgagaaccagaagcugaucgccaaccaguucaacagcgccaucgggaagauccaggacucccugagcuccaccgccagcgcgcucggcaagcugcaggacguggucaaccagaacgcccaggcccugaacacgcucgugaagcagcuguccagcaacuucggggccaucuccagcgugcugaacgacauccucucccgccuggacccgcccgaggccgagguccagaucgaccggcugaucaccggccgccuccagagccugcagaccuacgugacccagcagcugauccgggcggccgagauccgcgccagcgccaaccucgccgcgaccaagauguccgagugcgugcugggccagagcaagcgggucgacuucugcgggaagggcuaccaccugauguccuucccccagagcgcgccccacggggugguguuccuccacgucacguacgugcccgcccaggagaagaacuucaccaccgccccggccaucugccacgacggcaaggcccacuucccccgcgagggggucuucguguccaacggcacccacugguucgugacgcagcggaacuucuacgagccccagaucaucaccaccgacaacaccuucgucagcggcaacugcgacguggugaucgggaucgucaacaacacgguguacgacccccugcagccggagcuggacuccuucaaggaggagcucgacaaguacuucaagaaccacaccagccccgacguggaccugggcgacaucuccgggaucaacgccagcgucgugaacauccagaaggagaucgaccgccugaacgagguggccaagaaccucaacgagucccugaucgaccugcaggagcucggcaaguacgagcaguacaucaaguggcccugguacaucuggcugggcuucaucgccgggcugaucgcgaucgucauggugaccaucaugcucugcugcaugaccagcugcugcuccugccugaagggcugcugcagcugcggguccugcugcaaguucgacgaggacgacagcgagccggugcugaagggcgucaagcuccacuacacgugaggacuaguuauaagacugacuagcccgaugggccucccaacgggcccuccuccccuccuugcaccgagauuaauaaaaaaaaaaaaaaaaaaaaaaaaaaaaaaaaaaaaaaaaaaaaaaaaaaaaaaaaaaaaaaaaaaaaaaaaaaaaaaaaaaaaaaaaaaaaaaaaaaaa

SEQ ID NO: 25521 - RNA, 4005 nt, Artificial Sequence
  SARS-CoV-2/Wuhan/WIV05/2019__EPI_ISL_402128 spike protein mRNA gc (1-1273)(K986P_V987P_H69del_V70del_D614G)
aggagaaagcuuaccauguucguguuccugguccuccugccccuggugagcucccagugcgugaaccucaccacccgcacgcagcugccgcccgccuacaccaacagcuucacccggggcgucuacuaccccgacaagguguuccgcuccagcgugcugcacuccacccaggaccucuuccugcccuucuucagcaacgucacgugguuccacgccaucuccgggaccaacggcaccaagcgguucgacaacccggugcugcccuucaacgacgggguguacuucgcgagcaccgagaaguccaacaucauccgcggcuggaucuucgggacgacccucgacagcaagacccagucccugcugaucgucaacaacgccaccaacguggugaucaaggucugcgaguuccaguucugcaacgaccccuuccucggcguguacuaccacaagaacaacaagagcuggauggaguccgaguuccggguguacagcuccgccaacaacugcacguucgaguacgucagccagcccuuccugauggaccuggagggcaagcaggggaacuucaagaaccuccgcgaguucguguucaagaacaucgacggcuacuucaagaucuacuccaagcacaccccgaucaaccuggugcgggaccugccccagggguucagcgcccucgagccccuggucgaccugcccaucggcaucaacaucacccgcuuccagacccuccuggcccugcaccgguccuaccucacgccgggggacagcagcuccggcuggaccgcgggcgccgccgccuacuacgugggguaccugcagccccgcaccuuccugcucaaguacaacgagaacggcaccaucacggacgcgguggacugcgcccuggacccccugagcgagaccaagugcacccucaaguccuucaccgucgagaaggggaucuaccagacgagcaacuuccgggugcagcccaccgaguccaucgugcgcuucccgaacaucaccaaccugugccccuucggcgaggucuucaacgccacccgguucgccagcguguacgccuggaaccgcaagcggaucuccaacugcgucgcggacuacagcgugcuguacaacuccgccagcuucuccacguucaagugcuacggcgugagccccaccaagcucaacgaccugugcuucaccaacgucuacgccgacuccuucgugauccgcggggacgaggugcggcagaucgcccccggccagaccgggaagaucgccgacuacaacuacaagcugccggacgacuucacgggcugcgucaucgcguggaacagcaacaaccucgacuccaaggucgggggcaacuacaacuaccuguaccgccuguuccgcaagagcaaccucaagcccuucgagcgggacaucuccaccgagaucuaccaggccggcagcacccccugcaacgggguggagggcuucaacugcuacuucccccugcaguccuacggguuccagccgaccaacggcgugggguaccagcccuaccggguggugguccugagcuucgagcuccugcacgcccccgccacggugugcggccccaagaaguccaccaaccuggugaagaacaagugcgucaacuucaacuucaacggccucaccgggaccggcgugcugaccgagagcaacaagaaguuccugccguuccagcaguucgggcgcgacaucgccgacacgaccgacgcggugcgcgacccccagacccuggagauccucgacaucacccccugcagcuucggcggggucuccgugaucacgccgggcaccaacaccagcaaccagguggccguccuguaccagggcgugaacugcaccgaggugcccgucgccauccacgccgaccagcugacgcccaccuggcggguguacuccaccgggagcaacguguuccagacccgcgccggcugccucaucggggcggagcacgucaacaacuccuacgagugcgacauccccaucggcgccggcaucugcgccagcuaccagacgcagaccaacuccccgcggcgcgcccggagcguggcgucccagagcaucaucgccuacaccaugucccugggggccgagaacagcguggccuacuccaacaacagcaucgccauccccaccaacuucacgaucuccgucaccaccgagauccugcccgugagcaugaccaagacgagcguggacugcaccauguacaucugcggcgacuccaccgagugcagcaaccuccugcugcaguacggguccuucugcacccagcucaaccgcgcgcugacgggcaucgccgucgagcaggacaagaacacccaggagguguucgcccaggugaagcagaucuacaagacgcccccgaucaaggacuucgggggcuucaacuucagccagauccugcccgaccccuccaagcccagcaagcgguccuucaucgaggaccuccuguucaacaaggucacccuggccgacgccggcuucaucaagcaguacggggacugccucggcgacaucgcggcccgcgaccugaucugcgcccagaaguucaacgggcugaccgugcucccgccccugcugaccgacgagaugaucgcccaguacaccagcgcccuccuggcgggcaccaucacguccggguggaccuucggcgccggcgccgcccugcagauccccuucgcgaugcagauggccuaccgguucaacgggaucggcgugacccagaacguccucuacgagaaccagaagcugaucgccaaccaguucaacagcgccaucgggaagauccaggacucccugagcuccaccgccagcgcgcucggcaagcugcaggacguggugaaccagaacgcccaggcccugaacacgcucgucaagcagcuguccagcaacuucggggccaucuccagcgugcugaacgacauccucucccgccuggacccgcccgaggccgaggugcagaucgaccggcugaucaccggccgccuccagagccugcagaccuacgucacccagcagcugauccgggcggccgagauccgcgccagcgccaaccucgccgcgaccaagauguccgagugcgugcugggccagagcaagcggguggacuucugcgggaagggcuaccaccugauguccuucccccagagcgcgccccacggggucguguuccuccacgugacguacguccccgcccaggagaagaacuucaccaccgccccggccaucugccacgacggcaaggcccacuucccccgcgaggggguguucgucuccaacggcacccacugguucgugacgcagcggaacuucuacgagccccagaucaucaccaccgacaacaccuucgugagcggcaacugcgacgucgugaucgggaucgugaacaacacggucuacgacccccugcagccggagcuggacuccuucaaggaggagcucgacaaguacuucaagaaccacaccagccccgacguggaccugggcgacaucuccgggaucaacgccagcguggucaacauccagaaggagaucgaccgccugaacgagguggccaagaaccucaacgagucccugaucgaccugcaggagcucggcaaguacgagcaguacaucaaguggcccugguacaucuggcugggcuucaucgccgggcugaucgcgaucgugauggucaccaucaugcucugcugcaugaccagcugcugcuccugccugaagggcugcugcagcugcggguccugcugcaaguucgacgaggacgacagcgagccggugcugaagggcgugaagcuccacuacacgugaggacuaguuauaagacugacuagcccgaugggccucccaacgggcccuccuccccuccuugcaccgagauuaauaaaaaaaaaaaaaaaaaaaaaaaaaaaaaaaaaaaaaaaaaaaaaaaaaaaaaaaaaaaaaaaaaaaaaaaaaaaaaaaaaaaaaaaaaaaaaaaaaaaa

SEQ ID NO: 25522 - RNA, 4011 nt, Artificial Sequence
  SARS-CoV-2/Wuhan/WIV05/2019__EPI_ISL_402128 spike protein mRNA gc (1-1273)(K986P_V987P_Y453F_D614G)
aggagaaagcuuaccauguucguguuccugguccuccugccccuggugagcucccagugcgugaaccucaccacccgcacgcagcugccgcccgccuacaccaacagcuucacccggggcgucuacuaccccgacaagguguuccgcuccagcgugcugcacuccacccaggaccucuuccugcccuucuucagcaacgucacgugguuccacgccauccacguguccgggaccaacggcaccaagcgguucgacaacccggugcugcccuucaacgacggggucuacuucgcgagcaccgagaaguccaacaucauccgcggcuggaucuucgggacgacccucgacagcaagacccagucccugcugaucgugaacaacgccaccaacguggucaucaaggugugcgaguuccaguucugcaacgaccccuuccucggcguguacuaccacaagaacaacaagagcuggauggaguccgaguuccgggucuacagcuccgccaacaacugcacguucgaguacgugagccagcccuuccugauggaccuggagggcaagcaggggaacuucaagaaccuccgcgaguucguguucaagaacaucgacggcuacuucaagaucuacuccaagcacaccccgaucaaccugguccgggaccugccccagggguucagcgcccucgagccccugguggaccugcccaucggcaucaacaucacccgcuuccagacccuccuggcccugcaccgguccuaccucacgccgggggacagcagcuccggcuggaccgcgggcgccgccgccuacuacgugggguaccugcagccccgcaccuuccugcucaaguacaacgagaacggcaccaucacggacgcggucgacugcgcccuggacccccugagcgagaccaagugcacccucaaguccuucaccguggagaaggggaucuaccagacgagcaacuuccgggugcagcccaccgaguccaucguccgcuucccgaacaucaccaaccugugccccuucggcgagguguucaacgccacccgguucgccagcgucuacgccuggaaccgcaagcggaucuccaacugcguggcggacuacagcgugcuguacaacuccgccagcuucuccacguucaagugcuacggcgucagccccaccaagcucaacgaccugugcuucaccaacguguacgccgacuccuucgugauccgcggggacgagguccggcagaucgcccccggccagaccgggaagaucgccgacuacaacuacaagcugccggacgacuucacgggcugcgugaucgcguggaacagcaacaaccucgacuccaaggucgggggcaacuacaacuaccuguuccgccuguuccgcaagagcaaccucaagcccuucgagcgggacaucuccaccgagaucuaccaggccggcagcacccccugcaacgggguggagggcuucaacugcuacuucccccugcaguccuacggguuccagccgaccaacggcgugggguaccagcccuaccggguggucgugcugagcuucgagcuccugcacgcccccgccacggugugcggccccaagaaguccaccaaccuggucaagaacaagugcgugaacuucaacuucaacggccucaccgggaccggcgugcugaccgagagcaacaagaaguuccugccguuccagcaguucgggcgcgacaucgccgacacgaccgacgcgguccgcgacccccagacccuggagauccucgacaucacccccugcagcuucggcgggguguccgugaucacgccgggcaccaacaccagcaaccaggucgccgugcuguaccagggcgugaacugcaccgagguccccguggccauccacgccgaccagcugacgcccaccuggcggguguacuccaccgggagcaacgucuuccagacccgcgccggcugccucaucggggcggagcacgugaacaacuccuacgagugcgacauccccaucggcgccggcaucugcgccagcuaccagacgcagaccaacuccccgcggcgcgcccggagcguggcgucccagagcaucaucgccuacaccaugucccugggggccgagaacagcgucgccuacuccaacaacagcaucgccauccccaccaacuucacgaucuccgugaccaccgagauccugcccgugagcaugaccaagacgagcgucgacugcaccauguacaucugcggcgacuccaccgagugcagcaaccuccugcugcaguacggguccuucugcacccagcucaaccgcgcgcugacgggcaucgccguggagcaggacaagaacacccaggagguguucgcccaggucaagcagaucuacaagacgcccccgaucaaggacuucgggggcuucaacuucagccagauccugcccgaccccuccaagcccagcaagcgguccuucaucgaggaccuccuguucaacaaggugacccuggccgacgccggcuucaucaagcaguacggggacugccucggcgacaucgcggcccgcgaccugaucugcgcccagaaguucaacgggcugaccgugcucccgccccugcugaccgacgagaugaucgcccaguacaccagcgcccuccuggcgggcaccaucacguccggguggaccuucggcgccggcgccgcccugcagauccccuucgcgaugcagauggccuaccgguucaacgggaucggcgucacccagaacgugcucuacgagaaccagaagcugaucgccaaccaguucaacagcgccaucgggaagauccaggacucccugagcuccaccgccagcgcgcucggcaagcugcaggacguggucaaccagaacgcccaggcccugaacacgcucgugaagcagcuguccagcaacuucggggccaucuccagcgugcugaacgacauccucucccgccuggacccgcccgaggccgagguccagaucgaccggcugaucaccggccgccuccagagccugcagaccuacgugacccagcagcugauccgggcggccgagauccgcgccagcgccaaccucgccgcgaccaagauguccgagugcgugcugggccagagcaagcgggucgacuucugcgggaagggcuaccaccugauguccuucccccagagcgcgccccacggggugguguuccuccacgucacguacgugcccgcccaggagaagaacuucaccaccgccccggccaucugccacgacggcaaggcccacuucccccgcgagggggucuucguguccaacggcacccacugguucgugacgcagcggaacuucuacgagccccagaucaucaccaccgacaacaccuucgucagcggcaacugcgacguggugaucgggaucgucaacaacacgguguacgacccccugcagccggagcuggacuccuucaaggaggagcucgacaaguacuucaagaaccacaccagccccgacguggaccugggcgacaucuccgggaucaacgccagcgucgugaacauccagaaggagaucgaccgccugaacgagguggccaagaaccucaacgagucccugaucgaccugcaggagcucggcaaguacgagcaguacaucaaguggcccugguacaucuggcugggcuucaucgccgggcugaucgcgaucgucauggugaccaucaugcucugcugcaugaccagcugcugcuccugccugaagggcugcugcagcugcggguccugcugcaaguucgacgaggacgacagcgagccggugcugaagggcgucaagcuccacuacacgugaggacuaguuauaagacugacuagcccgaugggccucccaacgggcccuccuccccuccuugcaccgagauuaauaaaaaaaaaaaaaaaaaaaaaaaaaaaaaaaaaaaaaaaaaaaaaaaaaaaaaaaaaaaaaaaaaaaaaaaaaaaaaaaaaaaaaaaaaaaaaaaaaaaa

SEQ ID NO: 25523 - RNA, 4011 nt, Artificial Sequence
  SARS-CoV-2/Wuhan/WIV05/2019__EPI_ISL_402128 spike protein mRNA gc (1-1273)(K986P_V987P_D614G_I692V)
aggagaaagcuuaccauguucguguuccugguccuccugccccuggugagcucccagugcgugaaccucaccacccgcacgcagcugccgcccgccuacaccaacagcuucacccggggcgucuacuaccccgacaagguguuccgcuccagcgugcugcacuccacccaggaccucuuccugcccuucuucagcaacgucacgugguuccacgccauccacguguccgggaccaacggcaccaagcgguucgacaacccggugcugcccuucaacgacggggucuacuucgcgagcaccgagaaguccaacaucauccgcggcuggaucuucgggacgacccucgacagcaagacccagucccugcugaucgugaacaacgccaccaacguggucaucaaggugugcgaguuccaguucugcaacgaccccuuccucggcguguacuaccacaagaacaacaagagcuggauggaguccgaguuccgggucuacagcuccgccaacaacugcacguucgaguacgugagccagcccuuccugauggaccuggagggcaagcaggggaacuucaagaaccuccgcgaguucguguucaagaacaucgacggcuacuucaagaucuacuccaagcacaccccgaucaaccugguccgggaccugccccagggguucagcgcccucgagccccugguggaccugcccaucggcaucaacaucacccgcuuccagacccuccuggcccugcaccgguccuaccucacgccgggggacagcagcuccggcuggaccgcgggcgccgccgccuacuacgugggguaccugcagccccgcaccuuccugcucaaguacaacgagaacggcaccaucacggacgcggucgacugcgcccuggacccccugagcgagaccaagugcacccucaaguccuucaccguggagaaggggaucuaccagacgagcaacuuccgggugcagcccaccgaguccaucguccgcuucccgaacaucaccaaccugugccccuucggcgagguguucaacgccacccgguucgccagcgucuacgccuggaaccgcaagcggaucuccaacugcguggcggacuacagcgugcuguacaacuccgccagcuucuccacguucaagugcuacggcgucagccccaccaagcucaacgaccugugcuucaccaacguguacgccgacuccuucgugauccgcggggacgagguccggcagaucgcccccggccagaccgggaagaucgccgacuacaacuacaagcugccggacgacuucacgggcugcgugaucgcguggaacagcaacaaccucgacuccaaggucgggggcaacuacaacuaccuguaccgccuguuccgcaagagcaaccucaagcccuucgagcgggacaucuccaccgagaucuaccaggccggcagcacccccugcaacgggguggagggcuucaacugcuacuucccccugcaguccuacggguuccagccgaccaacggcgugggguaccagcccuaccggguggucgugcugagcuucgagcuccugcacgcccccgccacggugugcggccccaagaaguccaccaaccuggucaagaacaagugcgugaacuucaacuucaacggccucaccgggaccggcgugcugaccgagagcaacaagaaguuccugccguuccagcaguucgggcgcgacaucgccgacacgaccgacgcgguccgcgacccccagacccuggagauccucgacaucacccccugcagcuucggcgggguguccgugaucacgccgggcaccaacaccagcaaccaggucgccgugcuguaccagggcgugaacugcaccgagguccccguggccauccacgccgaccagcugacgcccaccuggcggguguacuccaccgggagcaacgucuuccagacccgcgccggcugccucaucggggcggagcacgugaacaacuccuacgagugcgacauccccaucggcgccggcaucugcgccagcuaccagacgcagaccaacuccccgcggcgcgcccggagcguggcgucccagagcgucaucgccuacaccaugucccugggggccgagaacagcguggccuacuccaacaacagcaucgccauccccaccaacuucacgaucuccgugaccaccgagauccugcccgucagcaugaccaagacgagcguggacugcaccauguacaucugcggcgacuccaccgagugcagcaaccuccugcugcaguacggguccuucugcacccagcucaaccgcgcgcugacgggcaucgccguggagcaggacaagaacacccaggaggucuucgcccaggugaagcagaucuacaagacgcccccgaucaaggacuucgggggcuucaacuucagccagauccugcccgaccccuccaagcccagcaagcgguccuucaucgaggaccuccuguucaacaaggugacccuggccgacgccggcuucaucaagcaguacggggacugccucggcgacaucgcggcccgcgaccugaucugcgcccagaaguucaacgggcugaccguccucccgccccugcugaccgacgagaugaucgcccaguacaccagcgcccuccuggcgggcaccaucacguccggguggaccuucggcgccggcgccgcccugcagauccccuucgcgaugcagauggccuaccgguucaacgggaucggcgugacccagaacgugcucuacgagaaccagaagcugaucgccaaccaguucaacagcgccaucgggaagauccaggacucccugagcuccaccgccagcgcgcucggcaagcugcaggacgucgugaaccagaacgcccaggcccugaacacgcucgugaagcagcuguccagcaacuucggggccaucuccagcguccugaacgacauccucucccgccuggacccgcccgaggccgaggugcagaucgaccggcugaucaccggccgccuccagagccugcagaccuacgugacccagcagcugauccgggcggccgagauccgcgccagcgccaaccucgccgcgaccaagauguccgagugcguccugggccagagcaagcggguggacuucugcgggaagggcuaccaccugauguccuucccccagagcgcgccccacgggguggucuuccuccacgugacguacguccccgcccaggagaagaacuucaccaccgccccggccaucugccacgacggcaaggcccacuucccccgcgaggggguguucguguccaacggcacccacugguucgucacgcagcggaacuucuacgagccccagaucaucaccaccgacaacaccuucgugagcggcaacugcgacguggucaucgggaucgugaacaacacgguguacgacccccugcagccggagcuggacuccuucaaggaggagcucgacaaguacuucaagaaccacaccagccccgacgucgaccugggcgacaucuccgggaucaacgccagcguggugaacauccagaaggagaucgaccgccugaacgaggucgccaagaaccucaacgagucccugaucgaccugcaggagcucggcaaguacgagcaguacaucaaguggcccugguacaucuggcugggcuucaucgccgggcugaucgcgaucgugauggugaccaucaugcucugcugcaugaccagcugcugcuccugccugaagggcugcugcagcugcggguccugcugcaaguucgacgaggacgacagcgagccgguccugaagggcgugaagcuccacuacacgugaggacuaguuauaagacugacuagcccgaugggccucccaacgggcccuccuccccuccuugcaccgagauuaauaaaaaaaaaaaaaaaaaaaaaaaaaaaaaaaaaaaaaaaaaaaaaaaaaaaaaaaaaaaaaaaaaaaaaaaaaaaaaaaaaaaaaaaaaaaaaaaaaaaa

SEQ ID NO: 25524 - RNA, 4011 nt, Artificial Sequence
  SARS-CoV-2/Wuhan/WIV05/2019__EPI_ISL_402128 spike protein mRNA gc (1-1273)(K986P_V987P_D614G_M1229I)
aggagaaagcuuaccauguucguguuccugguccuccugccccuggugagcucccagugcgugaaccucaccacccgcacgcagcugccgcccgccuacaccaacagcuucacccggggcgucuacuaccccgacaagguguuccgcuccagcgugcugcacuccacccaggaccucuuccugcccuucuucagcaacgucacgugguuccacgccauccacguguccgggaccaacggcaccaagcgguucgacaacccggugcugcccuucaacgacggggucuacuucgcgagcaccgagaaguccaacaucauccgcggcuggaucuucgggacgacccucgacagcaagacccagucccugcugaucgugaacaacgccaccaacguggucaucaaggugugcgaguuccaguucugcaacgaccccuuccucggcguguacuaccacaagaacaacaagagcuggauggaguccgaguuccgggucuacagcuccgccaacaacugcacguucgaguacgugagccagcccuuccugauggaccuggagggcaagcaggggaacuucaagaaccuccgcgaguucguguucaagaacaucgacggcuacuucaagaucuacuccaagcacaccccgaucaaccugguccgggaccugccccagggguucagcgcccucgagccccugguggaccugcccaucggcaucaacaucacccgcuuccagacccuccuggcccugcaccgguccuaccucacgccgggggacagcagcuccggcuggaccgcgggcgccgccgccuacuacgugggguaccugcagccccgcaccuuccugcucaaguacaacgagaacggcaccaucacggacgcggucgacugcgcccuggacccccugagcgagaccaagugcacccucaaguccuucaccguggagaaggggaucuaccagacgagcaacuuccgggugcagcccaccgaguccaucguccgcuucccgaacaucaccaaccugugccccuucggcgagguguucaacgccacccgguucgccagcgucuacgccuggaaccgcaagcggaucuccaacugcguggcggacuacagcgugcuguacaacuccgccagcuucuccacguucaagugcuacggcgucagccccaccaagcucaacgaccugugcuucaccaacguguacgccgacuccuucgugauccgcggggacgagguccggcagaucgcccccggccagaccgggaagaucgccgacuacaacuacaagcugccggacgacuucacgggcugcgugaucgcguggaacagcaacaaccucgacuccaaggucgggggcaacuacaacuaccuguaccgccuguuccgcaagagcaaccucaagcccuucgagcgggacaucuccaccgagaucuaccaggccggcagcacccccugcaacgggguggagggcuucaacugcuacuucccccugcaguccuacggguuccagccgaccaacggcgugggguaccagcccuaccggguggucgugcugagcuucgagcuccugcacgcccccgccacggugugcggccccaagaaguccaccaaccuggucaagaacaagugcgugaacuucaacuucaacggccucaccgggaccggcgugcugaccgagagcaacaagaaguuccugccguuccagcaguucgggcgcgacaucgccgacacgaccgacgcgguccgcgacccccagacccuggagauccucgacaucacccccugcagcuucggcgggguguccgugaucacgccgggcaccaacaccagcaaccaggucgccgugcuguaccagggcgugaacugcaccgagguccccguggccauccacgccgaccagcugacgcccaccuggcggguguacuccaccgggagcaacgucuuccagacccgcgccggcugccucaucggggcggagcacgugaacaacuccuacgagugcgacauccccaucggcgccggcaucugcgccagcuaccagacgcagaccaacuccccgcggcgcgcccggagcguggcgucccagagcaucaucgccuacaccaugucccugggggccgagaacagcgucgccuacuccaacaacagcaucgccauccccaccaacuucacgaucuccgugaccaccgagauccugcccgugagcaugaccaagacgagcgucgacugcaccauguacaucugcggcgacuccaccgagugcagcaaccuccugcugcaguacggguccuucugcacccagcucaaccgcgcgcugacgggcaucgccguggagcaggacaagaacacccaggagguguucgcccaggucaagcagaucuacaagacgcccccgaucaaggacuucgggggcuucaacuucagccagauccugcccgaccccuccaagcccagcaagcgguccuucaucgaggaccuccuguucaacaaggugacccuggccgacgccggcuucaucaagcaguacggggacugccucggcgacaucgcggcccgcgaccugaucugcgcccagaaguucaacgggcugaccgugcucccgccccugcugaccgacgagaugaucgcccaguacaccagcgcccuccuggcgggcaccaucacguccggguggaccuucggcgccggcgccgcccugcagauccccuucgcgaugcagauggccuaccgguucaacgggaucggcgucacccagaacgugcucuacgagaaccagaagcugaucgccaaccaguucaacagcgccaucgggaagauccaggacucccugagcuccaccgccagcgcgcucggcaagcugcaggacguggucaaccagaacgcccaggcccugaacacgcucgugaagcagcuguccagcaacuucggggccaucuccagcgugcugaacgacauccucucccgccuggacccgcccgaggccgagguccagaucgaccggcugaucaccggccgccuccagagccugcagaccuacgugacccagcagcugauccgggcggccgagauccgcgccagcgccaaccucgccgcgaccaagauguccgagugcgugcugggccagagcaagcgggucgacuucugcgggaagggcuaccaccugauguccuucccccagagcgcgccccacggggugguguuccuccacgucacguacgugcccgcccaggagaagaacuucaccaccgccccggccaucugccacgacggcaaggcccacuucccccgcgagggggucuucguguccaacggcacccacugguucgugacgcagcggaacuucuacgagccccagaucaucaccaccgacaacaccuucgucagcggcaacugcgacguggugaucgggaucgucaacaacacgguguacgacccccugcagccggagcuggacuccuucaaggaggagcucgacaaguacuucaagaaccacaccagccccgacguggaccugggcgacaucuccgggaucaacgccagcgucgugaacauccagaaggagaucgaccgccugaacgagguggccaagaaccucaacgagucccugaucgaccugcaggagcucggcaaguacgagcaguacaucaaguggcccugguacaucuggcugggcuucaucgccgggcugaucgcgaucgucaucgugaccaucaugcucugcugcaugaccagcugcugcuccugccugaagggcugcugcagcugcggguccugcugcaaguucgacgaggacgacagcgagccggugcugaagggcgucaagcuccacuacacgugaggacuaguuauaagacugacuagcccgaugggccucccaacgggcccuccuccccuccuugcaccgagauuaauaaaaaaaaaaaaaaaaaaaaaaaaaaaaaaaaaaaaaaaaaaaaaaaaaaaaaaaaaaaaaaaaaaaaaaaaaaaaaaaaaaaaaaaaaaaaaaaaaaaa

SEQ ID NO: 25525 - RNA, 4005 nt, Artificial Sequence
  SARS-CoV-2/Wuhan/WIV05/2019__EPI_ISL_402128 spike protein mRNA gc (1-1273)(K986P_V987P_H69del_V70del_A222V_Y453F_S477N_D614G_I692V)
aggagaaagcuuaccauguucguguuccugguccuccugccccuggugagcucccagugcgugaaccucaccacccgcacgcagcugccgcccgccuacaccaacagcuucacccggggcgucuacuaccccgacaagguguuccgcuccagcgugcugcacuccacccaggaccucuuccugcccuucuucagcaacgucacgugguuccacgccaucuccgggaccaacggcaccaagcgguucgacaacccggugcugcccuucaacgacgggguguacuucgcgagcaccgagaaguccaacaucauccgcggcuggaucuucgggacgacccucgacagcaagacccagucccugcugaucgucaacaacgccaccaacguggugaucaaggucugcgaguuccaguucugcaacgaccccuuccucggcguguacuaccacaagaacaacaagagcuggauggaguccgaguuccggguguacagcuccgccaacaacugcacguucgaguacgucagccagcccuuccugauggaccuggagggcaagcaggggaacuucaagaaccuccgcgaguucguguucaagaacaucgacggcuacuucaagaucuacuccaagcacaccccgaucaaccuggugcgggaccugccccagggguucagcguccucgagccccugguggaccugcccaucggcaucaacaucacccgcuuccagacccuccuggcccugcaccgguccuaccucacgccgggggacagcagcuccggcuggaccgccggcgcggccgccuacuacgugggguaccugcagccccgcaccuuccugcucaaguacaacgagaacggcaccaucacggacgccgucgacugcgcgcuggacccccugagcgagaccaagugcacccucaaguccuucaccguggagaaggggaucuaccagacgagcaacuuccgggugcagcccaccgaguccaucguccgcuucccgaacaucaccaaccugugccccuucggcgagguguucaacgccacccgguucgccagcgucuacgccuggaaccgcaagcggaucuccaacugcguggccgacuacagcgugcuguacaacuccgcgagcuucuccacguucaagugcuacggcgucagccccaccaagcucaacgaccugugcuucaccaacguguacgccgacuccuucgugauccgcggggacgagguccggcagaucgcccccggccagaccgggaagaucgccgacuacaacuacaagcugccggacgacuucacgggcugcgugaucgccuggaacagcaacaaccucgacuccaaggucgggggcaacuacaacuaccuguuccgccuguuccgcaagagcaaccucaagcccuucgagcgggacaucuccaccgagaucuaccaggcgggcaacacccccugcaacgggguggagggcuucaacugcuacuucccccugcagagcuacggguuccagccgaccaacggcgugggguaccagcccuaccggguggucgugcuguccuucgagcuccugcacgcccccgccacggugugcggccccaagaaguccaccaaccuggucaagaacaagugcgugaacuucaacuucaacggccucaccgggaccggcgugcugaccgagagcaacaagaaguuccugccguuccagcaguucgggcgcgacaucgccgacacgaccgacgccguccgcgacccccagacccuggagauccucgacaucacccccugcagcuucggcggggugagcgugaucacgccgggcaccaacaccuccaaccaggucgcggugcuguaccagggcgugaacugcaccgagguccccguggccauccacgccgaccagcugacgcccaccuggcggguguacagcaccggguccaacgucuuccagacccgcgccggcugccucaucggggccgagcacgugaacaacagcuacgagugcgacauccccaucggcgcgggcaucugcgccuccuaccagacgcagaccaacagcccgcggcgcgcccgguccguggccagccaguccgucaucgcguacaccaugagccugggggccgagaacuccguggccuacagcaacaacuccaucgccauccccaccaacuucacgaucagcgugaccaccgagauccugcccgucuccaugaccaagacgagcguggacugcaccauguacaucugcggcgacagcaccgagugcuccaaccuccugcugcaguacgggagcuucugcacccagcucaaccgcgcccugacgggcaucgcgguggagcaggacaagaacacccaggaggucuucgcccaggugaagcagaucuacaagacgcccccgaucaaggacuucgggggcuucaacuucucccagauccugcccgaccccagcaagcccuccaagcggagcuucaucgaggaccuccuguucaacaaggugacccuggccgacgccggcuucaucaagcaguacggggacugccucggcgacaucgccgcgcgcgaccugaucugcgcccagaaguucaacgggcugaccguccucccgccccugcugaccgacgagaugaucgcccaguacaccuccgcccuccuggccggcaccaucacgagcggguggaccuucggcgcgggcgccgcccugcagauccccuucgccaugcagauggcguaccgguucaacgggaucggcgugacccagaacgugcucuacgagaaccagaagcugaucgccaaccaguucaacuccgccaucgggaagauccaggacagccuguccagcaccgccuccgcccucggcaagcugcaggacgucgugaaccagaacgcgcaggcccugaacacgcucgugaagcagcugagcuccaacuucggggccaucagcuccguccugaacgacauccucagccgccuggacccgcccgaggccgaggugcagaucgaccggcugaucaccggccgccuccagucccugcagaccuacgugacccagcagcugauccgggccgcggagauccgcgccagcgccaaccucgccgccaccaagaugagcgagugcguccugggccaguccaagcggguggacuucugcgggaagggcuaccaccugaugagcuucccccaguccgcgccccacgggguggucuuccuccacgugacguacguccccgcccaggagaagaacuucaccaccgccccggccaucugccacgacggcaaggcgcacuucccccgcgaggggguguucgugagcaacggcacccacugguucgucacgcagcggaacuucuacgagccccagaucaucaccaccgacaacaccuucguguccggcaacugcgacguggucaucgggaucgugaacaacacgguguacgacccccugcagccggagcuggacagcuucaaggaggagcucgacaaguacuucaagaaccacaccucccccgacgucgaccugggcgacaucagcgggaucaacgccuccguggugaacauccagaaggagaucgaccgccugaacgaggucgccaagaaccucaacgagagccugaucgaccugcaggagcucggcaaguacgagcaguacaucaaguggcccugguacaucuggcugggcuucaucgccgggcugaucgccaucgugauggugaccaucaugcucugcugcaugaccuccugcugcagcugccugaagggcugcugcuccugcgggagcugcugcaaguucgacgaggacgacuccgagccgguccugaagggcgugaagcuccacuacacgugaggacuaguuauaagacugacuagcccgaugggccucccaacgggcccuccuccccuccuugcaccgagauuaauaaaaaaaaaaaaaaaaaaaaaaaaaaaaaaaaaaaaaaaaaaaaaaaaaaaaaaaaaaaaaaaaaaaaaaaaaaaaaaaaaaaaaaaaaaaaaaaaaaaa

SEQ ID NO: 25526 - RNA, 4005 nt, Artificial Sequence
  SARS-CoV-2/Wuhan/WIV05/2019__EPI_ISL_402128 spike protein mRNA gc (1-1273)(K986P_V987P_H69del_V70del_Y453F_D614G_I692V_M1229I)
aggagaaagcuuaccauguucguguuccugguccuccugccccuggugagcucccagugcgugaaccucaccacccgcacgcagcugccgcccgccuacaccaacagcuucacccggggcgucuacuaccccgacaagguguuccgcuccagcgugcugcacuccacccaggaccucuuccugcccuucuucagcaacgucacgugguuccacgccaucuccgggaccaacggcaccaagcgguucgacaacccggugcugcccuucaacgacgggguguacuucgcgagcaccgagaaguccaacaucauccgcggcuggaucuucgggacgacccucgacagcaagacccagucccugcugaucgucaacaacgccaccaacguggugaucaaggucugcgaguuccaguucugcaacgaccccuuccucggcguguacuaccacaagaacaacaagagcuggauggaguccgaguuccggguguacagcuccgccaacaacugcacguucgaguacgucagccagcccuuccugauggaccuggagggcaagcaggggaacuucaagaaccuccgcgaguucguguucaagaacaucgacggcuacuucaagaucuacuccaagcacaccccgaucaaccuggugcgggaccugccccagggguucagcgcccucgagccccuggucgaccugcccaucggcaucaacaucacccgcuuccagacccuccuggcccugcaccgguccuaccucacgccgggggacagcagcuccggcuggaccgcgggcgccgccgccuacuacgugggguaccugcagccccgcaccuuccugcucaaguacaacgagaacggcaccaucacggacgcgguggacugcgcccuggacccccugagcgagaccaagugcacccucaaguccuucaccgucgagaaggggaucuaccagacgagcaacuuccgggugcagcccaccgaguccaucgugcgcuucccgaacaucaccaaccugugccccuucggcgaggucuucaacgccacccgguucgccagcguguacgccuggaaccgcaagcggaucuccaacugcgucgcggacuacagcgugcuguacaacuccgccagcuucuccacguucaagugcuacggcgugagccccaccaagcucaacgaccugugcuucaccaacgucuacgccgacuccuucgugauccgcggggacgaggugcggcagaucgcccccggccagaccgggaagaucgccgacuacaacuacaagcugccggacgacuucacgggcugcgucaucgcguggaacagcaacaaccucgacuccaaggucgggggcaacuacaacuaccuguuccgccuguuccgcaagagcaaccucaagcccuucgagcgggacaucuccaccgagaucuaccaggccggcagcacccccugcaacgggguggagggcuucaacugcuacuucccccugcaguccuacggguuccagccgaccaacggcgugggguaccagcccuaccggguggugguccugagcuucgagcuccugcacgcccccgccacggugugcggccccaagaaguccaccaaccuggugaagaacaagugcgucaacuucaacuucaacggccucaccgggaccggcgugcugaccgagagcaacaagaaguuccugccguuccagcaguucgggcgcgacaucgccgacacgaccgacgcggugcgcgacccccagacccuggagauccucgacaucacccccugcagcuucggcggggucuccgugaucacgccgggcaccaacaccagcaaccagguggccguccuguaccagggcgugaacugcaccgaggugcccgucgccauccacgccgaccagcugacgcccaccuggcggguguacuccaccgggagcaacguguuccagacccgcgccggcugccucaucggggcggagcacgucaacaacuccuacgagugcgacauccccaucggcgccggcaucugcgccagcuaccagacgcagaccaacuccccgcggcgcgcccggagcguggcgucccagagcgugaucgccuacaccaugucccugggggccgagaacagcgucgccuacuccaacaacagcaucgccauccccaccaacuucacgaucuccgugaccaccgagauccugcccgugagcaugaccaagacgagcgucgacugcaccauguacaucugcggcgacuccaccgagugcagcaaccuccugcugcaguacggguccuucugcacccagcucaaccgcgcgcugacgggcaucgccguggagcaggacaagaacacccaggagguguucgcccaggucaagcagaucuacaagacgcccccgaucaaggacuucgggggcuucaacuucagccagauccugcccgaccccuccaagcccagcaagcgguccuucaucgaggaccuccuguucaacaaggugacccuggccgacgccggcuucaucaagcaguacggggacugccucggcgacaucgcggcccgcgaccugaucugcgcccagaaguucaacgggcugaccgugcucccgccccugcugaccgacgagaugaucgcccaguacaccagcgcccuccuggcgggcaccaucacguccggguggaccuucggcgccggcgccgcccugcagauccccuucgcgaugcagauggccuaccgguucaacgggaucggcgucacccagaacgugcucuacgagaaccagaagcugaucgccaaccaguucaacagcgccaucgggaagauccaggacucccugagcuccaccgccagcgcgcucggcaagcugcaggacguggucaaccagaacgcccaggcccugaacacgcucgugaagcagcuguccagcaacuucggggccaucuccagcgugcugaacgacauccucucccgccuggacccgcccgaggccgagguccagaucgaccggcugaucaccggccgccuccagagccugcagaccuacgugacccagcagcugauccgggcggccgagauccgcgccagcgccaaccucgccgcgaccaagauguccgagugcgugcugggccagagcaagcgggucgacuucugcgggaagggcuaccaccugauguccuucccccagagcgcgccccacggggugguguuccuccacgucacguacgugcccgcccaggagaagaacuucaccaccgccccggccaucugccacgacggcaaggcccacuucccccgcgagggggucuucguguccaacggcacccacugguucgugacgcagcggaacuucuacgagccccagaucaucaccaccgacaacaccuucgucagcggcaacugcgacguggugaucgggaucgucaacaacacgguguacgacccccugcagccggagcuggacuccuucaaggaggagcucgacaaguacuucaagaaccacaccagccccgacguggaccugggcgacaucuccgggaucaacgccagcgucgugaacauccagaaggagaucgaccgccugaacgagguggccaagaaccucaacgagucccugaucgaccugcaggagcucggcaaguacgagcaguacaucaaguggcccugguacaucuggcugggcuucaucgccgggcugaucgcgaucgucaucgugaccaucaugcucugcugcaugaccagcugcugcuccugccugaagggcugcugcagcugcggguccugcugcaaguucgacgaggacgacagcgagccggugcugaagggcgucaagcuccacuacacgugaggacuaguuauaagacugacuagcccgaugggccucccaacgggcccuccuccccuccuugcaccgagauuaauaaaaaaaaaaaaaaaaaaaaaaaaaaaaaaaaaaaaaaaaaaaaaaaaaaaaaaaaaaaaaaaaaaaaaaaaaaaaaaaaaaaaaaaaaaaaaaaaaaaa

SEQ ID NO: 25527 - RNA, 4002 nt, Artificial Sequence
  SARS-CoV-2/Wuhan/WIV05/2019__EPI_ISL_402128 spike protein mRNA gc (1-1273)(K986P_V987P_K986P_V987P_H69del_V70del_Y144del_N501Y_A570 D_D614G_P681H_T716I_S982A_D1118H)
aggagaaagcuuaccauguucguguuccugguccuccugccccuggugagcucccagugcgugaaccucaccacccgcacgcagcugccgcccgccuacaccaacagcuucacccggggcgucuacuaccccgacaagguguuccgcuccagcgugcugcacuccacccaggaccucuuccugcccuucuucagcaacgucacgugguuccacgccaucuccgggaccaacggcaccaagcgguucgacaacccggugcugcccuucaacgacgggguguacuucgcgagcaccgagaaguccaacaucauccgcggcuggaucuucgggacgacccucgacagcaagacccagucccugcugaucgucaacaacgccaccaacguggugaucaaggucugcgaguuccaguucugcaacgaccccuuccucggcguguaccacaagaacaacaagagcuggauggaguccgaguuccggguguacagcuccgccaacaacugcacguucgaguacgucagccagcccuuccugauggaccuggagggcaagcaggggaacuucaagaaccuccgcgaguucguguucaagaacaucgacggcuacuucaagaucuacuccaagcacaccccgaucaaccuggugcgggaccugccccagggguucagcgcccucgagccccuggucgaccugcccaucggcaucaacaucacccgcuuccagacccuccuggcccugcaccgguccuaccucacgccgggggacagcagcuccggcuggaccgcgggcgccgccgccuacuacgugggguaccugcagccccgcaccuuccugcucaaguacaacgagaacggcaccaucacggacgcgguggacugcgcccuggacccccugagcgagaccaagugcacccucaaguccuucaccgucgagaaggggaucuaccagacgagcaacuuccgggugcagcccaccgaguccaucgugcgcuucccgaacaucaccaaccugugccccuucggcgaggucuucaacgccacccgguucgccagcguguacgccuggaaccgcaagcggaucuccaacugcgucgcggacuacagcgugcuguacaacuccgccagcuucuccacguucaagugcuacggcgugagccccaccaagcucaacgaccugugcuucaccaacgucuacgccgacuccuucgugauccgcggggacgaggugcggcagaucgcccccggccagaccgggaagaucgccgacuacaacuacaagcugccggacgacuucacgggcugcgucaucgcguggaacagcaacaaccucgacuccaaggucgggggcaacuacaacuaccuguaccgccuguuccgcaagagcaaccucaagcccuucgagcgggacaucuccaccgagaucuaccaggccggcagcacccccugcaacgggguggagggcuucaacugcuacuucccccugcaguccuacggguuccagccgaccuacggcgugggguaccagcccuaccggguggugguccugagcuucgagcuccugcacgcccccgccacggugugcggccccaagaaguccaccaaccuggugaagaacaagugcgucaacuucaacuucaacggccucaccgggaccggcgugcugaccgagagcaacaagaaguuccugccguuccagcaguucgggcgcgacaucgacgacacgaccgacgccgugcgcgacccccagacccuggagauccucgacaucacccccugcagcuucggcggggucuccgugaucacgccgggcaccaacaccagcaaccagguggcgguccuguaccagggcgugaacugcaccgaggugcccgucgccauccacgccgaccagcugacgcccaccuggcggguguacuccaccgggagcaacguguuccagacccgcgccggcugccucaucggggccgagcacgucaacaacuccuacgagugcgacauccccaucggcgcgggcaucugcgccagcuaccagacgcagaccaacucccaccggcgcgcccggagcguggccucccagagcaucaucgcguacaccaugucccugggggccgagaacagcguggccuacuccaacaacagcaucgccaucccgaucaacuucaccaucuccgucacgaccgagauccugcccgugagcaugaccaagaccagcguggacugcacgauguacaucugcggcgacuccaccgagugcagcaaccuccugcugcaguacggguccuucugcacccagcucaaccgcgcccugaccggcaucgcggucgagcaggacaagaacacgcaggagguguucgcccaggugaagcagaucuacaagaccccgcccaucaaggacuucgggggcuucaacuucagccagauccugcccgaccccuccaagcccagcaagcgguccuucaucgaggaccuccuguucaacaaggucacccuggccgacgccggcuucaucaagcaguacggggacugccucggcgacaucgccgcgcgcgaccugaucugcgcccagaaguucaacgggcugaccgugcugcccccgcuccugacggacgagaugaucgcccaguacaccagcgcccuccuggccggcaccaucaccuccggguggacguucggcgcgggcgccgcccugcagauccccuucgccaugcagauggcguaccgguucaacgggaucggcgugacccagaacguccucuacgagaaccagaagcugaucgccaaccaguucaacagcgccaucgggaagauccaggacucccugagcuccaccgccagcgcccucggcaagcugcaggacguggugaaccagaacgcgcaggcccugaacacccucgucaagcagcuguccagcaacuucggggccaucuccagcgugcugaacgacauccucgcccgccuggacccgcccgaggccgaggugcagaucgaccggcugaucacgggccgccuccagucccugcagaccuacgucacccagcagcugauccgggcggccgagauccgcgccagcgccaaccucgccgcgaccaagaugagcgagugcgugcugggccaguccaagcggguggacuucugcgggaagggcuaccaccugaugagcuucccccaguccgcgccccacggggucguguuccuccacgugaccuacguccccgcccaggagaagaacuucacgaccgcccccgccaucugccacgacggcaaggcccacuucccgcgcgaggggguguucgucagcaacggcacccacugguucgugacccagcggaacuucuacgagccccagaucaucacgacccacaacaccuucguguccggcaacugcgacgucgugaucgggaucgugaacaacaccgucuacgacccccugcagcccgagcuggacagcuucaaggaggagcucgacaaguacuucaagaaccacacguccccggacguggaccugggcgacaucagcgggaucaacgccuccguggucaacauccagaaggagaucgaccgccugaacgagguggccaagaaccucaacgagagccugaucgaccugcaggagcucggcaaguacgagcaguacaucaaguggcccugguacaucuggcugggcuucaucgccgggcugaucgcgaucgugauggucaccaucaugcucugcugcaugaccuccugcugcagcugccugaagggcugcugcuccugcgggagcugcugcaaguucgacgaggacgacuccgagcccgugcugaagggcgugaagcuccacuacaccugaggacuaguuauaagacugacuagcccgaugggccucccaacgggcccuccuccccuccuugcaccgagauuaauaaaaaaaaaaaaaaaaaaaaaaaaaaaaaaaaaaaaaaaaaaaaaaaaaaaaaaaaaaaaaaaaaaaaaaaaaaaaaaaaaaaaaaaaaaaaaaaaaaaa

SEQ ID NO: 25528 - RNA, 4011 nt, Artificial Sequence
  SARS-CoV-2/Wuhan/WIV05/2019__EPI_ISL_402128 spike protein mRNA gc (1-1273)(K986P_V987P_K986P_V987P_K417N_E484K_N501Y_D614G)
aggagaaagcuuaccauguucguguuccugguccuccugccccuggugagcucccagugcgugaaccucaccacccgcacgcagcugccgcccgccuacaccaacagcuucacccggggcgucuacuaccccgacaagguguuccgcuccagcgugcugcacuccacccaggaccucuuccugcccuucuucagcaacgucacgugguuccacgccauccacguguccgggaccaacggcaccaagcgguucgacaacccggugcugcccuucaacgacggggucuacuucgcgagcaccgagaaguccaacaucauccgcggcuggaucuucgggacgacccucgacagcaagacccagucccugcugaucgugaacaacgccaccaacguggucaucaaggugugcgaguuccaguucugcaacgaccccuuccucggcguguacuaccacaagaacaacaagagcuggauggaguccgaguuccgggucuacagcuccgccaacaacugcacguucgaguacgugagccagcccuuccugauggaccuggagggcaagcaggggaacuucaagaaccuccgcgaguucguguucaagaacaucgacggcuacuucaagaucuacuccaagcacaccccgaucaaccugguccgggaccugccccagggguucagcgcccucgagccccugguggaccugcccaucggcaucaacaucacccgcuuccagacccuccuggcccugcaccgguccuaccucacgccgggggacagcagcuccggcuggaccgcgggcgccgccgccuacuacgugggguaccugcagccccgcaccuuccugcucaaguacaacgagaacggcaccaucacggacgcggucgacugcgcccuggacccccugagcgagaccaagugcacccucaaguccuucaccguggagaaggggaucuaccagacgagcaacuuccgggugcagcccaccgaguccaucguccgcuucccgaacaucaccaaccugugccccuucggcgagguguucaacgccacccgguucgccagcgucuacgccuggaaccgcaagcggaucuccaacugcguggcggacuacagcgugcuguacaacuccgccagcuucuccacguucaagugcuacggcgucagccccaccaagcucaacgaccugugcuucaccaacguguacgccgacuccuucgugauccgcggggacgagguccggcagaucgcccccggccagaccgggaacaucgccgacuacaacuacaagcugccggacgacuucacgggcugcgugaucgcguggaacagcaacaaccucgacuccaaggucgggggcaacuacaacuaccuguaccgccuguuccgcaagagcaaccucaagcccuucgagcgggacaucuccaccgagaucuaccaggccggcagcacccccugcaacggggugaagggcuucaacugcuacuucccccugcaguccuacggguuccagccgaccuacggcgugggguaccagcccuaccggguggucgugcugagcuucgagcuccugcacgcccccgccacggugugcggccccaagaaguccaccaaccuggucaagaacaagugcgugaacuucaacuucaacggccucaccgggaccggcgugcugaccgagagcaacaagaaguuccugccguuccagcaguucgggcgcgacaucgccgacacgaccgacgcgguccgcgacccccagacccuggagauccucgacaucacccccugcagcuucggcgggguguccgugaucacgccgggcaccaacaccagcaaccaggucgccgugcuguaccagggcgugaacugcaccgagguccccguggccauccacgccgaccagcugacgcccaccuggcggguguacuccaccgggagcaacgucuuccagacccgcgccggcugccucaucggggcggagcacgugaacaacuccuacgagugcgacauccccaucggcgccggcaucugcgccagcuaccagacgcagaccaacuccccgcggcgcgcccggagcguggcgucccagagcaucaucgccuacaccaugucccugggggccgagaacagcgucgccuacuccaacaacagcaucgccauccccaccaacuucacgaucuccgugaccaccgagauccugcccgugagcaugaccaagacgagcgucgacugcaccauguacaucugcggcgacuccaccgagugcagcaaccuccugcugcaguacggguccuucugcacccagcucaaccgcgcgcugacgggcaucgccguggagcaggacaagaacacccaggagguguucgcccaggucaagcagaucuacaagacgcccccgaucaaggacuucgggggcuucaacuucagccagauccugcccgaccccuccaagcccagcaagcgguccuucaucgaggaccuccuguucaacaaggugacccuggccgacgccggcuucaucaagcaguacggggacugccucggcgacaucgcggcccgcgaccugaucugcgcccagaaguucaacgggcugaccgugcucccgccccugcugaccgacgagaugaucgcccaguacaccagcgcccuccuggcgggcaccaucacguccggguggaccuucggcgccggcgccgcccugcagauccccuucgcgaugcagauggccuaccgguucaacgggaucggcgucacccagaacgugcucuacgagaaccagaagcugaucgccaaccaguucaacagcgccaucgggaagauccaggacucccugagcuccaccgccagcgcgcucggcaagcugcaggacguggucaaccagaacgcccaggcccugaacacgcucgugaagcagcuguccagcaacuucggggccaucuccagcgugcugaacgacauccucucccgccuggacccgcccgaggccgagguccagaucgaccggcugaucaccggccgccuccagagccugcagaccuacgugacccagcagcugauccgggcggccgagauccgcgccagcgccaaccucgccgcgaccaagauguccgagugcgugcugggccagagcaagcgggucgacuucugcgggaagggcuaccaccugauguccuucccccagagcgcgccccacggggugguguuccuccacgucacguacgugcccgcccaggagaagaacuucaccaccgccccggccaucugccacgacggcaaggcccacuucccccgcgagggggucuucguguccaacggcacccacugguucgugacgcagcggaacuucuacgagccccagaucaucaccaccgacaacaccuucgucagcggcaacugcgacguggugaucgggaucgucaacaacacgguguacgacccccugcagccggagcuggacuccuucaaggaggagcucgacaaguacuucaagaaccacaccagccccgacguggaccugggcgacaucuccgggaucaacgccagcgucgugaacauccagaaggagaucgaccgccugaacgagguggccaagaaccucaacgagucccugaucgaccugcaggagcucggcaaguacgagcaguacaucaaguggcccugguacaucuggcugggcuucaucgccgggcugaucgcgaucgucauggugaccaucaugcucugcugcaugaccagcugcugcuccugccugaagggcugcugcagcugcggguccugcugcaaguucgacgaggacgacagcgagccggugcugaagggcgucaagcuccacuacacgugaggacuaguuauaagacugacuagcccgaugggccucccaacgggcccuccuccccuccuugcaccgagauuaauaaaaaaaaaaaaaaaaaaaaaaaaaaaaaaaaaaaaaaaaaaaaaaaaaaaaaaaaaaaaaaaaaaaaaaaaaaaaaaaaaaaaaaaaaaaaaaaaaaaa

SEQ ID NO: 25529 - RNA, 4002 nt, Artificial Sequence
  SARS-CoV-2/Wuhan/WIV05/2019__EPI_ISL_402128 spike protein mRNA gc (1-1273)(K986P_V987P_K986P_V987P_L18F_D80A_D215G_L242del_A243del_ L244del_R246I_K417N_E484K_N501Y_D614G_A701V)
aggagaaagcuuaccauguucguguuccugguccuccugccccuggugagcucccagugcgugaacuucaccacccgcacgcagcucccgcccgccuacaccaacagcuucacccggggcgucuacuaccccgacaagguguuccgcuccagcgugcugcacuccacccaggaccuguuccuccccuucuucagcaacgucacgugguuccacgccauccacguguccgggaccaacggcaccaagcgguucgcgaacccggugcugcccuucaacgacggggucuacuucgccagcaccgagaaguccaacaucauccgcggcuggaucuucgggacgacccuggacagcaagacccagucccuccugaucgugaacaacgccaccaacguggucaucaaggugugcgaguuccaguucugcaacgaccccuuccugggcguguacuaccacaagaacaacaagagcuggauggaguccgaguuccgggucuacagcuccgccaacaacugcacguucgaguacgugagccagcccuuccucauggaccuggagggcaagcaggggaacuucaagaaccugcgcgaguucguguucaagaacaucgacggcuacuucaagaucuacuccaagcacaccccgaucaaccucguccgggggcugccccagggcuucagcgcccuggagccccucguggaccugcccaucgggaucaacaucacccgcuuccagacccugcacaucuccuaccucacgccgggcgacagcagcuccggcuggaccgcgggggccgccgccuacuacgugggcuaccugcagccccggaccuuccugcucaaguacaacgagaacgggaccaucacggacgcggucgacugcgcccuggacccccugagcgagaccaagugcacccucaaguccuucaccguggagaagggcaucuaccagacgagcaacuuccgcgugcagcccaccgaguccaucguccgguucccgaacaucaccaaccugugccccuucggcgagguguucaacgccacccgcuucgccagcgucuacgccuggaaccggaagcgcaucuccaacugcguggcggacuacagcgugcuguacaacuccgccagcuucuccacguucaagugcuacggggucagccccaccaagcucaacgaccugugcuucaccaacguguacgccgacuccuucgugauccggggcgacgagguccgccagaucgcccccgggcagaccggcaacaucgccgacuacaacuacaagcugccggacgacuucacggggugcgugaucgcguggaacagcaacaaccucgacuccaaggugggcggcaacuacaacuaccuguaccggcuguuccgcaagagcaaccucaagcccuucgagcgggacaucuccaccgagaucuaccaggccgggagcacccccugcaacggcgucaagggguucaacugcuacuucccccugcaguccuacggcuuccagccgaccuacggggugggcuaccagcccuaccgcguggucgugcugagcuucgagcuccugcacgcccccgccacggugugcggccccaagaaguccaccaaccuggucaagaacaagugcgugaacuucaacuucaacgggcucaccggcaccggggugcugaccgagagcaacaagaaguuccugccguuccagcaguucggccgggacaucgccgacacgaccgacgcgguccgcgacccccagacccucgagauccuggacaucacccccugcagcuucgggggcguguccgugaucacgccgggcaccaacaccagcaaccaggucgccgugcuguaccagggggugaacugcaccgagguccccguggccauccacgccgaccagcugacgcccaccuggcgcguguacuccaccggcagcaacgucuuccagacccgggccgggugccucaucggcgcggagcacgugaacaacuccuacgagugcgacauccccaucggcgccgggaucugcgccagcuaccagacgcagaccaacuccccgcgccgggcccgcagcguggcgucccagagcaucaucgccuacaccaugucccugggcgucgagaacagcguggccuacuccaacaacagcaucgccauccccaccaacuucacgaucuccgugaccaccgagauccugcccgucagcaugaccaagacgagcguggacugcaccauguacaucugcggggacuccaccgagugcagcaaccuccugcugcaguacggcuccuucugcacccagcucaaccgggcccugacggggaucgcgguggagcaggacaagaacacccaggaggucuucgcccaggugaagcagaucuacaagacgcccccgaucaaggacuucggcggcuucaacuucagccagauccugcccgaccccuccaagcccagcaagcgcuccuucaucgaggaccuccuguucaacaaggugacccuggccgacgccggguucaucaagcaguacggcgacugccucggggacaucgccgcgcgggaccugaucugcgcccagaaguucaacggccugaccguccucccgccccugcugaccgacgagaugaucgcccaguacaccagcgcccuccuggccgggaccaucacguccggcuggaccuucggcgcgggggccgcccugcagauccccuucgccaugcagauggcguaccgcuucaacggcaucggggugacccagaacgugcucuacgagaaccagaagcugaucgccaaccaguucaacagcgccaucggcaagauccaggacucccugagcuccaccgccagcgcccucgggaagcugcaggacgucgugaaccagaacgcgcaggcccugaacacgcucgugaagcagcuguccagcaacuucggcgccaucuccagcguccugaacgacauccucucccggcuggacccgcccgaggccgaggugcagaucgaccgccugaucaccggccggcuccagagccugcagaccuacgugacccagcagcugauccgcgccgcggagauccgggccagcgccaaccucgccgccaccaagauguccgagugcguccuggggcagagcaagcgcguggacuucugcggcaagggguaccaccugauguccuucccccagagcgcgccccacggcguggucuuccuccacgugacguacguccccgcccaggagaagaacuucaccaccgccccggccaucugccacgacgggaaggcgcacuucccccgggagggcguguucguguccaacggcacccacugguucgucacgcagcgcaacuucuacgagccccagaucaucaccaccgacaacaccuucgugagcgggaacugcgacguggucaucggcaucgugaacaacacgguguacgacccccugcagccggagcuggacuccuucaaggaggagcucgacaaguacuucaagaaccacaccagccccgacgucgaccugggggacaucuccggcaucaacgccagcguggugaacauccagaaggagaucgaccggcugaacgaggucgccaagaaccucaacgagucccugaucgaccugcaggagcucggcaaguacgagcaguacaucaaguggcccugguacaucuggcugggguucaucgccggccugaucgccaucgugauggugaccaucaugcucugcugcaugaccagcugcugcuccugccugaaggggugcugcagcugcggcuccugcugcaaguucgacgaggacgacagcgagccgguccugaagggggugaagcuccacuacacgugaggacuaguuauaagacugacuagcccgaugggccucccaacgggcccuccuccccuccuugcaccgagauuaauaaaaaaaaaaaaaaaaaaaaaaaaaaaaaaaaaaaaaaaaaaaaaaaaaaaaaaaaaaaaaaaaaaaaaaaaaaaaaaaaaaaaaaaaaaaaaaaaaaaa

SEQ ID NO: 25530 - RNA, 4011 nt, Artificial Sequence
  SARS-CoV-2/Wuhan/WIV05/2019__EPI_ISL_402128 spike protein mRNA gc (1-1273)(K986P_V987P_K986P_V987P_E484K_D614G)
aggagaaagcuuaccauguucguguuccugguccuccugccccuggugagcucccagugcgugaaccucaccacccgcacgcagcugccgcccgccuacaccaacagcuucacccggggcgucuacuaccccgacaagguguuccgcuccagcgugcugcacuccacccaggaccucuuccugcccuucuucagcaacgucacgugguuccacgccauccacguguccgggaccaacggcaccaagcgguucgacaacccggugcugcccuucaacgacggggucuacuucgcgagcaccgagaaguccaacaucauccgcggcuggaucuucgggacgacccucgacagcaagacccagucccugcugaucgugaacaacgccaccaacguggucaucaaggugugcgaguuccaguucugcaacgaccccuuccucggcguguacuaccacaagaacaacaagagcuggauggaguccgaguuccgggucuacagcuccgccaacaacugcacguucgaguacgugagccagcccuuccugauggaccuggagggcaagcaggggaacuucaagaaccuccgcgaguucguguucaagaacaucgacggcuacuucaagaucuacuccaagcacaccccgaucaaccugguccgggaccugccccagggguucagcgcccucgagccccugguggaccugcccaucggcaucaacaucacccgcuuccagacccuccuggcccugcaccgguccuaccucacgccgggggacagcagcuccggcuggaccgcgggcgccgccgccuacuacgugggguaccugcagccccgcaccuuccugcucaaguacaacgagaacggcaccaucacggacgcggucgacugcgcccuggacccccugagcgagaccaagugcacccucaaguccuucaccguggagaaggggaucuaccagacgagcaacuuccgggugcagcccaccgaguccaucguccgcuucccgaacaucaccaaccugugccccuucggcgagguguucaacgccacccgguucgccagcgucuacgccuggaaccgcaagcggaucuccaacugcguggcggacuacagcgugcuguacaacuccgccagcuucuccacguucaagugcuacggcgucagccccaccaagcucaacgaccugugcuucaccaacguguacgccgacuccuucgugauccgcggggacgagguccggcagaucgcccccggccagaccgggaagaucgccgacuacaacuacaagcugccggacgacuucacgggcugcgugaucgcguggaacagcaacaaccucgacuccaaggucgggggcaacuacaacuaccuguaccgccuguuccgcaagagcaaccucaagcccuucgagcgggacaucuccaccgagaucuaccaggccggcagcacccccugcaacggggugaagggcuucaacugcuacuucccccugcaguccuacggguuccagccgaccaacggcgugggguaccagcccuaccggguggucgugcugagcuucgagcuccugcacgcccccgccacggugugcggccccaagaaguccaccaaccuggucaagaacaagugcgugaacuucaacuucaacggccucaccgggaccggcgugcugaccgagagcaacaagaaguuccugccguuccagcaguucgggcgcgacaucgccgacacgaccgacgcgguccgcgacccccagacccuggagauccucgacaucacccccugcagcuucggcgggguguccgugaucacgccgggcaccaacaccagcaaccaggucgccgugcuguaccagggcgugaacugcaccgagguccccguggccauccacgccgaccagcugacgcccaccuggcggguguacuccaccgggagcaacgucuuccagacccgcgccggcugccucaucggggcggagcacgugaacaacuccuacgagugcgacauccccaucggcgccggcaucugcgccagcuaccagacgcagaccaacuccccgcggcgcgcccggagcguggcgucccagagcaucaucgccuacaccaugucccugggggccgagaacagcgucgccuacuccaacaacagcaucgccauccccaccaacuucacgaucuccgugaccaccgagauccugcccgugagcaugaccaagacgagcgucgacugcaccauguacaucugcggcgacuccaccgagugcagcaaccuccugcugcaguacggguccuucugcacccagcucaaccgcgcgcugacgggcaucgccguggagcaggacaagaacacccaggagguguucgcccaggucaagcagaucuacaagacgcccccgaucaaggacuucgggggcuucaacuucagccagauccugcccgaccccuccaagcccagcaagcgguccuucaucgaggaccuccuguucaacaaggugacccuggccgacgccggcuucaucaagcaguacggggacugccucggcgacaucgcggcccgcgaccugaucugcgcccagaaguucaacgggcugaccgugcucccgccccugcugaccgacgagaugaucgcccaguacaccagcgcccuccuggcgggcaccaucacguccggguggaccuucggcgccggcgccgcccugcagauccccuucgcgaugcagauggccuaccgguucaacgggaucggcgucacccagaacgugcucuacgagaaccagaagcugaucgccaaccaguucaacagcgccaucgggaagauccaggacucccugagcuccaccgccagcgcgcucggcaagcugcaggacguggucaaccagaacgcccaggcccugaacacgcucgugaagcagcuguccagcaacuucggggccaucuccagcgugcugaacgacauccucucccgccuggacccgcccgaggccgagguccagaucgaccggcugaucaccggccgccuccagagccugcagaccuacgugacccagcagcugauccgggcggccgagauccgcgccagcgccaaccucgccgcgaccaagauguccgagugcgugcugggccagagcaagcgggucgacuucugcgggaagggcuaccaccugauguccuucccccagagcgcgccccacggggugguguuccuccacgucacguacgugcccgcccaggagaagaacuucaccaccgccccggccaucugccacgacggcaaggcccacuucccccgcgagggggucuucguguccaacggcacccacugguucgugacgcagcggaacuucuacgagccccagaucaucaccaccgacaacaccuucgucagcggcaacugcgacguggugaucgggaucgucaacaacacgguguacgacccccugcagccggagcuggacuccuucaaggaggagcucgacaaguacuucaagaaccacaccagccccgacguggaccugggcgacaucuccgggaucaacgccagcgucgugaacauccagaaggagaucgaccgccugaacgagguggccaagaaccucaacgagucccugaucgaccugcaggagcucggcaaguacgagcaguacaucaaguggcccugguacaucuggcugggcuucaucgccgggcugaucgcgaucgucauggugaccaucaugcucugcugcaugaccagcugcugcuccugccugaagggcugcugcagcugcggguccugcugcaaguucgacgaggacgacagcgagccggugcugaagggcgucaagcuccacuacacgugaggacuaguuauaagacugacuagcccgaugggccucccaacgggcccuccuccccuccuugcaccgagauuaauaaaaaaaaaaaaaaaaaaaaaaaaaaaaaaaaaaaaaaaaaaaaaaaaaaaaaaaaaaaaaaaaaaaaaaaaaaaaaaaaaaaaaaaaaaaaaaaaaaaa

SEQ ID NO: 25531 - RNA, 4011 nt, Artificial Sequence
  SARS-CoV-2/Wuhan/WIV05/2019__EPI_ISL_402128 spike protein mRNA gc (1-1273)(K986P_V987P_K986P_V987P_L18F_T20N_P26S_D138Y_R190S_K417T _E484K_N501Y_D614G_H655Y_T1027I)
aggagaaagcuuaccauguucguguuccugguccuccugccccuggugagcucccagugcgugaacuucaccaaccgcacccagcucccgagcgccuacacgaacuccuucacccggggcgucuacuaccccgacaagguguuccgcagcuccgugcugcacagcacccaggaccuguuccuccccuucuucuccaacgucaccugguuccacgccauccacgugagcgggacgaacggcaccaagcgguucgacaaccccgugcugccguucaacgacggggucuacuucgcguccaccgagaaguccaacaucauccgcggcuggaucuucgggaccacgcuggacuccaagacccagagccuccugaucgugaacaacgccaccaacguggucaucaaggugugcgaguuccaguucugcaacuaccccuuccugggcguguacuaccacaagaacaacaaguccuggauggagagcgaguuccgggucuacuccagcgccaacaacugcaccuucgaguacgugucccagcccuuccucauggaccuggagggcaagcaggggaacuucaagaaccugagcgaguucguguucaagaacaucgacggcuacuucaagaucuacuccaagcacacgcccaucaaccucguccgcgaccugccgcagggguucagcgcccuggagccccucguggaccugcccaucggcaucaacaucacccgguuccagacccugcucgcccugcaccgcagcuaccugacccccggggacuccagcuccggcuggacggcgggcgccgccgccuacuacgugggguaccuccagccgcggaccuuccugcugaaguacaacgagaacggcaccaucaccgacgcggucgacugcgcccucgacccccugagcgagacgaagugcacccugaaguccuucaccguggagaaggggaucuaccagaccagcaacuuccgcgugcagcccacggaguccaucguccgguuccccaacaucaccaaccucugcccguucggcgagguguucaacgccacccgcuucgccagcgucuacgccuggaaccggaagcgcaucuccaacugcguggcggacuacagcgugcuguacaacuccgccagcuucuccaccuucaagugcuacggcgucagccccacgaagcugaacgaccucugcuucaccaacguguacgccgacuccuucgugauccgcggggacgagguccggcagaucgcccccggccagaccgggaccaucgccgacuacaacuacaagcugcccgacgacuucacgggcugcgugaucgcguggaacagcaacaaccuggacuccaaggucgggggcaacuacaacuaccucuaccggcuguuccgcaagagcaaccugaagccguucgagcgggacaucuccaccgagaucuaccaggccggcagcacccccugcaacggggugaagggcuucaacugcuacuucccccuccagagcuacggguuccagcccaccuacggcgugggguaccagccguaccgcguggucgugcuguccuucgagcugcuccacgcccccgccacggugugcggccccaagaaguccaccaaccuggucaagaacaagugcgugaacuucaacuucaacggccugaccgggaccggcgugcucaccgagagcaacaagaaguuccugcccuuccagcaguucgggcgggacaucgccgacacgaccgacgcgguccgcgacccgcagacccuggagauccuggacaucacccccugcagcuucggcgggguguccgugaucacgcccggcaccaacaccagcaaccaggucgccgugcucuaccagggcgugaacugcaccgaggucccgguggccauccacgccgaccagcugacgcccaccuggcgcguguacuccaccgggagcaacgucuuccagacccgggccggcugccugaucggggcggaguacgugaacaacuccuacgagugcgacauccccaucggcgccggcaucugcgccagcuaccagacgcagaccaacagcccccgccgggcccgcagcguggcgucccagagcaucaucgccuacaccaugucccucggggccgagaacagcgucgccuacuccaacaacagcaucgccaucccgaccaacuucacgaucagcgugaccaccgagauccugcccguguccaugaccaagacgagcgucgacugcaccauguacaucugcggcgacuccaccgagugcagcaaccugcuccugcaguacggguccuucugcacccagcugaaccgggcgcucacgggcaucgccguggagcaggacaagaacacccaggagguguucgcccaggucaagcagaucuacaagaccccgcccaucaaggacuucgggggcuucaacuucagccagauccugcccgaccccuccaagcccagcaagcgcuccuucaucgaggaccuccuguucaacaaggugacccuggccgacgccggcuucaucaagcaguacggggacugccugggcgacaucgcggcccgggaccucaucugcgcccagaaguucaacgggcugacggugcugcccccgcuccugaccgacgagaugaucgcccaguacaccagcgcccugcucgcgggcaccaucacguccggguggaccuucggcgccggcgccgcccugcagauccccuucgcgaugcagauggccuaccgcuucaacgggaucggcgucacccagaacgugcuguacgagaaccagaagcucaucgccaaccaguucaacagcgccaucgggaagauccaggacucccugagcuccaccgccagcgcgcugggcaagcuccaggacguggucaaccagaacgcccaggcccugaacacgcuggugaagcagcucuccagcaacuucggggccaucuccagcgugcugaacgacauccugagccggcucgacccgcccgaggccgagguccagaucgaccgccugaucaccggccggcugcagucccuccagaccuacgugacccagcagcugauccgcgcggccgagauccgggccagcgccaaccuggccgcgaucaagauguccgagugcgugcucggccagagcaagcgcgucgacuucugcgggaagggcuaccaccugauguccuucccccagagcgcgccccacggggugguguuccugcacgucaccuacgugcccgcccaggagaagaacuucacgaccgcccccgccaucugccacgacggcaaggcccacuucccgcgggagggggucuucguguccaacggcacccacugguucgugacccagcgcaacuucuacgagccccagaucaucacgaccgacaacaccuucgucagcggcaacugcgacguggugaucgggaucgucaacaacaccguguacgacccccuccagcccgagcuggacuccuucaaggaggagcuggacaaguacuucaagaaccacacgagcccggacguggaccucggcgacaucuccgggaucaacgccagcgucgugaacauccagaaggagaucgaccggcugaacgagguggccaagaaccugaacgagucccucaucgaccugcaggagcugggcaaguacgagcaguacaucaaguggcccugguacaucuggcucggcuucaucgccgggcugaucgcgaucgucauggugaccaucaugcugugcugcaugaccagcugcugcuccugccucaagggcugcugcagcugcggguccugcugcaaguucgacgaggacgacagcgagcccgugcugaagggcgucaagcugcacuacaccugaggacuaguuauaagacugacuagcccgaugggccucccaacgggcccuccuccccuccuugcaccgagauuaauaaaaaaaaaaaaaaaaaaaaaaaaaaaaaaaaaaaaaaaaaaaaaaaaaaaaaaaaaaaaaaaaaaaaaaaaaaaaaaaaaaaaaaaaaaaaaaaaaaaa

SEQ ID NO: 25532 - RNA, 4011 nt, Artificial Sequence
  SARS-CoV-2/Wuhan/WIV05/2019__EPI_ISL_402128 spike protein mRNA gc (1-1273)(K986P_V987P_K986P_V987P_S13I_W152C_L452R_D614G)
aggagaaagcuuaccauguucguguuccugguccuccugccccuggugagcauccagugcgugaaccucaccacccgcacgcagcugccgcccgccuacaccaacuccuucacccggggcgucuacuaccccgacaagguguuccgcagcuccgugcugcacagcacccaggaccucuuccugcccuucuucuccaacgucacgugguuccacgccauccacgugagcgggaccaacggcaccaagcgguucgacaacccggugcugcccuucaacgacggggucuacuucgcguccaccgagaaguccaacaucauccgcggcuggaucuucgggacgacccucgacagcaagacccagagccugcugaucgugaacaacgccaccaacguggucaucaaggugugcgaguuccaguucugcaacgaccccuuccucggcguguacuaccacaagaacaacaaguccugcauggagagcgaguuccgggucuacuccagcgccaacaacugcacguucgaguacgugucccagcccuuccugauggaccuggagggcaagcaggggaacuucaagaaccuccgcgaguucguguucaagaacaucgacggcuacuucaagaucuacagcaagcacaccccgaucaaccugguccgggaccugccccagggguucuccgcccucgagccccugguggaccugcccaucggcaucaacaucacccgcuuccagacccuccuggcccugcaccggagcuaccucacgccgggggacuccagcagcggcuggaccgcgggcgccgccgccuacuacgugggguaccugcagccccgcaccuuccugcucaaguacaacgagaacggcaccaucacggacgcggucgacugcgcccuggacccccuguccgagaccaagugcacccucaagagcuucaccguggagaaggggaucuaccagacguccaacuuccgggugcagcccaccgagagcaucguccgcuucccgaacaucaccaaccugugccccuucggcgagguguucaacgccacccgguucgccuccgucuacgccuggaaccgcaagcggaucagcaacugcguggcggacuacuccgugcuguacaacagcgccuccuucagcacguucaagugcuacggcgucucccccaccaagcucaacgaccugugcuucaccaacguguacgccgacagcuucgugauccgcggggacgagguccggcagaucgcccccggccagaccgggaagaucgccgacuacaacuacaagcugccggacgacuucacgggcugcgugaucgcguggaacuccaacaaccucgacagcaaggucgggggcaacuacaacuaccgcuaccggcuguuccgcaaguccaaccugaagcccuucgagcgggacaucagcaccgagaucuaccaggccggcuccacccccugcaacgggguggagggcuucaacugcuacuucccccuccagagcuacggguuccagccgaccaacggcgugggguaccagcccuaccgcguggucgugcuguccuucgagcugcuccacgcccccgccacggugugcggccccaagaaguccaccaaccuggucaagaacaagugcgugaacuucaacuucaacggccugaccgggaccggcgugcucaccgagagcaacaagaaguuccugccguuccagcaguucgggcgcgacaucgccgacacgaccgacgcgguccgggacccccagacccuggagauccuggacaucacccccugcagcuucggcggggugagcgugaucacgccgggcaccaacaccuccaaccaggucgccgugcucuaccagggcgugaacugcaccgagguccccguggccauccacgccgaccagcugacgcccaccuggcgcguguacagcaccggguccaacgucuuccagacccgggccggcugccugaucggggcggagcacgugaacaacagcuacgagugcgacauccccaucggcgccggcaucugcgccuccuaccagacgcagaccaacagcccgcgccgggcccgcuccguggcgagccaguccaucaucgccuacaccaugagccucggggccgagaacuccgucgccuacagcaacaacuccaucgccauccccaccaacuucacgaucagcgugaccaccgagauccugcccguguccaugaccaagacgagcgucgacugcaccauguacaucugcggcgacagcaccgagugcuccaaccugcuccugcaguacgggagcuucugcacccagcugaaccgggcgcucacgggcaucgccguggagcaggacaagaacacccaggagguguucgcccaggucaagcagaucuacaagacgcccccgaucaaggacuucgggggcuucaacuucucccagauccugcccgaccccagcaagcccuccaagcgcagcuucaucgaggaccuccuguucaacaaggugacccuggccgacgccggcuucaucaagcaguacggggacugccugggcgacaucgcggcccgggaccucaucugcgcccagaaguucaacgggcugaccgugcugccgccccuccugaccgacgagaugaucgcccaguacaccuccgcccugcucgcgggcaccaucacgagcggguggaccuucggcgccggcgccgcccugcagauccccuucgcgaugcagauggccuaccgcuucaacgggaucggcgucacccagaacgugcuguacgagaaccagaagcucaucgccaaccaguucaacuccgccaucgggaagauccaggacagccuguccagcaccgccuccgcgcugggcaagcuccaggacguggucaaccagaacgcccaggcccugaacacgcuggugaagcagcucagcuccaacuucggggccaucagcuccgugcugaacgacauccugagccggcucgacccgcccgaggccgagguccagaucgaccgccugaucaccggccggcugcagucccuccagaccuacgugacccagcagcugauccgcgcggccgagauccgggccagcgccaaccuggccgcgaccaagaugagcgagugcgugcucggccaguccaagcgcgucgacuucugcgggaagggcuaccaccugaugagcuucccccaguccgcgccccacggggugguguuccugcacgucacguacgugcccgcccaggagaagaacuucaccaccgccccggccaucugccacgacggcaaggcccacuucccccgggagggggucuucgugagcaacggcacccacugguucgugacgcagcgcaacuucuacgagccccagaucaucaccaccgacaacaccuucgucuccggcaacugcgacguggugaucgggaucgucaacaacacgguguacgacccccuccagccggagcuggacagcuucaaggaggagcuggacaaguacuucaagaaccacaccucccccgacguggaccucggcgacaucagcgggaucaacgccuccgucgugaacauccagaaggagaucgaccggcugaacgagguggccaagaaccugaacgagagccucaucgaccugcaggagcugggcaaguacgagcaguacaucaaguggcccugguacaucuggcucggcuucaucgccgggcugaucgcgaucgucauggugaccaucaugcugugcugcaugaccuccugcugcagcugccucaagggcugcugcuccugcgggagcugcugcaaguucgacgaggacgacuccgagccggugcugaagggcgucaagcugcacuacacgugaggacuaguuauaagacugacuagcccgaugggccucccaacgggcccuccuccccuccuugcaccgagauuaauaaaaaaaaaaaaaaaaaaaaaaaaaaaaaaaaaaaaaaaaaaaaaaaaaaaaaaaaaaaaaaaaaaaaaaaaaaaaaaaaaaaaaaaaaaaaaaaaaaaa

SEQ ID NO: 25533 - RNA, 4011 nt, Artificial Sequence
  SARS-CoV-2/Wuhan/WIV05/2019__EPI_ISL_402128 spike protein mRNA gc (1-1273)(K986P_V987P)
aggagaaagcuuaccauguucguguuccuggugcugcugccccuggugagcagccagugcgugaaccugaccacccggacccagcugccaccagccuacaccaacagcuucacccggggcgucuacuaccccgacaagguguuccggagcagcguccugcacagcacccaggaccuguuccugcccuucuucagcaacgugaccugguuccacgccauccacgugagcggcaccaacggcaccaagcgguucgacaaccccgugcugcccuucaacgacggcguguacuucgccagcaccgagaagagcaacaucauccggggcuggaucuucggcaccacccuggacagcaagacccagagccugcugaucgugaauaacgccaccaacguggugaucaaggugugcgaguuccaguucugcaacgaccccuuccugggcguguacuaccacaagaacaacaagagcuggauggagagcgaguuccggguguacagcagcgccaacaacugcaccuucgaguacgugagccagcccuuccugauggaccuggagggcaagcagggcaacuucaagaaccugcgggaguucguguucaagaacaucgacggcuacuucaagaucuacagcaagcacaccccaaucaaccuggugcgggaucugccccagggcuucucagcccuggagccccugguggaccugcccaucggcaucaacaucacccgguuccagacccugcuggcccugcaccggagcuaccugaccccaggcgacagcagcagcggguggacagcaggcgcggcugcuuacuacgugggcuaccugcagccccggaccuuccugcugaaguacaacgagaacggcaccaucaccgacgccguggacugcgcccuggacccucugagcgagaccaagugcacccugaagagcuucaccguggagaagggcaucuaccagaccagcaacuuccgggugcagcccaccgagagcaucgugcgguuccccaacaucaccaaccugugccccuucggcgagguguucaacgccacccgguucgccagcguguacgccuggaaccggaagcggaucagcaacugcguggccgacuacagcgugcuguacaacagcgccagcuucagcaccuucaagugcuacggcgugagccccaccaagcugaacgaccugugcuucaccaacguguacgccgacagcuucgugauccguggcgacgaggugcggcagaucgcacccggccagacaggcaagaucgccgacuacaacuacaagcugcccgacgacuucaccggcugcgugaucgccuggaacagcaacaaccucgacagcaaggugggcggcaacuacaacuaccuguaccggcuguuccggaagagcaaccugaagcccuucgagcgggacaucagcaccgagaucuaccaagccggcuccaccccuugcaacggcguggagggcuucaacugcuacuucccucugcagagcuacggcuuccagcccaccaacggcgugggcuaccagcccuaccgggugguggugcugagcuucgagcugcugcacgccccagccaccguguguggccccaagaagagcaccaaccuggugaagaacaagugcgugaacuucaacuucaacggccuuaccggcaccggcgugcugaccgagagcaacaagaaauuccugcccuuucagcaguucggccgggacaucgccgacaccaccgacgcugugcgggauccccagacccuggagauccuggacaucaccccuugcagcuucggcggcgugagcgugaucaccccaggcaccaacaccagcaaccagguggccgugcuguaccaggacgugaacugcaccgaggugcccguggccauccacgccgaccagcugacacccaccuggcgggucuacagcaccggcagcaacguguuccagacccgggccgguugccugaucggcgccgagcacgugaacaacagcuacgagugcgacauccccaucggcgccggcaucugugccagcuaccagacccagaccaauucaccccggagggcaaggagcguggccagccagagcaucaucgccuacaccaugagccugggcgccgagaacagcguggccuacagcaacaacagcaucgccauccccaccaacuucaccaucagcgugaccaccgagauucugcccgugagcaugaccaagaccagcguggacugcaccauguacaucugcggcgacagcaccgagugcagcaaccugcugcugcaguacggcagcuucugcacccagcugaaccgggcccugaccggcaucgccguggagcaggacaagaacacccaggagguguucgcccaggugaagcagaucuacaagaccccucccaucaaggacuucggcggcuucaacuucagccagauccugcccgaccccagcaagcccagcaagcggagcuucaucgaggaccugcuguucaacaaggugacccuagccgacgccggcuucaucaagcaguacggcgacugccucggcgacauagccgcccgggaccugaucugcgcccagaaguucaacggccugaccgugcugccuccccugcugaccgacgagaugaucgcccaguacaccagcgcccuguuagccggaaccaucaccagcggcuggacuuucggcgcuggagccgcucugcagauccccuucgccaugcagauggccuaccgguucaacggcaucggcgugacccagaacgugcuguacgagaaccagaagcugaucgccaaccaguucaacagcgccaucggcaagauccaggacagccugagcagcaccgcuagcgcccugggcaagcugcaggacguggugaaccagaacgcccaggcccugaacacccuggugaagcagcugagcagcaacuucggcgccaucagcagcgugcugaacgacauccugagccggcuggacccucccgaggccgaggugcagaucgaccggcugaucacuggccggcugcagagccugcagaccuacgugacccagcagcugauccgggccgccgagauucgggccagcgccaaccuggccgccaccaagaugagcgagugcgugcugggccagagcaagcggguggacuucugcggcaagggcuaccaccugaugagcuuuccccagagcgcaccccacggagugguguuccugcacgugaccuacgugcccgcccaggagaagaacuucaccaccgccccagccaucugccacgacggcaaggcccacuuuccccgggagggcguguucgugagcaacggcacccacugguucgugacccagcggaacuucuacgagccccagaucaucaccaccgacaacaccuucgugagcggcaacugcgacguggugaucggcaucgugaacaacaccguguacgauccccugcagcccgagcuggacagcuucaaggaggagcuggacaaguacuucaagaaucacaccagccccgacguggaccugggcgacaucagcggcaucaacgccagcguggugaacauccagaaggagaucgaucggcugaacgagguggccaagaaccugaacgagagccugaucgaccugcaggagcugggcaaguacgagcaguacaucaaguggcccugguacaucuggcugggcuucaucgccggccugaucgccaucgugauggugaccaucaugcugugcugcaugaccagcugcugcagcugccugaagggcuguugcagcugcggcagcugcugcaaguucgacgaggacgacagcgagcccgugcugaagggcgugaagcugcacuacaccugaggacuaguuauaagacugacuagcccgaugggccucccaacgggcccuccuccccuccuugcaccgagauuaauaaaaaaaaaaaaaaaaaaaaaaaaaaaaaaaaaaaaaaaaaaaaaaaaaaaaaaaaaaaaaaaaaaaaaaaaaaaaaaaaaaaaaaaaaaaaaaaaaaaa

SEQ ID NO: 25534 - RNA, 4011 nt, Artificial Sequence
  SARS-CoV-2/Wuhan/WIV05/2019__EPI_ISL_402128 spike protein mRNA gc (1-1273)(K986P_V987P_ D614G)
aggagaaagcuuaccauguucguguuccuggugcugcugccccuggugagcagccagugcgugaaccugaccacccggacccagcugccaccagccuacaccaacagcuucacccggggcgucuacuaccccgacaagguguuccggagcagcguccugcacagcacccaggaccuguuccugcccuucuucagcaacgugaccugguuccacgccauccacgugagcggcaccaacggcaccaagcgguucgacaaccccgugcugcccuucaacgacggcguguacuucgccagcaccgagaagagcaacaucauccggggcuggaucuucggcaccacccuggacagcaagacccagagccugcugaucgugaauaacgccaccaacguggugaucaaggugugcgaguuccaguucugcaacgaccccuuccugggcguguacuaccacaagaacaacaagagcuggauggagagcgaguuccggguguacagcagcgccaacaacugcaccuucgaguacgugagccagcccuuccugauggaccuggagggcaagcagggcaacuucaagaaccugcgggaguucguguucaagaacaucgacggcuacuucaagaucuacagcaagcacaccccaaucaaccuggugcgggaucugccccagggcuucucagcccuggagccccugguggaccugcccaucggcaucaacaucacccgguuccagacccugcuggcccugcaccggagcuaccugaccccaggcgacagcagcagcggguggacagcaggcgcggcugcuuacuacgugggcuaccugcagccccggaccuuccugcugaaguacaacgagaacggcaccaucaccgacgccguggacugcgcccuggacccucugagcgagaccaagugcacccugaagagcuucaccguggagaagggcaucuaccagaccagcaacuuccgggugcagcccaccgagagcaucgugcgguuccccaacaucaccaaccugugccccuucggcgagguguucaacgccacccgguucgccagcguguacgccuggaaccggaagcggaucagcaacugcguggccgacuacagcgugcuguacaacagcgccagcuucagcaccuucaagugcuacggcgugagccccaccaagcugaacgaccugugcuucaccaacguguacgccgacagcuucgugauccguggcgacgaggugcggcagaucgcacccggccagacaggcaagaucgccgacuacaacuacaagcugcccgacgacuucaccggcugcgugaucgccuggaacagcaacaaccucgacagcaaggugggcggcaacuacaacuaccuguaccggcuguuccggaagagcaaccugaagcccuucgagcgggacaucagcaccgagaucuaccaagccggcuccaccccuugcaacggcguggagggcuucaacugcuacuucccucugcagagcuacggcuuccagcccaccaacggcgugggcuaccagcccuaccgggugguggugcugagcuucgagcugcugcacgccccagccaccguguguggccccaagaagagcaccaaccuggugaagaacaagugcgugaacuucaacuucaacggccuuaccggcaccggcgugcugaccgagagcaacaagaaauuccugcccuuucagcaguucggccgggacaucgccgacaccaccgacgcugugcgggauccccagacccuggagauccuggacaucaccccuugcagcuucggcggcgugagcgugaucaccccaggcaccaacaccagcaaccagguggccgugcuguaccagggcgugaacugcaccgaggugcccguggccauccacgccgaccagcugacacccaccuggcgggucuacagcaccggcagcaacguguuccagacccgggccgguugccugaucggcgccgagcacgugaacaacagcuacgagugcgacauccccaucggcgccggcaucugugccagcuaccagacccagaccaauucaccccggagggcaaggagcguggccagccagagcaucaucgccuacaccaugagccugggcgccgagaacagcguggccuacagcaacaacagcaucgccauccccaccaacuucaccaucagcgugaccaccgagauucugcccgugagcaugaccaagaccagcguggacugcaccauguacaucugcggcgacagcaccgagugcagcaaccugcugcugcaguacggcagcuucugcacccagcugaaccgggcccugaccggcaucgccguggagcaggacaagaacacccaggagguguucgcccaggugaagcagaucuacaagaccccucccaucaaggacuucggcggcuucaacuucagccagauccugcccgaccccagcaagcccagcaagcggagcuucaucgaggaccugcuguucaacaaggugacccuagccgacgccggcuucaucaagcaguacggcgacugccucggcgacauagccgcccgggaccugaucugcgcccagaaguucaacggccugaccgugcugccuccccugcugaccgacgagaugaucgcccaguacaccagcgcccuguuagccggaaccaucaccagcggcuggacuuucggcgcuggagccgcucugcagauccccuucgccaugcagauggccuaccgguucaacggcaucggcgugacccagaacgugcuguacgagaaccagaagcugaucgccaaccaguucaacagcgccaucggcaagauccaggacagccugagcagcaccgcuagcgcccugggcaagcugcaggacguggugaaccagaacgcccaggcccugaacacccuggugaagcagcugagcagcaacuucggcgccaucagcagcgugcugaacgacauccugagccggcuggacccucccgaggccgaggugcagaucgaccggcugaucacuggccggcugcagagccugcagaccuacgugacccagcagcugauccgggccgccgagauucgggccagcgccaaccuggccgccaccaagaugagcgagugcgugcugggccagagcaagcggguggacuucugcggcaagggcuaccaccugaugagcuuuccccagagcgcaccccacggagugguguuccugcacgugaccuacgugcccgcccaggagaagaacuucaccaccgccccagccaucugccacgacggcaaggcccacuuuccccgggagggcguguucgugagcaacggcacccacugguucgugacccagcggaacuucuacgagccccagaucaucaccaccgacaacaccuucgugagcggcaacugcgacguggugaucggcaucgugaacaacaccguguacgauccccugcagcccgagcuggacagcuucaaggaggagcuggacaaguacuucaagaaucacaccagccccgacguggaccugggcgacaucagcggcaucaacgccagcguggugaacauccagaaggagaucgaucggcugaacgagguggccaagaaccugaacgagagccugaucgaccugcaggagcugggcaaguacgagcaguacaucaaguggcccugguacaucuggcugggcuucaucgccggccugaucgccaucgugauggugaccaucaugcugugcugcaugaccagcugcugcagcugccugaagggcuguugcagcugcggcagcugcugcaaguucgacgaggacgacagcgagcccgugcugaagggcgugaagcugcacuacaccugaggacuaguuauaagacugacuagcccgaugggccucccaacgggcccuccuccccuccuugcaccgagauuaauaaaaaaaaaaaaaaaaaaaaaaaaaaaaaaaaaaaaaaaaaaaaaaaaaaaaaaaaaaaaaaaaaaaaaaaaaaaaaaaaaaaaaaaaaaaaaaaaaaaa

SEQ ID NO: 25535 - RNA, 4011 nt, Artificial Sequence
  SARS-CoV-2/Wuhan/WIV05/2019__EPI_ISL_402128 spike protein mRNA gc (1-1273)(K986P_V987P_A222V_D614G)
aggagaaagcuuaccauguucguguuccuggugcugcugccccuggugagcagccagugcgugaaccugaccacccggacccagcugccaccagccuacaccaacagcuucacccggggcgucuacuaccccgacaagguguuccggagcagcguccugcacagcacccaggaccuguuccugcccuucuucagcaacgugaccugguuccacgccauccacgugagcggcaccaacggcaccaagcgguucgacaaccccgugcugcccuucaacgacggcguguacuucgccagcaccgagaagagcaacaucauccggggcuggaucuucggcaccacccuggacagcaagacccagagccugcugaucgugaauaacgccaccaacguggugaucaaggugugcgaguuccaguucugcaacgaccccuuccugggcguguacuaccacaagaacaacaagagcuggauggagagcgaguuccggguguacagcagcgccaacaacugcaccuucgaguacgugagccagcccuuccugauggaccuggagggcaagcagggcaacuucaagaaccugcgggaguucguguucaagaacaucgacggcuacuucaagaucuacagcaagcacaccccaaucaaccuggugcgggaucugccccagggcuucucagugcuggagccccugguggaccugcccaucggcaucaacaucacccgguuccagacccugcuggcccugcaccggagcuaccugaccccaggcgacagcagcagcggguggacagcaggcgcggcugcuuacuacgugggcuaccugcagccccggaccuuccugcugaaguacaacgagaacggcaccaucaccgacgccguggacugcgcccuggacccucugagcgagaccaagugcacccugaagagcuucaccguggagaagggcaucuaccagaccagcaacuuccgggugcagcccaccgagagcaucgugcgguuccccaacaucaccaaccugugccccuucggcgagguguucaacgccacccgguucgccagcguguacgccuggaaccggaagcggaucagcaacugcguggccgacuacagcgugcuguacaacagcgccagcuucagcaccuucaagugcuacggcgugagccccaccaagcugaacgaccugugcuucaccaacguguacgccgacagcuucgugauccguggcgacgaggugcggcagaucgcacccggccagacaggcaagaucgccgacuacaacuacaagcugcccgacgacuucaccggcugcgugaucgccuggaacagcaacaaccucgacagcaaggugggcggcaacuacaacuaccuguaccggcuguuccggaagagcaaccugaagcccuucgagcgggacaucagcaccgagaucuaccaagccggcuccaccccuugcaacggcguggagggcuucaacugcuacuucccucugcagagcuacggcuuccagcccaccaacggcgugggcuaccagcccuaccgggugguggugcugagcuucgagcugcugcacgccccagccaccguguguggccccaagaagagcaccaaccuggugaagaacaagugcgugaacuucaacuucaacggccuuaccggcaccggcgugcugaccgagagcaacaagaaauuccugcccuuucagcaguucggccgggacaucgccgacaccaccgacgcugugcgggauccccagacccuggagauccuggacaucaccccuugcagcuucggcggcgugagcgugaucaccccaggcaccaacaccagcaaccagguggccgugcuguaccagggcgugaacugcaccgaggugcccguggccauccacgccgaccagcugacacccaccuggcgggucuacagcaccggcagcaacguguuccagacccgggccgguugccugaucggcgccgagcacgugaacaacagcuacgagugcgacauccccaucggcgccggcaucugugccagcuaccagacccagaccaauucaccccggagggcaaggagcguggccagccagagcaucaucgccuacaccaugagccugggcgccgagaacagcguggccuacagcaacaacagcaucgccauccccaccaacuucaccaucagcgugaccaccgagauucugcccgugagcaugaccaagaccagcguggacugcaccauguacaucugcggcgacagcaccgagugcagcaaccugcugcugcaguacggcagcuucugcacccagcugaaccgggcccugaccggcaucgccguggagcaggacaagaacacccaggagguguucgcccaggugaagcagaucuacaagaccccucccaucaaggacuucggcggcuucaacuucagccagauccugcccgaccccagcaagcccagcaagcggagcuucaucgaggaccugcuguucaacaaggugacccuagccgacgccggcuucaucaagcaguacggcgacugccucggcgacauagccgcccgggaccugaucugcgcccagaaguucaacggccugaccgugcugccuccccugcugaccgacgagaugaucgcccaguacaccagcgcccuguuagccggaaccaucaccagcggcuggacuuucggcgcuggagccgcucugcagauccccuucgccaugcagauggccuaccgguucaacggcaucggcgugacccagaacgugcuguacgagaaccagaagcugaucgccaaccaguucaacagcgccaucggcaagauccaggacagccugagcagcaccgcuagcgcccugggcaagcugcaggacguggugaaccagaacgcccaggcccugaacacccuggugaagcagcugagcagcaacuucggcgccaucagcagcgugcugaacgacauccugagccggcuggacccucccgaggccgaggugcagaucgaccggcugaucacuggccggcugcagagccugcagaccuacgugacccagcagcugauccgggccgccgagauucgggccagcgccaaccuggccgccaccaagaugagcgagugcgugcugggccagagcaagcggguggacuucugcggcaagggcuaccaccugaugagcuuuccccagagcgcaccccacggagugguguuccugcacgugaccuacgugcccgcccaggagaagaacuucaccaccgccccagccaucugccacgacggcaaggcccacuuuccccgggagggcguguucgugagcaacggcacccacugguucgugacccagcggaacuucuacgagccccagaucaucaccaccgacaacaccuucgugagcggcaacugcgacguggugaucggcaucgugaacaacaccguguacgauccccugcagcccgagcuggacagcuucaaggaggagcuggacaaguacuucaagaaucacaccagccccgacguggaccugggcgacaucagcggcaucaacgccagcguggugaacauccagaaggagaucgaucggcugaacgagguggccaagaaccugaacgagagccugaucgaccugcaggagcugggcaaguacgagcaguacaucaaguggcccugguacaucuggcugggcuucaucgccggccugaucgccaucgugauggugaccaucaugcugugcugcaugaccagcugcugcagcugccugaagggcuguugcagcugcggcagcugcugcaaguucgacgaggacgacagcgagcccgugcugaagggcgugaagcugcacuacaccugaggacuaguuauaagacugacuagcccgaugggccucccaacgggcccuccuccccuccuugcaccgagauuaauaaaaaaaaaaaaaaaaaaaaaaaaaaaaaaaaaaaaaaaaaaaaaaaaaaaaaaaaaaaaaaaaaaaaaaaaaaaaaaaaaaaaaaaaaaaaaaaaaaaa

SEQ ID NO: 25536 - RNA, 4011 nt, Artificial Sequence
  SARS-CoV-2/Wuhan/WIV05/2019__EPI_ISL_402128 spike protein mRNA gc (1-1273)(K986P_V987P_N439K_D614G)
aggagaaagcuuaccauguucguguuccuggugcugcugccccuggugagcagccagugcgugaaccugaccacccggacccagcugccaccagccuacaccaacagcuucacccggggcgucuacuaccccgacaagguguuccggagcagcguccugcacagcacccaggaccuguuccugcccuucuucagcaacgugaccugguuccacgccauccacgugagcggcaccaacggcaccaagcgguucgacaaccccgugcugcccuucaacgacggcguguacuucgccagcaccgagaagagcaacaucauccggggcuggaucuucggcaccacccuggacagcaagacccagagccugcugaucgugaauaacgccaccaacguggugaucaaggugugcgaguuccaguucugcaacgaccccuuccugggcguguacuaccacaagaacaacaagagcuggauggagagcgaguuccggguguacagcagcgccaacaacugcaccuucgaguacgugagccagcccuuccugauggaccuggagggcaagcagggcaacuucaagaaccugcgggaguucguguucaagaacaucgacggcuacuucaagaucuacagcaagcacaccccaaucaaccuggugcgggaucugccccagggcuucucagcccuggagccccugguggaccugcccaucggcaucaacaucacccgguuccagacccugcuggcccugcaccggagcuaccugaccccaggcgacagcagcagcggguggacagcaggcgcggcugcuuacuacgugggcuaccugcagccccggaccuuccugcugaaguacaacgagaacggcaccaucaccgacgccguggacugcgcccuggacccucugagcgagaccaagugcacccugaagagcuucaccguggagaagggcaucuaccagaccagcaacuuccgggugcagcccaccgagagcaucgugcgguuccccaacaucaccaaccugugccccuucggcgagguguucaacgccacccgguucgccagcguguacgccuggaaccggaagcggaucagcaacugcguggccgacuacagcgugcuguacaacagcgccagcuucagcaccuucaagugcuacggcgugagccccaccaagcugaacgaccugugcuucaccaacguguacgccgacagcuucgugauccguggcgacgaggugcggcagaucgcacccggccagacaggcaagaucgccgacuacaacuacaagcugcccgacgacuucaccggcugcgugaucgccuggaacagcaagaaccucgacagcaaggugggcggcaacuacaacuaccuguaccggcuguuccggaagagcaaccugaagcccuucgagcgggacaucagcaccgagaucuaccaagccggcuccaccccuugcaacggcguggagggcuucaacugcuacuucccucugcagagcuacggcuuccagcccaccaacggcgugggcuaccagcccuaccgggugguggugcugagcuucgagcugcugcacgccccagccaccguguguggccccaagaagagcaccaaccuggugaagaacaagugcgugaacuucaacuucaacggccuuaccggcaccggcgugcugaccgagagcaacaagaaauuccugcccuuucagcaguucggccgggacaucgccgacaccaccgacgcugugcgggauccccagacccuggagauccuggacaucaccccuugcagcuucggcggcgugagcgugaucaccccaggcaccaacaccagcaaccagguggccgugcuguaccagggcgugaacugcaccgaggugcccguggccauccacgccgaccagcugacacccaccuggcgggucuacagcaccggcagcaacguguuccagacccgggccgguugccugaucggcgccgagcacgugaacaacagcuacgagugcgacauccccaucggcgccggcaucugugccagcuaccagacccagaccaauucaccccggagggcaaggagcguggccagccagagcaucaucgccuacaccaugagccugggcgccgagaacagcguggccuacagcaacaacagcaucgccauccccaccaacuucaccaucagcgugaccaccgagauucugcccgugagcaugaccaagaccagcguggacugcaccauguacaucugcggcgacagcaccgagugcagcaaccugcugcugcaguacggcagcuucugcacccagcugaaccgggcccugaccggcaucgccguggagcaggacaagaacacccaggagguguucgcccaggugaagcagaucuacaagaccccucccaucaaggacuucggcggcuucaacuucagccagauccugcccgaccccagcaagcccagcaagcggagcuucaucgaggaccugcuguucaacaaggugacccuagccgacgccggcuucaucaagcaguacggcgacugccucggcgacauagccgcccgggaccugaucugcgcccagaaguucaacggccugaccgugcugccuccccugcugaccgacgagaugaucgcccaguacaccagcgcccuguuagccggaaccaucaccagcggcuggacuuucggcgcuggagccgcucugcagauccccuucgccaugcagauggccuaccgguucaacggcaucggcgugacccagaacgugcuguacgagaaccagaagcugaucgccaaccaguucaacagcgccaucggcaagauccaggacagccugagcagcaccgcuagcgcccugggcaagcugcaggacguggugaaccagaacgcccaggcccugaacacccuggugaagcagcugagcagcaacuucggcgccaucagcagcgugcugaacgacauccugagccggcuggacccucccgaggccgaggugcagaucgaccggcugaucacuggccggcugcagagccugcagaccuacgugacccagcagcugauccgggccgccgagauucgggccagcgccaaccuggccgccaccaagaugagcgagugcgugcugggccagagcaagcggguggacuucugcggcaagggcuaccaccugaugagcuuuccccagagcgcaccccacggagugguguuccugcacgugaccuacgugcccgcccaggagaagaacuucaccaccgccccagccaucugccacgacggcaaggcccacuuuccccgggagggcguguucgugagcaacggcacccacugguucgugacccagcggaacuucuacgagccccagaucaucaccaccgacaacaccuucgugagcggcaacugcgacguggugaucggcaucgugaacaacaccguguacgauccccugcagcccgagcuggacagcuucaaggaggagcuggacaaguacuucaagaaucacaccagccccgacguggaccugggcgacaucagcggcaucaacgccagcguggugaacauccagaaggagaucgaucggcugaacgagguggccaagaaccugaacgagagccugaucgaccugcaggagcugggcaaguacgagcaguacaucaaguggcccugguacaucuggcugggcuucaucgccggccugaucgccaucgugauggugaccaucaugcugugcugcaugaccagcugcugcagcugccugaagggcuguugcagcugcggcagcugcugcaaguucgacgaggacgacagcgagcccgugcugaagggcgugaagcugcacuacaccugaggacuaguuauaagacugacuagcccgaugggccucccaacgggcccuccuccccuccuugcaccgagauuaauaaaaaaaaaaaaaaaaaaaaaaaaaaaaaaaaaaaaaaaaaaaaaaaaaaaaaaaaaaaaaaaaaaaaaaaaaaaaaaaaaaaaaaaaaaaaaaaaaaaa

SEQ ID NO: 25537 - RNA, 4011 nt, Artificial Sequence
  SARS-CoV-2/Wuhan/WIV05/2019__EPI_ISL_402128 spike protein mRNA gc (1-1273)(K986P_V987P_S477N_D614G)
aggagaaagcuuaccauguucguguuccuggugcugcugccccuggugagcagccagugcgugaaccugaccacccggacccagcugccaccagccuacaccaacagcuucacccggggcgucuacuaccccgacaagguguuccggagcagcguccugcacagcacccaggaccuguuccugcccuucuucagcaacgugaccugguuccacgccauccacgugagcggcaccaacggcaccaagcgguucgacaaccccgugcugcccuucaacgacggcguguacuucgccagcaccgagaagagcaacaucauccggggcuggaucuucggcaccacccuggacagcaagacccagagccugcugaucgugaauaacgccaccaacguggugaucaaggugugcgaguuccaguucugcaacgaccccuuccugggcguguacuaccacaagaacaacaagagcuggauggagagcgaguuccggguguacagcagcgccaacaacugcaccuucgaguacgugagccagcccuuccugauggaccuggagggcaagcagggcaacuucaagaaccugcgggaguucguguucaagaacaucgacggcuacuucaagaucuacagcaagcacaccccaaucaaccuggugcgggaucugccccagggcuucucagcccuggagccccugguggaccugcccaucggcaucaacaucacccgguuccagacccugcuggcccugcaccggagcuaccugaccccaggcgacagcagcagcggguggacagcaggcgcggcugcuuacuacgugggcuaccugcagccccggaccuuccugcugaaguacaacgagaacggcaccaucaccgacgccguggacugcgcccuggacccucugagcgagaccaagugcacccugaagagcuucaccguggagaagggcaucuaccagaccagcaacuuccgggugcagcccaccgagagcaucgugcgguuccccaacaucaccaaccugugccccuucggcgagguguucaacgccacccgguucgccagcguguacgccuggaaccggaagcggaucagcaacugcguggccgacuacagcgugcuguacaacagcgccagcuucagcaccuucaagugcuacggcgugagccccaccaagcugaacgaccugugcuucaccaacguguacgccgacagcuucgugauccguggcgacgaggugcggcagaucgcacccggccagacaggcaagaucgccgacuacaacuacaagcugcccgacgacuucaccggcugcgugaucgccuggaacagcaacaaccucgacagcaaggugggcggcaacuacaacuaccuguaccggcuguuccggaagagcaaccugaagcccuucgagcgggacaucagcaccgagaucuaccaagccggcaacaccccuugcaacggcguggagggcuucaacugcuacuucccucugcagagcuacggcuuccagcccaccaacggcgugggcuaccagcccuaccgggugguggugcugagcuucgagcugcugcacgccccagccaccguguguggccccaagaagagcaccaaccuggugaagaacaagugcgugaacuucaacuucaacggccuuaccggcaccggcgugcugaccgagagcaacaagaaauuccugcccuuucagcaguucggccgggacaucgccgacaccaccgacgcugugcgggauccccagacccuggagauccuggacaucaccccuugcagcuucggcggcgugagcgugaucaccccaggcaccaacaccagcaaccagguggccgugcuguaccagggcgugaacugcaccgaggugcccguggccauccacgccgaccagcugacacccaccuggcgggucuacagcaccggcagcaacguguuccagacccgggccgguugccugaucggcgccgagcacgugaacaacagcuacgagugcgacauccccaucggcgccggcaucugugccagcuaccagacccagaccaauucaccccggagggcaaggagcguggccagccagagcaucaucgccuacaccaugagccugggcgccgagaacagcguggccuacagcaacaacagcaucgccauccccaccaacuucaccaucagcgugaccaccgagauucugcccgugagcaugaccaagaccagcguggacugcaccauguacaucugcggcgacagcaccgagugcagcaaccugcugcugcaguacggcagcuucugcacccagcugaaccgggcccugaccggcaucgccguggagcaggacaagaacacccaggagguguucgcccaggugaagcagaucuacaagaccccucccaucaaggacuucggcggcuucaacuucagccagauccugcccgaccccagcaagcccagcaagcggagcuucaucgaggaccugcuguucaacaaggugacccuagccgacgccggcuucaucaagcaguacggcgacugccucggcgacauagccgcccgggaccugaucugcgcccagaaguucaacggccugaccgugcugccuccccugcugaccgacgagaugaucgcccaguacaccagcgcccuguuagccggaaccaucaccagcggcuggacuuucggcgcuggagccgcucugcagauccccuucgccaugcagauggccuaccgguucaacggcaucggcgugacccagaacgugcuguacgagaaccagaagcugaucgccaaccaguucaacagcgccaucggcaagauccaggacagccugagcagcaccgcuagcgcccugggcaagcugcaggacguggugaaccagaacgcccaggcccugaacacccuggugaagcagcugagcagcaacuucggcgccaucagcagcgugcugaacgacauccugagccggcuggacccucccgaggccgaggugcagaucgaccggcugaucacuggccggcugcagagccugcagaccuacgugacccagcagcugauccgggccgccgagauucgggccagcgccaaccuggccgccaccaagaugagcgagugcgugcugggccagagcaagcggguggacuucugcggcaagggcuaccaccugaugagcuuuccccagagcgcaccccacggagugguguuccugcacgugaccuacgugcccgcccaggagaagaacuucaccaccgccccagccaucugccacgacggcaaggcccacuuuccccgggagggcguguucgugagcaacggcacccacugguucgugacccagcggaacuucuacgagccccagaucaucaccaccgacaacaccuucgugagcggcaacugcgacguggugaucggcaucgugaacaacaccguguacgauccccugcagcccgagcuggacagcuucaaggaggagcuggacaaguacuucaagaaucacaccagccccgacguggaccugggcgacaucagcggcaucaacgccagcguggugaacauccagaaggagaucgaucggcugaacgagguggccaagaaccugaacgagagccugaucgaccugcaggagcugggcaaguacgagcaguacaucaaguggcccugguacaucuggcugggcuucaucgccggccugaucgccaucgugauggugaccaucaugcugugcugcaugaccagcugcugcagcugccugaagggcuguugcagcugcggcagcugcugcaaguucgacgaggacgacagcgagcccgugcugaagggcgugaagcugcacuacaccugaggacuaguuauaagacugacuagcccgaugggccucccaacgggcccuccuccccuccuugcaccgagauuaauaaaaaaaaaaaaaaaaaaaaaaaaaaaaaaaaaaaaaaaaaaaaaaaaaaaaaaaaaaaaaaaaaaaaaaaaaaaaaaaaaaaaaaaaaaaaaaaaaaaa

SEQ ID NO: 25538 - RNA, 4011 nt, Artificial Sequence
  SARS-CoV-2/Wuhan/WIV05/2019__EPI_ISL_402128 spike protein mRNA gc (1-1273)(K986P_V987P_N501Y_D614G)
aggagaaagcuuaccauguucguguuccuggugcugcugccccuggugagcagccagugcgugaaccugaccacccggacccagcugccaccagccuacaccaacagcuucacccggggcgucuacuaccccgacaagguguuccggagcagcguccugcacagcacccaggaccuguuccugcccuucuucagcaacgugaccugguuccacgccauccacgugagcggcaccaacggcaccaagcgguucgacaaccccgugcugcccuucaacgacggcguguacuucgccagcaccgagaagagcaacaucauccggggcuggaucuucggcaccacccuggacagcaagacccagagccugcugaucgugaauaacgccaccaacguggugaucaaggugugcgaguuccaguucugcaacgaccccuuccugggcguguacuaccacaagaacaacaagagcuggauggagagcgaguuccggguguacagcagcgccaacaacugcaccuucgaguacgugagccagcccuuccugauggaccuggagggcaagcagggcaacuucaagaaccugcgggaguucguguucaagaacaucgacggcuacuucaagaucuacagcaagcacaccccaaucaaccuggugcgggaucugccccagggcuucucagcccuggagccccugguggaccugcccaucggcaucaacaucacccgguuccagacccugcuggcccugcaccggagcuaccugaccccaggcgacagcagcagcggguggacagcaggcgcggcugcuuacuacgugggcuaccugcagccccggaccuuccugcugaaguacaacgagaacggcaccaucaccgacgccguggacugcgcccuggacccucugagcgagaccaagugcacccugaagagcuucaccguggagaagggcaucuaccagaccagcaacuuccgggugcagcccaccgagagcaucgugcgguuccccaacaucaccaaccugugccccuucggcgagguguucaacgccacccgguucgccagcguguacgccuggaaccggaagcggaucagcaacugcguggccgacuacagcgugcuguacaacagcgccagcuucagcaccuucaagugcuacggcgugagccccaccaagcugaacgaccugugcuucaccaacguguacgccgacagcuucgugauccguggcgacgaggugcggcagaucgcacccggccagacaggcaagaucgccgacuacaacuacaagcugcccgacgacuucaccggcugcgugaucgccuggaacagcaacaaccucgacagcaaggugggcggcaacuacaacuaccuguaccggcuguuccggaagagcaaccugaagcccuucgagcgggacaucagcaccgagaucuaccaagccggcuccaccccuugcaacggcguggagggcuucaacugcuacuucccucugcagagcuacggcuuccagcccaccuacggcgugggcuaccagcccuaccgggugguggugcugagcuucgagcugcugcacgccccagccaccguguguggccccaagaagagcaccaaccuggugaagaacaagugcgugaacuucaacuucaacggccuuaccggcaccggcgugcugaccgagagcaacaagaaauuccugcccuuucagcaguucggccgggacaucgccgacaccaccgacgcugugcgggauccccagacccuggagauccuggacaucaccccuugcagcuucggcggcgugagcgugaucaccccaggcaccaacaccagcaaccagguggccgugcuguaccagggcgugaacugcaccgaggugcccguggccauccacgccgaccagcugacacccaccuggcgggucuacagcaccggcagcaacguguuccagacccgggccgguugccugaucggcgccgagcacgugaacaacagcuacgagugcgacauccccaucggcgccggcaucugugccagcuaccagacccagaccaauucaccccggagggcaaggagcguggccagccagagcaucaucgccuacaccaugagccugggcgccgagaacagcguggccuacagcaacaacagcaucgccauccccaccaacuucaccaucagcgugaccaccgagauucugcccgugagcaugaccaagaccagcguggacugcaccauguacaucugcggcgacagcaccgagugcagcaaccugcugcugcaguacggcagcuucugcacccagcugaaccgggcccugaccggcaucgccguggagcaggacaagaacacccaggagguguucgcccaggugaagcagaucuacaagaccccucccaucaaggacuucggcggcuucaacuucagccagauccugcccgaccccagcaagcccagcaagcggagcuucaucgaggaccugcuguucaacaaggugacccuagccgacgccggcuucaucaagcaguacggcgacugccucggcgacauagccgcccgggaccugaucugcgcccagaaguucaacggccugaccgugcugccuccccugcugaccgacgagaugaucgcccaguacaccagcgcccuguuagccggaaccaucaccagcggcuggacuuucggcgcuggagccgcucugcagauccccuucgccaugcagauggccuaccgguucaacggcaucggcgugacccagaacgugcuguacgagaaccagaagcugaucgccaaccaguucaacagcgccaucggcaagauccaggacagccugagcagcaccgcuagcgcccugggcaagcugcaggacguggugaaccagaacgcccaggcccugaacacccuggugaagcagcugagcagcaacuucggcgccaucagcagcgugcugaacgacauccugagccggcuggacccucccgaggccgaggugcagaucgaccggcugaucacuggccggcugcagagccugcagaccuacgugacccagcagcugauccgggccgccgagauucgggccagcgccaaccuggccgccaccaagaugagcgagugcgugcugggccagagcaagcggguggacuucugcggcaagggcuaccaccugaugagcuuuccccagagcgcaccccacggagugguguuccugcacgugaccuacgugcccgcccaggagaagaacuucaccaccgccccagccaucugccacgacggcaaggcccacuuuccccgggagggcguguucgugagcaacggcacccacugguucgugacccagcggaacuucuacgagccccagaucaucaccaccgacaacaccuucgugagcggcaacugcgacguggugaucggcaucgugaacaacaccguguacgauccccugcagcccgagcuggacagcuucaaggaggagcuggacaaguacuucaagaaucacaccagccccgacguggaccugggcgacaucagcggcaucaacgccagcguggugaacauccagaaggagaucgaucggcugaacgagguggccaagaaccugaacgagagccugaucgaccugcaggagcugggcaaguacgagcaguacaucaaguggcccugguacaucuggcugggcuucaucgccggccugaucgccaucgugauggugaccaucaugcugugcugcaugaccagcugcugcagcugccugaagggcuguugcagcugcggcagcugcugcaaguucgacgaggacgacagcgagcccgugcugaagggcgugaagcugcacuacaccugaggacuaguuauaagacugacuagcccgaugggccucccaacgggcccuccuccccuccuugcaccgagauuaauaaaaaaaaaaaaaaaaaaaaaaaaaaaaaaaaaaaaaaaaaaaaaaaaaaaaaaaaaaaaaaaaaaaaaaaaaaaaaaaaaaaaaaaaaaaaaaaaaaaa

SEQ ID NO: 25539 - RNA, 4005 nt, Artificial Sequence
  SARS-CoV-2/Wuhan/WIV05/2019__EPI_ISL_402128 spike protein mRNA gc (1-1273)(K986P_V987P_H69del_V70del_D614G)
aggagaaagcuuaccauguucguguuccuggugcugcugccccuggugagcagccagugcgugaaccugaccacccggacccagcugccaccagccuacaccaacagcuucacccggggcgucuacuaccccgacaagguguuccggagcagcguccugcacagcacccaggaccuguuccugcccuucuucagcaacgugaccugguuccacgccaucagcggcaccaacggcaccaagcgguucgacaaccccgugcugcccuucaacgacggcguguacuucgccagcaccgagaagagcaacaucauccggggcuggaucuucggcaccacccuggacagcaagacccagagccugcugaucgugaauaacgccaccaacguggugaucaaggugugcgaguuccaguucugcaacgaccccuuccugggcguguacuaccacaagaacaacaagagcuggauggagagcgaguuccggguguacagcagcgccaacaacugcaccuucgaguacgugagccagcccuuccugauggaccuggagggcaagcagggcaacuucaagaaccugcgggaguucguguucaagaacaucgacggcuacuucaagaucuacagcaagcacaccccaaucaaccuggugcgggaucugccccagggcuucucagcccuggagccccugguggaccugcccaucggcaucaacaucacccgguuccagacccugcuggcccugcaccggagcuaccugaccccaggcgacagcagcagcggguggacagcaggcgcggcugcuuacuacgugggcuaccugcagccccggaccuuccugcugaaguacaacgagaacggcaccaucaccgacgccguggacugcgcccuggacccucugagcgagaccaagugcacccugaagagcuucaccguggagaagggcaucuaccagaccagcaacuuccgggugcagcccaccgagagcaucgugcgguuccccaacaucaccaaccugugccccuucggcgagguguucaacgccacccgguucgccagcguguacgccuggaaccggaagcggaucagcaacugcguggccgacuacagcgugcuguacaacagcgccagcuucagcaccuucaagugcuacggcgugagccccaccaagcugaacgaccugugcuucaccaacguguacgccgacagcuucgugauccguggcgacgaggugcggcagaucgcacccggccagacaggcaagaucgccgacuacaacuacaagcugcccgacgacuucaccggcugcgugaucgccuggaacagcaacaaccucgacagcaaggugggcggcaacuacaacuaccuguaccggcuguuccggaagagcaaccugaagcccuucgagcgggacaucagcaccgagaucuaccaagccggcuccaccccuugcaacggcguggagggcuucaacugcuacuucccucugcagagcuacggcuuccagcccaccaacggcgugggcuaccagcccuaccgggugguggugcugagcuucgagcugcugcacgccccagccaccguguguggccccaagaagagcaccaaccuggugaagaacaagugcgugaacuucaacuucaacggccuuaccggcaccggcgugcugaccgagagcaacaagaaauuccugcccuuucagcaguucggccgggacaucgccgacaccaccgacgcugugcgggauccccagacccuggagauccuggacaucaccccuugcagcuucggcggcgugagcgugaucaccccaggcaccaacaccagcaaccagguggccgugcuguaccagggcgugaacugcaccgaggugcccguggccauccacgccgaccagcugacacccaccuggcgggucuacagcaccggcagcaacguguuccagacccgggccgguugccugaucggcgccgagcacgugaacaacagcuacgagugcgacauccccaucggcgccggcaucugugccagcuaccagacccagaccaauucaccccggagggcaaggagcguggccagccagagcaucaucgccuacaccaugagccugggcgccgagaacagcguggccuacagcaacaacagcaucgccauccccaccaacuucaccaucagcgugaccaccgagauucugcccgugagcaugaccaagaccagcguggacugcaccauguacaucugcggcgacagcaccgagugcagcaaccugcugcugcaguacggcagcuucugcacccagcugaaccgggcccugaccggcaucgccguggagcaggacaagaacacccaggagguguucgcccaggugaagcagaucuacaagaccccucccaucaaggacuucggcggcuucaacuucagccagauccugcccgaccccagcaagcccagcaagcggagcuucaucgaggaccugcuguucaacaaggugacccuagccgacgccggcuucaucaagcaguacggcgacugccucggcgacauagccgcccgggaccugaucugcgcccagaaguucaacggccugaccgugcugccuccccugcugaccgacgagaugaucgcccaguacaccagcgcccuguuagccggaaccaucaccagcggcuggacuuucggcgcuggagccgcucugcagauccccuucgccaugcagauggccuaccgguucaacggcaucggcgugacccagaacgugcuguacgagaaccagaagcugaucgccaaccaguucaacagcgccaucggcaagauccaggacagccugagcagcaccgcuagcgcccugggcaagcugcaggacguggugaaccagaacgcccaggcccugaacacccuggugaagcagcugagcagcaacuucggcgccaucagcagcgugcugaacgacauccugagccggcuggacccucccgaggccgaggugcagaucgaccggcugaucacuggccggcugcagagccugcagaccuacgugacccagcagcugauccgggccgccgagauucgggccagcgccaaccuggccgccaccaagaugagcgagugcgugcugggccagagcaagcggguggacuucugcggcaagggcuaccaccugaugagcuuuccccagagcgcaccccacggagugguguuccugcacgugaccuacgugcccgcccaggagaagaacuucaccaccgccccagccaucugccacgacggcaaggcccacuuuccccgggagggcguguucgugagcaacggcacccacugguucgugacccagcggaacuucuacgagccccagaucaucaccaccgacaacaccuucgugagcggcaacugcgacguggugaucggcaucgugaacaacaccguguacgauccccugcagcccgagcuggacagcuucaaggaggagcuggacaaguacuucaagaaucacaccagccccgacguggaccugggcgacaucagcggcaucaacgccagcguggugaacauccagaaggagaucgaucggcugaacgagguggccaagaaccugaacgagagccugaucgaccugcaggagcugggcaaguacgagcaguacaucaaguggcccugguacaucuggcugggcuucaucgccggccugaucgccaucgugauggugaccaucaugcugugcugcaugaccagcugcugcagcugccugaagggcuguugcagcugcggcagcugcugcaaguucgacgaggacgacagcgagcccgugcugaagggcgugaagcugcacuacaccugaggacuaguuauaagacugacuagcccgaugggccucccaacgggcccuccuccccuccuugcaccgagauuaauaaaaaaaaaaaaaaaaaaaaaaaaaaaaaaaaaaaaaaaaaaaaaaaaaaaaaaaaaaaaaaaaaaaaaaaaaaaaaaaaaaaaaaaaaaaaaaaaaaaa

SEQ ID NO: 25540 - RNA, 4011 nt, Artificial Sequence
  SARS-CoV-2/Wuhan/WIV05/2019__EPI_ISL_402128 spike protein mRNA gc (1-1273)(K986P_V987P_Y453F_D614G)
aggagaaagcuuaccauguucguguuccuggugcugcugccccuggugagcagccagugcgugaaccugaccacccggacccagcugccaccagccuacaccaacagcuucacccggggcgucuacuaccccgacaagguguuccggagcagcguccugcacagcacccaggaccuguuccugcccuucuucagcaacgugaccugguuccacgccauccacgugagcggcaccaacggcaccaagcgguucgacaaccccgugcugcccuucaacgacggcguguacuucgccagcaccgagaagagcaacaucauccggggcuggaucuucggcaccacccuggacagcaagacccagagccugcugaucgugaauaacgccaccaacguggugaucaaggugugcgaguuccaguucugcaacgaccccuuccugggcguguacuaccacaagaacaacaagagcuggauggagagcgaguuccggguguacagcagcgccaacaacugcaccuucgaguacgugagccagcccuuccugauggaccuggagggcaagcagggcaacuucaagaaccugcgggaguucguguucaagaacaucgacggcuacuucaagaucuacagcaagcacaccccaaucaaccuggugcgggaucugccccagggcuucucagcccuggagccccugguggaccugcccaucggcaucaacaucacccgguuccagacccugcuggcccugcaccggagcuaccugaccccaggcgacagcagcagcggguggacagcaggcgcggcugcuuacuacgugggcuaccugcagccccggaccuuccugcugaaguacaacgagaacggcaccaucaccgacgccguggacugcgcccuggacccucugagcgagaccaagugcacccugaagagcuucaccguggagaagggcaucuaccagaccagcaacuuccgggugcagcccaccgagagcaucgugcgguuccccaacaucaccaaccugugccccuucggcgagguguucaacgccacccgguucgccagcguguacgccuggaaccggaagcggaucagcaacugcguggccgacuacagcgugcuguacaacagcgccagcuucagcaccuucaagugcuacggcgugagccccaccaagcugaacgaccugugcuucaccaacguguacgccgacagcuucgugauccguggcgacgaggugcggcagaucgcacccggccagacaggcaagaucgccgacuacaacuacaagcugcccgacgacuucaccggcugcgugaucgccuggaacagcaacaaccucgacagcaaggugggcggcaacuacaacuaccuguuccggcuguuccggaagagcaaccugaagcccuucgagcgggacaucagcaccgagaucuaccaagccggcuccaccccuugcaacggcguggagggcuucaacugcuacuucccucugcagagcuacggcuuccagcccaccaacggcgugggcuaccagcccuaccgggugguggugcugagcuucgagcugcugcacgccccagccaccguguguggccccaagaagagcaccaaccuggugaagaacaagugcgugaacuucaacuucaacggccuuaccggcaccggcgugcugaccgagagcaacaagaaauuccugcccuuucagcaguucggccgggacaucgccgacaccaccgacgcugugcgggauccccagacccuggagauccuggacaucaccccuugcagcuucggcggcgugagcgugaucaccccaggcaccaacaccagcaaccagguggccgugcuguaccagggcgugaacugcaccgaggugcccguggccauccacgccgaccagcugacacccaccuggcgggucuacagcaccggcagcaacguguuccagacccgggccgguugccugaucggcgccgagcacgugaacaacagcuacgagugcgacauccccaucggcgccggcaucugugccagcuaccagacccagaccaauucaccccggagggcaaggagcguggccagccagagcaucaucgccuacaccaugagccugggcgccgagaacagcguggccuacagcaacaacagcaucgccauccccaccaacuucaccaucagcgugaccaccgagauucugcccgugagcaugaccaagaccagcguggacugcaccauguacaucugcggcgacagcaccgagugcagcaaccugcugcugcaguacggcagcuucugcacccagcugaaccgggcccugaccggcaucgccguggagcaggacaagaacacccaggagguguucgcccaggugaagcagaucuacaagaccccucccaucaaggacuucggcggcuucaacuucagccagauccugcccgaccccagcaagcccagcaagcggagcuucaucgaggaccugcuguucaacaaggugacccuagccgacgccggcuucaucaagcaguacggcgacugccucggcgacauagccgcccgggaccugaucugcgcccagaaguucaacggccugaccgugcugccuccccugcugaccgacgagaugaucgcccaguacaccagcgcccuguuagccggaaccaucaccagcggcuggacuuucggcgcuggagccgcucugcagauccccuucgccaugcagauggccuaccgguucaacggcaucggcgugacccagaacgugcuguacgagaaccagaagcugaucgccaaccaguucaacagcgccaucggcaagauccaggacagccugagcagcaccgcuagcgcccugggcaagcugcaggacguggugaaccagaacgcccaggcccugaacacccuggugaagcagcugagcagcaacuucggcgccaucagcagcgugcugaacgacauccugagccggcuggacccucccgaggccgaggugcagaucgaccggcugaucacuggccggcugcagagccugcagaccuacgugacccagcagcugauccgggccgccgagauucgggccagcgccaaccuggccgccaccaagaugagcgagugcgugcugggccagagcaagcggguggacuucugcggcaagggcuaccaccugaugagcuuuccccagagcgcaccccacggagugguguuccugcacgugaccuacgugcccgcccaggagaagaacuucaccaccgccccagccaucugccacgacggcaaggcccacuuuccccgggagggcguguucgugagcaacggcacccacugguucgugacccagcggaacuucuacgagccccagaucaucaccaccgacaacaccuucgugagcggcaacugcgacguggugaucggcaucgugaacaacaccguguacgauccccugcagcccgagcuggacagcuucaaggaggagcuggacaaguacuucaagaaucacaccagccccgacguggaccugggcgacaucagcggcaucaacgccagcguggugaacauccagaaggagaucgaucggcugaacgagguggccaagaaccugaacgagagccugaucgaccugcaggagcugggcaaguacgagcaguacaucaaguggcccugguacaucuggcugggcuucaucgccggccugaucgccaucgugauggugaccaucaugcugugcugcaugaccagcugcugcagcugccugaagggcuguugcagcugcggcagcugcugcaaguucgacgaggacgacagcgagcccgugcugaagggcgugaagcugcacuacaccugaggacuaguuauaagacugacuagcccgaugggccucccaacgggcccuccuccccuccuugcaccgagauuaauaaaaaaaaaaaaaaaaaaaaaaaaaaaaaaaaaaaaaaaaaaaaaaaaaaaaaaaaaaaaaaaaaaaaaaaaaaaaaaaaaaaaaaaaaaaaaaaaaaaa

SEQ ID NO: 25541 - RNA, 4011 nt, Artificial Sequence
  SARS-CoV-2/Wuhan/WIV05/2019__EPI_ISL_402128 spike protein mRNA gc (1-1273)(K986P_V987P_D614G_I692V)
aggagaaagcuuaccauguucguguuccuggugcugcugccccuggugagcagccagugcgugaaccugaccacccggacccagcugccaccagccuacaccaacagcuucacccggggcgucuacuaccccgacaagguguuccggagcagcguccugcacagcacccaggaccuguuccugcccuucuucagcaacgugaccugguuccacgccauccacgugagcggcaccaacggcaccaagcgguucgacaaccccgugcugcccuucaacgacggcguguacuucgccagcaccgagaagagcaacaucauccggggcuggaucuucggcaccacccuggacagcaagacccagagccugcugaucgugaauaacgccaccaacguggugaucaaggugugcgaguuccaguucugcaacgaccccuuccugggcguguacuaccacaagaacaacaagagcuggauggagagcgaguuccggguguacagcagcgccaacaacugcaccuucgaguacgugagccagcccuuccugauggaccuggagggcaagcagggcaacuucaagaaccugcgggaguucguguucaagaacaucgacggcuacuucaagaucuacagcaagcacaccccaaucaaccuggugcgggaucugccccagggcuucucagcccuggagccccugguggaccugcccaucggcaucaacaucacccgguuccagacccugcuggcccugcaccggagcuaccugaccccaggcgacagcagcagcggguggacagcaggcgcggcugcuuacuacgugggcuaccugcagccccggaccuuccugcugaaguacaacgagaacggcaccaucaccgacgccguggacugcgcccuggacccucugagcgagaccaagugcacccugaagagcuucaccguggagaagggcaucuaccagaccagcaacuuccgggugcagcccaccgagagcaucgugcgguuccccaacaucaccaaccugugccccuucggcgagguguucaacgccacccgguucgccagcguguacgccuggaaccggaagcggaucagcaacugcguggccgacuacagcgugcuguacaacagcgccagcuucagcaccuucaagugcuacggcgugagccccaccaagcugaacgaccugugcuucaccaacguguacgccgacagcuucgugauccguggcgacgaggugcggcagaucgcacccggccagacaggcaagaucgccgacuacaacuacaagcugcccgacgacuucaccggcugcgugaucgccuggaacagcaacaaccucgacagcaaggugggcggcaacuacaacuaccuguaccggcuguuccggaagagcaaccugaagcccuucgagcgggacaucagcaccgagaucuaccaagccggcuccaccccuugcaacggcguggagggcuucaacugcuacuucccucugcagagcuacggcuuccagcccaccaacggcgugggcuaccagcccuaccgggugguggugcugagcuucgagcugcugcacgccccagccaccguguguggccccaagaagagcaccaaccuggugaagaacaagugcgugaacuucaacuucaacggccuuaccggcaccggcgugcugaccgagagcaacaagaaauuccugcccuuucagcaguucggccgggacaucgccgacaccaccgacgcugugcgggauccccagacccuggagauccuggacaucaccccuugcagcuucggcggcgugagcgugaucaccccaggcaccaacaccagcaaccagguggccgugcuguaccagggcgugaacugcaccgaggugcccguggccauccacgccgaccagcugacacccaccuggcgggucuacagcaccggcagcaacguguuccagacccgggccgguugccugaucggcgccgagcacgugaacaacagcuacgagugcgacauccccaucggcgccggcaucugugccagcuaccagacccagaccaauucaccccggagggcaaggagcguggccagccagagcgugaucgccuacaccaugagccugggcgccgagaacagcguggccuacagcaacaacagcaucgccauccccaccaacuucaccaucagcgugaccaccgagauucugcccgugagcaugaccaagaccagcguggacugcaccauguacaucugcggcgacagcaccgagugcagcaaccugcugcugcaguacggcagcuucugcacccagcugaaccgggcccugaccggcaucgccguggagcaggacaagaacacccaggagguguucgcccaggugaagcagaucuacaagaccccucccaucaaggacuucggcggcuucaacuucagccagauccugcccgaccccagcaagcccagcaagcggagcuucaucgaggaccugcuguucaacaaggugacccuagccgacgccggcuucaucaagcaguacggcgacugccucggcgacauagccgcccgggaccugaucugcgcccagaaguucaacggccugaccgugcugccuccccugcugaccgacgagaugaucgcccaguacaccagcgcccuguuagccggaaccaucaccagcggcuggacuuucggcgcuggagccgcucugcagauccccuucgccaugcagauggccuaccgguucaacggcaucggcgugacccagaacgugcuguacgagaaccagaagcugaucgccaaccaguucaacagcgccaucggcaagauccaggacagccugagcagcaccgcuagcgcccugggcaagcugcaggacguggugaaccagaacgcccaggcccugaacacccuggugaagcagcugagcagcaacuucggcgccaucagcagcgugcugaacgacauccugagccggcuggacccucccgaggccgaggugcagaucgaccggcugaucacuggccggcugcagagccugcagaccuacgugacccagcagcugauccgggccgccgagauucgggccagcgccaaccuggccgccaccaagaugagcgagugcgugcugggccagagcaagcggguggacuucugcggcaagggcuaccaccugaugagcuuuccccagagcgcaccccacggagugguguuccugcacgugaccuacgugcccgcccaggagaagaacuucaccaccgccccagccaucugccacgacggcaaggcccacuuuccccgggagggcguguucgugagcaacggcacccacugguucgugacccagcggaacuucuacgagccccagaucaucaccaccgacaacaccuucgugagcggcaacugcgacguggugaucggcaucgugaacaacaccguguacgauccccugcagcccgagcuggacagcuucaaggaggagcuggacaaguacuucaagaaucacaccagccccgacguggaccugggcgacaucagcggcaucaacgccagcguggugaacauccagaaggagaucgaucggcugaacgagguggccaagaaccugaacgagagccugaucgaccugcaggagcugggcaaguacgagcaguacaucaaguggcccugguacaucuggcugggcuucaucgccggccugaucgccaucgugauggugaccaucaugcugugcugcaugaccagcugcugcagcugccugaagggcuguugcagcugcggcagcugcugcaaguucgacgaggacgacagcgagcccgugcugaagggcgugaagcugcacuacaccugaggacuaguuauaagacugacuagcccgaugggccucccaacgggcccuccuccccuccuugcaccgagauuaauaaaaaaaaaaaaaaaaaaaaaaaaaaaaaaaaaaaaaaaaaaaaaaaaaaaaaaaaaaaaaaaaaaaaaaaaaaaaaaaaaaaaaaaaaaaaaaaaaaaa

SEQ ID NO: 25542 - RNA, 4011 nt, Artificial Sequence
  SARS-CoV-2/Wuhan/WIV05/2019__EPI_ISL_402128 spike protein mRNA gc (1-1273)(K986P_V987P_D614G_M1229I)
aggagaaagcuuaccauguucguguuccuggugcugcugccccuggugagcagccagugcgugaaccugaccacccggacccagcugccaccagccuacaccaacagcuucacccggggcgucuacuaccccgacaagguguuccggagcagcguccugcacagcacccaggaccuguuccugcccuucuucagcaacgugaccugguuccacgccauccacgugagcggcaccaacggcaccaagcgguucgacaaccccgugcugcccuucaacgacggcguguacuucgccagcaccgagaagagcaacaucauccggggcuggaucuucggcaccacccuggacagcaagacccagagccugcugaucgugaauaacgccaccaacguggugaucaaggugugcgaguuccaguucugcaacgaccccuuccugggcguguacuaccacaagaacaacaagagcuggauggagagcgaguuccggguguacagcagcgccaacaacugcaccuucgaguacgugagccagcccuuccugauggaccuggagggcaagcagggcaacuucaagaaccugcgggaguucguguucaagaacaucgacggcuacuucaagaucuacagcaagcacaccccaaucaaccuggugcgggaucugccccagggcuucucagcccuggagccccugguggaccugcccaucggcaucaacaucacccgguuccagacccugcuggcccugcaccggagcuaccugaccccaggcgacagcagcagcggguggacagcaggcgcggcugcuuacuacgugggcuaccugcagccccggaccuuccugcugaaguacaacgagaacggcaccaucaccgacgccguggacugcgcccuggacccucugagcgagaccaagugcacccugaagagcuucaccguggagaagggcaucuaccagaccagcaacuuccgggugcagcccaccgagagcaucgugcgguuccccaacaucaccaaccugugccccuucggcgagguguucaacgccacccgguucgccagcguguacgccuggaaccggaagcggaucagcaacugcguggccgacuacagcgugcuguacaacagcgccagcuucagcaccuucaagugcuacggcgugagccccaccaagcugaacgaccugugcuucaccaacguguacgccgacagcuucgugauccguggcgacgaggugcggcagaucgcacccggccagacaggcaagaucgccgacuacaacuacaagcugcccgacgacuucaccggcugcgugaucgccuggaacagcaacaaccucgacagcaaggugggcggcaacuacaacuaccuguaccggcuguuccggaagagcaaccugaagcccuucgagcgggacaucagcaccgagaucuaccaagccggcuccaccccuugcaacggcguggagggcuucaacugcuacuucccucugcagagcuacggcuuccagcccaccaacggcgugggcuaccagcccuaccgggugguggugcugagcuucgagcugcugcacgccccagccaccguguguggccccaagaagagcaccaaccuggugaagaacaagugcgugaacuucaacuucaacggccuuaccggcaccggcgugcugaccgagagcaacaagaaauuccugcccuuucagcaguucggccgggacaucgccgacaccaccgacgcugugcgggauccccagacccuggagauccuggacaucaccccuugcagcuucggcggcgugagcgugaucaccccaggcaccaacaccagcaaccagguggccgugcuguaccagggcgugaacugcaccgaggugcccguggccauccacgccgaccagcugacacccaccuggcgggucuacagcaccggcagcaacguguuccagacccgggccgguugccugaucggcgccgagcacgugaacaacagcuacgagugcgacauccccaucggcgccggcaucugugccagcuaccagacccagaccaauucaccccggagggcaaggagcguggccagccagagcaucaucgccuacaccaugagccugggcgccgagaacagcguggccuacagcaacaacagcaucgccauccccaccaacuucaccaucagcgugaccaccgagauucugcccgugagcaugaccaagaccagcguggacugcaccauguacaucugcggcgacagcaccgagugcagcaaccugcugcugcaguacggcagcuucugcacccagcugaaccgggcccugaccggcaucgccguggagcaggacaagaacacccaggagguguucgcccaggugaagcagaucuacaagaccccucccaucaaggacuucggcggcuucaacuucagccagauccugcccgaccccagcaagcccagcaagcggagcuucaucgaggaccugcuguucaacaaggugacccuagccgacgccggcuucaucaagcaguacggcgacugccucggcgacauagccgcccgggaccugaucugcgcccagaaguucaacggccugaccgugcugccuccccugcugaccgacgagaugaucgcccaguacaccagcgcccuguuagccggaaccaucaccagcggcuggacuuucggcgcuggagccgcucugcagauccccuucgccaugcagauggccuaccgguucaacggcaucggcgugacccagaacgugcuguacgagaaccagaagcugaucgccaaccaguucaacagcgccaucggcaagauccaggacagccugagcagcaccgcuagcgcccugggcaagcugcaggacguggugaaccagaacgcccaggcccugaacacccuggugaagcagcugagcagcaacuucggcgccaucagcagcgugcugaacgacauccugagccggcuggacccucccgaggccgaggugcagaucgaccggcugaucacuggccggcugcagagccugcagaccuacgugacccagcagcugauccgggccgccgagauucgggccagcgccaaccuggccgccaccaagaugagcgagugcgugcugggccagagcaagcggguggacuucugcggcaagggcuaccaccugaugagcuuuccccagagcgcaccccacggagugguguuccugcacgugaccuacgugcccgcccaggagaagaacuucaccaccgccccagccaucugccacgacggcaaggcccacuuuccccgggagggcguguucgugagcaacggcacccacugguucgugacccagcggaacuucuacgagccccagaucaucaccaccgacaacaccuucgugagcggcaacugcgacguggugaucggcaucgugaacaacaccguguacgauccccugcagcccgagcuggacagcuucaaggaggagcuggacaaguacuucaagaaucacaccagccccgacguggaccugggcgacaucagcggcaucaacgccagcguggugaacauccagaaggagaucgaucggcugaacgagguggccaagaaccugaacgagagccugaucgaccugcaggagcugggcaaguacgagcaguacaucaaguggcccugguacaucuggcugggcuucaucgccggccugaucgccaucgugaucgugaccaucaugcugugcugcaugaccagcugcugcagcugccugaagggcuguugcagcugcggcagcugcugcaaguucgacgaggacgacagcgagcccgugcugaagggcgugaagcugcacuacaccugaggacuaguuauaagacugacuagcccgaugggccucccaacgggcccuccuccccuccuugcaccgagauuaauaaaaaaaaaaaaaaaaaaaaaaaaaaaaaaaaaaaaaaaaaaaaaaaaaaaaaaaaaaaaaaaaaaaaaaaaaaaaaaaaaaaaaaaaaaaaaaaaaaaa

SEQ ID NO: 25543 - RNA, 4005 nt, Artificial Sequence
  SARS-CoV-2/Wuhan/WIV05/2019__EPI_ISL_402128 spike protein mRNA gc (1-1273)(K986P_V987P_H69del_V70del_A222V_Y453F_S477N_D614G_I692V)
aggagaaagcuuaccauguucguguuccuggugcugcugccccuggugagcagccagugcgugaaccugaccacccggacccagcugccaccagccuacaccaacagcuucacccggggcgucuacuaccccgacaagguguuccggagcagcguccugcacagcacccaggaccuguuccugcccuucuucagcaacgugaccugguuccacgccaucagcggcaccaacggcaccaagcgguucgacaaccccgugcugcccuucaacgacggcguguacuucgccagcaccgagaagagcaacaucauccggggcuggaucuucggcaccacccuggacagcaagacccagagccugcugaucgugaauaacgccaccaacguggugaucaaggugugcgaguuccaguucugcaacgaccccuuccugggcguguacuaccacaagaacaacaagagcuggauggagagcgaguuccggguguacagcagcgccaacaacugcaccuucgaguacgugagccagcccuuccugauggaccuggagggcaagcagggcaacuucaagaaccugcgggaguucguguucaagaacaucgacggcuacuucaagaucuacagcaagcacaccccaaucaaccuggugcgggaucugccccagggcuucucagugcuggagccccugguggaccugcccaucggcaucaacaucacccgguuccagacccugcuggcccugcaccggagcuaccugaccccaggcgacagcagcagcggguggacagcaggcgcggcugcuuacuacgugggcuaccugcagccccggaccuuccugcugaaguacaacgagaacggcaccaucaccgacgccguggacugcgcccuggacccucugagcgagaccaagugcacccugaagagcuucaccguggagaagggcaucuaccagaccagcaacuuccgggugcagcccaccgagagcaucgugcgguuccccaacaucaccaaccugugccccuucggcgagguguucaacgccacccgguucgccagcguguacgccuggaaccggaagcggaucagcaacugcguggccgacuacagcgugcuguacaacagcgccagcuucagcaccuucaagugcuacggcgugagccccaccaagcugaacgaccugugcuucaccaacguguacgccgacagcuucgugauccguggcgacgaggugcggcagaucgcacccggccagacaggcaagaucgccgacuacaacuacaagcugcccgacgacuucaccggcugcgugaucgccuggaacagcaacaaccucgacagcaaggugggcggcaacuacaacuaccuguuccggcuguuccggaagagcaaccugaagcccuucgagcgggacaucagcaccgagaucuaccaagccggcaacaccccuugcaacggcguggagggcuucaacugcuacuucccucugcagagcuacggcuuccagcccaccaacggcgugggcuaccagcccuaccgggugguggugcugagcuucgagcugcugcacgccccagccaccguguguggccccaagaagagcaccaaccuggugaagaacaagugcgugaacuucaacuucaacggccuuaccggcaccggcgugcugaccgagagcaacaagaaauuccugcccuuucagcaguucggccgggacaucgccgacaccaccgacgcugugcgggauccccagacccuggagauccuggacaucaccccuugcagcuucggcggcgugagcgugaucaccccaggcaccaacaccagcaaccagguggccgugcuguaccagggcgugaacugcaccgaggugcccguggccauccacgccgaccagcugacacccaccuggcgggucuacagcaccggcagcaacguguuccagacccgggccgguugccugaucggcgccgagcacgugaacaacagcuacgagugcgacauccccaucggcgccggcaucugugccagcuaccagacccagaccaauucaccccggagggcaaggagcguggccagccagagcgugaucgccuacaccaugagccugggcgccgagaacagcguggccuacagcaacaacagcaucgccauccccaccaacuucaccaucagcgugaccaccgagauucugcccgugagcaugaccaagaccagcguggacugcaccauguacaucugcggcgacagcaccgagugcagcaaccugcugcugcaguacggcagcuucugcacccagcugaaccgggcccugaccggcaucgccguggagcaggacaagaacacccaggagguguucgcccaggugaagcagaucuacaagaccccucccaucaaggacuucggcggcuucaacuucagccagauccugcccgaccccagcaagcccagcaagcggagcuucaucgaggaccugcuguucaacaaggugacccuagccgacgccggcuucaucaagcaguacggcgacugccucggcgacauagccgcccgggaccugaucugcgcccagaaguucaacggccugaccgugcugccuccccugcugaccgacgagaugaucgcccaguacaccagcgcccuguuagccggaaccaucaccagcggcuggacuuucggcgcuggagccgcucugcagauccccuucgccaugcagauggccuaccgguucaacggcaucggcgugacccagaacgugcuguacgagaaccagaagcugaucgccaaccaguucaacagcgccaucggcaagauccaggacagccugagcagcaccgcuagcgcccugggcaagcugcaggacguggugaaccagaacgcccaggcccugaacacccuggugaagcagcugagcagcaacuucggcgccaucagcagcgugcugaacgacauccugagccggcuggacccucccgaggccgaggugcagaucgaccggcugaucacuggccggcugcagagccugcagaccuacgugacccagcagcugauccgggccgccgagauucgggccagcgccaaccuggccgccaccaagaugagcgagugcgugcugggccagagcaagcggguggacuucugcggcaagggcuaccaccugaugagcuuuccccagagcgcaccccacggagugguguuccugcacgugaccuacgugcccgcccaggagaagaacuucaccaccgccccagccaucugccacgacggcaaggcccacuuuccccgggagggcguguucgugagcaacggcacccacugguucgugacccagcggaacuucuacgagccccagaucaucaccaccgacaacaccuucgugagcggcaacugcgacguggugaucggcaucgugaacaacaccguguacgauccccugcagcccgagcuggacagcuucaaggaggagcuggacaaguacuucaagaaucacaccagccccgacguggaccugggcgacaucagcggcaucaacgccagcguggugaacauccagaaggagaucgaucggcugaacgagguggccaagaaccugaacgagagccugaucgaccugcaggagcugggcaaguacgagcaguacaucaaguggcccugguacaucuggcugggcuucaucgccggccugaucgccaucgugauggugaccaucaugcugugcugcaugaccagcugcugcagcugccugaagggcuguugcagcugcggcagcugcugcaaguucgacgaggacgacagcgagcccgugcugaagggcgugaagcugcacuacaccugaggacuaguuauaagacugacuagcccgaugggccucccaacgggcccuccuccccuccuugcaccgagauuaauaaaaaaaaaaaaaaaaaaaaaaaaaaaaaaaaaaaaaaaaaaaaaaaaaaaaaaaaaaaaaaaaaaaaaaaaaaaaaaaaaaaaaaaaaaaaaaaaaaaa

SEQ ID NO: 25544 - RNA, 4005 nt, Artificial Sequence
  SARS-CoV-2/Wuhan/WIV05/2019__EPI_ISL_402128 spike protein mRNA gc (1-1273)(K986P_V987P_H69del_V70del_Y453F_D614G_I692V_M1229I)
aggagaaagcuuaccauguucguguuccuggugcugcugccccuggugagcagccagugcgugaaccugaccacccggacccagcugccaccagccuacaccaacagcuucacccggggcgucuacuaccccgacaagguguuccggagcagcguccugcacagcacccaggaccuguuccugcccuucuucagcaacgugaccugguuccacgccaucagcggcaccaacggcaccaagcgguucgacaaccccgugcugcccuucaacgacggcguguacuucgccagcaccgagaagagcaacaucauccggggcuggaucuucggcaccacccuggacagcaagacccagagccugcugaucgugaauaacgccaccaacguggugaucaaggugugcgaguuccaguucugcaacgaccccuuccugggcguguacuaccacaagaacaacaagagcuggauggagagcgaguuccggguguacagcagcgccaacaacugcaccuucgaguacgugagccagcccuuccugauggaccuggagggcaagcagggcaacuucaagaaccugcgggaguucguguucaagaacaucgacggcuacuucaagaucuacagcaagcacaccccaaucaaccuggugcgggaucugccccagggcuucucagcccuggagccccugguggaccugcccaucggcaucaacaucacccgguuccagacccugcuggcccugcaccggagcuaccugaccccaggcgacagcagcagcggguggacagcaggcgcggcugcuuacuacgugggcuaccugcagccccggaccuuccugcugaaguacaacgagaacggcaccaucaccgacgccguggacugcgcccuggacccucugagcgagaccaagugcacccugaagagcuucaccguggagaagggcaucuaccagaccagcaacuuccgggugcagcccaccgagagcaucgugcgguuccccaacaucaccaaccugugccccuucggcgagguguucaacgccacccgguucgccagcguguacgccuggaaccggaagcggaucagcaacugcguggccgacuacagcgugcuguacaacagcgccagcuucagcaccuucaagugcuacggcgugagccccaccaagcugaacgaccugugcuucaccaacguguacgccgacagcuucgugauccguggcgacgaggugcggcagaucgcacccggccagacaggcaagaucgccgacuacaacuacaagcugcccgacgacuucaccggcugcgugaucgccuggaacagcaacaaccucgacagcaaggugggcggcaacuacaacuaccuguuccggcuguuccggaagagcaaccugaagcccuucgagcgggacaucagcaccgagaucuaccaagccggcuccaccccuugcaacggcguggagggcuucaacugcuacuucccucugcagagcuacggcuuccagcccaccaacggcgugggcuaccagcccuaccgggugguggugcugagcuucgagcugcugcacgccccagccaccguguguggccccaagaagagcaccaaccuggugaagaacaagugcgugaacuucaacuucaacggccuuaccggcaccggcgugcugaccgagagcaacaagaaauuccugcccuuucagcaguucggccgggacaucgccgacaccaccgacgcugugcgggauccccagacccuggagauccuggacaucaccccuugcagcuucggcggcgugagcgugaucaccccaggcaccaacaccagcaaccagguggccgugcuguaccagggcgugaacugcaccgaggugcccguggccauccacgccgaccagcugacacccaccuggcgggucuacagcaccggcagcaacguguuccagacccgggccgguugccugaucggcgccgagcacgugaacaacagcuacgagugcgacauccccaucggcgccggcaucugugccagcuaccagacccagaccaauucaccccggagggcaaggagcguggccagccagagcgugaucgccuacaccaugagccugggcgccgagaacagcguggccuacagcaacaacagcaucgccauccccaccaacuucaccaucagcgugaccaccgagauucugcccgugagcaugaccaagaccagcguggacugcaccauguacaucugcggcgacagcaccgagugcagcaaccugcugcugcaguacggcagcuucugcacccagcugaaccgggcccugaccggcaucgccguggagcaggacaagaacacccaggagguguucgcccaggugaagcagaucuacaagaccccucccaucaaggacuucggcggcuucaacuucagccagauccugcccgaccccagcaagcccagcaagcggagcuucaucgaggaccugcuguucaacaaggugacccuagccgacgccggcuucaucaagcaguacggcgacugccucggcgacauagccgcccgggaccugaucugcgcccagaaguucaacggccugaccgugcugccuccccugcugaccgacgagaugaucgcccaguacaccagcgcccuguuagccggaaccaucaccagcggcuggacuuucggcgcuggagccgcucugcagauccccuucgccaugcagauggccuaccgguucaacggcaucggcgugacccagaacgugcuguacgagaaccagaagcugaucgccaaccaguucaacagcgccaucggcaagauccaggacagccugagcagcaccgcuagcgcccugggcaagcugcaggacguggugaaccagaacgcccaggcccugaacacccuggugaagcagcugagcagcaacuucggcgccaucagcagcgugcugaacgacauccugagccggcuggacccucccgaggccgaggugcagaucgaccggcugaucacuggccggcugcagagccugcagaccuacgugacccagcagcugauccgggccgccgagauucgggccagcgccaaccuggccgccaccaagaugagcgagugcgugcugggccagagcaagcggguggacuucugcggcaagggcuaccaccugaugagcuuuccccagagcgcaccccacggagugguguuccugcacgugaccuacgugcccgcccaggagaagaacuucaccaccgccccagccaucugccacgacggcaaggcccacuuuccccgggagggcguguucgugagcaacggcacccacugguucgugacccagcggaacuucuacgagccccagaucaucaccaccgacaacaccuucgugagcggcaacugcgacguggugaucggcaucgugaacaacaccguguacgauccccugcagcccgagcuggacagcuucaaggaggagcuggacaaguacuucaagaaucacaccagccccgacguggaccugggcgacaucagcggcaucaacgccagcguggugaacauccagaaggagaucgaucggcugaacgagguggccaagaaccugaacgagagccugaucgaccugcaggagcugggcaaguacgagcaguacaucaaguggcccugguacaucuggcugggcuucaucgccggccugaucgccaucgugaucgugaccaucaugcugugcugcaugaccagcugcugcagcugccugaagggcuguugcagcugcggcagcugcugcaaguucgacgaggacgacagcgagcccgugcugaagggcgugaagcugcacuacaccugaggacuaguuauaagacugacuagcccgaugggccucccaacgggcccuccuccccuccuugcaccgagauuaauaaaaaaaaaaaaaaaaaaaaaaaaaaaaaaaaaaaaaaaaaaaaaaaaaaaaaaaaaaaaaaaaaaaaaaaaaaaaaaaaaaaaaaaaaaaaaaaaaaaa

SEQ ID NO: 25545 - RNA, 4002 nt, Artificial Sequence
  SARS-CoV-2/Wuhan/WIV05/2019__EPI_ISL_402128 spike protein mRNA gc (1-1273)(K986P_V987P_K986P_V987P_H69del_V70del_Y144del_N501Y_A570 D_D614G_P681H_T716I_S982A_D1118H)
aggagaaagcuuaccauguucguguuccuggugcugcugccccuggugagcagccagugcgugaaccugaccacccggacccagcugccaccagccuacaccaacagcuucacccggggcgucuacuaccccgacaagguguuccggagcagcguccugcacagcacccaggaccuguuccugcccuucuucagcaacgugaccugguuccacgccaucagcggcaccaacggcaccaagcgguucgacaaccccgugcugcccuucaacgacggcguguacuucgccagcaccgagaagagcaacaucauccggggcuggaucuucggcaccacccuggacagcaagacccagagccugcugaucgugaauaacgccaccaacguggugaucaaggugugcgaguuccaguucugcaacgaccccuuccugggcguguaccacaagaacaacaagagcuggauggagagcgaguuccggguguacagcagcgccaacaacugcaccuucgaguacgugagccagcccuuccugauggaccuggagggcaagcagggcaacuucaagaaccugcgggaguucguguucaagaacaucgacggcuacuucaagaucuacagcaagcacaccccaaucaaccuggugcgggaucugccccagggcuucucagcccuggagccccugguggaccugcccaucggcaucaacaucacccgguuccagacccugcuggcccugcaccggagcuaccugaccccaggcgacagcagcagcggguggacagcaggcgcggcugcuuacuacgugggcuaccugcagccccggaccuuccugcugaaguacaacgagaacggcaccaucaccgacgccguggacugcgcccuggacccucugagcgagaccaagugcacccugaagagcuucaccguggagaagggcaucuaccagaccagcaacuuccgggugcagcccaccgagagcaucgugcgguuccccaacaucaccaaccugugccccuucggcgagguguucaacgccacccgguucgccagcguguacgccuggaaccggaagcggaucagcaacugcguggccgacuacagcgugcuguacaacagcgccagcuucagcaccuucaagugcuacggcgugagccccaccaagcugaacgaccugugcuucaccaacguguacgccgacagcuucgugauccguggcgacgaggugcggcagaucgcacccggccagacaggcaagaucgccgacuacaacuacaagcugcccgacgacuucaccggcugcgugaucgccuggaacagcaacaaccucgacagcaaggugggcggcaacuacaacuaccuguaccggcuguuccggaagagcaaccugaagcccuucgagcgggacaucagcaccgagaucuaccaagccggcuccaccccuugcaacggcguggagggcuucaacugcuacuucccucugcagagcuacggcuuccagcccaccuacggcgugggcuaccagcccuaccgggugguggugcugagcuucgagcugcugcacgccccagccaccguguguggccccaagaagagcaccaaccuggugaagaacaagugcgugaacuucaacuucaacggccuuaccggcaccggcgugcugaccgagagcaacaagaaauuccugcccuuucagcaguucggccgggacaucgacgacaccaccgacgcugugcgggauccccagacccuggagauccuggacaucaccccuugcagcuucggcggcgugagcgugaucaccccaggcaccaacaccagcaaccagguggccgugcuguaccagggcgugaacugcaccgaggugcccguggccauccacgccgaccagcugacacccaccuggcgggucuacagcaccggcagcaacguguuccagacccgggccgguugccugaucggcgccgagcacgugaacaacagcuacgagugcgacauccccaucggcgccggcaucugugccagcuaccagacccagaccaauucacaccggagggcaaggagcguggccagccagagcaucaucgccuacaccaugagccugggcgccgagaacagcguggccuacagcaacaacagcaucgccauccccaucaacuucaccaucagcgugaccaccgagauucugcccgugagcaugaccaagaccagcguggacugcaccauguacaucugcggcgacagcaccgagugcagcaaccugcugcugcaguacggcagcuucugcacccagcugaaccgggcccugaccggcaucgccguggagcaggacaagaacacccaggagguguucgcccaggugaagcagaucuacaagaccccucccaucaaggacuucggcggcuucaacuucagccagauccugcccgaccccagcaagcccagcaagcggagcuucaucgaggaccugcuguucaacaaggugacccuagccgacgccggcuucaucaagcaguacggcgacugccucggcgacauagccgcccgggaccugaucugcgcccagaaguucaacggccugaccgugcugccuccccugcugaccgacgagaugaucgcccaguacaccagcgcccuguuagccggaaccaucaccagcggcuggacuuucggcgcuggagccgcucugcagauccccuucgccaugcagauggccuaccgguucaacggcaucggcgugacccagaacgugcuguacgagaaccagaagcugaucgccaaccaguucaacagcgccaucggcaagauccaggacagccugagcagcaccgcuagcgcccugggcaagcugcaggacguggugaaccagaacgcccaggcccugaacacccuggugaagcagcugagcagcaacuucggcgccaucagcagcgugcugaacgacauccuggcccggcuggacccucccgaggccgaggugcagaucgaccggcugaucacuggccggcugcagagccugcagaccuacgugacccagcagcugauccgggccgccgagauucgggccagcgccaaccuggccgccaccaagaugagcgagugcgugcugggccagagcaagcggguggacuucugcggcaagggcuaccaccugaugagcuuuccccagagcgcaccccacggagugguguuccugcacgugaccuacgugcccgcccaggagaagaacuucaccaccgccccagccaucugccacgacggcaaggcccacuuuccccgggagggcguguucgugagcaacggcacccacugguucgugacccagcggaacuucuacgagccccagaucaucaccacccacaacaccuucgugagcggcaacugcgacguggugaucggcaucgugaacaacaccguguacgauccccugcagcccgagcuggacagcuucaaggaggagcuggacaaguacuucaagaaucacaccagccccgacguggaccugggcgacaucagcggcaucaacgccagcguggugaacauccagaaggagaucgaucggcugaacgagguggccaagaaccugaacgagagccugaucgaccugcaggagcugggcaaguacgagcaguacaucaaguggcccugguacaucuggcugggcuucaucgccggccugaucgccaucgugauggugaccaucaugcugugcugcaugaccagcugcugcagcugccugaagggcuguugcagcugcggcagcugcugcaaguucgacgaggacgacagcgagcccgugcugaagggcgugaagcugcacuacaccugaggacuaguuauaagacugacuagcccgaugggccucccaacgggcccuccuccccuccuugcaccgagauuaauaaaaaaaaaaaaaaaaaaaaaaaaaaaaaaaaaaaaaaaaaaaaaaaaaaaaaaaaaaaaaaaaaaaaaaaaaaaaaaaaaaaaaaaaaaaaaaaaaaaa

SEQ ID NO: 25546 - RNA, 4011 nt, Artificial Sequence
  SARS-CoV-2/Wuhan/WIV05/2019__EPI_ISL_402128 spike protein mRNA gc (1-1273)(K986P_V987P_K986P_V987P_K417N_E484K_N501Y_D614G)
aggagaaagcuuaccauguucguguuccuggugcugcugccccuggugagcagccagugcgugaaccugaccacccggacccagcugccaccagccuacaccaacagcuucacccggggcgucuacuaccccgacaagguguuccggagcagcguccugcacagcacccaggaccuguuccugcccuucuucagcaacgugaccugguuccacgccauccacgugagcggcaccaacggcaccaagcgguucgacaaccccgugcugcccuucaacgacggcguguacuucgccagcaccgagaagagcaacaucauccggggcuggaucuucggcaccacccuggacagcaagacccagagccugcugaucgugaauaacgccaccaacguggugaucaaggugugcgaguuccaguucugcaacgaccccuuccugggcguguacuaccacaagaacaacaagagcuggauggagagcgaguuccggguguacagcagcgccaacaacugcaccuucgaguacgugagccagcccuuccugauggaccuggagggcaagcagggcaacuucaagaaccugcgggaguucguguucaagaacaucgacggcuacuucaagaucuacagcaagcacaccccaaucaaccuggugcgggaucugccccagggcuucucagcccuggagccccugguggaccugcccaucggcaucaacaucacccgguuccagacccugcuggcccugcaccggagcuaccugaccccaggcgacagcagcagcggguggacagcaggcgcggcugcuuacuacgugggcuaccugcagccccggaccuuccugcugaaguacaacgagaacggcaccaucaccgacgccguggacugcgcccuggacccucugagcgagaccaagugcacccugaagagcuucaccguggagaagggcaucuaccagaccagcaacuuccgggugcagcccaccgagagcaucgugcgguuccccaacaucaccaaccugugccccuucggcgagguguucaacgccacccgguucgccagcguguacgccuggaaccggaagcggaucagcaacugcguggccgacuacagcgugcuguacaacagcgccagcuucagcaccuucaagugcuacggcgugagccccaccaagcugaacgaccugugcuucaccaacguguacgccgacagcuucgugauccguggcgacgaggugcggcagaucgcacccggccagacaggcaacaucgccgacuacaacuacaagcugcccgacgacuucaccggcugcgugaucgccuggaacagcaacaaccucgacagcaaggugggcggcaacuacaacuaccuguaccggcuguuccggaagagcaaccugaagcccuucgagcgggacaucagcaccgagaucuaccaagccggcuccaccccuugcaacggcgugaagggcuucaacugcuacuucccucugcagagcuacggcuuccagcccaccuacggcgugggcuaccagcccuaccgggugguggugcugagcuucgagcugcugcacgccccagccaccguguguggccccaagaagagcaccaaccuggugaagaacaagugcgugaacuucaacuucaacggccuuaccggcaccggcgugcugaccgagagcaacaagaaauuccugcccuuucagcaguucggccgggacaucgccgacaccaccgacgcugugcgggauccccagacccuggagauccuggacaucaccccuugcagcuucggcggcgugagcgugaucaccccaggcaccaacaccagcaaccagguggccgugcuguaccagggcgugaacugcaccgaggugcccguggccauccacgccgaccagcugacacccaccuggcgggucuacagcaccggcagcaacguguuccagacccgggccgguugccugaucggcgccgagcacgugaacaacagcuacgagugcgacauccccaucggcgccggcaucugugccagcuaccagacccagaccaauucaccccggagggcaaggagcguggccagccagagcaucaucgccuacaccaugagccugggcgccgagaacagcguggccuacagcaacaacagcaucgccauccccaccaacuucaccaucagcgugaccaccgagauucugcccgugagcaugaccaagaccagcguggacugcaccauguacaucugcggcgacagcaccgagugcagcaaccugcugcugcaguacggcagcuucugcacccagcugaaccgggcccugaccggcaucgccguggagcaggacaagaacacccaggagguguucgcccaggugaagcagaucuacaagaccccucccaucaaggacuucggcggcuucaacuucagccagauccugcccgaccccagcaagcccagcaagcggagcuucaucgaggaccugcuguucaacaaggugacccuagccgacgccggcuucaucaagcaguacggcgacugccucggcgacauagccgcccgggaccugaucugcgcccagaaguucaacggccugaccgugcugccuccccugcugaccgacgagaugaucgcccaguacaccagcgcccuguuagccggaaccaucaccagcggcuggacuuucggcgcuggagccgcucugcagauccccuucgccaugcagauggccuaccgguucaacggcaucggcgugacccagaacgugcuguacgagaaccagaagcugaucgccaaccaguucaacagcgccaucggcaagauccaggacagccugagcagcaccgcuagcgcccugggcaagcugcaggacguggugaaccagaacgcccaggcccugaacacccuggugaagcagcugagcagcaacuucggcgccaucagcagcgugcugaacgacauccugagccggcuggacccucccgaggccgaggugcagaucgaccggcugaucacuggccggcugcagagccugcagaccuacgugacccagcagcugauccgggccgccgagauucgggccagcgccaaccuggccgccaccaagaugagcgagugcgugcugggccagagcaagcggguggacuucugcggcaagggcuaccaccugaugagcuuuccccagagcgcaccccacggagugguguuccugcacgugaccuacgugcccgcccaggagaagaacuucaccaccgccccagccaucugccacgacggcaaggcccacuuuccccgggagggcguguucgugagcaacggcacccacugguucgugacccagcggaacuucuacgagccccagaucaucaccaccgacaacaccuucgugagcggcaacugcgacguggugaucggcaucgugaacaacaccguguacgauccccugcagcccgagcuggacagcuucaaggaggagcuggacaaguacuucaagaaucacaccagccccgacguggaccugggcgacaucagcggcaucaacgccagcguggugaacauccagaaggagaucgaucggcugaacgagguggccaagaaccugaacgagagccugaucgaccugcaggagcugggcaaguacgagcaguacaucaaguggcccugguacaucuggcugggcuucaucgccggccugaucgccaucgugauggugaccaucaugcugugcugcaugaccagcugcugcagcugccugaagggcuguugcagcugcggcagcugcugcaaguucgacgaggacgacagcgagcccgugcugaagggcgugaagcugcacuacaccugaggacuaguuauaagacugacuagcccgaugggccucccaacgggcccuccuccccuccuugcaccgagauuaauaaaaaaaaaaaaaaaaaaaaaaaaaaaaaaaaaaaaaaaaaaaaaaaaaaaaaaaaaaaaaaaaaaaaaaaaaaaaaaaaaaaaaaaaaaaaaaaaaaaa

SEQ ID NO: 25547 - RNA, 4002 nt, Artificial Sequence
  SARS-CoV-2/Wuhan/WIV05/2019__EPI_ISL_402128 spike protein mRNA gc (1-1273)(K986P_V987P_K986P_V987P_L18F_D80A_D215G_L242del_A243del_ L244del_R246I_K417N_E484K_N501Y_D614G_A701V)
aggagaaagcuuaccauguucguguuccuggugcugcugccccuggugagcagccagugcgugaacuucaccacccggacccagcugccaccagccuacaccaacagcuucacccggggcgucuacuaccccgacaagguguuccggagcagcguccugcacagcacccaggaccuguuccugcccuucuucagcaacgugaccugguuccacgccauccacgugagcggcaccaacggcaccaagcgguucgccaaccccgugcugcccuucaacgacggcguguacuucgccagcaccgagaagagcaacaucauccggggcuggaucuucggcaccacccuggacagcaagacccagagccugcugaucgugaauaacgccaccaacguggugaucaaggugugcgaguuccaguucugcaacgaccccuuccugggcguguacuaccacaagaacaacaagagcuggauggagagcgaguuccggguguacagcagcgccaacaacugcaccuucgaguacgugagccagcccuuccugauggaccuggagggcaagcagggcaacuucaagaaccugcgggaguucguguucaagaacaucgacggcuacuucaagaucuacagcaagcacaccccaaucaaccuggugcggggccugccccagggcuucucagcccuggagccccugguggaccugcccaucggcaucaacaucacccgguuccagacccugcacaucagcuaccugaccccaggcgacagcagcagcggguggacagcaggcgcggcugcuuacuacgugggcuaccugcagccccggaccuuccugcugaaguacaacgagaacggcaccaucaccgacgccguggacugcgcccuggacccucugagcgagaccaagugcacccugaagagcuucaccguggagaagggcaucuaccagaccagcaacuuccgggugcagcccaccgagagcaucgugcgguuccccaacaucaccaaccugugccccuucggcgagguguucaacgccacccgguucgccagcguguacgccuggaaccggaagcggaucagcaacugcguggccgacuacagcgugcuguacaacagcgccagcuucagcaccuucaagugcuacggcgugagccccaccaagcugaacgaccugugcuucaccaacguguacgccgacagcuucgugauccguggcgacgaggugcggcagaucgcacccggccagacaggcaacaucgccgacuacaacuacaagcugcccgacgacuucaccggcugcgugaucgccuggaacagcaacaaccucgacagcaaggugggcggcaacuacaacuaccuguaccggcuguuccggaagagcaaccugaagcccuucgagcgggacaucagcaccgagaucuaccaagccggcuccaccccuugcaacggcgugaagggcuucaacugcuacuucccucugcagagcuacggcuuccagcccaccuacggcgugggcuaccagcccuaccgggugguggugcugagcuucgagcugcugcacgccccagccaccguguguggccccaagaagagcaccaaccuggugaagaacaagugcgugaacuucaacuucaacggccuuaccggcaccggcgugcugaccgagagcaacaagaaauuccugcccuuucagcaguucggccgggacaucgccgacaccaccgacgcugugcgggauccccagacccuggagauccuggacaucaccccuugcagcuucggcggcgugagcgugaucaccccaggcaccaacaccagcaaccagguggccgugcuguaccagggcgugaacugcaccgaggugcccguggccauccacgccgaccagcugacacccaccuggcgggucuacagcaccggcagcaacguguuccagacccgggccgguugccugaucggcgccgagcacgugaacaacagcuacgagugcgacauccccaucggcgccggcaucugugccagcuaccagacccagaccaauucaccccggagggcaaggagcguggccagccagagcaucaucgccuacaccaugagccugggcguggagaacagcguggccuacagcaacaacagcaucgccauccccaccaacuucaccaucagcgugaccaccgagauucugcccgugagcaugaccaagaccagcguggacugcaccauguacaucugcggcgacagcaccgagugcagcaaccugcugcugcaguacggcagcuucugcacccagcugaaccgggcccugaccggcaucgccguggagcaggacaagaacacccaggagguguucgcccaggugaagcagaucuacaagaccccucccaucaaggacuucggcggcuucaacuucagccagauccugcccgaccccagcaagcccagcaagcggagcuucaucgaggaccugcuguucaacaaggugacccuagccgacgccggcuucaucaagcaguacggcgacugccucggcgacauagccgcccgggaccugaucugcgcccagaaguucaacggccugaccgugcugccuccccugcugaccgacgagaugaucgcccaguacaccagcgcccuguuagccggaaccaucaccagcggcuggacuuucggcgcuggagccgcucugcagauccccuucgccaugcagauggccuaccgguucaacggcaucggcgugacccagaacgugcuguacgagaaccagaagcugaucgccaaccaguucaacagcgccaucggcaagauccaggacagccugagcagcaccgcuagcgcccugggcaagcugcaggacguggugaaccagaacgcccaggcccugaacacccuggugaagcagcugagcagcaacuucggcgccaucagcagcgugcugaacgacauccugagccggcuggacccucccgaggccgaggugcagaucgaccggcugaucacuggccggcugcagagccugcagaccuacgugacccagcagcugauccgggccgccgagauucgggccagcgccaaccuggccgccaccaagaugagcgagugcgugcugggccagagcaagcggguggacuucugcggcaagggcuaccaccugaugagcuuuccccagagcgcaccccacggagugguguuccugcacgugaccuacgugcccgcccaggagaagaacuucaccaccgccccagccaucugccacgacggcaaggcccacuuuccccgggagggcguguucgugagcaacggcacccacugguucgugacccagcggaacuucuacgagccccagaucaucaccaccgacaacaccuucgugagcggcaacugcgacguggugaucggcaucgugaacaacaccguguacgauccccugcagcccgagcuggacagcuucaaggaggagcuggacaaguacuucaagaaucacaccagccccgacguggaccugggcgacaucagcggcaucaacgccagcguggugaacauccagaaggagaucgaucggcugaacgagguggccaagaaccugaacgagagccugaucgaccugcaggagcugggcaaguacgagcaguacaucaaguggcccugguacaucuggcugggcuucaucgccggccugaucgccaucgugauggugaccaucaugcugugcugcaugaccagcugcugcagcugccugaagggcuguugcagcugcggcagcugcugcaaguucgacgaggacgacagcgagcccgugcugaagggcgugaagcugcacuacaccugaggacuaguuauaagacugacuagcccgaugggccucccaacgggcccuccuccccuccuugcaccgagauuaauaaaaaaaaaaaaaaaaaaaaaaaaaaaaaaaaaaaaaaaaaaaaaaaaaaaaaaaaaaaaaaaaaaaaaaaaaaaaaaaaaaaaaaaaaaaaaaaaaaaa

SEQ ID NO: 25548 - RNA, 4011 nt, Artificial Sequence
  SARS-CoV-2/Wuhan/WIV05/2019__EPI_ISL_402128 spike protein mRNA gc (1-1273)(K986P_V987P_K986P_V987P_E484K_D614G)
aggagaaagcuuaccauguucguguuccuggugcugcugccccuggugagcagccagugcgugaaccugaccacccggacccagcugccaccagccuacaccaacagcuucacccggggcgucuacuaccccgacaagguguuccggagcagcguccugcacagcacccaggaccuguuccugcccuucuucagcaacgugaccugguuccacgccauccacgugagcggcaccaacggcaccaagcgguucgacaaccccgugcugcccuucaacgacggcguguacuucgccagcaccgagaagagcaacaucauccggggcuggaucuucggcaccacccuggacagcaagacccagagccugcugaucgugaauaacgccaccaacguggugaucaaggugugcgaguuccaguucugcaacgaccccuuccugggcguguacuaccacaagaacaacaagagcuggauggagagcgaguuccggguguacagcagcgccaacaacugcaccuucgaguacgugagccagcccuuccugauggaccuggagggcaagcagggcaacuucaagaaccugcgggaguucguguucaagaacaucgacggcuacuucaagaucuacagcaagcacaccccaaucaaccuggugcgggaucugccccagggcuucucagcccuggagccccugguggaccugcccaucggcaucaacaucacccgguuccagacccugcuggcccugcaccggagcuaccugaccccaggcgacagcagcagcggguggacagcaggcgcggcugcuuacuacgugggcuaccugcagccccggaccuuccugcugaaguacaacgagaacggcaccaucaccgacgccguggacugcgcccuggacccucugagcgagaccaagugcacccugaagagcuucaccguggagaagggcaucuaccagaccagcaacuuccgggugcagcccaccgagagcaucgugcgguuccccaacaucaccaaccugugccccuucggcgagguguucaacgccacccgguucgccagcguguacgccuggaaccggaagcggaucagcaacugcguggccgacuacagcgugcuguacaacagcgccagcuucagcaccuucaagugcuacggcgugagccccaccaagcugaacgaccugugcuucaccaacguguacgccgacagcuucgugauccguggcgacgaggugcggcagaucgcacccggccagacaggcaagaucgccgacuacaacuacaagcugcccgacgacuucaccggcugcgugaucgccuggaacagcaacaaccucgacagcaaggugggcggcaacuacaacuaccuguaccggcuguuccggaagagcaaccugaagcccuucgagcgggacaucagcaccgagaucuaccaagccggcuccaccccuugcaacggcgugaagggcuucaacugcuacuucccucugcagagcuacggcuuccagcccaccaacggcgugggcuaccagcccuaccgggugguggugcugagcuucgagcugcugcacgccccagccaccguguguggccccaagaagagcaccaaccuggugaagaacaagugcgugaacuucaacuucaacggccuuaccggcaccggcgugcugaccgagagcaacaagaaauuccugcccuuucagcaguucggccgggacaucgccgacaccaccgacgcugugcgggauccccagacccuggagauccuggacaucaccccuugcagcuucggcggcgugagcgugaucaccccaggcaccaacaccagcaaccagguggccgugcuguaccagggcgugaacugcaccgaggugcccguggccauccacgccgaccagcugacacccaccuggcgggucuacagcaccggcagcaacguguuccagacccgggccgguugccugaucggcgccgagcacgugaacaacagcuacgagugcgacauccccaucggcgccggcaucugugccagcuaccagacccagaccaauucaccccggagggcaaggagcguggccagccagagcaucaucgccuacaccaugagccugggcgccgagaacagcguggccuacagcaacaacagcaucgccauccccaccaacuucaccaucagcgugaccaccgagauucugcccgugagcaugaccaagaccagcguggacugcaccauguacaucugcggcgacagcaccgagugcagcaaccugcugcugcaguacggcagcuucugcacccagcugaaccgggcccugaccggcaucgccguggagcaggacaagaacacccaggagguguucgcccaggugaagcagaucuacaagaccccucccaucaaggacuucggcggcuucaacuucagccagauccugcccgaccccagcaagcccagcaagcggagcuucaucgaggaccugcuguucaacaaggugacccuagccgacgccggcuucaucaagcaguacggcgacugccucggcgacauagccgcccgggaccugaucugcgcccagaaguucaacggccugaccgugcugccuccccugcugaccgacgagaugaucgcccaguacaccagcgcccuguuagccggaaccaucaccagcggcuggacuuucggcgcuggagccgcucugcagauccccuucgccaugcagauggccuaccgguucaacggcaucggcgugacccagaacgugcuguacgagaaccagaagcugaucgccaaccaguucaacagcgccaucggcaagauccaggacagccugagcagcaccgcuagcgcccugggcaagcugcaggacguggugaaccagaacgcccaggcccugaacacccuggugaagcagcugagcagcaacuucggcgccaucagcagcgugcugaacgacauccugagccggcuggacccucccgaggccgaggugcagaucgaccggcugaucacuggccggcugcagagccugcagaccuacgugacccagcagcugauccgggccgccgagauucgggccagcgccaaccuggccgccaccaagaugagcgagugcgugcugggccagagcaagcggguggacuucugcggcaagggcuaccaccugaugagcuuuccccagagcgcaccccacggagugguguuccugcacgugaccuacgugcccgcccaggagaagaacuucaccaccgccccagccaucugccacgacggcaaggcccacuuuccccgggagggcguguucgugagcaacggcacccacugguucgugacccagcggaacuucuacgagccccagaucaucaccaccgacaacaccuucgugagcggcaacugcgacguggugaucggcaucgugaacaacaccguguacgauccccugcagcccgagcuggacagcuucaaggaggagcuggacaaguacuucaagaaucacaccagccccgacguggaccugggcgacaucagcggcaucaacgccagcguggugaacauccagaaggagaucgaucggcugaacgagguggccaagaaccugaacgagagccugaucgaccugcaggagcugggcaaguacgagcaguacaucaaguggcccugguacaucuggcugggcuucaucgccggccugaucgccaucgugauggugaccaucaugcugugcugcaugaccagcugcugcagcugccugaagggcuguugcagcugcggcagcugcugcaaguucgacgaggacgacagcgagcccgugcugaagggcgugaagcugcacuacaccugaggacuaguuauaagacugacuagcccgaugggccucccaacgggcccuccuccccuccuugcaccgagauuaauaaaaaaaaaaaaaaaaaaaaaaaaaaaaaaaaaaaaaaaaaaaaaaaaaaaaaaaaaaaaaaaaaaaaaaaaaaaaaaaaaaaaaaaaaaaaaaaaaaaa

SEQ ID NO: 25549 - RNA, 4011 nt, Artificial Sequence
  SARS-CoV-2/Wuhan/WIV05/2019__EPI_ISL_402128 spike protein mRNA gc (1-1273)(K986P_V987P_K986P_V987P_L18F_T20N_P26S_D138Y_R190S_K417T _E484K_N501Y_D614G_H655Y_T1027I)
aggagaaagcuuaccauguucguguuccuggugcugcugccccuggugagcagccagugcgugaacuucaccaaccggacccagcugccaagcgccuacaccaacagcuucacccggggcgucuacuaccccgacaagguguuccggagcagcguccugcacagcacccaggaccuguuccugcccuucuucagcaacgugaccugguuccacgccauccacgugagcggcaccaacggcaccaagcgguucgacaaccccgugcugcccuucaacgacggcguguacuucgccagcaccgagaagagcaacaucauccggggcuggaucuucggcaccacccuggacagcaagacccagagccugcugaucgugaauaacgccaccaacguggugaucaaggugugcgaguuccaguucugcaacuaccccuuccugggcguguacuaccacaagaacaacaagagcuggauggagagcgaguuccggguguacagcagcgccaacaacugcaccuucgaguacgugagccagcccuuccugauggaccuggagggcaagcagggcaacuucaagaaccugagcgaguucguguucaagaacaucgacggcuacuucaagaucuacagcaagcacaccccaaucaaccuggugcgggaucugccccagggcuucucagcccuggagccccugguggaccugcccaucggcaucaacaucacccgguuccagacccugcuggcccugcaccggagcuaccugaccccaggcgacagcagcagcggguggacagcaggcgcggcugcuuacuacgugggcuaccugcagccccggaccuuccugcugaaguacaacgagaacggcaccaucaccgacgccguggacugcgcccuggacccucugagcgagaccaagugcacccugaagagcuucaccguggagaagggcaucuaccagaccagcaacuuccgggugcagcccaccgagagcaucgugcgguuccccaacaucaccaaccugugccccuucggcgagguguucaacgccacccgguucgccagcguguacgccuggaaccggaagcggaucagcaacugcguggccgacuacagcgugcuguacaacagcgccagcuucagcaccuucaagugcuacggcgugagccccaccaagcugaacgaccugugcuucaccaacguguacgccgacagcuucgugauccguggcgacgaggugcggcagaucgcacccggccagacaggcaccaucgccgacuacaacuacaagcugcccgacgacuucaccggcugcgugaucgccuggaacagcaacaaccucgacagcaaggugggcggcaacuacaacuaccuguaccggcuguuccggaagagcaaccugaagcccuucgagcgggacaucagcaccgagaucuaccaagccggcuccaccccuugcaacggcgugaagggcuucaacugcuacuucccucugcagagcuacggcuuccagcccaccuacggcgugggcuaccagcccuaccgggugguggugcugagcuucgagcugcugcacgccccagccaccguguguggccccaagaagagcaccaaccuggugaagaacaagugcgugaacuucaacuucaacggccuuaccggcaccggcgugcugaccgagagcaacaagaaauuccugcccuuucagcaguucggccgggacaucgccgacaccaccgacgcugugcgggauccccagacccuggagauccuggacaucaccccuugcagcuucggcggcgugagcgugaucaccccaggcaccaacaccagcaaccagguggccgugcuguaccagggcgugaacugcaccgaggugcccguggccauccacgccgaccagcugacacccaccuggcgggucuacagcaccggcagcaacguguuccagacccgggccgguugccugaucggcgccgaguacgugaacaacagcuacgagugcgacauccccaucggcgccggcaucugugccagcuaccagacccagaccaauucaccccggagggcaaggagcguggccagccagagcaucaucgccuacaccaugagccugggcgccgagaacagcguggccuacagcaacaacagcaucgccauccccaccaacuucaccaucagcgugaccaccgagauucugcccgugagcaugaccaagaccagcguggacugcaccauguacaucugcggcgacagcaccgagugcagcaaccugcugcugcaguacggcagcuucugcacccagcugaaccgggcccugaccggcaucgccguggagcaggacaagaacacccaggagguguucgcccaggugaagcagaucuacaagaccccucccaucaaggacuucggcggcuucaacuucagccagauccugcccgaccccagcaagcccagcaagcggagcuucaucgaggaccugcuguucaacaaggugacccuagccgacgccggcuucaucaagcaguacggcgacugccucggcgacauagccgcccgggaccugaucugcgcccagaaguucaacggccugaccgugcugccuccccugcugaccgacgagaugaucgcccaguacaccagcgcccuguuagccggaaccaucaccagcggcuggacuuucggcgcuggagccgcucugcagauccccuucgccaugcagauggccuaccgguucaacggcaucggcgugacccagaacgugcuguacgagaaccagaagcugaucgccaaccaguucaacagcgccaucggcaagauccaggacagccugagcagcaccgcuagcgcccugggcaagcugcaggacguggugaaccagaacgcccaggcccugaacacccuggugaagcagcugagcagcaacuucggcgccaucagcagcgugcugaacgacauccugagccggcuggacccucccgaggccgaggugcagaucgaccggcugaucacuggccggcugcagagccugcagaccuacgugacccagcagcugauccgggccgccgagauucgggccagcgccaaccuggccgccaucaagaugagcgagugcgugcugggccagagcaagcggguggacuucugcggcaagggcuaccaccugaugagcuuuccccagagcgcaccccacggagugguguuccugcacgugaccuacgugcccgcccaggagaagaacuucaccaccgccccagccaucugccacgacggcaaggcccacuuuccccgggagggcguguucgugagcaacggcacccacugguucgugacccagcggaacuucuacgagccccagaucaucaccaccgacaacaccuucgugagcggcaacugcgacguggugaucggcaucgugaacaacaccguguacgauccccugcagcccgagcuggacagcuucaaggaggagcuggacaaguacuucaagaaucacaccagccccgacguggaccugggcgacaucagcggcaucaacgccagcguggugaacauccagaaggagaucgaucggcugaacgagguggccaagaaccugaacgagagccugaucgaccugcaggagcugggcaaguacgagcaguacaucaaguggcccugguacaucuggcugggcuucaucgccggccugaucgccaucgugauggugaccaucaugcugugcugcaugaccagcugcugcagcugccugaagggcuguugcagcugcggcagcugcugcaaguucgacgaggacgacagcgagcccgugcugaagggcgugaagcugcacuacaccugaggacuaguuauaagacugacuagcccgaugggccucccaacgggcccuccuccccuccuugcaccgagauuaauaaaaaaaaaaaaaaaaaaaaaaaaaaaaaaaaaaaaaaaaaaaaaaaaaaaaaaaaaaaaaaaaaaaaaaaaaaaaaaaaaaaaaaaaaaaaaaaaaaaa

SEQ ID NO: 25550 - RNA, 4011 nt, Artificial Sequence
  SARS-CoV-2/Wuhan/WIV05/2019__EPI_ISL_402128 spike protein mRNA gc (1-1273)(K986P_V987P_K986P_V987P_S13I_W152C_L452R_D614G)
aggagaaagcuuaccauguucguguuccuggugcugcugccccuggugagcauccagugcgugaaccugaccacccggacccagcugccaccagccuacaccaacagcuucacccggggcgucuacuaccccgacaagguguuccggagcagcguccugcacagcacccaggaccuguuccugcccuucuucagcaacgugaccugguuccacgccauccacgugagcggcaccaacggcaccaagcgguucgacaaccccgugcugcccuucaacgacggcguguacuucgccagcaccgagaagagcaacaucauccggggcuggaucuucggcaccacccuggacagcaagacccagagccugcugaucgugaauaacgccaccaacguggugaucaaggugugcgaguuccaguucugcaacgaccccuuccugggcguguacuaccacaagaacaacaagagcugcauggagagcgaguuccggguguacagcagcgccaacaacugcaccuucgaguacgugagccagcccuuccugauggaccuggagggcaagcagggcaacuucaagaaccugcgggaguucguguucaagaacaucgacggcuacuucaagaucuacagcaagcacaccccaaucaaccuggugcgggaucugccccagggcuucucagcccuggagccccugguggaccugcccaucggcaucaacaucacccgguuccagacccugcuggcccugcaccggagcuaccugaccccaggcgacagcagcagcggguggacagcaggcgcggcugcuuacuacgugggcuaccugcagccccggaccuuccugcugaaguacaacgagaacggcaccaucaccgacgccguggacugcgcccuggacccucugagcgagaccaagugcacccugaagagcuucaccguggagaagggcaucuaccagaccagcaacuuccgggugcagcccaccgagagcaucgugcgguuccccaacaucaccaaccugugccccuucggcgagguguucaacgccacccgguucgccagcguguacgccuggaaccggaagcggaucagcaacugcguggccgacuacagcgugcuguacaacagcgccagcuucagcaccuucaagugcuacggcgugagccccaccaagcugaacgaccugugcuucaccaacguguacgccgacagcuucgugauccguggcgacgaggugcggcagaucgcacccggccagacaggcaagaucgccgacuacaacuacaagcugcccgacgacuucaccggcugcgugaucgccuggaacagcaacaaccucgacagcaaggugggcggcaacuacaacuaccgcuaccggcuguuccggaagagcaaccugaagcccuucgagcgggacaucagcaccgagaucuaccaagccggcuccaccccuugcaacggcguggagggcuucaacugcuacuucccucugcagagcuacggcuuccagcccaccaacggcgugggcuaccagcccuaccgggugguggugcugagcuucgagcugcugcacgccccagccaccguguguggccccaagaagagcaccaaccuggugaagaacaagugcgugaacuucaacuucaacggccuuaccggcaccggcgugcugaccgagagcaacaagaaauuccugcccuuucagcaguucggccgggacaucgccgacaccaccgacgcugugcgggauccccagacccuggagauccuggacaucaccccuugcagcuucggcggcgugagcgugaucaccccaggcaccaacaccagcaaccagguggccgugcuguaccagggcgugaacugcaccgaggugcccguggccauccacgccgaccagcugacacccaccuggcgggucuacagcaccggcagcaacguguuccagacccgggccgguugccugaucggcgccgagcacgugaacaacagcuacgagugcgacauccccaucggcgccggcaucugugccagcuaccagacccagaccaauucaccccggagggcaaggagcguggccagccagagcaucaucgccuacaccaugagccugggcgccgagaacagcguggccuacagcaacaacagcaucgccauccccaccaacuucaccaucagcgugaccaccgagauucugcccgugagcaugaccaagaccagcguggacugcaccauguacaucugcggcgacagcaccgagugcagcaaccugcugcugcaguacggcagcuucugcacccagcugaaccgggcccugaccggcaucgccguggagcaggacaagaacacccaggagguguucgcccaggugaagcagaucuacaagaccccucccaucaaggacuucggcggcuucaacuucagccagauccugcccgaccccagcaagcccagcaagcggagcuucaucgaggaccugcuguucaacaaggugacccuagccgacgccggcuucaucaagcaguacggcgacugccucggcgacauagccgcccgggaccugaucugcgcccagaaguucaacggccugaccgugcugccuccccugcugaccgacgagaugaucgcccaguacaccagcgcccuguuagccggaaccaucaccagcggcuggacuuucggcgcuggagccgcucugcagauccccuucgccaugcagauggccuaccgguucaacggcaucggcgugacccagaacgugcuguacgagaaccagaagcugaucgccaaccaguucaacagcgccaucggcaagauccaggacagccugagcagcaccgcuagcgcccugggcaagcugcaggacguggugaaccagaacgcccaggcccugaacacccuggugaagcagcugagcagcaacuucggcgccaucagcagcgugcugaacgacauccugagccggcuggacccucccgaggccgaggugcagaucgaccggcugaucacuggccggcugcagagccugcagaccuacgugacccagcagcugauccgggccgccgagauucgggccagcgccaaccuggccgccaccaagaugagcgagugcgugcugggccagagcaagcggguggacuucugcggcaagggcuaccaccugaugagcuuuccccagagcgcaccccacggagugguguuccugcacgugaccuacgugcccgcccaggagaagaacuucaccaccgccccagccaucugccacgacggcaaggcccacuuuccccgggagggcguguucgugagcaacggcacccacugguucgugacccagcggaacuucuacgagccccagaucaucaccaccgacaacaccuucgugagcggcaacugcgacguggugaucggcaucgugaacaacaccguguacgauccccugcagcccgagcuggacagcuucaaggaggagcuggacaaguacuucaagaaucacaccagccccgacguggaccugggcgacaucagcggcaucaacgccagcguggugaacauccagaaggagaucgaucggcugaacgagguggccaagaaccugaacgagagccugaucgaccugcaggagcugggcaaguacgagcaguacaucaaguggcccugguacaucuggcugggcuucaucgccggccugaucgccaucgugauggugaccaucaugcugugcugcaugaccagcugcugcagcugccugaagggcuguugcagcugcggcagcugcugcaaguucgacgaggacgacagcgagcccgugcugaagggcgugaagcugcacuacaccugaggacuaguuauaagacugacuagcccgaugggccucccaacgggcccuccuccccuccuugcaccgagauuaauaaaaaaaaaaaaaaaaaaaaaaaaaaaaaaaaaaaaaaaaaaaaaaaaaaaaaaaaaaaaaaaaaaaaaaaaaaaaaaaaaaaaaaaaaaaaaaaaaaaa

SEQ ID NO: 25551 - RNA, 4011 nt, Artificial Sequence
  SARS-CoV-2/Wuhan/WIV05/2019__EPI_ISL_402128 spike protein mRNA gc (1-1273)(K986P_V987P)
aggagaaagcuuaccauguucguguuccuggugcugcugccccuggugagcagccagugcgugaaccugaccacccggacccagcugcccccugccuacaccaacagcuucacccggggcguguacuaccccgacaagguguuccggagcagcgugcugcacagcacccaggaccuguuccugcccuucuucagcaacgugaccugguuccacgccauccacgugagcggcaccaacggcaccaagcgguucgacaacccagugcugcccuucaacgacggcguguacuucgccagcaccgagaagucaaacaucauccggggcuggaucuucggcaccacccuggacagcaagacacagagccugcugaucgugaacaacgccaccaacguggugaucaaggugugcgaguuucaguucugcaacgaccccuuccugggcguguacuaccacaagaacaacaagagcuggauggagagcgaguuccgggucuacagcagcgcuaacaauugcaccuucgaguacgugagccagcccuuccugauggaccucgagggcaagcagggcaacuucaagaaccugcgggaguucguguucaagaacaucgauggcuacuucaagaucuacagcaagcacacccccaucaaccuggugcgggaccugccccagggauucagcgcccuggagccucugguggaccugcccaucggcaucaacaucaccagguuccagacccugcuggcccugcaccggagcuaccugacccccggcgacagcagcagcggcuggaccgccggcgccgccgcauacuacgugggcuaccugcagccacggaccuuccugcugaaguacaacgagaacggcaccaucaccgacgccguggacugcgcccuggacccccugagcgagaccaagugcacccuaaagagcuucaccguggagaagggcaucuaccagaccagcaacuuccgggugcagcccacugagagcaucgugcgguuccccaacauuaccaaccugugucccuucggcgagguguucaacgccacccgguucgccagcguguacgccuggaaccggaagcggaucagcaacugcguggccgacuacagcgugcuguacaacagcgccagcuucagcaccuucaagugcuacggcgugagcccuaccaagcugaacgaccugugcuucaccaacguguacgcugacagcuucgugauccggggcgacgaggugcggcagaucgcccccggccagaccggcaagaucgccgacuacaacuacaagcugcccgacgacuucaccggcugcgugaucgccuggaacagcaacaaccuggacagcaaggugggcggcaacuacaacuaccuguaccggcuguuccguaagagcaaccugaagccauucgagcgggacaucagcaccgagaucuaccaggccggcagcacccccugcaacgguguggagggcuuuaacugcuacuucccccugcagagcuacggcuuccagcccaccaacggcgugggcuaccagcccuaccgggugguggugcugagcuucgagcugcugcacgcccccgccaccgugugcggcccuaaaaagagcaccaaccuggugaagaacaagugcgugaacuucaauuucaacggccugaccggcaccggcgugcugaccgagagcaacaagaaguuccugcccuuccagcaguucggccgggauaucgccgacaccaccgacgcagugcgggacccccagacccuggagauccuggacaucaccccaugcagcuucggcggcgugagcgucaucacccccggcacaaacaccagcaaccagguggccgugcuguaccaggacgugaacugcaccgaggugcccguggccauccacgccgaccagcugacccccaccuggcggguguacagcaccggaagcaacguguuccagacccgggccggcugccugaucggcgccgagcacgugaacaacuccuacgagugcgacauccccaucggcgcuggcaucugcgccagcuaccagacccagaccaacagcccccggcgggcccggagcguggccagccagagcaucaucgccuacaccaugagcuuaggcgccgagaacagcguggccuacagcaacaacagcaucgcgaucccuaccaacuucaccaucagcgugaccaccgagauacugcccgugagcaugaccaagaccagcguggacuguaccauguacaucugcggcgacagcaccgagugcagcaaccugcugcugcaguacggcagcuucugcacccagcugaaccgggcccugaccggcaucgccguggagcaggacaagaacacccaagagguguucgcccaggugaagcagaucuacaagacucccccaaucaaggacuucggcggcuucaacuucagccagauccugcccgaccccagcaagcccagcaagcggagcuucaucgaggaccugcuguucaacaaggugacccuggccgacgccggcuucaucaagcaguacggcgauugccugggcgacaucgccgcucgggaccugaucugcgcccagaaguucaacgggcugaccgugcugcccccucugcugaccgacgagaugaucgcccaguacaccagcgcccugcuugccggcaccaucaccagcggcuggaccuucggcgccggcgcagcccugcagauccccuucgccaugcagauggccuaccgguucaacggcaucggcgugacccagaacgugcuguacgagaaccagaagcugaucgccaaccaguucaacagcgccaucggcaagauccaggacagccugagcagcaccgccagcgcccugggcaagcugcaggacguggugaaccagaacgcucaggcccugaacacccuggugaagcagcugagcagcaacuucggcgccaucagcucagugcugaaugacauccugagcaggcuggaucccccagaggccgaggugcagaucgaccggcugaucaccggccggcugcagagccugcagaccuacgugacccagcagcugauccgggccgccgagauccgggccagcgccaaccuggcagccaccaagaugagcgagugcgugcugggccagagcaagcggguggacuuuugcggcaagggcuaccaccugaugagcuucccccagagcgcuccccacggcgugguguuccuccacgugacauacguccccgcccaggagaagaacuucaccaccgcccccgccauuugccacgacggcaaggcccacuucccccgggagggcguguucgugagcaacggaacccacugguucgugacccagcggaacuucuacgagccucagaucaucaccaccgacaacaccuucgugagcggcaacugcgacguggugaucggcaucgugaacaacaccguguacgacccccugcagcccgagcuggacagcuucaaggaggagcuggacaaguacuucaagaaccacaccagcccagacguggaccugggcgacaucagcggcaucaacgccagcguggugaacauccagaaggagaucgaccggcugaacgagguggccaagaaccugaacgagagccugaucgaccugcaggagcugggcaaguacgagcaguacaucaaguggcccugguacaucuggcugggcuucaucgccggccugaucgccaucgugauggugaccaucaugcugugcugcaugaccagcugcuguagcugccugaagggcugcugcagcugcggcagcugcugcaaguucgacgaggacgacagcgagcccgugcugaagggcgugaagcugcacuacaccugaggacuaguuauaagacugacuagcccgaugggccucccaacgggcccuccuccccuccuugcaccgagauuaauaaaaaaaaaaaaaaaaaaaaaaaaaaaaaaaaaaaaaaaaaaaaaaaaaaaaaaaaaaaaaaaaaaaaaaaaaaaaaaaaaaaaaaaaaaaaaaaaaaaa

SEQ ID NO: 25552 - RNA, 4011 nt, Artificial Sequence
  SARS-CoV-2/Wuhan/WIV05/2019__EPI_ISL_402128 spike protein mRNA gc (1-1273)(K986P_V987P_ D614G)
aggagaaagcuuaccauguucguguuccuggugcugcugccccuggugagcagccagugcgugaaccugaccacccggacccagcugcccccugccuacaccaacagcuucacccggggcguguacuaccccgacaagguguuccggagcagcgugcugcacagcacccaggaccuguuccugcccuucuucagcaacgugaccugguuccacgccauccacgugagcggcaccaacggcaccaagcgguucgacaacccagugcugcccuucaacgacggcguguacuucgccagcaccgagaagucaaacaucauccggggcuggaucuucggcaccacccuggacagcaagacacagagccugcugaucgugaacaacgccaccaacguggugaucaaggugugcgaguuucaguucugcaacgaccccuuccugggcguguacuaccacaagaacaacaagagcuggauggagagcgaguuccgggucuacagcagcgcuaacaauugcaccuucgaguacgugagccagcccuuccugauggaccucgagggcaagcagggcaacuucaagaaccugcgggaguucguguucaagaacaucgauggcuacuucaagaucuacagcaagcacacccccaucaaccuggugcgggaccugccccagggauucagcgcccuggagccucugguggaccugcccaucggcaucaacaucaccagguuccagacccugcuggcccugcaccggagcuaccugacccccggcgacagcagcagcggcuggaccgccggcgccgccgcauacuacgugggcuaccugcagccacggaccuuccugcugaaguacaacgagaacggcaccaucaccgacgccguggacugcgcccuggacccccugagcgagaccaagugcacccuaaagagcuucaccguggagaagggcaucuaccagaccagcaacuuccgggugcagcccacugagagcaucgugcgguuccccaacauuaccaaccugugucccuucggcgagguguucaacgccacccgguucgccagcguguacgccuggaaccggaagcggaucagcaacugcguggccgacuacagcgugcuguacaacagcgccagcuucagcaccuucaagugcuacggcgugagcccuaccaagcugaacgaccugugcuucaccaacguguacgcugacagcuucgugauccggggcgacgaggugcggcagaucgcccccggccagaccggcaagaucgccgacuacaacuacaagcugcccgacgacuucaccggcugcgugaucgccuggaacagcaacaaccuggacagcaaggugggcggcaacuacaacuaccuguaccggcuguuccguaagagcaaccugaagccauucgagcgggacaucagcaccgagaucuaccaggccggcagcacccccugcaacgguguggagggcuuuaacugcuacuucccccugcagagcuacggcuuccagcccaccaacggcgugggcuaccagcccuaccgggugguggugcugagcuucgagcugcugcacgcccccgccaccgugugcggcccuaaaaagagcaccaaccuggugaagaacaagugcgugaacuucaauuucaacggccugaccggcaccggcgugcugaccgagagcaacaagaaguuccugcccuuccagcaguucggccgggauaucgccgacaccaccgacgcagugcgggacccccagacccuggagauccuggacaucaccccaugcagcuucggcggcgugagcgucaucacccccggcacaaacaccagcaaccagguggccgugcuguaccagggagugaacugcaccgaggugcccguggccauccacgccgaccagcugacccccaccuggcggguguacagcaccggcagcaacguguuccagacccgggccggcugccugaucggcgccgagcacgugaacaacuccuacgagugcgacauccccaucggcgcuggcaucugcgccagcuaccagacccagaccaacagcccccggcgggcccggagcguggccagccagagcaucaucgccuacaccaugagcuuaggcgccgagaacagcguggccuacagcaacaacagcaucgcgaucccuaccaacuucaccaucagcgugaccaccgagauacugcccgugagcaugaccaagaccagcguggacuguaccauguacaucugcggcgacagcaccgagugcagcaaccugcugcugcaguacggcagcuucugcacccagcugaaccgggcccugaccggcaucgccguggagcaggacaagaacacccaagagguguucgcccaggugaagcagaucuacaagacucccccaaucaaggacuucggcggcuucaacuucagccagauccugcccgaccccagcaagcccagcaagcggagcuucaucgaggaccugcuguucaacaaggugacccuggccgacgccggcuucaucaagcaguacggcgacugccugggggauaucgccgcucgggaccugaucugcgcccagaaguucaacggccugaccgugcugcccccucugcugaccgacgagaugaucgcccaguacaccagcgcccugcuugccggcaccaucaccagcggcuggaccuucggcgccggcgcagcccugcagauccccuucgccaugcagauggccuaccgguucaacggcaucggcgugacccagaacgugcuguacgagaaccagaagcugaucgccaaccaguucaacagcgccaucggcaagauccaggacagccugagcagcaccgccagcgcccugggcaagcugcaggacguggugaaccagaacgcucaggcccugaacacccuggugaagcagcugagcagcaacuucggcgccaucagcucagugcugaaugacauccugagcaggcuggaucccccagaggccgaggugcagaucgaccggcugaucaccggccggcugcagagccugcagaccuacgugacccagcagcugauccgggccgccgagauccgggccagcgccaaccuggcagccaccaagaugagcgagugcgugcugggccagagcaagcggguggacuuuugcggcaagggcuaccaccugaugagcuucccccagagcgcuccccacggcgugguguuccuccacgugacauacguccccgcccaggagaagaacuucaccaccgcccccgccauuugccacgacggcaaggcccacuucccccgggagggaguguucgugagcaacggcacccacugguucgugacccagcggaacuucuacgagccucagaucaucaccaccgacaacaccuucgugagcggcaacugcgacguggugaucggcaucgugaacaacaccguguacgacccccugcagcccgagcuggacagcuucaaggaggagcuggacaaguacuucaagaaccacaccagcccagacguggaccugggcgacaucagcggcaucaacgccagcguggugaacauccagaaggagaucgaccggcugaacgagguggccaagaaccugaacgagagccugaucgaccugcaggagcugggcaaguacgagcaguacaucaaguggcccugguacaucuggcugggcuucaucgccggccugaucgccaucgugauggugaccaucaugcugugcugcaugaccagcugcuguagcugccugaagggcugcugcagcugcggcagcugcugcaaguucgacgaggacgacagcgagcccgugcugaagggcgugaagcugcacuacaccugaggacuaguuauaagacugacuagcccgaugggccucccaacgggcccuccuccccuccuugcaccgagauuaauaaaaaaaaaaaaaaaaaaaaaaaaaaaaaaaaaaaaaaaaaaaaaaaaaaaaaaaaaaaaaaaaaaaaaaaaaaaaaaaaaaaaaaaaaaaaaaaaaaaa

SEQ ID NO: 25553 - RNA, 4011 nt, Artificial Sequence
  SARS-CoV-2/Wuhan/WIV05/2019__EPI_ISL_402128 spike protein mRNA gc (1-1273)(K986P_V987P_A222V_D614G)
aggagaaagcuuaccauguucguguuccuggugcugcugccccuggugagcagccagugcgugaaccugaccacccggacccagcugcccccugccuacaccaacagcuucacccggggcguguacuaccccgacaagguguuccggagcagcgugcugcacagcacccaggaccuguuccugcccuucuucagcaacgugaccugguuccacgccauccacgugagcggcaccaacggcaccaagcgguucgacaacccagugcugcccuucaacgacggcguguacuucgccagcaccgagaagucaaacaucauccggggcuggaucuucggcaccacccuggacagcaagacacagagccugcugaucgugaacaacgccaccaacguggugaucaaggugugcgaguuucaguucugcaacgaccccuuccugggcguguacuaccacaagaacaacaagagcuggauggagagcgaguuccgggucuacagcagcgcuaacaauugcaccuucgaguacgugagccagcccuuccugauggaccucgagggcaagcagggcaacuucaagaaccugcgggaguucguguucaagaacaucgauggcuacuucaagaucuacagcaagcacacccccaucaaccuggugcgggaccugccccagggauucagcgugcuggagccucugguggaccugcccaucggcaucaacaucaccagguuccagacccugcuggcccugcaccggagcuaccugacccccggcgacagcagcagcggcuggaccgccggcgccgccgccuacuacgugggcuaccugcagccacggaccuuccugcugaaguacaacgagaacggcaccaucaccgacgcaguggacugcgcccuggacccccugagcgagaccaagugcacccuaaagagcuucaccguggagaagggcaucuaccagaccagcaacuuccgggugcagcccacugagagcaucgugcgguuccccaacauuaccaaccugugucccuucggcgagguguucaacgccacccgguucgccagcguguacgccuggaaccggaagcggaucagcaacugcguggccgacuacagcgugcuguacaacagcgccagcuucagcaccuucaagugcuacggcgugagcccuaccaagcugaacgaccugugcuucaccaacguguacgccgacagcuucgugauccggggcgacgaggugcggcagaucgcucccggccagaccggcaagaucgccgacuacaacuacaagcugcccgacgacuucaccggcugcgugaucgccuggaacagcaacaaccuggacagcaaggugggcggcaacuacaacuaccuguaccggcuguuccguaagagcaaccugaagccauucgagcgggacaucagcaccgagaucuaccaggccggcagcacccccugcaacgguguggagggcuuuaacugcuacuucccccugcagagcuacggcuuccagcccaccaacggcgugggcuaccagcccuaccgggugguggugcugagcuucgagcugcugcacgcccccgccaccgugugcggcccuaaaaagagcaccaaccuggugaagaacaagugcgugaacuucaauuucaacggccugaccggcaccggcgugcugaccgagagcaacaagaaguuccugcccuuccagcaguucggccgggauaucgccgacaccaccgacgccgugcgggacccccagacccuggagauccuggacaucaccccaugcagcuucggcggcgucagcgugaucacccccggcacaaacaccagcaaccagguggcagugcuguaccagggagugaacugcaccgaggugcccguggccauccacgccgaccagcugacccccaccuggcggguguacagcaccggcagcaacguguuccagacccgggccggcugccugaucggcgccgagcacgugaacaacuccuacgagugcgacauccccaucggcgccggcaucugcgcuagcuaccagacccagaccaacagcccccggcgggcccggagcguggccagccagagcaucaucgccuacaccaugagcuuaggcgccgagaacagcguggccuacagcaacaacagcaucgccaucccuaccaacuucaccaucagcgugaccaccgagauacugcccgugagcaugaccaagaccagcguggacuguaccauguacaucugcggcgacagcaccgagugcagcaaccugcugcugcaguacggcagcuucugcacccagcugaaccgggcgcugaccggcaucgccguggagcaggacaagaacacccaagagguguucgcccaggugaagcagaucuacaagacucccccaaucaaggacuucggcggcuucaacuucagccagauccugcccgaccccagcaagcccagcaagcggagcuucaucgaggaccugcuguucaacaaggugacccuggccgacgccggcuucaucaagcaguacggcgacugccugggggauaucgccgcccgggaccugaucugcgcucagaaguucaacggccugaccgugcugcccccucugcugaccgacgagaugaucgcccaguacaccagcgcccugcuugccggcaccaucaccagcggcuggaccuucggcgccggcgccgcacugcagauccccuucgccaugcagauggccuaccgguucaacggcaucggcgugacccagaacgugcuguacgagaaccagaagcugaucgccaaccaguucaacagcgccaucggcaagauccaggacagccugagcagcaccgccagcgcccugggcaagcugcaggacguggugaaccagaacgcccaggcucugaacacccuggugaagcagcugagcagcaacuucggcgccaucagcucagugcugaaugacauccugagcaggcuggaucccccagaggccgaggugcagaucgaccggcugaucaccggccggcugcagagccugcagaccuacgugacccagcagcugauccgggccgccgagauccgggccagcgccaaccuggccgcaaccaagaugagcgagugcgugcugggccagagcaagcggguggacuuuugcggcaagggcuaccaccugaugagcuucccccagagcgcuccccacggcgugguguuccuccacgucacauacgugcccgcccaggagaagaacuucaccaccgcccccgccauuugccacgacggcaaggcccacuucccccgggagggaguguucgugagcaacggcacccacugguucgugacccagcggaacuucuacgagccucagaucaucaccaccgacaacaccuucgugagcggcaacugcgacguggugaucggcaucgugaacaacaccguguacgacccccugcagcccgagcuggacagcuucaaggaggagcuggacaaguacuucaagaaccacaccagcccagacguggaccugggcgacaucagcggcaucaacgccagcguggugaacauccagaaggagaucgaccggcugaacgagguggccaagaaccugaacgagagccugaucgaccugcaggagcugggcaaguacgagcaguacaucaaguggcccugguacaucuggcugggcuucaucgccggccugaucgccaucgugauggugaccaucaugcugugcugcaugaccagcugcuguagcugccugaagggcugcugcagcugcggcagcugcugcaaguucgacgaggacgacagcgagcccgugcugaagggcgugaagcugcacuacaccugaggacuaguuauaagacugacuagcccgaugggccucccaacgggcccuccuccccuccuugcaccgagauuaauaaaaaaaaaaaaaaaaaaaaaaaaaaaaaaaaaaaaaaaaaaaaaaaaaaaaaaaaaaaaaaaaaaaaaaaaaaaaaaaaaaaaaaaaaaaaaaaaaaaa

SEQ ID NO: 25554 - RNA, 4011 nt, Artificial Sequence
  SARS-CoV-2/Wuhan/WIV05/2019__EPI_ISL_402128 spike protein mRNA gc (1-1273)(K986P_V987P_N439K_D614G)
aggagaaagcuuaccauguucguguuccuggugcugcugccccuggugagcagccagugcgugaaccugaccacccggacccagcugcccccugccuacaccaacagcuucacccggggcguguacuaccccgacaagguguuccggagcagcgugcugcacagcacccaggaccuguuccugcccuucuucagcaacgugaccugguuccacgccauccacgugagcggcaccaacggcaccaagcgguucgacaacccagugcugcccuucaacgacggcguguacuucgccagcaccgagaagucaaacaucauccggggcuggaucuucggcaccacccuggacagcaagacacagagccugcugaucgugaacaacgccaccaacguggugaucaaggugugcgaguuucaguucugcaacgaccccuuccugggcguguacuaccacaagaacaacaagagcuggauggagagcgaguuccgggucuacagcagcgcuaacaauugcaccuucgaguacgugagccagcccuuccugauggaccucgagggcaagcagggcaacuucaagaaccugcgggaguucguguucaagaacaucgauggcuacuucaagaucuacagcaagcacacccccaucaaccuggugcgggaccugccccagggauucagcgcccuggagccucugguggaccugcccaucggcaucaacaucaccagguuccagacccugcuggcccugcaccggagcuaccugacccccggcgacagcagcagcggcuggaccgccggcgccgccgcauacuacgugggcuaccugcagccacggaccuuccugcugaaguacaacgagaacggcaccaucaccgacgccguggacugcgcccuggacccccugagcgagaccaagugcacccuaaagagcuucaccguggagaagggcaucuaccagaccagcaacuuccgggugcagcccacugagagcaucgugcgguuccccaacauuaccaaccugugucccuucggcgagguguucaacgccacccgguucgccagcguguacgccuggaaccggaagcggaucagcaacugcguggccgacuacagcgugcuguacaacagcgccagcuucagcaccuucaagugcuacggcgugagcccuaccaagcugaacgaccugugcuucaccaacguguacgcugacagcuucgugauccggggcgacgaggugcggcagaucgcccccggccagaccggcaagaucgccgacuacaacuacaagcugcccgacgacuucaccggcugcgugaucgccuggaacagcaagaaccuggacagcaaggugggcggcaacuacaacuaccuguaccggcuguuccguaagagcaaccugaagccauucgagcgggacaucagcaccgagaucuaccaggccggcagcacccccugcaacgguguggagggcuuuaacugcuacuucccccugcagagcuacggcuuccagcccaccaacggcgugggcuaccagcccuaccgggugguggugcugagcuucgagcugcugcacgcccccgccaccgugugcggcccuaaaaagagcaccaaccuggugaagaacaagugcgugaacuucaacuucaauggccugaccggcaccggcgugcugaccgagagcaacaagaaguuccugcccuuccagcaguucggccgggauaucgccgacaccaccgacgcagugcgggacccccagacccuggagauccuggacaucaccccaugcagcuucggcggcgugagcgucaucacccccggcacaaacaccagcaaccagguggccgugcuguaccagggagugaacugcaccgaggugcccguggccauccacgccgaccagcugacccccaccuggcggguguacagcaccggcagcaacguguuccagacccgggccggcugccugaucggcgccgagcacgugaacaacuccuacgagugcgacauccccaucggcgcuggcaucugcgccagcuaccagacccagaccaacagcccccggcgggcccggagcguggccagccagagcaucaucgccuacaccaugagcuuaggcgccgagaacagcguggccuacagcaacaacagcaucgcgaucccuaccaacuucaccaucagcgugaccaccgagauacugcccgugagcaugaccaagaccagcguggacuguaccauguacaucugcggcgacagcaccgagugcagcaaccugcugcugcaguacggcagcuucugcacccagcugaaccgggcccugaccggcaucgccguggagcaggacaagaacacccaagagguguucgcccaggugaagcagaucuacaagacucccccaaucaaggacuucggcggcuucaacuucagccagauccugcccgaccccagcaagcccagcaagcggagcuucaucgaggaccugcuguucaacaaggugacccuggccgacgccggcuucaucaagcaguacggcgacugccugggggauaucgccgcucgggaccugaucugcgcccagaaguucaacggccugaccgugcugcccccucugcugaccgacgagaugaucgcccaguacaccagcgcccugcuugccggcaccaucaccagcggcuggaccuucggcgccggcgcagcccugcagauccccuucgccaugcagauggccuaccgguucaacggcaucggcgugacccagaacgugcuguacgagaaccagaagcugaucgccaaccaguucaacagcgccaucggcaagauccaggacagccugagcagcaccgccagcgcccugggcaagcugcaggacguggugaaccagaacgcucaggcccugaacacccuggugaagcagcugagcagcaacuucggcgccaucagcucagugcugaacgacauccugagcaggcuggaucccccagaggccgaggugcagaucgaccggcugaucaccggccggcugcagagccugcagaccuacgugacccagcagcugauccgggccgccgagauccgggccagcgccaaucuggcagccaccaagaugagcgagugcgugcugggccagagcaagcggguggacuuuugcggcaagggcuaccaccugaugagcuucccccagagcgcuccccacggcgugguguuccuccacgugacauacguccccgcccaggagaagaacuucaccaccgcccccgccauuugccacgacggcaaggcccacuucccccgggagggaguguucgugagcaacggcacccacugguucgugacccagcggaacuucuacgagccucagaucaucaccaccgacaacaccuucgugagcggcaacugcgacguggugaucggcaucgugaacaacaccguguacgacccccugcagcccgagcuggacagcuucaaggaggagcuggacaaguacuucaagaaccacaccagcccagacguggaccugggcgacaucagcggcaucaacgccagcguggugaacauccagaaggagaucgaccggcugaacgagguggccaagaaccugaacgagagccugaucgaccugcaggagcugggcaaguacgagcaguacaucaaguggcccugguacaucuggcugggcuucaucgccggccugaucgccaucgugauggugaccaucaugcugugcugcaugaccagcugcuguagcugccugaagggcugcugcagcugcggcagcugcugcaaguucgacgaggacgacagcgagcccgugcugaagggcgugaagcugcacuacaccugaggacuaguuauaagacugacuagcccgaugggccucccaacgggcccuccuccccuccuugcaccgagauuaauaaaaaaaaaaaaaaaaaaaaaaaaaaaaaaaaaaaaaaaaaaaaaaaaaaaaaaaaaaaaaaaaaaaaaaaaaaaaaaaaaaaaaaaaaaaaaaaaaaaa

SEQ ID NO: 25555 - RNA, 4011 nt, Artificial Sequence
  SARS-CoV-2/Wuhan/WIV05/2019__EPI_ISL_402128 spike protein mRNA gc (1-1273)(K986P_V987P_S477N_D614G)
aggagaaagcuuaccauguucguguuccuggugcugcugccccuggugagcagccagugcgugaaccugaccacccggacccagcugcccccugccuacaccaacagcuucacccggggcguguacuaccccgacaagguguuccggagcagcgugcugcacagcacccaggaccuguuccugcccuucuucagcaacgugaccugguuccacgccauccacgugagcggcaccaacggcaccaagcgguucgacaacccagugcugcccuucaacgacggcguguacuucgccagcaccgagaagucaaacaucauccggggcuggaucuucggcaccacccuggacagcaagacacagagccugcugaucgugaacaacgccaccaacguggugaucaaggugugcgaguuucaguucugcaacgaccccuuccugggcguguacuaccacaagaacaacaagagcuggauggagagcgaguuccgggucuacagcagcgcuaacaauugcaccuucgaguacgugagccagcccuuccugauggaccucgagggcaagcagggcaacuucaagaaccugcgggaguucguguucaagaacaucgauggcuacuucaagaucuacagcaagcacacccccaucaaccuggugcgggaccugccccagggauucagcgcccuggagccucugguggaccugcccaucggcaucaacaucaccagguuccagacccugcuggcccugcaccggagcuaccugacccccggcgacagcagcagcggcuggaccgccggcgccgccgcauacuacgugggcuaccugcagccacggaccuuccugcugaaguacaacgagaacggcaccaucaccgacgccguggacugcgcccuggacccccugagcgagaccaagugcacccuaaagagcuucaccguggagaagggcaucuaccagaccagcaacuuccgggugcagcccacugagagcaucgugcgguuccccaacauuaccaaccugugucccuucggcgagguguucaacgccacccgguucgccagcguguacgccuggaaccggaagcggaucagcaacugcguggccgacuacagcgugcuguacaacagcgccagcuucagcaccuucaagugcuacggcgugagcccuaccaagcugaacgaccugugcuucaccaacguguacgcugacagcuucgugauccggggcgacgaggugcggcagaucgcccccggccagaccggcaagaucgccgacuacaacuacaagcugcccgacgacuucaccggcugcgugaucgccuggaacagcaacaaccuggacagcaaggugggcggcaacuacaacuaccuguaccggcuguuccguaagagcaaccugaagccauucgagcgggacaucagcaccgagaucuaccaggccggcaacacccccugcaacgguguggagggcuuuaacugcuacuucccccugcagagcuacggcuuccagcccaccaacggcgugggcuaccagcccuaccgggugguggugcugagcuucgagcugcugcacgcccccgccaccgugugcggcccuaaaaagagcaccaaccuggugaagaacaagugcgugaauuucaacuucaacggccugaccggcaccggcgugcugaccgagagcaacaagaaguuccugcccuuccagcaguucggccgggauaucgccgacaccaccgacgcagugcgggacccccagacccuggagauccuggacaucaccccaugcagcuucggcggcgugagcgucaucacccccggcacaaacaccagcaaccagguggccgugcuguaccagggagugaacugcaccgaggugcccguggccauccacgccgaccagcugacccccaccuggcggguguacagcaccggcagcaacguguuccagacccgggccggcugccugaucggcgccgagcacgugaacaacagcuacgagugcgacauccccaucggcgcuggcaucugcgccuccuaccagacccagaccaacagcccccggcgggcccggagcguggccagccagagcaucaucgccuacaccaugagcuuaggcgccgagaacagcguggccuacagcaacaacagcaucgcgaucccuaccaacuucaccaucagcgugaccaccgagauacugcccgugagcaugaccaagaccagcguggacuguaccauguacaucugcggcgacagcaccgagugcagcaaccugcugcugcaguacggcagcuucugcacccagcugaaccgggcccugaccggcaucgccguggagcaggacaagaacacccaagagguguucgcccaggugaagcagaucuacaagacucccccaaucaaggacuucggcggcuucaacuucagccagauccugcccgaccccagcaagcccagcaagcggagcuucaucgaggaccugcuguucaacaaggugacccuggccgacgccggcuucaucaagcaguacggcgacugccugggggauaucgccgcucgggaccugaucugcgcccagaaguucaacggccugaccgugcugcccccucugcugaccgacgagaugaucgcccaguacaccagcgcccugcuugccggcaccaucaccagcggcuggaccuucggcgccggcgcagcccugcagauccccuucgccaugcagauggccuaccgguucaacggcaucggcgugacccagaacgugcuguacgagaaccagaagcugaucgccaaccaguucaacagcgccaucggcaagauccaggacagccugagcagcaccgccagcgcccugggcaagcugcaggacguggugaaccagaacgcucaggcccugaacacccuggugaagcagcugagcagcaauuucggcgccaucagcagcgugcugaacgacauccugucaaggcuggaucccccagaggccgaggugcagaucgaccggcugaucaccggccggcugcagagccugcagaccuacgugacccagcagcugauccgggccgccgagauccgggccagcgccaaccuggcagccaccaagaugagcgagugcgugcugggccagagcaagcggguggacuuuugcggcaagggcuaccaccugaugagcuucccccagagcgcuccccacggcgugguguuccuccacgugacauacguccccgcccaggagaagaacuucaccaccgcccccgccauuugccacgacggcaaggcccacuucccccgggagggaguguucgugagcaacggcacccacugguucgugacccagcggaacuucuacgagccucagaucaucaccaccgacaacaccuucgugagcggcaacugcgacguggugaucggcaucgugaacaacaccguguacgacccccugcagcccgagcuggacagcuucaaggaggagcuggacaaguacuucaagaaccacaccagcccagacguggaccugggcgacaucagcggcaucaacgccagcguggugaacauccagaaggagaucgaccggcugaacgagguggccaagaaccugaacgagagccugaucgaccugcaggagcugggcaaguacgagcaguacaucaaguggcccugguacaucuggcugggcuucaucgccggccugaucgccaucgugauggugaccaucaugcugugcugcaugaccagcugcuguagcugccugaagggcugcugcagcugcggcagcugcugcaaguucgacgaggacgacagcgagcccgugcugaagggcgugaagcugcacuacaccugaggacuaguuauaagacugacuagcccgaugggccucccaacgggcccuccuccccuccuugcaccgagauuaauaaaaaaaaaaaaaaaaaaaaaaaaaaaaaaaaaaaaaaaaaaaaaaaaaaaaaaaaaaaaaaaaaaaaaaaaaaaaaaaaaaaaaaaaaaaaaaaaaaaa

SEQ ID NO: 25556 - RNA, 4011 nt, Artificial Sequence
  SARS-CoV-2/Wuhan/WIV05/2019__EPI_ISL_402128 spike protein mRNA gc (1-1273)(K986P_V987P_N501Y_D614G)
aggagaaagcuuaccauguucguguuccuggugcugcugccccuggugagcagccagugcgugaaccugaccacccggacccagcugcccccugccuacaccaacagcuucacccggggcguguacuaccccgacaagguguuccggagcagcgugcugcacagcacccaggaccuguuccugcccuucuucagcaacgugaccugguuccacgccauccacgugagcggcaccaacggcaccaagcgguucgacaacccagugcugcccuucaacgacggcguguacuucgccagcaccgagaagucaaacaucauccggggcuggaucuucggcaccacccuggacagcaagacacagagccugcugaucgugaacaacgccaccaacguggugaucaaggugugcgaguuucaguucugcaacgaccccuuccugggcguguacuaccacaagaacaacaagagcuggauggagagcgaguuccgggucuacagcagcgcuaacaauugcaccuucgaguacgugagccagcccuuccugauggaccucgagggcaagcagggcaacuucaagaaccugcgggaguucguguucaagaacaucgauggcuacuucaagaucuacagcaagcacacccccaucaaccuggugcgggaccugccccagggauucagcgcccuggagccucugguggaccugcccaucggcaucaacaucaccagguuccagacccugcuggcccugcaccggagcuaccugacccccggcgacagcagcagcggcuggaccgccggcgccgccgcauacuacgugggcuaccugcagccacggaccuuccugcugaaguacaacgagaacggcaccaucaccgacgccguggacugcgcccuggacccccugagcgagaccaagugcacccuaaagagcuucaccguggagaagggcaucuaccagaccagcaacuuccgggugcagcccacugagagcaucgugcgguuccccaacauuaccaaccugugucccuucggcgagguguucaacgccacccgguucgccagcguguacgccuggaaccggaagcggaucagcaacugcguggccgacuacagcgugcuguacaacagcgccagcuucagcaccuucaagugcuacggcgugagcccuaccaagcugaacgaccugugcuucaccaacguguacgcugacagcuucgugauccggggcgacgaggugcggcagaucgcccccggccagaccggcaagaucgccgacuacaacuacaagcugcccgacgacuucaccggcugcgugaucgccuggaacagcaacaaccuggacagcaaggugggcggcaacuacaacuaccuguaccggcuguuccguaagagcaaccugaagccauucgagcgggacaucagcaccgagaucuaccaggccggcagcacccccugcaacgguguggagggcuuuaacugcuacuucccccugcagagcuacggcuuccagcccaccuacggcgugggcuaccagcccuaccgggugguggugcugagcuucgagcugcugcacgcccccgccaccgugugcggcccuaaaaagagcaccaaccuggugaagaacaagugcgugaacuucaacuucaauggccugaccggcaccggcgugcugaccgagagcaacaagaaguuccugcccuuccagcaguucggccgggauaucgccgacaccaccgacgcagugcgggacccccagacccuggagauccuggacaucaccccaugcagcuucggcggcgugagcgucaucacccccggcacaaacaccagcaaccagguggccgugcuguaccagggagugaacugcaccgaggugcccguggccauccacgccgaccagcugacccccaccuggcggguguacagcaccggcagcaacguguuccagacccgggccggcugccugaucggcgccgagcacgugaacaacuccuacgagugcgacauccccaucggcgcuggcaucugcgccagcuaccagacccagaccaacagcccccggcgggcccggagcguggccagccagagcaucaucgccuacaccaugagcuuaggcgccgagaacagcguggccuacagcaacaacagcaucgcgaucccuaccaacuucaccaucagcgugaccaccgagauacugcccgugagcaugaccaagaccagcguggacuguaccauguacaucugcggcgacagcaccgagugcagcaaccugcugcugcaguacggcagcuucugcacccagcugaaccgggcccugaccggcaucgccguggagcaggacaagaacacccaagagguguucgcccaggugaagcagaucuacaagacucccccaaucaaggacuucggcggcuucaacuucagccagauccugcccgaccccagcaagcccagcaagcggagcuucaucgaggaccugcuguucaacaaggugacccuggccgacgccggcuucaucaagcaguacggcgacugccugggggauaucgccgcucgggaccugaucugcgcccagaaguucaacggccugaccgugcugcccccucugcugaccgacgagaugaucgcccaguacaccagcgcccugcuugccggcaccaucaccagcggcuggaccuucggcgccggcgcagcccugcagauccccuucgccaugcagauggccuaccgguucaacggcaucggcgugacccagaacgugcuguacgagaaccagaagcugaucgccaaccaguucaacagcgccaucggcaagauccaggacagccugagcagcaccgccagcgcccugggcaagcugcaggacguggugaaccagaacgcucaggcccugaacacccuggugaagcagcugagcagcaacuucggcgccaucagcucagugcugaacgacauccugagcaggcuggaucccccagaggccgaggugcagaucgaccggcugaucaccggccggcugcagagccugcagaccuacgugacccagcagcugauccgggccgccgagauccgggccagcgccaaucuggcagccaccaagaugagcgagugcgugcugggccagagcaagcggguggacuuuugcggcaagggcuaccaccugaugagcuucccccagagcgcuccccacggcgugguguuccuccacgugacauacguccccgcccaggagaagaacuucaccaccgcccccgccauuugccacgacggcaaggcccacuucccccgggagggaguguucgugagcaacggcacccacugguucgugacccagcggaacuucuacgagccucagaucaucaccaccgacaacaccuucgugagcggcaacugcgacguggugaucggcaucgugaacaacaccguguacgacccccugcagcccgagcuggacagcuucaaggaggagcuggacaaguacuucaagaaccacaccagcccagacguggaccugggcgacaucagcggcaucaacgccagcguggugaacauccagaaggagaucgaccggcugaacgagguggccaagaaccugaacgagagccugaucgaccugcaggagcugggcaaguacgagcaguacaucaaguggcccugguacaucuggcugggcuucaucgccggccugaucgccaucgugauggugaccaucaugcugugcugcaugaccagcugcuguagcugccugaagggcugcugcagcugcggcagcugcugcaaguucgacgaggacgacagcgagcccgugcugaagggcgugaagcugcacuacaccugaggacuaguuauaagacugacuagcccgaugggccucccaacgggcccuccuccccuccuugcaccgagauuaauaaaaaaaaaaaaaaaaaaaaaaaaaaaaaaaaaaaaaaaaaaaaaaaaaaaaaaaaaaaaaaaaaaaaaaaaaaaaaaaaaaaaaaaaaaaaaaaaaaaa

SEQ ID NO: 25557 - RNA, 4005 nt, Artificial Sequence
  SARS-CoV-2/Wuhan/WIV05/2019__EPI_ISL_402128 spike protein mRNA gc (1-1273)(K986P_V987P_H69del_V70del_D614G)
aggagaaagcuuaccauguucguguuccuggugcugcugccccuggugagcagccagugcgugaaccugaccacccggacccagcugcccccugccuacaccaacagcuucacccggggcguguacuaccccgacaagguguuccggagcagcgugcugcacagcacccaggaccuguuccugcccuucuucagcaacgugaccugguuccacgccaucagcggcaccaacggcaccaagcgguucgacaacccagugcugcccuucaacgacggcguguacuucgccagcaccgagaagucaaacaucauccggggcuggaucuucggcaccacccuggacagcaagacacagagccugcugaucgugaacaacgccaccaacguggugaucaaggugugcgaguuucaguucugcaacgaccccuuccugggcguguacuaccacaagaacaacaagagcuggauggagagcgaguuccggguguacagcagcgcuaacaauugcaccuucgaguacgucagccagcccuuccugauggaccucgagggcaagcagggcaacuucaagaaccugcgggaguucguguucaagaacaucgauggcuacuucaagaucuacagcaagcacacccccaucaaccuggugcgggaccugccccagggauucagcgcccuggagccucugguggaccugcccaucggcaucaacaucaccagguuccagacccugcuggcccugcaccggagcuaccugacccccggcgacagcagcagcggcuggaccgccggcgccgccgcauacuacgugggcuaccugcagccacggaccuuccugcugaaguacaacgagaacggcaccaucaccgacgccguggacugcgcccuggacccccugagcgagaccaagugcacccuaaagagcuucaccguggagaagggcaucuaccagaccagcaacuuccgggugcagcccacugagagcaucgugcgguuccccaacauuaccaaccugugucccuucggcgagguguucaacgccacccgguucgccagcguguacgccuggaaccggaagcggaucagcaacugcguggccgacuacagcgugcuguacaacagcgccagcuucagcaccuucaagugcuacggcgugagcccuaccaagcugaacgaccugugcuucaccaacguguacgcugacagcuucgugauccggggcgacgaggugcggcagaucgcccccggccagaccggcaagaucgccgacuacaacuacaagcugcccgacgacuucaccggcugcgugaucgccuggaacagcaacaaccuggacagcaaggugggcggcaacuacaacuaccuguaccggcuguuccguaagagcaaccugaagccauucgagcgggacaucagcaccgagaucuaccaggccggcagcacccccugcaacgguguggagggcuuuaacugcuacuucccccugcagagcuacggcuuccagcccaccaacggcgugggcuaccagcccuaccgggugguggugcugagcuucgagcugcugcacgcccccgccaccgugugcggcccuaaaaagagcaccaaccuggugaagaacaagugcgugaacuucaauuucaacggccugaccggcaccggcgugcugaccgagagcaacaagaaguuccugcccuuccagcaguucggccgggauaucgccgacaccaccgacgcagugcgggacccccagacccuggagauccuggacaucaccccaugcagcuucggcggcgugagcgugaucacccccggcacaaacaccagcaaccaggucgccgugcuguaccagggagugaacugcaccgaggugcccguggccauccacgccgaccagcugacccccaccuggcggguguacagcaccggcagcaacguguuccagacccgggccggcugccugaucggcgccgagcacgugaacaacuccuacgagugcgacauccccaucggcgcuggcaucugcgccagcuaccagacccagaccaacagcccccggcgggcccggagcguggccagccagagcaucaucgccuacaccaugagcuuaggcgccgagaacagcguggccuacagcaacaacagcaucgcgaucccuaccaacuucaccaucagcgugaccaccgagauacugcccgugagcaugaccaagaccagcguggacuguaccauguacaucugcggcgacagcaccgagugcagcaaccugcugcugcaguacggcagcuucugcacccagcugaaccgggcccugaccggcaucgccguggagcaggacaagaacacccaagagguguucgcccaggugaagcagaucuacaagacucccccaaucaaggacuucggcggcuucaacuucagccagauccugcccgaccccagcaagcccagcaagcggagcuucaucgaggaccugcuguucaacaaggugacccuggccgacgccggcuucaucaagcaguacggcgacugccugggggauaucgccgcucgggaccugaucugcgcccagaaguucaacggccugaccgugcugcccccucugcugaccgacgagaugaucgcccaguacaccagcgcccugcuugccggcaccaucaccagcggcuggaccuucggcgccggcgcagcccugcagauccccuucgccaugcagauggccuaccgguucaacggcaucggcgugacccagaacgugcuguacgagaaccagaagcugaucgccaaccaguucaacagcgccaucggcaagauccaggacagccugagcagcaccgccagcgcccugggcaagcugcaggacguggugaaccagaacgcucaggcccugaacacccuggugaagcagcugagcagcaacuucggcgccaucagcucagugcugaaugacauccugagcaggcuggaucccccagaggccgaggugcagaucgaccggcugaucaccggccggcugcagagccugcagaccuacgugacccagcagcugauccgggccgccgagauccgggccagcgccaaccuggcagccaccaagaugagcgagugcgugcugggccagagcaagcggguggacuuuugcggcaagggcuaccaccugaugagcuucccccagagcgcuccccacggcgugguguuccuccacgugacauacgugcccgcccaggagaagaacuucaccaccgcccccgccauuugccacgacggcaaggcccacuucccccgggagggagucuucgugagcaacggcacccacugguucgugacccagcggaacuucuacgagccucagaucaucaccaccgacaacaccuucgugagcggcaacugcgacguggugaucggcaucgugaacaacaccguguacgacccccugcagcccgagcuggacagcuucaaggaggagcuggacaaguacuucaagaaccacaccagcccagacguggaccugggcgacaucagcggcaucaacgccagcguggugaacauccagaaggagaucgaccggcugaacgagguggccaagaaccugaacgagagccugaucgaccugcaggagcugggcaaguacgagcaguacaucaaguggcccugguacaucuggcugggcuucaucgccggccugaucgccaucgugauggugaccaucaugcugugcugcaugaccagcugcuguagcugccugaagggcugcugcagcugcggcagcugcugcaaguucgacgaggacgacagcgagcccgugcugaagggcgugaagcugcacuacaccugaggacuaguuauaagacugacuagcccgaugggccucccaacgggcccuccuccccuccuugcaccgagauuaauaaaaaaaaaaaaaaaaaaaaaaaaaaaaaaaaaaaaaaaaaaaaaaaaaaaaaaaaaaaaaaaaaaaaaaaaaaaaaaaaaaaaaaaaaaaaaaaaaaaa

SEQ ID NO: 25558 - RNA, 4011 nt, Artificial Sequence
  SARS-CoV-2/Wuhan/WIV05/2019__EPI_ISL_402128 spike protein mRNA gc (1-1273)(K986P_V987P_Y453F_D614G)
aggagaaagcuuaccauguucguguuccuggugcugcugccccuggugagcagccagugcgugaaccugaccacccggacccagcugcccccugccuacaccaacagcuucacccggggcguguacuaccccgacaagguguuccggagcagcgugcugcacagcacccaggaccuguuccugcccuucuucagcaacgugaccugguuccacgccauccacgugagcggcaccaacggcaccaagcgguucgacaacccagugcugcccuucaacgacggcguguacuucgccagcaccgagaagucaaacaucauccggggcuggaucuucggcaccacccuggacagcaagacacagagccugcugaucgugaacaacgccaccaacguggugaucaaggugugcgaguuucaguucugcaacgaccccuuccugggcguguacuaccacaagaacaacaagagcuggauggagagcgaguuccgggucuacagcagcgcuaacaauugcaccuucgaguacgugagccagcccuuccugauggaccucgagggcaagcagggcaacuucaagaaccugcgggaguucguguucaagaacaucgauggcuacuucaagaucuacagcaagcacacccccaucaaccuggugcgggaccugccccagggauucagcgcccuggagccucugguggaccugcccaucggcaucaacaucaccagguuccagacccugcuggcccugcaccggagcuaccugacccccggcgacagcagcagcggcuggaccgccggcgccgccgcauacuacgugggcuaccugcagccacggaccuuccugcugaaguacaacgagaacggcaccaucaccgacgccguggacugcgcccuggacccccugagcgagaccaagugcacccuaaagagcuucaccguggagaagggcaucuaccagaccagcaacuuccgggugcagcccacugagagcaucgugcgguuccccaacauuaccaaccugugucccuucggcgagguguucaacgccacccgguucgccagcguguacgccuggaaccggaagcggaucagcaacugcguggccgacuacagcgugcuguacaacagcgccagcuucagcaccuucaagugcuacggcgugagcccuaccaagcugaacgaccugugcuucaccaacguguacgcugacagcuucgugauccggggcgacgaggugcggcagaucgcccccggccagaccggcaagaucgccgacuacaacuacaagcugcccgacgacuucaccggcugcgugaucgccuggaacagcaacaaccuggacagcaaggugggcggcaacuacaacuaccuguuccggcuguuccguaagagcaaccugaagccauuugagcgggacaucagcaccgagaucuaccaggccggcagcacccccugcaacgguguggagggcuucaacugcuacuucccccugcagagcuacggcuuccagcccaccaacggcgugggcuaccagcccuaccgggugguggugcugagcuucgagcugcugcacgcccccgccaccgugugcggcccuaaaaagagcaccaaccuggugaagaacaagugcgugaacuucaauuucaacggccugaccggcaccggcgugcugaccgagagcaacaagaaguuccugcccuuccagcaguucggccgggauaucgccgacaccaccgacgcagugcgggacccccagacccuggagauccuggacaucaccccaugcagcuucggcggcgugagcgucaucacccccggcacaaacaccagcaaccagguggccgugcuguaccagggagugaacugcaccgaggugcccguggccauccacgccgaccagcugacccccaccuggcggguguacagcaccggcagcaacguguuccagacccgggccggcugccugaucggcgccgagcacgugaacaacuccuacgagugcgacauccccaucggcgcuggcaucugcgccagcuaccagacccagaccaacagcccccggcgggcccggagcguggccagccagagcaucaucgccuacaccaugagcuuaggcgccgagaacagcguggccuacagcaacaacagcaucgcgaucccuaccaacuucaccaucagcgugaccaccgagauacugcccgugagcaugaccaagaccagcguggacuguaccauguacaucugcggcgacagcaccgagugcagcaaccugcugcugcaguacggcagcuucugcacccagcugaaccgggcccugaccggcaucgccguggagcaggacaagaacacccaagagguguucgcccaggugaagcagaucuacaagacucccccaaucaaggacuucggcggcuucaacuucagccagauccugcccgaccccagcaagcccagcaagcggagcuucaucgaggaccugcuguucaacaaggugacccuggccgacgccggcuucaucaagcaguacggcgacugccugggggauaucgccgcucgggaccugaucugcgcccagaaguucaacggccugaccgugcugcccccucugcugaccgacgagaugaucgcccaguacaccagcgcccugcuugccggcaccaucaccagcggcuggaccuucggcgccggcgcagcccugcagauccccuucgccaugcagauggccuaccgguucaacggcaucggcgugacccagaacgugcuguacgagaaccagaagcugaucgccaaccaguucaacagcgccaucggcaagauccaggacagccugagcagcaccgccagcgcccugggcaagcugcaggacguggugaaccagaacgcucaggcccugaacacccuggugaagcagcugagcagcaacuuuggcgccaucagcucagugcugaaugacauccugagcaggcuggaucccccagaggccgaggugcagaucgaccggcugaucaccggccggcugcagagccugcagaccuacgugacccagcagcugauccgggccgccgagauccgggccagcgccaaccuggcagccaccaagaugagcgagugcgugcugggccagagcaagcggguggacuucugcggcaagggcuaccaccugaugagcuucccccagagcgcuccccacggcgugguguuccuccacgugacauacguccccgcccaggagaagaacuucaccaccgcccccgccauuugccacgacggcaaggcccacuucccccgggagggaguguucgugagcaacggcacccacugguucgugacccagcggaacuucuacgagccucagaucaucaccaccgacaacaccuucgugagcggcaacugcgacguggugaucggcaucgugaacaacaccguguacgacccccugcagcccgagcuggacagcuucaaggaggagcuggacaaguacuucaagaaccacaccagcccagacguggaccugggcgacaucagcggcaucaacgccagcguggugaacauccagaaggagaucgaccggcugaacgagguggccaagaaccugaacgagagccugaucgaccugcaggagcugggcaaguacgagcaguacaucaaguggcccugguacaucuggcugggcuucaucgccggccugaucgccaucgugauggugaccaucaugcugugcugcaugaccagcugcuguagcugccugaagggcugcugcagcugcggcagcugcugcaaguucgacgaggacgacagcgagcccgugcugaagggcgugaagcugcacuacaccugaggacuaguuauaagacugacuagcccgaugggccucccaacgggcccuccuccccuccuugcaccgagauuaauaaaaaaaaaaaaaaaaaaaaaaaaaaaaaaaaaaaaaaaaaaaaaaaaaaaaaaaaaaaaaaaaaaaaaaaaaaaaaaaaaaaaaaaaaaaaaaaaaaaa

SEQ ID NO: 25559 - RNA, 4011 nt, Artificial Sequence
  SARS-CoV-2/Wuhan/WIV05/2019__EPI_ISL_402128 spike protein mRNA gc (1-1273)(K986P_V987P_D614G_I692V)
aggagaaagcuuaccauguucguguuccuggugcugcugccccuggugagcagccagugcgugaaccugaccacccggacccagcugcccccugccuacaccaacagcuucacccggggcguguacuaccccgacaagguguuccggagcagcgugcugcacagcacccaggaccuguuccugcccuucuucagcaacgugaccugguuccacgccauccacgugagcggcaccaacggcaccaagcgguucgacaacccagugcugcccuucaacgacggcguguacuucgccagcaccgagaagucaaacaucauccggggcuggaucuucggcaccacccuggacagcaagacacagagccugcugaucgugaacaacgccaccaacguggugaucaaggugugcgaguuucaguucugcaacgaccccuuccugggcguguacuaccacaagaacaacaagagcuggauggagagcgaguuccgggucuacagcagcgcuaacaauugcaccuucgaguacgugagccagcccuuccugauggaccucgagggcaagcagggcaacuucaagaaccugcgggaguucguguucaagaacaucgauggcuacuucaagaucuacagcaagcacacccccaucaaccuggugcgggaccugccccagggauucagcgcccuggagccucugguggaccugcccaucggcaucaacaucaccagguuccagacccugcuggcccugcaccggagcuaccugacccccggcgacagcagcagcggcuggaccgccggcgccgccgcauacuacgugggcuaccugcagccacggaccuuccugcugaaguacaacgagaacggcaccaucaccgacgccguggacugcgcccuggacccccugagcgagaccaagugcacccuaaagagcuucaccguggagaagggcaucuaccagaccagcaacuuccgggugcagcccacugagagcaucgugcgguuccccaacauuaccaaccugugucccuucggcgagguguucaacgccacccgguucgccagcguguacgccuggaaccggaagcggaucagcaacugcguggccgacuacagcgugcuguacaacagcgccagcuucagcaccuucaagugcuacggcgugagcccuaccaagcugaacgaccugugcuucaccaacguguacgcugacagcuucgugauccggggcgacgaggugcggcagaucgcccccggccagaccggcaagaucgccgacuacaacuacaagcugcccgacgacuucaccggcugcgugaucgccuggaacagcaacaaccuggacagcaaggugggcggcaacuacaacuaccuguaccggcuguuccguaagagcaaccugaagccauucgagcgggacaucagcaccgagaucuaccaggccggcagcacccccugcaacgguguggagggcuuuaacugcuacuucccccugcagagcuacggcuuccagcccaccaacggcgugggcuaccagcccuaccgggugguggugcugagcuucgagcugcugcacgcccccgccaccgugugcggcccuaaaaagagcaccaaccuggugaagaacaagugcgugaacuucaauuucaacggccugaccggcaccggcgugcugaccgagagcaacaagaaguuccugcccuuccagcaguucggccgggauaucgccgacaccaccgacgcagugcgggacccccagacccuggagauccuggacaucaccccaugcagcuucggcggcgugagcgucaucacccccggcacaaacaccagcaaccagguggccgugcuguaccagggagugaacugcaccgaggugcccguggccauccacgccgaccagcugacccccaccuggcggguguacagcaccggcagcaacguguuccagacccgggccggcugccugaucggcgccgagcacgugaacaacuccuacgagugcgacauccccaucggcgcuggcaucugcgccagcuaccagacccagaccaacagcccccggcgggcccggagcguggccagccagagcgugaucgccuacaccaugagcuuaggcgccgagaacagcguggccuacagcaacaacagcaucgcgaucccuaccaacuucaccaucagcgugaccaccgagauccugcccgugagcaugaccaagaccagcguggacuguaccauguacauaugcggcgacagcaccgagugcagcaaccugcugcugcaguacggcagcuucugcacccagcugaaccgggcccugaccggcaucgccguggagcaggacaagaacacccaagagguguucgcccaggugaagcagaucuacaagacucccccaaucaaggacuucggcggcuucaacuucagccagauccugcccgaccccagcaagcccagcaagcggagcuucaucgaggaccugcuguucaacaaggugacccuggccgacgccggcuucaucaagcaguacggcgacugccugggggauaucgccgcucgggaccugaucugcgcccagaaguucaacggccugaccgugcugcccccucugcugaccgacgagaugaucgcccaguacaccagcgcccugcuugccggcaccaucaccagcggcuggaccuucggcgccggcgcagcccugcagauccccuucgccaugcagauggccuaccgguucaacggcaucggcgugacccagaacgugcuguacgagaaccagaagcugaucgccaaccaguucaacagcgccaucggcaagauccaggacagccugagcagcaccgccagcgcccugggcaagcugcaggacguggugaaccagaacgcucaggcccugaacacccuggugaagcagcugagcagcaacuucggcgccaucagcucagugcugaaugacauccugagcaggcuggaucccccagaggccgaggugcagaucgaccggcugaucaccggccggcugcagagccugcagaccuacgugacccagcagcugauccgggccgccgagauccgggccagcgccaaccuggcagccaccaagaugagcgagugcgugcugggccagagcaagcggguggacuuuugcggcaagggcuaccaccugaugagcuucccccagagcgcuccccacggcgugguguuccuccacgucacauacgugcccgcccaggagaagaacuucaccaccgcccccgccaucugccacgacggcaaggcccacuucccccgggagggaguguucgugagcaacggcacccacugguucgugacccagcggaacuucuacgagccucagauuaucaccaccgacaacaccuucgugagcggcaacugcgacguggugaucggcaucgugaacaacaccguguacgacccccugcagcccgagcuggacagcuucaaggaggagcuggacaaguacuucaagaaccacaccagcccagacguggaccugggcgacaucagcggcaucaacgccagcguggugaacauccagaaggagaucgaccggcugaacgagguggccaagaaccugaacgagagccugaucgaccugcaggagcugggcaaguacgagcaguacaucaaguggcccugguacaucuggcugggcuucaucgccggccugaucgccaucgugauggugaccaucaugcugugcugcaugaccagcugcuguagcugccugaagggcugcugcagcugcggcagcugcugcaaguucgacgaggacgacagcgagcccgugcugaagggcgugaagcugcacuacaccugaggacuaguuauaagacugacuagcccgaugggccucccaacgggcccuccuccccuccuugcaccgagauuaauaaaaaaaaaaaaaaaaaaaaaaaaaaaaaaaaaaaaaaaaaaaaaaaaaaaaaaaaaaaaaaaaaaaaaaaaaaaaaaaaaaaaaaaaaaaaaaaaaaaa

SEQ ID NO: 25560 - RNA, 4011 nt, Artificial Sequence
  SARS-CoV-2/Wuhan/WIV05/2019__EPI_ISL_402128 spike protein mRNA gc (1-1273)(K986P_V987P_D614G_M1229I)
aggagaaagcuuaccauguucguguuccuggugcugcugccccuggugagcagccagugcgugaaccugaccacccggacccagcugcccccugccuacaccaacagcuucacccggggcguguacuaccccgacaagguguuccggagcagcgugcugcacagcacccaggaccuguuccugcccuucuucagcaacgugaccugguuccacgccauccacgugagcggcaccaacggcaccaagcgguucgacaacccagugcugcccuucaacgacggcguguacuucgccagcaccgagaagucaaacaucauccggggcuggaucuucggcaccacccuggacagcaagacacagagccugcugaucgugaacaacgccaccaacguggugaucaaggugugcgaguuucaguucugcaacgaccccuuccugggcguguacuaccacaagaacaacaagagcuggauggagagcgaguuccgggucuacagcagcgcuaacaauugcaccuucgaguacgugagccagcccuuccugauggaccucgagggcaagcagggcaacuucaagaaccugcgggaguucguguucaagaacaucgauggcuacuucaagaucuacagcaagcacacccccaucaaccuggugcgggaccugccccagggauucagcgcccuggagccucugguggaccugcccaucggcaucaacaucaccagguuccagacccugcuggcccugcaccggagcuaccugacccccggcgacagcagcagcggcuggaccgccggcgccgccgcauacuacgugggcuaccugcagccacggaccuuccugcugaaguacaacgagaacggcaccaucaccgacgccguggacugcgcccuggacccccugagcgagaccaagugcacccuaaagagcuucaccguggagaagggcaucuaccagaccagcaacuuccgggugcagcccacugagagcaucgugcgguuccccaacauuaccaaccugugucccuucggcgagguguucaacgccacccgguucgccagcguguacgccuggaaccggaagcggaucagcaacugcguggccgacuacagcgugcuguacaacagcgccagcuucagcaccuucaagugcuacggcgugagcccuaccaagcugaacgaccugugcuucaccaacguguacgcugacagcuucgugauccggggcgacgaggugcggcagaucgcccccggccagaccggcaagaucgccgacuacaacuacaagcugcccgacgacuucaccggcugcgugaucgccuggaacagcaacaaccuggacagcaaggugggcggcaacuacaacuaccuguaccggcuguuccguaagagcaaccugaagccauucgagcgggacaucagcaccgagaucuaccaggccggcagcacccccugcaacgguguggagggcuuuaacugcuacuucccccugcagagcuacggcuuccagcccaccaacggcgugggcuaccagcccuaccgggugguggugcugagcuucgagcugcugcacgcccccgccaccgugugcggcccuaaaaagagcaccaaccuggugaagaacaagugcgugaacuucaauuucaacggccugaccggcaccggcgugcugaccgagagcaacaagaaguuccugcccuuccagcaguucggccgggauaucgccgacaccaccgacgcagugcgggacccccagacccuggagauccuggacaucaccccaugcagcuucggcggcgugagcgucaucacccccggcacaaacaccagcaaccagguggccgugcuguaccagggagugaacugcaccgaggugcccguggccauccacgccgaccagcugacccccaccuggcggguguacagcaccggcagcaacguguuccagacccgggccggcugccugaucggcgccgagcacgugaacaacuccuacgagugcgacauccccaucggcgcuggcaucugcgccagcuaccagacccagaccaacagcccccggcgggcccggagcguggccagccagagcaucaucgccuacaccaugagcuuaggcgccgagaacagcguggccuacagcaacaacagcaucgcgaucccuaccaacuucaccaucagcgugaccaccgagauacugcccgugagcaugaccaagaccagcguggacuguaccauguacaucugcggcgacagcaccgagugcagcaaccugcugcugcaguacggcagcuucugcacccagcugaaccgggcccugaccggcaucgccguggagcaggacaagaacacccaagagguguucgcccaggugaagcagaucuacaagacucccccaaucaaggacuucggcggcuucaacuucagccagauccugcccgaccccagcaagcccagcaagcggagcuucaucgaggaccugcuguucaacaaggugacccuggccgacgccggcuucaucaagcaguacggcgacugccugggggauaucgccgcucgggaccugaucugcgcccagaaguucaacggccugaccgugcugcccccucugcugaccgacgagaugaucgcccaguacaccagcgcccugcuugccggcaccaucaccagcggcuggaccuucggcgccggcgcagcccugcagauccccuucgccaugcagauggccuaccgguucaacggcaucggcgugacccagaacgugcuguacgagaaccagaagcugaucgccaaccaguucaacagcgccaucggcaagauccaggacagccugagcagcaccgccagcgcccugggcaagcugcaggacguggugaaccagaacgcucaggcccugaacacccuggugaagcagcugagcagcaacuucggcgccaucagcucagugcugaaugacauccugagcaggcuggaucccccagaggccgaggugcagaucgaccggcugaucaccggccggcugcagagccugcagaccuacgugacccagcagcugauccgggccgccgagauccgggccagcgccaaccuggcagccaccaagaugagcgagugcgugcugggccagagcaagcggguggacuuuugcggcaagggcuaccaccugaugagcuucccccagagcgcuccccacggcgugguguuccuccacgugacauacguccccgcccaggagaagaacuucaccaccgcccccgccauuugccacgacggcaaggcccacuucccccgggagggaguguucgugagcaacggcacccacugguucgugacccagcggaacuucuacgagccucagaucaucaccaccgacaacaccuucgugagcggcaacugcgacguggugaucggcaucgugaacaacaccguguacgacccccugcagcccgagcuggacagcuucaaggaggagcuggacaaguacuucaagaaccacaccagcccagacguggaccugggcgacaucagcggcaucaacgccagcguggugaacauccagaaggagaucgaccggcugaacgagguggccaagaaccugaacgagagccugaucgaccugcaggagcugggcaaguacgagcaguacaucaaguggcccugguacaucuggcugggcuucaucgccggccugaucgccaucgugaucgugaccaucaugcugugcugcaugaccagcugcuguagcugccugaagggcugcugcagcugcggcagcugcugcaaguucgacgaggacgacagcgagcccgugcugaagggcgugaagcugcacuacaccugaggacuaguuauaagacugacuagcccgaugggccucccaacgggcccuccuccccuccuugcaccgagauuaauaaaaaaaaaaaaaaaaaaaaaaaaaaaaaaaaaaaaaaaaaaaaaaaaaaaaaaaaaaaaaaaaaaaaaaaaaaaaaaaaaaaaaaaaaaaaaaaaaaaa

SEQ ID NO: 25561 - RNA, 4005 nt, Artificial Sequence
  SARS-CoV-2/Wuhan/WIV05/2019__EPI_ISL_402128 spike protein mRNA gc (1-1273)(K986P_V987P_H69del_V70del_A222V_Y453F_S477N_D614G_I692V)
aggagaaagcuuaccauguucguguuccuggugcugcugccccuggugagcagccagugcgugaaccugaccacccggacccagcugcccccugccuacaccaacagcuucacccggggcguguacuaccccgacaagguguuccggagcagcgugcugcacagcacccaggaccuguuccugcccuucuucagcaacgugaccugguuccacgccaucagcggcaccaacggcaccaagcgguucgacaacccagugcugcccuucaacgacggcguguacuucgccagcaccgagaagucaaacaucauccggggcuggaucuucggcaccacccuggacagcaagacacagagccugcugaucgugaacaacgccaccaacguggugaucaaggugugcgaguuucaguucugcaacgaccccuuccugggcguguacuaccacaagaacaacaagagcuggauggagagcgaguuccggguguacagcagcgcuaacaauugcaccuucgaguacgucagccagcccuuccugauggaccucgagggcaagcagggcaacuucaagaaccugcgggaguucguguucaagaacaucgauggcuacuucaagaucuacagcaagcacacccccaucaaccuggugcgggaccugccccagggauucagcgugcuggagccucugguggaccugcccaucggcaucaacaucaccagguuccagacccugcuggcccugcaccggagcuaccugacccccggcgacagcagcagcggcuggaccgccggcgccgccgccuacuacgugggcuaccugcagccacggaccuuccugcugaaguacaacgagaacggcaccaucaccgacgcaguggacugcgcccuggacccccugagcgagaccaagugcacccuaaagagcuucaccguggagaagggcaucuaccagaccagcaacuuccgggugcagcccacugagagcaucgugcgguuccccaacauuaccaaccugugucccuucggcgagguguucaacgccacccgguucgccagcguguacgccuggaaccggaagcggaucagcaacugcguggccgacuacagcgugcuguacaacagcgccagcuucagcaccuucaagugcuacggcgugagcccuaccaagcugaacgaccugugcuucaccaacguguacgccgacagcuucgugauccggggcgacgaggugcggcagaucgcucccggccagaccggcaagaucgccgacuacaacuacaagcugcccgacgacuucaccggcugcgugaucgccuggaacagcaacaaccuggacagcaaggugggcggcaacuacaacuaccuguuccggcuguuccguaagagcaaccugaagccauuugagcgggacaucagcaccgagaucuaccaggccggcaacacccccugcaacgguguggagggcuucaacugcuacuucccccugcagagcuacggcuuccagcccaccaacggcgugggcuaccagcccuaccgggugguggugcugagcuucgagcugcugcacgcccccgccaccgugugcggcccuaaaaagagcaccaaccuggugaagaacaagugcgugaauuucaacuucaacggccugaccggcaccggcgugcugaccgagagcaacaagaaguuccugcccuuccagcaguucggccgggauaucgccgacaccaccgacgccgugcgggacccccagacccuggagauccuggacaucaccccaugcagcuucggcggcgugagcgucaucacccccggcacaaacaccagcaaccagguggcagugcuguaccagggagugaacugcaccgaggugcccguggccauccacgccgaccagcugacccccaccuggcggguguacagcaccggcagcaacguguuccagacccgggccggcugccugaucggcgccgagcacgugaacaacagcuacgagugcgacauccccaucggcgccggcaucugcgcuuccuaccagacccagaccaacagcccccggcgggcccggagcguggccagccagagcgugaucgccuacaccaugagcuuaggcgccgagaacagcguggccuacagcaacaacagcaucgccaucccuaccaacuucaccaucagcgugaccaccgagauccugcccgugagcaugaccaagaccagcguggacuguaccauguacauaugcggcgacagcaccgagugcagcaaccugcugcugcaguacggcagcuucugcacccagcugaaccgggcgcugaccggcaucgccguggagcaggacaagaacacccaagagguguucgcccaggugaagcagaucuacaagacucccccaaucaaggacuucggcggcuucaacuucagccagauccugcccgaccccagcaagcccagcaagcggagcuucaucgaggaccugcuguucaacaaggugacccuggccgacgccggcuucaucaagcaguacggcgacugccugggggauaucgccgcccgggaccugaucugcgcucagaaguucaacggccugaccgugcugcccccucugcugaccgacgagaugaucgcccaguacaccagcgcccugcuugccggcaccaucaccagcggcuggaccuucggcgccggcgccgcacugcagauccccuucgccaugcagauggccuaccgguucaacggcaucggcgugacccagaacgugcuguacgagaaccagaagcugaucgccaaccaguucaacagcgccaucggcaagauccaggacagccugagcagcaccgccagcgcccugggcaagcugcaggacguggugaaccagaacgcccaggcucugaacacccuggugaagcagcugagcagcaauuuuggcgccaucagcagcgugcugaacgacauccugucaaggcuggaucccccagaggccgaggugcagaucgaccggcugaucaccggccggcugcagagccugcagaccuacgugacccagcagcugauccgggccgccgagauccgggccagcgccaaccuggccgcaaccaagaugagcgagugcgugcugggccagagcaagcggguggacuucugcggcaagggcuaccaccugaugagcuucccccagagcgcuccccacggcgugguguuccuccacgucacauacgugcccgcccaggagaagaacuucaccaccgcccccgccaucugccacgacggcaaggcccacuucccccgggagggaguguucgugagcaacggcacccacugguucgugacccagcggaacuucuacgagccucagauuaucaccaccgacaacaccuucgugagcggcaacugcgacguggugaucggcaucgugaacaacaccguguacgacccccugcagcccgagcuggacagcuucaaggaggagcuggacaaguacuucaagaaccacaccagcccagacguggaccugggcgacaucagcggcaucaacgccagcguggugaacauccagaaggagaucgaccggcugaacgagguggccaagaaccugaacgagagccugaucgaccugcaggagcugggcaaguacgagcaguacaucaaguggcccugguacaucuggcugggcuucaucgccggccugaucgccaucgugauggugaccaucaugcugugcugcaugaccagcugcuguagcugccugaagggcugcugcagcugcggcagcugcugcaaguucgacgaggacgacagcgagcccgugcugaagggcgugaagcugcacuacaccugaggacuaguuauaagacugacuagcccgaugggccucccaacgggcccuccuccccuccuugcaccgagauuaauaaaaaaaaaaaaaaaaaaaaaaaaaaaaaaaaaaaaaaaaaaaaaaaaaaaaaaaaaaaaaaaaaaaaaaaaaaaaaaaaaaaaaaaaaaaaaaaaaaaa

SEQ ID NO: 25562 - RNA, 4005 nt, Artificial Sequence
  SARS-CoV-2/Wuhan/WIV05/2019__EPI_ISL_402128 spike protein mRNA gc (1-1273)(K986P_V987P_H69del_V70del_Y453F_D614G_I692V_M1229I)
aggagaaagcuuaccauguucguguuccuggugcugcugccccuggugagcagccagugcgugaaccugaccacccggacccagcugcccccugccuacaccaacagcuucacccggggcguguacuaccccgacaagguguuccggagcagcgugcugcacagcacccaggaccuguuccugcccuucuucagcaacgugaccugguuccacgccaucagcggcaccaacggcaccaagcgguucgacaacccagugcugcccuucaacgacggcguguacuucgccagcaccgagaagucaaacaucauccggggcuggaucuucggcaccacccuggacagcaagacacagagccugcugaucgugaacaacgccaccaacguggugaucaaggugugcgaguuucaguucugcaacgaccccuuccugggcguguacuaccacaagaacaacaagagcuggauggagagcgaguuccggguguacagcagcgcuaacaauugcaccuucgaguacgucagccagcccuuccugauggaccucgagggcaagcagggcaacuucaagaaccugcgggaguucguguucaagaacaucgauggcuacuucaagaucuacagcaagcacacccccaucaaccuggugcgggaccugccccagggauucagcgcccuggagccucugguggaccugcccaucggcaucaacaucaccagguuccagacccugcuggcccugcaccggagcuaccugacccccggcgacagcagcagcggcuggaccgccggcgccgccgcauacuacgugggcuaccugcagccacggaccuuccugcugaaguacaacgagaacggcaccaucaccgacgccguggacugcgcccuggacccccugagcgagaccaagugcacccuaaagagcuucaccguggagaagggcaucuaccagaccagcaacuuccgggugcagcccacugagagcaucgugcgguuccccaacauuaccaaccugugucccuucggcgagguguucaacgccacccgguucgccagcguguacgccuggaaccggaagcggaucagcaacugcguggccgacuacagcgugcuguacaacagcgccagcuucagcaccuucaagugcuacggcgugagcccuaccaagcugaacgaccugugcuucaccaacguguacgcugacagcuucgugauccggggcgacgaggugcggcagaucgcccccggccagaccggcaagaucgccgacuacaacuacaagcugcccgacgacuucaccggcugcgugaucgccuggaacagcaacaaccuggacagcaaggugggcggcaacuacaacuaccuguuccggcuguuccguaagagcaaccugaagccauuugagcgggacaucagcaccgagaucuaccaggccggcagcacccccugcaacgguguggagggcuucaacugcuacuucccccugcagagcuacggcuuccagcccaccaacggcgugggcuaccagcccuaccgggugguggugcugagcuucgagcugcugcacgcccccgccaccgugugcggcccuaaaaagagcaccaaccuggugaagaacaagugcgugaacuucaauuucaacggccugaccggcaccggcgugcugaccgagagcaacaagaaguuccugcccuuccagcaguucggccgggauaucgccgacaccaccgacgcagugcgggacccccagacccuggagauccuggacaucaccccaugcagcuucggcggcgugagcgugaucacccccggcacaaacaccagcaaccaggucgccgugcuguaccagggagugaacugcaccgaggugcccguggccauccacgccgaccagcugacccccaccuggcggguguacagcaccggcagcaacguguuccagacccgggccggcugccugaucggcgccgagcacgugaacaacuccuacgagugcgacauccccaucggcgcuggcaucugcgccagcuaccagacccagaccaacagcccccggcgggcccggagcguggccagccagagcgugaucgccuacaccaugagcuuaggcgccgagaacagcguggccuacagcaacaacagcaucgcgaucccuaccaacuucaccaucagcgugaccaccgagauccugcccgugagcaugaccaagaccagcguggacuguaccauguacauaugcggcgacagcaccgagugcagcaaccugcugcugcaguacggcagcuucugcacccagcugaaccgggcccugaccggcaucgccguggagcaggacaagaacacccaagagguguucgcccaggugaagcagaucuacaagacucccccaaucaaggacuucggcggcuucaacuucagccagauccugcccgaccccagcaagcccagcaagcggagcuucaucgaggaccugcuguucaacaaggugacccuggccgacgccggcuucaucaagcaguacggcgacugccugggggauaucgccgcucgggaccugaucugcgcccagaaguucaacggccugaccgugcugcccccucugcugaccgacgagaugaucgcccaguacaccagcgcccugcuugccggcaccaucaccagcggcuggaccuucggcgccggcgcagcccugcagauccccuucgccaugcagauggccuaccgguucaacggcaucggcgugacccagaacgugcuguacgagaaccagaagcugaucgccaaccaguucaacagcgccaucggcaagauccaggacagccugagcagcaccgccagcgcccugggcaagcugcaggacguggugaaccagaacgcucaggcccugaacacccuggugaagcagcugagcagcaacuuuggcgccaucagcucagugcugaaugacauccugagcaggcuggaucccccagaggccgaggugcagaucgaccggcugaucaccggccggcugcagagccugcagaccuacgugacccagcagcugauccgggccgccgagauccgggccagcgccaaccuggcagccaccaagaugagcgagugcgugcugggccagagcaagcggguggacuucugcggcaagggcuaccaccugaugagcuucccccagagcgcuccccacggcgugguguuccuccacgugacauacguccccgcccaggagaagaacuucaccaccgcccccgccaucugccacgacggcaaggcccacuucccccgggagggaguguucgugagcaacggcacccacugguucgugacccagcggaacuucuacgagccucagauuaucaccaccgacaacaccuucgugagcggcaacugcgacguggugaucggcaucgugaacaacaccguguacgacccccugcagcccgagcuggacagcuucaaggaggagcuggacaaguacuucaagaaccacaccagcccagacguggaccugggcgacaucagcggcaucaacgccagcguggugaacauccagaaggagaucgaccggcugaacgagguggccaagaaccugaacgagagccugaucgaccugcaggagcugggcaaguacgagcaguacaucaaguggcccugguacaucuggcugggcuucaucgccggccugaucgccaucgugaucgugaccaucaugcugugcugcaugaccagcugcuguagcugccugaagggcugcugcagcugcggcagcugcugcaaguucgacgaggacgacagcgagcccgugcugaagggcgugaagcugcacuacaccugaggacuaguuauaagacugacuagcccgaugggccucccaacgggcccuccuccccuccuugcaccgagauuaauaaaaaaaaaaaaaaaaaaaaaaaaaaaaaaaaaaaaaaaaaaaaaaaaaaaaaaaaaaaaaaaaaaaaaaaaaaaaaaaaaaaaaaaaaaaaaaaaaaaa

SEQ ID NO: 25563 - RNA, 4002 nt, Artificial Sequence
  SARS-CoV-2/Wuhan/WIV05/2019__EPI_ISL_402128 spike protein mRNA gc (1-1273)(K986P_V987P_K986P_V987P_H69del_V70del_Y144del_N501Y_A570 D_D614G_P681H_T716I_S982A_D1118H)
aggagaaagcuuaccauguucguguuccuggugcugcugccccuggugagcagccagugcgugaaccugaccacccggacccagcugcccccugccuacaccaacagcuucacccggggcguguacuaccccgacaagguguuccggagcagcgugcugcacagcacccaggaccuguuccugcccuucuucagcaacgugaccugguuccacgccaucagcggcaccaacggcaccaagcgguucgacaacccagugcugcccuucaacgacggcguguacuucgccagcaccgagaagucaaacaucauccggggcuggaucuucggcaccacccuggacagcaagacacagagccugcugaucgugaacaacgccaccaacguggugaucaaggugugcgaguuucaguucugcaacgaccccuuccugggcguguaccacaagaacaacaagagcuggauggagagcgaguuccggguguacagcagcgcuaacaauugcaccuucgaguacgucagccagcccuuccugauggaccucgagggcaagcagggcaacuucaagaaccugcgggaguucguguucaagaacaucgauggcuacuucaagaucuacagcaagcacacccccaucaaccuggugcgggaccugccccagggauucagcgcccuggagccucugguggaccugcccaucggcaucaacaucaccagguuccagacccugcuggcccugcaccggagcuaccugacccccggcgacagcagcagcggcuggaccgccggcgccgccgcauacuacgugggcuaccugcagccacggaccuuccugcugaaguacaacgagaacggcaccaucaccgacgccguggacugcgcccuggacccccugagcgagaccaagugcacccuaaagagcuucaccguggagaagggcaucuaccagaccagcaacuuccgggugcagcccacugagagcaucgugcgguuccccaacauuaccaaccugugucccuucggcgagguguucaacgccacccgguucgccagcguguacgccuggaaccggaagcggaucagcaacugcguggccgacuacagcgugcuguacaacagcgccagcuucagcaccuucaagugcuacggcgugagcccuaccaagcugaacgaccugugcuucaccaacguguacgcugacagcuucgugauccggggcgacgaggugcggcagaucgcccccggccagaccggcaagaucgccgacuacaacuacaagcugcccgacgacuucaccggcugcgugaucgccuggaacagcaacaaccuggacagcaaggugggcggcaacuacaacuaccuguaccggcuguuccguaagagcaaccugaagccauucgagcgggacaucagcaccgagaucuaccaggccggcagcacccccugcaacgguguggagggcuuuaacugcuacuucccccugcagagcuacggcuuccagcccaccuacggcgugggcuaccagcccuaccgggugguggugcugagcuucgagcugcugcacgcccccgccaccgugugcggcccuaaaaagagcaccaaccuggugaagaacaagugcgugaacuucaacuucaauggccugaccggcaccggcgugcugaccgagagcaacaagaaguuccugcccuuccagcaguucggccgggauaucgacgacaccaccgacgccgugcgggacccccagacccuggagauccuggacaucaccccaugcagcuucggcggcgugagcgugaucacccccggcacaaacaccagcaaccaggucgcagugcuguaccagggagugaacugcaccgaggugcccguggccauccacgccgaccagcugacccccaccuggcggguguacagcaccggcagcaacguguuccagacccgggccggcugccugaucggcgccgagcacgugaacaacuccuacgagugcgacauccccaucggcgccggcaucugcgcuagcuaccagacccagaccaacagccaccggcgggcccggagcguggccagccagagcaucaucgccuacaccaugagcuuaggcgccgagaacagcguggccuacagcaacaacagcaucgccauccccaucaacuucaccauaagcgugaccaccgagauccugccugugagcaugaccaagaccagcguggacuguaccauguacaucugcggcgacagcaccgagugcagcaaccugcugcugcaguacggcagcuucugcacccagcugaaccgggcgcugaccggcaucgccguggagcaggacaagaacacccaagagguguucgcccaggugaagcagaucuacaagaccccacccaucaaggacuucggcggcuucaacuucagccagauccugcccgaccccagcaagcccagcaagcggagcuucaucgaggaccugcuguucaacaaggugacucuggccgacgccggcuucaucaagcaguacggcgauugccugggggacaucgccgcccgggaccugaucugcgcucagaaguucaacggccugaccgugcugccuccccugcugaccgacgagaugaucgcccaguacaccagcgcccugcuugccggcaccaucaccagcggcuggaccuucggcgccggcgccgcacugcagauccccuucgccaugcagauggccuaccgguucaacggcaucggcgugacccagaacgugcuguacgagaaccagaagcugaucgccaaccaguucaacagcgccaucggcaagauccaggacagccugagcagcaccgccagcgcccugggcaagcugcaggacguggugaaccagaacgcccaggcucugaacacccuggugaagcagcugagcagcaacuucggcgccaucagcucagugcugaacgacauccuggccaggcuggacccacccgaggccgaggugcagaucgaccggcugaucaccggccggcugcagagccugcagaccuacgugacccagcagcugauccgggccgccgagauucgggccagcgccaaucuggcagccaccaagaugagcgagugcgugcugggccagagcaagcggguggacuuuugcggcaagggcuaccaccugaugagcuucccccagagcgcuccccacggcgugguguuccuccacgugaccuacgugcccgcccaggagaagaacuucacaaccgcccccgccaucugccacgacggcaaggcccacuucccccgggagggagucuucgugagcaacggcacccacugguucgugacccagcggaacuucuacgagccccagaucaucaccacccacaacaccuucgugagcggcaacugcgacguggugaucggcaucgugaacaacaccguguacgacccucugcagcccgagcuggacagcuucaaggaggagcuggacaaguacuucaagaaccacaccagccccgacguggaucugggcgacaucagcggcaucaacgccagcguggugaacauccagaaggagaucgaccggcugaacgagguggccaagaaccugaacgagagccugaucgaccugcaggagcugggcaaguacgagcaguacaucaaguggccaugguacaucuggcugggcuucaucgccggccugaucgccaucgugauggugaccaucaugcugugcugcaugaccagcugcuguagcugccugaagggcugcugcagcugcggcagcugcugcaaguucgacgaggacgacagcgagcccgugcugaagggcgugaagcugcacuacaccugaggacuaguuauaagacugacuagcccgaugggccucccaacgggcccuccuccccuccuugcaccgagauuaauaaaaaaaaaaaaaaaaaaaaaaaaaaaaaaaaaaaaaaaaaaaaaaaaaaaaaaaaaaaaaaaaaaaaaaaaaaaaaaaaaaaaaaaaaaaaaaaaaaaa

SEQ ID NO: 25564 - RNA, 4011 nt, Artificial Sequence
  SARS-CoV-2/Wuhan/WIV05/2019__EPI_ISL_402128 spike protein mRNA gc (1-1273)(K986P_V987P_K986P_V987P_K417N_E484K_N501Y_D614G)
aggagaaagcuuaccauguucguguuccuggugcugcugccccuggugagcagccagugcgugaaccugaccacccggacccagcugcccccugccuacaccaacagcuucacccggggcguguacuaccccgacaagguguuccggagcagcgugcugcacagcacccaggaccuguuccugcccuucuucagcaacgugaccugguuccacgccauccacgugagcggcaccaacggcaccaagcgguucgacaacccagugcugcccuucaacgacggcguguacuucgccagcaccgagaagucaaacaucauccggggcuggaucuucggcaccacccuggacagcaagacacagagccugcugaucgugaacaacgccaccaacguggugaucaaggugugcgaguuucaguucugcaacgaccccuuccugggcguguacuaccacaagaacaacaagagcuggauggagagcgaguuccgggucuacagcagcgcuaacaauugcaccuucgaguacgugagccagcccuuccugauggaccucgagggcaagcagggcaacuucaagaaccugcgggaguucguguucaagaacaucgauggcuacuucaagaucuacagcaagcacacccccaucaaccuggugcgggaccugccccagggauucagcgcccuggagccucugguggaccugcccaucggcaucaacaucaccagguuccagacccugcuggcccugcaccggagcuaccugacccccggcgacagcagcagcggcuggaccgccggcgccgccgcauacuacgugggcuaccugcagccacggaccuuccugcugaaguacaacgagaacggcaccaucaccgacgccguggacugcgcccuggacccccugagcgagaccaagugcacccuaaagagcuucaccguggagaagggcaucuaccagaccagcaacuuccgggugcagcccacugagagcaucgugcgguuccccaacauuaccaaccugugucccuucggcgagguguucaacgccacccgguucgccagcguguacgccuggaaccggaagcggaucagcaacugcguggccgacuacagcgugcuguacaacagcgccagcuucagcaccuucaagugcuacggcgugagcccuaccaagcugaacgaccugugcuucaccaacguguacgcugacagcuucgugauccggggcgacgaggugcggcagaucgcccccggccagaccggcaacaucgccgacuacaacuacaagcugcccgacgacuucaccggcugcgugaucgccuggaacagcaacaaccuggacagcaaggugggcggcaacuacaacuaccuguaccggcuguuccguaagagcaaccugaagccauucgagcgggacaucagcaccgagaucuaccaggccggcagcacccccugcaacggugugaagggcuuuaacugcuacuucccccugcagagcuacggcuuccagcccaccuacggcgugggcuaccagcccuaccgggugguggugcugagcuucgagcugcugcacgcccccgccaccgugugcggcccuaaaaagagcaccaaccuggugaagaacaagugcgugaacuucaauuucaacggccugaccggcaccggcgugcugaccgagagcaacaagaaguuccugcccuuccagcaguucggccgggauaucgccgacaccaccgacgcagugcgggacccccagacccuggagauccuggacaucaccccaugcagcuucggcggcgugagcgucaucacccccggcacaaacaccagcaaccagguggccgugcuguaccagggagugaacugcaccgaggugcccguggccauccacgccgaccagcugacccccaccuggcggguguacagcaccggcagcaacguguuccagacccgggccggcugccugaucggcgccgagcacgugaacaacuccuacgagugcgacauccccaucggcgcuggcaucugcgccagcuaccagacccagaccaacagcccccggcgggcccggagcguggccagccagagcaucaucgccuacaccaugagcuuaggcgccgagaacagcguggccuacagcaacaacagcaucgcgaucccuaccaacuucaccaucagcgugaccaccgagauacugcccgugagcaugaccaagaccagcguggacuguaccauguacaucugcggcgacagcaccgagugcagcaaccugcugcugcaguacggcagcuucugcacccagcugaaccgggcccugaccggcaucgccguggagcaggacaagaacacccaagagguguucgcccaggugaagcagaucuacaagacucccccaaucaaggacuucggcggcuucaacuucagccagauccugcccgaccccagcaagcccagcaagcggagcuucaucgaggaccugcuguucaacaaggugacccuggccgacgccggcuucaucaagcaguacggcgacugccugggggauaucgccgcucgggaccugaucugcgcccagaaguucaacggccugaccgugcugcccccucugcugaccgacgagaugaucgcccaguacaccagcgcccugcuugccggcaccaucaccagcggcuggaccuucggcgccggcgcagcccugcagauccccuucgccaugcagauggccuaccgguucaacggcaucggcgugacccagaacgugcuguacgagaaccagaagcugaucgccaaccaguucaacagcgccaucggcaagauccaggacagccugagcagcaccgccagcgcccugggcaagcugcaggacguggugaaccagaacgcucaggcccugaacacccuggugaagcagcugagcagcaacuucggcgccaucagcucagugcugaaugacauccugagcaggcuggaucccccagaggccgaggugcagaucgaccggcugaucaccggccggcugcagagccugcagaccuacgugacccagcagcugauccgggccgccgagauccgggccagcgccaaccuggcagccaccaagaugagcgagugcgugcugggccagagcaagcggguggacuuuugcggcaagggcuaccaccugaugagcuucccccagagcgcuccccacggcgugguguuccuccacgugacauacguccccgcccaggagaagaacuucaccaccgcccccgccauuugccacgacggcaaggcccacuucccccgggagggaguguucgugagcaacggcacccacugguucgugacccagcggaacuucuacgagccucagaucaucaccaccgacaacaccuucgugagcggcaacugcgacguggugaucggcaucgugaacaacaccguguacgacccccugcagcccgagcuggacagcuucaaggaggagcuggacaaguacuucaagaaccacaccagcccagacguggaccugggcgacaucagcggcaucaacgccagcguggugaacauccagaaggagaucgaccggcugaacgagguggccaagaaccugaacgagagccugaucgaccugcaggagcugggcaaguacgagcaguacaucaaguggcccugguacaucuggcugggcuucaucgccggccugaucgccaucgugauggugaccaucaugcugugcugcaugaccagcugcuguagcugccugaagggcugcugcagcugcggcagcugcugcaaguucgacgaggacgacagcgagcccgugcugaagggcgugaagcugcacuacaccugaggacuaguuauaagacugacuagcccgaugggccucccaacgggcccuccuccccuccuugcaccgagauuaauaaaaaaaaaaaaaaaaaaaaaaaaaaaaaaaaaaaaaaaaaaaaaaaaaaaaaaaaaaaaaaaaaaaaaaaaaaaaaaaaaaaaaaaaaaaaaaaaaaaa

SEQ ID NO: 25565 - RNA, 4002 nt, Artificial Sequence
  SARS-CoV-2/Wuhan/WIV05/2019__EPI_ISL_402128 spike protein mRNA gc (1-1273)(K986P_V987P_K986P_V987P_L18F_D80A_D215G_L242del_A243del_ L244del_R246I_K417N_E484K_N501Y_D614G_A701V)
aggagaaagcuuaccauguucguguuccuggugcugcugccccuggugagcagccagugcgugaacuucaccacccggacccagcugcccccugccuacaccaacagcuucacccggggcguguacuaccccgacaagguguuccggagcagcgugcugcacagcacccaggaccuguuccugcccuucuucagcaacgugaccugguuccacgccauccacgugagcggcaccaacggcaccaagcgguucgccaacccagugcugcccuucaacgacggcguguacuucgccagcaccgagaagucaaacaucauccggggcuggaucuuuggcaccacccuggacagcaagacacagagccugcugaucgugaacaacgcuaccaacguggugaucaaggugugcgaguuccaguucugcaacgaccccuuccugggcguguacuaccacaagaacaacaagagcuggauggagagcgaguuccgggucuacagcagcgccaacaauugcaccuucgaguacgugagccagcccuuccugauggaccuggagggcaagcagggcaacuucaagaaccuccgggaguucguguucaagaacaucgacggcuacuucaagaucuacagcaagcacacccccaucaaccuggugcggggacugccccagggcuucagcgcccuggagccucugguggaucugcccaucggcaucaacaucaccagguuccagacccugcacaucagcuaccugacccccggcgacagcagcagcggcuggaccgccggcgccgccgcauacuacgugggcuaccugcagccacggaccuuccugcugaaguacaacgagaacggcaccaucaccgacgccguggacugcgcccuggacccccugagcgagaccaagugcacccuuaagagcuucaccguggagaagggcaucuaccagaccagcaacuuccgggugcagcccacugagagcauugugcgguuccccaacaucaccaaccugugucccuucggcgagguguucaacgccacccgguucgccagcguguacgccuggaaccggaagcggaucagcaacugcguggccgacuacagcgugcuguacaacagcgccagcuucagcaccuucaagugcuacggcgugagcccuaccaagcugaacgaccugugcuucaccaacguguacgcugacagcuucgugauccggggcgacgaggugcggcagaucgcccccggccagaccggcaacaucgccgacuacaacuacaagcugcccgacgacuucaccggcugcgugaucgccuggaacagcaacaaccuggacagcaaggugggcggcaacuacaacuaccuguaccggcuauuccguaagagcaaccugaagccauuugagcgggacaucagcaccgagaucuaccaggccgguagcacccccugcaacggcgugaagggcuucaacugcuacuucccccugcagagcuacggcuuccagcccaccuacggcgugggcuaccagcccuaccgggugguggugcugagcuucgagcugcugcacgcccccgccaccgugugcggcccuaaaaagagcaccaaccuggugaagaacaagugcgugaacuucaauuucaacggccugaccggcaccggcgugcugaccgagagcaacaagaaguuccugcccuuccagcaguucggccgggacaucgccgacaccaccgaugcagugcgggacccccagacccuggagauccuggacaucaccccaugcagcuucggcggcgugagcgucaucacccccggaacaaacaccagcaaccagguggccgugcuguaccagggcgugaacugcaccgaggugcccguggccauccacgccgaccagcugacccccaccuggcggguguacagcaccggcagcaacguguuccagacccgggccggcugccugaucggcgccgagcacgugaacaacuccuacgagugcgacauccccaucggcgcuggcaucugcgccagcuaccagacccagaccaacagcccccggcgggcccggagcguggccagccagagcaucaucgccuacaccaugagccugggcguggagaacagcguggccuacagcaacaacagcaucgccaucccuaccaacuucaccauaagcgugaccaccgagauccugcccgugagcaugaccaagaccagcguggacuguaccauguacaucugcggcgacagcaccgagugcagcaaccuguuacugcaguacggcagcuucugcacccagcugaaccgggcgcugaccggcaucgccguggagcaggacaagaacacccaagagguguucgcccaggugaagcagaucuacaagacucccccaaucaaggacuucggcggcuucaacuucagccagauccugcccgaccccagcaagcccagcaagcggagcuucaucgaggaccugcuguucaacaaggugacccuggccgacgccggcuucaucaagcaguacggggacugccugggcgacaucgccgcccgggaccugaucugcgcucagaaguucaacggccugaccgugcugcccccucugcugaccgaugagaugaucgcccaguacaccagcgcccugcuggccggcaccaucaccagcggcuggaccuucggcgccggcgccgcacugcagauccccuucgccaugcagauggccuaccgguucaacggcaucggcgugacccagaacgugcuguacgagaaccagaagcugaucgccaaccaguucaacagcgccaucggcaagauccaggacagccugagcagcaccgccagcgcccugggcaagcugcaggacguggugaaccagaacgcccaggcucugaacacccuggugaagcagcugagcagcaacuuuggcgccaucagcucagugcugaaugacauccugagccggcuggaucccccagaggccgaggugcagaucgacaggcugaucaccggccggcugcagagccugcagaccuacgugacccagcagcugauccgggccgccgagauucgggccagcgccaaccuggccgcaaccaagaugagcgagugcgugcugggccagagcaagcggguggacuucugcggcaagggcuaccaccugaugagcuucccccagagcgcuccccacggcgugguguuccugcacgucacauacgugcccgcccaggagaagaacuucaccaccgcccccgccaucugccacgacggaaaggcccacuucccccgggagggcguguucgugagcaacggcacccacugguucgugacccagcggaacuucuacgagccucagaucaucaccaccgacaacaccuucgugagcggcaacugcgacguggugaucggcaucgugaacaacaccguguacgacccccugcagcccgagcuggacagcuucaaggaggagcucgacaaguacuucaagaaccacaccagcccagacguggaccugggcgacaucagcggcaucaacgccagcguggugaacauccagaaggagaucgaccggcugaacgagguggccaagaaccugaacgagagccugaucgaccugcaggagcugggcaaguacgagcaguacaucaaguggcccugguacaucuggcugggcuucaucgccggccugaucgccaucgugauggugaccaucaugcugugcugcaugaccagcugcuguagcugccugaagggcugcugcagcugcggcagcugcugcaaguucgacgaggacgacagcgagcccgugcugaagggcgugaagcugcacuacaccugaggacuaguuauaagacugacuagcccgaugggccucccaacgggcccuccuccccuccuugcaccgagauuaauaaaaaaaaaaaaaaaaaaaaaaaaaaaaaaaaaaaaaaaaaaaaaaaaaaaaaaaaaaaaaaaaaaaaaaaaaaaaaaaaaaaaaaaaaaaaaaaaaaaa

SEQ ID NO: 25566 - RNA, 4011 nt, Artificial Sequence
  SARS-CoV-2/Wuhan/WIV05/2019__EPI_ISL_402128 spike protein mRNA gc (1-1273)(K986P_V987P_K986P_V987P_E484K_D614G)
aggagaaagcuuaccauguucguguuccuggugcugcugccccuggugagcagccagugcgugaaccugaccacccggacccagcugcccccugccuacaccaacagcuucacccggggcguguacuaccccgacaagguguuccggagcagcgugcugcacagcacccaggaccuguuccugcccuucuucagcaacgugaccugguuccacgccauccacgugagcggcaccaacggcaccaagcgguucgacaacccagugcugcccuucaacgacggcguguacuucgccagcaccgagaagucaaacaucauccggggcuggaucuucggcaccacccuggacagcaagacacagagccugcugaucgugaacaacgccaccaacguggugaucaaggugugcgaguuucaguucugcaacgaccccuuccugggcguguacuaccacaagaacaacaagagcuggauggagagcgaguuccgggucuacagcagcgcuaacaauugcaccuucgaguacgugagccagcccuuccugauggaccucgagggcaagcagggcaacuucaagaaccugcgggaguucguguucaagaacaucgauggcuacuucaagaucuacagcaagcacacccccaucaaccuggugcgggaccugccccagggauucagcgcccuggagccucugguggaccugcccaucggcaucaacaucaccagguuccagacccugcuggcccugcaccggagcuaccugacccccggcgacagcagcagcggcuggaccgccggcgccgccgcauacuacgugggcuaccugcagccacggaccuuccugcugaaguacaacgagaacggcaccaucaccgacgccguggacugcgcccuggacccccugagcgagaccaagugcacccuaaagagcuucaccguggagaagggcaucuaccagaccagcaacuuccgggugcagcccacugagagcaucgugcgguuccccaacauuaccaaccugugucccuucggcgagguguucaacgccacccgguucgccagcguguacgccuggaaccggaagcggaucagcaacugcguggccgacuacagcgugcuguacaacagcgccagcuucagcaccuucaagugcuacggcgugagcccuaccaagcugaacgaccugugcuucaccaacguguacgcugacagcuucgugauccggggcgacgaggugcggcagaucgcccccggccagaccggcaagaucgccgacuacaacuacaagcugcccgacgacuucaccggcugcgugaucgccuggaacagcaacaaccuggacagcaaggugggcggcaacuacaacuaccuguaccggcuguuccguaagagcaaccugaagccauucgagcgggacaucagcaccgagaucuaccaggccggcagcacccccugcaacggugugaagggcuuuaacugcuacuucccccugcagagcuacggcuuccagcccaccaacggcgugggcuaccagcccuaccgggugguggugcugagcuucgagcugcugcacgcccccgccaccgugugcggcccuaaaaagagcaccaaccuggugaagaacaagugcgugaacuucaauuucaacggccugaccggcaccggcgugcugaccgagagcaacaagaaguuccugcccuuccagcaguucggccgggauaucgccgacaccaccgacgcagugcgggacccccagacccuggagauccuggacaucaccccaugcagcuucggcggcgugagcgucaucacccccggcacaaacaccagcaaccagguggccgugcuguaccagggagugaacugcaccgaggugcccguggccauccacgccgaccagcugacccccaccuggcggguguacagcaccggcagcaacguguuccagacccgggccggcugccugaucggcgccgagcacgugaacaacuccuacgagugcgacauccccaucggcgcuggcaucugcgccagcuaccagacccagaccaacagcccccggcgggcccggagcguggccagccagagcaucaucgccuacaccaugagcuuaggcgccgagaacagcguggccuacagcaacaacagcaucgcgaucccuaccaacuucaccaucagcgugaccaccgagauacugcccgugagcaugaccaagaccagcguggacuguaccauguacaucugcggcgacagcaccgagugcagcaaccugcugcugcaguacggcagcuucugcacccagcugaaccgggcccugaccggcaucgccguggagcaggacaagaacacccaagagguguucgcccaggugaagcagaucuacaagacucccccaaucaaggacuucggcggcuucaacuucagccagauccugcccgaccccagcaagcccagcaagcggagcuucaucgaggaccugcuguucaacaaggugacccuggccgacgccggcuucaucaagcaguacggcgacugccugggggauaucgccgcucgggaccugaucugcgcccagaaguucaacggccugaccgugcugcccccucugcugaccgacgagaugaucgcccaguacaccagcgcccugcuugccggcaccaucaccagcggcuggaccuucggcgccggcgcagcccugcagauccccuucgccaugcagauggccuaccgguucaacggcaucggcgugacccagaacgugcuguacgagaaccagaagcugaucgccaaccaguucaacagcgccaucggcaagauccaggacagccugagcagcaccgccagcgcccugggcaagcugcaggacguggugaaccagaacgcucaggcccugaacacccuggugaagcagcugagcagcaacuucggcgccaucagcucagugcugaaugacauccugagcaggcuggaucccccagaggccgaggugcagaucgaccggcugaucaccggccggcugcagagccugcagaccuacgugacccagcagcugauccgggccgccgagauccgggccagcgccaaccuggcagccaccaagaugagcgagugcgugcugggccagagcaagcggguggacuuuugcggcaagggcuaccaccugaugagcuucccccagagcgcuccccacggcgugguguuccuccacgugacauacguccccgcccaggagaagaacuucaccaccgcccccgccauuugccacgacggcaaggcccacuucccccgggagggaguguucgugagcaacggcacccacugguucgugacccagcggaacuucuacgagccucagaucaucaccaccgacaacaccuucgugagcggcaacugcgacguggugaucggcaucgugaacaacaccguguacgacccccugcagcccgagcuggacagcuucaaggaggagcuggacaaguacuucaagaaccacaccagcccagacguggaccugggcgacaucagcggcaucaacgccagcguggugaacauccagaaggagaucgaccggcugaacgagguggccaagaaccugaacgagagccugaucgaccugcaggagcugggcaaguacgagcaguacaucaaguggcccugguacaucuggcugggcuucaucgccggccugaucgccaucgugauggugaccaucaugcugugcugcaugaccagcugcuguagcugccugaagggcugcugcagcugcggcagcugcugcaaguucgacgaggacgacagcgagcccgugcugaagggcgugaagcugcacuacaccugaggacuaguuauaagacugacuagcccgaugggccucccaacgggcccuccuccccuccuugcaccgagauuaauaaaaaaaaaaaaaaaaaaaaaaaaaaaaaaaaaaaaaaaaaaaaaaaaaaaaaaaaaaaaaaaaaaaaaaaaaaaaaaaaaaaaaaaaaaaaaaaaaaaa

SEQ ID NO: 25567 - RNA, 4011 nt, Artificial Sequence
  SARS-CoV-2/Wuhan/WIV05/2019__EPI_ISL_402128 spike protein mRNA gc (1-1273)(K986P_V987P_K986P_V987P_L18F_T20N_P26S_D138Y_R190S_K417T _E484K_N501Y_D614G_H655Y_T1027I)
aggagaaagcuuaccauguucguguuccuggugcugcugccccuggugagcagccagugcgugaacuucaccaaccggacccagcugcccagcgccuacaccaacagcuucacccggggcguguacuacccugacaagguguuccggagcagcgugcugcacagcacccaggaccuguuccugcccuucuucagcaacgugaccugguuccacgccauccacgugagcggcaccaacggcaccaagcgguucgacaaccccgugcugccauucaacgacggcguguacuucgccagcaccgagaagucaaacaucauccggggcuggaucuuuggcaccacccuggacagcaagacccagagccugcugaucgugaacaacgccacaaacguggugaucaaggugugcgaguuccaguucugcaacuaccccuuccugggcguguacuaccacaagaacaacaagagcuggauggagagcgaguuccgggucuacagcagcgcuaauaacugcaccuucgaguacgugagccagcccuuccugauggaccuggagggcaagcagggcaacuucaagaaccucagcgaguucguguucaagaacaucgacggcuacuucaagaucuacagcaagcacacccccaucaaccuggugcgggaucugccccagggauucagcgcccuggagccccugguggaccugccuaucggcaucaacaucacccgguuccagacccugcuggcccugcacaggagcuaccugacccccggcgacagcagcagcggcuggaccgccggcgccgccgcauacuacgugggcuaccugcagccccggaccuuccugcugaaguacaacgagaacggcaccaucaccgacgccguggacugcgcccuggacccacugagcgagaccaagugcacccuaaagagcuucaccguggagaagggcaucuaccagaccagcaacuuccgggugcagcccaccgagagcaucgugcgguuccccaacauuacuaaccugugucccuucggcgagguguucaacgccacccgguucgccagcguguacgccuggaaccggaagcggaucagcaacugcguggccgacuacagcgugcuguacaacagcgccagcuucagcaccuucaagugcuacggcgugagccccaccaagcugaacgaccugugcuucaccaacguguacgcugacagcuucgugauccggggcgacgaggugcggcagaucgccccuggccagaccggcaccaucgccgacuacaacuacaagcugcccgacgacuucaccggcugcgugaucgccuggaacagcaacaaccuggacagcaaggugggcggcaacuacaacuaccuguaccggcuguuccguaagagcaaccugaagcccuuugagcgggacaucagcaccgagaucuaccaggccggcagcaccccaugcaacggugugaagggcuucaacugcuacuucccccugcagagcuacggcuuccagcccaccuacggcgugggcuaccagcccuaccgggugguggugcugagcuucgagcugcugcacgcccccgccaccgugugcggccccaaaaagagcaccaaccuggugaagaacaagugcgugaacuucaauuucaacggccugaccggcaccggcgugcugaccgagagcaacaagaaguuccugccuuuccagcaguucggccgggacaucgccgauaccaccgacgcagugcgggacccccagacccuggagauccuggacaucacccccugcagcuucggcggcgugagcgucaucaccccaggcacaaacaccagcaaccagguggccgugcuguaccagggagugaacugcaccgaggugcccguggccauccacgccgaccagcugacccccaccuggcggguguacuccaccggcagcaacguguuccagacccgggccggcugccugaucggcgccgaguacgugaacaacagcuacgagugcgacauccccaucggcgcuggcaucugcgccagcuaccagacccagaccaacagcccccggcgggcccggagcguggccagccagagcaucaucgccuacaccaugagccugggcgccgagaacagcguggccuacagcaacaacagcaucgcgauccccaccaacuucaccaucagcgugaccaccgagauauuaccugugagcaugaccaagaccagcguggacuguaccauguacaucugcggcgacagcaccgagugcagcaaccugcugcugcaguacggcagcuucugcacccagcugaaccgggcccugaccggcaucgccguggagcaggacaagaacacccaagagguguucgcccaggugaagcagaucuacaagacuccacccaucaaggacuucggcggcuucaacuucagccagauccugcccgaccccagcaagcccagcaagcggagcuucaucgaggaccugcuguucaacaaggugacccuggccgacgccggcuucaucaagcaguacggcgacugccugggggacaucgccgcucgggaucugaucugcgcccagaaguucaacggccugaccgugcugccuccccugcugaccgacgagaugaucgcccaguacaccagcgcccugcuggccggcaccaucaccagcggcuggaccuucggcgccggcgcagcccuucagauccccuucgccaugcagauggccuaccgguucaacggcaucggcgugacccagaacgugcuguacgagaaccagaagcugaucgccaaccaguucaacagcgccaucggcaagauccaggacagccugagcagcaccgccagcgcccugggcaagcugcaggacguggugaaccagaacgcucaggcccugaacacccuggugaagcagcugagcucaaacuuuggcgccaucagcagcgugcugaaugacauccugagccggcuggacccacccgaggccgaggugcagaucgacaggcugaucaccggccggcugcagagccugcagaccuacgugacccagcagcugauccgggccgccgagauccgggccagcgccaaccuggcagccauuaagaugagcgagugcgugcugggccagagcaagcggguggacuucugcggcaagggcuaccaccugaugagcuucccccagagcgcuccccacggcgugguguuccugcacgugaccuacguccccgcccaggagaagaacuucacaaccgcccccgccaucugccacgacggcaaggcccacuucccccgggagggaguguucgugagcaacggcacccacugguucgugacccagcggaacuucuacgagccccagaucaucaccaccgacaacaccuucgugagcggcaacugcgacguggugaucggcaucgugaacaacaccguguacgacccucuccagcccgagcuggacagcuucaaggaggagcuggacaaguacuucaagaaccacaccagccccgacguggaccugggcgauaucagcggcaucaacgccagcguggugaacauccagaaggagaucgaccggcugaacgagguggccaagaaccugaacgagagccugaucgaccugcaggagcugggcaaguacgagcaguacaucaaguggccaugguacaucuggcugggcuucaucgccggccugaucgccaucgugauggugaccaucaugcugugcugcaugaccagcugcuguagcugccugaagggcugcugcagcugcggcagcugcugcaaguucgacgaggacgacagcgagcccgugcugaagggcgugaagcugcacuacaccugaggacuaguuauaagacugacuagcccgaugggccucccaacgggcccuccuccccuccuugcaccgagauuaauaaaaaaaaaaaaaaaaaaaaaaaaaaaaaaaaaaaaaaaaaaaaaaaaaaaaaaaaaaaaaaaaaaaaaaaaaaaaaaaaaaaaaaaaaaaaaaaaaaaa

SEQ ID NO: 25568 - RNA, 4011 nt, Artificial Sequence
  SARS-CoV-2/Wuhan/WIV05/2019__EPI_ISL_402128 spike protein mRNA gc (1-1273)(K986P_V987P_K986P_V987P_S13I_W152C_L452R_D614G)
aggagaaagcuuaccauguucguguuccuggugcugcugccccuggugagcauccagugcgugaaccugaccacccggacccagcugcccccugccuacaccaacagcuucacccggggcguguacuaccccgacaagguguuccggagcagcgugcugcacagcacccaggaccuguuccugcccuucuucagcaacgugaccugguuccacgccauccacgugagcggcaccaacggcaccaagcgguucgacaacccagugcugcccuucaacgacggcguguacuucgccagcaccgagaagucaaacaucauccggggcuggaucuucggcaccacccuggacagcaagacacagagccugcugaucgugaacaacgccaccaacguggugaucaaggugugcgaguuucaguucugcaacgaccccuuccugggcguguacuaccacaagaacaacaagagcugcauggagagcgaguuccgggucuacagcagcgcuaacaauugcaccuucgaguacgugagccagcccuuccugauggaccucgagggcaagcagggcaacuucaagaaccugcgggaguucguguucaagaacaucgauggcuacuucaagaucuacagcaagcacacccccaucaaccuggugcgggaccugccccagggauucagcgcccuggagccucugguggaccugcccaucggcaucaacaucaccagguuccagacccugcuggcccugcaccggagcuaccugacccccggcgacagcagcagcggcuggaccgccggcgccgccgcauacuacgugggcuaccugcagccacggaccuuccugcugaaguacaacgagaacggcaccaucaccgacgccguggacugcgcccuggacccccugagcgagaccaaguguacccuaaagagcuucaccguggagaagggcaucuaccagaccagcaacuuccgggugcagcccacugagagcauugugcgguuccccaacaucaccaaccugugccccuucggcgagguguucaacgccacccgguucgccagcguguacgccuggaaccggaagcggaucagcaacugcguggccgacuacagcgugcuguacaacagcgccagcuucagcaccuucaagugcuacggcgugagcccuaccaagcugaacgaccugugcuucaccaacguguacgcugacagcuucgugauccggggcgacgaggugcggcagaucgcccccggccagaccggcaagaucgccgacuacaacuacaagcugcccgacgacuucaccggcugcgugaucgccuggaacagcaacaaccuggacagcaaggugggcggcaacuacaacuaccgguaccggcuguuccguaagagcaaccugaagccauucgagcgggacaucagcaccgagaucuaccaggccggcagcacccccugcaacgguguggagggcuuuaacugcuacuucccccugcagagcuacggcuuccagcccaccaacggcgugggcuaccagcccuaccgggugguggugcugagcuucgagcugcugcacgcccccgccaccgugugcggcccuaaaaagagcaccaaccuggugaagaacaagugcgugaacuucaauuucaacggccugaccggcaccggcgugcugaccgagagcaacaagaaguuccugcccuuccagcaguucggccgggauaucgccgacaccaccgacgcagugcgggacccccagacccuggagauccuggacaucaccccaugcagcuucggcggcgugagcgucaucacccccggcacaaacaccagcaaccagguggccgugcuguaccagggagugaacugcaccgaggugcccguggccauccacgccgaccagcugacccccaccuggcggguguacagcaccggcagcaacguguuccagacccgggccggcugccugaucggcgccgagcacgugaacaacagcuacgagugcgacauccccaucggcgcuggcaucugugccuccuaccagacccagaccaacagcccccggcgggcccggagcguggccagccagagcaucaucgccuacaccaugagccugggcgccgagaacagcguggccuacagcaacaacagcaucgcgaucccuaccaacuucaccauaagcgugaccaccgagaucuuacccgugagcaugaccaagaccagcguggacugcaccauguacaucugcggcgacagcaccgagugcagcaaccugcugcugcaguacggcagcuucugcacccagcugaaccgggcccugaccggcaucgccguggagcaggacaagaacacccaagagguguucgcccaggugaagcagaucuacaagacucccccaaucaaggacuucggcggcuucaacuucagccagauccugcccgaccccagcaagcccagcaagcggagcuucaucgaggaccugcuguucaacaaggugacccuggccgacgccggcuucaucaagcaguacggcgacugccugggggauaucgccgcucgggaccugaucugcgcccagaaguucaacggccugaccgugcugcccccucugcugaccgacgagaugaucgcccaguacaccagcgcccugcuggccggcaccaucaccagcggcuggaccuucggcgccggcgcagcccuucagauccccuucgccaugcagauggccuacagguucaacggcaucggcgugacccagaacgugcuguacgagaaccagaagcugaucgccaaccaguucaacagcgccaucggcaagauccaggacagccugagcagcaccgccagcgcccugggcaagcugcaggacguggugaaccagaacgcucaggcccugaacacccuggugaagcagcugagcagcaacuucggcgccaucagcagcgugcugaaugacauccugucacggcuggaucccccagaggccgaggugcagaucgaccggcugaucaccggccggcugcagagccugcagaccuacgugacccagcagcugauccgggccgccgagauucgggccagcgccaaccuggcagccaccaagaugagcgagugcgugcugggccagagcaagcggguggacuuuugcggcaagggcuaccaccugaugagcuucccccagagcgcuccccacggcgugguguuccugcacgugacauacguccccgcccaggagaagaacuucaccaccgcccccgccaucugccacgacggcaaggcccacuucccccgggagggaguguucgugagcaacggcacccacugguucgugacccagcggaacuucuacgagccucagaucaucaccaccgacaacaccuucgugagcggcaacugcgacguggugaucggcaucgugaacaacaccguguacgacccccuccagcccgagcuggacagcuucaaggaggagcuggacaaguacuucaagaaccacaccagcccagacguggaccugggcgacaucagcggcaucaacgccagcguggugaacauccagaaggagaucgaccggcugaacgagguggccaagaaccugaacgagagccugaucgaccugcaggagcugggcaaguacgagcaguacaucaaguggcccugguacaucuggcugggcuucaucgccggccugaucgccaucgugauggugaccaucaugcugugcugcaugaccagcuguugcagcugccugaagggcugcugcagcugcggcagcugcugcaaguucgacgaggacgacagcgagcccgugcugaagggcgugaagcugcacuacaccugaggacuaguuauaagacugacuagcccgaugggccucccaacgggcccuccuccccuccuugcaccgagauuaauaaaaaaaaaaaaaaaaaaaaaaaaaaaaaaaaaaaaaaaaaaaaaaaaaaaaaaaaaaaaaaaaaaaaaaaaaaaaaaaaaaaaaaaaaaaaaaaaaaaa

SEQ ID NO: 25569 - RNA, 4011 nt, Artificial Sequence
  SARS-CoV-2/Wuhan/WIV05/2019__EPI_ISL_402128 spike protein mRNA gc mod (1-1273)(K986P_V987P)
aggagaaagcuuaccauguucguguuucuggugcugcugccccugguguccagccagugugugaaccugaccaccagaacacagcugccuccagccuacaccaacagcuucaccagaggcguguacuaccccgacaagguguucagauccagcgugcugcacucuacccaggaccuguuccugccuuucuucagcaacgugaccugguuccacgccauccacguguccggcaccaauggcaccaagagauucgacaaccccgugcugcccuucaacgacgggguguacuuugccagcaccgagaaguccaacaucaucagaggcuggaucuucggcaccacacuggacagcaagacccagagccugcugaucgugaacaacgccaccaacguggucaucaaagugugcgaguuccaguucugcaacgaccccuuccugggcgucuacuaccacaagaacaacaagagcuggauggaaagcgaguuccggguguacagcagcgccaacaacugcaccuucgaguacgugucccagccuuuccugauggaccuggaaggcaagcagggcaacuucaagaaccugcgcgaguucguguucaagaacaucgacggcuacuucaaaaucuacagcaagcacaccccuaucaaccucgugcgggaucugccucagggcuucucugcucuggaaccccugguggaucugcccaucggcaucaacaucacccgguuucagacacugcuggcccugcacagaagcuaccugacaccuggcgauagcagcagcggauggacagcuggugccgccgcuuacuaugugggcuaccugcagccuagaaccuuccugcugaaguacaacgagaacggcaccaucaccgacgccguggauugugcucuggauccucugagcgagacaaagugcacccugaaguccuucaccguggaaaagggcaucuaccagaccagcaacuuccgggugcagcccaccgaauccaucgugcgguuccccaauaucaccaaucugugccccuucggcgagguguucaaugccaccagauucgccucuguguacgccuggaaccggaagcggaucagcaauugcguggccgacuacuccgugcuguacaacuccgccagcuucagcaccuucaagugcuacggcguguccccuaccaagcugaacgaccugugcuucacaaacguguacgccgacagcuucgugauccggggagaugaagugcggcagauugccccuggacagacaggcaagaucgccgacuacaacuacaagcugcccgacgacuucaccggcugugugauugccuggaacagcaacaaccuggacuccaaagucggcggcaacuacaauuaccuguaccggcuguuccggaaguccaaucugaagcccuucgagcgggacaucagcaccgaaaucuaucaggccggcagcaccccuugcaacggcguggaaggcuucaacugcuacuucccacugcaguccuacggcuuucagcccacaaauggcgugggcuaucagcccuacagagugguggugcugagcuucgaacugcugcaugcuccugccacagugugcggcccuaagaaaagcaccaaucucgugaagaacaaaugcgugaacuucaacuucaacggccugaccggcaccggcgugcugacagagagcaacaagaaguuccugccauuccagcaguuuggccgggauaucgccgauaccacagacgccguuagagauccccagacacuggaaauccuggacaucaccccaugcagcuucggcggagugucugugaucaccccuggcaccaacaccagcaaucagguggcagugcuguaccaggacgugaacuguaccgaagugcccguggccauucacgccgaucagcugacaccuacauggcggguguacuccaccggcagcaauguguuucagaccagagccggcugucugaucggagccgagcacgugaacaauagcuacgagugcgacauccccaucggcgcuggcaucugugccagcuaccagacacagacaaacagccccagacgggcuagaagcguggccagccagagcaucauugccuacacaaugucucugggcgccgagaacagcguggccuacuccaacaacucuaucgcuauccccaccaacuucaccaucagcgugaccaccgagauccugccuguguccaugaccaagaccagcguggacugcaccauguacaucugcggcgauuccaccgagugcuccaaccugcugcugcaguacggcagcuucugcacccagcugaauagagcccugacagggaucgccguggaacaggacaagaacacccaagagguguucgcccaagugaagcaaaucuacaagaccccuccuaucaaggacuucggcggcuucaauuucagccagauucugcccgauccuagcaagcccagcaagcggagcuucaucgaggaccugcuguucaacaaagugacacuggccgacgccggcuucaucaagcaguauggcgauugucugggcgacauugccgccagggaucugauuugcgcccagaaguuuaacggacugacagugcugccuccucugcugaccgaugagaugaucgcccaguacacaucugcccugcuggccggcacaaucacaagcggcuggacauuuggagcuggcgccgcucugcagauccccuuugcuaugcagauggccuaccgguucaacggcaucggagugacccagaaugugcuguacgagaaccagaagcugaucgccaaccaguucaacagcgccaucggcaagauccaggacagccugagcagcacagcaagcgcccugggaaagcugcaggacguggucaaccagaaugcccaggcacugaacacccuggucaagcagcuguccuccaacuucggcgccaucagcucugugcugaacgauauccugagcagacuggacccuccugaggccgaggugcagaucgacagacugaucacaggcagacugcagagccuccagacauacgugacccagcagcugaucagagccgccgagauuagagccucugccaaucuggccgccaccaagaugucugagugugugcugggccagagcaagagaguggacuuuugcggcaagggcuaccaccugaugagcuucccucagucugccccucacggcgugguguuucugcacgugacauaugugcccgcucaagagaagaauuucaccaccgcuccagccaucugccacgacggcaaagcccacuuuccuagagaaggcguguucguguccaacggcacccauugguucgugacacagcggaacuucuacgagccccagaucaucaccaccgacaacaccuucgugucuggcaacugcgacguugugaucggcauugugaacaauaccguguacgacccucugcagcccgagcuggacagcuucaaagaggaacuggacaaguacuuuaagaaccacacaagccccgacguggaccugggcgauaucagcggaaucaaugccagcgucgugaacauccagaaagagaucgaccggcugaacgagguggccaagaaucugaacgagagccugaucgaccugcaagaacuggggaaguacgagcaguacaucaaguggcccugguacaucuggcugggcuuuaucgccggacugauugccaucgugauggucacaaucaugcuguguugcaugaccagcugcuguagcugccugaagggcuguuguagcuguggcagcugcugcaaguucgacgaggacgauucugagcccgugcugaagggcgugaaacugcacuacaccugaggacuaguuauaagacugacuagcccgaugggccucccaacgggcccuccuccccuccuugcaccgagauuaauaaaaaaaaaaaaaaaaaaaaaaaaaaaaaaaaaaaaaaaaaaaaaaaaaaaaaaaaaaaaaaaaaaaaaaaaaaaaaaaaaaaaaaaaaaaaaaaaaaaa

SEQ ID NO: 25570 - RNA, 4011 nt, Artificial Sequence
  SARS-CoV-2/Wuhan/WIV05/2019__EPI_ISL_402128 spike protein mRNA gc mod (1-1273)(K986P_V987P_ D614G)
aggagaaagcuuaccauguucguguuucuggugcugcugccccugguguccagccagugugugaaccugaccaccagaacacagcugccuccagccuacaccaacagcuucaccagaggcguguacuaccccgacaagguguucagauccagcgugcugcacucuacccaggaccuguuccugccuuucuucagcaacgugaccugguuccacgccauccacguguccggcaccaauggcaccaagagauucgacaaccccgugcugcccuucaacgacgggguguacuuugccagcaccgagaaguccaacaucaucagaggcuggaucuucggcaccacacuggacagcaagacccagagccugcugaucgugaacaacgccaccaacguggucaucaaagugugcgaguuccaguucugcaacgaccccuuccugggcgucuacuaccacaagaacaacaagagcuggauggaaagcgaguuccggguguacagcagcgccaacaacugcaccuucgaguacgugucccagccuuuccugauggaccuggaaggcaagcagggcaacuucaagaaccugcgcgaguucguguucaagaacaucgacggcuacuucaaaaucuacagcaagcacaccccuaucaaccucgugcgggaucugccucagggcuucucugcucuggaaccccugguggaucugcccaucggcaucaacaucacccgguuucagacacugcuggcccugcacagaagcuaccugacaccuggcgauagcagcagcggauggacagcuggugccgccgcuuacuaugugggcuaccugcagccuagaaccuuccugcugaaguacaacgagaacggcaccaucaccgacgccguggauugugcucuggauccucugagcgagacaaagugcacccugaaguccuucaccguggaaaagggcaucuaccagaccagcaacuuccgggugcagcccaccgaauccaucgugcgguuccccaauaucaccaaucugugccccuucggcgagguguucaaugccaccagauucgccucuguguacgccuggaaccggaagcggaucagcaauugcguggccgacuacuccgugcuguacaacuccgccagcuucagcaccuucaagugcuacggcguguccccuaccaagcugaacgaccugugcuucacaaacguguacgccgacagcuucgugauccggggagaugaagugcggcagauugccccuggacagacaggcaagaucgccgacuacaacuacaagcugcccgacgacuucaccggcugugugauugccuggaacagcaacaaccuggacuccaaagucggcggcaacuacaauuaccuguaccggcuguuccggaaguccaaucugaagcccuucgagcgggacaucagcaccgaaaucuaucaggccggcagcaccccuugcaacggcguggaaggcuucaacugcuacuucccacugcaguccuacggcuuucagcccacaaauggcgugggcuaucagcccuacagagugguggugcugagcuucgaacugcugcaugcuccugccacagugugcggcccuaagaaaagcaccaaucucgugaagaacaaaugcgugaacuucaacuucaacggccugaccggcaccggcgugcugacagagagcaacaagaaguuccugccauuccagcaguuuggccgggauaucgccgauaccacagacgccguuagagauccccagacacuggaaauccuggacaucaccccaugcagcuucggcggagugucugugaucaccccuggcaccaacaccagcaaucagguggcagugcuguaccagggcgugaacuguaccgaagugcccguggccauucacgccgaucagcugacaccuacauggcggguguacuccaccggcagcaauguguuucagaccagagccggcugucugaucggagccgagcacgugaacaauagcuacgagugcgacauccccaucggcgcuggcaucugugccagcuaccagacacagacaaacagccccagacgggcuagaagcguggccagccagagcaucauugccuacacaaugucucugggcgccgagaacagcguggccuacuccaacaacucuaucgcuauccccaccaacuucaccaucagcgugaccaccgagauccugccuguguccaugaccaagaccagcguggacugcaccauguacaucugcggcgauuccaccgagugcuccaaccugcugcugcaguacggcagcuucugcacccagcugaauagagcccugacagggaucgccguggaacaggacaagaacacccaagagguguucgcccaagugaagcaaaucuacaagaccccuccuaucaaggacuucggcggcuucaauuucagccagauucugcccgauccuagcaagcccagcaagcggagcuucaucgaggaccugcuguucaacaaagugacacuggccgacgccggcuucaucaagcaguauggcgauugucugggcgacauugccgccagggaucugauuugcgcccagaaguuuaacggacugacagugcugccuccucugcugaccgaugagaugaucgcccaguacacaucugcccugcuggccggcacaaucacaagcggcuggacauuuggagcuggcgccgcucugcagauccccuuugcuaugcagauggccuaccgguucaacggcaucggagugacccagaaugugcuguacgagaaccagaagcugaucgccaaccaguucaacagcgccaucggcaagauccaggacagccugagcagcacagcaagcgcccugggaaagcugcaggacguggucaaccagaaugcccaggcacugaacacccuggucaagcagcuguccuccaacuucggcgccaucagcucugugcugaacgauauccugagcagacuggacccuccugaggccgaggugcagaucgacagacugaucacaggcagacugcagagccuccagacauacgugacccagcagcugaucagagccgccgagauuagagccucugccaaucuggccgccaccaagaugucugagugugugcugggccagagcaagagaguggacuuuugcggcaagggcuaccaccugaugagcuucccucagucugccccucacggcgugguguuucugcacgugacauaugugcccgcucaagagaagaauuucaccaccgcuccagccaucugccacgacggcaaagcccacuuuccuagagaaggcguguucguguccaacggcacccauugguucgugacacagcggaacuucuacgagccccagaucaucaccaccgacaacaccuucgugucuggcaacugcgacguugugaucggcauugugaacaauaccguguacgacccucugcagcccgagcuggacagcuucaaagaggaacuggacaaguacuuuaagaaccacacaagccccgacguggaccugggcgauaucagcggaaucaaugccagcgucgugaacauccagaaagagaucgaccggcugaacgagguggccaagaaucugaacgagagccugaucgaccugcaagaacuggggaaguacgagcaguacaucaaguggcccugguacaucuggcugggcuuuaucgccggacugauugccaucgugauggucacaaucaugcuguguugcaugaccagcugcuguagcugccugaagggcuguuguagcuguggcagcugcugcaaguucgacgaggacgauucugagcccgugcugaagggcgugaaacugcacuacaccugaggacuaguuauaagacugacuagcccgaugggccucccaacgggcccuccuccccuccuugcaccgagauuaauaaaaaaaaaaaaaaaaaaaaaaaaaaaaaaaaaaaaaaaaaaaaaaaaaaaaaaaaaaaaaaaaaaaaaaaaaaaaaaaaaaaaaaaaaaaaaaaaaaaa

SEQ ID NO: 25571 - RNA, 4011 nt, Artificial Sequence
  SARS-CoV-2/Wuhan/WIV05/2019__EPI_ISL_402128 spike protein mRNA gc mod (1-1273)(K986P_V987P_A222V_D614G)
aggagaaagcuuaccauguucguguuucuggugcugcugccccugguguccagccagugugugaaccugaccaccagaacacagcugccuccagccuacaccaacagcuucaccagaggcguguacuaccccgacaagguguucagauccagcgugcugcacucuacccaggaccuguuccugccuuucuucagcaacgugaccugguuccacgccauccacguguccggcaccaauggcaccaagagauucgacaaccccgugcugcccuucaacgacgggguguacuuugccagcaccgagaaguccaacaucaucagaggcuggaucuucggcaccacacuggacagcaagacccagagccugcugaucgugaacaacgccaccaacguggucaucaaagugugcgaguuccaguucugcaacgaccccuuccugggcgucuacuaccacaagaacaacaagagcuggauggaaagcgaguuccggguguacagcagcgccaacaacugcaccuucgaguacgugucccagccuuuccugauggaccuggaaggcaagcagggcaacuucaagaaccugcgcgaguucguguucaagaacaucgacggcuacuucaaaaucuacagcaagcacaccccuaucaaccucgugcgggaucugccucagggcuucucugugcuggaaccccugguggaucugcccaucggcaucaacaucacccgguuucagacacugcuggcccugcacagaagcuaccugacaccuggcgauagcagcagcggauggacagcuggugccgccgcuuacuaugugggcuaccugcagccuagaaccuuccugcugaaguacaacgagaacggcaccaucaccgacgccguggauugugcucuggauccucugagcgagacaaagugcacccugaaguccuucaccguggaaaagggcaucuaccagaccagcaacuuccgggugcagcccaccgaauccaucgugcgguuccccaauaucaccaaucugugccccuucggcgagguguucaaugccaccagauucgccucuguguacgccuggaaccggaagcggaucagcaauugcguggccgacuacuccgugcuguacaacuccgccagcuucagcaccuucaagugcuacggcguguccccuaccaagcugaacgaccugugcuucacaaacguguacgccgacagcuucgugauccggggagaugaagugcggcagauugccccuggacagacaggcaagaucgccgacuacaacuacaagcugcccgacgacuucaccggcugugugauugccuggaacagcaacaaccuggacuccaaagucggcggcaacuacaauuaccuguaccggcuguuccggaaguccaaucugaagcccuucgagcgggacaucagcaccgaaaucuaucaggccggcagcaccccuugcaacggcguggaaggcuucaacugcuacuucccacugcaguccuacggcuuucagcccacaaauggcgugggcuaucagcccuacagagugguggugcugagcuucgaacugcugcaugcuccugccacagugugcggcccuaagaaaagcaccaaucucgugaagaacaaaugcgugaacuucaacuucaacggccugaccggcaccggcgugcugacagagagcaacaagaaguuccugccauuccagcaguuuggccgggauaucgccgauaccacagacgccguuagagauccccagacacuggaaauccuggacaucaccccaugcagcuucggcggagugucugugaucaccccuggcaccaacaccagcaaucagguggcagugcuguaccagggcgugaacuguaccgaagugcccguggccauucacgccgaucagcugacaccuacauggcggguguacuccaccggcagcaauguguuucagaccagagccggcugucugaucggagccgagcacgugaacaauagcuacgagugcgacauccccaucggcgcuggcaucugugccagcuaccagacacagacaaacagccccagacgggcuagaagcguggccagccagagcaucauugccuacacaaugucucugggcgccgagaacagcguggccuacuccaacaacucuaucgcuauccccaccaacuucaccaucagcgugaccaccgagauccugccuguguccaugaccaagaccagcguggacugcaccauguacaucugcggcgauuccaccgagugcuccaaccugcugcugcaguacggcagcuucugcacccagcugaauagagcccugacagggaucgccguggaacaggacaagaacacccaagagguguucgcccaagugaagcaaaucuacaagaccccuccuaucaaggacuucggcggcuucaauuucagccagauucugcccgauccuagcaagcccagcaagcggagcuucaucgaggaccugcuguucaacaaagugacacuggccgacgccggcuucaucaagcaguauggcgauugucugggcgacauugccgccagggaucugauuugcgcccagaaguuuaacggacugacagugcugccuccucugcugaccgaugagaugaucgcccaguacacaucugcccugcuggccggcacaaucacaagcggcuggacauuuggagcuggcgccgcucugcagauccccuuugcuaugcagauggccuaccgguucaacggcaucggagugacccagaaugugcuguacgagaaccagaagcugaucgccaaccaguucaacagcgccaucggcaagauccaggacagccugagcagcacagcaagcgcccugggaaagcugcaggacguggucaaccagaaugcccaggcacugaacacccuggucaagcagcuguccuccaacuucggcgccaucagcucugugcugaacgauauccugagcagacuggacccuccugaggccgaggugcagaucgacagacugaucacaggcagacugcagagccuccagacauacgugacccagcagcugaucagagccgccgagauuagagccucugccaaucuggccgccaccaagaugucugagugugugcugggccagagcaagagaguggacuuuugcggcaagggcuaccaccugaugagcuucccucagucugccccucacggcgugguguuucugcacgugacauaugugcccgcucaagagaagaauuucaccaccgcuccagccaucugccacgacggcaaagcccacuuuccuagagaaggcguguucguguccaacggcacccauugguucgugacacagcggaacuucuacgagccccagaucaucaccaccgacaacaccuucgugucuggcaacugcgacguugugaucggcauugugaacaauaccguguacgacccucugcagcccgagcuggacagcuucaaagaggaacuggacaaguacuuuaagaaccacacaagccccgacguggaccugggcgauaucagcggaaucaaugccagcgucgugaacauccagaaagagaucgaccggcugaacgagguggccaagaaucugaacgagagccugaucgaccugcaagaacuggggaaguacgagcaguacaucaaguggcccugguacaucuggcugggcuuuaucgccggacugauugccaucgugauggucacaaucaugcuguguugcaugaccagcugcuguagcugccugaagggcuguuguagcuguggcagcugcugcaaguucgacgaggacgauucugagcccgugcugaagggcgugaaacugcacuacaccugaggacuaguuauaagacugacuagcccgaugggccucccaacgggcccuccuccccuccuugcaccgagauuaauaaaaaaaaaaaaaaaaaaaaaaaaaaaaaaaaaaaaaaaaaaaaaaaaaaaaaaaaaaaaaaaaaaaaaaaaaaaaaaaaaaaaaaaaaaaaaaaaaaaa

SEQ ID NO: 25572 - RNA, 4011 nt, Artificial Sequence
  SARS-CoV-2/Wuhan/WIV05/2019__EPI_ISL_402128 spike protein mRNA gc mod (1-1273)(K986P_V987P_N439K_D614G)
aggagaaagcuuaccauguucguguuucuggugcugcugccccugguguccagccagugugugaaccugaccaccagaacacagcugccuccagccuacaccaacagcuucaccagaggcguguacuaccccgacaagguguucagauccagcgugcugcacucuacccaggaccuguuccugccuuucuucagcaacgugaccugguuccacgccauccacguguccggcaccaauggcaccaagagauucgacaaccccgugcugcccuucaacgacgggguguacuuugccagcaccgagaaguccaacaucaucagaggcuggaucuucggcaccacacuggacagcaagacccagagccugcugaucgugaacaacgccaccaacguggucaucaaagugugcgaguuccaguucugcaacgaccccuuccugggcgucuacuaccacaagaacaacaagagcuggauggaaagcgaguuccggguguacagcagcgccaacaacugcaccuucgaguacgugucccagccuuuccugauggaccuggaaggcaagcagggcaacuucaagaaccugcgcgaguucguguucaagaacaucgacggcuacuucaaaaucuacagcaagcacaccccuaucaaccucgugcgggaucugccucagggcuucucugcucuggaaccccugguggaucugcccaucggcaucaacaucacccgguuucagacacugcuggcccugcacagaagcuaccugacaccuggcgauagcagcagcggauggacagcuggugccgccgcuuacuaugugggcuaccugcagccuagaaccuuccugcugaaguacaacgagaacggcaccaucaccgacgccguggauugugcucuggauccucugagcgagacaaagugcacccugaaguccuucaccguggaaaagggcaucuaccagaccagcaacuuccgggugcagcccaccgaauccaucgugcgguuccccaauaucaccaaucugugccccuucggcgagguguucaaugccaccagauucgccucuguguacgccuggaaccggaagcggaucagcaauugcguggccgacuacuccgugcuguacaacuccgccagcuucagcaccuucaagugcuacggcguguccccuaccaagcugaacgaccugugcuucacaaacguguacgccgacagcuucgugauccggggagaugaagugcggcagauugccccuggacagacaggcaagaucgccgacuacaacuacaagcugcccgacgacuucaccggcugugugauugccuggaacagcaagaaccuggacuccaaagucggcggcaacuacaauuaccuguaccggcuguuccggaaguccaaucugaagcccuucgagcgggacaucagcaccgaaaucuaucaggccggcagcaccccuugcaacggcguggaaggcuucaacugcuacuucccacugcaguccuacggcuuucagcccacaaauggcgugggcuaucagcccuacagagugguggugcugagcuucgaacugcugcaugcuccugccacagugugcggcccuaagaaaagcaccaaucucgugaagaacaaaugcgugaacuucaacuucaacggccugaccggcaccggcgugcugacagagagcaacaagaaguuccugccauuccagcaguuuggccgggauaucgccgauaccacagacgccguuagagauccccagacacuggaaauccuggacaucaccccaugcagcuucggcggagugucugugaucaccccuggcaccaacaccagcaaucagguggcagugcuguaccagggcgugaacuguaccgaagugcccguggccauucacgccgaucagcugacaccuacauggcggguguacuccaccggcagcaauguguuucagaccagagccggcugucugaucggagccgagcacgugaacaauagcuacgagugcgacauccccaucggcgcuggcaucugugccagcuaccagacacagacaaacagccccagacgggcuagaagcguggccagccagagcaucauugccuacacaaugucucugggcgccgagaacagcguggccuacuccaacaacucuaucgcuauccccaccaacuucaccaucagcgugaccaccgagauccugccuguguccaugaccaagaccagcguggacugcaccauguacaucugcggcgauuccaccgagugcuccaaccugcugcugcaguacggcagcuucugcacccagcugaauagagcccugacagggaucgccguggaacaggacaagaacacccaagagguguucgcccaagugaagcaaaucuacaagaccccuccuaucaaggacuucggcggcuucaauuucagccagauucugcccgauccuagcaagcccagcaagcggagcuucaucgaggaccugcuguucaacaaagugacacuggccgacgccggcuucaucaagcaguauggcgauugucugggcgacauugccgccagggaucugauuugcgcccagaaguuuaacggacugacagugcugccuccucugcugaccgaugagaugaucgcccaguacacaucugcccugcuggccggcacaaucacaagcggcuggacauuuggagcuggcgccgcucugcagauccccuuugcuaugcagauggccuaccgguucaacggcaucggagugacccagaaugugcuguacgagaaccagaagcugaucgccaaccaguucaacagcgccaucggcaagauccaggacagccugagcagcacagcaagcgcccugggaaagcugcaggacguggucaaccagaaugcccaggcacugaacacccuggucaagcagcuguccuccaacuucggcgccaucagcucugugcugaacgauauccugagcagacuggacccuccugaggccgaggugcagaucgacagacugaucacaggcagacugcagagccuccagacauacgugacccagcagcugaucagagccgccgagauuagagccucugccaaucuggccgccaccaagaugucugagugugugcugggccagagcaagagaguggacuuuugcggcaagggcuaccaccugaugagcuucccucagucugccccucacggcgugguguuucugcacgugacauaugugcccgcucaagagaagaauuucaccaccgcuccagccaucugccacgacggcaaagcccacuuuccuagagaaggcguguucguguccaacggcacccauugguucgugacacagcggaacuucuacgagccccagaucaucaccaccgacaacaccuucgugucuggcaacugcgacguugugaucggcauugugaacaauaccguguacgacccucugcagcccgagcuggacagcuucaaagaggaacuggacaaguacuuuaagaaccacacaagccccgacguggaccugggcgauaucagcggaaucaaugccagcgucgugaacauccagaaagagaucgaccggcugaacgagguggccaagaaucugaacgagagccugaucgaccugcaagaacuggggaaguacgagcaguacaucaaguggcccugguacaucuggcugggcuuuaucgccggacugauugccaucgugauggucacaaucaugcuguguugcaugaccagcugcuguagcugccugaagggcuguuguagcuguggcagcugcugcaaguucgacgaggacgauucugagcccgugcugaagggcgugaaacugcacuacaccugaggacuaguuauaagacugacuagcccgaugggccucccaacgggcccuccuccccuccuugcaccgagauuaauaaaaaaaaaaaaaaaaaaaaaaaaaaaaaaaaaaaaaaaaaaaaaaaaaaaaaaaaaaaaaaaaaaaaaaaaaaaaaaaaaaaaaaaaaaaaaaaaaaaa

SEQ ID NO: 25573 - RNA, 4011 nt, Artificial Sequence
  SARS-CoV-2/Wuhan/WIV05/2019__EPI_ISL_402128 spike protein mRNA gc mod (1-1273)(K986P_V987P_S477N_D614G)
aggagaaagcuuaccauguucguguuucuggugcugcugccccugguguccagccagugugugaaccugaccaccagaacacagcugccuccagccuacaccaacagcuucaccagaggcguguacuaccccgacaagguguucagauccagcgugcugcacucuacccaggaccuguuccugccuuucuucagcaacgugaccugguuccacgccauccacguguccggcaccaauggcaccaagagauucgacaaccccgugcugcccuucaacgacgggguguacuuugccagcaccgagaaguccaacaucaucagaggcuggaucuucggcaccacacuggacagcaagacccagagccugcugaucgugaacaacgccaccaacguggucaucaaagugugcgaguuccaguucugcaacgaccccuuccugggcgucuacuaccacaagaacaacaagagcuggauggaaagcgaguuccggguguacagcagcgccaacaacugcaccuucgaguacgugucccagccuuuccugauggaccuggaaggcaagcagggcaacuucaagaaccugcgcgaguucguguucaagaacaucgacggcuacuucaaaaucuacagcaagcacaccccuaucaaccucgugcgggaucugccucagggcuucucugcucuggaaccccugguggaucugcccaucggcaucaacaucacccgguuucagacacugcuggcccugcacagaagcuaccugacaccuggcgauagcagcagcggauggacagcuggugccgccgcuuacuaugugggcuaccugcagccuagaaccuuccugcugaaguacaacgagaacggcaccaucaccgacgccguggauugugcucuggauccucugagcgagacaaagugcacccugaaguccuucaccguggaaaagggcaucuaccagaccagcaacuuccgggugcagcccaccgaauccaucgugcgguuccccaauaucaccaaucugugccccuucggcgagguguucaaugccaccagauucgccucuguguacgccuggaaccggaagcggaucagcaauugcguggccgacuacuccgugcuguacaacuccgccagcuucagcaccuucaagugcuacggcguguccccuaccaagcugaacgaccugugcuucacaaacguguacgccgacagcuucgugauccggggagaugaagugcggcagauugccccuggacagacaggcaagaucgccgacuacaacuacaagcugcccgacgacuucaccggcugugugauugccuggaacagcaacaaccuggacuccaaagucggcggcaacuacaauuaccuguaccggcuguuccggaaguccaaucugaagcccuucgagcgggacaucagcaccgaaaucuaucaggccggcaacaccccuugcaacggcguggaaggcuucaacugcuacuucccacugcaguccuacggcuuucagcccacaaauggcgugggcuaucagcccuacagagugguggugcugagcuucgaacugcugcaugcuccugccacagugugcggcccuaagaaaagcaccaaucucgugaagaacaaaugcgugaacuucaacuucaacggccugaccggcaccggcgugcugacagagagcaacaagaaguuccugccauuccagcaguuuggccgggauaucgccgauaccacagacgccguuagagauccccagacacuggaaauccuggacaucaccccaugcagcuucggcggagugucugugaucaccccuggcaccaacaccagcaaucagguggcagugcuguaccagggcgugaacuguaccgaagugcccguggccauucacgccgaucagcugacaccuacauggcggguguacuccaccggcagcaauguguuucagaccagagccggcugucugaucggagccgagcacgugaacaauagcuacgagugcgacauccccaucggcgcuggcaucugugccagcuaccagacacagacaaacagccccagacgggcuagaagcguggccagccagagcaucauugccuacacaaugucucugggcgccgagaacagcguggccuacuccaacaacucuaucgcuauccccaccaacuucaccaucagcgugaccaccgagauccugccuguguccaugaccaagaccagcguggacugcaccauguacaucugcggcgauuccaccgagugcuccaaccugcugcugcaguacggcagcuucugcacccagcugaauagagcccugacagggaucgccguggaacaggacaagaacacccaagagguguucgcccaagugaagcaaaucuacaagaccccuccuaucaaggacuucggcggcuucaauuucagccagauucugcccgauccuagcaagcccagcaagcggagcuucaucgaggaccugcuguucaacaaagugacacuggccgacgccggcuucaucaagcaguauggcgauugucugggcgacauugccgccagggaucugauuugcgcccagaaguuuaacggacugacagugcugccuccucugcugaccgaugagaugaucgcccaguacacaucugcccugcuggccggcacaaucacaagcggcuggacauuuggagcuggcgccgcucugcagauccccuuugcuaugcagauggccuaccgguucaacggcaucggagugacccagaaugugcuguacgagaaccagaagcugaucgccaaccaguucaacagcgccaucggcaagauccaggacagccugagcagcacagcaagcgcccugggaaagcugcaggacguggucaaccagaaugcccaggcacugaacacccuggucaagcagcuguccuccaacuucggcgccaucagcucugugcugaacgauauccugagcagacuggacccuccugaggccgaggugcagaucgacagacugaucacaggcagacugcagagccuccagacauacgugacccagcagcugaucagagccgccgagauuagagccucugccaaucuggccgccaccaagaugucugagugugugcugggccagagcaagagaguggacuuuugcggcaagggcuaccaccugaugagcuucccucagucugccccucacggcgugguguuucugcacgugacauaugugcccgcucaagagaagaauuucaccaccgcuccagccaucugccacgacggcaaagcccacuuuccuagagaaggcguguucguguccaacggcacccauugguucgugacacagcggaacuucuacgagccccagaucaucaccaccgacaacaccuucgugucuggcaacugcgacguugugaucggcauugugaacaauaccguguacgacccucugcagcccgagcuggacagcuucaaagaggaacuggacaaguacuuuaagaaccacacaagccccgacguggaccugggcgauaucagcggaaucaaugccagcgucgugaacauccagaaagagaucgaccggcugaacgagguggccaagaaucugaacgagagccugaucgaccugcaagaacuggggaaguacgagcaguacaucaaguggcccugguacaucuggcugggcuuuaucgccggacugauugccaucgugauggucacaaucaugcuguguugcaugaccagcugcuguagcugccugaagggcuguuguagcuguggcagcugcugcaaguucgacgaggacgauucugagcccgugcugaagggcgugaaacugcacuacaccugaggacuaguuauaagacugacuagcccgaugggccucccaacgggcccuccuccccuccuugcaccgagauuaauaaaaaaaaaaaaaaaaaaaaaaaaaaaaaaaaaaaaaaaaaaaaaaaaaaaaaaaaaaaaaaaaaaaaaaaaaaaaaaaaaaaaaaaaaaaaaaaaaaaa

SEQ ID NO: 25574 - RNA, 4011 nt, Artificial Sequence
  SARS-CoV-2/Wuhan/WIV05/2019__EPI_ISL_402128 spike protein mRNA gc mod (1-1273)(K986P_V987P_N501Y_D614G)
aggagaaagcuuaccauguucguguuucuggugcugcugccccugguguccagccagugugugaaccugaccaccagaacacagcugccuccagccuacaccaacagcuucaccagaggcguguacuaccccgacaagguguucagauccagcgugcugcacucuacccaggaccuguuccugccuuucuucagcaacgugaccugguuccacgccauccacguguccggcaccaauggcaccaagagauucgacaaccccgugcugcccuucaacgacgggguguacuuugccagcaccgagaaguccaacaucaucagaggcuggaucuucggcaccacacuggacagcaagacccagagccugcugaucgugaacaacgccaccaacguggucaucaaagugugcgaguuccaguucugcaacgaccccuuccugggcgucuacuaccacaagaacaacaagagcuggauggaaagcgaguuccggguguacagcagcgccaacaacugcaccuucgaguacgugucccagccuuuccugauggaccuggaaggcaagcagggcaacuucaagaaccugcgcgaguucguguucaagaacaucgacggcuacuucaaaaucuacagcaagcacaccccuaucaaccucgugcgggaucugccucagggcuucucugcucuggaaccccugguggaucugcccaucggcaucaacaucacccgguuucagacacugcuggcccugcacagaagcuaccugacaccuggcgauagcagcagcggauggacagcuggugccgccgcuuacuaugugggcuaccugcagccuagaaccuuccugcugaaguacaacgagaacggcaccaucaccgacgccguggauugugcucuggauccucugagcgagacaaagugcacccugaaguccuucaccguggaaaagggcaucuaccagaccagcaacuuccgggugcagcccaccgaauccaucgugcgguuccccaauaucaccaaucugugccccuucggcgagguguucaaugccaccagauucgccucuguguacgccuggaaccggaagcggaucagcaauugcguggccgacuacuccgugcuguacaacuccgccagcuucagcaccuucaagugcuacggcguguccccuaccaagcugaacgaccugugcuucacaaacguguacgccgacagcuucgugauccggggagaugaagugcggcagauugccccuggacagacaggcaagaucgccgacuacaacuacaagcugcccgacgacuucaccggcugugugauugccuggaacagcaacaaccuggacuccaaagucggcggcaacuacaauuaccuguaccggcuguuccggaaguccaaucugaagcccuucgagcgggacaucagcaccgaaaucuaucaggccggcagcaccccuugcaacggcguggaaggcuucaacugcuacuucccacugcaguccuacggcuuucagcccacauacggcgugggcuaucagcccuacagagugguggugcugagcuucgaacugcugcaugcuccugccacagugugcggcccuaagaaaagcaccaaucucgugaagaacaaaugcgugaacuucaacuucaacggccugaccggcaccggcgugcugacagagagcaacaagaaguuccugccauuccagcaguuuggccgggauaucgccgauaccacagacgccguuagagauccccagacacuggaaauccuggacaucaccccaugcagcuucggcggagugucugugaucaccccuggcaccaacaccagcaaucagguggcagugcuguaccagggcgugaacuguaccgaagugcccguggccauucacgccgaucagcugacaccuacauggcggguguacuccaccggcagcaauguguuucagaccagagccggcugucugaucggagccgagcacgugaacaauagcuacgagugcgacauccccaucggcgcuggcaucugugccagcuaccagacacagacaaacagccccagacgggcuagaagcguggccagccagagcaucauugccuacacaaugucucugggcgccgagaacagcguggccuacuccaacaacucuaucgcuauccccaccaacuucaccaucagcgugaccaccgagauccugccuguguccaugaccaagaccagcguggacugcaccauguacaucugcggcgauuccaccgagugcuccaaccugcugcugcaguacggcagcuucugcacccagcugaauagagcccugacagggaucgccguggaacaggacaagaacacccaagagguguucgcccaagugaagcaaaucuacaagaccccuccuaucaaggacuucggcggcuucaauuucagccagauucugcccgauccuagcaagcccagcaagcggagcuucaucgaggaccugcuguucaacaaagugacacuggccgacgccggcuucaucaagcaguauggcgauugucugggcgacauugccgccagggaucugauuugcgcccagaaguuuaacggacugacagugcugccuccucugcugaccgaugagaugaucgcccaguacacaucugcccugcuggccggcacaaucacaagcggcuggacauuuggagcuggcgccgcucugcagauccccuuugcuaugcagauggccuaccgguucaacggcaucggagugacccagaaugugcuguacgagaaccagaagcugaucgccaaccaguucaacagcgccaucggcaagauccaggacagccugagcagcacagcaagcgcccugggaaagcugcaggacguggucaaccagaaugcccaggcacugaacacccuggucaagcagcuguccuccaacuucggcgccaucagcucugugcugaacgauauccugagcagacuggacccuccugaggccgaggugcagaucgacagacugaucacaggcagacugcagagccuccagacauacgugacccagcagcugaucagagccgccgagauuagagccucugccaaucuggccgccaccaagaugucugagugugugcugggccagagcaagagaguggacuuuugcggcaagggcuaccaccugaugagcuucccucagucugccccucacggcgugguguuucugcacgugacauaugugcccgcucaagagaagaauuucaccaccgcuccagccaucugccacgacggcaaagcccacuuuccuagagaaggcguguucguguccaacggcacccauugguucgugacacagcggaacuucuacgagccccagaucaucaccaccgacaacaccuucgugucuggcaacugcgacguugugaucggcauugugaacaauaccguguacgacccucugcagcccgagcuggacagcuucaaagaggaacuggacaaguacuuuaagaaccacacaagccccgacguggaccugggcgauaucagcggaaucaaugccagcgucgugaacauccagaaagagaucgaccggcugaacgagguggccaagaaucugaacgagagccugaucgaccugcaagaacuggggaaguacgagcaguacaucaaguggcccugguacaucuggcugggcuuuaucgccggacugauugccaucgugauggucacaaucaugcuguguugcaugaccagcugcuguagcugccugaagggcuguuguagcuguggcagcugcugcaaguucgacgaggacgauucugagcccgugcugaagggcgugaaacugcacuacaccugaggacuaguuauaagacugacuagcccgaugggccucccaacgggcccuccuccccuccuugcaccgagauuaauaaaaaaaaaaaaaaaaaaaaaaaaaaaaaaaaaaaaaaaaaaaaaaaaaaaaaaaaaaaaaaaaaaaaaaaaaaaaaaaaaaaaaaaaaaaaaaaaaaaa

SEQ ID NO: 25575 - RNA, 4005 nt, Artificial Sequence
  SARS-CoV-2/Wuhan/WIV05/2019__EPI_ISL_402128 spike protein mRNA gc mod (1-1273)(K986P_V987P_H69del_V70del_D614G)
aggagaaagcuuaccauguucguguuucuggugcugcugccccugguguccagccagugugugaaccugaccaccagaacacagcugccuccagccuacaccaacagcuucaccagaggcguguacuaccccgacaagguguucagauccagcgugcugcacucuacccaggaccuguuccugccuuucuucagcaacgugaccugguuccacgccaucuccggcaccaauggcaccaagagauucgacaaccccgugcugcccuucaacgacgggguguacuuugccagcaccgagaaguccaacaucaucagaggcuggaucuucggcaccacacuggacagcaagacccagagccugcugaucgugaacaacgccaccaacguggucaucaaagugugcgaguuccaguucugcaacgaccccuuccugggcgucuacuaccacaagaacaacaagagcuggauggaaagcgaguuccggguguacagcagcgccaacaacugcaccuucgaguacgugucccagccuuuccugauggaccuggaaggcaagcagggcaacuucaagaaccugcgcgaguucguguucaagaacaucgacggcuacuucaaaaucuacagcaagcacaccccuaucaaccucgugcgggaucugccucagggcuucucugcucuggaaccccugguggaucugcccaucggcaucaacaucacccgguuucagacacugcuggcccugcacagaagcuaccugacaccuggcgauagcagcagcggauggacagcuggugccgccgcuuacuaugugggcuaccugcagccuagaaccuuccugcugaaguacaacgagaacggcaccaucaccgacgccguggauugugcucuggauccucugagcgagacaaagugcacccugaaguccuucaccguggaaaagggcaucuaccagaccagcaacuuccgggugcagcccaccgaauccaucgugcgguuccccaauaucaccaaucugugccccuucggcgagguguucaaugccaccagauucgccucuguguacgccuggaaccggaagcggaucagcaauugcguggccgacuacuccgugcuguacaacuccgccagcuucagcaccuucaagugcuacggcguguccccuaccaagcugaacgaccugugcuucacaaacguguacgccgacagcuucgugauccggggagaugaagugcggcagauugccccuggacagacaggcaagaucgccgacuacaacuacaagcugcccgacgacuucaccggcugugugauugccuggaacagcaacaaccuggacuccaaagucggcggcaacuacaauuaccuguaccggcuguuccggaaguccaaucugaagcccuucgagcgggacaucagcaccgaaaucuaucaggccggcagcaccccuugcaacggcguggaaggcuucaacugcuacuucccacugcaguccuacggcuuucagcccacaaauggcgugggcuaucagcccuacagagugguggugcugagcuucgaacugcugcaugcuccugccacagugugcggcccuaagaaaagcaccaaucucgugaagaacaaaugcgugaacuucaacuucaacggccugaccggcaccggcgugcugacagagagcaacaagaaguuccugccauuccagcaguuuggccgggauaucgccgauaccacagacgccguuagagauccccagacacuggaaauccuggacaucaccccaugcagcuucggcggagugucugugaucaccccuggcaccaacaccagcaaucagguggcagugcuguaccagggcgugaacuguaccgaagugcccguggccauucacgccgaucagcugacaccuacauggcggguguacuccaccggcagcaauguguuucagaccagagccggcugucugaucggagccgagcacgugaacaauagcuacgagugcgacauccccaucggcgcuggcaucugugccagcuaccagacacagacaaacagccccagacgggcuagaagcguggccagccagagcaucauugccuacacaaugucucugggcgccgagaacagcguggccuacuccaacaacucuaucgcuauccccaccaacuucaccaucagcgugaccaccgagauccugccuguguccaugaccaagaccagcguggacugcaccauguacaucugcggcgauuccaccgagugcuccaaccugcugcugcaguacggcagcuucugcacccagcugaauagagcccugacagggaucgccguggaacaggacaagaacacccaagagguguucgcccaagugaagcaaaucuacaagaccccuccuaucaaggacuucggcggcuucaauuucagccagauucugcccgauccuagcaagcccagcaagcggagcuucaucgaggaccugcuguucaacaaagugacacuggccgacgccggcuucaucaagcaguauggcgauugucugggcgacauugccgccagggaucugauuugcgcccagaaguuuaacggacugacagugcugccuccucugcugaccgaugagaugaucgcccaguacacaucugcccugcuggccggcacaaucacaagcggcuggacauuuggagcuggcgccgcucugcagauccccuuugcuaugcagauggccuaccgguucaacggcaucggagugacccagaaugugcuguacgagaaccagaagcugaucgccaaccaguucaacagcgccaucggcaagauccaggacagccugagcagcacagcaagcgcccugggaaagcugcaggacguggucaaccagaaugcccaggcacugaacacccuggucaagcagcuguccuccaacuucggcgccaucagcucugugcugaacgauauccugagcagacuggacccuccugaggccgaggugcagaucgacagacugaucacaggcagacugcagagccuccagacauacgugacccagcagcugaucagagccgccgagauuagagccucugccaaucuggccgccaccaagaugucugagugugugcugggccagagcaagagaguggacuuuugcggcaagggcuaccaccugaugagcuucccucagucugccccucacggcgugguguuucugcacgugacauaugugcccgcucaagagaagaauuucaccaccgcuccagccaucugccacgacggcaaagcccacuuuccuagagaaggcguguucguguccaacggcacccauugguucgugacacagcggaacuucuacgagccccagaucaucaccaccgacaacaccuucgugucuggcaacugcgacguugugaucggcauugugaacaauaccguguacgacccucugcagcccgagcuggacagcuucaaagaggaacuggacaaguacuuuaagaaccacacaagccccgacguggaccugggcgauaucagcggaaucaaugccagcgucgugaacauccagaaagagaucgaccggcugaacgagguggccaagaaucugaacgagagccugaucgaccugcaagaacuggggaaguacgagcaguacaucaaguggcccugguacaucuggcugggcuuuaucgccggacugauugccaucgugauggucacaaucaugcuguguugcaugaccagcugcuguagcugccugaagggcuguuguagcuguggcagcugcugcaaguucgacgaggacgauucugagcccgugcugaagggcgugaaacugcacuacaccugaggacuaguuauaagacugacuagcccgaugggccucccaacgggcccuccuccccuccuugcaccgagauuaauaaaaaaaaaaaaaaaaaaaaaaaaaaaaaaaaaaaaaaaaaaaaaaaaaaaaaaaaaaaaaaaaaaaaaaaaaaaaaaaaaaaaaaaaaaaaaaaaaaaa

SEQ ID NO: 25576 - RNA, 4011 nt, Artificial Sequence
  SARS-CoV-2/Wuhan/WIV05/2019__EPI_ISL_402128 spike protein mRNA gc mod (1-1273)(K986P_V987P_Y453F_D614G)
aggagaaagcuuaccauguucguguuucuggugcugcugccccugguguccagccagugugugaaccugaccaccagaacacagcugccuccagccuacaccaacagcuucaccagaggcguguacuaccccgacaagguguucagauccagcgugcugcacucuacccaggaccuguuccugccuuucuucagcaacgugaccugguuccacgccauccacguguccggcaccaauggcaccaagagauucgacaaccccgugcugcccuucaacgacgggguguacuuugccagcaccgagaaguccaacaucaucagaggcuggaucuucggcaccacacuggacagcaagacccagagccugcugaucgugaacaacgccaccaacguggucaucaaagugugcgaguuccaguucugcaacgaccccuuccugggcgucuacuaccacaagaacaacaagagcuggauggaaagcgaguuccggguguacagcagcgccaacaacugcaccuucgaguacgugucccagccuuuccugauggaccuggaaggcaagcagggcaacuucaagaaccugcgcgaguucguguucaagaacaucgacggcuacuucaaaaucuacagcaagcacaccccuaucaaccucgugcgggaucugccucagggcuucucugcucuggaaccccugguggaucugcccaucggcaucaacaucacccgguuucagacacugcuggcccugcacagaagcuaccugacaccuggcgauagcagcagcggauggacagcuggugccgccgcuuacuaugugggcuaccugcagccuagaaccuuccugcugaaguacaacgagaacggcaccaucaccgacgccguggauugugcucuggauccucugagcgagacaaagugcacccugaaguccuucaccguggaaaagggcaucuaccagaccagcaacuuccgggugcagcccaccgaauccaucgugcgguuccccaauaucaccaaucugugccccuucggcgagguguucaaugccaccagauucgccucuguguacgccuggaaccggaagcggaucagcaauugcguggccgacuacuccgugcuguacaacuccgccagcuucagcaccuucaagugcuacggcguguccccuaccaagcugaacgaccugugcuucacaaacguguacgccgacagcuucgugauccggggagaugaagugcggcagauugccccuggacagacaggcaagaucgccgacuacaacuacaagcugcccgacgacuucaccggcugugugauugccuggaacagcaacaaccuggacuccaaagucggcggcaacuacaauuaccuguuccggcuguuccggaaguccaaucugaagcccuucgagcgggacaucagcaccgaaaucuaucaggccggcagcaccccuugcaacggcguggaaggcuucaacugcuacuucccacugcaguccuacggcuuucagcccacaaauggcgugggcuaucagcccuacagagugguggugcugagcuucgaacugcugcaugcuccugccacagugugcggcccuaagaaaagcaccaaucucgugaagaacaaaugcgugaacuucaacuucaacggccugaccggcaccggcgugcugacagagagcaacaagaaguuccugccauuccagcaguuuggccgggauaucgccgauaccacagacgccguuagagauccccagacacuggaaauccuggacaucaccccaugcagcuucggcggagugucugugaucaccccuggcaccaacaccagcaaucagguggcagugcuguaccagggcgugaacuguaccgaagugcccguggccauucacgccgaucagcugacaccuacauggcggguguacuccaccggcagcaauguguuucagaccagagccggcugucugaucggagccgagcacgugaacaauagcuacgagugcgacauccccaucggcgcuggcaucugugccagcuaccagacacagacaaacagccccagacgggcuagaagcguggccagccagagcaucauugccuacacaaugucucugggcgccgagaacagcguggccuacuccaacaacucuaucgcuauccccaccaacuucaccaucagcgugaccaccgagauccugccuguguccaugaccaagaccagcguggacugcaccauguacaucugcggcgauuccaccgagugcuccaaccugcugcugcaguacggcagcuucugcacccagcugaauagagcccugacagggaucgccguggaacaggacaagaacacccaagagguguucgcccaagugaagcaaaucuacaagaccccuccuaucaaggacuucggcggcuucaauuucagccagauucugcccgauccuagcaagcccagcaagcggagcuucaucgaggaccugcuguucaacaaagugacacuggccgacgccggcuucaucaagcaguauggcgauugucugggcgacauugccgccagggaucugauuugcgcccagaaguuuaacggacugacagugcugccuccucugcugaccgaugagaugaucgcccaguacacaucugcccugcuggccggcacaaucacaagcggcuggacauuuggagcuggcgccgcucugcagauccccuuugcuaugcagauggccuaccgguucaacggcaucggagugacccagaaugugcuguacgagaaccagaagcugaucgccaaccaguucaacagcgccaucggcaagauccaggacagccugagcagcacagcaagcgcccugggaaagcugcaggacguggucaaccagaaugcccaggcacugaacacccuggucaagcagcuguccuccaacuucggcgccaucagcucugugcugaacgauauccugagcagacuggacccuccugaggccgaggugcagaucgacagacugaucacaggcagacugcagagccuccagacauacgugacccagcagcugaucagagccgccgagauuagagccucugccaaucuggccgccaccaagaugucugagugugugcugggccagagcaagagaguggacuuuugcggcaagggcuaccaccugaugagcuucccucagucugccccucacggcgugguguuucugcacgugacauaugugcccgcucaagagaagaauuucaccaccgcuccagccaucugccacgacggcaaagcccacuuuccuagagaaggcguguucguguccaacggcacccauugguucgugacacagcggaacuucuacgagccccagaucaucaccaccgacaacaccuucgugucuggcaacugcgacguugugaucggcauugugaacaauaccguguacgacccucugcagcccgagcuggacagcuucaaagaggaacuggacaaguacuuuaagaaccacacaagccccgacguggaccugggcgauaucagcggaaucaaugccagcgucgugaacauccagaaagagaucgaccggcugaacgagguggccaagaaucugaacgagagccugaucgaccugcaagaacuggggaaguacgagcaguacaucaaguggcccugguacaucuggcugggcuuuaucgccggacugauugccaucgugauggucacaaucaugcuguguugcaugaccagcugcuguagcugccugaagggcuguuguagcuguggcagcugcugcaaguucgacgaggacgauucugagcccgugcugaagggcgugaaacugcacuacaccugaggacuaguuauaagacugacuagcccgaugggccucccaacgggcccuccuccccuccuugcaccgagauuaauaaaaaaaaaaaaaaaaaaaaaaaaaaaaaaaaaaaaaaaaaaaaaaaaaaaaaaaaaaaaaaaaaaaaaaaaaaaaaaaaaaaaaaaaaaaaaaaaaaaa

SEQ ID NO: 25577 - RNA, 4011 nt, Artificial Sequence
  SARS-CoV-2/Wuhan/WIV05/2019__EPI_ISL_402128 spike protein mRNA gc mod (1-1273)(K986P_V987P_D614G_I692V)
aggagaaagcuuaccauguucguguuucuggugcugcugccccugguguccagccagugugugaaccugaccaccagaacacagcugccuccagccuacaccaacagcuucaccagaggcguguacuaccccgacaagguguucagauccagcgugcugcacucuacccaggaccuguuccugccuuucuucagcaacgugaccugguuccacgccauccacguguccggcaccaauggcaccaagagauucgacaaccccgugcugcccuucaacgacgggguguacuuugccagcaccgagaaguccaacaucaucagaggcuggaucuucggcaccacacuggacagcaagacccagagccugcugaucgugaacaacgccaccaacguggucaucaaagugugcgaguuccaguucugcaacgaccccuuccugggcgucuacuaccacaagaacaacaagagcuggauggaaagcgaguuccggguguacagcagcgccaacaacugcaccuucgaguacgugucccagccuuuccugauggaccuggaaggcaagcagggcaacuucaagaaccugcgcgaguucguguucaagaacaucgacggcuacuucaaaaucuacagcaagcacaccccuaucaaccucgugcgggaucugccucagggcuucucugcucuggaaccccugguggaucugcccaucggcaucaacaucacccgguuucagacacugcuggcccugcacagaagcuaccugacaccuggcgauagcagcagcggauggacagcuggugccgccgcuuacuaugugggcuaccugcagccuagaaccuuccugcugaaguacaacgagaacggcaccaucaccgacgccguggauugugcucuggauccucugagcgagacaaagugcacccugaaguccuucaccguggaaaagggcaucuaccagaccagcaacuuccgggugcagcccaccgaauccaucgugcgguuccccaauaucaccaaucugugccccuucggcgagguguucaaugccaccagauucgccucuguguacgccuggaaccggaagcggaucagcaauugcguggccgacuacuccgugcuguacaacuccgccagcuucagcaccuucaagugcuacggcguguccccuaccaagcugaacgaccugugcuucacaaacguguacgccgacagcuucgugauccggggagaugaagugcggcagauugccccuggacagacaggcaagaucgccgacuacaacuacaagcugcccgacgacuucaccggcugugugauugccuggaacagcaacaaccuggacuccaaagucggcggcaacuacaauuaccuguaccggcuguuccggaaguccaaucugaagcccuucgagcgggacaucagcaccgaaaucuaucaggccggcagcaccccuugcaacggcguggaaggcuucaacugcuacuucccacugcaguccuacggcuuucagcccacaaauggcgugggcuaucagcccuacagagugguggugcugagcuucgaacugcugcaugcuccugccacagugugcggcccuaagaaaagcaccaaucucgugaagaacaaaugcgugaacuucaacuucaacggccugaccggcaccggcgugcugacagagagcaacaagaaguuccugccauuccagcaguuuggccgggauaucgccgauaccacagacgccguuagagauccccagacacuggaaauccuggacaucaccccaugcagcuucggcggagugucugugaucaccccuggcaccaacaccagcaaucagguggcagugcuguaccagggcgugaacuguaccgaagugcccguggccauucacgccgaucagcugacaccuacauggcggguguacuccaccggcagcaauguguuucagaccagagccggcugucugaucggagccgagcacgugaacaauagcuacgagugcgacauccccaucggcgcuggcaucugugccagcuaccagacacagacaaacagccccagacgggcuagaagcguggccagccagagcgugauugccuacacaaugucucugggcgccgagaacagcguggccuacuccaacaacucuaucgcuauccccaccaacuucaccaucagcgugaccaccgagauccugccuguguccaugaccaagaccagcguggacugcaccauguacaucugcggcgauuccaccgagugcuccaaccugcugcugcaguacggcagcuucugcacccagcugaauagagcccugacagggaucgccguggaacaggacaagaacacccaagagguguucgcccaagugaagcaaaucuacaagaccccuccuaucaaggacuucggcggcuucaauuucagccagauucugcccgauccuagcaagcccagcaagcggagcuucaucgaggaccugcuguucaacaaagugacacuggccgacgccggcuucaucaagcaguauggcgauugucugggcgacauugccgccagggaucugauuugcgcccagaaguuuaacggacugacagugcugccuccucugcugaccgaugagaugaucgcccaguacacaucugcccugcuggccggcacaaucacaagcggcuggacauuuggagcuggcgccgcucugcagauccccuuugcuaugcagauggccuaccgguucaacggcaucggagugacccagaaugugcuguacgagaaccagaagcugaucgccaaccaguucaacagcgccaucggcaagauccaggacagccugagcagcacagcaagcgcccugggaaagcugcaggacguggucaaccagaaugcccaggcacugaacacccuggucaagcagcuguccuccaacuucggcgccaucagcucugugcugaacgauauccugagcagacuggacccuccugaggccgaggugcagaucgacagacugaucacaggcagacugcagagccuccagacauacgugacccagcagcugaucagagccgccgagauuagagccucugccaaucuggccgccaccaagaugucugagugugugcugggccagagcaagagaguggacuuuugcggcaagggcuaccaccugaugagcuucccucagucugccccucacggcgugguguuucugcacgugacauaugugcccgcucaagagaagaauuucaccaccgcuccagccaucugccacgacggcaaagcccacuuuccuagagaaggcguguucguguccaacggcacccauugguucgugacacagcggaacuucuacgagccccagaucaucaccaccgacaacaccuucgugucuggcaacugcgacguugugaucggcauugugaacaauaccguguacgacccucugcagcccgagcuggacagcuucaaagaggaacuggacaaguacuuuaagaaccacacaagccccgacguggaccugggcgauaucagcggaaucaaugccagcgucgugaacauccagaaagagaucgaccggcugaacgagguggccaagaaucugaacgagagccugaucgaccugcaagaacuggggaaguacgagcaguacaucaaguggcccugguacaucuggcugggcuuuaucgccggacugauugccaucgugauggucacaaucaugcuguguugcaugaccagcugcuguagcugccugaagggcuguuguagcuguggcagcugcugcaaguucgacgaggacgauucugagcccgugcugaagggcgugaaacugcacuacaccugaggacuaguuauaagacugacuagcccgaugggccucccaacgggcccuccuccccuccuugcaccgagauuaauaaaaaaaaaaaaaaaaaaaaaaaaaaaaaaaaaaaaaaaaaaaaaaaaaaaaaaaaaaaaaaaaaaaaaaaaaaaaaaaaaaaaaaaaaaaaaaaaaaaa

SEQ ID NO: 25578 - RNA, 4011 nt, Artificial Sequence
  SARS-CoV-2/Wuhan/WIV05/2019__EPI_ISL_402128 spike protein mRNA gc mod (1-1273)(K986P_V987P_D614G_M1229I)
aggagaaagcuuaccauguucguguuucuggugcugcugccccugguguccagccagugugugaaccugaccaccagaacacagcugccuccagccuacaccaacagcuucaccagaggcguguacuaccccgacaagguguucagauccagcgugcugcacucuacccaggaccuguuccugccuuucuucagcaacgugaccugguuccacgccauccacguguccggcaccaauggcaccaagagauucgacaaccccgugcugcccuucaacgacgggguguacuuugccagcaccgagaaguccaacaucaucagaggcuggaucuucggcaccacacuggacagcaagacccagagccugcugaucgugaacaacgccaccaacguggucaucaaagugugcgaguuccaguucugcaacgaccccuuccugggcgucuacuaccacaagaacaacaagagcuggauggaaagcgaguuccggguguacagcagcgccaacaacugcaccuucgaguacgugucccagccuuuccugauggaccuggaaggcaagcagggcaacuucaagaaccugcgcgaguucguguucaagaacaucgacggcuacuucaaaaucuacagcaagcacaccccuaucaaccucgugcgggaucugccucagggcuucucugcucuggaaccccugguggaucugcccaucggcaucaacaucacccgguuucagacacugcuggcccugcacagaagcuaccugacaccuggcgauagcagcagcggauggacagcuggugccgccgcuuacuaugugggcuaccugcagccuagaaccuuccugcugaaguacaacgagaacggcaccaucaccgacgccguggauugugcucuggauccucugagcgagacaaagugcacccugaaguccuucaccguggaaaagggcaucuaccagaccagcaacuuccgggugcagcccaccgaauccaucgugcgguuccccaauaucaccaaucugugccccuucggcgagguguucaaugccaccagauucgccucuguguacgccuggaaccggaagcggaucagcaauugcguggccgacuacuccgugcuguacaacuccgccagcuucagcaccuucaagugcuacggcguguccccuaccaagcugaacgaccugugcuucacaaacguguacgccgacagcuucgugauccggggagaugaagugcggcagauugccccuggacagacaggcaagaucgccgacuacaacuacaagcugcccgacgacuucaccggcugugugauugccuggaacagcaacaaccuggacuccaaagucggcggcaacuacaauuaccuguaccggcuguuccggaaguccaaucugaagcccuucgagcgggacaucagcaccgaaaucuaucaggccggcagcaccccuugcaacggcguggaaggcuucaacugcuacuucccacugcaguccuacggcuuucagcccacaaauggcgugggcuaucagcccuacagagugguggugcugagcuucgaacugcugcaugcuccugccacagugugcggcccuaagaaaagcaccaaucucgugaagaacaaaugcgugaacuucaacuucaacggccugaccggcaccggcgugcugacagagagcaacaagaaguuccugccauuccagcaguuuggccgggauaucgccgauaccacagacgccguuagagauccccagacacuggaaauccuggacaucaccccaugcagcuucggcggagugucugugaucaccccuggcaccaacaccagcaaucagguggcagugcuguaccagggcgugaacuguaccgaagugcccguggccauucacgccgaucagcugacaccuacauggcggguguacuccaccggcagcaauguguuucagaccagagccggcugucugaucggagccgagcacgugaacaauagcuacgagugcgacauccccaucggcgcuggcaucugugccagcuaccagacacagacaaacagccccagacgggcuagaagcguggccagccagagcaucauugccuacacaaugucucugggcgccgagaacagcguggccuacuccaacaacucuaucgcuauccccaccaacuucaccaucagcgugaccaccgagauccugccuguguccaugaccaagaccagcguggacugcaccauguacaucugcggcgauuccaccgagugcuccaaccugcugcugcaguacggcagcuucugcacccagcugaauagagcccugacagggaucgccguggaacaggacaagaacacccaagagguguucgcccaagugaagcaaaucuacaagaccccuccuaucaaggacuucggcggcuucaauuucagccagauucugcccgauccuagcaagcccagcaagcggagcuucaucgaggaccugcuguucaacaaagugacacuggccgacgccggcuucaucaagcaguauggcgauugucugggcgacauugccgccagggaucugauuugcgcccagaaguuuaacggacugacagugcugccuccucugcugaccgaugagaugaucgcccaguacacaucugcccugcuggccggcacaaucacaagcggcuggacauuuggagcuggcgccgcucugcagauccccuuugcuaugcagauggccuaccgguucaacggcaucggagugacccagaaugugcuguacgagaaccagaagcugaucgccaaccaguucaacagcgccaucggcaagauccaggacagccugagcagcacagcaagcgcccugggaaagcugcaggacguggucaaccagaaugcccaggcacugaacacccuggucaagcagcuguccuccaacuucggcgccaucagcucugugcugaacgauauccugagcagacuggacccuccugaggccgaggugcagaucgacagacugaucacaggcagacugcagagccuccagacauacgugacccagcagcugaucagagccgccgagauuagagccucugccaaucuggccgccaccaagaugucugagugugugcugggccagagcaagagaguggacuuuugcggcaagggcuaccaccugaugagcuucccucagucugccccucacggcgugguguuucugcacgugacauaugugcccgcucaagagaagaauuucaccaccgcuccagccaucugccacgacggcaaagcccacuuuccuagagaaggcguguucguguccaacggcacccauugguucgugacacagcggaacuucuacgagccccagaucaucaccaccgacaacaccuucgugucuggcaacugcgacguugugaucggcauugugaacaauaccguguacgacccucugcagcccgagcuggacagcuucaaagaggaacuggacaaguacuuuaagaaccacacaagccccgacguggaccugggcgauaucagcggaaucaaugccagcgucgugaacauccagaaagagaucgaccggcugaacgagguggccaagaaucugaacgagagccugaucgaccugcaagaacuggggaaguacgagcaguacaucaaguggcccugguacaucuggcugggcuuuaucgccggacugauugccaucgugaucgucacaaucaugcuguguugcaugaccagcugcuguagcugccugaagggcuguuguagcuguggcagcugcugcaaguucgacgaggacgauucugagcccgugcugaagggcgugaaacugcacuacaccugaggacuaguuauaagacugacuagcccgaugggccucccaacgggcccuccuccccuccuugcaccgagauuaauaaaaaaaaaaaaaaaaaaaaaaaaaaaaaaaaaaaaaaaaaaaaaaaaaaaaaaaaaaaaaaaaaaaaaaaaaaaaaaaaaaaaaaaaaaaaaaaaaaaa

SEQ ID NO: 25579 - RNA, 4005 nt, Artificial Sequence
  SARS-CoV-2/Wuhan/WIV05/2019__EPI_ISL_402128 spike protein mRNA gc mod (1-1273)(K986P_V987P_H69del_V70del_A222V_Y453F_S477N_D614G_I692V)
aggagaaagcuuaccauguucguguuucuggugcugcugccccugguguccagccagugugugaaccugaccaccagaacacagcugccuccagccuacaccaacagcuucaccagaggcguguacuaccccgacaagguguucagauccagcgugcugcacucuacccaggaccuguuccugccuuucuucagcaacgugaccugguuccacgccaucuccggcaccaauggcaccaagagauucgacaaccccgugcugcccuucaacgacgggguguacuuugccagcaccgagaaguccaacaucaucagaggcuggaucuucggcaccacacuggacagcaagacccagagccugcugaucgugaacaacgccaccaacguggucaucaaagugugcgaguuccaguucugcaacgaccccuuccugggcgucuacuaccacaagaacaacaagagcuggauggaaagcgaguuccggguguacagcagcgccaacaacugcaccuucgaguacgugucccagccuuuccugauggaccuggaaggcaagcagggcaacuucaagaaccugcgcgaguucguguucaagaacaucgacggcuacuucaaaaucuacagcaagcacaccccuaucaaccucgugcgggaucugccucagggcuucucugugcuggaaccccugguggaucugcccaucggcaucaacaucacccgguuucagacacugcuggcccugcacagaagcuaccugacaccuggcgauagcagcagcggauggacagcuggugccgccgcuuacuaugugggcuaccugcagccuagaaccuuccugcugaaguacaacgagaacggcaccaucaccgacgccguggauugugcucuggauccucugagcgagacaaagugcacccugaaguccuucaccguggaaaagggcaucuaccagaccagcaacuuccgggugcagcccaccgaauccaucgugcgguuccccaauaucaccaaucugugccccuucggcgagguguucaaugccaccagauucgccucuguguacgccuggaaccggaagcggaucagcaauugcguggccgacuacuccgugcuguacaacuccgccagcuucagcaccuucaagugcuacggcguguccccuaccaagcugaacgaccugugcuucacaaacguguacgccgacagcuucgugauccggggagaugaagugcggcagauugccccuggacagacaggcaagaucgccgacuacaacuacaagcugcccgacgacuucaccggcugugugauugccuggaacagcaacaaccuggacuccaaagucggcggcaacuacaauuaccuguuccggcuguuccggaaguccaaucugaagcccuucgagcgggacaucagcaccgaaaucuaucaggccggcaacaccccuugcaacggcguggaaggcuucaacugcuacuucccacugcaguccuacggcuuucagcccacaaauggcgugggcuaucagcccuacagagugguggugcugagcuucgaacugcugcaugcuccugccacagugugcggcccuaagaaaagcaccaaucucgugaagaacaaaugcgugaacuucaacuucaacggccugaccggcaccggcgugcugacagagagcaacaagaaguuccugccauuccagcaguuuggccgggauaucgccgauaccacagacgccguuagagauccccagacacuggaaauccuggacaucaccccaugcagcuucggcggagugucugugaucaccccuggcaccaacaccagcaaucagguggcagugcuguaccagggcgugaacuguaccgaagugcccguggccauucacgccgaucagcugacaccuacauggcggguguacuccaccggcagcaauguguuucagaccagagccggcugucugaucggagccgagcacgugaacaauagcuacgagugcgacauccccaucggcgcuggcaucugugccagcuaccagacacagacaaacagccccagacgggcuagaagcguggccagccagagcgugauugccuacacaaugucucugggcgccgagaacagcguggccuacuccaacaacucuaucgcuauccccaccaacuucaccaucagcgugaccaccgagauccugccuguguccaugaccaagaccagcguggacugcaccauguacaucugcggcgauuccaccgagugcuccaaccugcugcugcaguacggcagcuucugcacccagcugaauagagcccugacagggaucgccguggaacaggacaagaacacccaagagguguucgcccaagugaagcaaaucuacaagaccccuccuaucaaggacuucggcggcuucaauuucagccagauucugcccgauccuagcaagcccagcaagcggagcuucaucgaggaccugcuguucaacaaagugacacuggccgacgccggcuucaucaagcaguauggcgauugucugggcgacauugccgccagggaucugauuugcgcccagaaguuuaacggacugacagugcugccuccucugcugaccgaugagaugaucgcccaguacacaucugcccugcuggccggcacaaucacaagcggcuggacauuuggagcuggcgccgcucugcagauccccuuugcuaugcagauggccuaccgguucaacggcaucggagugacccagaaugugcuguacgagaaccagaagcugaucgccaaccaguucaacagcgccaucggcaagauccaggacagccugagcagcacagcaagcgcccugggaaagcugcaggacguggucaaccagaaugcccaggcacugaacacccuggucaagcagcuguccuccaacuucggcgccaucagcucugugcugaacgauauccugagcagacuggacccuccugaggccgaggugcagaucgacagacugaucacaggcagacugcagagccuccagacauacgugacccagcagcugaucagagccgccgagauuagagccucugccaaucuggccgccaccaagaugucugagugugugcugggccagagcaagagaguggacuuuugcggcaagggcuaccaccugaugagcuucccucagucugccccucacggcgugguguuucugcacgugacauaugugcccgcucaagagaagaauuucaccaccgcuccagccaucugccacgacggcaaagcccacuuuccuagagaaggcguguucguguccaacggcacccauugguucgugacacagcggaacuucuacgagccccagaucaucaccaccgacaacaccuucgugucuggcaacugcgacguugugaucggcauugugaacaauaccguguacgacccucugcagcccgagcuggacagcuucaaagaggaacuggacaaguacuuuaagaaccacacaagccccgacguggaccugggcgauaucagcggaaucaaugccagcgucgugaacauccagaaagagaucgaccggcugaacgagguggccaagaaucugaacgagagccugaucgaccugcaagaacuggggaaguacgagcaguacaucaaguggcccugguacaucuggcugggcuuuaucgccggacugauugccaucgugauggucacaaucaugcuguguugcaugaccagcugcuguagcugccugaagggcuguuguagcuguggcagcugcugcaaguucgacgaggacgauucugagcccgugcugaagggcgugaaacugcacuacaccugaggacuaguuauaagacugacuagcccgaugggccucccaacgggcccuccuccccuccuugcaccgagauuaauaaaaaaaaaaaaaaaaaaaaaaaaaaaaaaaaaaaaaaaaaaaaaaaaaaaaaaaaaaaaaaaaaaaaaaaaaaaaaaaaaaaaaaaaaaaaaaaaaaaa

SEQ ID NO: 25580 - RNA, 4005 nt, Artificial Sequence
  SARS-CoV-2/Wuhan/WIV05/2019__EPI_ISL_402128 spike protein mRNA gc mod (1-1273)(K986P_V987P_H69del_V70del_Y453F_D614G_I692V_M1229I)
aggagaaagcuuaccauguucguguuucuggugcugcugccccugguguccagccagugugugaaccugaccaccagaacacagcugccuccagccuacaccaacagcuucaccagaggcguguacuaccccgacaagguguucagauccagcgugcugcacucuacccaggaccuguuccugccuuucuucagcaacgugaccugguuccacgccaucuccggcaccaauggcaccaagagauucgacaaccccgugcugcccuucaacgacgggguguacuuugccagcaccgagaaguccaacaucaucagaggcuggaucuucggcaccacacuggacagcaagacccagagccugcugaucgugaacaacgccaccaacguggucaucaaagugugcgaguuccaguucugcaacgaccccuuccugggcgucuacuaccacaagaacaacaagagcuggauggaaagcgaguuccggguguacagcagcgccaacaacugcaccuucgaguacgugucccagccuuuccugauggaccuggaaggcaagcagggcaacuucaagaaccugcgcgaguucguguucaagaacaucgacggcuacuucaaaaucuacagcaagcacaccccuaucaaccucgugcgggaucugccucagggcuucucugcucuggaaccccugguggaucugcccaucggcaucaacaucacccgguuucagacacugcuggcccugcacagaagcuaccugacaccuggcgauagcagcagcggauggacagcuggugccgccgcuuacuaugugggcuaccugcagccuagaaccuuccugcugaaguacaacgagaacggcaccaucaccgacgccguggauugugcucuggauccucugagcgagacaaagugcacccugaaguccuucaccguggaaaagggcaucuaccagaccagcaacuuccgggugcagcccaccgaauccaucgugcgguuccccaauaucaccaaucugugccccuucggcgagguguucaaugccaccagauucgccucuguguacgccuggaaccggaagcggaucagcaauugcguggccgacuacuccgugcuguacaacuccgccagcuucagcaccuucaagugcuacggcguguccccuaccaagcugaacgaccugugcuucacaaacguguacgccgacagcuucgugauccggggagaugaagugcggcagauugccccuggacagacaggcaagaucgccgacuacaacuacaagcugcccgacgacuucaccggcugugugauugccuggaacagcaacaaccuggacuccaaagucggcggcaacuacaauuaccuguuccggcuguuccggaaguccaaucugaagcccuucgagcgggacaucagcaccgaaaucuaucaggccggcagcaccccuugcaacggcguggaaggcuucaacugcuacuucccacugcaguccuacggcuuucagcccacaaauggcgugggcuaucagcccuacagagugguggugcugagcuucgaacugcugcaugcuccugccacagugugcggcccuaagaaaagcaccaaucucgugaagaacaaaugcgugaacuucaacuucaacggccugaccggcaccggcgugcugacagagagcaacaagaaguuccugccauuccagcaguuuggccgggauaucgccgauaccacagacgccguuagagauccccagacacuggaaauccuggacaucaccccaugcagcuucggcggagugucugugaucaccccuggcaccaacaccagcaaucagguggcagugcuguaccagggcgugaacuguaccgaagugcccguggccauucacgccgaucagcugacaccuacauggcggguguacuccaccggcagcaauguguuucagaccagagccggcugucugaucggagccgagcacgugaacaauagcuacgagugcgacauccccaucggcgcuggcaucugugccagcuaccagacacagacaaacagccccagacgggcuagaagcguggccagccagagcgugauugccuacacaaugucucugggcgccgagaacagcguggccuacuccaacaacucuaucgcuauccccaccaacuucaccaucagcgugaccaccgagauccugccuguguccaugaccaagaccagcguggacugcaccauguacaucugcggcgauuccaccgagugcuccaaccugcugcugcaguacggcagcuucugcacccagcugaauagagcccugacagggaucgccguggaacaggacaagaacacccaagagguguucgcccaagugaagcaaaucuacaagaccccuccuaucaaggacuucggcggcuucaauuucagccagauucugcccgauccuagcaagcccagcaagcggagcuucaucgaggaccugcuguucaacaaagugacacuggccgacgccggcuucaucaagcaguauggcgauugucugggcgacauugccgccagggaucugauuugcgcccagaaguuuaacggacugacagugcugccuccucugcugaccgaugagaugaucgcccaguacacaucugcccugcuggccggcacaaucacaagcggcuggacauuuggagcuggcgccgcucugcagauccccuuugcuaugcagauggccuaccgguucaacggcaucggagugacccagaaugugcuguacgagaaccagaagcugaucgccaaccaguucaacagcgccaucggcaagauccaggacagccugagcagcacagcaagcgcccugggaaagcugcaggacguggucaaccagaaugcccaggcacugaacacccuggucaagcagcuguccuccaacuucggcgccaucagcucugugcugaacgauauccugagcagacuggacccuccugaggccgaggugcagaucgacagacugaucacaggcagacugcagagccuccagacauacgugacccagcagcugaucagagccgccgagauuagagccucugccaaucuggccgccaccaagaugucugagugugugcugggccagagcaagagaguggacuuuugcggcaagggcuaccaccugaugagcuucccucagucugccccucacggcgugguguuucugcacgugacauaugugcccgcucaagagaagaauuucaccaccgcuccagccaucugccacgacggcaaagcccacuuuccuagagaaggcguguucguguccaacggcacccauugguucgugacacagcggaacuucuacgagccccagaucaucaccaccgacaacaccuucgugucuggcaacugcgacguugugaucggcauugugaacaauaccguguacgacccucugcagcccgagcuggacagcuucaaagaggaacuggacaaguacuuuaagaaccacacaagccccgacguggaccugggcgauaucagcggaaucaaugccagcgucgugaacauccagaaagagaucgaccggcugaacgagguggccaagaaucugaacgagagccugaucgaccugcaagaacuggggaaguacgagcaguacaucaaguggcccugguacaucuggcugggcuuuaucgccggacugauugccaucgugaucgucacaaucaugcuguguugcaugaccagcugcuguagcugccugaagggcuguuguagcuguggcagcugcugcaaguucgacgaggacgauucugagcccgugcugaagggcgugaaacugcacuacaccugaggacuaguuauaagacugacuagcccgaugggccucccaacgggcccuccuccccuccuugcaccgagauuaauaaaaaaaaaaaaaaaaaaaaaaaaaaaaaaaaaaaaaaaaaaaaaaaaaaaaaaaaaaaaaaaaaaaaaaaaaaaaaaaaaaaaaaaaaaaaaaaaaaaa

SEQ ID NO: 25581 - RNA, 4002 nt, Artificial Sequence
  SARS-CoV-2/Wuhan/WIV05/2019__EPI_ISL_402128 spike protein mRNA gc mod (1-1273)(K986P_V987P_K986P_V987P_H69del_V70del_Y144del_N501Y_A570 D_D614G_P681H_T716I_S982A_D1118H)
aggagaaagcuuaccauguucguguuucuggugcugcugccccugguguccagccagugugugaaccugaccaccagaacacagcugccuccagccuacaccaacagcuucaccagaggcguguacuaccccgacaagguguucagauccagcgugcugcacucuacccaggaccuguuccugccuuucuucagcaacgugaccugguuccacgccaucuccggcaccaauggcaccaagagauucgacaaccccgugcugcccuucaacgacgggguguacuuugccagcaccgagaaguccaacaucaucagaggcuggaucuucggcaccacacuggacagcaagacccagagccugcugaucgugaacaacgccaccaacguggucaucaaagugugcgaguuccaguucugcaacgaccccuuccugggcgucuaccacaagaacaacaagagcuggauggaaagcgaguuccggguguacagcagcgccaacaacugcaccuucgaguacgugucccagccuuuccugauggaccuggaaggcaagcagggcaacuucaagaaccugcgcgaguucguguucaagaacaucgacggcuacuucaaaaucuacagcaagcacaccccuaucaaccucgugcgggaucugccucagggcuucucugcucuggaaccccugguggaucugcccaucggcaucaacaucacccgguuucagacacugcuggcccugcacagaagcuaccugacaccuggcgauagcagcagcggauggacagcuggugccgccgcuuacuaugugggcuaccugcagccuagaaccuuccugcugaaguacaacgagaacggcaccaucaccgacgccguggauugugcucuggauccucugagcgagacaaagugcacccugaaguccuucaccguggaaaagggcaucuaccagaccagcaacuuccgggugcagcccaccgaauccaucgugcgguuccccaauaucaccaaucugugccccuucggcgagguguucaaugccaccagauucgccucuguguacgccuggaaccggaagcggaucagcaauugcguggccgacuacuccgugcuguacaacuccgccagcuucagcaccuucaagugcuacggcguguccccuaccaagcugaacgaccugugcuucacaaacguguacgccgacagcuucgugauccggggagaugaagugcggcagauugccccuggacagacaggcaagaucgccgacuacaacuacaagcugcccgacgacuucaccggcugugugauugccuggaacagcaacaaccuggacuccaaagucggcggcaacuacaauuaccuguaccggcuguuccggaaguccaaucugaagcccuucgagcgggacaucagcaccgaaaucuaucaggccggcagcaccccuugcaacggcguggaaggcuucaacugcuacuucccacugcaguccuacggcuuucagcccacauacggcgugggcuaucagcccuacagagugguggugcugagcuucgaacugcugcaugcuccugccacagugugcggcccuaagaaaagcaccaaucucgugaagaacaaaugcgugaacuucaacuucaacggccugaccggcaccggcgugcugacagagagcaacaagaaguuccugccauuccagcaguuuggccgggauaucgacgauaccacagacgccguuagagauccccagacacuggaaauccuggacaucaccccaugcagcuucggcggagugucugugaucaccccuggcaccaacaccagcaaucagguggcagugcuguaccagggcgugaacuguaccgaagugcccguggccauucacgccgaucagcugacaccuacauggcggguguacuccaccggcagcaauguguuucagaccagagccggcugucugaucggagccgagcacgugaacaauagcuacgagugcgacauccccaucggcgcuggcaucugugccagcuaccagacacagacaaacagccacagacgggcuagaagcguggccagccagagcaucauugccuacacaaugucucugggcgccgagaacagcguggccuacuccaacaacucuaucgcuauccccaucaacuucaccaucagcgugaccaccgagauccugccuguguccaugaccaagaccagcguggacugcaccauguacaucugcggcgauuccaccgagugcuccaaccugcugcugcaguacggcagcuucugcacccagcugaauagagcccugacagggaucgccguggaacaggacaagaacacccaagagguguucgcccaagugaagcaaaucuacaagaccccuccuaucaaggacuucggcggcuucaauuucagccagauucugcccgauccuagcaagcccagcaagcggagcuucaucgaggaccugcuguucaacaaagugacacuggccgacgccggcuucaucaagcaguauggcgauugucugggcgacauugccgccagggaucugauuugcgcccagaaguuuaacggacugacagugcugccuccucugcugaccgaugagaugaucgcccaguacacaucugcccugcuggccggcacaaucacaagcggcuggacauuuggagcuggcgccgcucugcagauccccuuugcuaugcagauggccuaccgguucaacggcaucggagugacccagaaugugcuguacgagaaccagaagcugaucgccaaccaguucaacagcgccaucggcaagauccaggacagccugagcagcacagcaagcgcccugggaaagcugcaggacguggucaaccagaaugcccaggcacugaacacccuggucaagcagcuguccuccaacuucggcgccaucagcucugugcugaacgauauccuggccagacuggacccuccugaggccgaggugcagaucgacagacugaucacaggcagacugcagagccuccagacauacgugacccagcagcugaucagagccgccgagauuagagccucugccaaucuggccgccaccaagaugucugagugugugcugggccagagcaagagaguggacuuuugcggcaagggcuaccaccugaugagcuucccucagucugccccucacggcgugguguuucugcacgugacauaugugcccgcucaagagaagaauuucaccaccgcuccagccaucugccacgacggcaaagcccacuuuccuagagaaggcguguucguguccaacggcacccauugguucgugacacagcggaacuucuacgagccccagaucaucaccacccacaacaccuucgugucuggcaacugcgacguugugaucggcauugugaacaauaccguguacgacccucugcagcccgagcuggacagcuucaaagaggaacuggacaaguacuuuaagaaccacacaagccccgacguggaccugggcgauaucagcggaaucaaugccagcgucgugaacauccagaaagagaucgaccggcugaacgagguggccaagaaucugaacgagagccugaucgaccugcaagaacuggggaaguacgagcaguacaucaaguggcccugguacaucuggcugggcuuuaucgccggacugauugccaucgugauggucacaaucaugcuguguugcaugaccagcugcuguagcugccugaagggcuguuguagcuguggcagcugcugcaaguucgacgaggacgauucugagcccgugcugaagggcgugaaacugcacuacaccugaggacuaguuauaagacugacuagcccgaugggccucccaacgggcccuccuccccuccuugcaccgagauuaauaaaaaaaaaaaaaaaaaaaaaaaaaaaaaaaaaaaaaaaaaaaaaaaaaaaaaaaaaaaaaaaaaaaaaaaaaaaaaaaaaaaaaaaaaaaaaaaaaaaa

SEQ ID NO: 25582 - RNA, 4011 nt, Artificial Sequence
  SARS-CoV-2/Wuhan/WIV05/2019__EPI_ISL_402128 spike protein mRNA gc mod (1-1273)(K986P_V987P_K986P_V987P_K417N_E484K_N501Y_D614G)
aggagaaagcuuaccauguucguguuucuggugcugcugccccugguguccagccagugugugaaccugaccaccagaacacagcugccuccagccuacaccaacagcuucaccagaggcguguacuaccccgacaagguguucagauccagcgugcugcacucuacccaggaccuguuccugccuuucuucagcaacgugaccugguuccacgccauccacguguccggcaccaauggcaccaagagauucgacaaccccgugcugcccuucaacgacgggguguacuuugccagcaccgagaaguccaacaucaucagaggcuggaucuucggcaccacacuggacagcaagacccagagccugcugaucgugaacaacgccaccaacguggucaucaaagugugcgaguuccaguucugcaacgaccccuuccugggcgucuacuaccacaagaacaacaagagcuggauggaaagcgaguuccggguguacagcagcgccaacaacugcaccuucgaguacgugucccagccuuuccugauggaccuggaaggcaagcagggcaacuucaagaaccugcgcgaguucguguucaagaacaucgacggcuacuucaaaaucuacagcaagcacaccccuaucaaccucgugcgggaucugccucagggcuucucugcucuggaaccccugguggaucugcccaucggcaucaacaucacccgguuucagacacugcuggcccugcacagaagcuaccugacaccuggcgauagcagcagcggauggacagcuggugccgccgcuuacuaugugggcuaccugcagccuagaaccuuccugcugaaguacaacgagaacggcaccaucaccgacgccguggauugugcucuggauccucugagcgagacaaagugcacccugaaguccuucaccguggaaaagggcaucuaccagaccagcaacuuccgggugcagcccaccgaauccaucgugcgguuccccaauaucaccaaucugugccccuucggcgagguguucaaugccaccagauucgccucuguguacgccuggaaccggaagcggaucagcaauugcguggccgacuacuccgugcuguacaacuccgccagcuucagcaccuucaagugcuacggcguguccccuaccaagcugaacgaccugugcuucacaaacguguacgccgacagcuucgugauccggggagaugaagugcggcagauugccccuggacagacaggcaacaucgccgacuacaacuacaagcugcccgacgacuucaccggcugugugauugccuggaacagcaacaaccuggacuccaaagucggcggcaacuacaauuaccuguaccggcuguuccggaaguccaaucugaagcccuucgagcgggacaucagcaccgaaaucuaucaggccggcagcaccccuugcaacggcgugaagggcuucaacugcuacuucccacugcaguccuacggcuuucagcccacauacggcgugggcuaucagcccuacagagugguggugcugagcuucgaacugcugcaugcuccugccacagugugcggcccuaagaaaagcaccaaucucgugaagaacaaaugcgugaacuucaacuucaacggccugaccggcaccggcgugcugacagagagcaacaagaaguuccugccauuccagcaguuuggccgggauaucgccgauaccacagacgccguuagagauccccagacacuggaaauccuggacaucaccccaugcagcuucggcggagugucugugaucaccccuggcaccaacaccagcaaucagguggcagugcuguaccagggcgugaacuguaccgaagugcccguggccauucacgccgaucagcugacaccuacauggcggguguacuccaccggcagcaauguguuucagaccagagccggcugucugaucggagccgagcacgugaacaauagcuacgagugcgacauccccaucggcgcuggcaucugugccagcuaccagacacagacaaacagccccagacgggcuagaagcguggccagccagagcaucauugccuacacaaugucucugggcgccgagaacagcguggccuacuccaacaacucuaucgcuauccccaccaacuucaccaucagcgugaccaccgagauccugccuguguccaugaccaagaccagcguggacugcaccauguacaucugcggcgauuccaccgagugcuccaaccugcugcugcaguacggcagcuucugcacccagcugaauagagcccugacagggaucgccguggaacaggacaagaacacccaagagguguucgcccaagugaagcaaaucuacaagaccccuccuaucaaggacuucggcggcuucaauuucagccagauucugcccgauccuagcaagcccagcaagcggagcuucaucgaggaccugcuguucaacaaagugacacuggccgacgccggcuucaucaagcaguauggcgauugucugggcgacauugccgccagggaucugauuugcgcccagaaguuuaacggacugacagugcugccuccucugcugaccgaugagaugaucgcccaguacacaucugcccugcuggccggcacaaucacaagcggcuggacauuuggagcuggcgccgcucugcagauccccuuugcuaugcagauggccuaccgguucaacggcaucggagugacccagaaugugcuguacgagaaccagaagcugaucgccaaccaguucaacagcgccaucggcaagauccaggacagccugagcagcacagcaagcgcccugggaaagcugcaggacguggucaaccagaaugcccaggcacugaacacccuggucaagcagcuguccuccaacuucggcgccaucagcucugugcugaacgauauccugagcagacuggacccuccugaggccgaggugcagaucgacagacugaucacaggcagacugcagagccuccagacauacgugacccagcagcugaucagagccgccgagauuagagccucugccaaucuggccgccaccaagaugucugagugugugcugggccagagcaagagaguggacuuuugcggcaagggcuaccaccugaugagcuucccucagucugccccucacggcgugguguuucugcacgugacauaugugcccgcucaagagaagaauuucaccaccgcuccagccaucugccacgacggcaaagcccacuuuccuagagaaggcguguucguguccaacggcacccauugguucgugacacagcggaacuucuacgagccccagaucaucaccaccgacaacaccuucgugucuggcaacugcgacguugugaucggcauugugaacaauaccguguacgacccucugcagcccgagcuggacagcuucaaagaggaacuggacaaguacuuuaagaaccacacaagccccgacguggaccugggcgauaucagcggaaucaaugccagcgucgugaacauccagaaagagaucgaccggcugaacgagguggccaagaaucugaacgagagccugaucgaccugcaagaacuggggaaguacgagcaguacaucaaguggcccugguacaucuggcugggcuuuaucgccggacugauugccaucgugauggucacaaucaugcuguguugcaugaccagcugcuguagcugccugaagggcuguuguagcuguggcagcugcugcaaguucgacgaggacgauucugagcccgugcugaagggcgugaaacugcacuacaccugaggacuaguuauaagacugacuagcccgaugggccucccaacgggcccuccuccccuccuugcaccgagauuaauaaaaaaaaaaaaaaaaaaaaaaaaaaaaaaaaaaaaaaaaaaaaaaaaaaaaaaaaaaaaaaaaaaaaaaaaaaaaaaaaaaaaaaaaaaaaaaaaaaaa

SEQ ID NO: 25583 - RNA, 4002 nt, Artificial Sequence
  SARS-CoV-2/Wuhan/WIV05/2019__EPI_ISL_402128 spike protein mRNA gc mod (1-1273)(K986P_V987P_K986P_V987P_L18F_D80A_D215G_L242del_A243del_ L244del_R246I_K417N_E484K_N501Y_D614G_A701V)
aggagaaagcuuaccauguucguguuucuggugcugcugccccugguguccagccagugugugaacuucaccaccagaacacagcugccuccagccuacaccaacagcuucaccagaggcguguacuaccccgacaagguguucagauccagcgugcugcacucuacccaggaccuguuccugccuuucuucagcaacgugaccugguuccacgccauccacguguccggcaccaauggcaccaagagauucgccaaccccgugcugcccuucaacgacgggguguacuuugccagcaccgagaaguccaacaucaucagaggcuggaucuucggcaccacacuggacagcaagacccagagccugcugaucgugaacaacgccaccaacguggucaucaaagugugcgaguuccaguucugcaacgaccccuuccugggcgucuacuaccacaagaacaacaagagcuggauggaaagcgaguuccggguguacagcagcgccaacaacugcaccuucgaguacgugucccagccuuuccugauggaccuggaaggcaagcagggcaacuucaagaaccugcgcgaguucguguucaagaacaucgacggcuacuucaaaaucuacagcaagcacaccccuaucaaccucgugcggggccugccucagggcuucucugcucuggaaccccugguggaucugcccaucggcaucaacaucacccgguuucagacacugcacaucagcuaccugacaccuggcgauagcagcagcggauggacagcuggugccgccgcuuacuaugugggcuaccugcagccuagaaccuuccugcugaaguacaacgagaacggcaccaucaccgacgccguggauugugcucuggauccucugagcgagacaaagugcacccugaaguccuucaccguggaaaagggcaucuaccagaccagcaacuuccgggugcagcccaccgaauccaucgugcgguuccccaauaucaccaaucugugccccuucggcgagguguucaaugccaccagauucgccucuguguacgccuggaaccggaagcggaucagcaauugcguggccgacuacuccgugcuguacaacuccgccagcuucagcaccuucaagugcuacggcguguccccuaccaagcugaacgaccugugcuucacaaacguguacgccgacagcuucgugauccggggagaugaagugcggcagauugccccuggacagacaggcaacaucgccgacuacaacuacaagcugcccgacgacuucaccggcugugugauugccuggaacagcaacaaccuggacuccaaagucggcggcaacuacaauuaccuguaccggcuguuccggaaguccaaucugaagcccuucgagcgggacaucagcaccgaaaucuaucaggccggcagcaccccuugcaacggcgugaagggcuucaacugcuacuucccacugcaguccuacggcuuucagcccacauacggcgugggcuaucagcccuacagagugguggugcugagcuucgaacugcugcaugcuccugccacagugugcggcccuaagaaaagcaccaaucucgugaagaacaaaugcgugaacuucaacuucaacggccugaccggcaccggcgugcugacagagagcaacaagaaguuccugccauuccagcaguuuggccgggauaucgccgauaccacagacgccguuagagauccccagacacuggaaauccuggacaucaccccaugcagcuucggcggagugucugugaucaccccuggcaccaacaccagcaaucagguggcagugcuguaccagggcgugaacuguaccgaagugcccguggccauucacgccgaucagcugacaccuacauggcggguguacuccaccggcagcaauguguuucagaccagagccggcugucugaucggagccgagcacgugaacaauagcuacgagugcgacauccccaucggcgcuggcaucugugccagcuaccagacacagacaaacagccccagacgggcuagaagcguggccagccagagcaucauugccuacacaaugucucugggcguggagaacagcguggccuacuccaacaacucuaucgcuauccccaccaacuucaccaucagcgugaccaccgagauccugccuguguccaugaccaagaccagcguggacugcaccauguacaucugcggcgauuccaccgagugcuccaaccugcugcugcaguacggcagcuucugcacccagcugaauagagcccugacagggaucgccguggaacaggacaagaacacccaagagguguucgcccaagugaagcaaaucuacaagaccccuccuaucaaggacuucggcggcuucaauuucagccagauucugcccgauccuagcaagcccagcaagcggagcuucaucgaggaccugcuguucaacaaagugacacuggccgacgccggcuucaucaagcaguauggcgauugucugggcgacauugccgccagggaucugauuugcgcccagaaguuuaacggacugacagugcugccuccucugcugaccgaugagaugaucgcccaguacacaucugcccugcuggccggcacaaucacaagcggcuggacauuuggagcuggcgccgcucugcagauccccuuugcuaugcagauggccuaccgguucaacggcaucggagugacccagaaugugcuguacgagaaccagaagcugaucgccaaccaguucaacagcgccaucggcaagauccaggacagccugagcagcacagcaagcgcccugggaaagcugcaggacguggucaaccagaaugcccaggcacugaacacccuggucaagcagcuguccuccaacuucggcgccaucagcucugugcugaacgauauccugagcagacuggacccuccugaggccgaggugcagaucgacagacugaucacaggcagacugcagagccuccagacauacgugacccagcagcugaucagagccgccgagauuagagccucugccaaucuggccgccaccaagaugucugagugugugcugggccagagcaagagaguggacuuuugcggcaagggcuaccaccugaugagcuucccucagucugccccucacggcgugguguuucugcacgugacauaugugcccgcucaagagaagaauuucaccaccgcuccagccaucugccacgacggcaaagcccacuuuccuagagaaggcguguucguguccaacggcacccauugguucgugacacagcggaacuucuacgagccccagaucaucaccaccgacaacaccuucgugucuggcaacugcgacguugugaucggcauugugaacaauaccguguacgacccucugcagcccgagcuggacagcuucaaagaggaacuggacaaguacuuuaagaaccacacaagccccgacguggaccugggcgauaucagcggaaucaaugccagcgucgugaacauccagaaagagaucgaccggcugaacgagguggccaagaaucugaacgagagccugaucgaccugcaagaacuggggaaguacgagcaguacaucaaguggcccugguacaucuggcugggcuuuaucgccggacugauugccaucgugauggucacaaucaugcuguguugcaugaccagcugcuguagcugccugaagggcuguuguagcuguggcagcugcugcaaguucgacgaggacgauucugagcccgugcugaagggcgugaaacugcacuacaccugaggacuaguuauaagacugacuagcccgaugggccucccaacgggcccuccuccccuccuugcaccgagauuaauaaaaaaaaaaaaaaaaaaaaaaaaaaaaaaaaaaaaaaaaaaaaaaaaaaaaaaaaaaaaaaaaaaaaaaaaaaaaaaaaaaaaaaaaaaaaaaaaaaaa

SEQ ID NO: 25584 - RNA, 4011 nt, Artificial Sequence
  SARS-CoV-2/Wuhan/WIV05/2019__EPI_ISL_402128 spike protein mRNA gc mod (1-1273)(K986P_V987P_K986P_V987P_E484K_D614G)
aggagaaagcuuaccauguucguguuucuggugcugcugccccugguguccagccagugugugaaccugaccaccagaacacagcugccuccagccuacaccaacagcuucaccagaggcguguacuaccccgacaagguguucagauccagcgugcugcacucuacccaggaccuguuccugccuuucuucagcaacgugaccugguuccacgccauccacguguccggcaccaauggcaccaagagauucgacaaccccgugcugcccuucaacgacgggguguacuuugccagcaccgagaaguccaacaucaucagaggcuggaucuucggcaccacacuggacagcaagacccagagccugcugaucgugaacaacgccaccaacguggucaucaaagugugcgaguuccaguucugcaacgaccccuuccugggcgucuacuaccacaagaacaacaagagcuggauggaaagcgaguuccggguguacagcagcgccaacaacugcaccuucgaguacgugucccagccuuuccugauggaccuggaaggcaagcagggcaacuucaagaaccugcgcgaguucguguucaagaacaucgacggcuacuucaaaaucuacagcaagcacaccccuaucaaccucgugcgggaucugccucagggcuucucugcucuggaaccccugguggaucugcccaucggcaucaacaucacccgguuucagacacugcuggcccugcacagaagcuaccugacaccuggcgauagcagcagcggauggacagcuggugccgccgcuuacuaugugggcuaccugcagccuagaaccuuccugcugaaguacaacgagaacggcaccaucaccgacgccguggauugugcucuggauccucugagcgagacaaagugcacccugaaguccuucaccguggaaaagggcaucuaccagaccagcaacuuccgggugcagcccaccgaauccaucgugcgguuccccaauaucaccaaucugugccccuucggcgagguguucaaugccaccagauucgccucuguguacgccuggaaccggaagcggaucagcaauugcguggccgacuacuccgugcuguacaacuccgccagcuucagcaccuucaagugcuacggcguguccccuaccaagcugaacgaccugugcuucacaaacguguacgccgacagcuucgugauccggggagaugaagugcggcagauugccccuggacagacaggcaagaucgccgacuacaacuacaagcugcccgacgacuucaccggcugugugauugccuggaacagcaacaaccuggacuccaaagucggcggcaacuacaauuaccuguaccggcuguuccggaaguccaaucugaagcccuucgagcgggacaucagcaccgaaaucuaucaggccggcagcaccccuugcaacggcgugaagggcuucaacugcuacuucccacugcaguccuacggcuuucagcccacaaauggcgugggcuaucagcccuacagagugguggugcugagcuucgaacugcugcaugcuccugccacagugugcggcccuaagaaaagcaccaaucucgugaagaacaaaugcgugaacuucaacuucaacggccugaccggcaccggcgugcugacagagagcaacaagaaguuccugccauuccagcaguuuggccgggauaucgccgauaccacagacgccguuagagauccccagacacuggaaauccuggacaucaccccaugcagcuucggcggagugucugugaucaccccuggcaccaacaccagcaaucagguggcagugcuguaccagggcgugaacuguaccgaagugcccguggccauucacgccgaucagcugacaccuacauggcggguguacuccaccggcagcaauguguuucagaccagagccggcugucugaucggagccgagcacgugaacaauagcuacgagugcgacauccccaucggcgcuggcaucugugccagcuaccagacacagacaaacagccccagacgggcuagaagcguggccagccagagcaucauugccuacacaaugucucugggcgccgagaacagcguggccuacuccaacaacucuaucgcuauccccaccaacuucaccaucagcgugaccaccgagauccugccuguguccaugaccaagaccagcguggacugcaccauguacaucugcggcgauuccaccgagugcuccaaccugcugcugcaguacggcagcuucugcacccagcugaauagagcccugacagggaucgccguggaacaggacaagaacacccaagagguguucgcccaagugaagcaaaucuacaagaccccuccuaucaaggacuucggcggcuucaauuucagccagauucugcccgauccuagcaagcccagcaagcggagcuucaucgaggaccugcuguucaacaaagugacacuggccgacgccggcuucaucaagcaguauggcgauugucugggcgacauugccgccagggaucugauuugcgcccagaaguuuaacggacugacagugcugccuccucugcugaccgaugagaugaucgcccaguacacaucugcccugcuggccggcacaaucacaagcggcuggacauuuggagcuggcgccgcucugcagauccccuuugcuaugcagauggccuaccgguucaacggcaucggagugacccagaaugugcuguacgagaaccagaagcugaucgccaaccaguucaacagcgccaucggcaagauccaggacagccugagcagcacagcaagcgcccugggaaagcugcaggacguggucaaccagaaugcccaggcacugaacacccuggucaagcagcuguccuccaacuucggcgccaucagcucugugcugaacgauauccugagcagacuggacccuccugaggccgaggugcagaucgacagacugaucacaggcagacugcagagccuccagacauacgugacccagcagcugaucagagccgccgagauuagagccucugccaaucuggccgccaccaagaugucugagugugugcugggccagagcaagagaguggacuuuugcggcaagggcuaccaccugaugagcuucccucagucugccccucacggcgugguguuucugcacgugacauaugugcccgcucaagagaagaauuucaccaccgcuccagccaucugccacgacggcaaagcccacuuuccuagagaaggcguguucguguccaacggcacccauugguucgugacacagcggaacuucuacgagccccagaucaucaccaccgacaacaccuucgugucuggcaacugcgacguugugaucggcauugugaacaauaccguguacgacccucugcagcccgagcuggacagcuucaaagaggaacuggacaaguacuuuaagaaccacacaagccccgacguggaccugggcgauaucagcggaaucaaugccagcgucgugaacauccagaaagagaucgaccggcugaacgagguggccaagaaucugaacgagagccugaucgaccugcaagaacuggggaaguacgagcaguacaucaaguggcccugguacaucuggcugggcuuuaucgccggacugauugccaucgugauggucacaaucaugcuguguugcaugaccagcugcuguagcugccugaagggcuguuguagcuguggcagcugcugcaaguucgacgaggacgauucugagcccgugcugaagggcgugaaacugcacuacaccugaggacuaguuauaagacugacuagcccgaugggccucccaacgggcccuccuccccuccuugcaccgagauuaauaaaaaaaaaaaaaaaaaaaaaaaaaaaaaaaaaaaaaaaaaaaaaaaaaaaaaaaaaaaaaaaaaaaaaaaaaaaaaaaaaaaaaaaaaaaaaaaaaaaa

SEQ ID NO: 25585 - RNA, 4011 nt, Artificial Sequence
  SARS-CoV-2/Wuhan/WIV05/2019__EPI_ISL_402128 spike protein mRNA gc mod (1-1273)(K986P_V987P_K986P_V987P_L18F_T20N_P26S_D138Y_R190S_K417T _E484K_N501Y_D614G_H655Y_T1027I)
aggagaaagcuuaccauguucguguuucuggugcugcugccccugguguccagccagugugugaacuucaccaacagaacacagcugccuagcgccuacaccaacagcuucaccagaggcguguacuaccccgacaagguguucagauccagcgugcugcacucuacccaggaccuguuccugccuuucuucagcaacgugaccugguuccacgccauccacguguccggcaccaauggcaccaagagauucgacaaccccgugcugcccuucaacgacgggguguacuuugccagcaccgagaaguccaacaucaucagaggcuggaucuucggcaccacacuggacagcaagacccagagccugcugaucgugaacaacgccaccaacguggucaucaaagugugcgaguuccaguucugcaacuaccccuuccugggcgucuacuaccacaagaacaacaagagcuggauggaaagcgaguuccggguguacagcagcgccaacaacugcaccuucgaguacgugucccagccuuuccugauggaccuggaaggcaagcagggcaacuucaagaaccugagcgaguucguguucaagaacaucgacggcuacuucaaaaucuacagcaagcacaccccuaucaaccucgugcgggaucugccucagggcuucucugcucuggaaccccugguggaucugcccaucggcaucaacaucacccgguuucagacacugcuggcccugcacagaagcuaccugacaccuggcgauagcagcagcggauggacagcuggugccgccgcuuacuaugugggcuaccugcagccuagaaccuuccugcugaaguacaacgagaacggcaccaucaccgacgccguggauugugcucuggauccucugagcgagacaaagugcacccugaaguccuucaccguggaaaagggcaucuaccagaccagcaacuuccgggugcagcccaccgaauccaucgugcgguuccccaauaucaccaaucugugccccuucggcgagguguucaaugccaccagauucgccucuguguacgccuggaaccggaagcggaucagcaauugcguggccgacuacuccgugcuguacaacuccgccagcuucagcaccuucaagugcuacggcguguccccuaccaagcugaacgaccugugcuucacaaacguguacgccgacagcuucgugauccggggagaugaagugcggcagauugccccuggacagacaggcaccaucgccgacuacaacuacaagcugcccgacgacuucaccggcugugugauugccuggaacagcaacaaccuggacuccaaagucggcggcaacuacaauuaccuguaccggcuguuccggaaguccaaucugaagcccuucgagcgggacaucagcaccgaaaucuaucaggccggcagcaccccuugcaacggcgugaagggcuucaacugcuacuucccacugcaguccuacggcuuucagcccacauacggcgugggcuaucagcccuacagagugguggugcugagcuucgaacugcugcaugcuccugccacagugugcggcccuaagaaaagcaccaaucucgugaagaacaaaugcgugaacuucaacuucaacggccugaccggcaccggcgugcugacagagagcaacaagaaguuccugccauuccagcaguuuggccgggauaucgccgauaccacagacgccguuagagauccccagacacuggaaauccuggacaucaccccaugcagcuucggcggagugucugugaucaccccuggcaccaacaccagcaaucagguggcagugcuguaccagggcgugaacuguaccgaagugcccguggccauucacgccgaucagcugacaccuacauggcggguguacuccaccggcagcaauguguuucagaccagagccggcugucugaucggagccgaguacgugaacaauagcuacgagugcgacauccccaucggcgcuggcaucugugccagcuaccagacacagacaaacagccccagacgggcuagaagcguggccagccagagcaucauugccuacacaaugucucugggcgccgagaacagcguggccuacuccaacaacucuaucgcuauccccaccaacuucaccaucagcgugaccaccgagauccugccuguguccaugaccaagaccagcguggacugcaccauguacaucugcggcgauuccaccgagugcuccaaccugcugcugcaguacggcagcuucugcacccagcugaauagagcccugacagggaucgccguggaacaggacaagaacacccaagagguguucgcccaagugaagcaaaucuacaagaccccuccuaucaaggacuucggcggcuucaauuucagccagauucugcccgauccuagcaagcccagcaagcggagcuucaucgaggaccugcuguucaacaaagugacacuggccgacgccggcuucaucaagcaguauggcgauugucugggcgacauugccgccagggaucugauuugcgcccagaaguuuaacggacugacagugcugccuccucugcugaccgaugagaugaucgcccaguacacaucugcccugcuggccggcacaaucacaagcggcuggacauuuggagcuggcgccgcucugcagauccccuuugcuaugcagauggccuaccgguucaacggcaucggagugacccagaaugugcuguacgagaaccagaagcugaucgccaaccaguucaacagcgccaucggcaagauccaggacagccugagcagcacagcaagcgcccugggaaagcugcaggacguggucaaccagaaugcccaggcacugaacacccuggucaagcagcuguccuccaacuucggcgccaucagcucugugcugaacgauauccugagcagacuggacccuccugaggccgaggugcagaucgacagacugaucacaggcagacugcagagccuccagacauacgugacccagcagcugaucagagccgccgagauuagagccucugccaaucuggccgccaucaagaugucugagugugugcugggccagagcaagagaguggacuuuugcggcaagggcuaccaccugaugagcuucccucagucugccccucacggcgugguguuucugcacgugacauaugugcccgcucaagagaagaauuucaccaccgcuccagccaucugccacgacggcaaagcccacuuuccuagagaaggcguguucguguccaacggcacccauugguucgugacacagcggaacuucuacgagccccagaucaucaccaccgacaacaccuucgugucuggcaacugcgacguugugaucggcauugugaacaauaccguguacgacccucugcagcccgagcuggacagcuucaaagaggaacuggacaaguacuuuaagaaccacacaagccccgacguggaccugggcgauaucagcggaaucaaugccagcgucgugaacauccagaaagagaucgaccggcugaacgagguggccaagaaucugaacgagagccugaucgaccugcaagaacuggggaaguacgagcaguacaucaaguggcccugguacaucuggcugggcuuuaucgccggacugauugccaucgugauggucacaaucaugcuguguugcaugaccagcugcuguagcugccugaagggcuguuguagcuguggcagcugcugcaaguucgacgaggacgauucugagcccgugcugaagggcgugaaacugcacuacaccugaggacuaguuauaagacugacuagcccgaugggccucccaacgggcccuccuccccuccuugcaccgagauuaauaaaaaaaaaaaaaaaaaaaaaaaaaaaaaaaaaaaaaaaaaaaaaaaaaaaaaaaaaaaaaaaaaaaaaaaaaaaaaaaaaaaaaaaaaaaaaaaaaaaa

SEQ ID NO: 25586 - RNA, 4011 nt, Artificial Sequence
  SARS-CoV-2/Wuhan/WIV05/2019__EPI_ISL_402128 spike protein mRNA gc mod (1-1273)(K986P_V987P_K986P_V987P_S13I_W152C_L452R_D614G)
aggagaaagcuuaccauguucguguuucuggugcugcugccccugguguccauccagugugugaaccugaccaccagaacacagcugccuccagccuacaccaacagcuucaccagaggcguguacuaccccgacaagguguucagauccagcgugcugcacucuacccaggaccuguuccugccuuucuucagcaacgugaccugguuccacgccauccacguguccggcaccaauggcaccaagagauucgacaaccccgugcugcccuucaacgacgggguguacuuugccagcaccgagaaguccaacaucaucagaggcuggaucuucggcaccacacuggacagcaagacccagagccugcugaucgugaacaacgccaccaacguggucaucaaagugugcgaguuccaguucugcaacgaccccuuccugggcgucuacuaccacaagaacaacaagagcugcauggaaagcgaguuccggguguacagcagcgccaacaacugcaccuucgaguacgugucccagccuuuccugauggaccuggaaggcaagcagggcaacuucaagaaccugcgcgaguucguguucaagaacaucgacggcuacuucaaaaucuacagcaagcacaccccuaucaaccucgugcgggaucugccucagggcuucucugcucuggaaccccugguggaucugcccaucggcaucaacaucacccgguuucagacacugcuggcccugcacagaagcuaccugacaccuggcgauagcagcagcggauggacagcuggugccgccgcuuacuaugugggcuaccugcagccuagaaccuuccugcugaaguacaacgagaacggcaccaucaccgacgccguggauugugcucuggauccucugagcgagacaaagugcacccugaaguccuucaccguggaaaagggcaucuaccagaccagcaacuuccgggugcagcccaccgaauccaucgugcgguuccccaauaucaccaaucugugccccuucggcgagguguucaaugccaccagauucgccucuguguacgccuggaaccggaagcggaucagcaauugcguggccgacuacuccgugcuguacaacuccgccagcuucagcaccuucaagugcuacggcguguccccuaccaagcugaacgaccugugcuucacaaacguguacgccgacagcuucgugauccggggagaugaagugcggcagauugccccuggacagacaggcaagaucgccgacuacaacuacaagcugcccgacgacuucaccggcugugugauugccuggaacagcaacaaccuggacuccaaagucggcggcaacuacaauuaccgcuaccggcuguuccggaaguccaaucugaagcccuucgagcgggacaucagcaccgaaaucuaucaggccggcagcaccccuugcaacggcguggaaggcuucaacugcuacuucccacugcaguccuacggcuuucagcccacaaauggcgugggcuaucagcccuacagagugguggugcugagcuucgaacugcugcaugcuccugccacagugugcggcccuaagaaaagcaccaaucucgugaagaacaaaugcgugaacuucaacuucaacggccugaccggcaccggcgugcugacagagagcaacaagaaguuccugccauuccagcaguuuggccgggauaucgccgauaccacagacgccguuagagauccccagacacuggaaauccuggacaucaccccaugcagcuucggcggagugucugugaucaccccuggcaccaacaccagcaaucagguggcagugcuguaccagggcgugaacuguaccgaagugcccguggccauucacgccgaucagcugacaccuacauggcggguguacuccaccggcagcaauguguuucagaccagagccggcugucugaucggagccgagcacgugaacaauagcuacgagugcgacauccccaucggcgcuggcaucugugccagcuaccagacacagacaaacagccccagacgggcuagaagcguggccagccagagcaucauugccuacacaaugucucugggcgccgagaacagcguggccuacuccaacaacucuaucgcuauccccaccaacuucaccaucagcgugaccaccgagauccugccuguguccaugaccaagaccagcguggacugcaccauguacaucugcggcgauuccaccgagugcuccaaccugcugcugcaguacggcagcuucugcacccagcugaauagagcccugacagggaucgccguggaacaggacaagaacacccaagagguguucgcccaagugaagcaaaucuacaagaccccuccuaucaaggacuucggcggcuucaauuucagccagauucugcccgauccuagcaagcccagcaagcggagcuucaucgaggaccugcuguucaacaaagugacacuggccgacgccggcuucaucaagcaguauggcgauugucugggcgacauugccgccagggaucugauuugcgcccagaaguuuaacggacugacagugcugccuccucugcugaccgaugagaugaucgcccaguacacaucugcccugcuggccggcacaaucacaagcggcuggacauuuggagcuggcgccgcucugcagauccccuuugcuaugcagauggccuaccgguucaacggcaucggagugacccagaaugugcuguacgagaaccagaagcugaucgccaaccaguucaacagcgccaucggcaagauccaggacagccugagcagcacagcaagcgcccugggaaagcugcaggacguggucaaccagaaugcccaggcacugaacacccuggucaagcagcuguccuccaacuucggcgccaucagcucugugcugaacgauauccugagcagacuggacccuccugaggccgaggugcagaucgacagacugaucacaggcagacugcagagccuccagacauacgugacccagcagcugaucagagccgccgagauuagagccucugccaaucuggccgccaccaagaugucugagugugugcugggccagagcaagagaguggacuuuugcggcaagggcuaccaccugaugagcuucccucagucugccccucacggcgugguguuucugcacgugacauaugugcccgcucaagagaagaauuucaccaccgcuccagccaucugccacgacggcaaagcccacuuuccuagagaaggcguguucguguccaacggcacccauugguucgugacacagcggaacuucuacgagccccagaucaucaccaccgacaacaccuucgugucuggcaacugcgacguugugaucggcauugugaacaauaccguguacgacccucugcagcccgagcuggacagcuucaaagaggaacuggacaaguacuuuaagaaccacacaagccccgacguggaccugggcgauaucagcggaaucaaugccagcgucgugaacauccagaaagagaucgaccggcugaacgagguggccaagaaucugaacgagagccugaucgaccugcaagaacuggggaaguacgagcaguacaucaaguggcccugguacaucuggcugggcuuuaucgccggacugauugccaucgugauggucacaaucaugcuguguugcaugaccagcugcuguagcugccugaagggcuguuguagcuguggcagcugcugcaaguucgacgaggacgauucugagcccgugcugaagggcgugaaacugcacuacaccugaggacuaguuauaagacugacuagcccgaugggccucccaacgggcccuccuccccuccuugcaccgagauuaauaaaaaaaaaaaaaaaaaaaaaaaaaaaaaaaaaaaaaaaaaaaaaaaaaaaaaaaaaaaaaaaaaaaaaaaaaaaaaaaaaaaaaaaaaaaaaaaaaaaa

SEQ ID NO: 25587 - RNA, 4011 nt, Artificial Sequence
  SARS-CoV-2/Wuhan/WIV05/2019__EPI_ISL_402128 spike protein mRNA gc mod (1-1273)(K986P_V987P)
aggagaaagcuuaccauguucguguuccuggugcugcugccucugguguccagccagugugugaaccugaccaccagaacacagcugccuccagccuacaccaacagcuuuaccagaggcguguacuaccccgacaagguguucagauccagcgugcugcacucuacccaggaccuguuccugccuuucuucagcaacgugaccugguuccacgccauccacguguccggcaccaauggcaccaagagauucgacaaccccgugcugcccuucaacgacgggguguacuuugccagcaccgagaaguccaacaucaucagaggcuggaucuucggcaccacacuggacagcaagacccagagccugcugaucgugaacaacgccaccaacguggucaucaaagugugcgaguuccaguucugcaacgaccccuuccugggcgucuacuaccacaagaacaacaagagcuggauggaaagcgaguuccggguguacagcagcgccaacaacugcaccuucgaguacgugucccagccuuuccugauggaccuggaaggcaagcagggcaacuucaagaaccugcgcgaguucguguuuaagaacaucgacggcuacuucaagaucuacagcaagcacaccccuaucaaccucgugcgggaucugccucagggcuucucugcucuggaaccccugguggaucugcccaucggcaucaacaucacccgguuucagacacugcuggcccugcacagaagcuaccugacaccuggcgauagcagcagcggauggacagcuggugccgccgcuuacuaugugggcuaccugcagccuagaaccuuccugcugaaguacaacgagaacggcaccaucaccgacgccguggauugugcucuggauccucugagcgagacaaagugcacccugaaguccuucaccguggaaaagggcaucuaccagaccagcaacuuccgggugcagcccaccgaauccaucgugcgguuccccaauaucaccaaucugugccccuucggcgagguguucaaugccaccagauucgccucuguguacgccuggaaccggaagcggaucagcaauugcguggccgacuacuccgugcuguacaacuccgccagcuucagcaccuucaagugcuacggcguguccccuaccaagcugaacgaccugugcuucacaaacguguacgccgacagcuucgugauccggggagaugaagugcggcagauugccccuggacagacaggcaagaucgccgacuacaacuacaagcugcccgacgacuucaccggcugugugauugccuggaacagcaacaaccuggacuccaaagucggcggcaacuacaauuaccuguaccggcuguuccggaaguccaaucugaagcccuucgagcgggacaucuccaccgagaucuaucaggccggcagcaccccuuguaacggcguggaaggcuucaacugcuacuucccacugcaguccuacggcuuucagcccacaaauggcgugggcuaucagcccuacagagugguggugcugagcuucgaacugcugcaugccccugccacagugugcggcccuaagaaaagcaccaaucucgugaagaacaaaugcgugaacuucaacuucaacggccugaccggcaccggcgugcugacagagagcaacaagaaguuccugccauuccagcaguuuggccgggauaucgccgauaccacagacgccguuagagauccccagacacuggaaauccuggacaucaccccuugcagcuucggcggagugucugugaucaccccuggcaccaacaccagcaaucagguggcagugcuguaccaggacgugaacuguaccgaagugcccguggccauucacgccgaucagcugacaccuacauggcggguguacuccaccggcagcaauguguuucagaccagagccggcugucugaucggagccgagcacgugaacaauagcuacgagugcgacauccccaucggcgcuggaaucugcgccagcuaccagacacagacaaacagcccucggagagccagaagcguggccagccagagcaucauugccuacacaaugucucugggcgccgagaacagcguggccuacuccaacaacucuaucgcuauccccaccaacuucaccaucagcgugaccacagagauccugccuguguccaugaccaagaccagcguggacugcaccauguacaucugcggcgauuccaccgagugcuccaaccugcugcugcaguacggcagcuucugcacccagcugaauagagcccugacagggaucgccguggaacaggacaagaacacccaagagguguucgcccaagugaagcagaucuacaagaccccuccuaucaaggacuucggcggcuucaauuucagccagauucugcccgauccuagcaagcccagcaagcggagcuucaucgaggaccugcuguucaacaaagugacacuggccgacgccggcuucaucaagcaguauggcgauugucugggcgacauugccgccagggaucugauuugcgcccagaaguuuaacggacugacagugcugccuccucugcugaccgaugagaugaucgcccaguacacaucugcccugcuggccggcacaaucacaagcggcuggacauuuggagcaggcgccgcucugcagauccccuuugcuaugcagauggccuaccgguucaacggcaucggagugacccagaaugugcuguacgagaaccagaagcugaucgccaaccaguucaacagcgccaucggcaagauccaggacagccugagcagcacagcaagcgcccugggaaagcugcaggacguggucaaccagaaugcccaggcacugaacacccuggucaagcagcuguccuccaacuucggcgccaucagcucugugcugaacgauauccugagcagacuggacccuccugaggccgaggugcagaucgacagacugaucacaggcagacugcagagccuccagacauacgugacccagcagcugaucagagccgccgagauuagagccucugccaaucuggccgccaccaagaugucugagugugugcugggccagagcaagagaguggacuuuugcggcaagggcuaccaccugaugagcuucccucagucugccccucacggcgugguguuucugcacgugacauaugugcccgcucaagagaagaauuucaccaccgcuccagccaucugccacgacggcaaagcccacuuuccuagagaaggcguguucguguccaacggcacccauugguucgugacacagcggaacuucuacgagccccagaucaucaccaccgacaacaccuucgugucuggcaacugcgacgucgugaucggcauugugaacaauaccguguacgacccucugcagcccgagcuggacagcuucaaagaggaacuggacaaguacuuuaagaaccacacaagccccgacguggaccugggcgauaucagcggaaucaaugccagcgucgugaacauccagaaagagaucgaccggcugaacgagguggccaagaaucugaacgagagccugaucgaccugcaagaacuggggaaguacgagcaguacaucaaguggcccugguacaucuggcugggcuuuaucgccggacugauugccaucgugauggucacaaucaugcuguguugcaugaccagcugcuguagcugccugaagggcuguuguagcuguggcagcugcugcaaguucgacgaggacgauucugagcccgugcugaagggcgugaaacugcacuacacaugaggacuaguuauaagacugacuagcccgaugggccucccaacgggcccuccuccccuccuugcaccgagauuaauaaaaaaaaaaaaaaaaaaaaaaaaaaaaaaaaaaaaaaaaaaaaaaaaaaaaaaaaaaaaaaaaaaaaaaaaaaaaaaaaaaaaaaaaaaaaaaaaaaaa

SEQ ID NO: 25588 - RNA, 4011 nt, Artificial Sequence
  SARS-CoV-2/Wuhan/WIV05/2019__EPI_ISL_402128 spike protein mRNA gc mod (1-1273)(K986P_V987P_ D614G)
aggagaaagcuuaccauguucguguuccuggugcugcugccucugguguccagccagugugugaaccugaccaccagaacacagcugccuccagccuacaccaacagcuuuaccagaggcguguacuaccccgacaagguguucagauccagcgugcugcacucuacccaggaccuguuccugccuuucuucagcaacgugaccugguuccacgccauccacguguccggcaccaauggcaccaagagauucgacaaccccgugcugcccuucaacgacgggguguacuuugccagcaccgagaaguccaacaucaucagaggcuggaucuucggcaccacacuggacagcaagacccagagccugcugaucgugaacaacgccaccaacguggucaucaaagugugcgaguuccaguucugcaacgaccccuuccugggcgucuacuaccacaagaacaacaagagcuggauggaaagcgaguuccggguguacagcagcgccaacaacugcaccuucgaguacgugucccagccuuuccugauggaccuggaaggcaagcagggcaacuucaagaaccugcgcgaguucguguuuaagaacaucgacggcuacuucaagaucuacagcaagcacaccccuaucaaccucgugcgggaucugccucagggcuucucugcucuggaaccccugguggaucugcccaucggcaucaacaucacccgguuucagacacugcuggcccugcacagaagcuaccugacaccuggcgauagcagcagcggauggacagcuggugccgccgcuuacuaugugggcuaccugcagccuagaaccuuccugcugaaguacaacgagaacggcaccaucaccgacgccguggauugugcucuggauccucugagcgagacaaagugcacccugaaguccuucaccguggaaaagggcaucuaccagaccagcaacuuccgggugcagcccaccgaauccaucgugcgguuccccaauaucaccaaucugugccccuucggcgagguguucaaugccaccagauucgccucuguguacgccuggaaccggaagcggaucagcaauugcguggccgacuacuccgugcuguacaacuccgccagcuucagcaccuucaagugcuacggcguguccccuaccaagcugaacgaccugugcuucacaaacguguacgccgacagcuucgugauccggggagaugaagugcggcagauugccccuggacagacaggcaagaucgccgacuacaacuacaagcugcccgacgacuucaccggcugugugauugccuggaacagcaacaaccuggacuccaaagucggcggcaacuacaauuaccuguaccggcuguuccggaaguccaaucugaagcccuucgagcgggacaucuccaccgagaucuaucaggccggcagcaccccuuguaacggcguggaaggcuucaacugcuacuucccacugcaguccuacggcuuucagcccacaaauggcgugggcuaucagcccuacagagugguggugcugagcuucgaacugcugcaugccccugccacagugugcggcccuaagaaaagcaccaaucucgugaagaacaaaugcgugaacuucaacuucaacggccugaccggcaccggcgugcugacagagagcaacaagaaguuccugccauuccagcaguuuggccgggauaucgccgauaccacagacgccguuagagauccccagacacuggaaauccuggacaucaccccuugcagcuucggcggagugucugugaucaccccuggcaccaacaccagcaaucagguggcagugcuguaccagggcgugaacuguaccgaagugcccguggccauucacgccgaucagcugacaccuacauggcggguguacuccaccggcagcaauguguuucagaccagagccggcugucugaucggagccgagcacgugaacaauagcuacgagugcgacauccccaucggcgcuggaaucugcgccagcuaccagacacagacaaacagcccucggagagccagaagcguggccagccagagcaucauugccuacacaaugucucugggcgccgagaacagcguggccuacuccaacaacucuaucgcuauccccaccaacuucaccaucagcgugaccacagagauccugccuguguccaugaccaagaccagcguggacugcaccauguacaucugcggcgauuccaccgagugcuccaaccugcugcugcaguacggcagcuucugcacccagcugaauagagcccugacagggaucgccguggaacaggacaagaacacccaagagguguucgcccaagugaagcagaucuacaagaccccuccuaucaaggacuucggcggcuucaauuucagccagauucugcccgauccuagcaagcccagcaagcggagcuucaucgaggaccugcuguucaacaaagugacacuggccgacgccggcuucaucaagcaguauggcgauugucugggcgacauugccgccagggaucugauuugcgcccagaaguuuaacggacugacagugcugccuccucugcugaccgaugagaugaucgcccaguacacaucugcccugcuggccggcacaaucacaagcggcuggacauuuggagcaggcgccgcucugcagauccccuuugcuaugcagauggccuaccgguucaacggcaucggagugacccagaaugugcuguacgagaaccagaagcugaucgccaaccaguucaacagcgccaucggcaagauccaggacagccugagcagcacagcaagcgcccugggaaagcugcaggacguggucaaccagaaugcccaggcacugaacacccuggucaagcagcuguccuccaacuucggcgccaucagcucugugcugaacgauauccugagcagacuggacccuccugaggccgaggugcagaucgacagacugaucacaggcagacugcagagccuccagacauacgugacccagcagcugaucagagccgccgagauuagagccucugccaaucuggccgccaccaagaugucugagugugugcugggccagagcaagagaguggacuuuugcggcaagggcuaccaccugaugagcuucccucagucugccccucacggcgugguguuucugcacgugacauaugugcccgcucaagagaagaauuucaccaccgcuccagccaucugccacgacggcaaagcccacuuuccuagagaaggcguguucguguccaacggcacccauugguucgugacacagcggaacuucuacgagccccagaucaucaccaccgacaacaccuucgugucuggcaacugcgacgucgugaucggcauugugaacaauaccguguacgacccucugcagcccgagcuggacagcuucaaagaggaacuggacaaguacuuuaagaaccacacaagccccgacguggaccugggcgauaucagcggaaucaaugccagcgucgugaacauccagaaagagaucgaccggcugaacgagguggccaagaaucugaacgagagccugaucgaccugcaagaacuggggaaguacgagcaguacaucaaguggcccugguacaucuggcugggcuuuaucgccggacugauugccaucgugauggucacaaucaugcuguguugcaugaccagcugcuguagcugccugaagggcuguuguagcuguggcagcugcugcaaguucgacgaggacgauucugagcccgugcugaagggcgugaaacugcacuacacaugaggacuaguuauaagacugacuagcccgaugggccucccaacgggcccuccuccccuccuugcaccgagauuaauaaaaaaaaaaaaaaaaaaaaaaaaaaaaaaaaaaaaaaaaaaaaaaaaaaaaaaaaaaaaaaaaaaaaaaaaaaaaaaaaaaaaaaaaaaaaaaaaaaaa

SEQ ID NO: 25589 - RNA, 4011 nt, Artificial Sequence
  SARS-CoV-2/Wuhan/WIV05/2019__EPI_ISL_402128 spike protein mRNA gc mod (1-1273)(K986P_V987P_A222V_D614G)
aggagaaagcuuaccauguucguguuccuggugcugcugccucugguguccagccagugugugaaccugaccaccagaacacagcugccuccagccuacaccaacagcuuuaccagaggcguguacuaccccgacaagguguucagauccagcgugcugcacucuacccaggaccuguuccugccuuucuucagcaacgugaccugguuccacgccauccacguguccggcaccaauggcaccaagagauucgacaaccccgugcugcccuucaacgacgggguguacuuugccagcaccgagaaguccaacaucaucagaggcuggaucuucggcaccacacuggacagcaagacccagagccugcugaucgugaacaacgccaccaacguggucaucaaagugugcgaguuccaguucugcaacgaccccuuccugggcgucuacuaccacaagaacaacaagagcuggauggaaagcgaguuccggguguacagcagcgccaacaacugcaccuucgaguacgugucccagccuuuccugauggaccuggaaggcaagcagggcaacuucaagaaccugcgcgaguucguguuuaagaacaucgacggcuacuucaagaucuacagcaagcacaccccuaucaaccucgugcgggaucugccucagggcuucucugugcuggaaccccugguggaucugcccaucggcaucaacaucacccgguuucagacacugcuggcccugcacagaagcuaccugacaccuggcgauagcagcagcggauggacagcuggugccgccgcuuacuaugugggcuaccugcagccuagaaccuuccugcugaaguacaacgagaacggcaccaucaccgacgccguggauugugcucuggauccucugagcgagacaaagugcacccugaaguccuucaccguggaaaagggcaucuaccagaccagcaacuuccgggugcagcccaccgaauccaucgugcgguuccccaauaucaccaaucugugccccuucggcgagguguucaaugccaccagauucgccucuguguacgccuggaaccggaagcggaucagcaauugcguggccgacuacuccgugcuguacaacuccgccagcuucagcaccuucaagugcuacggcguguccccuaccaagcugaacgaccugugcuucacaaacguguacgccgacagcuucgugauccggggagaugaagugcggcagauugccccuggacagacaggcaagaucgccgacuacaacuacaagcugcccgacgacuucaccggcugugugauugccuggaacagcaacaaccuggacuccaaagucggcggcaacuacaauuaccuguaccggcuguuccggaaguccaaucugaagcccuucgagcgggacaucuccaccgagaucuaucaggccggcagcaccccuuguaacggcguggaaggcuucaacugcuacuucccacugcaguccuacggcuuucagcccacaaauggcgugggcuaucagcccuacagagugguggugcugagcuucgaacugcugcaugccccugccacagugugcggcccuaagaaaagcaccaaucucgugaagaacaaaugcgugaacuucaacuucaacggccugaccggcaccggcgugcugacagagagcaacaagaaguuccugccauuccagcaguuuggccgggauaucgccgauaccacagacgccguuagagauccccagacacuggaaauccuggacaucaccccuugcagcuucggcggagugucugugaucaccccuggcaccaacaccagcaaucagguggcagugcuguaccagggcgugaacuguaccgaagugcccguggccauucacgccgaucagcugacaccuacauggcggguguacuccaccggcagcaauguguuucagaccagagccggcugucugaucggagccgagcacgugaacaauagcuacgagugcgacauccccaucggcgcuggaaucugcgccagcuaccagacacagacaaacagcccucggagagccagaagcguggccagccagagcaucauugccuacacaaugucucugggcgccgagaacagcguggccuacuccaacaacucuaucgcuauccccaccaacuucaccaucagcgugaccacagagauccugccuguguccaugaccaagaccagcguggacugcaccauguacaucugcggcgauuccaccgagugcuccaaccugcugcugcaguacggcagcuucugcacccagcugaauagagcccugacagggaucgccguggaacaggacaagaacacccaagagguguucgcccaagugaagcagaucuacaagaccccuccuaucaaggacuucggcggcuucaauuucagccagauucugcccgauccuagcaagcccagcaagcggagcuucaucgaggaccugcuguucaacaaagugacacuggccgacgccggcuucaucaagcaguauggcgauugucugggcgacauugccgccagggaucugauuugcgcccagaaguuuaacggacugacagugcugccuccucugcugaccgaugagaugaucgcccaguacacaucugcccugcuggccggcacaaucacaagcggcuggacauuuggagcaggcgccgcucugcagauccccuuugcuaugcagauggccuaccgguucaacggcaucggagugacccagaaugugcuguacgagaaccagaagcugaucgccaaccaguucaacagcgccaucggcaagauccaggacagccugagcagcacagcaagcgcccugggaaagcugcaggacguggucaaccagaaugcccaggcacugaacacccuggucaagcagcuguccuccaacuucggcgccaucagcucugugcugaacgauauccugagcagacuggacccuccugaggccgaggugcagaucgacagacugaucacaggcagacugcagagccuccagacauacgugacccagcagcugaucagagccgccgagauuagagccucugccaaucuggccgccaccaagaugucugagugugugcugggccagagcaagagaguggacuuuugcggcaagggcuaccaccugaugagcuucccucagucugccccucacggcgugguguuucugcacgugacauaugugcccgcucaagagaagaauuucaccaccgcuccagccaucugccacgacggcaaagcccacuuuccuagagaaggcguguucguguccaacggcacccauugguucgugacacagcggaacuucuacgagccccagaucaucaccaccgacaacaccuucgugucuggcaacugcgacgucgugaucggcauugugaacaauaccguguacgacccucugcagcccgagcuggacagcuucaaagaggaacuggacaaguacuuuaagaaccacacaagccccgacguggaccugggcgauaucagcggaaucaaugccagcgucgugaacauccagaaagagaucgaccggcugaacgagguggccaagaaucugaacgagagccugaucgaccugcaagaacuggggaaguacgagcaguacaucaaguggcccugguacaucuggcugggcuuuaucgccggacugauugccaucgugauggucacaaucaugcuguguugcaugaccagcugcuguagcugccugaagggcuguuguagcuguggcagcugcugcaaguucgacgaggacgauucugagcccgugcugaagggcgugaaacugcacuacacaugaggacuaguuauaagacugacuagcccgaugggccucccaacgggcccuccuccccuccuugcaccgagauuaauaaaaaaaaaaaaaaaaaaaaaaaaaaaaaaaaaaaaaaaaaaaaaaaaaaaaaaaaaaaaaaaaaaaaaaaaaaaaaaaaaaaaaaaaaaaaaaaaaaaa

SEQ ID NO: 25590 - RNA, 4011 nt, Artificial Sequence
  SARS-CoV-2/Wuhan/WIV05/2019__EPI_ISL_402128 spike protein mRNA gc mod (1-1273)(K986P_V987P_N439K_D614G)
aggagaaagcuuaccauguucguguuccuggugcugcugccucugguguccagccagugugugaaccugaccaccagaacacagcugccuccagccuacaccaacagcuuuaccagaggcguguacuaccccgacaagguguucagauccagcgugcugcacucuacccaggaccuguuccugccuuucuucagcaacgugaccugguuccacgccauccacguguccggcaccaauggcaccaagagauucgacaaccccgugcugcccuucaacgacgggguguacuuugccagcaccgagaaguccaacaucaucagaggcuggaucuucggcaccacacuggacagcaagacccagagccugcugaucgugaacaacgccaccaacguggucaucaaagugugcgaguuccaguucugcaacgaccccuuccugggcgucuacuaccacaagaacaacaagagcuggauggaaagcgaguuccggguguacagcagcgccaacaacugcaccuucgaguacgugucccagccuuuccugauggaccuggaaggcaagcagggcaacuucaagaaccugcgcgaguucguguuuaagaacaucgacggcuacuucaagaucuacagcaagcacaccccuaucaaccucgugcgggaucugccucagggcuucucugcucuggaaccccugguggaucugcccaucggcaucaacaucacccgguuucagacacugcuggcccugcacagaagcuaccugacaccuggcgauagcagcagcggauggacagcuggugccgccgcuuacuaugugggcuaccugcagccuagaaccuuccugcugaaguacaacgagaacggcaccaucaccgacgccguggauugugcucuggauccucugagcgagacaaagugcacccugaaguccuucaccguggaaaagggcaucuaccagaccagcaacuuccgggugcagcccaccgaauccaucgugcgguuccccaauaucaccaaucugugccccuucggcgagguguucaaugccaccagauucgccucuguguacgccuggaaccggaagcggaucagcaauugcguggccgacuacuccgugcuguacaacuccgccagcuucagcaccuucaagugcuacggcguguccccuaccaagcugaacgaccugugcuucacaaacguguacgccgacagcuucgugauccggggagaugaagugcggcagauugccccuggacagacaggcaagaucgccgacuacaacuacaagcugcccgacgacuucaccggcugugugauugccuggaacagcaagaaccuggacuccaaagucggcggcaacuacaauuaccuguaccggcuguuccggaaguccaaucugaagcccuucgagcgggacaucuccaccgagaucuaucaggccggcagcaccccuuguaacggcguggaaggcuucaacugcuacuucccacugcaguccuacggcuuucagcccacaaauggcgugggcuaucagcccuacagagugguggugcugagcuucgaacugcugcaugccccugccacagugugcggcccuaagaaaagcaccaaucucgugaagaacaaaugcgugaacuucaacuucaacggccugaccggcaccggcgugcugacagagagcaacaagaaguuccugccauuccagcaguuuggccgggauaucgccgauaccacagacgccguuagagauccccagacacuggaaauccuggacaucaccccuugcagcuucggcggagugucugugaucaccccuggcaccaacaccagcaaucagguggcagugcuguaccagggcgugaacuguaccgaagugcccguggccauucacgccgaucagcugacaccuacauggcggguguacuccaccggcagcaauguguuucagaccagagccggcugucugaucggagccgagcacgugaacaauagcuacgagugcgacauccccaucggcgcuggaaucugcgccagcuaccagacacagacaaacagcccucggagagccagaagcguggccagccagagcaucauugccuacacaaugucucugggcgccgagaacagcguggccuacuccaacaacucuaucgcuauccccaccaacuucaccaucagcgugaccacagagauccugccuguguccaugaccaagaccagcguggacugcaccauguacaucugcggcgauuccaccgagugcuccaaccugcugcugcaguacggcagcuucugcacccagcugaauagagcccugacagggaucgccguggaacaggacaagaacacccaagagguguucgcccaagugaagcagaucuacaagaccccuccuaucaaggacuucggcggcuucaauuucagccagauucugcccgauccuagcaagcccagcaagcggagcuucaucgaggaccugcuguucaacaaagugacacuggccgacgccggcuucaucaagcaguauggcgauugucugggcgacauugccgccagggaucugauuugcgcccagaaguuuaacggacugacagugcugccuccucugcugaccgaugagaugaucgcccaguacacaucugcccugcuggccggcacaaucacaagcggcuggacauuuggagcaggcgccgcucugcagauccccuuugcuaugcagauggccuaccgguucaacggcaucggagugacccagaaugugcuguacgagaaccagaagcugaucgccaaccaguucaacagcgccaucggcaagauccaggacagccugagcagcacagcaagcgcccugggaaagcugcaggacguggucaaccagaaugcccaggcacugaacacccuggucaagcagcuguccuccaacuucggcgccaucagcucugugcugaacgauauccugagcagacuggacccuccugaggccgaggugcagaucgacagacugaucacaggcagacugcagagccuccagacauacgugacccagcagcugaucagagccgccgagauuagagccucugccaaucuggccgccaccaagaugucugagugugugcugggccagagcaagagaguggacuuuugcggcaagggcuaccaccugaugagcuucccucagucugccccucacggcgugguguuucugcacgugacauaugugcccgcucaagagaagaauuucaccaccgcuccagccaucugccacgacggcaaagcccacuuuccuagagaaggcguguucguguccaacggcacccauugguucgugacacagcggaacuucuacgagccccagaucaucaccaccgacaacaccuucgugucuggcaacugcgacgucgugaucggcauugugaacaauaccguguacgacccucugcagcccgagcuggacagcuucaaagaggaacuggacaaguacuuuaagaaccacacaagccccgacguggaccugggcgauaucagcggaaucaaugccagcgucgugaacauccagaaagagaucgaccggcugaacgagguggccaagaaucugaacgagagccugaucgaccugcaagaacuggggaaguacgagcaguacaucaaguggcccugguacaucuggcugggcuuuaucgccggacugauugccaucgugauggucacaaucaugcuguguugcaugaccagcugcuguagcugccugaagggcuguuguagcuguggcagcugcugcaaguucgacgaggacgauucugagcccgugcugaagggcgugaaacugcacuacacaugaggacuaguuauaagacugacuagcccgaugggccucccaacgggcccuccuccccuccuugcaccgagauuaauaaaaaaaaaaaaaaaaaaaaaaaaaaaaaaaaaaaaaaaaaaaaaaaaaaaaaaaaaaaaaaaaaaaaaaaaaaaaaaaaaaaaaaaaaaaaaaaaaaaa

SEQ ID NO: 25591 - RNA, 4011 nt, Artificial Sequence
  SARS-CoV-2/Wuhan/WIV05/2019__EPI_ISL_402128 spike protein mRNA gc mod (1-1273)(K986P_V987P_S477N_D614G)
aggagaaagcuuaccauguucguguuccuggugcugcugccucugguguccagccagugugugaaccugaccaccagaacacagcugccuccagccuacaccaacagcuuuaccagaggcguguacuaccccgacaagguguucagauccagcgugcugcacucuacccaggaccuguuccugccuuucuucagcaacgugaccugguuccacgccauccacguguccggcaccaauggcaccaagagauucgacaaccccgugcugcccuucaacgacgggguguacuuugccagcaccgagaaguccaacaucaucagaggcuggaucuucggcaccacacuggacagcaagacccagagccugcugaucgugaacaacgccaccaacguggucaucaaagugugcgaguuccaguucugcaacgaccccuuccugggcgucuacuaccacaagaacaacaagagcuggauggaaagcgaguuccggguguacagcagcgccaacaacugcaccuucgaguacgugucccagccuuuccugauggaccuggaaggcaagcagggcaacuucaagaaccugcgcgaguucguguuuaagaacaucgacggcuacuucaagaucuacagcaagcacaccccuaucaaccucgugcgggaucugccucagggcuucucugcucuggaaccccugguggaucugcccaucggcaucaacaucacccgguuucagacacugcuggcccugcacagaagcuaccugacaccuggcgauagcagcagcggauggacagcuggugccgccgcuuacuaugugggcuaccugcagccuagaaccuuccugcugaaguacaacgagaacggcaccaucaccgacgccguggauugugcucuggauccucugagcgagacaaagugcacccugaaguccuucaccguggaaaagggcaucuaccagaccagcaacuuccgggugcagcccaccgaauccaucgugcgguuccccaauaucaccaaucugugccccuucggcgagguguucaaugccaccagauucgccucuguguacgccuggaaccggaagcggaucagcaauugcguggccgacuacuccgugcuguacaacuccgccagcuucagcaccuucaagugcuacggcguguccccuaccaagcugaacgaccugugcuucacaaacguguacgccgacagcuucgugauccggggagaugaagugcggcagauugccccuggacagacaggcaagaucgccgacuacaacuacaagcugcccgacgacuucaccggcugugugauugccuggaacagcaacaaccuggacuccaaagucggcggcaacuacaauuaccuguaccggcuguuccggaaguccaaucugaagcccuucgagcgggacaucuccaccgagaucuaucaggccggcaacaccccuuguaacggcguggaaggcuucaacugcuacuucccacugcaguccuacggcuuucagcccacaaauggcgugggcuaucagcccuacagagugguggugcugagcuucgaacugcugcaugccccugccacagugugcggcccuaagaaaagcaccaaucucgugaagaacaaaugcgugaacuucaacuucaacggccugaccggcaccggcgugcugacagagagcaacaagaaguuccugccauuccagcaguuuggccgggauaucgccgauaccacagacgccguuagagauccccagacacuggaaauccuggacaucaccccuugcagcuucggcggagugucugugaucaccccuggcaccaacaccagcaaucagguggcagugcuguaccagggcgugaacuguaccgaagugcccguggccauucacgccgaucagcugacaccuacauggcggguguacuccaccggcagcaauguguuucagaccagagccggcugucugaucggagccgagcacgugaacaauagcuacgagugcgacauccccaucggcgcuggaaucugcgccagcuaccagacacagacaaacagcccucggagagccagaagcguggccagccagagcaucauugccuacacaaugucucugggcgccgagaacagcguggccuacuccaacaacucuaucgcuauccccaccaacuucaccaucagcgugaccacagagauccugccuguguccaugaccaagaccagcguggacugcaccauguacaucugcggcgauuccaccgagugcuccaaccugcugcugcaguacggcagcuucugcacccagcugaauagagcccugacagggaucgccguggaacaggacaagaacacccaagagguguucgcccaagugaagcagaucuacaagaccccuccuaucaaggacuucggcggcuucaauuucagccagauucugcccgauccuagcaagcccagcaagcggagcuucaucgaggaccugcuguucaacaaagugacacuggccgacgccggcuucaucaagcaguauggcgauugucugggcgacauugccgccagggaucugauuugcgcccagaaguuuaacggacugacagugcugccuccucugcugaccgaugagaugaucgcccaguacacaucugcccugcuggccggcacaaucacaagcggcuggacauuuggagcaggcgccgcucugcagauccccuuugcuaugcagauggccuaccgguucaacggcaucggagugacccagaaugugcuguacgagaaccagaagcugaucgccaaccaguucaacagcgccaucggcaagauccaggacagccugagcagcacagcaagcgcccugggaaagcugcaggacguggucaaccagaaugcccaggcacugaacacccuggucaagcagcuguccuccaacuucggcgccaucagcucugugcugaacgauauccugagcagacuggacccuccugaggccgaggugcagaucgacagacugaucacaggcagacugcagagccuccagacauacgugacccagcagcugaucagagccgccgagauuagagccucugccaaucuggccgccaccaagaugucugagugugugcugggccagagcaagagaguggacuuuugcggcaagggcuaccaccugaugagcuucccucagucugccccucacggcgugguguuucugcacgugacauaugugcccgcucaagagaagaauuucaccaccgcuccagccaucugccacgacggcaaagcccacuuuccuagagaaggcguguucguguccaacggcacccauugguucgugacacagcggaacuucuacgagccccagaucaucaccaccgacaacaccuucgugucuggcaacugcgacgucgugaucggcauugugaacaauaccguguacgacccucugcagcccgagcuggacagcuucaaagaggaacuggacaaguacuuuaagaaccacacaagccccgacguggaccugggcgauaucagcggaaucaaugccagcgucgugaacauccagaaagagaucgaccggcugaacgagguggccaagaaucugaacgagagccugaucgaccugcaagaacuggggaaguacgagcaguacaucaaguggcccugguacaucuggcugggcuuuaucgccggacugauugccaucgugauggucacaaucaugcuguguugcaugaccagcugcuguagcugccugaagggcuguuguagcuguggcagcugcugcaaguucgacgaggacgauucugagcccgugcugaagggcgugaaacugcacuacacaugaggacuaguuauaagacugacuagcccgaugggccucccaacgggcccuccuccccuccuugcaccgagauuaauaaaaaaaaaaaaaaaaaaaaaaaaaaaaaaaaaaaaaaaaaaaaaaaaaaaaaaaaaaaaaaaaaaaaaaaaaaaaaaaaaaaaaaaaaaaaaaaaaaaa

SEQ ID NO: 25592 - RNA, 4011 nt, Artificial Sequence
  SARS-CoV-2/Wuhan/WIV05/2019__EPI_ISL_402128 spike protein mRNA gc mod (1-1273)(K986P_V987P_N501Y_D614G)
aggagaaagcuuaccauguucguguuccuggugcugcugccucugguguccagccagugugugaaccugaccaccagaacacagcugccuccagccuacaccaacagcuuuaccagaggcguguacuaccccgacaagguguucagauccagcgugcugcacucuacccaggaccuguuccugccuuucuucagcaacgugaccugguuccacgccauccacguguccggcaccaauggcaccaagagauucgacaaccccgugcugcccuucaacgacgggguguacuuugccagcaccgagaaguccaacaucaucagaggcuggaucuucggcaccacacuggacagcaagacccagagccugcugaucgugaacaacgccaccaacguggucaucaaagugugcgaguuccaguucugcaacgaccccuuccugggcgucuacuaccacaagaacaacaagagcuggauggaaagcgaguuccggguguacagcagcgccaacaacugcaccuucgaguacgugucccagccuuuccugauggaccuggaaggcaagcagggcaacuucaagaaccugcgcgaguucguguuuaagaacaucgacggcuacuucaagaucuacagcaagcacaccccuaucaaccucgugcgggaucugccucagggcuucucugcucuggaaccccugguggaucugcccaucggcaucaacaucacccgguuucagacacugcuggcccugcacagaagcuaccugacaccuggcgauagcagcagcggauggacagcuggugccgccgcuuacuaugugggcuaccugcagccuagaaccuuccugcugaaguacaacgagaacggcaccaucaccgacgccguggauugugcucuggauccucugagcgagacaaagugcacccugaaguccuucaccguggaaaagggcaucuaccagaccagcaacuuccgggugcagcccaccgaauccaucgugcgguuccccaauaucaccaaucugugccccuucggcgagguguucaaugccaccagauucgccucuguguacgccuggaaccggaagcggaucagcaauugcguggccgacuacuccgugcuguacaacuccgccagcuucagcaccuucaagugcuacggcguguccccuaccaagcugaacgaccugugcuucacaaacguguacgccgacagcuucgugauccggggagaugaagugcggcagauugccccuggacagacaggcaagaucgccgacuacaacuacaagcugcccgacgacuucaccggcugugugauugccuggaacagcaacaaccuggacuccaaagucggcggcaacuacaauuaccuguaccggcuguuccggaaguccaaucugaagcccuucgagcgggacaucuccaccgagaucuaucaggccggcagcaccccuuguaacggcguggaaggcuucaacugcuacuucccacugcaguccuacggcuuucagcccacauacggcgugggcuaucagcccuacagagugguggugcugagcuucgaacugcugcaugccccugccacagugugcggcccuaagaaaagcaccaaucucgugaagaacaaaugcgugaacuucaacuucaacggccugaccggcaccggcgugcugacagagagcaacaagaaguuccugccauuccagcaguuuggccgggauaucgccgauaccacagacgccguuagagauccccagacacuggaaauccuggacaucaccccuugcagcuucggcggagugucugugaucaccccuggcaccaacaccagcaaucagguggcagugcuguaccagggcgugaacuguaccgaagugcccguggccauucacgccgaucagcugacaccuacauggcggguguacuccaccggcagcaauguguuucagaccagagccggcugucugaucggagccgagcacgugaacaauagcuacgagugcgacauccccaucggcgcuggaaucugcgccagcuaccagacacagacaaacagcccucggagagccagaagcguggccagccagagcaucauugccuacacaaugucucugggcgccgagaacagcguggccuacuccaacaacucuaucgcuauccccaccaacuucaccaucagcgugaccacagagauccugccuguguccaugaccaagaccagcguggacugcaccauguacaucugcggcgauuccaccgagugcuccaaccugcugcugcaguacggcagcuucugcacccagcugaauagagcccugacagggaucgccguggaacaggacaagaacacccaagagguguucgcccaagugaagcagaucuacaagaccccuccuaucaaggacuucggcggcuucaauuucagccagauucugcccgauccuagcaagcccagcaagcggagcuucaucgaggaccugcuguucaacaaagugacacuggccgacgccggcuucaucaagcaguauggcgauugucugggcgacauugccgccagggaucugauuugcgcccagaaguuuaacggacugacagugcugccuccucugcugaccgaugagaugaucgcccaguacacaucugcccugcuggccggcacaaucacaagcggcuggacauuuggagcaggcgccgcucugcagauccccuuugcuaugcagauggccuaccgguucaacggcaucggagugacccagaaugugcuguacgagaaccagaagcugaucgccaaccaguucaacagcgccaucggcaagauccaggacagccugagcagcacagcaagcgcccugggaaagcugcaggacguggucaaccagaaugcccaggcacugaacacccuggucaagcagcuguccuccaacuucggcgccaucagcucugugcugaacgauauccugagcagacuggacccuccugaggccgaggugcagaucgacagacugaucacaggcagacugcagagccuccagacauacgugacccagcagcugaucagagccgccgagauuagagccucugccaaucuggccgccaccaagaugucugagugugugcugggccagagcaagagaguggacuuuugcggcaagggcuaccaccugaugagcuucccucagucugccccucacggcgugguguuucugcacgugacauaugugcccgcucaagagaagaauuucaccaccgcuccagccaucugccacgacggcaaagcccacuuuccuagagaaggcguguucguguccaacggcacccauugguucgugacacagcggaacuucuacgagccccagaucaucaccaccgacaacaccuucgugucuggcaacugcgacgucgugaucggcauugugaacaauaccguguacgacccucugcagcccgagcuggacagcuucaaagaggaacuggacaaguacuuuaagaaccacacaagccccgacguggaccugggcgauaucagcggaaucaaugccagcgucgugaacauccagaaagagaucgaccggcugaacgagguggccaagaaucugaacgagagccugaucgaccugcaagaacuggggaaguacgagcaguacaucaaguggcccugguacaucuggcugggcuuuaucgccggacugauugccaucgugauggucacaaucaugcuguguugcaugaccagcugcuguagcugccugaagggcuguuguagcuguggcagcugcugcaaguucgacgaggacgauucugagcccgugcugaagggcgugaaacugcacuacacaugaggacuaguuauaagacugacuagcccgaugggccucccaacgggcccuccuccccuccuugcaccgagauuaauaaaaaaaaaaaaaaaaaaaaaaaaaaaaaaaaaaaaaaaaaaaaaaaaaaaaaaaaaaaaaaaaaaaaaaaaaaaaaaaaaaaaaaaaaaaaaaaaaaaa

SEQ ID NO: 25593 - RNA, 4005 nt, Artificial Sequence
  SARS-CoV-2/Wuhan/WIV05/2019__EPI_ISL_402128 spike protein mRNA gc mod (1-1273)(K986P_V987P_H69del_V70del_D614G)
aggagaaagcuuaccauguucguguuccuggugcugcugccucugguguccagccagugugugaaccugaccaccagaacacagcugccuccagccuacaccaacagcuuuaccagaggcguguacuaccccgacaagguguucagauccagcgugcugcacucuacccaggaccuguuccugccuuucuucagcaacgugaccugguuccacgccaucuccggcaccaauggcaccaagagauucgacaaccccgugcugcccuucaacgacgggguguacuuugccagcaccgagaaguccaacaucaucagaggcuggaucuucggcaccacacuggacagcaagacccagagccugcugaucgugaacaacgccaccaacguggucaucaaagugugcgaguuccaguucugcaacgaccccuuccugggcgucuacuaccacaagaacaacaagagcuggauggaaagcgaguuccggguguacagcagcgccaacaacugcaccuucgaguacgugucccagccuuuccugauggaccuggaaggcaagcagggcaacuucaagaaccugcgcgaguucguguuuaagaacaucgacggcuacuucaagaucuacagcaagcacaccccuaucaaccucgugcgggaucugccucagggcuucucugcucuggaaccccugguggaucugcccaucggcaucaacaucacccgguuucagacacugcuggcccugcacagaagcuaccugacaccuggcgauagcagcagcggauggacagcuggugccgccgcuuacuaugugggcuaccugcagccuagaaccuuccugcugaaguacaacgagaacggcaccaucaccgacgccguggauugugcucuggauccucugagcgagacaaagugcacccugaaguccuucaccguggaaaagggcaucuaccagaccagcaacuuccgggugcagcccaccgaauccaucgugcgguuccccaauaucaccaaucugugccccuucggcgagguguucaaugccaccagauucgccucuguguacgccuggaaccggaagcggaucagcaauugcguggccgacuacuccgugcuguacaacuccgccagcuucagcaccuucaagugcuacggcguguccccuaccaagcugaacgaccugugcuucacaaacguguacgccgacagcuucgugauccggggagaugaagugcggcagauugccccuggacagacaggcaagaucgccgacuacaacuacaagcugcccgacgacuucaccggcugugugauugccuggaacagcaacaaccuggacuccaaagucggcggcaacuacaauuaccuguaccggcuguuccggaaguccaaucugaagcccuucgagcgggacaucuccaccgagaucuaucaggccggcagcaccccuuguaacggcguggaaggcuucaacugcuacuucccacugcaguccuacggcuuucagcccacaaauggcgugggcuaucagcccuacagagugguggugcugagcuucgaacugcugcaugccccugccacagugugcggcccuaagaaaagcaccaaucucgugaagaacaaaugcgugaacuucaacuucaacggccugaccggcaccggcgugcugacagagagcaacaagaaguuccugccauuccagcaguuuggccgggauaucgccgauaccacagacgccguuagagauccccagacacuggaaauccuggacaucaccccuugcagcuucggcggagugucugugaucaccccuggcaccaacaccagcaaucagguggcagugcuguaccagggcgugaacuguaccgaagugcccguggccauucacgccgaucagcugacaccuacauggcggguguacuccaccggcagcaauguguuucagaccagagccggcugucugaucggagccgagcacgugaacaauagcuacgagugcgacauccccaucggcgcuggaaucugcgccagcuaccagacacagacaaacagcccucggagagccagaagcguggccagccagagcaucauugccuacacaaugucucugggcgccgagaacagcguggccuacuccaacaacucuaucgcuauccccaccaacuucaccaucagcgugaccacagagauccugccuguguccaugaccaagaccagcguggacugcaccauguacaucugcggcgauuccaccgagugcuccaaccugcugcugcaguacggcagcuucugcacccagcugaauagagcccugacagggaucgccguggaacaggacaagaacacccaagagguguucgcccaagugaagcagaucuacaagaccccuccuaucaaggacuucggcggcuucaauuucagccagauucugcccgauccuagcaagcccagcaagcggagcuucaucgaggaccugcuguucaacaaagugacacuggccgacgccggcuucaucaagcaguauggcgauugucugggcgacauugccgccagggaucugauuugcgcccagaaguuuaacggacugacagugcugccuccucugcugaccgaugagaugaucgcccaguacacaucugcccugcuggccggcacaaucacaagcggcuggacauuuggagcaggcgccgcucugcagauccccuuugcuaugcagauggccuaccgguucaacggcaucggagugacccagaaugugcuguacgagaaccagaagcugaucgccaaccaguucaacagcgccaucggcaagauccaggacagccugagcagcacagcaagcgcccugggaaagcugcaggacguggucaaccagaaugcccaggcacugaacacccuggucaagcagcuguccuccaacuucggcgccaucagcucugugcugaacgauauccugagcagacuggacccuccugaggccgaggugcagaucgacagacugaucacaggcagacugcagagccuccagacauacgugacccagcagcugaucagagccgccgagauuagagccucugccaaucuggccgccaccaagaugucugagugugugcugggccagagcaagagaguggacuuuugcggcaagggcuaccaccugaugagcuucccucagucugccccucacggcgugguguuucugcacgugacauaugugcccgcucaagagaagaauuucaccaccgcuccagccaucugccacgacggcaaagcccacuuuccuagagaaggcguguucguguccaacggcacccauugguucgugacacagcggaacuucuacgagccccagaucaucaccaccgacaacaccuucgugucuggcaacugcgacgucgugaucggcauugugaacaauaccguguacgacccucugcagcccgagcuggacagcuucaaagaggaacuggacaaguacuuuaagaaccacacaagccccgacguggaccugggcgauaucagcggaaucaaugccagcgucgugaacauccagaaagagaucgaccggcugaacgagguggccaagaaucugaacgagagccugaucgaccugcaagaacuggggaaguacgagcaguacaucaaguggcccugguacaucuggcugggcuuuaucgccggacugauugccaucgugauggucacaaucaugcuguguugcaugaccagcugcuguagcugccugaagggcuguuguagcuguggcagcugcugcaaguucgacgaggacgauucugagcccgugcugaagggcgugaaacugcacuacacaugaggacuaguuauaagacugacuagcccgaugggccucccaacgggcccuccuccccuccuugcaccgagauuaauaaaaaaaaaaaaaaaaaaaaaaaaaaaaaaaaaaaaaaaaaaaaaaaaaaaaaaaaaaaaaaaaaaaaaaaaaaaaaaaaaaaaaaaaaaaaaaaaaaaa

SEQ ID NO: 25594 - RNA, 4011 nt, Artificial Sequence
  SARS-CoV-2/Wuhan/WIV05/2019__EPI_ISL_402128 spike protein mRNA gc mod (1-1273)(K986P_V987P_Y453F_D614G)
aggagaaagcuuaccauguucguguuccuggugcugcugccucugguguccagccagugugugaaccugaccaccagaacacagcugccuccagccuacaccaacagcuuuaccagaggcguguacuaccccgacaagguguucagauccagcgugcugcacucuacccaggaccuguuccugccuuucuucagcaacgugaccugguuccacgccauccacguguccggcaccaauggcaccaagagauucgacaaccccgugcugcccuucaacgacgggguguacuuugccagcaccgagaaguccaacaucaucagaggcuggaucuucggcaccacacuggacagcaagacccagagccugcugaucgugaacaacgccaccaacguggucaucaaagugugcgaguuccaguucugcaacgaccccuuccugggcgucuacuaccacaagaacaacaagagcuggauggaaagcgaguuccggguguacagcagcgccaacaacugcaccuucgaguacgugucccagccuuuccugauggaccuggaaggcaagcagggcaacuucaagaaccugcgcgaguucguguuuaagaacaucgacggcuacuucaagaucuacagcaagcacaccccuaucaaccucgugcgggaucugccucagggcuucucugcucuggaaccccugguggaucugcccaucggcaucaacaucacccgguuucagacacugcuggcccugcacagaagcuaccugacaccuggcgauagcagcagcggauggacagcuggugccgccgcuuacuaugugggcuaccugcagccuagaaccuuccugcugaaguacaacgagaacggcaccaucaccgacgccguggauugugcucuggauccucugagcgagacaaagugcacccugaaguccuucaccguggaaaagggcaucuaccagaccagcaacuuccgggugcagcccaccgaauccaucgugcgguuccccaauaucaccaaucugugccccuucggcgagguguucaaugccaccagauucgccucuguguacgccuggaaccggaagcggaucagcaauugcguggccgacuacuccgugcuguacaacuccgccagcuucagcaccuucaagugcuacggcguguccccuaccaagcugaacgaccugugcuucacaaacguguacgccgacagcuucgugauccggggagaugaagugcggcagauugccccuggacagacaggcaagaucgccgacuacaacuacaagcugcccgacgacuucaccggcugugugauugccuggaacagcaacaaccuggacuccaaagucggcggcaacuacaauuaccuguuccggcuguuccggaaguccaaucugaagcccuucgagcgggacaucuccaccgagaucuaucaggccggcagcaccccuuguaacggcguggaaggcuucaacugcuacuucccacugcaguccuacggcuuucagcccacaaauggcgugggcuaucagcccuacagagugguggugcugagcuucgaacugcugcaugccccugccacagugugcggcccuaagaaaagcaccaaucucgugaagaacaaaugcgugaacuucaacuucaacggccugaccggcaccggcgugcugacagagagcaacaagaaguuccugccauuccagcaguuuggccgggauaucgccgauaccacagacgccguuagagauccccagacacuggaaauccuggacaucaccccuugcagcuucggcggagugucugugaucaccccuggcaccaacaccagcaaucagguggcagugcuguaccagggcgugaacuguaccgaagugcccguggccauucacgccgaucagcugacaccuacauggcggguguacuccaccggcagcaauguguuucagaccagagccggcugucugaucggagccgagcacgugaacaauagcuacgagugcgacauccccaucggcgcuggaaucugcgccagcuaccagacacagacaaacagcccucggagagccagaagcguggccagccagagcaucauugccuacacaaugucucugggcgccgagaacagcguggccuacuccaacaacucuaucgcuauccccaccaacuucaccaucagcgugaccacagagauccugccuguguccaugaccaagaccagcguggacugcaccauguacaucugcggcgauuccaccgagugcuccaaccugcugcugcaguacggcagcuucugcacccagcugaauagagcccugacagggaucgccguggaacaggacaagaacacccaagagguguucgcccaagugaagcagaucuacaagaccccuccuaucaaggacuucggcggcuucaauuucagccagauucugcccgauccuagcaagcccagcaagcggagcuucaucgaggaccugcuguucaacaaagugacacuggccgacgccggcuucaucaagcaguauggcgauugucugggcgacauugccgccagggaucugauuugcgcccagaaguuuaacggacugacagugcugccuccucugcugaccgaugagaugaucgcccaguacacaucugcccugcuggccggcacaaucacaagcggcuggacauuuggagcaggcgccgcucugcagauccccuuugcuaugcagauggccuaccgguucaacggcaucggagugacccagaaugugcuguacgagaaccagaagcugaucgccaaccaguucaacagcgccaucggcaagauccaggacagccugagcagcacagcaagcgcccugggaaagcugcaggacguggucaaccagaaugcccaggcacugaacacccuggucaagcagcuguccuccaacuucggcgccaucagcucugugcugaacgauauccugagcagacuggacccuccugaggccgaggugcagaucgacagacugaucacaggcagacugcagagccuccagacauacgugacccagcagcugaucagagccgccgagauuagagccucugccaaucuggccgccaccaagaugucugagugugugcugggccagagcaagagaguggacuuuugcggcaagggcuaccaccugaugagcuucccucagucugccccucacggcgugguguuucugcacgugacauaugugcccgcucaagagaagaauuucaccaccgcuccagccaucugccacgacggcaaagcccacuuuccuagagaaggcguguucguguccaacggcacccauugguucgugacacagcggaacuucuacgagccccagaucaucaccaccgacaacaccuucgugucuggcaacugcgacgucgugaucggcauugugaacaauaccguguacgacccucugcagcccgagcuggacagcuucaaagaggaacuggacaaguacuuuaagaaccacacaagccccgacguggaccugggcgauaucagcggaaucaaugccagcgucgugaacauccagaaagagaucgaccggcugaacgagguggccaagaaucugaacgagagccugaucgaccugcaagaacuggggaaguacgagcaguacaucaaguggcccugguacaucuggcugggcuuuaucgccggacugauugccaucgugauggucacaaucaugcuguguugcaugaccagcugcuguagcugccugaagggcuguuguagcuguggcagcugcugcaaguucgacgaggacgauucugagcccgugcugaagggcgugaaacugcacuacacaugaggacuaguuauaagacugacuagcccgaugggccucccaacgggcccuccuccccuccuugcaccgagauuaauaaaaaaaaaaaaaaaaaaaaaaaaaaaaaaaaaaaaaaaaaaaaaaaaaaaaaaaaaaaaaaaaaaaaaaaaaaaaaaaaaaaaaaaaaaaaaaaaaaaa

SEQ ID NO: 25595 - RNA, 4011 nt, Artificial Sequence
  SARS-CoV-2/Wuhan/WIV05/2019__EPI_ISL_402128 spike protein mRNA gc mod (1-1273)(K986P_V987P_D614G_I692V)
aggagaaagcuuaccauguucguguuccuggugcugcugccucugguguccagccagugugugaaccugaccaccagaacacagcugccuccagccuacaccaacagcuuuaccagaggcguguacuaccccgacaagguguucagauccagcgugcugcacucuacccaggaccuguuccugccuuucuucagcaacgugaccugguuccacgccauccacguguccggcaccaauggcaccaagagauucgacaaccccgugcugcccuucaacgacgggguguacuuugccagcaccgagaaguccaacaucaucagaggcuggaucuucggcaccacacuggacagcaagacccagagccugcugaucgugaacaacgccaccaacguggucaucaaagugugcgaguuccaguucugcaacgaccccuuccugggcgucuacuaccacaagaacaacaagagcuggauggaaagcgaguuccggguguacagcagcgccaacaacugcaccuucgaguacgugucccagccuuuccugauggaccuggaaggcaagcagggcaacuucaagaaccugcgcgaguucguguuuaagaacaucgacggcuacuucaagaucuacagcaagcacaccccuaucaaccucgugcgggaucugccucagggcuucucugcucuggaaccccugguggaucugcccaucggcaucaacaucacccgguuucagacacugcuggcccugcacagaagcuaccugacaccuggcgauagcagcagcggauggacagcuggugccgccgcuuacuaugugggcuaccugcagccuagaaccuuccugcugaaguacaacgagaacggcaccaucaccgacgccguggauugugcucuggauccucugagcgagacaaagugcacccugaaguccuucaccguggaaaagggcaucuaccagaccagcaacuuccgggugcagcccaccgaauccaucgugcgguuccccaauaucaccaaucugugccccuucggcgagguguucaaugccaccagauucgccucuguguacgccuggaaccggaagcggaucagcaauugcguggccgacuacuccgugcuguacaacuccgccagcuucagcaccuucaagugcuacggcguguccccuaccaagcugaacgaccugugcuucacaaacguguacgccgacagcuucgugauccggggagaugaagugcggcagauugccccuggacagacaggcaagaucgccgacuacaacuacaagcugcccgacgacuucaccggcugugugauugccuggaacagcaacaaccuggacuccaaagucggcggcaacuacaauuaccuguaccggcuguuccggaaguccaaucugaagcccuucgagcgggacaucuccaccgagaucuaucaggccggcagcaccccuuguaacggcguggaaggcuucaacugcuacuucccacugcaguccuacggcuuucagcccacaaauggcgugggcuaucagcccuacagagugguggugcugagcuucgaacugcugcaugccccugccacagugugcggcccuaagaaaagcaccaaucucgugaagaacaaaugcgugaacuucaacuucaacggccugaccggcaccggcgugcugacagagagcaacaagaaguuccugccauuccagcaguuuggccgggauaucgccgauaccacagacgccguuagagauccccagacacuggaaauccuggacaucaccccuugcagcuucggcggagugucugugaucaccccuggcaccaacaccagcaaucagguggcagugcuguaccagggcgugaacuguaccgaagugcccguggccauucacgccgaucagcugacaccuacauggcggguguacuccaccggcagcaauguguuucagaccagagccggcugucugaucggagccgagcacgugaacaauagcuacgagugcgacauccccaucggcgcuggaaucugcgccagcuaccagacacagacaaacagcccucggagagccagaagcguggccagccagagcgugauugccuacacaaugucucugggcgccgagaacagcguggccuacuccaacaacucuaucgcuauccccaccaacuucaccaucagcgugaccacagagauccugccuguguccaugaccaagaccagcguggacugcaccauguacaucugcggcgauuccaccgagugcuccaaccugcugcugcaguacggcagcuucugcacccagcugaauagagcccugacagggaucgccguggaacaggacaagaacacccaagagguguucgcccaagugaagcagaucuacaagaccccuccuaucaaggacuucggcggcuucaauuucagccagauucugcccgauccuagcaagcccagcaagcggagcuucaucgaggaccugcuguucaacaaagugacacuggccgacgccggcuucaucaagcaguauggcgauugucugggcgacauugccgccagggaucugauuugcgcccagaaguuuaacggacugacagugcugccuccucugcugaccgaugagaugaucgcccaguacacaucugcccugcuggccggcacaaucacaagcggcuggacauuuggagcaggcgccgcucugcagauccccuuugcuaugcagauggccuaccgguucaacggcaucggagugacccagaaugugcuguacgagaaccagaagcugaucgccaaccaguucaacagcgccaucggcaagauccaggacagccugagcagcacagcaagcgcccugggaaagcugcaggacguggucaaccagaaugcccaggcacugaacacccuggucaagcagcuguccuccaacuucggcgccaucagcucugugcugaacgauauccugagcagacuggacccuccugaggccgaggugcagaucgacagacugaucacaggcagacugcagagccuccagacauacgugacccagcagcugaucagagccgccgagauuagagccucugccaaucuggccgccaccaagaugucugagugugugcugggccagagcaagagaguggacuuuugcggcaagggcuaccaccugaugagcuucccucagucugccccucacggcgugguguuucugcacgugacauaugugcccgcucaagagaagaauuucaccaccgcuccagccaucugccacgacggcaaagcccacuuuccuagagaaggcguguucguguccaacggcacccauugguucgugacacagcggaacuucuacgagccccagaucaucaccaccgacaacaccuucgugucuggcaacugcgacgucgugaucggcauugugaacaauaccguguacgacccucugcagcccgagcuggacagcuucaaagaggaacuggacaaguacuuuaagaaccacacaagccccgacguggaccugggcgauaucagcggaaucaaugccagcgucgugaacauccagaaagagaucgaccggcugaacgagguggccaagaaucugaacgagagccugaucgaccugcaagaacuggggaaguacgagcaguacaucaaguggcccugguacaucuggcugggcuuuaucgccggacugauugccaucgugauggucacaaucaugcuguguugcaugaccagcugcuguagcugccugaagggcuguuguagcuguggcagcugcugcaaguucgacgaggacgauucugagcccgugcugaagggcgugaaacugcacuacacaugaggacuaguuauaagacugacuagcccgaugggccucccaacgggcccuccuccccuccuugcaccgagauuaauaaaaaaaaaaaaaaaaaaaaaaaaaaaaaaaaaaaaaaaaaaaaaaaaaaaaaaaaaaaaaaaaaaaaaaaaaaaaaaaaaaaaaaaaaaaaaaaaaaaa

SEQ ID NO: 25596 - RNA, 4011 nt, Artificial Sequence
  SARS-CoV-2/Wuhan/WIV05/2019__EPI_ISL_402128 spike protein mRNA gc mod (1-1273)(K986P_V987P_D614G_M1229I)
aggagaaagcuuaccauguucguguuccuggugcugcugccucugguguccagccagugugugaaccugaccaccagaacacagcugccuccagccuacaccaacagcuuuaccagaggcguguacuaccccgacaagguguucagauccagcgugcugcacucuacccaggaccuguuccugccuuucuucagcaacgugaccugguuccacgccauccacguguccggcaccaauggcaccaagagauucgacaaccccgugcugcccuucaacgacgggguguacuuugccagcaccgagaaguccaacaucaucagaggcuggaucuucggcaccacacuggacagcaagacccagagccugcugaucgugaacaacgccaccaacguggucaucaaagugugcgaguuccaguucugcaacgaccccuuccugggcgucuacuaccacaagaacaacaagagcuggauggaaagcgaguuccggguguacagcagcgccaacaacugcaccuucgaguacgugucccagccuuuccugauggaccuggaaggcaagcagggcaacuucaagaaccugcgcgaguucguguuuaagaacaucgacggcuacuucaagaucuacagcaagcacaccccuaucaaccucgugcgggaucugccucagggcuucucugcucuggaaccccugguggaucugcccaucggcaucaacaucacccgguuucagacacugcuggcccugcacagaagcuaccugacaccuggcgauagcagcagcggauggacagcuggugccgccgcuuacuaugugggcuaccugcagccuagaaccuuccugcugaaguacaacgagaacggcaccaucaccgacgccguggauugugcucuggauccucugagcgagacaaagugcacccugaaguccuucaccguggaaaagggcaucuaccagaccagcaacuuccgggugcagcccaccgaauccaucgugcgguuccccaauaucaccaaucugugccccuucggcgagguguucaaugccaccagauucgccucuguguacgccuggaaccggaagcggaucagcaauugcguggccgacuacuccgugcuguacaacuccgccagcuucagcaccuucaagugcuacggcguguccccuaccaagcugaacgaccugugcuucacaaacguguacgccgacagcuucgugauccggggagaugaagugcggcagauugccccuggacagacaggcaagaucgccgacuacaacuacaagcugcccgacgacuucaccggcugugugauugccuggaacagcaacaaccuggacuccaaagucggcggcaacuacaauuaccuguaccggcuguuccggaaguccaaucugaagcccuucgagcgggacaucuccaccgagaucuaucaggccggcagcaccccuuguaacggcguggaaggcuucaacugcuacuucccacugcaguccuacggcuuucagcccacaaauggcgugggcuaucagcccuacagagugguggugcugagcuucgaacugcugcaugccccugccacagugugcggcccuaagaaaagcaccaaucucgugaagaacaaaugcgugaacuucaacuucaacggccugaccggcaccggcgugcugacagagagcaacaagaaguuccugccauuccagcaguuuggccgggauaucgccgauaccacagacgccguuagagauccccagacacuggaaauccuggacaucaccccuugcagcuucggcggagugucugugaucaccccuggcaccaacaccagcaaucagguggcagugcuguaccagggcgugaacuguaccgaagugcccguggccauucacgccgaucagcugacaccuacauggcggguguacuccaccggcagcaauguguuucagaccagagccggcugucugaucggagccgagcacgugaacaauagcuacgagugcgacauccccaucggcgcuggaaucugcgccagcuaccagacacagacaaacagcccucggagagccagaagcguggccagccagagcaucauugccuacacaaugucucugggcgccgagaacagcguggccuacuccaacaacucuaucgcuauccccaccaacuucaccaucagcgugaccacagagauccugccuguguccaugaccaagaccagcguggacugcaccauguacaucugcggcgauuccaccgagugcuccaaccugcugcugcaguacggcagcuucugcacccagcugaauagagcccugacagggaucgccguggaacaggacaagaacacccaagagguguucgcccaagugaagcagaucuacaagaccccuccuaucaaggacuucggcggcuucaauuucagccagauucugcccgauccuagcaagcccagcaagcggagcuucaucgaggaccugcuguucaacaaagugacacuggccgacgccggcuucaucaagcaguauggcgauugucugggcgacauugccgccagggaucugauuugcgcccagaaguuuaacggacugacagugcugccuccucugcugaccgaugagaugaucgcccaguacacaucugcccugcuggccggcacaaucacaagcggcuggacauuuggagcaggcgccgcucugcagauccccuuugcuaugcagauggccuaccgguucaacggcaucggagugacccagaaugugcuguacgagaaccagaagcugaucgccaaccaguucaacagcgccaucggcaagauccaggacagccugagcagcacagcaagcgcccugggaaagcugcaggacguggucaaccagaaugcccaggcacugaacacccuggucaagcagcuguccuccaacuucggcgccaucagcucugugcugaacgauauccugagcagacuggacccuccugaggccgaggugcagaucgacagacugaucacaggcagacugcagagccuccagacauacgugacccagcagcugaucagagccgccgagauuagagccucugccaaucuggccgccaccaagaugucugagugugugcugggccagagcaagagaguggacuuuugcggcaagggcuaccaccugaugagcuucccucagucugccccucacggcgugguguuucugcacgugacauaugugcccgcucaagagaagaauuucaccaccgcuccagccaucugccacgacggcaaagcccacuuuccuagagaaggcguguucguguccaacggcacccauugguucgugacacagcggaacuucuacgagccccagaucaucaccaccgacaacaccuucgugucuggcaacugcgacgucgugaucggcauugugaacaauaccguguacgacccucugcagcccgagcuggacagcuucaaagaggaacuggacaaguacuuuaagaaccacacaagccccgacguggaccugggcgauaucagcggaaucaaugccagcgucgugaacauccagaaagagaucgaccggcugaacgagguggccaagaaucugaacgagagccugaucgaccugcaagaacuggggaaguacgagcaguacaucaaguggcccugguacaucuggcugggcuuuaucgccggacugauugccaucgugaucgucacaaucaugcuguguugcaugaccagcugcuguagcugccugaagggcuguuguagcuguggcagcugcugcaaguucgacgaggacgauucugagcccgugcugaagggcgugaaacugcacuacacaugaggacuaguuauaagacugacuagcccgaugggccucccaacgggcccuccuccccuccuugcaccgagauuaauaaaaaaaaaaaaaaaaaaaaaaaaaaaaaaaaaaaaaaaaaaaaaaaaaaaaaaaaaaaaaaaaaaaaaaaaaaaaaaaaaaaaaaaaaaaaaaaaaaaa

SEQ ID NO: 25597 - RNA, 4005 nt, Artificial Sequence
  SARS-CoV-2/Wuhan/WIV05/2019__EPI_ISL_402128 spike protein mRNA gc mod (1-1273)(K986P_V987P_H69del_V70del_A222V_Y453F_S477N_D614G_I692V)
aggagaaagcuuaccauguucguguuccuggugcugcugccucugguguccagccagugugugaaccugaccaccagaacacagcugccuccagccuacaccaacagcuuuaccagaggcguguacuaccccgacaagguguucagauccagcgugcugcacucuacccaggaccuguuccugccuuucuucagcaacgugaccugguuccacgccaucuccggcaccaauggcaccaagagauucgacaaccccgugcugcccuucaacgacgggguguacuuugccagcaccgagaaguccaacaucaucagaggcuggaucuucggcaccacacuggacagcaagacccagagccugcugaucgugaacaacgccaccaacguggucaucaaagugugcgaguuccaguucugcaacgaccccuuccugggcgucuacuaccacaagaacaacaagagcuggauggaaagcgaguuccggguguacagcagcgccaacaacugcaccuucgaguacgugucccagccuuuccugauggaccuggaaggcaagcagggcaacuucaagaaccugcgcgaguucguguuuaagaacaucgacggcuacuucaagaucuacagcaagcacaccccuaucaaccucgugcgggaucugccucagggcuucucugugcuggaaccccugguggaucugcccaucggcaucaacaucacccgguuucagacacugcuggcccugcacagaagcuaccugacaccuggcgauagcagcagcggauggacagcuggugccgccgcuuacuaugugggcuaccugcagccuagaaccuuccugcugaaguacaacgagaacggcaccaucaccgacgccguggauugugcucuggauccucugagcgagacaaagugcacccugaaguccuucaccguggaaaagggcaucuaccagaccagcaacuuccgggugcagcccaccgaauccaucgugcgguuccccaauaucaccaaucugugccccuucggcgagguguucaaugccaccagauucgccucuguguacgccuggaaccggaagcggaucagcaauugcguggccgacuacuccgugcuguacaacuccgccagcuucagcaccuucaagugcuacggcguguccccuaccaagcugaacgaccugugcuucacaaacguguacgccgacagcuucgugauccggggagaugaagugcggcagauugccccuggacagacaggcaagaucgccgacuacaacuacaagcugcccgacgacuucaccggcugugugauugccuggaacagcaacaaccuggacuccaaagucggcggcaacuacaauuaccuguuccggcuguuccggaaguccaaucugaagcccuucgagcgggacaucuccaccgagaucuaucaggccggcaacaccccuuguaacggcguggaaggcuucaacugcuacuucccacugcaguccuacggcuuucagcccacaaauggcgugggcuaucagcccuacagagugguggugcugagcuucgaacugcugcaugccccugccacagugugcggcccuaagaaaagcaccaaucucgugaagaacaaaugcgugaacuucaacuucaacggccugaccggcaccggcgugcugacagagagcaacaagaaguuccugccauuccagcaguuuggccgggauaucgccgauaccacagacgccguuagagauccccagacacuggaaauccuggacaucaccccuugcagcuucggcggagugucugugaucaccccuggcaccaacaccagcaaucagguggcagugcuguaccagggcgugaacuguaccgaagugcccguggccauucacgccgaucagcugacaccuacauggcggguguacuccaccggcagcaauguguuucagaccagagccggcugucugaucggagccgagcacgugaacaauagcuacgagugcgacauccccaucggcgcuggaaucugcgccagcuaccagacacagacaaacagcccucggagagccagaagcguggccagccagagcgugauugccuacacaaugucucugggcgccgagaacagcguggccuacuccaacaacucuaucgcuauccccaccaacuucaccaucagcgugaccacagagauccugccuguguccaugaccaagaccagcguggacugcaccauguacaucugcggcgauuccaccgagugcuccaaccugcugcugcaguacggcagcuucugcacccagcugaauagagcccugacagggaucgccguggaacaggacaagaacacccaagagguguucgcccaagugaagcagaucuacaagaccccuccuaucaaggacuucggcggcuucaauuucagccagauucugcccgauccuagcaagcccagcaagcggagcuucaucgaggaccugcuguucaacaaagugacacuggccgacgccggcuucaucaagcaguauggcgauugucugggcgacauugccgccagggaucugauuugcgcccagaaguuuaacggacugacagugcugccuccucugcugaccgaugagaugaucgcccaguacacaucugcccugcuggccggcacaaucacaagcggcuggacauuuggagcaggcgccgcucugcagauccccuuugcuaugcagauggccuaccgguucaacggcaucggagugacccagaaugugcuguacgagaaccagaagcugaucgccaaccaguucaacagcgccaucggcaagauccaggacagccugagcagcacagcaagcgcccugggaaagcugcaggacguggucaaccagaaugcccaggcacugaacacccuggucaagcagcuguccuccaacuucggcgccaucagcucugugcugaacgauauccugagcagacuggacccuccugaggccgaggugcagaucgacagacugaucacaggcagacugcagagccuccagacauacgugacccagcagcugaucagagccgccgagauuagagccucugccaaucuggccgccaccaagaugucugagugugugcugggccagagcaagagaguggacuuuugcggcaagggcuaccaccugaugagcuucccucagucugccccucacggcgugguguuucugcacgugacauaugugcccgcucaagagaagaauuucaccaccgcuccagccaucugccacgacggcaaagcccacuuuccuagagaaggcguguucguguccaacggcacccauugguucgugacacagcggaacuucuacgagccccagaucaucaccaccgacaacaccuucgugucuggcaacugcgacgucgugaucggcauugugaacaauaccguguacgacccucugcagcccgagcuggacagcuucaaagaggaacuggacaaguacuuuaagaaccacacaagccccgacguggaccugggcgauaucagcggaaucaaugccagcgucgugaacauccagaaagagaucgaccggcugaacgagguggccaagaaucugaacgagagccugaucgaccugcaagaacuggggaaguacgagcaguacaucaaguggcccugguacaucuggcugggcuuuaucgccggacugauugccaucgugauggucacaaucaugcuguguugcaugaccagcugcuguagcugccugaagggcuguuguagcuguggcagcugcugcaaguucgacgaggacgauucugagcccgugcugaagggcgugaaacugcacuacacaugaggacuaguuauaagacugacuagcccgaugggccucccaacgggcccuccuccccuccuugcaccgagauuaauaaaaaaaaaaaaaaaaaaaaaaaaaaaaaaaaaaaaaaaaaaaaaaaaaaaaaaaaaaaaaaaaaaaaaaaaaaaaaaaaaaaaaaaaaaaaaaaaaaaa

SEQ ID NO: 25598 - RNA, 4005 nt, Artificial Sequence
  SARS-CoV-2/Wuhan/WIV05/2019__EPI_ISL_402128 spike protein mRNA gc mod (1-1273)(K986P_V987P_H69del_V70del_Y453F_D614G_I692V_M1229I)
aggagaaagcuuaccauguucguguuccuggugcugcugccucugguguccagccagugugugaaccugaccaccagaacacagcugccuccagccuacaccaacagcuuuaccagaggcguguacuaccccgacaagguguucagauccagcgugcugcacucuacccaggaccuguuccugccuuucuucagcaacgugaccugguuccacgccaucuccggcaccaauggcaccaagagauucgacaaccccgugcugcccuucaacgacgggguguacuuugccagcaccgagaaguccaacaucaucagaggcuggaucuucggcaccacacuggacagcaagacccagagccugcugaucgugaacaacgccaccaacguggucaucaaagugugcgaguuccaguucugcaacgaccccuuccugggcgucuacuaccacaagaacaacaagagcuggauggaaagcgaguuccggguguacagcagcgccaacaacugcaccuucgaguacgugucccagccuuuccugauggaccuggaaggcaagcagggcaacuucaagaaccugcgcgaguucguguuuaagaacaucgacggcuacuucaagaucuacagcaagcacaccccuaucaaccucgugcgggaucugccucagggcuucucugcucuggaaccccugguggaucugcccaucggcaucaacaucacccgguuucagacacugcuggcccugcacagaagcuaccugacaccuggcgauagcagcagcggauggacagcuggugccgccgcuuacuaugugggcuaccugcagccuagaaccuuccugcugaaguacaacgagaacggcaccaucaccgacgccguggauugugcucuggauccucugagcgagacaaagugcacccugaaguccuucaccguggaaaagggcaucuaccagaccagcaacuuccgggugcagcccaccgaauccaucgugcgguuccccaauaucaccaaucugugccccuucggcgagguguucaaugccaccagauucgccucuguguacgccuggaaccggaagcggaucagcaauugcguggccgacuacuccgugcuguacaacuccgccagcuucagcaccuucaagugcuacggcguguccccuaccaagcugaacgaccugugcuucacaaacguguacgccgacagcuucgugauccggggagaugaagugcggcagauugccccuggacagacaggcaagaucgccgacuacaacuacaagcugcccgacgacuucaccggcugugugauugccuggaacagcaacaaccuggacuccaaagucggcggcaacuacaauuaccuguuccggcuguuccggaaguccaaucugaagcccuucgagcgggacaucuccaccgagaucuaucaggccggcagcaccccuuguaacggcguggaaggcuucaacugcuacuucccacugcaguccuacggcuuucagcccacaaauggcgugggcuaucagcccuacagagugguggugcugagcuucgaacugcugcaugccccugccacagugugcggcccuaagaaaagcaccaaucucgugaagaacaaaugcgugaacuucaacuucaacggccugaccggcaccggcgugcugacagagagcaacaagaaguuccugccauuccagcaguuuggccgggauaucgccgauaccacagacgccguuagagauccccagacacuggaaauccuggacaucaccccuugcagcuucggcggagugucugugaucaccccuggcaccaacaccagcaaucagguggcagugcuguaccagggcgugaacuguaccgaagugcccguggccauucacgccgaucagcugacaccuacauggcggguguacuccaccggcagcaauguguuucagaccagagccggcugucugaucggagccgagcacgugaacaauagcuacgagugcgacauccccaucggcgcuggaaucugcgccagcuaccagacacagacaaacagcccucggagagccagaagcguggccagccagagcgugauugccuacacaaugucucugggcgccgagaacagcguggccuacuccaacaacucuaucgcuauccccaccaacuucaccaucagcgugaccacagagauccugccuguguccaugaccaagaccagcguggacugcaccauguacaucugcggcgauuccaccgagugcuccaaccugcugcugcaguacggcagcuucugcacccagcugaauagagcccugacagggaucgccguggaacaggacaagaacacccaagagguguucgcccaagugaagcagaucuacaagaccccuccuaucaaggacuucggcggcuucaauuucagccagauucugcccgauccuagcaagcccagcaagcggagcuucaucgaggaccugcuguucaacaaagugacacuggccgacgccggcuucaucaagcaguauggcgauugucugggcgacauugccgccagggaucugauuugcgcccagaaguuuaacggacugacagugcugccuccucugcugaccgaugagaugaucgcccaguacacaucugcccugcuggccggcacaaucacaagcggcuggacauuuggagcaggcgccgcucugcagauccccuuugcuaugcagauggccuaccgguucaacggcaucggagugacccagaaugugcuguacgagaaccagaagcugaucgccaaccaguucaacagcgccaucggcaagauccaggacagccugagcagcacagcaagcgcccugggaaagcugcaggacguggucaaccagaaugcccaggcacugaacacccuggucaagcagcuguccuccaacuucggcgccaucagcucugugcugaacgauauccugagcagacuggacccuccugaggccgaggugcagaucgacagacugaucacaggcagacugcagagccuccagacauacgugacccagcagcugaucagagccgccgagauuagagccucugccaaucuggccgccaccaagaugucugagugugugcugggccagagcaagagaguggacuuuugcggcaagggcuaccaccugaugagcuucccucagucugccccucacggcgugguguuucugcacgugacauaugugcccgcucaagagaagaauuucaccaccgcuccagccaucugccacgacggcaaagcccacuuuccuagagaaggcguguucguguccaacggcacccauugguucgugacacagcggaacuucuacgagccccagaucaucaccaccgacaacaccuucgugucuggcaacugcgacgucgugaucggcauugugaacaauaccguguacgacccucugcagcccgagcuggacagcuucaaagaggaacuggacaaguacuuuaagaaccacacaagccccgacguggaccugggcgauaucagcggaaucaaugccagcgucgugaacauccagaaagagaucgaccggcugaacgagguggccaagaaucugaacgagagccugaucgaccugcaagaacuggggaaguacgagcaguacaucaaguggcccugguacaucuggcugggcuuuaucgccggacugauugccaucgugaucgucacaaucaugcuguguugcaugaccagcugcuguagcugccugaagggcuguuguagcuguggcagcugcugcaaguucgacgaggacgauucugagcccgugcugaagggcgugaaacugcacuacacaugaggacuaguuauaagacugacuagcccgaugggccucccaacgggcccuccuccccuccuugcaccgagauuaauaaaaaaaaaaaaaaaaaaaaaaaaaaaaaaaaaaaaaaaaaaaaaaaaaaaaaaaaaaaaaaaaaaaaaaaaaaaaaaaaaaaaaaaaaaaaaaaaaaaa

SEQ ID NO: 25599 - RNA, 4002 nt, Artificial Sequence
  SARS-CoV-2/Wuhan/WIV05/2019__EPI_ISL_402128 spike protein mRNA gc mod (1-1273)(K986P_V987P_K986P_V987P_H69del_V70del_Y144del_N501Y_A570 D_D614G_P681H_T716I_S982A_D1118H)
aggagaaagcuuaccauguucguguuccuggugcugcugccucugguguccagccagugugugaaccugaccaccagaacacagcugccuccagccuacaccaacagcuuuaccagaggcguguacuaccccgacaagguguucagauccagcgugcugcacucuacccaggaccuguuccugccuuucuucagcaacgugaccugguuccacgccaucuccggcaccaauggcaccaagagauucgacaaccccgugcugcccuucaacgacgggguguacuuugccagcaccgagaaguccaacaucaucagaggcuggaucuucggcaccacacuggacagcaagacccagagccugcugaucgugaacaacgccaccaacguggucaucaaagugugcgaguuccaguucugcaacgaccccuuccugggcgucuaccacaagaacaacaagagcuggauggaaagcgaguuccggguguacagcagcgccaacaacugcaccuucgaguacgugucccagccuuuccugauggaccuggaaggcaagcagggcaacuucaagaaccugcgcgaguucguguuuaagaacaucgacggcuacuucaagaucuacagcaagcacaccccuaucaaccucgugcgggaucugccucagggcuucucugcucuggaaccccugguggaucugcccaucggcaucaacaucacccgguuucagacacugcuggcccugcacagaagcuaccugacaccuggcgauagcagcagcggauggacagcuggugccgccgcuuacuaugugggcuaccugcagccuagaaccuuccugcugaaguacaacgagaacggcaccaucaccgacgccguggauugugcucuggauccucugagcgagacaaagugcacccugaaguccuucaccguggaaaagggcaucuaccagaccagcaacuuccgggugcagcccaccgaauccaucgugcgguuccccaauaucaccaaucugugccccuucggcgagguguucaaugccaccagauucgccucuguguacgccuggaaccggaagcggaucagcaauugcguggccgacuacuccgugcuguacaacuccgccagcuucagcaccuucaagugcuacggcguguccccuaccaagcugaacgaccugugcuucacaaacguguacgccgacagcuucgugauccggggagaugaagugcggcagauugccccuggacagacaggcaagaucgccgacuacaacuacaagcugcccgacgacuucaccggcugugugauugccuggaacagcaacaaccuggacuccaaagucggcggcaacuacaauuaccuguaccggcuguuccggaaguccaaucugaagcccuucgagcgggacaucuccaccgagaucuaucaggccggcagcaccccuuguaacggcguggaaggcuucaacugcuacuucccacugcaguccuacggcuuucagcccacauacggcgugggcuaucagcccuacagagugguggugcugagcuucgaacugcugcaugccccugccacagugugcggcccuaagaaaagcaccaaucucgugaagaacaaaugcgugaacuucaacuucaacggccugaccggcaccggcgugcugacagagagcaacaagaaguuccugccauuccagcaguuuggccgggauaucgacgauaccacagacgccguuagagauccccagacacuggaaauccuggacaucaccccuugcagcuucggcggagugucugugaucaccccuggcaccaacaccagcaaucagguggcagugcuguaccagggcgugaacuguaccgaagugcccguggccauucacgccgaucagcugacaccuacauggcggguguacuccaccggcagcaauguguuucagaccagagccggcugucugaucggagccgagcacgugaacaauagcuacgagugcgacauccccaucggcgcuggaaucugcgccagcuaccagacacagacaaacagccaccggagagccagaagcguggccagccagagcaucauugccuacacaaugucucugggcgccgagaacagcguggccuacuccaacaacucuaucgcuauccccaucaacuucaccaucagcgugaccacagagauccugccuguguccaugaccaagaccagcguggacugcaccauguacaucugcggcgauuccaccgagugcuccaaccugcugcugcaguacggcagcuucugcacccagcugaauagagcccugacagggaucgccguggaacaggacaagaacacccaagagguguucgcccaagugaagcagaucuacaagaccccuccuaucaaggacuucggcggcuucaauuucagccagauucugcccgauccuagcaagcccagcaagcggagcuucaucgaggaccugcuguucaacaaagugacacuggccgacgccggcuucaucaagcaguauggcgauugucugggcgacauugccgccagggaucugauuugcgcccagaaguuuaacggacugacagugcugccuccucugcugaccgaugagaugaucgcccaguacacaucugcccugcuggccggcacaaucacaagcggcuggacauuuggagcaggcgccgcucugcagauccccuuugcuaugcagauggccuaccgguucaacggcaucggagugacccagaaugugcuguacgagaaccagaagcugaucgccaaccaguucaacagcgccaucggcaagauccaggacagccugagcagcacagcaagcgcccugggaaagcugcaggacguggucaaccagaaugcccaggcacugaacacccuggucaagcagcuguccuccaacuucggcgccaucagcucugugcugaacgauauccuggccagacuggacccuccugaggccgaggugcagaucgacagacugaucacaggcagacugcagagccuccagacauacgugacccagcagcugaucagagccgccgagauuagagccucugccaaucuggccgccaccaagaugucugagugugugcugggccagagcaagagaguggacuuuugcggcaagggcuaccaccugaugagcuucccucagucugccccucacggcgugguguuucugcacgugacauaugugcccgcucaagagaagaauuucaccaccgcuccagccaucugccacgacggcaaagcccacuuuccuagagaaggcguguucguguccaacggcacccauugguucgugacacagcggaacuucuacgagccccagaucaucaccacccacaacaccuucgugucuggcaacugcgacgucgugaucggcauugugaacaauaccguguacgacccucugcagcccgagcuggacagcuucaaagaggaacuggacaaguacuuuaagaaccacacaagccccgacguggaccugggcgauaucagcggaaucaaugccagcgucgugaacauccagaaagagaucgaccggcugaacgagguggccaagaaucugaacgagagccugaucgaccugcaagaacuggggaaguacgagcaguacaucaaguggcccugguacaucuggcugggcuuuaucgccggacugauugccaucgugauggucacaaucaugcuguguugcaugaccagcugcuguagcugccugaagggcuguuguagcuguggcagcugcugcaaguucgacgaggacgauucugagcccgugcugaagggcgugaaacugcacuacacaugaggacuaguuauaagacugacuagcccgaugggccucccaacgggcccuccuccccuccuugcaccgagauuaauaaaaaaaaaaaaaaaaaaaaaaaaaaaaaaaaaaaaaaaaaaaaaaaaaaaaaaaaaaaaaaaaaaaaaaaaaaaaaaaaaaaaaaaaaaaaaaaaaaaa

SEQ ID NO: 25600 - RNA, 4011 nt, Artificial Sequence
  SARS-CoV-2/Wuhan/WIV05/2019__EPI_ISL_402128 spike protein mRNA gc mod (1-1273)(K986P_V987P_K986P_V987P_K417N_E484K_N501Y_D614G)
aggagaaagcuuaccauguucguguuccuggugcugcugccucugguguccagccagugugugaaccugaccaccagaacacagcugccuccagccuacaccaacagcuuuaccagaggcguguacuaccccgacaagguguucagauccagcgugcugcacucuacccaggaccuguuccugccuuucuucagcaacgugaccugguuccacgccauccacguguccggcaccaauggcaccaagagauucgacaaccccgugcugcccuucaacgacgggguguacuuugccagcaccgagaaguccaacaucaucagaggcuggaucuucggcaccacacuggacagcaagacccagagccugcugaucgugaacaacgccaccaacguggucaucaaagugugcgaguuccaguucugcaacgaccccuuccugggcgucuacuaccacaagaacaacaagagcuggauggaaagcgaguuccggguguacagcagcgccaacaacugcaccuucgaguacgugucccagccuuuccugauggaccuggaaggcaagcagggcaacuucaagaaccugcgcgaguucguguuuaagaacaucgacggcuacuucaagaucuacagcaagcacaccccuaucaaccucgugcgggaucugccucagggcuucucugcucuggaaccccugguggaucugcccaucggcaucaacaucacccgguuucagacacugcuggcccugcacagaagcuaccugacaccuggcgauagcagcagcggauggacagcuggugccgccgcuuacuaugugggcuaccugcagccuagaaccuuccugcugaaguacaacgagaacggcaccaucaccgacgccguggauugugcucuggauccucugagcgagacaaagugcacccugaaguccuucaccguggaaaagggcaucuaccagaccagcaacuuccgggugcagcccaccgaauccaucgugcgguuccccaauaucaccaaucugugccccuucggcgagguguucaaugccaccagauucgccucuguguacgccuggaaccggaagcggaucagcaauugcguggccgacuacuccgugcuguacaacuccgccagcuucagcaccuucaagugcuacggcguguccccuaccaagcugaacgaccugugcuucacaaacguguacgccgacagcuucgugauccggggagaugaagugcggcagauugccccuggacagacaggcaacaucgccgacuacaacuacaagcugcccgacgacuucaccggcugugugauugccuggaacagcaacaaccuggacuccaaagucggcggcaacuacaauuaccuguaccggcuguuccggaaguccaaucugaagcccuucgagcgggacaucuccaccgagaucuaucaggccggcagcaccccuuguaacggcgugaagggcuucaacugcuacuucccacugcaguccuacggcuuucagcccacauacggcgugggcuaucagcccuacagagugguggugcugagcuucgaacugcugcaugccccugccacagugugcggcccuaagaaaagcaccaaucucgugaagaacaaaugcgugaacuucaacuucaacggccugaccggcaccggcgugcugacagagagcaacaagaaguuccugccauuccagcaguuuggccgggauaucgccgauaccacagacgccguuagagauccccagacacuggaaauccuggacaucaccccuugcagcuucggcggagugucugugaucaccccuggcaccaacaccagcaaucagguggcagugcuguaccagggcgugaacuguaccgaagugcccguggccauucacgccgaucagcugacaccuacauggcggguguacuccaccggcagcaauguguuucagaccagagccggcugucugaucggagccgagcacgugaacaauagcuacgagugcgacauccccaucggcgcuggaaucugcgccagcuaccagacacagacaaacagcccucggagagccagaagcguggccagccagagcaucauugccuacacaaugucucugggcgccgagaacagcguggccuacuccaacaacucuaucgcuauccccaccaacuucaccaucagcgugaccacagagauccugccuguguccaugaccaagaccagcguggacugcaccauguacaucugcggcgauuccaccgagugcuccaaccugcugcugcaguacggcagcuucugcacccagcugaauagagcccugacagggaucgccguggaacaggacaagaacacccaagagguguucgcccaagugaagcagaucuacaagaccccuccuaucaaggacuucggcggcuucaauuucagccagauucugcccgauccuagcaagcccagcaagcggagcuucaucgaggaccugcuguucaacaaagugacacuggccgacgccggcuucaucaagcaguauggcgauugucugggcgacauugccgccagggaucugauuugcgcccagaaguuuaacggacugacagugcugccuccucugcugaccgaugagaugaucgcccaguacacaucugcccugcuggccggcacaaucacaagcggcuggacauuuggagcaggcgccgcucugcagauccccuuugcuaugcagauggccuaccgguucaacggcaucggagugacccagaaugugcuguacgagaaccagaagcugaucgccaaccaguucaacagcgccaucggcaagauccaggacagccugagcagcacagcaagcgcccugggaaagcugcaggacguggucaaccagaaugcccaggcacugaacacccuggucaagcagcuguccuccaacuucggcgccaucagcucugugcugaacgauauccugagcagacuggacccuccugaggccgaggugcagaucgacagacugaucacaggcagacugcagagccuccagacauacgugacccagcagcugaucagagccgccgagauuagagccucugccaaucuggccgccaccaagaugucugagugugugcugggccagagcaagagaguggacuuuugcggcaagggcuaccaccugaugagcuucccucagucugccccucacggcgugguguuucugcacgugacauaugugcccgcucaagagaagaauuucaccaccgcuccagccaucugccacgacggcaaagcccacuuuccuagagaaggcguguucguguccaacggcacccauugguucgugacacagcggaacuucuacgagccccagaucaucaccaccgacaacaccuucgugucuggcaacugcgacgucgugaucggcauugugaacaauaccguguacgacccucugcagcccgagcuggacagcuucaaagaggaacuggacaaguacuuuaagaaccacacaagccccgacguggaccugggcgauaucagcggaaucaaugccagcgucgugaacauccagaaagagaucgaccggcugaacgagguggccaagaaucugaacgagagccugaucgaccugcaagaacuggggaaguacgagcaguacaucaaguggcccugguacaucuggcugggcuuuaucgccggacugauugccaucgugauggucacaaucaugcuguguugcaugaccagcugcuguagcugccugaagggcuguuguagcuguggcagcugcugcaaguucgacgaggacgauucugagcccgugcugaagggcgugaaacugcacuacacaugaggacuaguuauaagacugacuagcccgaugggccucccaacgggcccuccuccccuccuugcaccgagauuaauaaaaaaaaaaaaaaaaaaaaaaaaaaaaaaaaaaaaaaaaaaaaaaaaaaaaaaaaaaaaaaaaaaaaaaaaaaaaaaaaaaaaaaaaaaaaaaaaaaaa

SEQ ID NO: 25601 - RNA, 4002 nt, Artificial Sequence
  SARS-CoV-2/Wuhan/WIV05/2019__EPI_ISL_402128 spike protein mRNA gc mod (1-1273)(K986P_V987P_K986P_V987P_L18F_D80A_D215G_L242del_A243del_ L244del_R246I_K417N_E484K_N501Y_D614G_A701V)
aggagaaagcuuaccauguucguguuccuggugcugcugccucugguguccagccagugugugaacuucaccaccagaacacagcugccuccagccuacaccaacagcuuuaccagaggcguguacuaccccgacaagguguucagauccagcgugcugcacucuacccaggaccuguuccugccuuucuucagcaacgugaccugguuccacgccauccacguguccggcaccaauggcaccaagagauucgccaaccccgugcugcccuucaacgacgggguguacuuugccagcaccgagaaguccaacaucaucagaggcuggaucuucggcaccacacuggacagcaagacccagagccugcugaucgugaacaacgccaccaacguggucaucaaagugugcgaguuccaguucugcaacgaccccuuccugggcgucuacuaccacaagaacaacaagagcuggauggaaagcgaguuccggguguacagcagcgccaacaacugcaccuucgaguacgugucccagccuuuccugauggaccuggaaggcaagcagggcaacuucaagaaccugcgcgaguucguguuuaagaacaucgacggcuacuucaagaucuacagcaagcacaccccuaucaaccucgugcggggccugccucagggcuucucugcucuggaaccccugguggaucugcccaucggcaucaacaucacccgguuucagacacugcacaucagcuaccugacaccuggcgauagcagcagcggauggacagcuggugccgccgcuuacuaugugggcuaccugcagccuagaaccuuccugcugaaguacaacgagaacggcaccaucaccgacgccguggauugugcucuggauccucugagcgagacaaagugcacccugaaguccuucaccguggaaaagggcaucuaccagaccagcaacuuccgggugcagcccaccgaauccaucgugcgguuccccaauaucaccaaucugugccccuucggcgagguguucaaugccaccagauucgccucuguguacgccuggaaccggaagcggaucagcaauugcguggccgacuacuccgugcuguacaacuccgccagcuucagcaccuucaagugcuacggcguguccccuaccaagcugaacgaccugugcuucacaaacguguacgccgacagcuucgugauccggggagaugaagugcggcagauugccccuggacagacaggcaacaucgccgacuacaacuacaagcugcccgacgacuucaccggcugugugauugccuggaacagcaacaaccuggacuccaaagucggcggcaacuacaauuaccuguaccggcuguuccggaaguccaaucugaagcccuucgagcgggacaucuccaccgagaucuaucaggccggcagcaccccuuguaacggcgugaagggcuucaacugcuacuucccacugcaguccuacggcuuucagcccacauacggcgugggcuaucagcccuacagagugguggugcugagcuucgaacugcugcaugccccugccacagugugcggcccuaagaaaagcaccaaucucgugaagaacaaaugcgugaacuucaacuucaacggccugaccggcaccggcgugcugacagagagcaacaagaaguuccugccauuccagcaguuuggccgggauaucgccgauaccacagacgccguuagagauccccagacacuggaaauccuggacaucaccccuugcagcuucggcggagugucugugaucaccccuggcaccaacaccagcaaucagguggcagugcuguaccagggcgugaacuguaccgaagugcccguggccauucacgccgaucagcugacaccuacauggcggguguacuccaccggcagcaauguguuucagaccagagccggcugucugaucggagccgagcacgugaacaauagcuacgagugcgacauccccaucggcgcuggaaucugcgccagcuaccagacacagacaaacagcccucggagagccagaagcguggccagccagagcaucauugccuacacaaugucucugggcguggagaacagcguggccuacuccaacaacucuaucgcuauccccaccaacuucaccaucagcgugaccacagagauccugccuguguccaugaccaagaccagcguggacugcaccauguacaucugcggcgauuccaccgagugcuccaaccugcugcugcaguacggcagcuucugcacccagcugaauagagcccugacagggaucgccguggaacaggacaagaacacccaagagguguucgcccaagugaagcagaucuacaagaccccuccuaucaaggacuucggcggcuucaauuucagccagauucugcccgauccuagcaagcccagcaagcggagcuucaucgaggaccugcuguucaacaaagugacacuggccgacgccggcuucaucaagcaguauggcgauugucugggcgacauugccgccagggaucugauuugcgcccagaaguuuaacggacugacagugcugccuccucugcugaccgaugagaugaucgcccaguacacaucugcccugcuggccggcacaaucacaagcggcuggacauuuggagcaggcgccgcucugcagauccccuuugcuaugcagauggccuaccgguucaacggcaucggagugacccagaaugugcuguacgagaaccagaagcugaucgccaaccaguucaacagcgccaucggcaagauccaggacagccugagcagcacagcaagcgcccugggaaagcugcaggacguggucaaccagaaugcccaggcacugaacacccuggucaagcagcuguccuccaacuucggcgccaucagcucugugcugaacgauauccugagcagacuggacccuccugaggccgaggugcagaucgacagacugaucacaggcagacugcagagccuccagacauacgugacccagcagcugaucagagccgccgagauuagagccucugccaaucuggccgccaccaagaugucugagugugugcugggccagagcaagagaguggacuuuugcggcaagggcuaccaccugaugagcuucccucagucugccccucacggcgugguguuucugcacgugacauaugugcccgcucaagagaagaauuucaccaccgcuccagccaucugccacgacggcaaagcccacuuuccuagagaaggcguguucguguccaacggcacccauugguucgugacacagcggaacuucuacgagccccagaucaucaccaccgacaacaccuucgugucuggcaacugcgacgucgugaucggcauugugaacaauaccguguacgacccucugcagcccgagcuggacagcuucaaagaggaacuggacaaguacuuuaagaaccacacaagccccgacguggaccugggcgauaucagcggaaucaaugccagcgucgugaacauccagaaagagaucgaccggcugaacgagguggccaagaaucugaacgagagccugaucgaccugcaagaacuggggaaguacgagcaguacaucaaguggcccugguacaucuggcugggcuuuaucgccggacugauugccaucgugauggucacaaucaugcuguguugcaugaccagcugcuguagcugccugaagggcuguuguagcuguggcagcugcugcaaguucgacgaggacgauucugagcccgugcugaagggcgugaaacugcacuacacaugaggacuaguuauaagacugacuagcccgaugggccucccaacgggcccuccuccccuccuugcaccgagauuaauaaaaaaaaaaaaaaaaaaaaaaaaaaaaaaaaaaaaaaaaaaaaaaaaaaaaaaaaaaaaaaaaaaaaaaaaaaaaaaaaaaaaaaaaaaaaaaaaaaaa

SEQ ID NO: 25602 - RNA, 4011 nt, Artificial Sequence
  SARS-CoV-2/Wuhan/WIV05/2019__EPI_ISL_402128 spike protein mRNA gc mod (1-1273)(K986P_V987P_K986P_V987P_E484K_D614G)
aggagaaagcuuaccauguucguguuccuggugcugcugccucugguguccagccagugugugaaccugaccaccagaacacagcugccuccagccuacaccaacagcuuuaccagaggcguguacuaccccgacaagguguucagauccagcgugcugcacucuacccaggaccuguuccugccuuucuucagcaacgugaccugguuccacgccauccacguguccggcaccaauggcaccaagagauucgacaaccccgugcugcccuucaacgacgggguguacuuugccagcaccgagaaguccaacaucaucagaggcuggaucuucggcaccacacuggacagcaagacccagagccugcugaucgugaacaacgccaccaacguggucaucaaagugugcgaguuccaguucugcaacgaccccuuccugggcgucuacuaccacaagaacaacaagagcuggauggaaagcgaguuccggguguacagcagcgccaacaacugcaccuucgaguacgugucccagccuuuccugauggaccuggaaggcaagcagggcaacuucaagaaccugcgcgaguucguguuuaagaacaucgacggcuacuucaagaucuacagcaagcacaccccuaucaaccucgugcgggaucugccucagggcuucucugcucuggaaccccugguggaucugcccaucggcaucaacaucacccgguuucagacacugcuggcccugcacagaagcuaccugacaccuggcgauagcagcagcggauggacagcuggugccgccgcuuacuaugugggcuaccugcagccuagaaccuuccugcugaaguacaacgagaacggcaccaucaccgacgccguggauugugcucuggauccucugagcgagacaaagugcacccugaaguccuucaccguggaaaagggcaucuaccagaccagcaacuuccgggugcagcccaccgaauccaucgugcgguuccccaauaucaccaaucugugccccuucggcgagguguucaaugccaccagauucgccucuguguacgccuggaaccggaagcggaucagcaauugcguggccgacuacuccgugcuguacaacuccgccagcuucagcaccuucaagugcuacggcguguccccuaccaagcugaacgaccugugcuucacaaacguguacgccgacagcuucgugauccggggagaugaagugcggcagauugccccuggacagacaggcaagaucgccgacuacaacuacaagcugcccgacgacuucaccggcugugugauugccuggaacagcaacaaccuggacuccaaagucggcggcaacuacaauuaccuguaccggcuguuccggaaguccaaucugaagcccuucgagcgggacaucuccaccgagaucuaucaggccggcagcaccccuuguaacggcgugaagggcuucaacugcuacuucccacugcaguccuacggcuuucagcccacaaauggcgugggcuaucagcccuacagagugguggugcugagcuucgaacugcugcaugccccugccacagugugcggcccuaagaaaagcaccaaucucgugaagaacaaaugcgugaacuucaacuucaacggccugaccggcaccggcgugcugacagagagcaacaagaaguuccugccauuccagcaguuuggccgggauaucgccgauaccacagacgccguuagagauccccagacacuggaaauccuggacaucaccccuugcagcuucggcggagugucugugaucaccccuggcaccaacaccagcaaucagguggcagugcuguaccagggcgugaacuguaccgaagugcccguggccauucacgccgaucagcugacaccuacauggcggguguacuccaccggcagcaauguguuucagaccagagccggcugucugaucggagccgagcacgugaacaauagcuacgagugcgacauccccaucggcgcuggaaucugcgccagcuaccagacacagacaaacagcccucggagagccagaagcguggccagccagagcaucauugccuacacaaugucucugggcgccgagaacagcguggccuacuccaacaacucuaucgcuauccccaccaacuucaccaucagcgugaccacagagauccugccuguguccaugaccaagaccagcguggacugcaccauguacaucugcggcgauuccaccgagugcuccaaccugcugcugcaguacggcagcuucugcacccagcugaauagagcccugacagggaucgccguggaacaggacaagaacacccaagagguguucgcccaagugaagcagaucuacaagaccccuccuaucaaggacuucggcggcuucaauuucagccagauucugcccgauccuagcaagcccagcaagcggagcuucaucgaggaccugcuguucaacaaagugacacuggccgacgccggcuucaucaagcaguauggcgauugucugggcgacauugccgccagggaucugauuugcgcccagaaguuuaacggacugacagugcugccuccucugcugaccgaugagaugaucgcccaguacacaucugcccugcuggccggcacaaucacaagcggcuggacauuuggagcaggcgccgcucugcagauccccuuugcuaugcagauggccuaccgguucaacggcaucggagugacccagaaugugcuguacgagaaccagaagcugaucgccaaccaguucaacagcgccaucggcaagauccaggacagccugagcagcacagcaagcgcccugggaaagcugcaggacguggucaaccagaaugcccaggcacugaacacccuggucaagcagcuguccuccaacuucggcgccaucagcucugugcugaacgauauccugagcagacuggacccuccugaggccgaggugcagaucgacagacugaucacaggcagacugcagagccuccagacauacgugacccagcagcugaucagagccgccgagauuagagccucugccaaucuggccgccaccaagaugucugagugugugcugggccagagcaagagaguggacuuuugcggcaagggcuaccaccugaugagcuucccucagucugccccucacggcgugguguuucugcacgugacauaugugcccgcucaagagaagaauuucaccaccgcuccagccaucugccacgacggcaaagcccacuuuccuagagaaggcguguucguguccaacggcacccauugguucgugacacagcggaacuucuacgagccccagaucaucaccaccgacaacaccuucgugucuggcaacugcgacgucgugaucggcauugugaacaauaccguguacgacccucugcagcccgagcuggacagcuucaaagaggaacuggacaaguacuuuaagaaccacacaagccccgacguggaccugggcgauaucagcggaaucaaugccagcgucgugaacauccagaaagagaucgaccggcugaacgagguggccaagaaucugaacgagagccugaucgaccugcaagaacuggggaaguacgagcaguacaucaaguggcccugguacaucuggcugggcuuuaucgccggacugauugccaucgugauggucacaaucaugcuguguugcaugaccagcugcuguagcugccugaagggcuguuguagcuguggcagcugcugcaaguucgacgaggacgauucugagcccgugcugaagggcgugaaacugcacuacacaugaggacuaguuauaagacugacuagcccgaugggccucccaacgggcccuccuccccuccuugcaccgagauuaauaaaaaaaaaaaaaaaaaaaaaaaaaaaaaaaaaaaaaaaaaaaaaaaaaaaaaaaaaaaaaaaaaaaaaaaaaaaaaaaaaaaaaaaaaaaaaaaaaaaa

SEQ ID NO: 25603 - RNA, 4011 nt, Artificial Sequence
  SARS-CoV-2/Wuhan/WIV05/2019__EPI_ISL_402128 spike protein mRNA gc mod (1-1273)(K986P_V987P_K986P_V987P_L18F_T20N_P26S_D138Y_R190S_K417T _E484K_N501Y_D614G_H655Y_T1027I)
aggagaaagcuuaccauguucguguuccuggugcugcugccucugguguccagccagugugugaacuucaccaacagaacacagcugccuagcgccuacaccaacagcuuuaccagaggcguguacuaccccgacaagguguucagauccagcgugcugcacucuacccaggaccuguuccugccuuucuucagcaacgugaccugguuccacgccauccacguguccggcaccaauggcaccaagagauucgacaaccccgugcugcccuucaacgacgggguguacuuugccagcaccgagaaguccaacaucaucagaggcuggaucuucggcaccacacuggacagcaagacccagagccugcugaucgugaacaacgccaccaacguggucaucaaagugugcgaguuccaguucugcaacuaccccuuccugggcgucuacuaccacaagaacaacaagagcuggauggaaagcgaguuccggguguacagcagcgccaacaacugcaccuucgaguacgugucccagccuuuccugauggaccuggaaggcaagcagggcaacuucaagaaccugagcgaguucguguuuaagaacaucgacggcuacuucaagaucuacagcaagcacaccccuaucaaccucgugcgggaucugccucagggcuucucugcucuggaaccccugguggaucugcccaucggcaucaacaucacccgguuucagacacugcuggcccugcacagaagcuaccugacaccuggcgauagcagcagcggauggacagcuggugccgccgcuuacuaugugggcuaccugcagccuagaaccuuccugcugaaguacaacgagaacggcaccaucaccgacgccguggauugugcucuggauccucugagcgagacaaagugcacccugaaguccuucaccguggaaaagggcaucuaccagaccagcaacuuccgggugcagcccaccgaauccaucgugcgguuccccaauaucaccaaucugugccccuucggcgagguguucaaugccaccagauucgccucuguguacgccuggaaccggaagcggaucagcaauugcguggccgacuacuccgugcuguacaacuccgccagcuucagcaccuucaagugcuacggcguguccccuaccaagcugaacgaccugugcuucacaaacguguacgccgacagcuucgugauccggggagaugaagugcggcagauugccccuggacagacaggcaccaucgccgacuacaacuacaagcugcccgacgacuucaccggcugugugauugccuggaacagcaacaaccuggacuccaaagucggcggcaacuacaauuaccuguaccggcuguuccggaaguccaaucugaagcccuucgagcgggacaucuccaccgagaucuaucaggccggcagcaccccuuguaacggcgugaagggcuucaacugcuacuucccacugcaguccuacggcuuucagcccacauacggcgugggcuaucagcccuacagagugguggugcugagcuucgaacugcugcaugccccugccacagugugcggcccuaagaaaagcaccaaucucgugaagaacaaaugcgugaacuucaacuucaacggccugaccggcaccggcgugcugacagagagcaacaagaaguuccugccauuccagcaguuuggccgggauaucgccgauaccacagacgccguuagagauccccagacacuggaaauccuggacaucaccccuugcagcuucggcggagugucugugaucaccccuggcaccaacaccagcaaucagguggcagugcuguaccagggcgugaacuguaccgaagugcccguggccauucacgccgaucagcugacaccuacauggcggguguacuccaccggcagcaauguguuucagaccagagccggcugucugaucggagccgaguacgugaacaauagcuacgagugcgacauccccaucggcgcuggaaucugcgccagcuaccagacacagacaaacagcccucggagagccagaagcguggccagccagagcaucauugccuacacaaugucucugggcgccgagaacagcguggccuacuccaacaacucuaucgcuauccccaccaacuucaccaucagcgugaccacagagauccugccuguguccaugaccaagaccagcguggacugcaccauguacaucugcggcgauuccaccgagugcuccaaccugcugcugcaguacggcagcuucugcacccagcugaauagagcccugacagggaucgccguggaacaggacaagaacacccaagagguguucgcccaagugaagcagaucuacaagaccccuccuaucaaggacuucggcggcuucaauuucagccagauucugcccgauccuagcaagcccagcaagcggagcuucaucgaggaccugcuguucaacaaagugacacuggccgacgccggcuucaucaagcaguauggcgauugucugggcgacauugccgccagggaucugauuugcgcccagaaguuuaacggacugacagugcugccuccucugcugaccgaugagaugaucgcccaguacacaucugcccugcuggccggcacaaucacaagcggcuggacauuuggagcaggcgccgcucugcagauccccuuugcuaugcagauggccuaccgguucaacggcaucggagugacccagaaugugcuguacgagaaccagaagcugaucgccaaccaguucaacagcgccaucggcaagauccaggacagccugagcagcacagcaagcgcccugggaaagcugcaggacguggucaaccagaaugcccaggcacugaacacccuggucaagcagcuguccuccaacuucggcgccaucagcucugugcugaacgauauccugagcagacuggacccuccugaggccgaggugcagaucgacagacugaucacaggcagacugcagagccuccagacauacgugacccagcagcugaucagagccgccgagauuagagccucugccaaucuggccgccaucaagaugucugagugugugcugggccagagcaagagaguggacuuuugcggcaagggcuaccaccugaugagcuucccucagucugccccucacggcgugguguuucugcacgugacauaugugcccgcucaagagaagaauuucaccaccgcuccagccaucugccacgacggcaaagcccacuuuccuagagaaggcguguucguguccaacggcacccauugguucgugacacagcggaacuucuacgagccccagaucaucaccaccgacaacaccuucgugucuggcaacugcgacgucgugaucggcauugugaacaauaccguguacgacccucugcagcccgagcuggacagcuucaaagaggaacuggacaaguacuuuaagaaccacacaagccccgacguggaccugggcgauaucagcggaaucaaugccagcgucgugaacauccagaaagagaucgaccggcugaacgagguggccaagaaucugaacgagagccugaucgaccugcaagaacuggggaaguacgagcaguacaucaaguggcccugguacaucuggcugggcuuuaucgccggacugauugccaucgugauggucacaaucaugcuguguugcaugaccagcugcuguagcugccugaagggcuguuguagcuguggcagcugcugcaaguucgacgaggacgauucugagcccgugcugaagggcgugaaacugcacuacacaugaggacuaguuauaagacugacuagcccgaugggccucccaacgggcccuccuccccuccuugcaccgagauuaauaaaaaaaaaaaaaaaaaaaaaaaaaaaaaaaaaaaaaaaaaaaaaaaaaaaaaaaaaaaaaaaaaaaaaaaaaaaaaaaaaaaaaaaaaaaaaaaaaaaa

SEQ ID NO: 25604 - RNA, 4011 nt, Artificial Sequence
  SARS-CoV-2/Wuhan/WIV05/2019__EPI_ISL_402128 spike protein mRNA gc mod (1-1273)(K986P_V987P_K986P_V987P_S13I_W152C_L452R_D614G)
aggagaaagcuuaccauguucguguuccuggugcugcugccucugguguccauccagugugugaaccugaccaccagaacacagcugccuccagccuacaccaacagcuuuaccagaggcguguacuaccccgacaagguguucagauccagcgugcugcacucuacccaggaccuguuccugccuuucuucagcaacgugaccugguuccacgccauccacguguccggcaccaauggcaccaagagauucgacaaccccgugcugcccuucaacgacgggguguacuuugccagcaccgagaaguccaacaucaucagaggcuggaucuucggcaccacacuggacagcaagacccagagccugcugaucgugaacaacgccaccaacguggucaucaaagugugcgaguuccaguucugcaacgaccccuuccugggcgucuacuaccacaagaacaacaagagcugcauggaaagcgaguuccggguguacagcagcgccaacaacugcaccuucgaguacgugucccagccuuuccugauggaccuggaaggcaagcagggcaacuucaagaaccugcgcgaguucguguuuaagaacaucgacggcuacuucaagaucuacagcaagcacaccccuaucaaccucgugcgggaucugccucagggcuucucugcucuggaaccccugguggaucugcccaucggcaucaacaucacccgguuucagacacugcuggcccugcacagaagcuaccugacaccuggcgauagcagcagcggauggacagcuggugccgccgcuuacuaugugggcuaccugcagccuagaaccuuccugcugaaguacaacgagaacggcaccaucaccgacgccguggauugugcucuggauccucugagcgagacaaagugcacccugaaguccuucaccguggaaaagggcaucuaccagaccagcaacuuccgggugcagcccaccgaauccaucgugcgguuccccaauaucaccaaucugugccccuucggcgagguguucaaugccaccagauucgccucuguguacgccuggaaccggaagcggaucagcaauugcguggccgacuacuccgugcuguacaacuccgccagcuucagcaccuucaagugcuacggcguguccccuaccaagcugaacgaccugugcuucacaaacguguacgccgacagcuucgugauccggggagaugaagugcggcagauugccccuggacagacaggcaagaucgccgacuacaacuacaagcugcccgacgacuucaccggcugugugauugccuggaacagcaacaaccuggacuccaaagucggcggcaacuacaauuaccgcuaccggcuguuccggaaguccaaucugaagcccuucgagcgggacaucuccaccgagaucuaucaggccggcagcaccccuuguaacggcguggaaggcuucaacugcuacuucccacugcaguccuacggcuuucagcccacaaauggcgugggcuaucagcccuacagagugguggugcugagcuucgaacugcugcaugccccugccacagugugcggcccuaagaaaagcaccaaucucgugaagaacaaaugcgugaacuucaacuucaacggccugaccggcaccggcgugcugacagagagcaacaagaaguuccugccauuccagcaguuuggccgggauaucgccgauaccacagacgccguuagagauccccagacacuggaaauccuggacaucaccccuugcagcuucggcggagugucugugaucaccccuggcaccaacaccagcaaucagguggcagugcuguaccagggcgugaacuguaccgaagugcccguggccauucacgccgaucagcugacaccuacauggcggguguacuccaccggcagcaauguguuucagaccagagccggcugucugaucggagccgagcacgugaacaauagcuacgagugcgacauccccaucggcgcuggaaucugcgccagcuaccagacacagacaaacagcccucggagagccagaagcguggccagccagagcaucauugccuacacaaugucucugggcgccgagaacagcguggccuacuccaacaacucuaucgcuauccccaccaacuucaccaucagcgugaccacagagauccugccuguguccaugaccaagaccagcguggacugcaccauguacaucugcggcgauuccaccgagugcuccaaccugcugcugcaguacggcagcuucugcacccagcugaauagagcccugacagggaucgccguggaacaggacaagaacacccaagagguguucgcccaagugaagcagaucuacaagaccccuccuaucaaggacuucggcggcuucaauuucagccagauucugcccgauccuagcaagcccagcaagcggagcuucaucgaggaccugcuguucaacaaagugacacuggccgacgccggcuucaucaagcaguauggcgauugucugggcgacauugccgccagggaucugauuugcgcccagaaguuuaacggacugacagugcugccuccucugcugaccgaugagaugaucgcccaguacacaucugcccugcuggccggcacaaucacaagcggcuggacauuuggagcaggcgccgcucugcagauccccuuugcuaugcagauggccuaccgguucaacggcaucggagugacccagaaugugcuguacgagaaccagaagcugaucgccaaccaguucaacagcgccaucggcaagauccaggacagccugagcagcacagcaagcgcccugggaaagcugcaggacguggucaaccagaaugcccaggcacugaacacccuggucaagcagcuguccuccaacuucggcgccaucagcucugugcugaacgauauccugagcagacuggacccuccugaggccgaggugcagaucgacagacugaucacaggcagacugcagagccuccagacauacgugacccagcagcugaucagagccgccgagauuagagccucugccaaucuggccgccaccaagaugucugagugugugcugggccagagcaagagaguggacuuuugcggcaagggcuaccaccugaugagcuucccucagucugccccucacggcgugguguuucugcacgugacauaugugcccgcucaagagaagaauuucaccaccgcuccagccaucugccacgacggcaaagcccacuuuccuagagaaggcguguucguguccaacggcacccauugguucgugacacagcggaacuucuacgagccccagaucaucaccaccgacaacaccuucgugucuggcaacugcgacgucgugaucggcauugugaacaauaccguguacgacccucugcagcccgagcuggacagcuucaaagaggaacuggacaaguacuuuaagaaccacacaagccccgacguggaccugggcgauaucagcggaaucaaugccagcgucgugaacauccagaaagagaucgaccggcugaacgagguggccaagaaucugaacgagagccugaucgaccugcaagaacuggggaaguacgagcaguacaucaaguggcccugguacaucuggcugggcuuuaucgccggacugauugccaucgugauggucacaaucaugcuguguugcaugaccagcugcuguagcugccugaagggcuguuguagcuguggcagcugcugcaaguucgacgaggacgauucugagcccgugcugaagggcgugaaacugcacuacacaugaggacuaguuauaagacugacuagcccgaugggccucccaacgggcccuccuccccuccuugcaccgagauuaauaaaaaaaaaaaaaaaaaaaaaaaaaaaaaaaaaaaaaaaaaaaaaaaaaaaaaaaaaaaaaaaaaaaaaaaaaaaaaaaaaaaaaaaaaaaaaaaaaaaa

SEQ ID NO: 25605 - RNA, 1347 nt, Artificial Sequence
  SARS-CoV-2/Wuhan/WIV05/2019__EPI_ISL_402128 spike protein mRNA gc (1-15,334-528) Ferritin construct
aggagaaagcuuaccauguucguguuccugguccuccugccccuggugagcucccagugcaaccugugccccuucggcgagguguucaacgccacccgguucgccagcgucuacgccuggaaccgcaagcggaucuccaacugcguggcggacuacagcgugcuguacaacuccgccagcuucuccacguucaagugcuacggcgucagccccaccaagcucaacgaccugugcuucaccaacguguacgccgacuccuucgugauccgcggggacgagguccggcagaucgcccccggccagaccgggaagaucgccgacuacaacuacaagcugccggacgacuucacgggcugcgugaucgcguggaacagcaacaaccucgacuccaaggucgggggcaacuacaacuaccuguaccgccuguuccgcaagagcaaccucaagcccuucgagcgggacaucuccaccgagaucuaccaggccggcagcacccccugcaacgggguggagggcuucaacugcuacuucccccugcaguccuacggguuccagccgaccaacggcgugggguaccagcccuaccggguggucgugcugagcuucgagcuccugcacgcccccgccacggugugcggccccaagggcggggguggaagcggcggggguggaagugacaucaucaagcuccugaacgagcaggucaacaaggagaugcaguccagcaaccuguacauguccaugagcuccuggugcuacacccacagccucgacggcgccgggcuguuccuguucgaccacgccgcggaggaguacgagcacgccaagaagcucaucaucuuccugaacgagaacaacgugcccgugcagcugaccuccaucagcgccccggagcacaaguucgagggccucacgcagaucuuccagaaggccuacgagcacgagcagcacaucuccgagagcaucaacaacaucguggaccacgccaucaaguccaaggaccacgcgaccuucaacuuccugcagugguacgucgccgagcagcacgaggaggaggugcuguucaaggacauccucgacaagaucgagcugaucgggaacgagaaccacggccuguaccucgccgaccaguacgugaaggggaucgccaagagccgcaaguccugaggacuaguuauaagacugacuagcccgaugggccucccaacgggcccuccuccccuccuugcaccgagauuaauagaucuaaaaaaaaaaaaaaaaaaaaaaaaaaaaaaaaaaaaaaaaaaaaaaaaaaaaaaaaaaaaaaaaaaaaaaaaaaaaaaaaaaaaaaaaaaaaaaaaaaaa

SEQ ID NO: 25606 - RNA, 945 nt, Artificial Sequence
  SARS-CoV-2/Wuhan/WIV05/2019__EPI_ISL_402128 spike protein mRNA gc (334-528) Foldon construct
aggagaaagcuuaccaugcccaugggcagccugcagccgcucgccacccuguaccugcucgggaugcugguggccuccguccuggcgaaccugugccccuucggcgagguguucaacgccacccgguucgccagcgucuacgccuggaaccgcaagcggaucuccaacugcguggcggacuacagcgugcuguacaacuccgccagcuucuccacguucaagugcuacggcgucagccccaccaagcucaacgaccugugcuucaccaacguguacgccgacuccuucgugauccgcggggacgagguccggcagaucgcccccggccagaccgggaagaucgccgacuacaacuacaagcugccggacgacuucacgggcugcgugaucgcguggaacagcaacaaccucgacuccaaggucgggggcaacuacaacuaccuguaccgccuguuccgcaagagcaaccucaagcccuucgagcgggacaucuccaccgagaucuaccaggccggcagcacccccugcaacgggguggagggcuucaacugcuacuucccccugcaguccuacggguuccagccgaccaacggcgugggguaccagcccuaccggguggucgugcugagcuucgagcuccugcacgcccccgccacggugugcggccccaagggcagcggcggguacauccccgaggccccgcgcgacggccaggccuacgugcggaaggacggcgaguggguccugcugagcaccuuccucugaggacuaguuauaagacugacuagcccgaugggccucccaacgggcccuccuccccuccuugcaccgagauuaauagaucuaaaaaaaaaaaaaaaaaaaaaaaaaaaaaaaaaaaaaaaaaaaaaaaaaaaaaaaaaaaaaaaaaaaaaaaaaaaaaaaaaaaaaaaaaaaaaaaaaaaa

SEQ ID NO: 25607 - RNA, 1323 nt, Artificial Sequence
  SARS-CoV-2/Wuhan/WIV05/2019__EPI_ISL_402128 spike protein mRNA gc (1-15,334-528) LumSynth construct
aggagaaagcuuaccauguucguguuccugguccuccugccccuggugagcucccagugcaaccugugccccuucggcgagguguucaacgccacccgguucgccagcgucuacgccuggaaccgcaagcggaucuccaacugcguggcggacuacagcgugcuguacaacuccgccagcuucuccacguucaagugcuacggcgucagccccaccaagcucaacgaccugugcuucaccaacguguacgccgacuccuucgugauccgcggggacgagguccggcagaucgcccccggccagaccgggaagaucgccgacuacaacuacaagcugccggacgacuucacgggcugcgugaucgcguggaacagcaacaaccucgacuccaaggucgggggcaacuacaacuaccuguaccgccuguuccgcaagagcaaccucaagcccuucgagcgggacaucuccaccgagaucuaccaggccggcagcacccccugcaacgggguggagggcuucaacugcuacuucccccugcaguccuacggguuccagccgaccaacggcgugggguaccagcccuaccggguggucgugcugagcuucgagcuccugcacgcccccgccacggugugcggccccaagggcggcggcggcuccggaggcggagguagcgggggacagaucuacgagggcaagcugaccgccgaggggcuccgcuucggcaucguggccagccgguucaaccacgcgcuggucgaccgccugguggagggggccaucgacgccaucgugcggcacggcgggcgcgaggaggacaucacccucguccgggugcccggcuccugggagaucccgguggccgccggcgagcuggcccgcaaggaggacaucgacgcggucaucgccaucggggugcugauccggggcgccacgccccacuucgacuacaucgccagcgagguguccaaggggcucgcggaccugagccuggagcuccgcaagcccaucaccuucggcgucaucaccgccgacacccuggagcaggccaucgagcgggccgggacgaagcacggcaacaagggcugggaggccgcgcuguccgccaucgagauggccaaccucuucaagagccugcgcugaggacuaguuauaagacugacuagcccgaugggccucccaacgggcccuccuccccuccuugcaccgagauuaauagaucuaaaaaaaaaaaaaaaaaaaaaaaaaaaaaaaaaaaaaaaaaaaaaaaaaaaaaaaaaaaaaaaaaaaaaaaaaaaaaaaaaaaaaaaaaaaaaaaaaaaa

SEQ ID NO: 25608 - RNA, 1284 nt, Artificial Sequence
  SARS-CoV-2/Wuhan/WIV05/2019__EPI_ISL_402128 spike protein mRNA gc (334-528) LumSynth construct
aggagaaagcuuaccaugcagaucuacgagggcaagcugaccgccgaggggcuccgcuucggcaucguggccagccgguucaaccacgcgcuggucgaccgccugguggagggggccaucgacgccaucgugcggcacggcgggcgcgaggaggacaucacccucguccgggugcccggcuccugggagaucccgguggccgccggcgagcuggcccgcaaggaggacaucgacgcggucaucgccaucggggugcugauccggggcgccacgccccacuucgacuacaucgccagcgagguguccaaggggcucgcggaccugagccuggagcuccgcaagcccaucaccuucggcgucaucaccgccgacacccuggagcaggccaucgagcgggccgggacgaagcacggcaacaagggcugggaggccgcgcuguccgccaucgagauggccaaccucuucaagagccugcgcggcgggggcgggagcggcgggggcggcuccgggggcgggaaccugugccccuucggcgagguguucaacgccacccgguucgccagcgucuacgccuggaaccgcaagcggaucuccaacugcguggcggacuacagcgugcuguacaacuccgccagcuucuccacguucaagugcuacggcgucagccccaccaagcucaacgaccugugcuucaccaacguguacgccgacuccuucgugauccgcggggacgagguccggcagaucgcccccggccagaccgggaagaucgccgacuacaacuacaagcugccggacgacuucacgggcugcgugaucgcguggaacagcaacaaccucgacuccaaggucgggggcaacuacaacuaccuguaccgccuguuccgcaagagcaaccucaagcccuucgagcgggacaucuccaccgagaucuaccaggccggcagcacccccugcaacgggguggagggcuucaacugcuacuucccccugcaguccuacggguuccagccgaccaacggcgugggguaccagcccuaccggguggucgugcugagcuucgagcuccugcacgcccccgccacggugugcggccccaagugaggacuaguuauaagacugacuagcccgaugggccucccaacgggcccuccuccccuccuugcaccgagauuaauagaucuaaaaaaaaaaaaaaaaaaaaaaaaaaaaaaaaaaaaaaaaaaaaaaaaaaaaaaaaaaaaaaaaaaaaaaaaaaaaaaaaaaaaaaaaaaaaaaaaaaaa

SEQ ID NO: 25609 - RNA, 4017 nt, Artificial Sequence
  SARS-CoV-2/Wuhan/WIV05/2019__EPI_ISL_402128 spike protein mRNA gc (1-1273)
aggagaaagcuuaccauguucguguuccugguccuccugccccuggugagcucccagugcgugaaccucaccacccgcacgcagcugccgcccgccuacaccaacagcuucacccggggcgucuacuaccccgacaagguguuccgcuccagcgugcugcacuccacccaggaccucuuccugcccuucuucagcaacgucacgugguuccacgccauccacguguccgggaccaacggcaccaagcgguucgacaacccggugcugcccuucaacgacggggucuacuucgcgagcaccgagaaguccaacaucauccgcggcuggaucuucgggacgacccucgacagcaagacccagucccugcugaucgugaacaacgccaccaacguggucaucaaggugugcgaguuccaguucugcaacgaccccuuccucggcguguacuaccacaagaacaacaagagcuggauggaguccgaguuccgggucuacagcuccgccaacaacugcacguucgaguacgugagccagcccuuccugauggaccuggagggcaagcaggggaacuucaagaaccuccgcgaguucguguucaagaacaucgacggcuacuucaagaucuacuccaagcacaccccgaucaaccugguccgggaccugccccagggguucagcgcccucgagccccugguggaccugcccaucggcaucaacaucacccgcuuccagacccuccuggcccugcaccgguccuaccucacgccgggggacagcagcuccggcuggaccgcgggcgccgccgccuacuacgugggguaccugcagccccgcaccuuccugcucaaguacaacgagaacggcaccaucacggacgcggucgacugcgcccuggacccccugagcgagaccaagugcacccucaaguccuucaccguggagaaggggaucuaccagacgagcaacuuccgggugcagcccaccgaguccaucguccgcuucccgaacaucaccaaccugugccccuucggcgagguguucaacgccacccgguucgccagcgucuacgccuggaaccgcaagcggaucuccaacugcguggcggacuacagcgugcuguacaacuccgccagcuucuccacguucaagugcuacggcgucagccccaccaagcucaacgaccugugcuucaccaacguguacgccgacuccuucgugauccgcggggacgagguccggcagaucgcccccggccagaccgggaagaucgccgacuacaacuacaagcugccggacgacuucacgggcugcgugaucgcguggaacagcaacaaccucgacuccaaggucgggggcaacuacaacuaccuguaccgccuguuccgcaagagcaaccucaagcccuucgagcgggacaucuccaccgagaucuaccaggccggcagcacccccugcaacgggguggagggcuucaacugcuacuucccccugcaguccuacggguuccagccgaccaacggcgugggguaccagcccuaccggguggucgugcugagcuucgagcuccugcacgcccccgccacggugugcggccccaagaaguccaccaaccuggucaagaacaagugcgugaacuucaacuucaacggccucaccgggaccggcgugcugaccgagagcaacaagaaguuccugccguuccagcaguucgggcgcgacaucgccgacacgaccgacgcgguccgcgacccccagacccuggagauccucgacaucacccccugcagcuucggcgggguguccgugaucacgccgggcaccaacaccagcaaccaggucgccgugcuguaccaggacgugaacugcaccgagguccccguggccauccacgccgaccagcugacgcccaccuggcggguguacuccaccggcagcaacgucuuccagacccgcgccgggugccucaucggcgcggagcacgugaacaacuccuacgagugcgacauccccaucggggccggcaucugcgccagcuaccagacgcagaccaacuccccgcggcgcgcccggagcguggcgucccagagcaucaucgccuacaccaugucccugggcgccgagaacagcgucgccuacuccaacaacagcaucgccauccccaccaacuucacgaucuccgugaccaccgagauccugcccgugagcaugaccaagacgagcgucgacugcaccauguacaucugcggggacuccaccgagugcagcaaccuccugcugcaguacggcuccuucugcacccagcucaaccgcgcgcugacggggaucgccguggagcaggacaagaacacccaggagguguucgcccaggucaagcagaucuacaagacgcccccgaucaaggacuucggcggguucaacuucagccagauccugcccgaccccuccaagcccagcaagcgguccuucaucgaggaccuccuguucaacaaggugacccuggccgacgccggcuucaucaagcaguacggcgacugccucggggacaucgcggcccgcgaccugaucugcgcccagaaguucaacggccugaccgugcucccgccccugcugaccgacgagaugaucgcccaguacaccagcgcccuccuggcggggaccaucacguccggcuggaccuucggggccggcgccgcccugcagauccccuucgcgaugcagauggccuaccgguucaacggcaucggggucacccagaacgugcucuacgagaaccagaagcugaucgccaaccaguucaacagcgccaucggcaagauccaggacucccugagcuccaccgccagcgcgcucgggaagcugcaggacguggucaaccagaacgcccaggcccugaacacgcucgugaagcagcuguccagcaacuucggcgccaucuccagcgugcugaacgacauccucucccgccuggacaaggucgaggccgaggugcagaucgaccggcugaucaccgggcgccuccagagccugcagaccuacgugacccagcagcugauccgggcggccgagauccgcgccagcgccaaccucgccgcgaccaagauguccgagugcguccugggccagagcaagcggguggacuucugcggcaagggguaccaccugauguccuucccccagagcgccccgcacggcguggucuuccuccacgugacguacguccccgcccaggagaagaacuucaccaccgcccccgcgaucugccacgacgggaaggcccacuucccccgcgagggcguguucguguccaacgggacccacugguucgucacgcagcggaacuucuacgagccgcagaucaucaccaccgacaacaccuucgugagcggcaacugcgacguggucaucggcaucgugaacaacacgguguacgacccccugcagcccgagcuggacuccuucaaggaggagcucgacaaguacuucaagaaccacaccagccccgacgucgaccugggggacaucuccggcaucaacgccagcguggugaacauccagaaggagaucgaccgccugaacgaggucgccaagaaccucaacgagucccugaucgaccugcaggagcucgggaaguacgagcaguacaucaaguggccgugguacaucuggcugggcuucaucgccggccugaucgcgaucgugauggugaccaucaugcucugcugcaugaccagcugcugcuccugccugaaggggugcugcagcugcggcuccugcugcaaguucgacgaggacgacagcgagcccguccugaagggggugaagcuccacuacacgugaggacuaguuauaagacugacuagcccgaugggccucccaacgggcccuccuccccuccuugcaccgagauuaauagaucuaaaaaaaaaaaaaaaaaaaaaaaaaaaaaaaaaaaaaaaaaaaaaaaaaaaaaaaaaaaaaaaaaaaaaaaaaaaaaaaaaaaaaaaaaaaaaaaaaaaa

SEQ ID NO: 25610 - RNA, 4017 nt, Artificial Sequence
  SARS-CoV-2/Wuhan/WIV05/2019__EPI_ISL_402128 spike protein mRNA gc (1-1273)(D614G)
aggagaaagcuuaccauguucguguuccugguccuccugccccuggugagcucccagugcgugaaccucaccacccgcacgcagcugccgcccgccuacaccaacagcuucacccggggcgucuacuaccccgacaagguguuccgcuccagcgugcugcacuccacccaggaccucuuccugcccuucuucagcaacgucacgugguuccacgccauccacguguccgggaccaacggcaccaagcgguucgacaacccggugcugcccuucaacgacggggucuacuucgcgagcaccgagaaguccaacaucauccgcggcuggaucuucgggacgacccucgacagcaagacccagucccugcugaucgugaacaacgccaccaacguggucaucaaggugugcgaguuccaguucugcaacgaccccuuccucggcguguacuaccacaagaacaacaagagcuggauggaguccgaguuccgggucuacagcuccgccaacaacugcacguucgaguacgugagccagcccuuccugauggaccuggagggcaagcaggggaacuucaagaaccuccgcgaguucguguucaagaacaucgacggcuacuucaagaucuacuccaagcacaccccgaucaaccugguccgggaccugccccagggguucagcgcccucgagccccugguggaccugcccaucggcaucaacaucacccgcuuccagacccuccuggcccugcaccgguccuaccucacgccgggggacagcagcuccggcuggaccgcgggcgccgccgccuacuacgugggguaccugcagccccgcaccuuccugcucaaguacaacgagaacggcaccaucacggacgcggucgacugcgcccuggacccccugagcgagaccaagugcacccucaaguccuucaccguggagaaggggaucuaccagacgagcaacuuccgggugcagcccaccgaguccaucguccgcuucccgaacaucaccaaccugugccccuucggcgagguguucaacgccacccgguucgccagcgucuacgccuggaaccgcaagcggaucuccaacugcguggcggacuacagcgugcuguacaacuccgccagcuucuccacguucaagugcuacggcgucagccccaccaagcucaacgaccugugcuucaccaacguguacgccgacuccuucgugauccgcggggacgagguccggcagaucgcccccggccagaccgggaagaucgccgacuacaacuacaagcugccggacgacuucacgggcugcgugaucgcguggaacagcaacaaccucgacuccaaggucgggggcaacuacaacuaccuguaccgccuguuccgcaagagcaaccucaagcccuucgagcgggacaucuccaccgagaucuaccaggccggcagcacccccugcaacgggguggagggcuucaacugcuacuucccccugcaguccuacggguuccagccgaccaacggcgugggguaccagcccuaccggguggucgugcugagcuucgagcuccugcacgcccccgccacggugugcggccccaagaaguccaccaaccuggucaagaacaagugcgugaacuucaacuucaacggccucaccgggaccggcgugcugaccgagagcaacaagaaguuccugccguuccagcaguucgggcgcgacaucgccgacacgaccgacgcgguccgcgacccccagacccuggagauccucgacaucacccccugcagcuucggcgggguguccgugaucacgccgggcaccaacaccagcaaccaggucgccgugcuguaccagggcgugaacugcaccgagguccccguggccauccacgccgaccagcugacgcccaccuggcggguguacuccaccggcagcaacgucuuccagacccgcgccgggugccucaucggcgcggagcacgugaacaacuccuacgagugcgacauccccaucggggccggcaucugcgccagcuaccagacgcagaccaacuccccgcggcgcgcccggagcguggcgucccagagcaucaucgccuacaccaugucccugggcgccgagaacagcgucgccuacuccaacaacagcaucgccauccccaccaacuucacgaucuccgugaccaccgagauccugcccgugagcaugaccaagacgagcgucgacugcaccauguacaucugcggggacuccaccgagugcagcaaccuccugcugcaguacggcuccuucugcacccagcucaaccgcgcgcugacggggaucgccguggagcaggacaagaacacccaggagguguucgcccaggucaagcagaucuacaagacgcccccgaucaaggacuucggcggguucaacuucagccagauccugcccgaccccuccaagcccagcaagcgguccuucaucgaggaccuccuguucaacaaggugacccuggccgacgccggcuucaucaagcaguacggcgacugccucggggacaucgcggcccgcgaccugaucugcgcccagaaguucaacggccugaccgugcucccgccccugcugaccgacgagaugaucgcccaguacaccagcgcccuccuggcggggaccaucacguccggcuggaccuucggggccggcgccgcccugcagauccccuucgcgaugcagauggccuaccgguucaacggcaucggggucacccagaacgugcucuacgagaaccagaagcugaucgccaaccaguucaacagcgccaucggcaagauccaggacucccugagcuccaccgccagcgcgcucgggaagcugcaggacguggucaaccagaacgcccaggcccugaacacgcucgugaagcagcuguccagcaacuucggcgccaucuccagcgugcugaacgacauccucucccgccuggacaaggucgaggccgaggugcagaucgaccggcugaucaccgggcgccuccagagccugcagaccuacgugacccagcagcugauccgggcggccgagauccgcgccagcgccaaccucgccgcgaccaagauguccgagugcguccugggccagagcaagcggguggacuucugcggcaagggguaccaccugauguccuucccccagagcgccccgcacggcguggucuuccuccacgugacguacguccccgcccaggagaagaacuucaccaccgcccccgcgaucugccacgacgggaaggcccacuucccccgcgagggcguguucguguccaacgggacccacugguucgucacgcagcggaacuucuacgagccgcagaucaucaccaccgacaacaccuucgugagcggcaacugcgacguggucaucggcaucgugaacaacacgguguacgacccccugcagcccgagcuggacuccuucaaggaggagcucgacaaguacuucaagaaccacaccagccccgacgucgaccugggggacaucuccggcaucaacgccagcguggugaacauccagaaggagaucgaccgccugaacgaggucgccaagaaccucaacgagucccugaucgaccugcaggagcucgggaaguacgagcaguacaucaaguggccgugguacaucuggcugggcuucaucgccggccugaucgcgaucgugauggugaccaucaugcucugcugcaugaccagcugcugcuccugccugaaggggugcugcagcugcggcuccugcugcaaguucgacgaggacgacagcgagcccguccugaagggggugaagcuccacuacacgugaggacuaguuauaagacugacuagcccgaugggccucccaacgggcccuccuccccuccuugcaccgagauuaauagaucuaaaaaaaaaaaaaaaaaaaaaaaaaaaaaaaaaaaaaaaaaaaaaaaaaaaaaaaaaaaaaaaaaaaaaaaaaaaaaaaaaaaaaaaaaaaaaaaaaaaa

SEQ ID NO: 25611 - RNA, 4017 nt, Artificial Sequence
  SARS-CoV-2/Wuhan/WIV05/2019__EPI_ISL_402128 spike protein mRNA gc (1-1273)(A222V_D614G)
aggagaaagcuuaccauguucguguuccugguccuccugccccuggugagcucccagugcgugaaccucaccacccgcacgcagcugccgcccgccuacaccaacagcuucacccggggcgucuacuaccccgacaagguguuccgcuccagcgugcugcacuccacccaggaccucuuccugcccuucuucagcaacgucacgugguuccacgccauccacguguccgggaccaacggcaccaagcgguucgacaacccggugcugcccuucaacgacggggucuacuucgcgagcaccgagaaguccaacaucauccgcggcuggaucuucgggacgacccucgacagcaagacccagucccugcugaucgugaacaacgccaccaacguggucaucaaggugugcgaguuccaguucugcaacgaccccuuccucggcguguacuaccacaagaacaacaagagcuggauggaguccgaguuccgggucuacagcuccgccaacaacugcacguucgaguacgugagccagcccuuccugauggaccuggagggcaagcaggggaacuucaagaaccuccgcgaguucguguucaagaacaucgacggcuacuucaagaucuacuccaagcacaccccgaucaaccugguccgggaccugccccagggguucagcguccucgagccccugguggaccugcccaucggcaucaacaucacccgcuuccagacccuccuggcccugcaccgguccuaccucacgccgggggacagcagcuccggcuggaccgcgggcgccgccgccuacuacgugggguaccugcagccccgcaccuuccugcucaaguacaacgagaacggcaccaucacggacgcggucgacugcgcccuggacccccugagcgagaccaagugcacccucaaguccuucaccguggagaaggggaucuaccagacgagcaacuuccgggugcagcccaccgaguccaucguccgcuucccgaacaucaccaaccugugccccuucggcgagguguucaacgccacccgguucgccagcgucuacgccuggaaccgcaagcggaucuccaacugcguggcggacuacagcgugcuguacaacuccgccagcuucuccacguucaagugcuacggcgucagccccaccaagcucaacgaccugugcuucaccaacguguacgccgacuccuucgugauccgcggggacgagguccggcagaucgcccccggccagaccgggaagaucgccgacuacaacuacaagcugccggacgacuucacgggcugcgugaucgcguggaacagcaacaaccucgacuccaaggucgggggcaacuacaacuaccuguaccgccuguuccgcaagagcaaccucaagcccuucgagcgggacaucuccaccgagaucuaccaggccggcagcacccccugcaacgggguggagggcuucaacugcuacuucccccugcaguccuacggguuccagccgaccaacggcgugggguaccagcccuaccggguggucgugcugagcuucgagcuccugcacgcccccgccacggugugcggccccaagaaguccaccaaccuggucaagaacaagugcgugaacuucaacuucaacggccucaccgggaccggcgugcugaccgagagcaacaagaaguuccugccguuccagcaguucgggcgcgacaucgccgacacgaccgacgcgguccgcgacccccagacccuggagauccucgacaucacccccugcagcuucggcgggguguccgugaucacgccgggcaccaacaccagcaaccaggucgccgugcuguaccagggcgugaacugcaccgagguccccguggccauccacgccgaccagcugacgcccaccuggcggguguacuccaccggcagcaacgucuuccagacccgcgccgggugccucaucggcgcggagcacgugaacaacuccuacgagugcgacauccccaucggggccggcaucugcgccagcuaccagacgcagaccaacuccccgcggcgcgcccggagcguggcgucccagagcaucaucgccuacaccaugucccugggcgccgagaacagcgucgccuacuccaacaacagcaucgccauccccaccaacuucacgaucuccgugaccaccgagauccugcccgugagcaugaccaagacgagcgucgacugcaccauguacaucugcggggacuccaccgagugcagcaaccuccugcugcaguacggcuccuucugcacccagcucaaccgcgcgcugacggggaucgccguggagcaggacaagaacacccaggagguguucgcccaggucaagcagaucuacaagacgcccccgaucaaggacuucggcggguucaacuucagccagauccugcccgaccccuccaagcccagcaagcgguccuucaucgaggaccuccuguucaacaaggugacccuggccgacgccggcuucaucaagcaguacggcgacugccucggggacaucgcggcccgcgaccugaucugcgcccagaaguucaacggccugaccgugcucccgccccugcugaccgacgagaugaucgcccaguacaccagcgcccuccuggcggggaccaucacguccggcuggaccuucggggccggcgccgcccugcagauccccuucgcgaugcagauggccuaccgguucaacggcaucggggucacccagaacgugcucuacgagaaccagaagcugaucgccaaccaguucaacagcgccaucggcaagauccaggacucccugagcuccaccgccagcgcgcucgggaagcugcaggacguggucaaccagaacgcccaggcccugaacacgcucgugaagcagcuguccagcaacuucggcgccaucuccagcgugcugaacgacauccucucccgccuggacaaggucgaggccgaggugcagaucgaccggcugaucaccgggcgccuccagagccugcagaccuacgugacccagcagcugauccgggcggccgagauccgcgccagcgccaaccucgccgcgaccaagauguccgagugcguccugggccagagcaagcggguggacuucugcggcaagggguaccaccugauguccuucccccagagcgccccgcacggcguggucuuccuccacgugacguacguccccgcccaggagaagaacuucaccaccgcccccgcgaucugccacgacgggaaggcccacuucccccgcgagggcguguucguguccaacgggacccacugguucgucacgcagcggaacuucuacgagccgcagaucaucaccaccgacaacaccuucgugagcggcaacugcgacguggucaucggcaucgugaacaacacgguguacgacccccugcagcccgagcuggacuccuucaaggaggagcucgacaaguacuucaagaaccacaccagccccgacgucgaccugggggacaucuccggcaucaacgccagcguggugaacauccagaaggagaucgaccgccugaacgaggucgccaagaaccucaacgagucccugaucgaccugcaggagcucgggaaguacgagcaguacaucaaguggccgugguacaucuggcugggcuucaucgccggccugaucgcgaucgugauggugaccaucaugcucugcugcaugaccagcugcugcuccugccugaaggggugcugcagcugcggcuccugcugcaaguucgacgaggacgacagcgagcccguccugaagggggugaagcuccacuacacgugaggacuaguuauaagacugacuagcccgaugggccucccaacgggcccuccuccccuccuugcaccgagauuaauagaucuaaaaaaaaaaaaaaaaaaaaaaaaaaaaaaaaaaaaaaaaaaaaaaaaaaaaaaaaaaaaaaaaaaaaaaaaaaaaaaaaaaaaaaaaaaaaaaaaaaaa

SEQ ID NO: 25612 - RNA, 4017 nt, Artificial Sequence
  SARS-CoV-2/Wuhan/WIV05/2019__EPI_ISL_402128 spike protein mRNA gc (1-1273)(N439K_D614G)
aggagaaagcuuaccauguucguguuccugguccuccugccccuggugagcucccagugcgugaaccucaccacccgcacgcagcugccgcccgccuacaccaacagcuucacccggggcgucuacuaccccgacaagguguuccgcuccagcgugcugcacuccacccaggaccucuuccugcccuucuucagcaacgucacgugguuccacgccauccacguguccgggaccaacggcaccaagcgguucgacaacccggugcugcccuucaacgacggggucuacuucgcgagcaccgagaaguccaacaucauccgcggcuggaucuucgggacgacccucgacagcaagacccagucccugcugaucgugaacaacgccaccaacguggucaucaaggugugcgaguuccaguucugcaacgaccccuuccucggcguguacuaccacaagaacaacaagagcuggauggaguccgaguuccgggucuacagcuccgccaacaacugcacguucgaguacgugagccagcccuuccugauggaccuggagggcaagcaggggaacuucaagaaccuccgcgaguucguguucaagaacaucgacggcuacuucaagaucuacuccaagcacaccccgaucaaccugguccgggaccugccccagggguucagcgcccucgagccccugguggaccugcccaucggcaucaacaucacccgcuuccagacccuccuggcccugcaccgguccuaccucacgccgggggacagcagcuccggcuggaccgcgggcgccgccgccuacuacgugggguaccugcagccccgcaccuuccugcucaaguacaacgagaacggcaccaucacggacgcggucgacugcgcccuggacccccugagcgagaccaagugcacccucaaguccuucaccguggagaaggggaucuaccagacgagcaacuuccgggugcagcccaccgaguccaucguccgcuucccgaacaucaccaaccugugccccuucggcgagguguucaacgccacccgguucgccagcgucuacgccuggaaccgcaagcggaucuccaacugcguggcggacuacagcgugcuguacaacuccgccagcuucuccacguucaagugcuacggcgucagccccaccaagcucaacgaccugugcuucaccaacguguacgccgacuccuucgugauccgcggggacgagguccggcagaucgcccccggccagaccgggaagaucgccgacuacaacuacaagcugccggacgacuucacgggcugcgugaucgcguggaacagcaagaaccucgacuccaaggucgggggcaacuacaacuaccuguaccgccuguuccgcaagagcaaccucaagcccuucgagcgggacaucuccaccgagaucuaccaggccggcagcacccccugcaacgggguggagggcuucaacugcuacuucccccugcaguccuacggguuccagccgaccaacggcgugggguaccagcccuaccggguggucgugcugagcuucgagcuccugcacgcccccgccacggugugcggccccaagaaguccaccaaccuggucaagaacaagugcgugaacuucaacuucaacggccucaccgggaccggcgugcugaccgagagcaacaagaaguuccugccguuccagcaguucgggcgcgacaucgccgacacgaccgacgcgguccgcgacccccagacccuggagauccucgacaucacccccugcagcuucggcgggguguccgugaucacgccgggcaccaacaccagcaaccaggucgccgugcuguaccagggcgugaacugcaccgagguccccguggccauccacgccgaccagcugacgcccaccuggcggguguacuccaccggcagcaacgucuuccagacccgcgccgggugccucaucggcgcggagcacgugaacaacuccuacgagugcgacauccccaucggggccggcaucugcgccagcuaccagacgcagaccaacuccccgcggcgcgcccggagcguggcgucccagagcaucaucgccuacaccaugucccugggcgccgagaacagcgucgccuacuccaacaacagcaucgccauccccaccaacuucacgaucuccgugaccaccgagauccugcccgugagcaugaccaagacgagcgucgacugcaccauguacaucugcggggacuccaccgagugcagcaaccuccugcugcaguacggcuccuucugcacccagcucaaccgcgcgcugacggggaucgccguggagcaggacaagaacacccaggagguguucgcccaggucaagcagaucuacaagacgcccccgaucaaggacuucggcggguucaacuucagccagauccugcccgaccccuccaagcccagcaagcgguccuucaucgaggaccuccuguucaacaaggugacccuggccgacgccggcuucaucaagcaguacggcgacugccucggggacaucgcggcccgcgaccugaucugcgcccagaaguucaacggccugaccgugcucccgccccugcugaccgacgagaugaucgcccaguacaccagcgcccuccuggcggggaccaucacguccggcuggaccuucggggccggcgccgcccugcagauccccuucgcgaugcagauggccuaccgguucaacggcaucggggucacccagaacgugcucuacgagaaccagaagcugaucgccaaccaguucaacagcgccaucggcaagauccaggacucccugagcuccaccgccagcgcgcucgggaagcugcaggacguggucaaccagaacgcccaggcccugaacacgcucgugaagcagcuguccagcaacuucggcgccaucuccagcgugcugaacgacauccucucccgccuggacaaggucgaggccgaggugcagaucgaccggcugaucaccgggcgccuccagagccugcagaccuacgugacccagcagcugauccgggcggccgagauccgcgccagcgccaaccucgccgcgaccaagauguccgagugcguccugggccagagcaagcggguggacuucugcggcaagggguaccaccugauguccuucccccagagcgccccgcacggcguggucuuccuccacgugacguacguccccgcccaggagaagaacuucaccaccgcccccgcgaucugccacgacgggaaggcccacuucccccgcgagggcguguucguguccaacgggacccacugguucgucacgcagcggaacuucuacgagccgcagaucaucaccaccgacaacaccuucgugagcggcaacugcgacguggucaucggcaucgugaacaacacgguguacgacccccugcagcccgagcuggacuccuucaaggaggagcucgacaaguacuucaagaaccacaccagccccgacgucgaccugggggacaucuccggcaucaacgccagcguggugaacauccagaaggagaucgaccgccugaacgaggucgccaagaaccucaacgagucccugaucgaccugcaggagcucgggaaguacgagcaguacaucaaguggccgugguacaucuggcugggcuucaucgccggccugaucgcgaucgugauggugaccaucaugcucugcugcaugaccagcugcugcuccugccugaaggggugcugcagcugcggcuccugcugcaaguucgacgaggacgacagcgagcccguccugaagggggugaagcuccacuacacgugaggacuaguuauaagacugacuagcccgaugggccucccaacgggcccuccuccccuccuugcaccgagauuaauagaucuaaaaaaaaaaaaaaaaaaaaaaaaaaaaaaaaaaaaaaaaaaaaaaaaaaaaaaaaaaaaaaaaaaaaaaaaaaaaaaaaaaaaaaaaaaaaaaaaaaaa

SEQ ID NO: 25613 - RNA, 4017 nt, Artificial Sequence
  SARS-CoV-2/Wuhan/WIV05/2019__EPI_ISL_402128 spike protein mRNA gc (1-1273)(S477N_D614G)
aggagaaagcuuaccauguucguguuccugguccuccugccccuggugagcucccagugcgugaaccucaccacccgcacgcagcugccgcccgccuacaccaacagcuucacccggggcgucuacuaccccgacaagguguuccgcuccagcgugcugcacuccacccaggaccucuuccugcccuucuucagcaacgucacgugguuccacgccauccacguguccgggaccaacggcaccaagcgguucgacaacccggugcugcccuucaacgacggggucuacuucgcgagcaccgagaaguccaacaucauccgcggcuggaucuucgggacgacccucgacagcaagacccagucccugcugaucgugaacaacgccaccaacguggucaucaaggugugcgaguuccaguucugcaacgaccccuuccucggcguguacuaccacaagaacaacaagagcuggauggaguccgaguuccgggucuacagcuccgccaacaacugcacguucgaguacgugagccagcccuuccugauggaccuggagggcaagcaggggaacuucaagaaccuccgcgaguucguguucaagaacaucgacggcuacuucaagaucuacuccaagcacaccccgaucaaccugguccgggaccugccccagggguucagcgcccucgagccccugguggaccugcccaucggcaucaacaucacccgcuuccagacccuccuggcccugcaccgguccuaccucacgccgggggacagcagcuccggcuggaccgcgggcgccgccgccuacuacgugggguaccugcagccccgcaccuuccugcucaaguacaacgagaacggcaccaucacggacgcggucgacugcgcccuggacccccugagcgagaccaagugcacccucaaguccuucaccguggagaaggggaucuaccagacgagcaacuuccgggugcagcccaccgaguccaucguccgcuucccgaacaucaccaaccugugccccuucggcgagguguucaacgccacccgguucgccagcgucuacgccuggaaccgcaagcggaucuccaacugcguggcggacuacagcgugcuguacaacuccgccagcuucuccacguucaagugcuacggcgucagccccaccaagcucaacgaccugugcuucaccaacguguacgccgacuccuucgugauccgcggggacgagguccggcagaucgcccccggccagaccgggaagaucgccgacuacaacuacaagcugccggacgacuucacgggcugcgugaucgcguggaacagcaacaaccucgacuccaaggucgggggcaacuacaacuaccuguaccgccuguuccgcaagagcaaccucaagcccuucgagcgggacaucuccaccgagaucuaccaggccggcaacacccccugcaacgggguggagggcuucaacugcuacuucccccugcaguccuacggguuccagccgaccaacggcgugggguaccagcccuaccggguggucgugcugagcuucgagcuccugcacgcccccgccacggugugcggccccaagaaguccaccaaccuggucaagaacaagugcgugaacuucaacuucaacggccucaccgggaccggcgugcugaccgagagcaacaagaaguuccugccguuccagcaguucgggcgcgacaucgccgacacgaccgacgcgguccgcgacccccagacccuggagauccucgacaucacccccugcagcuucggcgggguguccgugaucacgccgggcaccaacaccagcaaccaggucgccgugcuguaccagggcgugaacugcaccgagguccccguggccauccacgccgaccagcugacgcccaccuggcggguguacuccaccggcagcaacgucuuccagacccgcgccgggugccucaucggcgcggagcacgugaacaacuccuacgagugcgacauccccaucggggccggcaucugcgccagcuaccagacgcagaccaacuccccgcggcgcgcccggagcguggcgucccagagcaucaucgccuacaccaugucccugggcgccgagaacagcgucgccuacuccaacaacagcaucgccauccccaccaacuucacgaucuccgugaccaccgagauccugcccgugagcaugaccaagacgagcgucgacugcaccauguacaucugcggggacuccaccgagugcagcaaccuccugcugcaguacggcuccuucugcacccagcucaaccgcgcgcugacggggaucgccguggagcaggacaagaacacccaggagguguucgcccaggucaagcagaucuacaagacgcccccgaucaaggacuucggcggguucaacuucagccagauccugcccgaccccuccaagcccagcaagcgguccuucaucgaggaccuccuguucaacaaggugacccuggccgacgccggcuucaucaagcaguacggcgacugccucggggacaucgcggcccgcgaccugaucugcgcccagaaguucaacggccugaccgugcucccgccccugcugaccgacgagaugaucgcccaguacaccagcgcccuccuggcggggaccaucacguccggcuggaccuucggggccggcgccgcccugcagauccccuucgcgaugcagauggccuaccgguucaacggcaucggggucacccagaacgugcucuacgagaaccagaagcugaucgccaaccaguucaacagcgccaucggcaagauccaggacucccugagcuccaccgccagcgcgcucgggaagcugcaggacguggucaaccagaacgcccaggcccugaacacgcucgugaagcagcuguccagcaacuucggcgccaucuccagcgugcugaacgacauccucucccgccuggacaaggucgaggccgaggugcagaucgaccggcugaucaccgggcgccuccagagccugcagaccuacgugacccagcagcugauccgggcggccgagauccgcgccagcgccaaccucgccgcgaccaagauguccgagugcguccugggccagagcaagcggguggacuucugcggcaagggguaccaccugauguccuucccccagagcgccccgcacggcguggucuuccuccacgugacguacguccccgcccaggagaagaacuucaccaccgcccccgcgaucugccacgacgggaaggcccacuucccccgcgagggcguguucguguccaacgggacccacugguucgucacgcagcggaacuucuacgagccgcagaucaucaccaccgacaacaccuucgugagcggcaacugcgacguggucaucggcaucgugaacaacacgguguacgacccccugcagcccgagcuggacuccuucaaggaggagcucgacaaguacuucaagaaccacaccagccccgacgucgaccugggggacaucuccggcaucaacgccagcguggugaacauccagaaggagaucgaccgccugaacgaggucgccaagaaccucaacgagucccugaucgaccugcaggagcucgggaaguacgagcaguacaucaaguggccgugguacaucuggcugggcuucaucgccggccugaucgcgaucgugauggugaccaucaugcucugcugcaugaccagcugcugcuccugccugaaggggugcugcagcugcggcuccugcugcaaguucgacgaggacgacagcgagcccguccugaagggggugaagcuccacuacacgugaggacuaguuauaagacugacuagcccgaugggccucccaacgggcccuccuccccuccuugcaccgagauuaauagaucuaaaaaaaaaaaaaaaaaaaaaaaaaaaaaaaaaaaaaaaaaaaaaaaaaaaaaaaaaaaaaaaaaaaaaaaaaaaaaaaaaaaaaaaaaaaaaaaaaaaa

SEQ ID NO: 25614 - RNA, 4017 nt, Artificial Sequence
  SARS-CoV-2/Wuhan/WIV05/2019__EPI_ISL_402128 spike protein mRNA gc (1-1273)(N501Y_D614G)
aggagaaagcuuaccauguucguguuccugguccuccugccccuggugagcucccagugcgugaaccucaccacccgcacgcagcugccgcccgccuacaccaacagcuucacccggggcgucuacuaccccgacaagguguuccgcuccagcgugcugcacuccacccaggaccucuuccugcccuucuucagcaacgucacgugguuccacgccauccacguguccgggaccaacggcaccaagcgguucgacaacccggugcugcccuucaacgacggggucuacuucgcgagcaccgagaaguccaacaucauccgcggcuggaucuucgggacgacccucgacagcaagacccagucccugcugaucgugaacaacgccaccaacguggucaucaaggugugcgaguuccaguucugcaacgaccccuuccucggcguguacuaccacaagaacaacaagagcuggauggaguccgaguuccgggucuacagcuccgccaacaacugcacguucgaguacgugagccagcccuuccugauggaccuggagggcaagcaggggaacuucaagaaccuccgcgaguucguguucaagaacaucgacggcuacuucaagaucuacuccaagcacaccccgaucaaccugguccgggaccugccccagggguucagcgcccucgagccccugguggaccugcccaucggcaucaacaucacccgcuuccagacccuccuggcccugcaccgguccuaccucacgccgggggacagcagcuccggcuggaccgcgggcgccgccgccuacuacgugggguaccugcagccccgcaccuuccugcucaaguacaacgagaacggcaccaucacggacgcggucgacugcgcccuggacccccugagcgagaccaagugcacccucaaguccuucaccguggagaaggggaucuaccagacgagcaacuuccgggugcagcccaccgaguccaucguccgcuucccgaacaucaccaaccugugccccuucggcgagguguucaacgccacccgguucgccagcgucuacgccuggaaccgcaagcggaucuccaacugcguggcggacuacagcgugcuguacaacuccgccagcuucuccacguucaagugcuacggcgucagccccaccaagcucaacgaccugugcuucaccaacguguacgccgacuccuucgugauccgcggggacgagguccggcagaucgcccccggccagaccgggaagaucgccgacuacaacuacaagcugccggacgacuucacgggcugcgugaucgcguggaacagcaacaaccucgacuccaaggucgggggcaacuacaacuaccuguaccgccuguuccgcaagagcaaccucaagcccuucgagcgggacaucuccaccgagaucuaccaggccggcagcacccccugcaacgggguggagggcuucaacugcuacuucccccugcaguccuacggguuccagccgaccuacggcgugggguaccagcccuaccggguggucgugcugagcuucgagcuccugcacgcccccgccacggugugcggccccaagaaguccaccaaccuggucaagaacaagugcgugaacuucaacuucaacggccucaccgggaccggcgugcugaccgagagcaacaagaaguuccugccguuccagcaguucgggcgcgacaucgccgacacgaccgacgcgguccgcgacccccagacccuggagauccucgacaucacccccugcagcuucggcgggguguccgugaucacgccgggcaccaacaccagcaaccaggucgccgugcuguaccagggcgugaacugcaccgagguccccguggccauccacgccgaccagcugacgcccaccuggcggguguacuccaccggcagcaacgucuuccagacccgcgccgggugccucaucggcgcggagcacgugaacaacuccuacgagugcgacauccccaucggggccggcaucugcgccagcuaccagacgcagaccaacuccccgcggcgcgcccggagcguggcgucccagagcaucaucgccuacaccaugucccugggcgccgagaacagcgucgccuacuccaacaacagcaucgccauccccaccaacuucacgaucuccgugaccaccgagauccugcccgugagcaugaccaagacgagcgucgacugcaccauguacaucugcggggacuccaccgagugcagcaaccuccugcugcaguacggcuccuucugcacccagcucaaccgcgcgcugacggggaucgccguggagcaggacaagaacacccaggagguguucgcccaggucaagcagaucuacaagacgcccccgaucaaggacuucggcggguucaacuucagccagauccugcccgaccccuccaagcccagcaagcgguccuucaucgaggaccuccuguucaacaaggugacccuggccgacgccggcuucaucaagcaguacggcgacugccucggggacaucgcggcccgcgaccugaucugcgcccagaaguucaacggccugaccgugcucccgccccugcugaccgacgagaugaucgcccaguacaccagcgcccuccuggcggggaccaucacguccggcuggaccuucggggccggcgccgcccugcagauccccuucgcgaugcagauggccuaccgguucaacggcaucggggucacccagaacgugcucuacgagaaccagaagcugaucgccaaccaguucaacagcgccaucggcaagauccaggacucccugagcuccaccgccagcgcgcucgggaagcugcaggacguggucaaccagaacgcccaggcccugaacacgcucgugaagcagcuguccagcaacuucggcgccaucuccagcgugcugaacgacauccucucccgccuggacaaggucgaggccgaggugcagaucgaccggcugaucaccgggcgccuccagagccugcagaccuacgugacccagcagcugauccgggcggccgagauccgcgccagcgccaaccucgccgcgaccaagauguccgagugcguccugggccagagcaagcggguggacuucugcggcaagggguaccaccugauguccuucccccagagcgccccgcacggcguggucuuccuccacgugacguacguccccgcccaggagaagaacuucaccaccgcccccgcgaucugccacgacgggaaggcccacuucccccgcgagggcguguucguguccaacgggacccacugguucgucacgcagcggaacuucuacgagccgcagaucaucaccaccgacaacaccuucgugagcggcaacugcgacguggucaucggcaucgugaacaacacgguguacgacccccugcagcccgagcuggacuccuucaaggaggagcucgacaaguacuucaagaaccacaccagccccgacgucgaccugggggacaucuccggcaucaacgccagcguggugaacauccagaaggagaucgaccgccugaacgaggucgccaagaaccucaacgagucccugaucgaccugcaggagcucgggaaguacgagcaguacaucaaguggccgugguacaucuggcugggcuucaucgccggccugaucgcgaucgugauggugaccaucaugcucugcugcaugaccagcugcugcuccugccugaaggggugcugcagcugcggcuccugcugcaaguucgacgaggacgacagcgagcccguccugaagggggugaagcuccacuacacgugaggacuaguuauaagacugacuagcccgaugggccucccaacgggcccuccuccccuccuugcaccgagauuaauagaucuaaaaaaaaaaaaaaaaaaaaaaaaaaaaaaaaaaaaaaaaaaaaaaaaaaaaaaaaaaaaaaaaaaaaaaaaaaaaaaaaaaaaaaaaaaaaaaaaaaaa

SEQ ID NO: 25615 - RNA, 4011 nt, Artificial Sequence
  SARS-CoV-2/Wuhan/WIV05/2019__EPI_ISL_402128 spike protein mRNA gc (1-1273)(H69del_V70del_D614G)
aggagaaagcuuaccauguucguguuccugguccuccugccccuggugagcucccagugcgugaaccucaccacccgcacgcagcugccgcccgccuacaccaacagcuucacccggggcgucuacuaccccgacaagguguuccgcuccagcgugcugcacuccacccaggaccucuuccugcccuucuucagcaacgucacgugguuccacgccaucuccgggaccaacggcaccaagcgguucgacaacccggugcugcccuucaacgacggggucuacuucgcgagcaccgagaaguccaacaucauccgcggcuggaucuucgggacgacccucgacagcaagacccagucccugcugaucgugaacaacgccaccaacguggucaucaaggugugcgaguuccaguucugcaacgaccccuuccucggcguguacuaccacaagaacaacaagagcuggauggaguccgaguuccgggucuacagcuccgccaacaacugcacguucgaguacgugagccagcccuuccugauggaccuggagggcaagcaggggaacuucaagaaccuccgcgaguucguguucaagaacaucgacggcuacuucaagaucuacuccaagcacaccccgaucaaccugguccgggaccugccccagggguucagcgcccucgagccccugguggaccugcccaucggcaucaacaucacccgcuuccagacccuccuggcccugcaccgguccuaccucacgccgggggacagcagcuccggcuggaccgcgggcgccgccgccuacuacgugggguaccugcagccccgcaccuuccugcucaaguacaacgagaacggcaccaucacggacgcggucgacugcgcccuggacccccugagcgagaccaagugcacccucaaguccuucaccguggagaaggggaucuaccagacgagcaacuuccgggugcagcccaccgaguccaucguccgcuucccgaacaucaccaaccugugccccuucggcgagguguucaacgccacccgguucgccagcgucuacgccuggaaccgcaagcggaucuccaacugcguggcggacuacagcgugcuguacaacuccgccagcuucuccacguucaagugcuacggcgucagccccaccaagcucaacgaccugugcuucaccaacguguacgccgacuccuucgugauccgcggggacgagguccggcagaucgcccccggccagaccgggaagaucgccgacuacaacuacaagcugccggacgacuucacgggcugcgugaucgcguggaacagcaacaaccucgacuccaaggucgggggcaacuacaacuaccuguaccgccuguuccgcaagagcaaccucaagcccuucgagcgggacaucuccaccgagaucuaccaggccggcagcacccccugcaacgggguggagggcuucaacugcuacuucccccugcaguccuacggguuccagccgaccaacggcgugggguaccagcccuaccggguggucgugcugagcuucgagcuccugcacgcccccgccacggugugcggccccaagaaguccaccaaccuggucaagaacaagugcgugaacuucaacuucaacggccucaccgggaccggcgugcugaccgagagcaacaagaaguuccugccguuccagcaguucgggcgcgacaucgccgacacgaccgacgcgguccgcgacccccagacccuggagauccucgacaucacccccugcagcuucggcgggguguccgugaucacgccgggcaccaacaccagcaaccaggucgccgugcuguaccagggcgugaacugcaccgagguccccguggccauccacgccgaccagcugacgcccaccuggcggguguacuccaccggcagcaacgucuuccagacccgcgccgggugccucaucggcgcggagcacgugaacaacuccuacgagugcgacauccccaucggggccggcaucugcgccagcuaccagacgcagaccaacuccccgcggcgcgcccggagcguggcgucccagagcaucaucgccuacaccaugucccugggcgccgagaacagcgucgccuacuccaacaacagcaucgccauccccaccaacuucacgaucuccgugaccaccgagauccugcccgugagcaugaccaagacgagcgucgacugcaccauguacaucugcggggacuccaccgagugcagcaaccuccugcugcaguacggcuccuucugcacccagcucaaccgcgcgcugacggggaucgccguggagcaggacaagaacacccaggagguguucgcccaggucaagcagaucuacaagacgcccccgaucaaggacuucggcggguucaacuucagccagauccugcccgaccccuccaagcccagcaagcgguccuucaucgaggaccuccuguucaacaaggugacccuggccgacgccggcuucaucaagcaguacggcgacugccucggggacaucgcggcccgcgaccugaucugcgcccagaaguucaacggccugaccgugcucccgccccugcugaccgacgagaugaucgcccaguacaccagcgcccuccuggcggggaccaucacguccggcuggaccuucggggccggcgccgcccugcagauccccuucgcgaugcagauggccuaccgguucaacggcaucggggucacccagaacgugcucuacgagaaccagaagcugaucgccaaccaguucaacagcgccaucggcaagauccaggacucccugagcuccaccgccagcgcgcucgggaagcugcaggacguggucaaccagaacgcccaggcccugaacacgcucgugaagcagcuguccagcaacuucggcgccaucuccagcgugcugaacgacauccucucccgccuggacaaggucgaggccgaggugcagaucgaccggcugaucaccgggcgccuccagagccugcagaccuacgugacccagcagcugauccgggcggccgagauccgcgccagcgccaaccucgccgcgaccaagauguccgagugcguccugggccagagcaagcggguggacuucugcggcaagggguaccaccugauguccuucccccagagcgccccgcacggcguggucuuccuccacgugacguacguccccgcccaggagaagaacuucaccaccgcccccgcgaucugccacgacgggaaggcccacuucccccgcgagggcguguucguguccaacgggacccacugguucgucacgcagcggaacuucuacgagccgcagaucaucaccaccgacaacaccuucgugagcggcaacugcgacguggucaucggcaucgugaacaacacgguguacgacccccugcagcccgagcuggacuccuucaaggaggagcucgacaaguacuucaagaaccacaccagccccgacgucgaccugggggacaucuccggcaucaacgccagcguggugaacauccagaaggagaucgaccgccugaacgaggucgccaagaaccucaacgagucccugaucgaccugcaggagcucgggaaguacgagcaguacaucaaguggccgugguacaucuggcugggcuucaucgccggccugaucgcgaucgugauggugaccaucaugcucugcugcaugaccagcugcugcuccugccugaaggggugcugcagcugcggcuccugcugcaaguucgacgaggacgacagcgagcccguccugaagggggugaagcuccacuacacgugaggacuaguuauaagacugacuagcccgaugggccucccaacgggcccuccuccccuccuugcaccgagauuaauagaucuaaaaaaaaaaaaaaaaaaaaaaaaaaaaaaaaaaaaaaaaaaaaaaaaaaaaaaaaaaaaaaaaaaaaaaaaaaaaaaaaaaaaaaaaaaaaaaaaaaaa

SEQ ID NO: 25616 - RNA, 4017 nt, Artificial Sequence
  SARS-CoV-2/Wuhan/WIV05/2019__EPI_ISL_402128 spike protein mRNA gc (1-1273)(Y453F_D614G)
aggagaaagcuuaccauguucguguuccugguccuccugccccuggugagcucccagugcgugaaccucaccacccgcacgcagcugccgcccgccuacaccaacagcuucacccggggcgucuacuaccccgacaagguguuccgcuccagcgugcugcacuccacccaggaccucuuccugcccuucuucagcaacgucacgugguuccacgccauccacguguccgggaccaacggcaccaagcgguucgacaacccggugcugcccuucaacgacggggucuacuucgcgagcaccgagaaguccaacaucauccgcggcuggaucuucgggacgacccucgacagcaagacccagucccugcugaucgugaacaacgccaccaacguggucaucaaggugugcgaguuccaguucugcaacgaccccuuccucggcguguacuaccacaagaacaacaagagcuggauggaguccgaguuccgggucuacagcuccgccaacaacugcacguucgaguacgugagccagcccuuccugauggaccuggagggcaagcaggggaacuucaagaaccuccgcgaguucguguucaagaacaucgacggcuacuucaagaucuacuccaagcacaccccgaucaaccugguccgggaccugccccagggguucagcgcccucgagccccugguggaccugcccaucggcaucaacaucacccgcuuccagacccuccuggcccugcaccgguccuaccucacgccgggggacagcagcuccggcuggaccgcgggcgccgccgccuacuacgugggguaccugcagccccgcaccuuccugcucaaguacaacgagaacggcaccaucacggacgcggucgacugcgcccuggacccccugagcgagaccaagugcacccucaaguccuucaccguggagaaggggaucuaccagacgagcaacuuccgggugcagcccaccgaguccaucguccgcuucccgaacaucaccaaccugugccccuucggcgagguguucaacgccacccgguucgccagcgucuacgccuggaaccgcaagcggaucuccaacugcguggcggacuacagcgugcuguacaacuccgccagcuucuccacguucaagugcuacggcgucagccccaccaagcucaacgaccugugcuucaccaacguguacgccgacuccuucgugauccgcggggacgagguccggcagaucgcccccggccagaccgggaagaucgccgacuacaacuacaagcugccggacgacuucacgggcugcgugaucgcguggaacagcaacaaccucgacuccaaggucgggggcaacuacaacuaccuguuccgccuguuccgcaagagcaaccucaagcccuucgagcgggacaucuccaccgagaucuaccaggccggcagcacccccugcaacgggguggagggcuucaacugcuacuucccccugcaguccuacggguuccagccgaccaacggcgugggguaccagcccuaccggguggucgugcugagcuucgagcuccugcacgcccccgccacggugugcggccccaagaaguccaccaaccuggucaagaacaagugcgugaacuucaacuucaacggccucaccgggaccggcgugcugaccgagagcaacaagaaguuccugccguuccagcaguucgggcgcgacaucgccgacacgaccgacgcgguccgcgacccccagacccuggagauccucgacaucacccccugcagcuucggcgggguguccgugaucacgccgggcaccaacaccagcaaccaggucgccgugcuguaccagggcgugaacugcaccgagguccccguggccauccacgccgaccagcugacgcccaccuggcggguguacuccaccggcagcaacgucuuccagacccgcgccgggugccucaucggcgcggagcacgugaacaacuccuacgagugcgacauccccaucggggccggcaucugcgccagcuaccagacgcagaccaacuccccgcggcgcgcccggagcguggcgucccagagcaucaucgccuacaccaugucccugggcgccgagaacagcgucgccuacuccaacaacagcaucgccauccccaccaacuucacgaucuccgugaccaccgagauccugcccgugagcaugaccaagacgagcgucgacugcaccauguacaucugcggggacuccaccgagugcagcaaccuccugcugcaguacggcuccuucugcacccagcucaaccgcgcgcugacggggaucgccguggagcaggacaagaacacccaggagguguucgcccaggucaagcagaucuacaagacgcccccgaucaaggacuucggcggguucaacuucagccagauccugcccgaccccuccaagcccagcaagcgguccuucaucgaggaccuccuguucaacaaggugacccuggccgacgccggcuucaucaagcaguacggcgacugccucggggacaucgcggcccgcgaccugaucugcgcccagaaguucaacggccugaccgugcucccgccccugcugaccgacgagaugaucgcccaguacaccagcgcccuccuggcggggaccaucacguccggcuggaccuucggggccggcgccgcccugcagauccccuucgcgaugcagauggccuaccgguucaacggcaucggggucacccagaacgugcucuacgagaaccagaagcugaucgccaaccaguucaacagcgccaucggcaagauccaggacucccugagcuccaccgccagcgcgcucgggaagcugcaggacguggucaaccagaacgcccaggcccugaacacgcucgugaagcagcuguccagcaacuucggcgccaucuccagcgugcugaacgacauccucucccgccuggacaaggucgaggccgaggugcagaucgaccggcugaucaccgggcgccuccagagccugcagaccuacgugacccagcagcugauccgggcggccgagauccgcgccagcgccaaccucgccgcgaccaagauguccgagugcguccugggccagagcaagcggguggacuucugcggcaagggguaccaccugauguccuucccccagagcgccccgcacggcguggucuuccuccacgugacguacguccccgcccaggagaagaacuucaccaccgcccccgcgaucugccacgacgggaaggcccacuucccccgcgagggcguguucguguccaacgggacccacugguucgucacgcagcggaacuucuacgagccgcagaucaucaccaccgacaacaccuucgugagcggcaacugcgacguggucaucggcaucgugaacaacacgguguacgacccccugcagcccgagcuggacuccuucaaggaggagcucgacaaguacuucaagaaccacaccagccccgacgucgaccugggggacaucuccggcaucaacgccagcguggugaacauccagaaggagaucgaccgccugaacgaggucgccaagaaccucaacgagucccugaucgaccugcaggagcucgggaaguacgagcaguacaucaaguggccgugguacaucuggcugggcuucaucgccggccugaucgcgaucgugauggugaccaucaugcucugcugcaugaccagcugcugcuccugccugaaggggugcugcagcugcggcuccugcugcaaguucgacgaggacgacagcgagcccguccugaagggggugaagcuccacuacacgugaggacuaguuauaagacugacuagcccgaugggccucccaacgggcccuccuccccuccuugcaccgagauuaauagaucuaaaaaaaaaaaaaaaaaaaaaaaaaaaaaaaaaaaaaaaaaaaaaaaaaaaaaaaaaaaaaaaaaaaaaaaaaaaaaaaaaaaaaaaaaaaaaaaaaaaa

SEQ ID NO: 25617 - RNA, 4017 nt, Artificial Sequence
  SARS-CoV-2/Wuhan/WIV05/2019__EPI_ISL_402128 spike protein mRNA gc (1-1273)(D614G_I692V)
aggagaaagcuuaccauguucguguuccugguccuccugccccuggugagcucccagugcgugaaccucaccacccgcacgcagcugccgcccgccuacaccaacagcuucacccggggcgucuacuaccccgacaagguguuccgcuccagcgugcugcacuccacccaggaccucuuccugcccuucuucagcaacgucacgugguuccacgccauccacguguccgggaccaacggcaccaagcgguucgacaacccggugcugcccuucaacgacggggucuacuucgcgagcaccgagaaguccaacaucauccgcggcuggaucuucgggacgacccucgacagcaagacccagucccugcugaucgugaacaacgccaccaacguggucaucaaggugugcgaguuccaguucugcaacgaccccuuccucggcguguacuaccacaagaacaacaagagcuggauggaguccgaguuccgggucuacagcuccgccaacaacugcacguucgaguacgugagccagcccuuccugauggaccuggagggcaagcaggggaacuucaagaaccuccgcgaguucguguucaagaacaucgacggcuacuucaagaucuacuccaagcacaccccgaucaaccugguccgggaccugccccagggguucagcgcccucgagccccugguggaccugcccaucggcaucaacaucacccgcuuccagacccuccuggcccugcaccgguccuaccucacgccgggggacagcagcuccggcuggaccgcgggcgccgccgccuacuacgugggguaccugcagccccgcaccuuccugcucaaguacaacgagaacggcaccaucacggacgcggucgacugcgcccuggacccccugagcgagaccaagugcacccucaaguccuucaccguggagaaggggaucuaccagacgagcaacuuccgggugcagcccaccgaguccaucguccgcuucccgaacaucaccaaccugugccccuucggcgagguguucaacgccacccgguucgccagcgucuacgccuggaaccgcaagcggaucuccaacugcguggcggacuacagcgugcuguacaacuccgccagcuucuccacguucaagugcuacggcgucagccccaccaagcucaacgaccugugcuucaccaacguguacgccgacuccuucgugauccgcggggacgagguccggcagaucgcccccggccagaccgggaagaucgccgacuacaacuacaagcugccggacgacuucacgggcugcgugaucgcguggaacagcaacaaccucgacuccaaggucgggggcaacuacaacuaccuguaccgccuguuccgcaagagcaaccucaagcccuucgagcgggacaucuccaccgagaucuaccaggccggcagcacccccugcaacgggguggagggcuucaacugcuacuucccccugcaguccuacggguuccagccgaccaacggcgugggguaccagcccuaccggguggucgugcugagcuucgagcuccugcacgcccccgccacggugugcggccccaagaaguccaccaaccuggucaagaacaagugcgugaacuucaacuucaacggccucaccgggaccggcgugcugaccgagagcaacaagaaguuccugccguuccagcaguucgggcgcgacaucgccgacacgaccgacgcgguccgcgacccccagacccuggagauccucgacaucacccccugcagcuucggcgggguguccgugaucacgccgggcaccaacaccagcaaccaggucgccgugcuguaccagggcgugaacugcaccgagguccccguggccauccacgccgaccagcugacgcccaccuggcggguguacuccaccggcagcaacgucuuccagacccgcgccgggugccucaucggcgcggagcacgugaacaacuccuacgagugcgacauccccaucggggccggcaucugcgccagcuaccagacgcagaccaacuccccgcggcgcgcccggagcguggcgucccagagcgucaucgccuacaccaugucccugggcgccgagaacagcgucgccuacuccaacaacagcaucgccauccccaccaacuucacgaucuccgugaccaccgagauccugcccgugagcaugaccaagacgagcgucgacugcaccauguacaucugcggggacuccaccgagugcagcaaccuccugcugcaguacggcuccuucugcacccagcucaaccgcgcgcugacggggaucgccguggagcaggacaagaacacccaggagguguucgcccaggucaagcagaucuacaagacgcccccgaucaaggacuucggcggguucaacuucagccagauccugcccgaccccuccaagcccagcaagcgguccuucaucgaggaccuccuguucaacaaggugacccuggccgacgccggcuucaucaagcaguacggcgacugccucggggacaucgcggcccgcgaccugaucugcgcccagaaguucaacggccugaccgugcucccgccccugcugaccgacgagaugaucgcccaguacaccagcgcccuccuggcggggaccaucacguccggcuggaccuucggggccggcgccgcccugcagauccccuucgcgaugcagauggccuaccgguucaacggcaucggggucacccagaacgugcucuacgagaaccagaagcugaucgccaaccaguucaacagcgccaucggcaagauccaggacucccugagcuccaccgccagcgcgcucgggaagcugcaggacguggucaaccagaacgcccaggcccugaacacgcucgugaagcagcuguccagcaacuucggcgccaucuccagcgugcugaacgacauccucucccgccuggacaaggucgaggccgaggugcagaucgaccggcugaucaccgggcgccuccagagccugcagaccuacgugacccagcagcugauccgggcggccgagauccgcgccagcgccaaccucgccgcgaccaagauguccgagugcguccugggccagagcaagcggguggacuucugcggcaagggguaccaccugauguccuucccccagagcgccccgcacggcguggucuuccuccacgugacguacguccccgcccaggagaagaacuucaccaccgcccccgcgaucugccacgacgggaaggcccacuucccccgcgagggcguguucguguccaacgggacccacugguucgucacgcagcggaacuucuacgagccgcagaucaucaccaccgacaacaccuucgugagcggcaacugcgacguggucaucggcaucgugaacaacacgguguacgacccccugcagcccgagcuggacuccuucaaggaggagcucgacaaguacuucaagaaccacaccagccccgacgucgaccugggggacaucuccggcaucaacgccagcguggugaacauccagaaggagaucgaccgccugaacgaggucgccaagaaccucaacgagucccugaucgaccugcaggagcucgggaaguacgagcaguacaucaaguggccgugguacaucuggcugggcuucaucgccggccugaucgcgaucgugauggugaccaucaugcucugcugcaugaccagcugcugcuccugccugaaggggugcugcagcugcggcuccugcugcaaguucgacgaggacgacagcgagcccguccugaagggggugaagcuccacuacacgugaggacuaguuauaagacugacuagcccgaugggccucccaacgggcccuccuccccuccuugcaccgagauuaauagaucuaaaaaaaaaaaaaaaaaaaaaaaaaaaaaaaaaaaaaaaaaaaaaaaaaaaaaaaaaaaaaaaaaaaaaaaaaaaaaaaaaaaaaaaaaaaaaaaaaaaa

SEQ ID NO: 25618 - RNA, 4017 nt, Artificial Sequence
  SARS-CoV-2/Wuhan/WIV05/2019__EPI_ISL_402128 spike protein mRNA gc (1-1273)(D614G_M1229I)
aggagaaagcuuaccauguucguguuccugguccuccugccccuggugagcucccagugcgugaaccucaccacccgcacgcagcugccgcccgccuacaccaacagcuucacccggggcgucuacuaccccgacaagguguuccgcuccagcgugcugcacuccacccaggaccucuuccugcccuucuucagcaacgucacgugguuccacgccauccacguguccgggaccaacggcaccaagcgguucgacaacccggugcugcccuucaacgacggggucuacuucgcgagcaccgagaaguccaacaucauccgcggcuggaucuucgggacgacccucgacagcaagacccagucccugcugaucgugaacaacgccaccaacguggucaucaaggugugcgaguuccaguucugcaacgaccccuuccucggcguguacuaccacaagaacaacaagagcuggauggaguccgaguuccgggucuacagcuccgccaacaacugcacguucgaguacgugagccagcccuuccugauggaccuggagggcaagcaggggaacuucaagaaccuccgcgaguucguguucaagaacaucgacggcuacuucaagaucuacuccaagcacaccccgaucaaccugguccgggaccugccccagggguucagcgcccucgagccccugguggaccugcccaucggcaucaacaucacccgcuuccagacccuccuggcccugcaccgguccuaccucacgccgggggacagcagcuccggcuggaccgcgggcgccgccgccuacuacgugggguaccugcagccccgcaccuuccugcucaaguacaacgagaacggcaccaucacggacgcggucgacugcgcccuggacccccugagcgagaccaagugcacccucaaguccuucaccguggagaaggggaucuaccagacgagcaacuuccgggugcagcccaccgaguccaucguccgcuucccgaacaucaccaaccugugccccuucggcgagguguucaacgccacccgguucgccagcgucuacgccuggaaccgcaagcggaucuccaacugcguggcggacuacagcgugcuguacaacuccgccagcuucuccacguucaagugcuacggcgucagccccaccaagcucaacgaccugugcuucaccaacguguacgccgacuccuucgugauccgcggggacgagguccggcagaucgcccccggccagaccgggaagaucgccgacuacaacuacaagcugccggacgacuucacgggcugcgugaucgcguggaacagcaacaaccucgacuccaaggucgggggcaacuacaacuaccuguaccgccuguuccgcaagagcaaccucaagcccuucgagcgggacaucuccaccgagaucuaccaggccggcagcacccccugcaacgggguggagggcuucaacugcuacuucccccugcaguccuacggguuccagccgaccaacggcgugggguaccagcccuaccggguggucgugcugagcuucgagcuccugcacgcccccgccacggugugcggccccaagaaguccaccaaccuggucaagaacaagugcgugaacuucaacuucaacggccucaccgggaccggcgugcugaccgagagcaacaagaaguuccugccguuccagcaguucgggcgcgacaucgccgacacgaccgacgcgguccgcgacccccagacccuggagauccucgacaucacccccugcagcuucggcgggguguccgugaucacgccgggcaccaacaccagcaaccaggucgccgugcuguaccagggcgugaacugcaccgagguccccguggccauccacgccgaccagcugacgcccaccuggcggguguacuccaccggcagcaacgucuuccagacccgcgccgggugccucaucggcgcggagcacgugaacaacuccuacgagugcgacauccccaucggggccggcaucugcgccagcuaccagacgcagaccaacuccccgcggcgcgcccggagcguggcgucccagagcaucaucgccuacaccaugucccugggcgccgagaacagcgucgccuacuccaacaacagcaucgccauccccaccaacuucacgaucuccgugaccaccgagauccugcccgugagcaugaccaagacgagcgucgacugcaccauguacaucugcggggacuccaccgagugcagcaaccuccugcugcaguacggcuccuucugcacccagcucaaccgcgcgcugacggggaucgccguggagcaggacaagaacacccaggagguguucgcccaggucaagcagaucuacaagacgcccccgaucaaggacuucggcggguucaacuucagccagauccugcccgaccccuccaagcccagcaagcgguccuucaucgaggaccuccuguucaacaaggugacccuggccgacgccggcuucaucaagcaguacggcgacugccucggggacaucgcggcccgcgaccugaucugcgcccagaaguucaacggccugaccgugcucccgccccugcugaccgacgagaugaucgcccaguacaccagcgcccuccuggcggggaccaucacguccggcuggaccuucggggccggcgccgcccugcagauccccuucgcgaugcagauggccuaccgguucaacggcaucggggucacccagaacgugcucuacgagaaccagaagcugaucgccaaccaguucaacagcgccaucggcaagauccaggacucccugagcuccaccgccagcgcgcucgggaagcugcaggacguggucaaccagaacgcccaggcccugaacacgcucgugaagcagcuguccagcaacuucggcgccaucuccagcgugcugaacgacauccucucccgccuggacaaggucgaggccgaggugcagaucgaccggcugaucaccgggcgccuccagagccugcagaccuacgugacccagcagcugauccgggcggccgagauccgcgccagcgccaaccucgccgcgaccaagauguccgagugcguccugggccagagcaagcggguggacuucugcggcaagggguaccaccugauguccuucccccagagcgccccgcacggcguggucuuccuccacgugacguacguccccgcccaggagaagaacuucaccaccgcccccgcgaucugccacgacgggaaggcccacuucccccgcgagggcguguucguguccaacgggacccacugguucgucacgcagcggaacuucuacgagccgcagaucaucaccaccgacaacaccuucgugagcggcaacugcgacguggucaucggcaucgugaacaacacgguguacgacccccugcagcccgagcuggacuccuucaaggaggagcucgacaaguacuucaagaaccacaccagccccgacgucgaccugggggacaucuccggcaucaacgccagcguggugaacauccagaaggagaucgaccgccugaacgaggucgccaagaaccucaacgagucccugaucgaccugcaggagcucgggaaguacgagcaguacaucaaguggccgugguacaucuggcugggcuucaucgccggccugaucgcgaucgugaucgugaccaucaugcucugcugcaugaccagcugcugcuccugccugaaggggugcugcagcugcggcuccugcugcaaguucgacgaggacgacagcgagcccguccugaagggggugaagcuccacuacacgugaggacuaguuauaagacugacuagcccgaugggccucccaacgggcccuccuccccuccuugcaccgagauuaauagaucuaaaaaaaaaaaaaaaaaaaaaaaaaaaaaaaaaaaaaaaaaaaaaaaaaaaaaaaaaaaaaaaaaaaaaaaaaaaaaaaaaaaaaaaaaaaaaaaaaaaa

SEQ ID NO: 25619 - RNA, 4011 nt, Artificial Sequence
  SARS-CoV-2/Wuhan/WIV05/2019__EPI_ISL_402128 spike protein mRNA gc (1-1273)(H69del_V70del_A222V_Y453F_S477N_D614G_I692V)
aggagaaagcuuaccauguucguguuccugguccuccugccccuggugagcucccagugcgugaaccucaccacccgcacgcagcugccgcccgccuacaccaacagcuucacccggggcgucuacuaccccgacaagguguuccgcuccagcgugcugcacuccacccaggaccucuuccugcccuucuucagcaacgucacgugguuccacgccaucuccgggaccaacggcaccaagcgguucgacaacccggugcugcccuucaacgacggggucuacuucgcgagcaccgagaaguccaacaucauccgcggcuggaucuucgggacgacccucgacagcaagacccagucccugcugaucgugaacaacgccaccaacguggucaucaaggugugcgaguuccaguucugcaacgaccccuuccucggcguguacuaccacaagaacaacaagagcuggauggaguccgaguuccgggucuacagcuccgccaacaacugcacguucgaguacgugagccagcccuuccugauggaccuggagggcaagcaggggaacuucaagaaccuccgcgaguucguguucaagaacaucgacggcuacuucaagaucuacuccaagcacaccccgaucaaccugguccgggaccugccccagggguucagcguccucgagccccugguggaccugcccaucggcaucaacaucacccgcuuccagacccuccuggcccugcaccgguccuaccucacgccgggggacagcagcuccggcuggaccgcgggcgccgccgccuacuacgugggguaccugcagccccgcaccuuccugcucaaguacaacgagaacggcaccaucacggacgcggucgacugcgcccuggacccccugagcgagaccaagugcacccucaaguccuucaccguggagaaggggaucuaccagacgagcaacuuccgggugcagcccaccgaguccaucguccgcuucccgaacaucaccaaccugugccccuucggcgagguguucaacgccacccgguucgccagcgucuacgccuggaaccgcaagcggaucuccaacugcguggcggacuacagcgugcuguacaacuccgccagcuucuccacguucaagugcuacggcgucagccccaccaagcucaacgaccugugcuucaccaacguguacgccgacuccuucgugauccgcggggacgagguccggcagaucgcccccggccagaccgggaagaucgccgacuacaacuacaagcugccggacgacuucacgggcugcgugaucgcguggaacagcaacaaccucgacuccaaggucgggggcaacuacaacuaccuguuccgccuguuccgcaagagcaaccucaagcccuucgagcgggacaucuccaccgagaucuaccaggccggcaacacccccugcaacgggguggagggcuucaacugcuacuucccccugcaguccuacggguuccagccgaccaacggcgugggguaccagcccuaccggguggucgugcugagcuucgagcuccugcacgcccccgccacggugugcggccccaagaaguccaccaaccuggucaagaacaagugcgugaacuucaacuucaacggccucaccgggaccggcgugcugaccgagagcaacaagaaguuccugccguuccagcaguucgggcgcgacaucgccgacacgaccgacgcgguccgcgacccccagacccuggagauccucgacaucacccccugcagcuucggcgggguguccgugaucacgccgggcaccaacaccagcaaccaggucgccgugcuguaccagggcgugaacugcaccgagguccccguggccauccacgccgaccagcugacgcccaccuggcggguguacuccaccggcagcaacgucuuccagacccgcgccgggugccucaucggcgcggagcacgugaacaacuccuacgagugcgacauccccaucggggccggcaucugcgccagcuaccagacgcagaccaacuccccgcggcgcgcccggagcguggcgucccagagcgucaucgccuacaccaugucccugggcgccgagaacagcgucgccuacuccaacaacagcaucgccauccccaccaacuucacgaucuccgugaccaccgagauccugcccgugagcaugaccaagacgagcgucgacugcaccauguacaucugcggggacuccaccgagugcagcaaccuccugcugcaguacggcuccuucugcacccagcucaaccgcgcgcugacggggaucgccguggagcaggacaagaacacccaggagguguucgcccaggucaagcagaucuacaagacgcccccgaucaaggacuucggcggguucaacuucagccagauccugcccgaccccuccaagcccagcaagcgguccuucaucgaggaccuccuguucaacaaggugacccuggccgacgccggcuucaucaagcaguacggcgacugccucggggacaucgcggcccgcgaccugaucugcgcccagaaguucaacggccugaccgugcucccgccccugcugaccgacgagaugaucgcccaguacaccagcgcccuccuggcggggaccaucacguccggcuggaccuucggggccggcgccgcccugcagauccccuucgcgaugcagauggccuaccgguucaacggcaucggggucacccagaacgugcucuacgagaaccagaagcugaucgccaaccaguucaacagcgccaucggcaagauccaggacucccugagcuccaccgccagcgcgcucgggaagcugcaggacguggucaaccagaacgcccaggcccugaacacgcucgugaagcagcuguccagcaacuucggcgccaucuccagcgugcugaacgacauccucucccgccuggacaaggucgaggccgaggugcagaucgaccggcugaucaccgggcgccuccagagccugcagaccuacgugacccagcagcugauccgggcggccgagauccgcgccagcgccaaccucgccgcgaccaagauguccgagugcguccugggccagagcaagcggguggacuucugcggcaagggguaccaccugauguccuucccccagagcgccccgcacggcguggucuuccuccacgugacguacguccccgcccaggagaagaacuucaccaccgcccccgcgaucugccacgacgggaaggcccacuucccccgcgagggcguguucguguccaacgggacccacugguucgucacgcagcggaacuucuacgagccgcagaucaucaccaccgacaacaccuucgugagcggcaacugcgacguggucaucggcaucgugaacaacacgguguacgacccccugcagcccgagcuggacuccuucaaggaggagcucgacaaguacuucaagaaccacaccagccccgacgucgaccugggggacaucuccggcaucaacgccagcguggugaacauccagaaggagaucgaccgccugaacgaggucgccaagaaccucaacgagucccugaucgaccugcaggagcucgggaaguacgagcaguacaucaaguggccgugguacaucuggcugggcuucaucgccggccugaucgcgaucgugauggugaccaucaugcucugcugcaugaccagcugcugcuccugccugaaggggugcugcagcugcggcuccugcugcaaguucgacgaggacgacagcgagcccguccugaagggggugaagcuccacuacacgugaggacuaguuauaagacugacuagcccgaugggccucccaacgggcccuccuccccuccuugcaccgagauuaauagaucuaaaaaaaaaaaaaaaaaaaaaaaaaaaaaaaaaaaaaaaaaaaaaaaaaaaaaaaaaaaaaaaaaaaaaaaaaaaaaaaaaaaaaaaaaaaaaaaaaaaa

SEQ ID NO: 25620 - RNA, 4011 nt, Artificial Sequence
  SARS-CoV-2/Wuhan/WIV05/2019__EPI_ISL_402128 spike protein mRNA gc (1-1273)(H69del_V70del_Y453F_D614G_I692V_M1229I)
aggagaaagcuuaccauguucguguuccugguccuccugccccuggugagcucccagugcgugaaccucaccacccgcacgcagcugccgcccgccuacaccaacagcuucacccggggcgucuacuaccccgacaagguguuccgcuccagcgugcugcacuccacccaggaccucuuccugcccuucuucagcaacgucacgugguuccacgccaucuccgggaccaacggcaccaagcgguucgacaacccggugcugcccuucaacgacggggucuacuucgcgagcaccgagaaguccaacaucauccgcggcuggaucuucgggacgacccucgacagcaagacccagucccugcugaucgugaacaacgccaccaacguggucaucaaggugugcgaguuccaguucugcaacgaccccuuccucggcguguacuaccacaagaacaacaagagcuggauggaguccgaguuccgggucuacagcuccgccaacaacugcacguucgaguacgugagccagcccuuccugauggaccuggagggcaagcaggggaacuucaagaaccuccgcgaguucguguucaagaacaucgacggcuacuucaagaucuacuccaagcacaccccgaucaaccugguccgggaccugccccagggguucagcgcccucgagccccugguggaccugcccaucggcaucaacaucacccgcuuccagacccuccuggcccugcaccgguccuaccucacgccgggggacagcagcuccggcuggaccgcgggcgccgccgccuacuacgugggguaccugcagccccgcaccuuccugcucaaguacaacgagaacggcaccaucacggacgcggucgacugcgcccuggacccccugagcgagaccaagugcacccucaaguccuucaccguggagaaggggaucuaccagacgagcaacuuccgggugcagcccaccgaguccaucguccgcuucccgaacaucaccaaccugugccccuucggcgagguguucaacgccacccgguucgccagcgucuacgccuggaaccgcaagcggaucuccaacugcguggcggacuacagcgugcuguacaacuccgccagcuucuccacguucaagugcuacggcgucagccccaccaagcucaacgaccugugcuucaccaacguguacgccgacuccuucgugauccgcggggacgagguccggcagaucgcccccggccagaccgggaagaucgccgacuacaacuacaagcugccggacgacuucacgggcugcgugaucgcguggaacagcaacaaccucgacuccaaggucgggggcaacuacaacuaccuguuccgccuguuccgcaagagcaaccucaagcccuucgagcgggacaucuccaccgagaucuaccaggccggcagcacccccugcaacgggguggagggcuucaacugcuacuucccccugcaguccuacggguuccagccgaccaacggcgugggguaccagcccuaccggguggucgugcugagcuucgagcuccugcacgcccccgccacggugugcggccccaagaaguccaccaaccuggucaagaacaagugcgugaacuucaacuucaacggccucaccgggaccggcgugcugaccgagagcaacaagaaguuccugccguuccagcaguucgggcgcgacaucgccgacacgaccgacgcgguccgcgacccccagacccuggagauccucgacaucacccccugcagcuucggcgggguguccgugaucacgccgggcaccaacaccagcaaccaggucgccgugcuguaccagggcgugaacugcaccgagguccccguggccauccacgccgaccagcugacgcccaccuggcggguguacuccaccggcagcaacgucuuccagacccgcgccgggugccucaucggcgcggagcacgugaacaacuccuacgagugcgacauccccaucggggccggcaucugcgccagcuaccagacgcagaccaacuccccgcggcgcgcccggagcguggcgucccagagcgugaucgccuacaccaugucccugggcgccgagaacagcgucgccuacuccaacaacagcaucgccauccccaccaacuucacgaucuccgugaccaccgagauccugcccgugagcaugaccaagacgagcgucgacugcaccauguacaucugcggggacuccaccgagugcagcaaccuccugcugcaguacggcuccuucugcacccagcucaaccgcgcgcugacggggaucgccguggagcaggacaagaacacccaggagguguucgcccaggucaagcagaucuacaagacgcccccgaucaaggacuucggcggguucaacuucagccagauccugcccgaccccuccaagcccagcaagcgguccuucaucgaggaccuccuguucaacaaggugacccuggccgacgccggcuucaucaagcaguacggcgacugccucggggacaucgcggcccgcgaccugaucugcgcccagaaguucaacggccugaccgugcucccgccccugcugaccgacgagaugaucgcccaguacaccagcgcccuccuggcggggaccaucacguccggcuggaccuucggggccggcgccgcccugcagauccccuucgcgaugcagauggccuaccgguucaacggcaucggggucacccagaacgugcucuacgagaaccagaagcugaucgccaaccaguucaacagcgccaucggcaagauccaggacucccugagcuccaccgccagcgcgcucgggaagcugcaggacguggucaaccagaacgcccaggcccugaacacgcucgugaagcagcuguccagcaacuucggcgccaucuccagcgugcugaacgacauccucucccgccuggacaaggucgaggccgaggugcagaucgaccggcugaucaccgggcgccuccagagccugcagaccuacgugacccagcagcugauccgggcggccgagauccgcgccagcgccaaccucgccgcgaccaagauguccgagugcguccugggccagagcaagcggguggacuucugcggcaagggguaccaccugauguccuucccccagagcgccccgcacggcguggucuuccuccacgugacguacguccccgcccaggagaagaacuucaccaccgcccccgcgaucugccacgacgggaaggcccacuucccccgcgagggcguguucguguccaacgggacccacugguucgucacgcagcggaacuucuacgagccgcagaucaucaccaccgacaacaccuucgugagcggcaacugcgacguggucaucggcaucgugaacaacacgguguacgacccccugcagcccgagcuggacuccuucaaggaggagcucgacaaguacuucaagaaccacaccagccccgacgucgaccugggggacaucuccggcaucaacgccagcguggugaacauccagaaggagaucgaccgccugaacgaggucgccaagaaccucaacgagucccugaucgaccugcaggagcucgggaaguacgagcaguacaucaaguggccgugguacaucuggcugggcuucaucgccggccugaucgcgaucgugaucgugaccaucaugcucugcugcaugaccagcugcugcuccugccugaaggggugcugcagcugcggcuccugcugcaaguucgacgaggacgacagcgagcccguccugaagggggugaagcuccacuacacgugaggacuaguuauaagacugacuagcccgaugggccucccaacgggcccuccuccccuccuugcaccgagauuaauagaucuaaaaaaaaaaaaaaaaaaaaaaaaaaaaaaaaaaaaaaaaaaaaaaaaaaaaaaaaaaaaaaaaaaaaaaaaaaaaaaaaaaaaaaaaaaaaaaaaaaaa

SEQ ID NO: 25621 - RNA, 4008 nt, Artificial Sequence
  SARS-CoV-2/Wuhan/WIV05/2019__EPI_ISL_402128 spike protein mRNA gc (1-1273)(H69del_V70del_Y144del_N501Y_A570D_D614G_P681H_T716I_S982 A_D1118H)
aggagaaagcuuaccauguucguguuccugguccuccugccccuggugagcucccagugcgugaaccucaccacccgcacgcagcugccgcccgccuacaccaacagcuucacccggggcgucuacuaccccgacaagguguuccgcuccagcgugcugcacuccacccaggaccucuuccugcccuucuucagcaacgucacgugguuccacgccaucuccgggaccaacggcaccaagcgguucgacaacccggugcugcccuucaacgacggggucuacuucgcgagcaccgagaaguccaacaucauccgcggcuggaucuucgggacgacccucgacagcaagacccagucccugcugaucgugaacaacgccaccaacguggucaucaaggugugcgaguuccaguucugcaacgaccccuuccucggcguguaccacaagaacaacaagagcuggauggaguccgaguuccgggucuacagcuccgccaacaacugcacguucgaguacgugagccagcccuuccugauggaccuggagggcaagcaggggaacuucaagaaccuccgcgaguucguguucaagaacaucgacggcuacuucaagaucuacuccaagcacaccccgaucaaccugguccgggaccugccccagggguucagcgcccucgagccccugguggaccugcccaucggcaucaacaucacccgcuuccagacccuccuggcccugcaccgguccuaccucacgccgggggacagcagcuccggcuggaccgcgggcgccgccgccuacuacgugggguaccugcagccccgcaccuuccugcucaaguacaacgagaacggcaccaucacggacgcggucgacugcgcccuggacccccugagcgagaccaagugcacccucaaguccuucaccguggagaaggggaucuaccagacgagcaacuuccgggugcagcccaccgaguccaucguccgcuucccgaacaucaccaaccugugccccuucggcgagguguucaacgccacccgguucgccagcgucuacgccuggaaccgcaagcggaucuccaacugcguggcggacuacagcgugcuguacaacuccgccagcuucuccacguucaagugcuacggcgucagccccaccaagcucaacgaccugugcuucaccaacguguacgccgacuccuucgugauccgcggggacgagguccggcagaucgcccccggccagaccgggaagaucgccgacuacaacuacaagcugccggacgacuucacgggcugcgugaucgcguggaacagcaacaaccucgacuccaaggucgggggcaacuacaacuaccuguaccgccuguuccgcaagagcaaccucaagcccuucgagcgggacaucuccaccgagaucuaccaggccggcagcacccccugcaacgggguggagggcuucaacugcuacuucccccugcaguccuacggguuccagccgaccuacggcgugggguaccagcccuaccggguggucgugcugagcuucgagcuccugcacgcccccgccacggugugcggccccaagaaguccaccaaccuggucaagaacaagugcgugaacuucaacuucaacggccucaccgggaccggcgugcugaccgagagcaacaagaaguuccugccguuccagcaguucgggcgcgacaucgacgacacgaccgacgcgguccgcgacccccagacccuggagauccucgacaucacccccugcagcuucggcgggguguccgugaucacgccgggcaccaacaccagcaaccaggucgccgugcuguaccagggcgugaacugcaccgagguccccguggccauccacgccgaccagcugacgcccaccuggcggguguacuccaccggcagcaacgucuuccagacccgcgccgggugccucaucggcgcggagcacgugaacaacuccuacgagugcgacauccccaucggggccggcaucugcgccagcuaccagacgcagaccaacucccaccggcgcgcccggagcguggcgucccagagcaucaucgccuacaccaugucccugggcgccgagaacagcgucgccuacuccaacaacagcaucgccauccccaucaacuucacgaucuccgugaccaccgagauccugcccgugagcaugaccaagacgagcgucgacugcaccauguacaucugcggggacuccaccgagugcagcaaccuccugcugcaguacggcuccuucugcacccagcucaaccgcgcgcugacggggaucgccguggagcaggacaagaacacccaggagguguucgcccaggucaagcagaucuacaagacgcccccgaucaaggacuucggcggguucaacuucagccagauccugcccgaccccuccaagcccagcaagcgguccuucaucgaggaccuccuguucaacaaggugacccuggccgacgccggcuucaucaagcaguacggcgacugccucggggacaucgcggcccgcgaccugaucugcgcccagaaguucaacggccugaccgugcucccgccccugcugaccgacgagaugaucgcccaguacaccagcgcccuccuggcggggaccaucacguccggcuggaccuucggggccggcgccgcccugcagauccccuucgcgaugcagauggccuaccgguucaacggcaucggggucacccagaacgugcucuacgagaaccagaagcugaucgccaaccaguucaacagcgccaucggcaagauccaggacucccugagcuccaccgccagcgcgcucgggaagcugcaggacguggucaaccagaacgcccaggcccugaacacgcucgugaagcagcuguccagcaacuucggcgccaucuccagcgugcugaacgacauccucgcccgccuggacaaggucgaggccgaggugcagaucgaccggcugaucaccgggcgccuccagagccugcagaccuacgugacccagcagcugauccgggcggccgagauccgcgccagcgccaaccucgccgcgaccaagauguccgagugcguccugggccagagcaagcggguggacuucugcggcaagggguaccaccugauguccuucccccagagcgccccgcacggcguggucuuccuccacgugacguacguccccgcccaggagaagaacuucaccaccgcccccgcgaucugccacgacgggaaggcccacuucccccgcgagggcguguucguguccaacgggacccacugguucgucacgcagcggaacuucuacgagccgcagaucaucaccacccacaacaccuucgugagcggcaacugcgacguggucaucggcaucgugaacaacacgguguacgacccccugcagcccgagcuggacuccuucaaggaggagcucgacaaguacuucaagaaccacaccagccccgacgucgaccugggggacaucuccggcaucaacgccagcguggugaacauccagaaggagaucgaccgccugaacgaggucgccaagaaccucaacgagucccugaucgaccugcaggagcucgggaaguacgagcaguacaucaaguggccgugguacaucuggcugggcuucaucgccggccugaucgcgaucgugauggugaccaucaugcucugcugcaugaccagcugcugcuccugccugaaggggugcugcagcugcggcuccugcugcaaguucgacgaggacgacagcgagcccguccugaagggggugaagcuccacuacacgugaggacuaguuauaagacugacuagcccgaugggccucccaacgggcccuccuccccuccuugcaccgagauuaauagaucuaaaaaaaaaaaaaaaaaaaaaaaaaaaaaaaaaaaaaaaaaaaaaaaaaaaaaaaaaaaaaaaaaaaaaaaaaaaaaaaaaaaaaaaaaaaaaaaaaaaa

SEQ ID NO: 25622 - RNA, 4017 nt, Artificial Sequence
  SARS-CoV-2/Wuhan/WIV05/2019__EPI_ISL_402128 spike protein mRNA gc (1-1273)(K417N_E484K_N501Y_D614G)
aggagaaagcuuaccauguucguguuccugguccuccugccccuggugagcucccagugcgugaaccucaccacccgcacgcagcugccgcccgccuacaccaacagcuucacccggggcgucuacuaccccgacaagguguuccgcuccagcgugcugcacuccacccaggaccucuuccugcccuucuucagcaacgucacgugguuccacgccauccacguguccgggaccaacggcaccaagcgguucgacaacccggugcugcccuucaacgacggggucuacuucgcgagcaccgagaaguccaacaucauccgcggcuggaucuucgggacgacccucgacagcaagacccagucccugcugaucgugaacaacgccaccaacguggucaucaaggugugcgaguuccaguucugcaacgaccccuuccucggcguguacuaccacaagaacaacaagagcuggauggaguccgaguuccgggucuacagcuccgccaacaacugcacguucgaguacgugagccagcccuuccugauggaccuggagggcaagcaggggaacuucaagaaccuccgcgaguucguguucaagaacaucgacggcuacuucaagaucuacuccaagcacaccccgaucaaccugguccgggaccugccccagggguucagcgcccucgagccccugguggaccugcccaucggcaucaacaucacccgcuuccagacccuccuggcccugcaccgguccuaccucacgccgggggacagcagcuccggcuggaccgcgggcgccgccgccuacuacgugggguaccugcagccccgcaccuuccugcucaaguacaacgagaacggcaccaucacggacgcggucgacugcgcccuggacccccugagcgagaccaagugcacccucaaguccuucaccguggagaaggggaucuaccagacgagcaacuuccgggugcagcccaccgaguccaucguccgcuucccgaacaucaccaaccugugccccuucggcgagguguucaacgccacccgguucgccagcgucuacgccuggaaccgcaagcggaucuccaacugcguggcggacuacagcgugcuguacaacuccgccagcuucuccacguucaagugcuacggcgucagccccaccaagcucaacgaccugugcuucaccaacguguacgccgacuccuucgugauccgcggggacgagguccggcagaucgcccccggccagaccgggaacaucgccgacuacaacuacaagcugccggacgacuucacgggcugcgugaucgcguggaacagcaacaaccucgacuccaaggucgggggcaacuacaacuaccuguaccgccuguuccgcaagagcaaccucaagcccuucgagcgggacaucuccaccgagaucuaccaggccggcagcacccccugcaacggggugaagggcuucaacugcuacuucccccugcaguccuacggguuccagccgaccuacggcgugggguaccagcccuaccggguggucgugcugagcuucgagcuccugcacgcccccgccacggugugcggccccaagaaguccaccaaccuggucaagaacaagugcgugaacuucaacuucaacggccucaccgggaccggcgugcugaccgagagcaacaagaaguuccugccguuccagcaguucgggcgcgacaucgccgacacgaccgacgcgguccgcgacccccagacccuggagauccucgacaucacccccugcagcuucggcgggguguccgugaucacgccgggcaccaacaccagcaaccaggucgccgugcuguaccagggcgugaacugcaccgagguccccguggccauccacgccgaccagcugacgcccaccuggcggguguacuccaccggcagcaacgucuuccagacccgcgccgggugccucaucggcgcggagcacgugaacaacuccuacgagugcgacauccccaucggggccggcaucugcgccagcuaccagacgcagaccaacuccccgcggcgcgcccggagcguggcgucccagagcaucaucgccuacaccaugucccugggcgccgagaacagcgucgccuacuccaacaacagcaucgccauccccaccaacuucacgaucuccgugaccaccgagauccugcccgugagcaugaccaagacgagcgucgacugcaccauguacaucugcggggacuccaccgagugcagcaaccuccugcugcaguacggcuccuucugcacccagcucaaccgcgcgcugacggggaucgccguggagcaggacaagaacacccaggagguguucgcccaggucaagcagaucuacaagacgcccccgaucaaggacuucggcggguucaacuucagccagauccugcccgaccccuccaagcccagcaagcgguccuucaucgaggaccuccuguucaacaaggugacccuggccgacgccggcuucaucaagcaguacggcgacugccucggggacaucgcggcccgcgaccugaucugcgcccagaaguucaacggccugaccgugcucccgccccugcugaccgacgagaugaucgcccaguacaccagcgcccuccuggcggggaccaucacguccggcuggaccuucggggccggcgccgcccugcagauccccuucgcgaugcagauggccuaccgguucaacggcaucggggucacccagaacgugcucuacgagaaccagaagcugaucgccaaccaguucaacagcgccaucggcaagauccaggacucccugagcuccaccgccagcgcgcucgggaagcugcaggacguggucaaccagaacgcccaggcccugaacacgcucgugaagcagcuguccagcaacuucggcgccaucuccagcgugcugaacgacauccucucccgccuggacaaggucgaggccgaggugcagaucgaccggcugaucaccgggcgccuccagagccugcagaccuacgugacccagcagcugauccgggcggccgagauccgcgccagcgccaaccucgccgcgaccaagauguccgagugcguccugggccagagcaagcggguggacuucugcggcaagggguaccaccugauguccuucccccagagcgccccgcacggcguggucuuccuccacgugacguacguccccgcccaggagaagaacuucaccaccgcccccgcgaucugccacgacgggaaggcccacuucccccgcgagggcguguucguguccaacgggacccacugguucgucacgcagcggaacuucuacgagccgcagaucaucaccaccgacaacaccuucgugagcggcaacugcgacguggucaucggcaucgugaacaacacgguguacgacccccugcagcccgagcuggacuccuucaaggaggagcucgacaaguacuucaagaaccacaccagccccgacgucgaccugggggacaucuccggcaucaacgccagcguggugaacauccagaaggagaucgaccgccugaacgaggucgccaagaaccucaacgagucccugaucgaccugcaggagcucgggaaguacgagcaguacaucaaguggccgugguacaucuggcugggcuucaucgccggccugaucgcgaucgugauggugaccaucaugcucugcugcaugaccagcugcugcuccugccugaaggggugcugcagcugcggcuccugcugcaaguucgacgaggacgacagcgagcccguccugaagggggugaagcuccacuacacgugaggacuaguuauaagacugacuagcccgaugggccucccaacgggcccuccuccccuccuugcaccgagauuaauagaucuaaaaaaaaaaaaaaaaaaaaaaaaaaaaaaaaaaaaaaaaaaaaaaaaaaaaaaaaaaaaaaaaaaaaaaaaaaaaaaaaaaaaaaaaaaaaaaaaaaaa

SEQ ID NO: 25623 - RNA, 4008 nt, Artificial Sequence
  SARS-CoV-2/Wuhan/WIV05/2019__EPI_ISL_402128 spike protein mRNA gc (1-1273)(L18F_D80A_D215G_L242del_A243del_L244del_R246I_K417N_E484 K_N501Y_D614G_A701V)
aggagaaagcuuaccauguucguguuccugguccuccugccccuggugagcucccagugcgugaacuucaccacccgcacgcagcugccgcccgccuacaccaacagcuucacccggggcgucuacuaccccgacaagguguuccgcuccagcgugcugcacuccacccaggaccucuuccugcccuucuucagcaacgucacgugguuccacgccauccacguguccgggaccaacggcaccaagcgguucgccaacccggugcugcccuucaacgacggggucuacuucgcgagcaccgagaaguccaacaucauccgcggcuggaucuucgggacgacccucgacagcaagacccagucccugcugaucgugaacaacgccaccaacguggucaucaaggugugcgaguuccaguucugcaacgaccccuuccucggcguguacuaccacaagaacaacaagagcuggauggaguccgaguuccgggucuacagcuccgccaacaacugcacguucgaguacgugagccagcccuuccugauggaccuggagggcaagcaggggaacuucaagaaccuccgcgaguucguguucaagaacaucgacggcuacuucaagaucuacuccaagcacaccccgaucaaccugguccggggccugccccagggguucagcgcccucgagccccugguggaccugcccaucggcaucaacaucacccgcuuccagacccuccacaucuccuaccucacgccgggggacagcagcuccggcuggaccgcgggcgccgccgccuacuacgugggguaccugcagccccgcaccuuccugcucaaguacaacgagaacggcaccaucacggacgcggucgacugcgcccuggacccccugagcgagaccaagugcacccucaaguccuucaccguggagaaggggaucuaccagacgagcaacuuccgggugcagcccaccgaguccaucguccgcuucccgaacaucaccaaccugugccccuucggcgagguguucaacgccacccgguucgccagcgucuacgccuggaaccgcaagcggaucuccaacugcguggcggacuacagcgugcuguacaacuccgccagcuucuccacguucaagugcuacggcgucagccccaccaagcucaacgaccugugcuucaccaacguguacgccgacuccuucgugauccgcggggacgagguccggcagaucgcccccggccagaccgggaacaucgccgacuacaacuacaagcugccggacgacuucacgggcugcgugaucgcguggaacagcaacaaccucgacuccaaggucgggggcaacuacaacuaccuguaccgccuguuccgcaagagcaaccucaagcccuucgagcgggacaucuccaccgagaucuaccaggccggcagcacccccugcaacggggugaagggcuucaacugcuacuucccccugcaguccuacggguuccagccgaccuacggcgugggguaccagcccuaccggguggucgugcugagcuucgagcuccugcacgcccccgccacggugugcggccccaagaaguccaccaaccuggucaagaacaagugcgugaacuucaacuucaacggccucaccgggaccggcgugcugaccgagagcaacaagaaguuccugccguuccagcaguucgggcgcgacaucgccgacacgaccgacgcgguccgcgacccccagacccuggagauccucgacaucacccccugcagcuucggcgggguguccgugaucacgccgggcaccaacaccagcaaccaggucgccgugcuguaccagggcgugaacugcaccgagguccccguggccauccacgccgaccagcugacgcccaccuggcggguguacuccaccggcagcaacgucuuccagacccgcgccgggugccucaucggcgcggagcacgugaacaacuccuacgagugcgacauccccaucggggccggcaucugcgccagcuaccagacgcagaccaacuccccgcggcgcgcccggagcguggcgucccagagcaucaucgccuacaccaugucccugggcguggagaacagcgucgccuacuccaacaacagcaucgccauccccaccaacuucacgaucuccgugaccaccgagauccugcccgugagcaugaccaagacgagcgucgacugcaccauguacaucugcggggacuccaccgagugcagcaaccuccugcugcaguacggcuccuucugcacccagcucaaccgcgcgcugacggggaucgccguggagcaggacaagaacacccaggagguguucgcccaggucaagcagaucuacaagacgcccccgaucaaggacuucggcggguucaacuucagccagauccugcccgaccccuccaagcccagcaagcgguccuucaucgaggaccuccuguucaacaaggugacccuggccgacgccggcuucaucaagcaguacggcgacugccucggggacaucgcggcccgcgaccugaucugcgcccagaaguucaacggccugaccgugcucccgccccugcugaccgacgagaugaucgcccaguacaccagcgcccuccuggcggggaccaucacguccggcuggaccuucggggccggcgccgcccugcagauccccuucgcgaugcagauggccuaccgguucaacggcaucggggucacccagaacgugcucuacgagaaccagaagcugaucgccaaccaguucaacagcgccaucggcaagauccaggacucccugagcuccaccgccagcgcgcucgggaagcugcaggacguggucaaccagaacgcccaggcccugaacacgcucgugaagcagcuguccagcaacuucggcgccaucuccagcgugcugaacgacauccucucccgccuggacaaggucgaggccgaggugcagaucgaccggcugaucaccgggcgccuccagagccugcagaccuacgugacccagcagcugauccgggcggccgagauccgcgccagcgccaaccucgccgcgaccaagauguccgagugcguccugggccagagcaagcggguggacuucugcggcaagggguaccaccugauguccuucccccagagcgccccgcacggcguggucuuccuccacgugacguacguccccgcccaggagaagaacuucaccaccgcccccgcgaucugccacgacgggaaggcccacuucccccgcgagggcguguucguguccaacgggacccacugguucgucacgcagcggaacuucuacgagccgcagaucaucaccaccgacaacaccuucgugagcggcaacugcgacguggucaucggcaucgugaacaacacgguguacgacccccugcagcccgagcuggacuccuucaaggaggagcucgacaaguacuucaagaaccacaccagccccgacgucgaccugggggacaucuccggcaucaacgccagcguggugaacauccagaaggagaucgaccgccugaacgaggucgccaagaaccucaacgagucccugaucgaccugcaggagcucgggaaguacgagcaguacaucaaguggccgugguacaucuggcugggcuucaucgccggccugaucgcgaucgugauggugaccaucaugcucugcugcaugaccagcugcugcuccugccugaaggggugcugcagcugcggcuccugcugcaaguucgacgaggacgacagcgagcccguccugaagggggugaagcuccacuacacgugaggacuaguuauaagacugacuagcccgaugggccucccaacgggcccuccuccccuccuugcaccgagauuaauagaucuaaaaaaaaaaaaaaaaaaaaaaaaaaaaaaaaaaaaaaaaaaaaaaaaaaaaaaaaaaaaaaaaaaaaaaaaaaaaaaaaaaaaaaaaaaaaaaaaaaaa

SEQ ID NO: 25624 - RNA, 4017 nt, Artificial Sequence
  SARS-CoV-2/Wuhan/WIV05/2019__EPI_ISL_402128 spike protein mRNA gc (1-1273)(E484K_D614G)
aggagaaagcuuaccauguucguguuccugguccuccugccccuggugagcucccagugcgugaaccucaccacccgcacgcagcugccgcccgccuacaccaacagcuucacccggggcgucuacuaccccgacaagguguuccgcuccagcgugcugcacuccacccaggaccucuuccugcccuucuucagcaacgucacgugguuccacgccauccacguguccgggaccaacggcaccaagcgguucgacaacccggugcugcccuucaacgacggggucuacuucgcgagcaccgagaaguccaacaucauccgcggcuggaucuucgggacgacccucgacagcaagacccagucccugcugaucgugaacaacgccaccaacguggucaucaaggugugcgaguuccaguucugcaacgaccccuuccucggcguguacuaccacaagaacaacaagagcuggauggaguccgaguuccgggucuacagcuccgccaacaacugcacguucgaguacgugagccagcccuuccugauggaccuggagggcaagcaggggaacuucaagaaccuccgcgaguucguguucaagaacaucgacggcuacuucaagaucuacuccaagcacaccccgaucaaccugguccgggaccugccccagggguucagcgcccucgagccccugguggaccugcccaucggcaucaacaucacccgcuuccagacccuccuggcccugcaccgguccuaccucacgccgggggacagcagcuccggcuggaccgcgggcgccgccgccuacuacgugggguaccugcagccccgcaccuuccugcucaaguacaacgagaacggcaccaucacggacgcggucgacugcgcccuggacccccugagcgagaccaagugcacccucaaguccuucaccguggagaaggggaucuaccagacgagcaacuuccgggugcagcccaccgaguccaucguccgcuucccgaacaucaccaaccugugccccuucggcgagguguucaacgccacccgguucgccagcgucuacgccuggaaccgcaagcggaucuccaacugcguggcggacuacagcgugcuguacaacuccgccagcuucuccacguucaagugcuacggcgucagccccaccaagcucaacgaccugugcuucaccaacguguacgccgacuccuucgugauccgcggggacgagguccggcagaucgcccccggccagaccgggaagaucgccgacuacaacuacaagcugccggacgacuucacgggcugcgugaucgcguggaacagcaacaaccucgacuccaaggucgggggcaacuacaacuaccuguaccgccuguuccgcaagagcaaccucaagcccuucgagcgggacaucuccaccgagaucuaccaggccggcagcacccccugcaacggggugaagggcuucaacugcuacuucccccugcaguccuacggguuccagccgaccaacggcgugggguaccagcccuaccggguggucgugcugagcuucgagcuccugcacgcccccgccacggugugcggccccaagaaguccaccaaccuggucaagaacaagugcgugaacuucaacuucaacggccucaccgggaccggcgugcugaccgagagcaacaagaaguuccugccguuccagcaguucgggcgcgacaucgccgacacgaccgacgcgguccgcgacccccagacccuggagauccucgacaucacccccugcagcuucggcgggguguccgugaucacgccgggcaccaacaccagcaaccaggucgccgugcuguaccagggcgugaacugcaccgagguccccguggccauccacgccgaccagcugacgcccaccuggcggguguacuccaccggcagcaacgucuuccagacccgcgccgggugccucaucggcgcggagcacgugaacaacuccuacgagugcgacauccccaucggggccggcaucugcgccagcuaccagacgcagaccaacuccccgcggcgcgcccggagcguggcgucccagagcaucaucgccuacaccaugucccugggcgccgagaacagcgucgccuacuccaacaacagcaucgccauccccaccaacuucacgaucuccgugaccaccgagauccugcccgugagcaugaccaagacgagcgucgacugcaccauguacaucugcggggacuccaccgagugcagcaaccuccugcugcaguacggcuccuucugcacccagcucaaccgcgcgcugacggggaucgccguggagcaggacaagaacacccaggagguguucgcccaggucaagcagaucuacaagacgcccccgaucaaggacuucggcggguucaacuucagccagauccugcccgaccccuccaagcccagcaagcgguccuucaucgaggaccuccuguucaacaaggugacccuggccgacgccggcuucaucaagcaguacggcgacugccucggggacaucgcggcccgcgaccugaucugcgcccagaaguucaacggccugaccgugcucccgccccugcugaccgacgagaugaucgcccaguacaccagcgcccuccuggcggggaccaucacguccggcuggaccuucggggccggcgccgcccugcagauccccuucgcgaugcagauggccuaccgguucaacggcaucggggucacccagaacgugcucuacgagaaccagaagcugaucgccaaccaguucaacagcgccaucggcaagauccaggacucccugagcuccaccgccagcgcgcucgggaagcugcaggacguggucaaccagaacgcccaggcccugaacacgcucgugaagcagcuguccagcaacuucggcgccaucuccagcgugcugaacgacauccucucccgccuggacaaggucgaggccgaggugcagaucgaccggcugaucaccgggcgccuccagagccugcagaccuacgugacccagcagcugauccgggcggccgagauccgcgccagcgccaaccucgccgcgaccaagauguccgagugcguccugggccagagcaagcggguggacuucugcggcaagggguaccaccugauguccuucccccagagcgccccgcacggcguggucuuccuccacgugacguacguccccgcccaggagaagaacuucaccaccgcccccgcgaucugccacgacgggaaggcccacuucccccgcgagggcguguucguguccaacgggacccacugguucgucacgcagcggaacuucuacgagccgcagaucaucaccaccgacaacaccuucgugagcggcaacugcgacguggucaucggcaucgugaacaacacgguguacgacccccugcagcccgagcuggacuccuucaaggaggagcucgacaaguacuucaagaaccacaccagccccgacgucgaccugggggacaucuccggcaucaacgccagcguggugaacauccagaaggagaucgaccgccugaacgaggucgccaagaaccucaacgagucccugaucgaccugcaggagcucgggaaguacgagcaguacaucaaguggccgugguacaucuggcugggcuucaucgccggccugaucgcgaucgugauggugaccaucaugcucugcugcaugaccagcugcugcuccugccugaaggggugcugcagcugcggcuccugcugcaaguucgacgaggacgacagcgagcccguccugaagggggugaagcuccacuacacgugaggacuaguuauaagacugacuagcccgaugggccucccaacgggcccuccuccccuccuugcaccgagauuaauagaucuaaaaaaaaaaaaaaaaaaaaaaaaaaaaaaaaaaaaaaaaaaaaaaaaaaaaaaaaaaaaaaaaaaaaaaaaaaaaaaaaaaaaaaaaaaaaaaaaaaaa

SEQ ID NO: 25625 - RNA, 4017 nt, Artificial Sequence
  SARS-CoV-2/Wuhan/WIV05/2019__EPI_ISL_402128 spike protein mRNA gc (1-1273)(L18F_T20N_P26S_D138Y_R190S_K417T_E484K_N501Y_D614G_H655Y _T1027I)
aggagaaagcuuaccauguucguguuccugguccuccugccccuggugagcucccagugcgugaacuucaccaaccgcacgcagcugccgagcgccuacaccaacagcuucacccggggcgucuacuaccccgacaagguguuccgcuccagcgugcugcacuccacccaggaccucuuccugcccuucuucagcaacgucacgugguuccacgccauccacguguccgggaccaacggcaccaagcgguucgacaacccggugcugcccuucaacgacggggucuacuucgcgagcaccgagaaguccaacaucauccgcggcuggaucuucgggacgacccucgacagcaagacccagucccugcugaucgugaacaacgccaccaacguggucaucaaggugugcgaguuccaguucugcaacuaccccuuccucggcguguacuaccacaagaacaacaagagcuggauggaguccgaguuccgggucuacagcuccgccaacaacugcacguucgaguacgugagccagcccuuccugauggaccuggagggcaagcaggggaacuucaagaaccucagcgaguucguguucaagaacaucgacggcuacuucaagaucuacuccaagcacaccccgaucaaccugguccgggaccugccccagggguucagcgcccucgagccccugguggaccugcccaucggcaucaacaucacccgcuuccagacccuccuggcccugcaccgguccuaccucacgccgggggacagcagcuccggcuggaccgcgggcgccgccgccuacuacgugggguaccugcagccccgcaccuuccugcucaaguacaacgagaacggcaccaucacggacgcggucgacugcgcccuggacccccugagcgagaccaagugcacccucaaguccuucaccguggagaaggggaucuaccagacgagcaacuuccgggugcagcccaccgaguccaucguccgcuucccgaacaucaccaaccugugccccuucggcgagguguucaacgccacccgguucgccagcgucuacgccuggaaccgcaagcggaucuccaacugcguggcggacuacagcgugcuguacaacuccgccagcuucuccacguucaagugcuacggcgucagccccaccaagcucaacgaccugugcuucaccaacguguacgccgacuccuucgugauccgcggggacgagguccggcagaucgcccccggccagaccgggaccaucgccgacuacaacuacaagcugccggacgacuucacgggcugcgugaucgcguggaacagcaacaaccucgacuccaaggucgggggcaacuacaacuaccuguaccgccuguuccgcaagagcaaccucaagcccuucgagcgggacaucuccaccgagaucuaccaggccggcagcacccccugcaacggggugaagggcuucaacugcuacuucccccugcaguccuacggguuccagccgaccuacggcgugggguaccagcccuaccggguggucgugcugagcuucgagcuccugcacgcccccgccacggugugcggccccaagaaguccaccaaccuggucaagaacaagugcgugaacuucaacuucaacggccucaccgggaccggcgugcugaccgagagcaacaagaaguuccugccguuccagcaguucgggcgcgacaucgccgacacgaccgacgcgguccgcgacccccagacccuggagauccucgacaucacccccugcagcuucggcgggguguccgugaucacgccgggcaccaacaccagcaaccaggucgccgugcuguaccagggcgugaacugcaccgagguccccguggccauccacgccgaccagcugacgcccaccuggcggguguacuccaccggcagcaacgucuuccagacccgcgccgggugccucaucggcgcggaguacgugaacaacuccuacgagugcgacauccccaucggggccggcaucugcgccagcuaccagacgcagaccaacuccccgcggcgcgcccggagcguggcgucccagagcaucaucgccuacaccaugucccugggcgccgagaacagcgucgccuacuccaacaacagcaucgccauccccaccaacuucacgaucuccgugaccaccgagauccugcccgugagcaugaccaagacgagcgucgacugcaccauguacaucugcggggacuccaccgagugcagcaaccuccugcugcaguacggcuccuucugcacccagcucaaccgcgcgcugacggggaucgccguggagcaggacaagaacacccaggagguguucgcccaggucaagcagaucuacaagacgcccccgaucaaggacuucggcggguucaacuucagccagauccugcccgaccccuccaagcccagcaagcgguccuucaucgaggaccuccuguucaacaaggugacccuggccgacgccggcuucaucaagcaguacggcgacugccucggggacaucgcggcccgcgaccugaucugcgcccagaaguucaacggccugaccgugcucccgccccugcugaccgacgagaugaucgcccaguacaccagcgcccuccuggcggggaccaucacguccggcuggaccuucggggccggcgccgcccugcagauccccuucgcgaugcagauggccuaccgguucaacggcaucggggucacccagaacgugcucuacgagaaccagaagcugaucgccaaccaguucaacagcgccaucggcaagauccaggacucccugagcuccaccgccagcgcgcucgggaagcugcaggacguggucaaccagaacgcccaggcccugaacacgcucgugaagcagcuguccagcaacuucggcgccaucuccagcgugcugaacgacauccucucccgccuggacaaggucgaggccgaggugcagaucgaccggcugaucaccgggcgccuccagagccugcagaccuacgugacccagcagcugauccgggcggccgagauccgcgccagcgccaaccucgccgcgaucaagauguccgagugcguccugggccagagcaagcggguggacuucugcggcaagggguaccaccugauguccuucccccagagcgccccgcacggcguggucuuccuccacgugacguacguccccgcccaggagaagaacuucaccaccgcccccgcgaucugccacgacgggaaggcccacuucccccgcgagggcguguucguguccaacgggacccacugguucgucacgcagcggaacuucuacgagccgcagaucaucaccaccgacaacaccuucgugagcggcaacugcgacguggucaucggcaucgugaacaacacgguguacgacccccugcagcccgagcuggacuccuucaaggaggagcucgacaaguacuucaagaaccacaccagccccgacgucgaccugggggacaucuccggcaucaacgccagcguggugaacauccagaaggagaucgaccgccugaacgaggucgccaagaaccucaacgagucccugaucgaccugcaggagcucgggaaguacgagcaguacaucaaguggccgugguacaucuggcugggcuucaucgccggccugaucgcgaucgugauggugaccaucaugcucugcugcaugaccagcugcugcuccugccugaaggggugcugcagcugcggcuccugcugcaaguucgacgaggacgacagcgagcccguccugaagggggugaagcuccacuacacgugaggacuaguuauaagacugacuagcccgaugggccucccaacgggcccuccuccccuccuugcaccgagauuaauagaucuaaaaaaaaaaaaaaaaaaaaaaaaaaaaaaaaaaaaaaaaaaaaaaaaaaaaaaaaaaaaaaaaaaaaaaaaaaaaaaaaaaaaaaaaaaaaaaaaaaaa

SEQ ID NO: 25626 - RNA, 4017 nt, Artificial Sequence
  SARS-CoV-2/Wuhan/WIV05/2019__EPI_ISL_402128 spike protein mRNA gc (1-1273)(S13I_W152C_L452R_D614G)
aggagaaagcuuaccauguucguguuccugguccuccugccccuggugagcauccagugcgugaaccucaccacccgcacgcagcugccgcccgccuacaccaacagcuucacccggggcgucuacuaccccgacaagguguuccgcuccagcgugcugcacuccacccaggaccucuuccugcccuucuucagcaacgucacgugguuccacgccauccacguguccgggaccaacggcaccaagcgguucgacaacccggugcugcccuucaacgacggggucuacuucgcgagcaccgagaaguccaacaucauccgcggcuggaucuucgggacgacccucgacagcaagacccagucccugcugaucgugaacaacgccaccaacguggucaucaaggugugcgaguuccaguucugcaacgaccccuuccucggcguguacuaccacaagaacaacaagagcugcauggaguccgaguuccgggucuacagcuccgccaacaacugcacguucgaguacgugagccagcccuuccugauggaccuggagggcaagcaggggaacuucaagaaccuccgcgaguucguguucaagaacaucgacggcuacuucaagaucuacuccaagcacaccccgaucaaccugguccgggaccugccccagggguucagcgcccucgagccccugguggaccugcccaucggcaucaacaucacccgcuuccagacccuccuggcccugcaccgguccuaccucacgccgggggacagcagcuccggcuggaccgcgggcgccgccgccuacuacgugggguaccugcagccccgcaccuuccugcucaaguacaacgagaacggcaccaucacggacgcggucgacugcgcccuggacccccugagcgagaccaagugcacccucaaguccuucaccguggagaaggggaucuaccagacgagcaacuuccgggugcagcccaccgaguccaucguccgcuucccgaacaucaccaaccugugccccuucggcgagguguucaacgccacccgguucgccagcgucuacgccuggaaccgcaagcggaucuccaacugcguggcggacuacagcgugcuguacaacuccgccagcuucuccacguucaagugcuacggcgucagccccaccaagcucaacgaccugugcuucaccaacguguacgccgacuccuucgugauccgcggggacgagguccggcagaucgcccccggccagaccgggaagaucgccgacuacaacuacaagcugccggacgacuucacgggcugcgugaucgcguggaacagcaacaaccucgacuccaaggucgggggcaacuacaacuaccgcuaccgccuguuccgcaagagcaaccucaagcccuucgagcgggacaucuccaccgagaucuaccaggccggcagcacccccugcaacgggguggagggcuucaacugcuacuucccccugcaguccuacggguuccagccgaccaacggcgugggguaccagcccuaccggguggucgugcugagcuucgagcuccugcacgcccccgccacggugugcggccccaagaaguccaccaaccuggucaagaacaagugcgugaacuucaacuucaacggccucaccgggaccggcgugcugaccgagagcaacaagaaguuccugccguuccagcaguucgggcgcgacaucgccgacacgaccgacgcgguccgcgacccccagacccuggagauccucgacaucacccccugcagcuucggcgggguguccgugaucacgccgggcaccaacaccagcaaccaggucgccgugcuguaccagggcgugaacugcaccgagguccccguggccauccacgccgaccagcugacgcccaccuggcggguguacuccaccggcagcaacgucuuccagacccgcgccgggugccucaucggcgcggagcacgugaacaacuccuacgagugcgacauccccaucggggccggcaucugcgccagcuaccagacgcagaccaacuccccgcggcgcgcccggagcguggcgucccagagcaucaucgccuacaccaugucccugggcgccgagaacagcgucgccuacuccaacaacagcaucgccauccccaccaacuucacgaucuccgugaccaccgagauccugcccgugagcaugaccaagacgagcgucgacugcaccauguacaucugcggggacuccaccgagugcagcaaccuccugcugcaguacggcuccuucugcacccagcucaaccgcgcgcugacggggaucgccguggagcaggacaagaacacccaggagguguucgcccaggucaagcagaucuacaagacgcccccgaucaaggacuucggcggguucaacuucagccagauccugcccgaccccuccaagcccagcaagcgguccuucaucgaggaccuccuguucaacaaggugacccuggccgacgccggcuucaucaagcaguacggcgacugccucggggacaucgcggcccgcgaccugaucugcgcccagaaguucaacggccugaccgugcucccgccccugcugaccgacgagaugaucgcccaguacaccagcgcccuccuggcggggaccaucacguccggcuggaccuucggggccggcgccgcccugcagauccccuucgcgaugcagauggccuaccgguucaacggcaucggggucacccagaacgugcucuacgagaaccagaagcugaucgccaaccaguucaacagcgccaucggcaagauccaggacucccugagcuccaccgccagcgcgcucgggaagcugcaggacguggucaaccagaacgcccaggcccugaacacgcucgugaagcagcuguccagcaacuucggcgccaucuccagcgugcugaacgacauccucucccgccuggacaaggucgaggccgaggugcagaucgaccggcugaucaccgggcgccuccagagccugcagaccuacgugacccagcagcugauccgggcggccgagauccgcgccagcgccaaccucgccgcgaccaagauguccgagugcguccugggccagagcaagcggguggacuucugcggcaagggguaccaccugauguccuucccccagagcgccccgcacggcguggucuuccuccacgugacguacguccccgcccaggagaagaacuucaccaccgcccccgcgaucugccacgacgggaaggcccacuucccccgcgagggcguguucguguccaacgggacccacugguucgucacgcagcggaacuucuacgagccgcagaucaucaccaccgacaacaccuucgugagcggcaacugcgacguggucaucggcaucgugaacaacacgguguacgacccccugcagcccgagcuggacuccuucaaggaggagcucgacaaguacuucaagaaccacaccagccccgacgucgaccugggggacaucuccggcaucaacgccagcguggugaacauccagaaggagaucgaccgccugaacgaggucgccaagaaccucaacgagucccugaucgaccugcaggagcucgggaaguacgagcaguacaucaaguggccgugguacaucuggcugggcuucaucgccggccugaucgcgaucgugauggugaccaucaugcucugcugcaugaccagcugcugcuccugccugaaggggugcugcagcugcggcuccugcugcaaguucgacgaggacgacagcgagcccguccugaagggggugaagcuccacuacacgugaggacuaguuauaagacugacuagcccgaugggccucccaacgggcccuccuccccuccuugcaccgagauuaauagaucuaaaaaaaaaaaaaaaaaaaaaaaaaaaaaaaaaaaaaaaaaaaaaaaaaaaaaaaaaaaaaaaaaaaaaaaaaaaaaaaaaaaaaaaaaaaaaaaaaaaa

SEQ ID NO: 25627 - RNA, 4017 nt, Artificial Sequence; identical to SEQ ID NO: 25609
  SARS-CoV-2/Wuhan/WIV05/2019__EPI_ISL_402128 spike protein mRNA gc (1-1273)

SEQ ID NO: 25628 - RNA, 4017 nt, Artificial Sequence
  SARS-CoV-2/Wuhan/WIV05/2019__EPI_ISL_402128 spike protein mRNA gc (1-1273)(D614G)
aggagaaagcuuaccauguucguguuccugguccuccugccccuggugagcucccagugcgugaaccucaccacccgcacgcagcugccgcccgccuacaccaacagcuucacccggggcgucuacuaccccgacaagguguuccgcuccagcgugcugcacuccacccaggaccucuuccugcccuucuucagcaacgucacgugguuccacgccauccacguguccgggaccaacggcaccaagcgguucgacaacccggugcugcccuucaacgacggggucuacuucgcgagcaccgagaaguccaacaucauccgcggcuggaucuucgggacgacccucgacagcaagacccagucccugcugaucgugaacaacgccaccaacguggucaucaaggugugcgaguuccaguucugcaacgaccccuuccucggcguguacuaccacaagaacaacaagagcuggauggaguccgaguuccgggucuacagcuccgccaacaacugcacguucgaguacgugagccagcccuuccugauggaccuggagggcaagcaggggaacuucaagaaccuccgcgaguucguguucaagaacaucgacggcuacuucaagaucuacuccaagcacaccccgaucaaccugguccgggaccugccccagggguucagcgcccucgagccccugguggaccugcccaucggcaucaacaucacccgcuuccagacccuccuggcccugcaccgguccuaccucacgccgggggacagcagcuccggcuggaccgcgggcgccgccgccuacuacgugggguaccugcagccccgcaccuuccugcucaaguacaacgagaacggcaccaucacggacgcggucgacugcgcccuggacccccugagcgagaccaagugcacccucaaguccuucaccguggagaaggggaucuaccagacgagcaacuuccgggugcagcccaccgaguccaucguccgcuucccgaacaucaccaaccugugccccuucggcgagguguucaacgccacccgguucgccagcgucuacgccuggaaccgcaagcggaucuccaacugcguggcggacuacagcgugcuguacaacuccgccagcuucuccacguucaagugcuacggcgucagccccaccaagcucaacgaccugugcuucaccaacguguacgccgacuccuucgugauccgcggggacgagguccggcagaucgcccccggccagaccgggaagaucgccgacuacaacuacaagcugccggacgacuucacgggcugcgugaucgcguggaacagcaacaaccucgacuccaaggucgggggcaacuacaacuaccuguaccgccuguuccgcaagagcaaccucaagcccuucgagcgggacaucuccaccgagaucuaccaggccggcagcacccccugcaacgggguggagggcuucaacugcuacuucccccugcaguccuacggguuccagccgaccaacggcgugggguaccagcccuaccggguggucgugcugagcuucgagcuccugcacgcccccgccacggugugcggccccaagaaguccaccaaccuggucaagaacaagugcgugaacuucaacuucaacggccucaccgggaccggcgugcugaccgagagcaacaagaaguuccugccguuccagcaguucgggcgcgacaucgccgacacgaccgacgcgguccgcgacccccagacccuggagauccucgacaucacccccugcagcuucggcgggguguccgugaucacgccgggcaccaacaccagcaaccaggucgccgugcuguaccagggcgugaacugcaccgagguccccguggccauccacgccgaccagcugacgcccaccuggcggguguacuccaccgggagcaacgucuuccagacccgcgccggcugccucaucggggcggagcacgugaacaacuccuacgagugcgacauccccaucggcgccggcaucugcgccagcuaccagacgcagaccaacuccccgcggcgcgcccggagcguggcgucccagagcaucaucgccuacaccaugucccugggggccgagaacagcgucgccuacuccaacaacagcaucgccauccccaccaacuucacgaucuccgugaccaccgagauccugcccgugagcaugaccaagacgagcgucgacugcaccauguacaucugcggcgacuccaccgagugcagcaaccuccugcugcaguacggguccuucugcacccagcucaaccgcgcgcugacgggcaucgccguggagcaggacaagaacacccaggagguguucgcccaggucaagcagaucuacaagacgcccccgaucaaggacuucgggggcuucaacuucagccagauccugcccgaccccuccaagcccagcaagcgguccuucaucgaggaccuccuguucaacaaggugacccuggccgacgccggcuucaucaagcaguacggggacugccucggcgacaucgcggcccgcgaccugaucugcgcccagaaguucaacgggcugaccgugcucccgccccugcugaccgacgagaugaucgcccaguacaccagcgcccuccuggcgggcaccaucacguccggguggaccuucggcgccggcgccgcccugcagauccccuucgcgaugcagauggccuaccgguucaacgggaucggcgucacccagaacgugcucuacgagaaccagaagcugaucgccaaccaguucaacagcgccaucgggaagauccaggacucccugagcuccaccgccagcgcgcucggcaagcugcaggacguggucaaccagaacgcccaggcccugaacacgcucgugaagcagcuguccagcaacuucggggccaucuccagcgugcugaacgacauccucucccgccuggacaaggucgaggccgaggugcagaucgaccggcugaucaccggccgccuccagagccugcagaccuacgugacccagcagcugauccgggcggccgagauccgcgccagcgccaaccucgccgcgaccaagauguccgagugcguccugggccagagcaagcggguggacuucugcgggaagggcuaccaccugauguccuucccccagagcgccccgcacgggguggucuuccuccacgugacguacguccccgcccaggagaagaacuucaccaccgcccccgcgaucugccacgacggcaaggcccacuucccccgcgaggggguguucguguccaacggcacccacugguucgucacgcagcggaacuucuacgagccgcagaucaucaccaccgacaacaccuucgugagcggcaacugcgacguggucaucgggaucgugaacaacacgguguacgacccccugcagcccgagcuggacuccuucaaggaggagcucgacaaguacuucaagaaccacaccagccccgacgucgaccugggcgacaucuccgggaucaacgccagcguggugaacauccagaaggagaucgaccgccugaacgaggucgccaagaaccucaacgagucccugaucgaccugcaggagcucggcaaguacgagcaguacaucaaguggccgugguacaucuggcugggcuucaucgccgggcugaucgcgaucgugauggugaccaucaugcucugcugcaugaccagcugcugcuccugccugaagggcugcugcagcugcggguccugcugcaaguucgacgaggacgacagcgagcccguccugaagggcgugaagcuccacuacacgugaggacuaguuauaagacugacuagcccgaugggccucccaacgggcccuccuccccuccuugcaccgagauuaauagaucuaaaaaaaaaaaaaaaaaaaaaaaaaaaaaaaaaaaaaaaaaaaaaaaaaaaaaaaaaaaaaaaaaaaaaaaaaaaaaaaaaaaaaaaaaaaaaaaaaaaa

SEQ ID NO: 25629 - RNA, 4017 nt, Artificial Sequence
  SARS-CoV-2/Wuhan/WIV05/2019__EPI_ISL_402128 spike protein mRNA gc (1-1273)(A222V_D614G)
aggagaaagcuuaccauguucguguuccugguccuccugccccuggugagcucccagugcgugaaccucaccacccgcacgcagcugccgcccgccuacaccaacagcuucacccggggcgucuacuaccccgacaagguguuccgcuccagcgugcugcacuccacccaggaccucuuccugcccuucuucagcaacgucacgugguuccacgccauccacguguccgggaccaacggcaccaagcgguucgacaacccggugcugcccuucaacgacggggucuacuucgcgagcaccgagaaguccaacaucauccgcggcuggaucuucgggacgacccucgacagcaagacccagucccugcugaucgugaacaacgccaccaacguggucaucaaggugugcgaguuccaguucugcaacgaccccuuccucggcguguacuaccacaagaacaacaagagcuggauggaguccgaguuccgggucuacagcuccgccaacaacugcacguucgaguacgugagccagcccuuccugauggaccuggagggcaagcaggggaacuucaagaaccuccgcgaguucguguucaagaacaucgacggcuacuucaagaucuacuccaagcacaccccgaucaaccugguccgggaccugccccagggguucagcgugcucgagccccugguggaccugcccaucggcaucaacaucacccgcuuccagacccuccuggcccugcaccgguccuaccucacgccgggggacagcagcuccggcuggaccgccggcgcggccgccuacuacgucggguaccugcagccccgcaccuuccugcucaaguacaacgagaacggcaccaucacggacgccguggacugcgcgcuggacccccugagcgagaccaagugcacccucaaguccuucaccguggagaaggggaucuaccagacgagcaacuuccggguccagcccaccgaguccaucgugcgcuucccgaacaucaccaaccugugccccuucggcgaggucuucaacgccacccgguucgccagcguguacgccuggaaccgcaagcggaucuccaacugcguggccgacuacagcguccuguacaacuccgcgagcuucuccacguucaagugcuacggcgugagccccaccaagcucaacgaccugugcuucaccaacguguacgccgacuccuucgucauccgcggggacgaggugcggcagaucgcccccggccagaccgggaagaucgccgacuacaacuacaagcugccggacgacuucacgggcugcgugaucgccuggaacagcaacaaccucgacuccaaggucgggggcaacuacaacuaccuguaccgccuguuccgcaagagcaaccucaagcccuucgagcgggacaucuccaccgagaucuaccaggcgggcagcacccccugcaacgggguggagggcuucaacugcuacuucccccugcaguccuacggguuccagccgaccaacggcgugggguaccagcccuaccgggucguggugcugagcuucgagcuccugcacgcccccgccacggucugcggccccaagaaguccaccaaccuggugaagaacaagugcgugaacuucaacuucaacggccucaccgggaccggcguccugaccgagagcaacaagaaguuccugccguuccagcaguucgggcgcgacaucgccgacacgaccgacgccgugcgcgacccccagacccuggagauccucgacaucacccccugcagcuucggcgggguguccgucaucacgccgggcaccaacaccagcaaccagguggcggugcuguaccagggcgucaacugcaccgaggugcccguggccauccacgccgaccagcugacgcccaccuggcgggucuacuccaccgggagcaacguguuccagacccgcgccggcugccucaucggggccgagcacgugaacaacuccuacgagugcgacauccccaucggcgcgggcaucugcgccagcuaccagacgcagaccaacuccccgcggcgcgcccggagcgucgccucccagagcaucaucgcguacaccaugucccugggggccgagaacagcguggccuacuccaacaacagcaucgccauccccaccaacuucacgaucuccgugaccaccgagauccugcccgucagcaugaccaagacgagcguggacugcaccauguacaucugcggcgacuccaccgagugcagcaaccuccugcugcaguacggguccuucugcacccagcucaaccgcgcccugacgggcaucgcgguggagcaggacaagaacacccaggaggucuucgcccaggugaagcagaucuacaagacgcccccgaucaaggacuucgggggcuucaacuucagccagauccugcccgaccccuccaagcccagcaagcgguccuucaucgaggaccuccuguucaacaaggugacccuggccgacgccggcuucaucaagcaguacggggacugccucggcgacaucgccgcgcgcgaccugaucugcgcccagaaguucaacgggcugaccguccucccgccccugcugaccgacgagaugaucgcccaguacaccagcgcccuccuggccggcaccaucacguccggguggaccuucggcgcgggcgccgcccugcagauccccuucgccaugcagauggcguaccgguucaacgggaucggcgugacccagaacgugcucuacgagaaccagaagcugaucgccaaccaguucaacagcgccaucgggaagauccaggacucccugagcuccaccgccagcgcccucggcaagcugcaggacgucgugaaccagaacgcgcaggcccugaacacgcucgugaagcagcuguccagcaacuucggggccaucuccagcguccugaacgacauccucucccgccuggacaagguggaggccgaggugcagaucgaccggcugaucaccggccgccuccagagccugcagaccuacgucacccagcagcugauccgggccgcggagauccgcgccagcgccaaccucgccgccaccaagauguccgagugcgugcugggccagagcaagcggguggacuucugcgggaagggcuaccaccugauguccuucccccagagcgcgccgcacggggucguguuccuccacgucacguacgugcccgcccaggagaagaacuucaccaccgcccccgccaucugccacgacggcaaggcgcacuucccccgcgaggggguguucgucuccaacggcacccacugguucgugacgcagcggaacuucuacgagccgcagaucaucaccaccgacaacaccuucgugagcggcaacugcgacgucgugaucgggaucgugaacaacacggucuacgacccccugcagcccgagcuggacuccuucaaggaggagcucgacaaguacuucaagaaccacaccagccccgacguggaccugggcgacaucuccgggaucaacgccagcguggucaacauccagaaggagaucgaccgccugaacgagguggccaagaaccucaacgagucccugaucgaccugcaggagcucggcaaguacgagcaguacaucaaguggccgugguacaucuggcugggcuucaucgccgggcugaucgccaucgugauggucaccaucaugcucugcugcaugaccagcugcugcuccugccugaagggcugcugcagcugcggguccugcugcaaguucgacgaggacgacagcgagcccgugcugaagggcgugaagcuccacuacacgugaggacuaguuauaagacugacuagcccgaugggccucccaacgggcccuccuccccuccuugcaccgagauuaauagaucuaaaaaaaaaaaaaaaaaaaaaaaaaaaaaaaaaaaaaaaaaaaaaaaaaaaaaaaaaaaaaaaaaaaaaaaaaaaaaaaaaaaaaaaaaaaaaaaaaaaa

SEQ ID NO: 25630 - RNA, 4017 nt, Artificial Sequence
  SARS-CoV-2/Wuhan/WIV05/2019__EPI_ISL_402128 spike protein mRNA gc (1-1273)(N439K_D614G)
aggagaaagcuuaccauguucguguuccugguccuccugccccuggugagcucccagugcgugaaccucaccacccgcacgcagcugccgcccgccuacaccaacagcuucacccggggcgucuacuaccccgacaagguguuccgcuccagcgugcugcacuccacccaggaccucuuccugcccuucuucagcaacgucacgugguuccacgccauccacguguccgggaccaacggcaccaagcgguucgacaacccggugcugcccuucaacgacggggucuacuucgcgagcaccgagaaguccaacaucauccgcggcuggaucuucgggacgacccucgacagcaagacccagucccugcugaucgugaacaacgccaccaacguggucaucaaggugugcgaguuccaguucugcaacgaccccuuccucggcguguacuaccacaagaacaacaagagcuggauggaguccgaguuccgggucuacagcuccgccaacaacugcacguucgaguacgugagccagcccuuccugauggaccuggagggcaagcaggggaacuucaagaaccuccgcgaguucguguucaagaacaucgacggcuacuucaagaucuacuccaagcacaccccgaucaaccugguccgggaccugccccagggguucagcgcccucgagccccugguggaccugcccaucggcaucaacaucacccgcuuccagacccuccuggcccugcaccgguccuaccucacgccgggggacagcagcuccggcuggaccgcgggcgccgccgccuacuacgugggguaccugcagccccgcaccuuccugcucaaguacaacgagaacggcaccaucacggacgcggucgacugcgcccuggacccccugagcgagaccaagugcacccucaaguccuucaccguggagaaggggaucuaccagacgagcaacuuccgggugcagcccaccgaguccaucguccgcuucccgaacaucaccaaccugugccccuucggcgagguguucaacgccacccgguucgccagcgucuacgccuggaaccgcaagcggaucuccaacugcguggcggacuacagcgugcuguacaacuccgccagcuucuccacguucaagugcuacggcgucagccccaccaagcucaacgaccugugcuucaccaacguguacgccgacuccuucgugauccgcggggacgagguccggcagaucgcccccggccagaccgggaagaucgccgacuacaacuacaagcugccggacgacuucacgggcugcgugaucgcguggaacagcaagaaccucgacuccaaggucgggggcaacuacaacuaccuguaccgccuguuccgcaagagcaaccucaagcccuucgagcgggacaucuccaccgagaucuaccaggccggcagcacccccugcaacgggguggagggcuucaacugcuacuucccccugcaguccuacggguuccagccgaccaacggcgugggguaccagcccuaccggguggucgugcugagcuucgagcuccugcacgcccccgccacggugugcggccccaagaaguccaccaaccuggucaagaacaagugcgugaacuucaacuucaacggccucaccgggaccggcgugcugaccgagagcaacaagaaguuccugccguuccagcaguucgggcgcgacaucgccgacacgaccgacgcgguccgcgacccccagacccuggagauccucgacaucacccccugcagcuucggcgggguguccgugaucacgccgggcaccaacaccagcaaccaggucgccgugcuguaccagggcgugaacugcaccgagguccccguggccauccacgccgaccagcugacgcccaccuggcggguguacuccaccgggagcaacgucuuccagacccgcgccggcugccucaucggggcggagcacgugaacaacuccuacgagugcgacauccccaucggcgccggcaucugcgccagcuaccagacgcagaccaacuccccgcggcgcgcccggagcguggcgucccagagcaucaucgccuacaccaugucccugggggccgagaacagcgucgccuacuccaacaacagcaucgccauccccaccaacuucacgaucuccgugaccaccgagauccugcccgugagcaugaccaagacgagcgucgacugcaccauguacaucugcggcgacuccaccgagugcagcaaccuccugcugcaguacggguccuucugcacccagcucaaccgcgcgcugacgggcaucgccguggagcaggacaagaacacccaggagguguucgcccaggucaagcagaucuacaagacgcccccgaucaaggacuucgggggcuucaacuucagccagauccugcccgaccccuccaagcccagcaagcgguccuucaucgaggaccuccuguucaacaaggugacccuggccgacgccggcuucaucaagcaguacggggacugccucggcgacaucgcggcccgcgaccugaucugcgcccagaaguucaacgggcugaccgugcucccgccccugcugaccgacgagaugaucgcccaguacaccagcgcccuccuggcgggcaccaucacguccggguggaccuucggcgccggcgccgcccugcagauccccuucgcgaugcagauggccuaccgguucaacgggaucggcgucacccagaacgugcucuacgagaaccagaagcugaucgccaaccaguucaacagcgccaucgggaagauccaggacucccugagcuccaccgccagcgcgcucggcaagcugcaggacguggucaaccagaacgcccaggcccugaacacgcucgugaagcagcuguccagcaacuucggggccaucuccagcgugcugaacgacauccucucccgccuggacaaggucgaggccgaggugcagaucgaccggcugaucaccggccgccuccagagccugcagaccuacgugacccagcagcugauccgggcggccgagauccgcgccagcgccaaccucgccgcgaccaagauguccgagugcguccugggccagagcaagcggguggacuucugcgggaagggcuaccaccugauguccuucccccagagcgccccgcacgggguggucuuccuccacgugacguacguccccgcccaggagaagaacuucaccaccgcccccgcgaucugccacgacggcaaggcccacuucccccgcgaggggguguucguguccaacggcacccacugguucgucacgcagcggaacuucuacgagccgcagaucaucaccaccgacaacaccuucgugagcggcaacugcgacguggucaucgggaucgugaacaacacgguguacgacccccugcagcccgagcuggacuccuucaaggaggagcucgacaaguacuucaagaaccacaccagccccgacgucgaccugggcgacaucuccgggaucaacgccagcguggugaacauccagaaggagaucgaccgccugaacgaggucgccaagaaccucaacgagucccugaucgaccugcaggagcucggcaaguacgagcaguacaucaaguggccgugguacaucuggcugggcuucaucgccgggcugaucgcgaucgugauggugaccaucaugcucugcugcaugaccagcugcugcuccugccugaagggcugcugcagcugcggguccugcugcaaguucgacgaggacgacagcgagcccguccugaagggcgugaagcuccacuacacgugaggacuaguuauaagacugacuagcccgaugggccucccaacgggcccuccuccccuccuugcaccgagauuaauagaucuaaaaaaaaaaaaaaaaaaaaaaaaaaaaaaaaaaaaaaaaaaaaaaaaaaaaaaaaaaaaaaaaaaaaaaaaaaaaaaaaaaaaaaaaaaaaaaaaaaaa

SEQ ID NO: 25631 - RNA, 4017 nt, Artificial Sequence
  SARS-CoV-2/Wuhan/WIV05/2019__EPI_ISL_402128 spike protein mRNA gc (1-1273)(S477N_D614G)
aggagaaagcuuaccauguucguguuccugguccuccugccccuggugagcucccagugcgugaaccucaccacccgcacgcagcugccgcccgccuacaccaacagcuucacccggggcgucuacuaccccgacaagguguuccgcuccagcgugcugcacuccacccaggaccucuuccugcccuucuucagcaacgucacgugguuccacgccauccacguguccgggaccaacggcaccaagcgguucgacaacccggugcugcccuucaacgacggggucuacuucgcgagcaccgagaaguccaacaucauccgcggcuggaucuucgggacgacccucgacagcaagacccagucccugcugaucgugaacaacgccaccaacguggucaucaaggugugcgaguuccaguucugcaacgaccccuuccucggcguguacuaccacaagaacaacaagagcuggauggaguccgaguuccgggucuacagcuccgccaacaacugcacguucgaguacgugagccagcccuuccugauggaccuggagggcaagcaggggaacuucaagaaccuccgcgaguucguguucaagaacaucgacggcuacuucaagaucuacuccaagcacaccccgaucaaccugguccgggaccugccccagggguucagcgcccucgagccccugguggaccugcccaucggcaucaacaucacccgcuuccagacccuccuggcccugcaccgguccuaccucacgccgggggacagcagcuccggcuggaccgcgggcgccgccgccuacuacgugggguaccugcagccccgcaccuuccugcucaaguacaacgagaacggcaccaucacggacgcggucgacugcgcccuggacccccugagcgagaccaagugcacccucaaguccuucaccguggagaaggggaucuaccagacgagcaacuuccgggugcagcccaccgaguccaucguccgcuucccgaacaucaccaaccugugccccuucggcgagguguucaacgccacccgguucgccagcgucuacgccuggaaccgcaagcggaucuccaacugcguggcggacuacagcgugcuguacaacuccgccagcuucuccacguucaagugcuacggcgucagccccaccaagcucaacgaccugugcuucaccaacguguacgccgacuccuucgugauccgcggggacgagguccggcagaucgcccccggccagaccgggaagaucgccgacuacaacuacaagcugccggacgacuucacgggcugcgugaucgcguggaacagcaacaaccucgacuccaaggucgggggcaacuacaacuaccuguaccgccuguuccgcaagagcaaccucaagcccuucgagcgggacaucuccaccgagaucuaccaggccggcaacacccccugcaacgggguggagggcuucaacugcuacuucccccugcagagcuacggguuccagccgaccaacggcgugggguaccagcccuaccggguggucgugcuguccuucgagcuccugcacgcccccgccacggugugcggccccaagaaguccaccaaccuggucaagaacaagugcgugaacuucaacuucaacggccucaccgggaccggcgugcugaccgagagcaacaagaaguuccugccguuccagcaguucgggcgcgacaucgccgacacgaccgacgcgguccgcgacccccagacccuggagauccucgacaucacccccugcagcuucggcggggugagcgugaucacgccgggcaccaacaccuccaaccaggucgccgugcuguaccagggcgugaacugcaccgagguccccguggccauccacgccgaccagcugacgcccaccuggcggguguacagcaccggguccaacgucuuccagacccgcgccggcugccucaucggggcggagcacgugaacaacagcuacgagugcgacauccccaucggcgccggcaucugcgccuccuaccagacgcagaccaacagcccgcggcgcgcccgguccguggcgagccaguccaucaucgccuacaccaugagccugggggccgagaacuccgucgccuacagcaacaacuccaucgccauccccaccaacuucacgaucagcgugaccaccgagauccugcccguguccaugaccaagacgagcgucgacugcaccauguacaucugcggcgacagcaccgagugcuccaaccuccugcugcaguacgggagcuucugcacccagcucaaccgcgcgcugacgggcaucgccguggagcaggacaagaacacccaggagguguucgcccaggucaagcagaucuacaagacgcccccgaucaaggacuucgggggcuucaacuucucccagauccugcccgaccccagcaagcccuccaagcggagcuucaucgaggaccuccuguucaacaaggugacccuggccgacgccggcuucaucaagcaguacggggacugccucggcgacaucgcggcccgcgaccugaucugcgcccagaaguucaacgggcugaccgugcucccgccccugcugaccgacgagaugaucgcccaguacaccuccgcccuccuggcgggcaccaucacgagcggguggaccuucggcgccggcgccgcccugcagauccccuucgcgaugcagauggccuaccgguucaacgggaucggcgucacccagaacgugcucuacgagaaccagaagcugaucgccaaccaguucaacuccgccaucgggaagauccaggacagccuguccagcaccgccuccgcgcucggcaagcugcaggacguggucaaccagaacgcccaggcccugaacacgcucgugaagcagcugagcuccaacuucggggccaucagcuccgugcugaacgacauccucagccgccuggacaaggucgaggccgaggugcagaucgaccggcugaucaccggccgccuccagucccugcagaccuacgugacccagcagcugauccgggcggccgagauccgcgccagcgccaaccucgccgcgaccaagaugagcgagugcguccugggccaguccaagcggguggacuucugcgggaagggcuaccaccugaugagcuucccccaguccgccccgcacgggguggucuuccuccacgugacguacguccccgcccaggagaagaacuucaccaccgcccccgcgaucugccacgacggcaaggcccacuucccccgcgaggggguguucgugagcaacggcacccacugguucgucacgcagcggaacuucuacgagccgcagaucaucaccaccgacaacaccuucguguccggcaacugcgacguggucaucgggaucgugaacaacacgguguacgacccccugcagcccgagcuggacagcuucaaggaggagcucgacaaguacuucaagaaccacaccucccccgacgucgaccugggcgacaucagcgggaucaacgccuccguggugaacauccagaaggagaucgaccgccugaacgaggucgccaagaaccucaacgagagccugaucgaccugcaggagcucggcaaguacgagcaguacaucaaguggccgugguacaucuggcugggcuucaucgccgggcugaucgcgaucgugauggugaccaucaugcucugcugcaugaccuccugcugcagcugccugaagggcugcugcuccugcgggagcugcugcaaguucgacgaggacgacuccgagcccguccugaagggcgugaagcuccacuacacgugaggacuaguuauaagacugacuagcccgaugggccucccaacgggcccuccuccccuccuugcaccgagauuaauagaucuaaaaaaaaaaaaaaaaaaaaaaaaaaaaaaaaaaaaaaaaaaaaaaaaaaaaaaaaaaaaaaaaaaaaaaaaaaaaaaaaaaaaaaaaaaaaaaaaaaaa

SEQ ID NO: 25632 - RNA, 4017 nt, Artificial Sequence
  SARS-CoV-2/Wuhan/WIV05/2019__EPI_ISL_402128 spike protein mRNA gc (1-1273)(N501Y_D614G)
aggagaaagcuuaccauguucguguuccugguccuccugccccuggugagcucccagugcgugaaccucaccacccgcacgcagcugccgcccgccuacaccaacagcuucacccggggcgucuacuaccccgacaagguguuccgcuccagcgugcugcacuccacccaggaccucuuccugcccuucuucagcaacgucacgugguuccacgccauccacguguccgggaccaacggcaccaagcgguucgacaacccggugcugcccuucaacgacggggucuacuucgcgagcaccgagaaguccaacaucauccgcggcuggaucuucgggacgacccucgacagcaagacccagucccugcugaucgugaacaacgccaccaacguggucaucaaggugugcgaguuccaguucugcaacgaccccuuccucggcguguacuaccacaagaacaacaagagcuggauggaguccgaguuccgggucuacagcuccgccaacaacugcacguucgaguacgugagccagcccuuccugauggaccuggagggcaagcaggggaacuucaagaaccuccgcgaguucguguucaagaacaucgacggcuacuucaagaucuacuccaagcacaccccgaucaaccugguccgggaccugccccagggguucagcgcccucgagccccugguggaccugcccaucggcaucaacaucacccgcuuccagacccuccuggcccugcaccgguccuaccucacgccgggggacagcagcuccggcuggaccgcgggcgccgccgccuacuacgugggguaccugcagccccgcaccuuccugcucaaguacaacgagaacggcaccaucacggacgcggucgacugcgcccuggacccccugagcgagaccaagugcacccucaaguccuucaccguggagaaggggaucuaccagacgagcaacuuccgggugcagcccaccgaguccaucguccgcuucccgaacaucaccaaccugugccccuucggcgagguguucaacgccacccgguucgccagcgucuacgccuggaaccgcaagcggaucuccaacugcguggcggacuacagcgugcuguacaacuccgccagcuucuccacguucaagugcuacggcgucagccccaccaagcucaacgaccugugcuucaccaacguguacgccgacuccuucgugauccgcggggacgagguccggcagaucgcccccggccagaccgggaagaucgccgacuacaacuacaagcugccggacgacuucacgggcugcgugaucgcguggaacagcaacaaccucgacuccaaggucgggggcaacuacaacuaccuguaccgccuguuccgcaagagcaaccucaagcccuucgagcgggacaucuccaccgagaucuaccaggccggcagcacccccugcaacgggguggagggcuucaacugcuacuucccccugcaguccuacggguuccagccgaccuacggcgugggguaccagcccuaccggguggucgugcugagcuucgagcuccugcacgcccccgccacggugugcggccccaagaaguccaccaaccuggucaagaacaagugcgugaacuucaacuucaacggccucaccgggaccggcgugcugaccgagagcaacaagaaguuccugccguuccagcaguucgggcgcgacaucgccgacacgaccgacgcgguccgcgacccccagacccuggagauccucgacaucacccccugcagcuucggcgggguguccgugaucacgccgggcaccaacaccagcaaccaggucgccgugcuguaccagggcgugaacugcaccgagguccccguggccauccacgccgaccagcugacgcccaccuggcggguguacuccaccgggagcaacgucuuccagacccgcgccggcugccucaucggggcggagcacgugaacaacuccuacgagugcgacauccccaucggcgccggcaucugcgccagcuaccagacgcagaccaacuccccgcggcgcgcccggagcguggcgucccagagcaucaucgccuacaccaugucccugggggccgagaacagcgucgccuacuccaacaacagcaucgccauccccaccaacuucacgaucuccgugaccaccgagauccugcccgugagcaugaccaagacgagcgucgacugcaccauguacaucugcggcgacuccaccgagugcagcaaccuccugcugcaguacggguccuucugcacccagcucaaccgcgcgcugacgggcaucgccguggagcaggacaagaacacccaggagguguucgcccaggucaagcagaucuacaagacgcccccgaucaaggacuucgggggcuucaacuucagccagauccugcccgaccccuccaagcccagcaagcgguccuucaucgaggaccuccuguucaacaaggugacccuggccgacgccggcuucaucaagcaguacggggacugccucggcgacaucgcggcccgcgaccugaucugcgcccagaaguucaacgggcugaccgugcucccgccccugcugaccgacgagaugaucgcccaguacaccagcgcccuccuggcgggcaccaucacguccggguggaccuucggcgccggcgccgcccugcagauccccuucgcgaugcagauggccuaccgguucaacgggaucggcgucacccagaacgugcucuacgagaaccagaagcugaucgccaaccaguucaacagcgccaucgggaagauccaggacucccugagcuccaccgccagcgcgcucggcaagcugcaggacguggucaaccagaacgcccaggcccugaacacgcucgugaagcagcuguccagcaacuucggggccaucuccagcgugcugaacgacauccucucccgccuggacaaggucgaggccgaggugcagaucgaccggcugaucaccggccgccuccagagccugcagaccuacgugacccagcagcugauccgggcggccgagauccgcgccagcgccaaccucgccgcgaccaagauguccgagugcguccugggccagagcaagcggguggacuucugcgggaagggcuaccaccugauguccuucccccagagcgccccgcacgggguggucuuccuccacgugacguacguccccgcccaggagaagaacuucaccaccgcccccgcgaucugccacgacggcaaggcccacuucccccgcgaggggguguucguguccaacggcacccacugguucgucacgcagcggaacuucuacgagccgcagaucaucaccaccgacaacaccuucgugagcggcaacugcgacguggucaucgggaucgugaacaacacgguguacgacccccugcagcccgagcuggacuccuucaaggaggagcucgacaaguacuucaagaaccacaccagccccgacgucgaccugggcgacaucuccgggaucaacgccagcguggugaacauccagaaggagaucgaccgccugaacgaggucgccaagaaccucaacgagucccugaucgaccugcaggagcucggcaaguacgagcaguacaucaaguggccgugguacaucuggcugggcuucaucgccgggcugaucgcgaucgugauggugaccaucaugcucugcugcaugaccagcugcugcuccugccugaagggcugcugcagcugcggguccugcugcaaguucgacgaggacgacagcgagcccguccugaagggcgugaagcuccacuacacgugaggacuaguuauaagacugacuagcccgaugggccucccaacgggcccuccuccccuccuugcaccgagauuaauagaucuaaaaaaaaaaaaaaaaaaaaaaaaaaaaaaaaaaaaaaaaaaaaaaaaaaaaaaaaaaaaaaaaaaaaaaaaaaaaaaaaaaaaaaaaaaaaaaaaaaaa

SEQ ID NO: 25633 - RNA, 4011 nt, Artificial Sequence
  SARS-CoV-2/Wuhan/WIV05/2019__EPI_ISL_402128 spike protein mRNA gc (1-1273)(H69del_V70del_D614G)
aggagaaagcuuaccauguucguguuccugguccuccugccccuggugagcucccagugcgugaaccucaccacccgcacgcagcugccgcccgccuacaccaacagcuucacccggggcgucuacuaccccgacaagguguuccgcuccagcgugcugcacuccacccaggaccucuuccugcccuucuucagcaacgucacgugguuccacgccaucuccgggaccaacggcaccaagcgguucgacaacccggugcugcccuucaacgacgggguguacuucgcgagcaccgagaaguccaacaucauccgcggcuggaucuucgggacgacccucgacagcaagacccagucccugcugaucgucaacaacgccaccaacguggugaucaaggucugcgaguuccaguucugcaacgaccccuuccucggcguguacuaccacaagaacaacaagagcuggauggaguccgaguuccggguguacagcuccgccaacaacugcacguucgaguacgucagccagcccuuccugauggaccuggagggcaagcaggggaacuucaagaaccuccgcgaguucguguucaagaacaucgacggcuacuucaagaucuacuccaagcacaccccgaucaaccuggugcgggaccugccccagggguucagcgcccucgagccccuggucgaccugcccaucggcaucaacaucacccgcuuccagacccuccuggcccugcaccgguccuaccucacgccgggggacagcagcuccggcuggaccgcgggcgccgccgccuacuacgugggguaccugcagccccgcaccuuccugcucaaguacaacgagaacggcaccaucacggacgcgguggacugcgcccuggacccccugagcgagaccaagugcacccucaaguccuucaccgucgagaaggggaucuaccagacgagcaacuuccgggugcagcccaccgaguccaucgugcgcuucccgaacaucaccaaccugugccccuucggcgaggucuucaacgccacccgguucgccagcguguacgccuggaaccgcaagcggaucuccaacugcgucgcggacuacagcgugcuguacaacuccgccagcuucuccacguucaagugcuacggcgugagccccaccaagcucaacgaccugugcuucaccaacgucuacgccgacuccuucgugauccgcggggacgaggugcggcagaucgcccccggccagaccgggaagaucgccgacuacaacuacaagcugccggacgacuucacgggcugcgucaucgcguggaacagcaacaaccucgacuccaaggucgggggcaacuacaacuaccuguaccgccuguuccgcaagagcaaccucaagcccuucgagcgggacaucuccaccgagaucuaccaggccggcagcacccccugcaacgggguggagggcuucaacugcuacuucccccugcaguccuacggguuccagccgaccaacggcgugggguaccagcccuaccggguggugguccugagcuucgagcuccugcacgcccccgccacggugugcggccccaagaaguccaccaaccuggugaagaacaagugcgucaacuucaacuucaacggccucaccgggaccggcgugcugaccgagagcaacaagaaguuccugccguuccagcaguucgggcgcgacaucgccgacacgaccgacgcggugcgcgacccccagacccuggagauccucgacaucacccccugcagcuucggcggggucuccgugaucacgccgggcaccaacaccagcaaccagguggccguccuguaccagggcgugaacugcaccgaggugcccgucgccauccacgccgaccagcugacgcccaccuggcggguguacuccaccgggagcaacguguuccagacccgcgccggcugccucaucggggcggagcacgucaacaacuccuacgagugcgacauccccaucggcgccggcaucugcgccagcuaccagacgcagaccaacuccccgcggcgcgcccggagcguggcgucccagagcaucaucgccuacaccaugucccugggggccgagaacagcguggccuacuccaacaacagcaucgccauccccaccaacuucacgaucuccgucaccaccgagauccugcccgugagcaugaccaagacgagcguggacugcaccauguacaucugcggcgacuccaccgagugcagcaaccuccugcugcaguacggguccuucugcacccagcucaaccgcgcgcugacgggcaucgccgucgagcaggacaagaacacccaggagguguucgcccaggugaagcagaucuacaagacgcccccgaucaaggacuucgggggcuucaacuucagccagauccugcccgaccccuccaagcccagcaagcgguccuucaucgaggaccuccuguucaacaaggucacccuggccgacgccggcuucaucaagcaguacggggacugccucggcgacaucgcggcccgcgaccugaucugcgcccagaaguucaacgggcugaccgugcucccgccccugcugaccgacgagaugaucgcccaguacaccagcgcccuccuggcgggcaccaucacguccggguggaccuucggcgccggcgccgcccugcagauccccuucgcgaugcagauggccuaccgguucaacgggaucggcgugacccagaacguccucuacgagaaccagaagcugaucgccaaccaguucaacagcgccaucgggaagauccaggacucccugagcuccaccgccagcgcgcucggcaagcugcaggacguggugaaccagaacgcccaggcccugaacacgcucgucaagcagcuguccagcaacuucggggccaucuccagcgugcugaacgacauccucucccgccuggacaagguggaggccgagguccagaucgaccggcugaucaccggccgccuccagagccugcagaccuacgugacccagcagcugauccgggcggccgagauccgcgccagcgccaaccucgccgcgaccaagauguccgagugcgugcugggccagagcaagcgggucgacuucugcgggaagggcuaccaccugauguccuucccccagagcgccccgcacggggugguguuccuccacgucacguacgugcccgcccaggagaagaacuucaccaccgcccccgcgaucugccacgacggcaaggcccacuucccccgcgagggggucuucguguccaacggcacccacugguucgugacgcagcggaacuucuacgagccgcagaucaucaccaccgacaacaccuucgucagcggcaacugcgacguggugaucgggaucgucaacaacacgguguacgacccccugcagcccgagcuggacuccuucaaggaggagcucgacaaguacuucaagaaccacaccagccccgacguggaccugggcgacaucuccgggaucaacgccagcgucgugaacauccagaaggagaucgaccgccugaacgagguggccaagaaccucaacgagucccugaucgaccugcaggagcucggcaaguacgagcaguacaucaaguggccgugguacaucuggcugggcuucaucgccgggcugaucgcgaucgucauggugaccaucaugcucugcugcaugaccagcugcugcuccugccugaagggcugcugcagcugcggguccugcugcaaguucgacgaggacgacagcgagcccgugcugaagggcgucaagcuccacuacacgugaggacuaguuauaagacugacuagcccgaugggccucccaacgggcccuccuccccuccuugcaccgagauuaauagaucuaaaaaaaaaaaaaaaaaaaaaaaaaaaaaaaaaaaaaaaaaaaaaaaaaaaaaaaaaaaaaaaaaaaaaaaaaaaaaaaaaaaaaaaaaaaaaaaaaaaa

SEQ ID NO: 25634 - RNA, 4017 nt, Artificial Sequence
  SARS-CoV-2/Wuhan/WIV05/2019__EPI_ISL_402128 spike protein mRNA gc (1-1273)(Y453F_D614G)
aggagaaagcuuaccauguucguguuccugguccuccugccccuggugagcucccagugcgugaaccucaccacccgcacgcagcugccgcccgccuacaccaacagcuucacccggggcgucuacuaccccgacaagguguuccgcuccagcgugcugcacuccacccaggaccucuuccugcccuucuucagcaacgucacgugguuccacgccauccacguguccgggaccaacggcaccaagcgguucgacaacccggugcugcccuucaacgacggggucuacuucgcgagcaccgagaaguccaacaucauccgcggcuggaucuucgggacgacccucgacagcaagacccagucccugcugaucgugaacaacgccaccaacguggucaucaaggugugcgaguuccaguucugcaacgaccccuuccucggcguguacuaccacaagaacaacaagagcuggauggaguccgaguuccgggucuacagcuccgccaacaacugcacguucgaguacgugagccagcccuuccugauggaccuggagggcaagcaggggaacuucaagaaccuccgcgaguucguguucaagaacaucgacggcuacuucaagaucuacuccaagcacaccccgaucaaccugguccgggaccugccccagggguucagcgcccucgagccccugguggaccugcccaucggcaucaacaucacccgcuuccagacccuccuggcccugcaccgguccuaccucacgccgggggacagcagcuccggcuggaccgcgggcgccgccgccuacuacgugggguaccugcagccccgcaccuuccugcucaaguacaacgagaacggcaccaucacggacgcggucgacugcgcccuggacccccugagcgagaccaagugcacccucaaguccuucaccguggagaaggggaucuaccagacgagcaacuuccgggugcagcccaccgaguccaucguccgcuucccgaacaucaccaaccugugccccuucggcgagguguucaacgccacccgguucgccagcgucuacgccuggaaccgcaagcggaucuccaacugcguggcggacuacagcgugcuguacaacuccgccagcuucuccacguucaagugcuacggcgucagccccaccaagcucaacgaccugugcuucaccaacguguacgccgacuccuucgugauccgcggggacgagguccggcagaucgcccccggccagaccgggaagaucgccgacuacaacuacaagcugccggacgacuucacgggcugcgugaucgcguggaacagcaacaaccucgacuccaaggucgggggcaacuacaacuaccuguuccgccuguuccgcaagagcaaccucaagcccuucgagcgggacaucuccaccgagaucuaccaggccggcagcacccccugcaacgggguggagggcuucaacugcuacuucccccugcaguccuacggguuccagccgaccaacggcgugggguaccagcccuaccggguggucgugcugagcuucgagcuccugcacgcccccgccacggugugcggccccaagaaguccaccaaccuggucaagaacaagugcgugaacuucaacuucaacggccucaccgggaccggcgugcugaccgagagcaacaagaaguuccugccguuccagcaguucgggcgcgacaucgccgacacgaccgacgcgguccgcgacccccagacccuggagauccucgacaucacccccugcagcuucggcgggguguccgugaucacgccgggcaccaacaccagcaaccaggucgccgugcuguaccagggcgugaacugcaccgagguccccguggccauccacgccgaccagcugacgcccaccuggcggguguacuccaccgggagcaacgucuuccagacccgcgccggcugccucaucggggcggagcacgugaacaacuccuacgagugcgacauccccaucggcgccggcaucugcgccagcuaccagacgcagaccaacuccccgcggcgcgcccggagcguggcgucccagagcaucaucgccuacaccaugucccugggggccgagaacagcgucgccuacuccaacaacagcaucgccauccccaccaacuucacgaucuccgugaccaccgagauccugcccgugagcaugaccaagacgagcgucgacugcaccauguacaucugcggcgacuccaccgagugcagcaaccuccugcugcaguacggguccuucugcacccagcucaaccgcgcgcugacgggcaucgccguggagcaggacaagaacacccaggagguguucgcccaggucaagcagaucuacaagacgcccccgaucaaggacuucgggggcuucaacuucagccagauccugcccgaccccuccaagcccagcaagcgguccuucaucgaggaccuccuguucaacaaggugacccuggccgacgccggcuucaucaagcaguacggggacugccucggcgacaucgcggcccgcgaccugaucugcgcccagaaguucaacgggcugaccgugcucccgccccugcugaccgacgagaugaucgcccaguacaccagcgcccuccuggcgggcaccaucacguccggguggaccuucggcgccggcgccgcccugcagauccccuucgcgaugcagauggccuaccgguucaacgggaucggcgucacccagaacgugcucuacgagaaccagaagcugaucgccaaccaguucaacagcgccaucgggaagauccaggacucccugagcuccaccgccagcgcgcucggcaagcugcaggacguggucaaccagaacgcccaggcccugaacacgcucgugaagcagcuguccagcaacuucggggccaucuccagcgugcugaacgacauccucucccgccuggacaaggucgaggccgaggugcagaucgaccggcugaucaccggccgccuccagagccugcagaccuacgugacccagcagcugauccgggcggccgagauccgcgccagcgccaaccucgccgcgaccaagauguccgagugcguccugggccagagcaagcggguggacuucugcgggaagggcuaccaccugauguccuucccccagagcgccccgcacgggguggucuuccuccacgugacguacguccccgcccaggagaagaacuucaccaccgcccccgcgaucugccacgacggcaaggcccacuucccccgcgaggggguguucguguccaacggcacccacugguucgucacgcagcggaacuucuacgagccgcagaucaucaccaccgacaacaccuucgugagcggcaacugcgacguggucaucgggaucgugaacaacacgguguacgacccccugcagcccgagcuggacuccuucaaggaggagcucgacaaguacuucaagaaccacaccagccccgacgucgaccugggcgacaucuccgggaucaacgccagcguggugaacauccagaaggagaucgaccgccugaacgaggucgccaagaaccucaacgagucccugaucgaccugcaggagcucggcaaguacgagcaguacaucaaguggccgugguacaucuggcugggcuucaucgccgggcugaucgcgaucgugauggugaccaucaugcucugcugcaugaccagcugcugcuccugccugaagggcugcugcagcugcggguccugcugcaaguucgacgaggacgacagcgagcccguccugaagggcgugaagcuccacuacacgugaggacuaguuauaagacugacuagcccgaugggccucccaacgggcccuccuccccuccuugcaccgagauuaauagaucuaaaaaaaaaaaaaaaaaaaaaaaaaaaaaaaaaaaaaaaaaaaaaaaaaaaaaaaaaaaaaaaaaaaaaaaaaaaaaaaaaaaaaaaaaaaaaaaaaaaa

SEQ ID NO: 25635 - RNA, 4017 nt, Artificial Sequence
  SARS-CoV-2/Wuhan/WIV05/2019__EPI_ISL_402128 spike protein mRNA gc (1-1273)(D614G_I692V)
aggagaaagcuuaccauguucguguuccugguccuccugccccuggugagcucccagugcgugaaccucaccacccgcacgcagcugccgcccgccuacaccaacagcuucacccggggcgucuacuaccccgacaagguguuccgcuccagcgugcugcacuccacccaggaccucuuccugcccuucuucagcaacgucacgugguuccacgccauccacguguccgggaccaacggcaccaagcgguucgacaacccggugcugcccuucaacgacggggucuacuucgcgagcaccgagaaguccaacaucauccgcggcuggaucuucgggacgacccucgacagcaagacccagucccugcugaucgugaacaacgccaccaacguggucaucaaggugugcgaguuccaguucugcaacgaccccuuccucggcguguacuaccacaagaacaacaagagcuggauggaguccgaguuccgggucuacagcuccgccaacaacugcacguucgaguacgugagccagcccuuccugauggaccuggagggcaagcaggggaacuucaagaaccuccgcgaguucguguucaagaacaucgacggcuacuucaagaucuacuccaagcacaccccgaucaaccugguccgggaccugccccagggguucagcgcccucgagccccugguggaccugcccaucggcaucaacaucacccgcuuccagacccuccuggcccugcaccgguccuaccucacgccgggggacagcagcuccggcuggaccgcgggcgccgccgccuacuacgugggguaccugcagccccgcaccuuccugcucaaguacaacgagaacggcaccaucacggacgcggucgacugcgcccuggacccccugagcgagaccaagugcacccucaaguccuucaccguggagaaggggaucuaccagacgagcaacuuccgggugcagcccaccgaguccaucguccgcuucccgaacaucaccaaccugugccccuucggcgagguguucaacgccacccgguucgccagcgucuacgccuggaaccgcaagcggaucuccaacugcguggcggacuacagcgugcuguacaacuccgccagcuucuccacguucaagugcuacggcgucagccccaccaagcucaacgaccugugcuucaccaacguguacgccgacuccuucgugauccgcggggacgagguccggcagaucgcccccggccagaccgggaagaucgccgacuacaacuacaagcugccggacgacuucacgggcugcgugaucgcguggaacagcaacaaccucgacuccaaggucgggggcaacuacaacuaccuguaccgccuguuccgcaagagcaaccucaagcccuucgagcgggacaucuccaccgagaucuaccaggccggcagcacccccugcaacgggguggagggcuucaacugcuacuucccccugcaguccuacggguuccagccgaccaacggcgugggguaccagcccuaccggguggucgugcugagcuucgagcuccugcacgcccccgccacggugugcggccccaagaaguccaccaaccuggucaagaacaagugcgugaacuucaacuucaacggccucaccgggaccggcgugcugaccgagagcaacaagaaguuccugccguuccagcaguucgggcgcgacaucgccgacacgaccgacgcgguccgcgacccccagacccuggagauccucgacaucacccccugcagcuucggcgggguguccgugaucacgccgggcaccaacaccagcaaccaggucgccgugcuguaccagggcgugaacugcaccgagguccccguggccauccacgccgaccagcugacgcccaccuggcggguguacuccaccgggagcaacgucuuccagacccgcgccggcugccucaucggggcggagcacgugaacaacuccuacgagugcgacauccccaucggcgccggcaucugcgccagcuaccagacgcagaccaacuccccgcggcgcgcccggagcguggcgucccagagcgucaucgccuacaccaugucccugggggccgagaacagcguggccuacuccaacaacagcaucgccauccccaccaacuucacgaucuccgugaccaccgagauccugcccgucagcaugaccaagacgagcguggacugcaccauguacaucugcggcgacuccaccgagugcagcaaccuccugcugcaguacggguccuucugcacccagcucaaccgcgcgcugacgggcaucgccguggagcaggacaagaacacccaggaggucuucgcccaggugaagcagaucuacaagacgcccccgaucaaggacuucgggggcuucaacuucagccagauccugcccgaccccuccaagcccagcaagcgguccuucaucgaggaccuccuguucaacaaggugacccuggccgacgccggcuucaucaagcaguacggggacugccucggcgacaucgcggcccgcgaccugaucugcgcccagaaguucaacgggcugaccguccucccgccccugcugaccgacgagaugaucgcccaguacaccagcgcccuccuggcgggcaccaucacguccggguggaccuucggcgccggcgccgcccugcagauccccuucgcgaugcagauggccuaccgguucaacgggaucggcgugacccagaacgugcucuacgagaaccagaagcugaucgccaaccaguucaacagcgccaucgggaagauccaggacucccugagcuccaccgccagcgcgcucggcaagcugcaggacgucgugaaccagaacgcccaggcccugaacacgcucgugaagcagcuguccagcaacuucggggccaucuccagcguccugaacgacauccucucccgccuggacaagguggaggccgaggugcagaucgaccggcugaucaccggccgccuccagagccugcagaccuacgucacccagcagcugauccgggcggccgagauccgcgccagcgccaaccucgccgcgaccaagauguccgagugcgugcugggccagagcaagcggguggacuucugcgggaagggcuaccaccugauguccuucccccagagcgccccgcacggggucguguuccuccacgucacguacgugcccgcccaggagaagaacuucaccaccgcccccgcgaucugccacgacggcaaggcccacuucccccgcgaggggguguucgucuccaacggcacccacugguucgugacgcagcggaacuucuacgagccgcagaucaucaccaccgacaacaccuucgugagcggcaacugcgacgucgugaucgggaucgugaacaacacggucuacgacccccugcagcccgagcuggacuccuucaaggaggagcucgacaaguacuucaagaaccacaccagccccgacguggaccugggcgacaucuccgggaucaacgccagcguggucaacauccagaaggagaucgaccgccugaacgagguggccaagaaccucaacgagucccugaucgaccugcaggagcucggcaaguacgagcaguacaucaaguggccgugguacaucuggcugggcuucaucgccgggcugaucgcgaucgugauggucaccaucaugcucugcugcaugaccagcugcugcuccugccugaagggcugcugcagcugcggguccugcugcaaguucgacgaggacgacagcgagcccgugcugaagggcgugaagcuccacuacacgugaggacuaguuauaagacugacuagcccgaugggccucccaacgggcccuccuccccuccuugcaccgagauuaauagaucuaaaaaaaaaaaaaaaaaaaaaaaaaaaaaaaaaaaaaaaaaaaaaaaaaaaaaaaaaaaaaaaaaaaaaaaaaaaaaaaaaaaaaaaaaaaaaaaaaaaa

SEQ ID NO: 25636 - RNA, 4017 nt, Artificial Sequence
  SARS-CoV-2/Wuhan/WIV05/2019__EPI_ISL_402128 spike protein mRNA gc (1-1273)(D614G_M1229I)
aggagaaagcuuaccauguucguguuccugguccuccugccccuggugagcucccagugcgugaaccucaccacccgcacgcagcugccgcccgccuacaccaacagcuucacccggggcgucuacuaccccgacaagguguuccgcuccagcgugcugcacuccacccaggaccucuuccugcccuucuucagcaacgucacgugguuccacgccauccacguguccgggaccaacggcaccaagcgguucgacaacccggugcugcccuucaacgacggggucuacuucgcgagcaccgagaaguccaacaucauccgcggcuggaucuucgggacgacccucgacagcaagacccagucccugcugaucgugaacaacgccaccaacguggucaucaaggugugcgaguuccaguucugcaacgaccccuuccucggcguguacuaccacaagaacaacaagagcuggauggaguccgaguuccgggucuacagcuccgccaacaacugcacguucgaguacgugagccagcccuuccugauggaccuggagggcaagcaggggaacuucaagaaccuccgcgaguucguguucaagaacaucgacggcuacuucaagaucuacuccaagcacaccccgaucaaccugguccgggaccugccccagggguucagcgcccucgagccccugguggaccugcccaucggcaucaacaucacccgcuuccagacccuccuggcccugcaccgguccuaccucacgccgggggacagcagcuccggcuggaccgcgggcgccgccgccuacuacgugggguaccugcagccccgcaccuuccugcucaaguacaacgagaacggcaccaucacggacgcggucgacugcgcccuggacccccugagcgagaccaagugcacccucaaguccuucaccguggagaaggggaucuaccagacgagcaacuuccgggugcagcccaccgaguccaucguccgcuucccgaacaucaccaaccugugccccuucggcgagguguucaacgccacccgguucgccagcgucuacgccuggaaccgcaagcggaucuccaacugcguggcggacuacagcgugcuguacaacuccgccagcuucuccacguucaagugcuacggcgucagccccaccaagcucaacgaccugugcuucaccaacguguacgccgacuccuucgugauccgcggggacgagguccggcagaucgcccccggccagaccgggaagaucgccgacuacaacuacaagcugccggacgacuucacgggcugcgugaucgcguggaacagcaacaaccucgacuccaaggucgggggcaacuacaacuaccuguaccgccuguuccgcaagagcaaccucaagcccuucgagcgggacaucuccaccgagaucuaccaggccggcagcacccccugcaacgggguggagggcuucaacugcuacuucccccugcaguccuacggguuccagccgaccaacggcgugggguaccagcccuaccggguggucgugcugagcuucgagcuccugcacgcccccgccacggugugcggccccaagaaguccaccaaccuggucaagaacaagugcgugaacuucaacuucaacggccucaccgggaccggcgugcugaccgagagcaacaagaaguuccugccguuccagcaguucgggcgcgacaucgccgacacgaccgacgcgguccgcgacccccagacccuggagauccucgacaucacccccugcagcuucggcgggguguccgugaucacgccgggcaccaacaccagcaaccaggucgccgugcuguaccagggcgugaacugcaccgagguccccguggccauccacgccgaccagcugacgcccaccuggcggguguacuccaccgggagcaacgucuuccagacccgcgccggcugccucaucggggcggagcacgugaacaacuccuacgagugcgacauccccaucggcgccggcaucugcgccagcuaccagacgcagaccaacuccccgcggcgcgcccggagcguggcgucccagagcaucaucgccuacaccaugucccugggggccgagaacagcgucgccuacuccaacaacagcaucgccauccccaccaacuucacgaucuccgugaccaccgagauccugcccgugagcaugaccaagacgagcgucgacugcaccauguacaucugcggcgacuccaccgagugcagcaaccuccugcugcaguacggguccuucugcacccagcucaaccgcgcgcugacgggcaucgccguggagcaggacaagaacacccaggagguguucgcccaggucaagcagaucuacaagacgcccccgaucaaggacuucgggggcuucaacuucagccagauccugcccgaccccuccaagcccagcaagcgguccuucaucgaggaccuccuguucaacaaggugacccuggccgacgccggcuucaucaagcaguacggggacugccucggcgacaucgcggcccgcgaccugaucugcgcccagaaguucaacgggcugaccgugcucccgccccugcugaccgacgagaugaucgcccaguacaccagcgcccuccuggcgggcaccaucacguccggguggaccuucggcgccggcgccgcccugcagauccccuucgcgaugcagauggccuaccgguucaacgggaucggcgucacccagaacgugcucuacgagaaccagaagcugaucgccaaccaguucaacagcgccaucgggaagauccaggacucccugagcuccaccgccagcgcgcucggcaagcugcaggacguggucaaccagaacgcccaggcccugaacacgcucgugaagcagcuguccagcaacuucggggccaucuccagcgugcugaacgacauccucucccgccuggacaaggucgaggccgaggugcagaucgaccggcugaucaccggccgccuccagagccugcagaccuacgugacccagcagcugauccgggcggccgagauccgcgccagcgccaaccucgccgcgaccaagauguccgagugcguccugggccagagcaagcggguggacuucugcgggaagggcuaccaccugauguccuucccccagagcgccccgcacgggguggucuuccuccacgugacguacguccccgcccaggagaagaacuucaccaccgcccccgcgaucugccacgacggcaaggcccacuucccccgcgaggggguguucguguccaacggcacccacugguucgucacgcagcggaacuucuacgagccgcagaucaucaccaccgacaacaccuucgugagcggcaacugcgacguggucaucgggaucgugaacaacacgguguacgacccccugcagcccgagcuggacuccuucaaggaggagcucgacaaguacuucaagaaccacaccagccccgacgucgaccugggcgacaucuccgggaucaacgccagcguggugaacauccagaaggagaucgaccgccugaacgaggucgccaagaaccucaacgagucccugaucgaccugcaggagcucggcaaguacgagcaguacaucaaguggccgugguacaucuggcugggcuucaucgccgggcugaucgcgaucgugaucgugaccaucaugcucugcugcaugaccagcugcugcuccugccugaagggcugcugcagcugcggguccugcugcaaguucgacgaggacgacagcgagcccguccugaagggcgugaagcuccacuacacgugaggacuaguuauaagacugacuagcccgaugggccucccaacgggcccuccuccccuccuugcaccgagauuaauagaucuaaaaaaaaaaaaaaaaaaaaaaaaaaaaaaaaaaaaaaaaaaaaaaaaaaaaaaaaaaaaaaaaaaaaaaaaaaaaaaaaaaaaaaaaaaaaaaaaaaaa

SEQ ID NO: 25637 - RNA, 4011 nt, Artificial Sequence
  SARS-CoV-2/Wuhan/WIV05/2019__EPI_ISL_402128 spike protein mRNA gc (1-1273)(H69del_V70del_A222V_Y453F_S477N_D614G_I692V)
aggagaaagcuuaccauguucguguuccugguccuccugccccuggugagcucccagugcgugaaccucaccacccgcacgcagcugccgcccgccuacaccaacagcuucacccggggcgucuacuaccccgacaagguguuccgcuccagcgugcugcacuccacccaggaccucuuccugcccuucuucagcaacgucacgugguuccacgccaucuccgggaccaacggcaccaagcgguucgacaacccggugcugcccuucaacgacgggguguacuucgcgagcaccgagaaguccaacaucauccgcggcuggaucuucgggacgacccucgacagcaagacccagucccugcugaucgucaacaacgccaccaacguggugaucaaggucugcgaguuccaguucugcaacgaccccuuccucggcguguacuaccacaagaacaacaagagcuggauggaguccgaguuccggguguacagcuccgccaacaacugcacguucgaguacgucagccagcccuuccugauggaccuggagggcaagcaggggaacuucaagaaccuccgcgaguucguguucaagaacaucgacggcuacuucaagaucuacuccaagcacaccccgaucaaccuggugcgggaccugccccagggguucagcguccucgagccccugguggaccugcccaucggcaucaacaucacccgcuuccagacccuccuggcccugcaccgguccuaccucacgccgggggacagcagcuccggcuggaccgccggcgcggccgccuacuacgugggguaccugcagccccgcaccuuccugcucaaguacaacgagaacggcaccaucacggacgccgucgacugcgcgcuggacccccugagcgagaccaagugcacccucaaguccuucaccguggagaaggggaucuaccagacgagcaacuuccgggugcagcccaccgaguccaucguccgcuucccgaacaucaccaaccugugccccuucggcgagguguucaacgccacccgguucgccagcgucuacgccuggaaccgcaagcggaucuccaacugcguggccgacuacagcgugcuguacaacuccgcgagcuucuccacguucaagugcuacggcgucagccccaccaagcucaacgaccugugcuucaccaacguguacgccgacuccuucgugauccgcggggacgagguccggcagaucgcccccggccagaccgggaagaucgccgacuacaacuacaagcugccggacgacuucacgggcugcgugaucgccuggaacagcaacaaccucgacuccaaggucgggggcaacuacaacuaccuguuccgccuguuccgcaagagcaaccucaagcccuucgagcgggacaucuccaccgagaucuaccaggcgggcaacacccccugcaacgggguggagggcuucaacugcuacuucccccugcagagcuacggguuccagccgaccaacggcgugggguaccagcccuaccggguggucgugcuguccuucgagcuccugcacgcccccgccacggugugcggccccaagaaguccaccaaccuggucaagaacaagugcgugaacuucaacuucaacggccucaccgggaccggcgugcugaccgagagcaacaagaaguuccugccguuccagcaguucgggcgcgacaucgccgacacgaccgacgccguccgcgacccccagacccuggagauccucgacaucacccccugcagcuucggcggggugagcgugaucacgccgggcaccaacaccuccaaccaggucgcggugcuguaccagggcgugaacugcaccgagguccccguggccauccacgccgaccagcugacgcccaccuggcggguguacagcaccggguccaacgucuuccagacccgcgccggcugccucaucggggccgagcacgugaacaacagcuacgagugcgacauccccaucggcgcgggcaucugcgccuccuaccagacgcagaccaacagcccgcggcgcgcccgguccguggccagccaguccgucaucgcguacaccaugagccugggggccgagaacuccguggccuacagcaacaacuccaucgccauccccaccaacuucacgaucagcgugaccaccgagauccugcccgucuccaugaccaagacgagcguggacugcaccauguacaucugcggcgacagcaccgagugcuccaaccuccugcugcaguacgggagcuucugcacccagcucaaccgcgcccugacgggcaucgcgguggagcaggacaagaacacccaggaggucuucgcccaggugaagcagaucuacaagacgcccccgaucaaggacuucgggggcuucaacuucucccagauccugcccgaccccagcaagcccuccaagcggagcuucaucgaggaccuccuguucaacaaggugacccuggccgacgccggcuucaucaagcaguacggggacugccucggcgacaucgccgcgcgcgaccugaucugcgcccagaaguucaacgggcugaccguccucccgccccugcugaccgacgagaugaucgcccaguacaccuccgcccuccuggccggcaccaucacgagcggguggaccuucggcgcgggcgccgcccugcagauccccuucgccaugcagauggcguaccgguucaacgggaucggcgugacccagaacgugcucuacgagaaccagaagcugaucgccaaccaguucaacuccgccaucgggaagauccaggacagccuguccagcaccgccuccgcccucggcaagcugcaggacgucgugaaccagaacgcgcaggcccugaacacgcucgugaagcagcugagcuccaacuucggggccaucagcuccguccugaacgacauccucagccgccuggacaagguggaggccgaggugcagaucgaccggcugaucaccggccgccuccagucccugcagaccuacgucacccagcagcugauccgggccgcggagauccgcgccagcgccaaccucgccgccaccaagaugagcgagugcgugcugggccaguccaagcggguggacuucugcgggaagggcuaccaccugaugagcuucccccaguccgcgccgcacggggucguguuccuccacgucacguacgugcccgcccaggagaagaacuucaccaccgcccccgccaucugccacgacggcaaggcgcacuucccccgcgaggggguguucgucagcaacggcacccacugguucgugacgcagcggaacuucuacgagccgcagaucaucaccaccgacaacaccuucguguccggcaacugcgacgucgugaucgggaucgugaacaacacggucuacgacccccugcagcccgagcuggacagcuucaaggaggagcucgacaaguacuucaagaaccacaccucccccgacguggaccugggcgacaucagcgggaucaacgccuccguggucaacauccagaaggagaucgaccgccugaacgagguggccaagaaccucaacgagagccugaucgaccugcaggagcucggcaaguacgagcaguacaucaaguggccgugguacaucuggcugggcuucaucgccgggcugaucgccaucgugauggucaccaucaugcucugcugcaugaccuccugcugcagcugccugaagggcugcugcuccugcgggagcugcugcaaguucgacgaggacgacuccgagcccgugcugaagggcgugaagcuccacuacacgugaggacuaguuauaagacugacuagcccgaugggccucccaacgggcccuccuccccuccuugcaccgagauuaauagaucuaaaaaaaaaaaaaaaaaaaaaaaaaaaaaaaaaaaaaaaaaaaaaaaaaaaaaaaaaaaaaaaaaaaaaaaaaaaaaaaaaaaaaaaaaaaaaaaaaaaa

SEQ ID NO: 25638 - RNA, 4011 nt, Artificial Sequence
  SARS-CoV-2/Wuhan/WIV05/2019__EPI_ISL_402128 spike protein mRNA gc (1-1273)(H69del_V70del_Y453F_D614G_I692V_M1229I)
aggagaaagcuuaccauguucguguuccugguccuccugccccuggugagcucccagugcgugaaccucaccacccgcacgcagcugccgcccgccuacaccaacagcuucacccggggcgucuacuaccccgacaagguguuccgcuccagcgugcugcacuccacccaggaccucuuccugcccuucuucagcaacgucacgugguuccacgccaucuccgggaccaacggcaccaagcgguucgacaacccggugcugcccuucaacgacgggguguacuucgcgagcaccgagaaguccaacaucauccgcggcuggaucuucgggacgacccucgacagcaagacccagucccugcugaucgucaacaacgccaccaacguggugaucaaggucugcgaguuccaguucugcaacgaccccuuccucggcguguacuaccacaagaacaacaagagcuggauggaguccgaguuccggguguacagcuccgccaacaacugcacguucgaguacgucagccagcccuuccugauggaccuggagggcaagcaggggaacuucaagaaccuccgcgaguucguguucaagaacaucgacggcuacuucaagaucuacuccaagcacaccccgaucaaccuggugcgggaccugccccagggguucagcgcccucgagccccuggucgaccugcccaucggcaucaacaucacccgcuuccagacccuccuggcccugcaccgguccuaccucacgccgggggacagcagcuccggcuggaccgcgggcgccgccgccuacuacgugggguaccugcagccccgcaccuuccugcucaaguacaacgagaacggcaccaucacggacgcgguggacugcgcccuggacccccugagcgagaccaagugcacccucaaguccuucaccgucgagaaggggaucuaccagacgagcaacuuccgggugcagcccaccgaguccaucgugcgcuucccgaacaucaccaaccugugccccuucggcgaggucuucaacgccacccgguucgccagcguguacgccuggaaccgcaagcggaucuccaacugcgucgcggacuacagcgugcuguacaacuccgccagcuucuccacguucaagugcuacggcgugagccccaccaagcucaacgaccugugcuucaccaacgucuacgccgacuccuucgugauccgcggggacgaggugcggcagaucgcccccggccagaccgggaagaucgccgacuacaacuacaagcugccggacgacuucacgggcugcgucaucgcguggaacagcaacaaccucgacuccaaggucgggggcaacuacaacuaccuguuccgccuguuccgcaagagcaaccucaagcccuucgagcgggacaucuccaccgagaucuaccaggccggcagcacccccugcaacgggguggagggcuucaacugcuacuucccccugcaguccuacggguuccagccgaccaacggcgugggguaccagcccuaccggguggugguccugagcuucgagcuccugcacgcccccgccacggugugcggccccaagaaguccaccaaccuggugaagaacaagugcgucaacuucaacuucaacggccucaccgggaccggcgugcugaccgagagcaacaagaaguuccugccguuccagcaguucgggcgcgacaucgccgacacgaccgacgcggugcgcgacccccagacccuggagauccucgacaucacccccugcagcuucggcggggucuccgugaucacgccgggcaccaacaccagcaaccagguggccguccuguaccagggcgugaacugcaccgaggugcccgucgccauccacgccgaccagcugacgcccaccuggcggguguacuccaccgggagcaacguguuccagacccgcgccggcugccucaucggggcggagcacgucaacaacuccuacgagugcgacauccccaucggcgccggcaucugcgccagcuaccagacgcagaccaacuccccgcggcgcgcccggagcguggcgucccagagcgugaucgccuacaccaugucccugggggccgagaacagcgucgccuacuccaacaacagcaucgccauccccaccaacuucacgaucuccgugaccaccgagauccugcccgugagcaugaccaagacgagcgucgacugcaccauguacaucugcggcgacuccaccgagugcagcaaccuccugcugcaguacggguccuucugcacccagcucaaccgcgcgcugacgggcaucgccguggagcaggacaagaacacccaggagguguucgcccaggucaagcagaucuacaagacgcccccgaucaaggacuucgggggcuucaacuucagccagauccugcccgaccccuccaagcccagcaagcgguccuucaucgaggaccuccuguucaacaaggugacccuggccgacgccggcuucaucaagcaguacggggacugccucggcgacaucgcggcccgcgaccugaucugcgcccagaaguucaacgggcugaccgugcucccgccccugcugaccgacgagaugaucgcccaguacaccagcgcccuccuggcgggcaccaucacguccggguggaccuucggcgccggcgccgcccugcagauccccuucgcgaugcagauggccuaccgguucaacgggaucggcgucacccagaacgugcucuacgagaaccagaagcugaucgccaaccaguucaacagcgccaucgggaagauccaggacucccugagcuccaccgccagcgcgcucggcaagcugcaggacguggucaaccagaacgcccaggcccugaacacgcucgugaagcagcuguccagcaacuucggggccaucuccagcgugcugaacgacauccucucccgccuggacaaggucgaggccgaggugcagaucgaccggcugaucaccggccgccuccagagccugcagaccuacgugacccagcagcugauccgggcggccgagauccgcgccagcgccaaccucgccgcgaccaagauguccgagugcguccugggccagagcaagcggguggacuucugcgggaagggcuaccaccugauguccuucccccagagcgccccgcacgggguggucuuccuccacgugacguacguccccgcccaggagaagaacuucaccaccgcccccgcgaucugccacgacggcaaggcccacuucccccgcgaggggguguucguguccaacggcacccacugguucgucacgcagcggaacuucuacgagccgcagaucaucaccaccgacaacaccuucgugagcggcaacugcgacguggucaucgggaucgugaacaacacgguguacgacccccugcagcccgagcuggacuccuucaaggaggagcucgacaaguacuucaagaaccacaccagccccgacgucgaccugggcgacaucuccgggaucaacgccagcguggugaacauccagaaggagaucgaccgccugaacgaggucgccaagaaccucaacgagucccugaucgaccugcaggagcucggcaaguacgagcaguacaucaaguggccgugguacaucuggcugggcuucaucgccgggcugaucgcgaucgugaucgugaccaucaugcucugcugcaugaccagcugcugcuccugccugaagggcugcugcagcugcggguccugcugcaaguucgacgaggacgacagcgagcccguccugaagggcgugaagcuccacuacacgugaggacuaguuauaagacugacuagcccgaugggccucccaacgggcccuccuccccuccuugcaccgagauuaauagaucuaaaaaaaaaaaaaaaaaaaaaaaaaaaaaaaaaaaaaaaaaaaaaaaaaaaaaaaaaaaaaaaaaaaaaaaaaaaaaaaaaaaaaaaaaaaaaaaaaaaa

SEQ ID NO: 25639 - RNA, 4008 nt, Artificial Sequence
  SARS-CoV-2/Wuhan/WIV05/2019__EPI_ISL_402128 spike protein mRNA gc (1-1273)(H69del_V70del_Y144del_N501Y_A570D_D614G_P681H_T716I_S982 A_D1118H)
aggagaaagcuuaccauguucguguuccugguccuccugccccuggugagcucccagugcgugaaccucaccacccgcacgcagcugccgcccgccuacaccaacagcuucacccggggcgucuacuaccccgacaagguguuccgcuccagcgugcugcacuccacccaggaccucuuccugcccuucuucagcaacgucacgugguuccacgccaucuccgggaccaacggcaccaagcgguucgacaacccggugcugcccuucaacgacgggguguacuucgcgagcaccgagaaguccaacaucauccgcggcuggaucuucgggacgacccucgacagcaagacccagucccugcugaucgucaacaacgccaccaacguggugaucaaggucugcgaguuccaguucugcaacgaccccuuccucggcguguaccacaagaacaacaagagcuggauggaguccgaguuccggguguacagcuccgccaacaacugcacguucgaguacgucagccagcccuuccugauggaccuggagggcaagcaggggaacuucaagaaccuccgcgaguucguguucaagaacaucgacggcuacuucaagaucuacuccaagcacaccccgaucaaccuggugcgggaccugccccagggguucagcgcccucgagccccuggucgaccugcccaucggcaucaacaucacccgcuuccagacccuccuggcccugcaccgguccuaccucacgccgggggacagcagcuccggcuggaccgcgggcgccgccgccuacuacgugggguaccugcagccccgcaccuuccugcucaaguacaacgagaacggcaccaucacggacgcgguggacugcgcccuggacccccugagcgagaccaagugcacccucaaguccuucaccgucgagaaggggaucuaccagacgagcaacuuccgggugcagcccaccgaguccaucgugcgcuucccgaacaucaccaaccugugccccuucggcgaggucuucaacgccacccgguucgccagcguguacgccuggaaccgcaagcggaucuccaacugcgucgcggacuacagcgugcuguacaacuccgccagcuucuccacguucaagugcuacggcgugagccccaccaagcucaacgaccugugcuucaccaacgucuacgccgacuccuucgugauccgcggggacgaggugcggcagaucgcccccggccagaccgggaagaucgccgacuacaacuacaagcugccggacgacuucacgggcugcgucaucgcguggaacagcaacaaccucgacuccaaggucgggggcaacuacaacuaccuguaccgccuguuccgcaagagcaaccucaagcccuucgagcgggacaucuccaccgagaucuaccaggccggcagcacccccugcaacgggguggagggcuucaacugcuacuucccccugcaguccuacggguuccagccgaccuacggcgugggguaccagcccuaccggguggugguccugagcuucgagcuccugcacgcccccgccacggugugcggccccaagaaguccaccaaccuggugaagaacaagugcgucaacuucaacuucaacggccucaccgggaccggcgugcugaccgagagcaacaagaaguuccugccguuccagcaguucgggcgcgacaucgacgacacgaccgacgccgugcgcgacccccagacccuggagauccucgacaucacccccugcagcuucggcggggucuccgugaucacgccgggcaccaacaccagcaaccagguggcgguccuguaccagggcgugaacugcaccgaggugcccgucgccauccacgccgaccagcugacgcccaccuggcggguguacuccaccgggagcaacguguuccagacccgcgccggcugccucaucggggccgagcacgucaacaacuccuacgagugcgacauccccaucggcgcgggcaucugcgccagcuaccagacgcagaccaacucccaccggcgcgcccggagcguggccucccagagcaucaucgcguacaccaugucccugggggccgagaacagcguggccuacuccaacaacagcaucgccaucccgaucaacuucaccaucuccgucacgaccgagauccugcccgugagcaugaccaagaccagcguggacugcacgauguacaucugcggcgacuccaccgagugcagcaaccuccugcugcaguacggguccuucugcacccagcucaaccgcgcccugaccggcaucgcggucgagcaggacaagaacacgcaggagguguucgcccaggugaagcagaucuacaagaccccgcccaucaaggacuucgggggcuucaacuucagccagauccugcccgaccccuccaagcccagcaagcgguccuucaucgaggaccuccuguucaacaaggucacccuggccgacgccggcuucaucaagcaguacggggacugccucggcgacaucgccgcgcgcgaccugaucugcgcccagaaguucaacgggcugaccgugcugcccccgcuccugacggacgagaugaucgcccaguacaccagcgcccuccuggccggcaccaucaccuccggguggacguucggcgcgggcgccgcccugcagauccccuucgccaugcagauggcguaccgguucaacgggaucggcgugacccagaacguccucuacgagaaccagaagcugaucgccaaccaguucaacagcgccaucgggaagauccaggacucccugagcuccaccgccagcgcccucggcaagcugcaggacguggugaaccagaacgcgcaggcccugaacacccucgucaagcagcuguccagcaacuucggggccaucuccagcgugcugaacgacauccucgcccgccuggacaagguggaggccgagguccagaucgaccggcugaucacgggccgccuccagucccugcagaccuacgugacccagcagcugauccgggcggccgagauccgcgccagcgccaaccucgccgcgaccaagaugagcgagugcgugcugggccaguccaagcgggucgacuucugcgggaagggcuaccaccugaugagcuucccccaguccgcgccccacggggugguguuccuccacgucaccuacgugccggcccaggagaagaacuucacgaccgcccccgccaucugccacgacggcaaggcccacuucccccgcgagggggucuucgugagcaacggcacccacugguucgugacccagcggaacuucuacgagccccagaucaucacgacccacaacaccuucgucuccggcaacugcgacguggugaucgggaucgucaacaacaccguguacgacccgcugcagcccgagcuggacagcuucaaggaggagcucgacaaguacuucaagaaccacacgucccccgacguggaccugggcgacaucagcgggaucaacgccuccgucgugaacauccagaaggagaucgaccgccugaacgagguggccaagaaccucaacgagagccugaucgaccugcaggagcucggcaaguacgagcaguacaucaaguggcccugguacaucuggcugggcuucaucgccgggcugaucgcgaucgucauggugaccaucaugcucugcugcaugaccuccugcugcagcugccugaagggcugcugcuccugcgggagcugcugcaaguucgacgaggacgacuccgagccggugcugaagggcgucaagcuccacuacaccugaggacuaguuauaagacugacuagcccgaugggccucccaacgggcccuccuccccuccuugcaccgagauuaauagaucuaaaaaaaaaaaaaaaaaaaaaaaaaaaaaaaaaaaaaaaaaaaaaaaaaaaaaaaaaaaaaaaaaaaaaaaaaaaaaaaaaaaaaaaaaaaaaaaaaaaa

SEQ ID NO: 25640 - RNA, 4017 nt, Artificial Sequence
  SARS-CoV-2/Wuhan/WIV05/2019__EPI_ISL_402128 spike protein mRNA gc (1-1273)(K417N_E484K_N501Y_D614G)
aggagaaagcuuaccauguucguguuccugguccuccugccccuggugagcucccagugcgugaaccucaccacccgcacgcagcugccgcccgccuacaccaacagcuucacccggggcgucuacuaccccgacaagguguuccgcuccagcgugcugcacuccacccaggaccucuuccugcccuucuucagcaacgucacgugguuccacgccauccacguguccgggaccaacggcaccaagcgguucgacaacccggugcugcccuucaacgacggggucuacuucgcgagcaccgagaaguccaacaucauccgcggcuggaucuucgggacgacccucgacagcaagacccagucccugcugaucgugaacaacgccaccaacguggucaucaaggugugcgaguuccaguucugcaacgaccccuuccucggcguguacuaccacaagaacaacaagagcuggauggaguccgaguuccgggucuacagcuccgccaacaacugcacguucgaguacgugagccagcccuuccugauggaccuggagggcaagcaggggaacuucaagaaccuccgcgaguucguguucaagaacaucgacggcuacuucaagaucuacuccaagcacaccccgaucaaccugguccgggaccugccccagggguucagcgcccucgagccccugguggaccugcccaucggcaucaacaucacccgcuuccagacccuccuggcccugcaccgguccuaccucacgccgggggacagcagcuccggcuggaccgcgggcgccgccgccuacuacgugggguaccugcagccccgcaccuuccugcucaaguacaacgagaacggcaccaucacggacgcggucgacugcgcccuggacccccugagcgagaccaagugcacccucaaguccuucaccguggagaaggggaucuaccagacgagcaacuuccgggugcagcccaccgaguccaucguccgcuucccgaacaucaccaaccugugccccuucggcgagguguucaacgccacccgguucgccagcgucuacgccuggaaccgcaagcggaucuccaacugcguggcggacuacagcgugcuguacaacuccgccagcuucuccacguucaagugcuacggcgucagccccaccaagcucaacgaccugugcuucaccaacguguacgccgacuccuucgugauccgcggggacgagguccggcagaucgcccccggccagaccgggaacaucgccgacuacaacuacaagcugccggacgacuucacgggcugcgugaucgcguggaacagcaacaaccucgacuccaaggucgggggcaacuacaacuaccuguaccgccuguuccgcaagagcaaccucaagcccuucgagcgggacaucuccaccgagaucuaccaggccggcagcacccccugcaacggggugaagggcuucaacugcuacuucccccugcaguccuacggguuccagccgaccuacggcgugggguaccagcccuaccggguggucgugcugagcuucgagcuccugcacgcccccgccacggugugcggccccaagaaguccaccaaccuggucaagaacaagugcgugaacuucaacuucaacggccucaccgggaccggcgugcugaccgagagcaacaagaaguuccugccguuccagcaguucgggcgcgacaucgccgacacgaccgacgcgguccgcgacccccagacccuggagauccucgacaucacccccugcagcuucggcgggguguccgugaucacgccgggcaccaacaccagcaaccaggucgccgugcuguaccagggcgugaacugcaccgagguccccguggccauccacgccgaccagcugacgcccaccuggcggguguacuccaccgggagcaacgucuuccagacccgcgccggcugccucaucggggcggagcacgugaacaacuccuacgagugcgacauccccaucggcgccggcaucugcgccagcuaccagacgcagaccaacuccccgcggcgcgcccggagcguggcgucccagagcaucaucgccuacaccaugucccugggggccgagaacagcgucgccuacuccaacaacagcaucgccauccccaccaacuucacgaucuccgugaccaccgagauccugcccgugagcaugaccaagacgagcgucgacugcaccauguacaucugcggcgacuccaccgagugcagcaaccuccugcugcaguacggguccuucugcacccagcucaaccgcgcgcugacgggcaucgccguggagcaggacaagaacacccaggagguguucgcccaggucaagcagaucuacaagacgcccccgaucaaggacuucgggggcuucaacuucagccagauccugcccgaccccuccaagcccagcaagcgguccuucaucgaggaccuccuguucaacaaggugacccuggccgacgccggcuucaucaagcaguacggggacugccucggcgacaucgcggcccgcgaccugaucugcgcccagaaguucaacgggcugaccgugcucccgccccugcugaccgacgagaugaucgcccaguacaccagcgcccuccuggcgggcaccaucacguccggguggaccuucggcgccggcgccgcccugcagauccccuucgcgaugcagauggccuaccgguucaacgggaucggcgucacccagaacgugcucuacgagaaccagaagcugaucgccaaccaguucaacagcgccaucgggaagauccaggacucccugagcuccaccgccagcgcgcucggcaagcugcaggacguggucaaccagaacgcccaggcccugaacacgcucgugaagcagcuguccagcaacuucggggccaucuccagcgugcugaacgacauccucucccgccuggacaaggucgaggccgaggugcagaucgaccggcugaucaccggccgccuccagagccugcagaccuacgugacccagcagcugauccgggcggccgagauccgcgccagcgccaaccucgccgcgaccaagauguccgagugcguccugggccagagcaagcggguggacuucugcgggaagggcuaccaccugauguccuucccccagagcgccccgcacgggguggucuuccuccacgugacguacguccccgcccaggagaagaacuucaccaccgcccccgcgaucugccacgacggcaaggcccacuucccccgcgaggggguguucguguccaacggcacccacugguucgucacgcagcggaacuucuacgagccgcagaucaucaccaccgacaacaccuucgugagcggcaacugcgacguggucaucgggaucgugaacaacacgguguacgacccccugcagcccgagcuggacuccuucaaggaggagcucgacaaguacuucaagaaccacaccagccccgacgucgaccugggcgacaucuccgggaucaacgccagcguggugaacauccagaaggagaucgaccgccugaacgaggucgccaagaaccucaacgagucccugaucgaccugcaggagcucggcaaguacgagcaguacaucaaguggccgugguacaucuggcugggcuucaucgccgggcugaucgcgaucgugauggugaccaucaugcucugcugcaugaccagcugcugcuccugccugaagggcugcugcagcugcggguccugcugcaaguucgacgaggacgacagcgagcccguccugaagggcgugaagcuccacuacacgugaggacuaguuauaagacugacuagcccgaugggccucccaacgggcccuccuccccuccuugcaccgagauuaauagaucuaaaaaaaaaaaaaaaaaaaaaaaaaaaaaaaaaaaaaaaaaaaaaaaaaaaaaaaaaaaaaaaaaaaaaaaaaaaaaaaaaaaaaaaaaaaaaaaaaaaa

SEQ ID NO: 25641 - RNA, 4008 nt, Artificial Sequence
  SARS-CoV-2/Wuhan/WIV05/2019__EPI_ISL_402128 spike protein mRNA gc (1-1273)(L18F_D80A_D215G_L242del_A243del_L244del_R246I_K417N_E484 K_N501Y_D614G_A701V)
aggagaaagcuuaccauguucguguuccugguccuccugccccuggugagcucccagugcgugaacuucaccacccgcacgcagcucccgcccgccuacaccaacagcuucacccggggcgucuacuaccccgacaagguguuccgcuccagcgugcugcacuccacccaggaccuguuccuccccuucuucagcaacgucacgugguuccacgccauccacguguccgggaccaacggcaccaagcgguucgcgaacccggugcugcccuucaacgacggggucuacuucgccagcaccgagaaguccaacaucauccgcggcuggaucuucgggacgacccuggacagcaagacccagucccuccugaucgugaacaacgccaccaacguggucaucaaggugugcgaguuccaguucugcaacgaccccuuccugggcguguacuaccacaagaacaacaagagcuggauggaguccgaguuccgggucuacagcuccgccaacaacugcacguucgaguacgugagccagcccuuccucauggaccuggagggcaagcaggggaacuucaagaaccugcgcgaguucguguucaagaacaucgacggcuacuucaagaucuacuccaagcacaccccgaucaaccucguccgggggcugccccagggcuucagcgcccuggagccccucguggaccugcccaucgggaucaacaucacccgcuuccagacccugcacaucuccuaccucacgccgggcgacagcagcuccggcuggaccgcgggggccgccgccuacuacgugggcuaccugcagccccggaccuuccugcucaaguacaacgagaacgggaccaucacggacgcggucgacugcgcccuggacccccugagcgagaccaagugcacccucaaguccuucaccguggagaagggcaucuaccagacgagcaacuuccgcgugcagcccaccgaguccaucguccgguucccgaacaucaccaaccugugccccuucggcgagguguucaacgccacccgcuucgccagcgucuacgccuggaaccggaagcgcaucuccaacugcguggcggacuacagcgugcuguacaacuccgccagcuucuccacguucaagugcuacggggucagccccaccaagcucaacgaccugugcuucaccaacguguacgccgacuccuucgugauccggggcgacgagguccgccagaucgcccccgggcagaccggcaacaucgccgacuacaacuacaagcugccggacgacuucacggggugcgugaucgcguggaacagcaacaaccucgacuccaaggugggcggcaacuacaacuaccuguaccggcuguuccgcaagagcaaccucaagcccuucgagcgggacaucuccaccgagaucuaccaggccgggagcacccccugcaacggcgucaagggguucaacugcuacuucccccugcaguccuacggcuuccagccgaccuacggggugggcuaccagcccuaccgcguggucgugcugagcuucgagcuccugcacgcccccgccacggugugcggccccaagaaguccaccaaccuggucaagaacaagugcgugaacuucaacuucaacgggcucaccggcaccggggugcugaccgagagcaacaagaaguuccugccguuccagcaguucggccgggacaucgccgacacgaccgacgcgguccgcgacccccagacccucgagauccuggacaucacccccugcagcuucgggggcguguccgugaucacgccgggcaccaacaccagcaaccaggucgccgugcuguaccagggggugaacugcaccgagguccccguggccauccacgccgaccagcugacgcccaccuggcgcguguacuccaccggcagcaacgucuuccagacccgggccgggugccucaucggcgcggagcacgugaacaacuccuacgagugcgacauccccaucggcgccgggaucugcgccagcuaccagacgcagaccaacuccccgcgccgggcccgcagcguggcgucccagagcaucaucgccuacaccaugucccugggcgucgagaacagcguggccuacuccaacaacagcaucgccauccccaccaacuucacgaucuccgugaccaccgagauccugcccgucagcaugaccaagacgagcguggacugcaccauguacaucugcggggacuccaccgagugcagcaaccuccugcugcaguacggcuccuucugcacccagcucaaccgggcccugacggggaucgcgguggagcaggacaagaacacccaggaggucuucgcccaggugaagcagaucuacaagacgcccccgaucaaggacuucggcggcuucaacuucagccagauccugcccgaccccuccaagcccagcaagcgcuccuucaucgaggaccuccuguucaacaaggugacccuggccgacgccggguucaucaagcaguacggcgacugccucggggacaucgccgcgcgggaccugaucugcgcccagaaguucaacggccugaccguccucccgccccugcugaccgacgagaugaucgcccaguacaccagcgcccuccuggccgggaccaucacguccggcuggaccuucggcgcgggggccgcccugcagauccccuucgccaugcagauggcguaccgcuucaacggcaucggggugacccagaacgugcucuacgagaaccagaagcugaucgccaaccaguucaacagcgccaucggcaagauccaggacucccugagcuccaccgccagcgcccucgggaagcugcaggacgucgugaaccagaacgcgcaggcccugaacacgcucgugaagcagcuguccagcaacuucggcgccaucuccagcguccugaacgacauccucucccggcuggacaagguggaggccgaggugcagaucgaccgccugaucaccggccggcuccagagccugcagaccuacgucacccagcagcugauccgcgccgcggagauccgggccagcgccaaccucgccgccaccaagauguccgagugcgugcuggggcagagcaagcgcguggacuucugcggcaagggguaccaccugauguccuucccccagagcgcgccgcacggcgucguguuccuccacgucacguacgugcccgcccaggagaagaacuucaccaccgcccccgccaucugccacgacgggaaggcgcacuucccccgggagggcguguucgucuccaacggcacccacugguucgugacgcagcgcaacuucuacgagccgcagaucaucaccaccgacaacaccuucgugagcgggaacugcgacgucgugaucggcaucgugaacaacacggucuacgacccccugcagcccgagcuggacuccuucaaggaggagcucgacaaguacuucaagaaccacaccagccccgacguggaccugggggacaucuccggcaucaacgccagcguggucaacauccagaaggagaucgaccggcugaacgagguggccaagaaccucaacgagucccugaucgaccugcaggagcucggcaaguacgagcaguacaucaaguggccgugguacaucuggcugggguucaucgccggccugaucgccaucgugauggucaccaucaugcucugcugcaugaccagcugcugcuccugccugaaggggugcugcagcugcggcuccugcugcaaguucgacgaggacgacagcgagcccgugcugaagggggugaagcuccacuacacgugaggacuaguuauaagacugacuagcccgaugggccucccaacgggcccuccuccccuccuugcaccgagauuaauagaucuaaaaaaaaaaaaaaaaaaaaaaaaaaaaaaaaaaaaaaaaaaaaaaaaaaaaaaaaaaaaaaaaaaaaaaaaaaaaaaaaaaaaaaaaaaaaaaaaaaaa

SEQ ID NO: 25642 - RNA, 4017 nt, Artificial Sequence
  SARS-CoV-2/Wuhan/WIV05/2019__EPI_ISL_402128 spike protein mRNA gc (1-1273)(E484K_D614G)
aggagaaagcuuaccauguucguguuccugguccuccugccccuggugagcucccagugcgugaaccucaccacccgcacgcagcugccgcccgccuacaccaacagcuucacccggggcgucuacuaccccgacaagguguuccgcuccagcgugcugcacuccacccaggaccucuuccugcccuucuucagcaacgucacgugguuccacgccauccacguguccgggaccaacggcaccaagcgguucgacaacccggugcugcccuucaacgacggggucuacuucgcgagcaccgagaaguccaacaucauccgcggcuggaucuucgggacgacccucgacagcaagacccagucccugcugaucgugaacaacgccaccaacguggucaucaaggugugcgaguuccaguucugcaacgaccccuuccucggcguguacuaccacaagaacaacaagagcuggauggaguccgaguuccgggucuacagcuccgccaacaacugcacguucgaguacgugagccagcccuuccugauggaccuggagggcaagcaggggaacuucaagaaccuccgcgaguucguguucaagaacaucgacggcuacuucaagaucuacuccaagcacaccccgaucaaccugguccgggaccugccccagggguucagcgcccucgagccccugguggaccugcccaucggcaucaacaucacccgcuuccagacccuccuggcccugcaccgguccuaccucacgccgggggacagcagcuccggcuggaccgcgggcgccgccgccuacuacgugggguaccugcagccccgcaccuuccugcucaaguacaacgagaacggcaccaucacggacgcggucgacugcgcccuggacccccugagcgagaccaagugcacccucaaguccuucaccguggagaaggggaucuaccagacgagcaacuuccgggugcagcccaccgaguccaucguccgcuucccgaacaucaccaaccugugccccuucggcgagguguucaacgccacccgguucgccagcgucuacgccuggaaccgcaagcggaucuccaacugcguggcggacuacagcgugcuguacaacuccgccagcuucuccacguucaagugcuacggcgucagccccaccaagcucaacgaccugugcuucaccaacguguacgccgacuccuucgugauccgcggggacgagguccggcagaucgcccccggccagaccgggaagaucgccgacuacaacuacaagcugccggacgacuucacgggcugcgugaucgcguggaacagcaacaaccucgacuccaaggucgggggcaacuacaacuaccuguaccgccuguuccgcaagagcaaccucaagcccuucgagcgggacaucuccaccgagaucuaccaggccggcagcacccccugcaacggggugaagggcuucaacugcuacuucccccugcaguccuacggguuccagccgaccaacggcgugggguaccagcccuaccggguggucgugcugagcuucgagcuccugcacgcccccgccacggugugcggccccaagaaguccaccaaccuggucaagaacaagugcgugaacuucaacuucaacggccucaccgggaccggcgugcugaccgagagcaacaagaaguuccugccguuccagcaguucgggcgcgacaucgccgacacgaccgacgcgguccgcgacccccagacccuggagauccucgacaucacccccugcagcuucggcgggguguccgugaucacgccgggcaccaacaccagcaaccaggucgccgugcuguaccagggcgugaacugcaccgagguccccguggccauccacgccgaccagcugacgcccaccuggcggguguacuccaccgggagcaacgucuuccagacccgcgccggcugccucaucggggcggagcacgugaacaacuccuacgagugcgacauccccaucggcgccggcaucugcgccagcuaccagacgcagaccaacuccccgcggcgcgcccggagcguggcgucccagagcaucaucgccuacaccaugucccugggggccgagaacagcgucgccuacuccaacaacagcaucgccauccccaccaacuucacgaucuccgugaccaccgagauccugcccgugagcaugaccaagacgagcgucgacugcaccauguacaucugcggcgacuccaccgagugcagcaaccuccugcugcaguacggguccuucugcacccagcucaaccgcgcgcugacgggcaucgccguggagcaggacaagaacacccaggagguguucgcccaggucaagcagaucuacaagacgcccccgaucaaggacuucgggggcuucaacuucagccagauccugcccgaccccuccaagcccagcaagcgguccuucaucgaggaccuccuguucaacaaggugacccuggccgacgccggcuucaucaagcaguacggggacugccucggcgacaucgcggcccgcgaccugaucugcgcccagaaguucaacgggcugaccgugcucccgccccugcugaccgacgagaugaucgcccaguacaccagcgcccuccuggcgggcaccaucacguccggguggaccuucggcgccggcgccgcccugcagauccccuucgcgaugcagauggccuaccgguucaacgggaucggcgucacccagaacgugcucuacgagaaccagaagcugaucgccaaccaguucaacagcgccaucgggaagauccaggacucccugagcuccaccgccagcgcgcucggcaagcugcaggacguggucaaccagaacgcccaggcccugaacacgcucgugaagcagcuguccagcaacuucggggccaucuccagcgugcugaacgacauccucucccgccuggacaaggucgaggccgaggugcagaucgaccggcugaucaccggccgccuccagagccugcagaccuacgugacccagcagcugauccgggcggccgagauccgcgccagcgccaaccucgccgcgaccaagauguccgagugcguccugggccagagcaagcggguggacuucugcgggaagggcuaccaccugauguccuucccccagagcgccccgcacgggguggucuuccuccacgugacguacguccccgcccaggagaagaacuucaccaccgcccccgcgaucugccacgacggcaaggcccacuucccccgcgaggggguguucguguccaacggcacccacugguucgucacgcagcggaacuucuacgagccgcagaucaucaccaccgacaacaccuucgugagcggcaacugcgacguggucaucgggaucgugaacaacacgguguacgacccccugcagcccgagcuggacuccuucaaggaggagcucgacaaguacuucaagaaccacaccagccccgacgucgaccugggcgacaucuccgggaucaacgccagcguggugaacauccagaaggagaucgaccgccugaacgaggucgccaagaaccucaacgagucccugaucgaccugcaggagcucggcaaguacgagcaguacaucaaguggccgugguacaucuggcugggcuucaucgccgggcugaucgcgaucgugauggugaccaucaugcucugcugcaugaccagcugcugcuccugccugaagggcugcugcagcugcggguccugcugcaaguucgacgaggacgacagcgagcccguccugaagggcgugaagcuccacuacacgugaggacuaguuauaagacugacuagcccgaugggccucccaacgggcccuccuccccuccuugcaccgagauuaauagaucuaaaaaaaaaaaaaaaaaaaaaaaaaaaaaaaaaaaaaaaaaaaaaaaaaaaaaaaaaaaaaaaaaaaaaaaaaaaaaaaaaaaaaaaaaaaaaaaaaaaa

SEQ ID NO: 25643 - RNA, 4017 nt, Artificial Sequence
  SARS-CoV-2/Wuhan/WIV05/2019__EPI_ISL_402128 spike protein mRNA gc (1-1273)(L18F_T20N_P26S_D138Y_R190S_K417T_E484K_N501Y_D614G_H655Y _T1027I)
aggagaaagcuuaccauguucguguuccugguccuccugccccuggugagcucccagugcgugaacuucaccaaccgcacccagcucccgagcgccuacacgaacuccuucacccggggcgucuacuaccccgacaagguguuccgcagcuccgugcugcacagcacccaggaccuguuccuccccuucuucuccaacgucaccugguuccacgccauccacgugagcgggacgaacggcaccaagcgguucgacaaccccgugcugccguucaacgacggggucuacuucgcguccaccgagaaguccaacaucauccgcggcuggaucuucgggaccacgcuggacuccaagacccagagccuccugaucgugaacaacgccaccaacguggucaucaaggugugcgaguuccaguucugcaacuaccccuuccugggcguguacuaccacaagaacaacaaguccuggauggagagcgaguuccgggucuacuccagcgccaacaacugcaccuucgaguacgugucccagcccuuccucauggaccuggagggcaagcaggggaacuucaagaaccugagcgaguucguguucaagaacaucgacggcuacuucaagaucuacuccaagcacacgcccaucaaccucguccgcgaccugccgcagggguucagcgcccuggagccccucguggaccugcccaucggcaucaacaucacccgguuccagacccugcucgcccugcaccgcagcuaccugacccccggggacuccagcuccggcuggacggcgggcgccgccgccuacuacgugggguaccuccagccgcggaccuuccugcugaaguacaacgagaacggcaccaucaccgacgcggucgacugcgcccucgacccccugagcgagacgaagugcacccugaaguccuucaccguggagaaggggaucuaccagaccagcaacuuccgcgugcagcccacggaguccaucguccgguuccccaacaucaccaaccucugcccguucggcgagguguucaacgccacccgcuucgccagcgucuacgccuggaaccggaagcgcaucuccaacugcguggcggacuacagcgugcuguacaacuccgccagcuucuccaccuucaagugcuacggcgucagccccacgaagcugaacgaccucugcuucaccaacguguacgccgacuccuucgugauccgcggggacgagguccggcagaucgcccccggccagaccgggaccaucgccgacuacaacuacaagcugcccgacgacuucacgggcugcgugaucgcguggaacagcaacaaccuggacuccaaggucgggggcaacuacaacuaccucuaccggcuguuccgcaagagcaaccugaagccguucgagcgggacaucuccaccgagaucuaccaggccggcagcacccccugcaacggggugaagggcuucaacugcuacuucccccuccagagcuacggguuccagcccaccuacggcgugggguaccagccguaccgcguggucgugcuguccuucgagcugcuccacgcccccgccacggugugcggccccaagaaguccaccaaccuggucaagaacaagugcgugaacuucaacuucaacggccugaccgggaccggcgugcucaccgagagcaacaagaaguuccugcccuuccagcaguucgggcgggacaucgccgacacgaccgacgcgguccgcgacccgcagacccuggagauccuggacaucacccccugcagcuucggcgggguguccgugaucacgcccggcaccaacaccagcaaccaggucgccgugcucuaccagggcgugaacugcaccgaggucccgguggccauccacgccgaccagcugacgcccaccuggcgcguguacuccaccgggagcaacgucuuccagacccgggccggcugccugaucggggcggaguacgugaacaacuccuacgagugcgacauccccaucggcgccggcaucugcgccagcuaccagacgcagaccaacagcccccgccgggcccgcagcguggcgucccagagcaucaucgccuacaccaugucccucggggccgagaacagcgucgccuacuccaacaacagcaucgccaucccgaccaacuucacgaucagcgugaccaccgagauccugcccguguccaugaccaagacgagcgucgacugcaccauguacaucugcggcgacuccaccgagugcagcaaccugcuccugcaguacggguccuucugcacccagcugaaccgggcgcucacgggcaucgccguggagcaggacaagaacacccaggagguguucgcccaggucaagcagaucuacaagaccccgcccaucaaggacuucgggggcuucaacuucagccagauccugcccgaccccuccaagcccagcaagcgcuccuucaucgaggaccuccuguucaacaaggugacccuggccgacgccggcuucaucaagcaguacggggacugccugggcgacaucgcggcccgggaccucaucugcgcccagaaguucaacgggcugacggugcugcccccgcuccugaccgacgagaugaucgcccaguacaccagcgcccugcucgcgggcaccaucacguccggguggaccuucggcgccggcgccgcccugcagauccccuucgcgaugcagauggccuaccgcuucaacgggaucggcgucacccagaacgugcuguacgagaaccagaagcucaucgccaaccaguucaacagcgccaucgggaagauccaggacucccugagcuccaccgccagcgcgcugggcaagcuccaggacguggucaaccagaacgcccaggcccugaacacgcuggugaagcagcucuccagcaacuucggggccaucuccagcgugcugaacgacauccugagccggcucgacaaggucgaggccgaggugcagaucgaccgccugaucaccggccggcugcagucccuccagaccuacgugacccagcagcugauccgcgcggccgagauccgggccagcgccaaccuggccgcgaucaagauguccgagugcguccucggccagagcaagcgcguggacuucugcgggaagggcuaccaccugauguccuucccccagagcgcgccccacgggguggucuuccugcacgugaccuacgucccggcccaggagaagaacuucacgaccgcccccgccaucugccacgacggcaaggcccacuucccccgggaggggguguucguguccaacggcacccacugguucgucacccagcgcaacuucuacgagccccagaucaucacgaccgacaacaccuucgugagcggcaacugcgacguggucaucgggaucgugaacaacaccguguacgacccgcuccagcccgagcuggacuccuucaaggaggagcuggacaaguacuucaagaaccacacgagccccgacgucgaccucggcgacaucuccgggaucaacgccagcguggugaacauccagaaggagaucgaccggcugaacgaggucgccaagaaccugaacgagucccucaucgaccugcaggagcugggcaaguacgagcaguacaucaaguggcccugguacaucuggcucggcuucaucgccgggcugaucgcgaucgugauggugaccaucaugcugugcugcaugaccagcugcugcuccugccucaagggcugcugcagcugcggguccugcugcaaguucgacgaggacgacagcgagccgguccugaagggcgugaagcugcacuacaccugaggacuaguuauaagacugacuagcccgaugggccucccaacgggcccuccuccccuccuugcaccgagauuaauagaucuaaaaaaaaaaaaaaaaaaaaaaaaaaaaaaaaaaaaaaaaaaaaaaaaaaaaaaaaaaaaaaaaaaaaaaaaaaaaaaaaaaaaaaaaaaaaaaaaaaaa

SEQ ID NO: 25644 - RNA, 4017 nt, Artificial Sequence
  SARS-CoV-2/Wuhan/WIV05/2019__EPI_ISL_402128 spike protein mRNA gc (1-1273)(S13I_W152C_L452R_D614G)
aggagaaagcuuaccauguucguguuccugguccuccugccccuggugagcauccagugcgugaaccucaccacccgcacgcagcugccgcccgccuacaccaacuccuucacccggggcgucuacuaccccgacaagguguuccgcagcuccgugcugcacagcacccaggaccucuuccugcccuucuucuccaacgucacgugguuccacgccauccacgugagcgggaccaacggcaccaagcgguucgacaacccggugcugcccuucaacgacggggucuacuucgcguccaccgagaaguccaacaucauccgcggcuggaucuucgggacgacccucgacagcaagacccagagccugcugaucgugaacaacgccaccaacguggucaucaaggugugcgaguuccaguucugcaacgaccccuuccucggcguguacuaccacaagaacaacaaguccugcauggagagcgaguuccgggucuacuccagcgccaacaacugcacguucgaguacgugucccagcccuuccugauggaccuggagggcaagcaggggaacuucaagaaccuccgcgaguucguguucaagaacaucgacggcuacuucaagaucuacagcaagcacaccccgaucaaccugguccgggaccugccccagggguucuccgcccucgagccccugguggaccugcccaucggcaucaacaucacccgcuuccagacccuccuggcccugcaccggagcuaccucacgccgggggacuccagcagcggcuggaccgcgggcgccgccgccuacuacgugggguaccugcagccccgcaccuuccugcucaaguacaacgagaacggcaccaucacggacgcggucgacugcgcccuggacccccuguccgagaccaagugcacccucaagagcuucaccguggagaaggggaucuaccagacguccaacuuccgggugcagcccaccgagagcaucguccgcuucccgaacaucaccaaccugugccccuucggcgagguguucaacgccacccgguucgccuccgucuacgccuggaaccgcaagcggaucagcaacugcguggcggacuacuccgugcuguacaacagcgccuccuucagcacguucaagugcuacggcgucucccccaccaagcucaacgaccugugcuucaccaacguguacgccgacagcuucgugauccgcggggacgagguccggcagaucgcccccggccagaccgggaagaucgccgacuacaacuacaagcugccggacgacuucacgggcugcgugaucgcguggaacuccaacaaccucgacagcaaggucgggggcaacuacaacuaccgcuaccggcuguuccgcaaguccaaccugaagcccuucgagcgggacaucagcaccgagaucuaccaggccggcuccacccccugcaacgggguggagggcuucaacugcuacuucccccuccagagcuacggguuccagccgaccaacggcgugggguaccagcccuaccgcguggucgugcuguccuucgagcugcuccacgcccccgccacggugugcggccccaagaaguccaccaaccuggucaagaacaagugcgugaacuucaacuucaacggccugaccgggaccggcgugcucaccgagagcaacaagaaguuccugccguuccagcaguucgggcgcgacaucgccgacacgaccgacgcgguccgggacccccagacccuggagauccuggacaucacccccugcagcuucggcggggugagcgugaucacgccgggcaccaacaccuccaaccaggucgccgugcucuaccagggcgugaacugcaccgagguccccguggccauccacgccgaccagcugacgcccaccuggcgcguguacagcaccggguccaacgucuuccagacccgggccggcugccugaucggggcggagcacgugaacaacagcuacgagugcgacauccccaucggcgccggcaucugcgccuccuaccagacgcagaccaacagcccgcgccgggcccgcuccguggcgagccaguccaucaucgccuacaccaugagccucggggccgagaacuccgucgccuacagcaacaacuccaucgccauccccaccaacuucacgaucagcgugaccaccgagauccugcccguguccaugaccaagacgagcgucgacugcaccauguacaucugcggcgacagcaccgagugcuccaaccugcuccugcaguacgggagcuucugcacccagcugaaccgggcgcucacgggcaucgccguggagcaggacaagaacacccaggagguguucgcccaggucaagcagaucuacaagacgcccccgaucaaggacuucgggggcuucaacuucucccagauccugcccgaccccagcaagcccuccaagcgcagcuucaucgaggaccuccuguucaacaaggugacccuggccgacgccggcuucaucaagcaguacggggacugccugggcgacaucgcggcccgggaccucaucugcgcccagaaguucaacgggcugaccgugcugccgccccuccugaccgacgagaugaucgcccaguacaccuccgcccugcucgcgggcaccaucacgagcggguggaccuucggcgccggcgccgcccugcagauccccuucgcgaugcagauggccuaccgcuucaacgggaucggcgucacccagaacgugcuguacgagaaccagaagcucaucgccaaccaguucaacuccgccaucgggaagauccaggacagccuguccagcaccgccuccgcgcugggcaagcuccaggacguggucaaccagaacgcccaggcccugaacacgcuggugaagcagcucagcuccaacuucggggccaucagcuccgugcugaacgacauccugagccggcucgacaaggucgaggccgaggugcagaucgaccgccugaucaccggccggcugcagucccuccagaccuacgugacccagcagcugauccgcgcggccgagauccgggccagcgccaaccuggccgcgaccaagaugagcgagugcguccucggccaguccaagcgcguggacuucugcgggaagggcuaccaccugaugagcuucccccaguccgccccgcacgggguggucuuccugcacgugacguacguccccgcccaggagaagaacuucaccaccgcccccgcgaucugccacgacggcaaggcccacuucccccgggaggggguguucgugagcaacggcacccacugguucgucacgcagcgcaacuucuacgagccgcagaucaucaccaccgacaacaccuucguguccggcaacugcgacguggucaucgggaucgugaacaacacgguguacgacccccuccagcccgagcuggacagcuucaaggaggagcuggacaaguacuucaagaaccacaccucccccgacgucgaccucggcgacaucagcgggaucaacgccuccguggugaacauccagaaggagaucgaccggcugaacgaggucgccaagaaccugaacgagagccucaucgaccugcaggagcugggcaaguacgagcaguacaucaaguggccgugguacaucuggcucggcuucaucgccgggcugaucgcgaucgugauggugaccaucaugcugugcugcaugaccuccugcugcagcugccucaagggcugcugcuccugcgggagcugcugcaaguucgacgaggacgacuccgagcccguccugaagggcgugaagcugcacuacacgugaggacuaguuauaagacugacuagcccgaugggccucccaacgggcccuccuccccuccuugcaccgagauuaauagaucuaaaaaaaaaaaaaaaaaaaaaaaaaaaaaaaaaaaaaaaaaaaaaaaaaaaaaaaaaaaaaaaaaaaaaaaaaaaaaaaaaaaaaaaaaaaaaaaaaaaa

SEQ ID NO: 25645 - RNA, 4017 nt, Artificial Sequence
  SARS-CoV-2/Wuhan/WIV05/2019__EPI_ISL_402128 spike protein mRNA gc (1-1273)
aggagaaagcuuaccauguucguguuccuggugcugcugccccuggugagcagccagugcgugaaccugaccacccggacccagcugccaccagccuacaccaacagcuucacccggggcgucuacuaccccgacaagguguuccggagcagcguccugcacagcacccaggaccuguuccugcccuucuucagcaacgugaccugguuccacgccauccacgugagcggcaccaacggcaccaagcgguucgacaaccccgugcugcccuucaacgacggcguguacuucgccagcaccgagaagagcaacaucauccggggcuggaucuucggcaccacccuggacagcaagacccagagccugcugaucgugaauaacgccaccaacguggugaucaaggugugcgaguuccaguucugcaacgaccccuuccugggcguguacuaccacaagaacaacaagagcuggauggagagcgaguuccggguguacagcagcgccaacaacugcaccuucgaguacgugagccagcccuuccugauggaccuggagggcaagcagggcaacuucaagaaccugcgggaguucguguucaagaacaucgacggcuacuucaagaucuacagcaagcacaccccaaucaaccuggugcgggaucugccccagggcuucucagcccuggagccccugguggaccugcccaucggcaucaacaucacccgguuccagacccugcuggcccugcaccggagcuaccugaccccaggcgacagcagcagcggguggacagcaggcgcggcugcuuacuacgugggcuaccugcagccccggaccuuccugcugaaguacaacgagaacggcaccaucaccgacgccguggacugcgcccuggacccucugagcgagaccaagugcacccugaagagcuucaccguggagaagggcaucuaccagaccagcaacuuccgggugcagcccaccgagagcaucgugcgguuccccaacaucaccaaccugugccccuucggcgagguguucaacgccacccgguucgccagcguguacgccuggaaccggaagcggaucagcaacugcguggccgacuacagcgugcuguacaacagcgccagcuucagcaccuucaagugcuacggcgugagccccaccaagcugaacgaccugugcuucaccaacguguacgccgacagcuucgugauccguggcgacgaggugcggcagaucgcacccggccagacaggcaagaucgccgacuacaacuacaagcugcccgacgacuucaccggcugcgugaucgccuggaacagcaacaaccucgacagcaaggugggcggcaacuacaacuaccuguaccggcuguuccggaagagcaaccugaagcccuucgagcgggacaucagcaccgagaucuaccaagccggcuccaccccuugcaacggcguggagggcuucaacugcuacuucccucugcagagcuacggcuuccagcccaccaacggcgugggcuaccagcccuaccgggugguggugcugagcuucgagcugcugcacgccccagccaccguguguggccccaagaagagcaccaaccuggugaagaacaagugcgugaacuucaacuucaacggccuuaccggcaccggcgugcugaccgagagcaacaagaaauuccugcccuuucagcaguucggccgggacaucgccgacaccaccgacgcugugcgggauccccagacccuggagauccuggacaucaccccuugcagcuucggcggcgugagcgugaucaccccaggcaccaacaccagcaaccagguggccgugcuguaccaggacgugaacugcaccgaggugcccguggccauccacgccgaccagcugacacccaccuggcgggucuacagcaccggcagcaacguguuccagacccgggccgguugccugaucggcgccgagcacgugaacaacagcuacgagugcgacauccccaucggcgccggcaucugugccagcuaccagacccagaccaauucaccccggagggcaaggagcguggccagccagagcaucaucgccuacaccaugagccugggcgccgagaacagcguggccuacagcaacaacagcaucgccauccccaccaacuucaccaucagcgugaccaccgagauucugcccgugagcaugaccaagaccagcguggacugcaccauguacaucugcggcgacagcaccgagugcagcaaccugcugcugcaguacggcagcuucugcacccagcugaaccgggcccugaccggcaucgccguggagcaggacaagaacacccaggagguguucgcccaggugaagcagaucuacaagaccccucccaucaaggacuucggcggcuucaacuucagccagauccugcccgaccccagcaagcccagcaagcggagcuucaucgaggaccugcuguucaacaaggugacccuagccgacgccggcuucaucaagcaguacggcgacugccucggcgacauagccgcccgggaccugaucugcgcccagaaguucaacggccugaccgugcugccuccccugcugaccgacgagaugaucgcccaguacaccagcgcccuguuagccggaaccaucaccagcggcuggacuuucggcgcuggagccgcucugcagauccccuucgccaugcagauggccuaccgguucaacggcaucggcgugacccagaacgugcuguacgagaaccagaagcugaucgccaaccaguucaacagcgccaucggcaagauccaggacagccugagcagcaccgcuagcgcccugggcaagcugcaggacguggugaaccagaacgcccaggcccugaacacccuggugaagcagcugagcagcaacuucggcgccaucagcagcgugcugaacgacauccugagccggcuggacaaggucgaggccgaggugcagaucgaccggcugaucacuggccggcugcagagccugcagaccuacgugacccagcagcugauccgggccgccgagauucgggccagcgccaaccuggccgccaccaagaugagcgagugcgugcugggccagagcaagcggguggacuucugcggcaagggcuaccaccugaugagcuuuccccagagcgcaccccacggagugguguuccugcacgugaccuacgugcccgcccaggagaagaacuucaccaccgccccagccaucugccacgacggcaaggcccacuuuccccgggagggcguguucgugagcaacggcacccacugguucgugacccagcggaacuucuacgagccccagaucaucaccaccgacaacaccuucgugagcggcaacugcgacguggugaucggcaucgugaacaacaccguguacgauccccugcagcccgagcuggacagcuucaaggaggagcuggacaaguacuucaagaaucacaccagccccgacguggaccugggcgacaucagcggcaucaacgccagcguggugaacauccagaaggagaucgaucggcugaacgagguggccaagaaccugaacgagagccugaucgaccugcaggagcugggcaaguacgagcaguacaucaaguggcccugguacaucuggcugggcuucaucgccggccugaucgccaucgugauggugaccaucaugcugugcugcaugaccagcugcugcagcugccugaagggcuguugcagcugcggcagcugcugcaaguucgacgaggacgacagcgagcccgugcugaagggcgugaagcugcacuacaccugaggacuaguuauaagacugacuagcccgaugggccucccaacgggcccuccuccccuccuugcaccgagauuaauagaucuaaaaaaaaaaaaaaaaaaaaaaaaaaaaaaaaaaaaaaaaaaaaaaaaaaaaaaaaaaaaaaaaaaaaaaaaaaaaaaaaaaaaaaaaaaaaaaaaaaaa

SEQ ID NO: 25646 - RNA, 4017 nt, Artificial Sequence
  SARS-CoV-2/Wuhan/WIV05/2019__EPI_ISL_402128 spike protein mRNA gc (1-1273)(D614G)
aggagaaagcuuaccauguucguguuccuggugcugcugccccuggugagcagccagugcgugaaccugaccacccggacccagcugccaccagccuacaccaacagcuucacccggggcgucuacuaccccgacaagguguuccggagcagcguccugcacagcacccaggaccuguuccugcccuucuucagcaacgugaccugguuccacgccauccacgugagcggcaccaacggcaccaagcgguucgacaaccccgugcugcccuucaacgacggcguguacuucgccagcaccgagaagagcaacaucauccggggcuggaucuucggcaccacccuggacagcaagacccagagccugcugaucgugaauaacgccaccaacguggugaucaaggugugcgaguuccaguucugcaacgaccccuuccugggcguguacuaccacaagaacaacaagagcuggauggagagcgaguuccggguguacagcagcgccaacaacugcaccuucgaguacgugagccagcccuuccugauggaccuggagggcaagcagggcaacuucaagaaccugcgggaguucguguucaagaacaucgacggcuacuucaagaucuacagcaagcacaccccaaucaaccuggugcgggaucugccccagggcuucucagcccuggagccccugguggaccugcccaucggcaucaacaucacccgguuccagacccugcuggcccugcaccggagcuaccugaccccaggcgacagcagcagcggguggacagcaggcgcggcugcuuacuacgugggcuaccugcagccccggaccuuccugcugaaguacaacgagaacggcaccaucaccgacgccguggacugcgcccuggacccucugagcgagaccaagugcacccugaagagcuucaccguggagaagggcaucuaccagaccagcaacuuccgggugcagcccaccgagagcaucgugcgguuccccaacaucaccaaccugugccccuucggcgagguguucaacgccacccgguucgccagcguguacgccuggaaccggaagcggaucagcaacugcguggccgacuacagcgugcuguacaacagcgccagcuucagcaccuucaagugcuacggcgugagccccaccaagcugaacgaccugugcuucaccaacguguacgccgacagcuucgugauccguggcgacgaggugcggcagaucgcacccggccagacaggcaagaucgccgacuacaacuacaagcugcccgacgacuucaccggcugcgugaucgccuggaacagcaacaaccucgacagcaaggugggcggcaacuacaacuaccuguaccggcuguuccggaagagcaaccugaagcccuucgagcgggacaucagcaccgagaucuaccaagccggcuccaccccuugcaacggcguggagggcuucaacugcuacuucccucugcagagcuacggcuuccagcccaccaacggcgugggcuaccagcccuaccgggugguggugcugagcuucgagcugcugcacgccccagccaccguguguggccccaagaagagcaccaaccuggugaagaacaagugcgugaacuucaacuucaacggccuuaccggcaccggcgugcugaccgagagcaacaagaaauuccugcccuuucagcaguucggccgggacaucgccgacaccaccgacgcugugcgggauccccagacccuggagauccuggacaucaccccuugcagcuucggcggcgugagcgugaucaccccaggcaccaacaccagcaaccagguggccgugcuguaccagggcgugaacugcaccgaggugcccguggccauccacgccgaccagcugacacccaccuggcgggucuacagcaccggcagcaacguguuccagacccgggccgguugccugaucggcgccgagcacgugaacaacagcuacgagugcgacauccccaucggcgccggcaucugugccagcuaccagacccagaccaauucaccccggagggcaaggagcguggccagccagagcaucaucgccuacaccaugagccugggcgccgagaacagcguggccuacagcaacaacagcaucgccauccccaccaacuucaccaucagcgugaccaccgagauucugcccgugagcaugaccaagaccagcguggacugcaccauguacaucugcggcgacagcaccgagugcagcaaccugcugcugcaguacggcagcuucugcacccagcugaaccgggcccugaccggcaucgccguggagcaggacaagaacacccaggagguguucgcccaggugaagcagaucuacaagaccccucccaucaaggacuucggcggcuucaacuucagccagauccugcccgaccccagcaagcccagcaagcggagcuucaucgaggaccugcuguucaacaaggugacccuagccgacgccggcuucaucaagcaguacggcgacugccucggcgacauagccgcccgggaccugaucugcgcccagaaguucaacggccugaccgugcugccuccccugcugaccgacgagaugaucgcccaguacaccagcgcccuguuagccggaaccaucaccagcggcuggacuuucggcgcuggagccgcucugcagauccccuucgccaugcagauggccuaccgguucaacggcaucggcgugacccagaacgugcuguacgagaaccagaagcugaucgccaaccaguucaacagcgccaucggcaagauccaggacagccugagcagcaccgcuagcgcccugggcaagcugcaggacguggugaaccagaacgcccaggcccugaacacccuggugaagcagcugagcagcaacuucggcgccaucagcagcgugcugaacgacauccugagccggcuggacaaggucgaggccgaggugcagaucgaccggcugaucacuggccggcugcagagccugcagaccuacgugacccagcagcugauccgggccgccgagauucgggccagcgccaaccuggccgccaccaagaugagcgagugcgugcugggccagagcaagcggguggacuucugcggcaagggcuaccaccugaugagcuuuccccagagcgcaccccacggagugguguuccugcacgugaccuacgugcccgcccaggagaagaacuucaccaccgccccagccaucugccacgacggcaaggcccacuuuccccgggagggcguguucgugagcaacggcacccacugguucgugacccagcggaacuucuacgagccccagaucaucaccaccgacaacaccuucgugagcggcaacugcgacguggugaucggcaucgugaacaacaccguguacgauccccugcagcccgagcuggacagcuucaaggaggagcuggacaaguacuucaagaaucacaccagccccgacguggaccugggcgacaucagcggcaucaacgccagcguggugaacauccagaaggagaucgaucggcugaacgagguggccaagaaccugaacgagagccugaucgaccugcaggagcugggcaaguacgagcaguacaucaaguggcccugguacaucuggcugggcuucaucgccggccugaucgccaucgugauggugaccaucaugcugugcugcaugaccagcugcugcagcugccugaagggcuguugcagcugcggcagcugcugcaaguucgacgaggacgacagcgagcccgugcugaagggcgugaagcugcacuacaccugaggacuaguuauaagacugacuagcccgaugggccucccaacgggcccuccuccccuccuugcaccgagauuaauagaucuaaaaaaaaaaaaaaaaaaaaaaaaaaaaaaaaaaaaaaaaaaaaaaaaaaaaaaaaaaaaaaaaaaaaaaaaaaaaaaaaaaaaaaaaaaaaaaaaaaaa

SEQ ID NO: 25647 - RNA, 4017 nt, Artificial Sequence
  SARS-CoV-2/Wuhan/WIV05/2019__EPI_ISL_402128 spike protein mRNA gc (1-1273)(A222V_D614G)
aggagaaagcuuaccauguucguguuccuggugcugcugccccuggugagcagccagugcgugaaccugaccacccggacccagcugccaccagccuacaccaacagcuucacccggggcgucuacuaccccgacaagguguuccggagcagcguccugcacagcacccaggaccuguuccugcccuucuucagcaacgugaccugguuccacgccauccacgugagcggcaccaacggcaccaagcgguucgacaaccccgugcugcccuucaacgacggcguguacuucgccagcaccgagaagagcaacaucauccggggcuggaucuucggcaccacccuggacagcaagacccagagccugcugaucgugaauaacgccaccaacguggugaucaaggugugcgaguuccaguucugcaacgaccccuuccugggcguguacuaccacaagaacaacaagagcuggauggagagcgaguuccggguguacagcagcgccaacaacugcaccuucgaguacgugagccagcccuuccugauggaccuggagggcaagcagggcaacuucaagaaccugcgggaguucguguucaagaacaucgacggcuacuucaagaucuacagcaagcacaccccaaucaaccuggugcgggaucugccccagggcuucucagugcuggagccccugguggaccugcccaucggcaucaacaucacccgguuccagacccugcuggcccugcaccggagcuaccugaccccaggcgacagcagcagcggguggacagcaggcgcggcugcuuacuacgugggcuaccugcagccccggaccuuccugcugaaguacaacgagaacggcaccaucaccgacgccguggacugcgcccuggacccucugagcgagaccaagugcacccugaagagcuucaccguggagaagggcaucuaccagaccagcaacuuccgggugcagcccaccgagagcaucgugcgguuccccaacaucaccaaccugugccccuucggcgagguguucaacgccacccgguucgccagcguguacgccuggaaccggaagcggaucagcaacugcguggccgacuacagcgugcuguacaacagcgccagcuucagcaccuucaagugcuacggcgugagccccaccaagcugaacgaccugugcuucaccaacguguacgccgacagcuucgugauccguggcgacgaggugcggcagaucgcacccggccagacaggcaagaucgccgacuacaacuacaagcugcccgacgacuucaccggcugcgugaucgccuggaacagcaacaaccucgacagcaaggugggcggcaacuacaacuaccuguaccggcuguuccggaagagcaaccugaagcccuucgagcgggacaucagcaccgagaucuaccaagccggcuccaccccuugcaacggcguggagggcuucaacugcuacuucccucugcagagcuacggcuuccagcccaccaacggcgugggcuaccagcccuaccgggugguggugcugagcuucgagcugcugcacgccccagccaccguguguggccccaagaagagcaccaaccuggugaagaacaagugcgugaacuucaacuucaacggccuuaccggcaccggcgugcugaccgagagcaacaagaaauuccugcccuuucagcaguucggccgggacaucgccgacaccaccgacgcugugcgggauccccagacccuggagauccuggacaucaccccuugcagcuucggcggcgugagcgugaucaccccaggcaccaacaccagcaaccagguggccgugcuguaccagggcgugaacugcaccgaggugcccguggccauccacgccgaccagcugacacccaccuggcgggucuacagcaccggcagcaacguguuccagacccgggccgguugccugaucggcgccgagcacgugaacaacagcuacgagugcgacauccccaucggcgccggcaucugugccagcuaccagacccagaccaauucaccccggagggcaaggagcguggccagccagagcaucaucgccuacaccaugagccugggcgccgagaacagcguggccuacagcaacaacagcaucgccauccccaccaacuucaccaucagcgugaccaccgagauucugcccgugagcaugaccaagaccagcguggacugcaccauguacaucugcggcgacagcaccgagugcagcaaccugcugcugcaguacggcagcuucugcacccagcugaaccgggcccugaccggcaucgccguggagcaggacaagaacacccaggagguguucgcccaggugaagcagaucuacaagaccccucccaucaaggacuucggcggcuucaacuucagccagauccugcccgaccccagcaagcccagcaagcggagcuucaucgaggaccugcuguucaacaaggugacccuagccgacgccggcuucaucaagcaguacggcgacugccucggcgacauagccgcccgggaccugaucugcgcccagaaguucaacggccugaccgugcugccuccccugcugaccgacgagaugaucgcccaguacaccagcgcccuguuagccggaaccaucaccagcggcuggacuuucggcgcuggagccgcucugcagauccccuucgccaugcagauggccuaccgguucaacggcaucggcgugacccagaacgugcuguacgagaaccagaagcugaucgccaaccaguucaacagcgccaucggcaagauccaggacagccugagcagcaccgcuagcgcccugggcaagcugcaggacguggugaaccagaacgcccaggcccugaacacccuggugaagcagcugagcagcaacuucggcgccaucagcagcgugcugaacgacauccugagccggcuggacaaggucgaggccgaggugcagaucgaccggcugaucacuggccggcugcagagccugcagaccuacgugacccagcagcugauccgggccgccgagauucgggccagcgccaaccuggccgccaccaagaugagcgagugcgugcugggccagagcaagcggguggacuucugcggcaagggcuaccaccugaugagcuuuccccagagcgcaccccacggagugguguuccugcacgugaccuacgugcccgcccaggagaagaacuucaccaccgccccagccaucugccacgacggcaaggcccacuuuccccgggagggcguguucgugagcaacggcacccacugguucgugacccagcggaacuucuacgagccccagaucaucaccaccgacaacaccuucgugagcggcaacugcgacguggugaucggcaucgugaacaacaccguguacgauccccugcagcccgagcuggacagcuucaaggaggagcuggacaaguacuucaagaaucacaccagccccgacguggaccugggcgacaucagcggcaucaacgccagcguggugaacauccagaaggagaucgaucggcugaacgagguggccaagaaccugaacgagagccugaucgaccugcaggagcugggcaaguacgagcaguacaucaaguggcccugguacaucuggcugggcuucaucgccggccugaucgccaucgugauggugaccaucaugcugugcugcaugaccagcugcugcagcugccugaagggcuguugcagcugcggcagcugcugcaaguucgacgaggacgacagcgagcccgugcugaagggcgugaagcugcacuacaccugaggacuaguuauaagacugacuagcccgaugggccucccaacgggcccuccuccccuccuugcaccgagauuaauagaucuaaaaaaaaaaaaaaaaaaaaaaaaaaaaaaaaaaaaaaaaaaaaaaaaaaaaaaaaaaaaaaaaaaaaaaaaaaaaaaaaaaaaaaaaaaaaaaaaaaaa

SEQ ID NO: 25648 - RNA, 4017 nt, Artificial Sequence
  SARS-CoV-2/Wuhan/WIV05/2019__EPI_ISL_402128 spike protein mRNA gc (1-1273)(N439K_D614G)
aggagaaagcuuaccauguucguguuccuggugcugcugccccuggugagcagccagugcgugaaccugaccacccggacccagcugccaccagccuacaccaacagcuucacccggggcgucuacuaccccgacaagguguuccggagcagcguccugcacagcacccaggaccuguuccugcccuucuucagcaacgugaccugguuccacgccauccacgugagcggcaccaacggcaccaagcgguucgacaaccccgugcugcccuucaacgacggcguguacuucgccagcaccgagaagagcaacaucauccggggcuggaucuucggcaccacccuggacagcaagacccagagccugcugaucgugaauaacgccaccaacguggugaucaaggugugcgaguuccaguucugcaacgaccccuuccugggcguguacuaccacaagaacaacaagagcuggauggagagcgaguuccggguguacagcagcgccaacaacugcaccuucgaguacgugagccagcccuuccugauggaccuggagggcaagcagggcaacuucaagaaccugcgggaguucguguucaagaacaucgacggcuacuucaagaucuacagcaagcacaccccaaucaaccuggugcgggaucugccccagggcuucucagcccuggagccccugguggaccugcccaucggcaucaacaucacccgguuccagacccugcuggcccugcaccggagcuaccugaccccaggcgacagcagcagcggguggacagcaggcgcggcugcuuacuacgugggcuaccugcagccccggaccuuccugcugaaguacaacgagaacggcaccaucaccgacgccguggacugcgcccuggacccucugagcgagaccaagugcacccugaagagcuucaccguggagaagggcaucuaccagaccagcaacuuccgggugcagcccaccgagagcaucgugcgguuccccaacaucaccaaccugugccccuucggcgagguguucaacgccacccgguucgccagcguguacgccuggaaccggaagcggaucagcaacugcguggccgacuacagcgugcuguacaacagcgccagcuucagcaccuucaagugcuacggcgugagccccaccaagcugaacgaccugugcuucaccaacguguacgccgacagcuucgugauccguggcgacgaggugcggcagaucgcacccggccagacaggcaagaucgccgacuacaacuacaagcugcccgacgacuucaccggcugcgugaucgccuggaacagcaagaaccucgacagcaaggugggcggcaacuacaacuaccuguaccggcuguuccggaagagcaaccugaagcccuucgagcgggacaucagcaccgagaucuaccaagccggcuccaccccuugcaacggcguggagggcuucaacugcuacuucccucugcagagcuacggcuuccagcccaccaacggcgugggcuaccagcccuaccgggugguggugcugagcuucgagcugcugcacgccccagccaccguguguggccccaagaagagcaccaaccuggugaagaacaagugcgugaacuucaacuucaacggccuuaccggcaccggcgugcugaccgagagcaacaagaaauuccugcccuuucagcaguucggccgggacaucgccgacaccaccgacgcugugcgggauccccagacccuggagauccuggacaucaccccuugcagcuucggcggcgugagcgugaucaccccaggcaccaacaccagcaaccagguggccgugcuguaccagggcgugaacugcaccgaggugcccguggccauccacgccgaccagcugacacccaccuggcgggucuacagcaccggcagcaacguguuccagacccgggccgguugccugaucggcgccgagcacgugaacaacagcuacgagugcgacauccccaucggcgccggcaucugugccagcuaccagacccagaccaauucaccccggagggcaaggagcguggccagccagagcaucaucgccuacaccaugagccugggcgccgagaacagcguggccuacagcaacaacagcaucgccauccccaccaacuucaccaucagcgugaccaccgagauucugcccgugagcaugaccaagaccagcguggacugcaccauguacaucugcggcgacagcaccgagugcagcaaccugcugcugcaguacggcagcuucugcacccagcugaaccgggcccugaccggcaucgccguggagcaggacaagaacacccaggagguguucgcccaggugaagcagaucuacaagaccccucccaucaaggacuucggcggcuucaacuucagccagauccugcccgaccccagcaagcccagcaagcggagcuucaucgaggaccugcuguucaacaaggugacccuagccgacgccggcuucaucaagcaguacggcgacugccucggcgacauagccgcccgggaccugaucugcgcccagaaguucaacggccugaccgugcugccuccccugcugaccgacgagaugaucgcccaguacaccagcgcccuguuagccggaaccaucaccagcggcuggacuuucggcgcuggagccgcucugcagauccccuucgccaugcagauggccuaccgguucaacggcaucggcgugacccagaacgugcuguacgagaaccagaagcugaucgccaaccaguucaacagcgccaucggcaagauccaggacagccugagcagcaccgcuagcgcccugggcaagcugcaggacguggugaaccagaacgcccaggcccugaacacccuggugaagcagcugagcagcaacuucggcgccaucagcagcgugcugaacgacauccugagccggcuggacaaggucgaggccgaggugcagaucgaccggcugaucacuggccggcugcagagccugcagaccuacgugacccagcagcugauccgggccgccgagauucgggccagcgccaaccuggccgccaccaagaugagcgagugcgugcugggccagagcaagcggguggacuucugcggcaagggcuaccaccugaugagcuuuccccagagcgcaccccacggagugguguuccugcacgugaccuacgugcccgcccaggagaagaacuucaccaccgccccagccaucugccacgacggcaaggcccacuuuccccgggagggcguguucgugagcaacggcacccacugguucgugacccagcggaacuucuacgagccccagaucaucaccaccgacaacaccuucgugagcggcaacugcgacguggugaucggcaucgugaacaacaccguguacgauccccugcagcccgagcuggacagcuucaaggaggagcuggacaaguacuucaagaaucacaccagccccgacguggaccugggcgacaucagcggcaucaacgccagcguggugaacauccagaaggagaucgaucggcugaacgagguggccaagaaccugaacgagagccugaucgaccugcaggagcugggcaaguacgagcaguacaucaaguggcccugguacaucuggcugggcuucaucgccggccugaucgccaucgugauggugaccaucaugcugugcugcaugaccagcugcugcagcugccugaagggcuguugcagcugcggcagcugcugcaaguucgacgaggacgacagcgagcccgugcugaagggcgugaagcugcacuacaccugaggacuaguuauaagacugacuagcccgaugggccucccaacgggcccuccuccccuccuugcaccgagauuaauagaucuaaaaaaaaaaaaaaaaaaaaaaaaaaaaaaaaaaaaaaaaaaaaaaaaaaaaaaaaaaaaaaaaaaaaaaaaaaaaaaaaaaaaaaaaaaaaaaaaaaaa

SEQ ID NO: 25649 - RNA, 4017 nt, Artificial Sequence
  SARS-CoV-2/Wuhan/WIV05/2019__EPI_ISL_402128 spike protein mRNA gc (1-1273)(S477N_D614G)
aggagaaagcuuaccauguucguguuccuggugcugcugccccuggugagcagccagugcgugaaccugaccacccggacccagcugccaccagccuacaccaacagcuucacccggggcgucuacuaccccgacaagguguuccggagcagcguccugcacagcacccaggaccuguuccugcccuucuucagcaacgugaccugguuccacgccauccacgugagcggcaccaacggcaccaagcgguucgacaaccccgugcugcccuucaacgacggcguguacuucgccagcaccgagaagagcaacaucauccggggcuggaucuucggcaccacccuggacagcaagacccagagccugcugaucgugaauaacgccaccaacguggugaucaaggugugcgaguuccaguucugcaacgaccccuuccugggcguguacuaccacaagaacaacaagagcuggauggagagcgaguuccggguguacagcagcgccaacaacugcaccuucgaguacgugagccagcccuuccugauggaccuggagggcaagcagggcaacuucaagaaccugcgggaguucguguucaagaacaucgacggcuacuucaagaucuacagcaagcacaccccaaucaaccuggugcgggaucugccccagggcuucucagcccuggagccccugguggaccugcccaucggcaucaacaucacccgguuccagacccugcuggcccugcaccggagcuaccugaccccaggcgacagcagcagcggguggacagcaggcgcggcugcuuacuacgugggcuaccugcagccccggaccuuccugcugaaguacaacgagaacggcaccaucaccgacgccguggacugcgcccuggacccucugagcgagaccaagugcacccugaagagcuucaccguggagaagggcaucuaccagaccagcaacuuccgggugcagcccaccgagagcaucgugcgguuccccaacaucaccaaccugugccccuucggcgagguguucaacgccacccgguucgccagcguguacgccuggaaccggaagcggaucagcaacugcguggccgacuacagcgugcuguacaacagcgccagcuucagcaccuucaagugcuacggcgugagccccaccaagcugaacgaccugugcuucaccaacguguacgccgacagcuucgugauccguggcgacgaggugcggcagaucgcacccggccagacaggcaagaucgccgacuacaacuacaagcugcccgacgacuucaccggcugcgugaucgccuggaacagcaacaaccucgacagcaaggugggcggcaacuacaacuaccuguaccggcuguuccggaagagcaaccugaagcccuucgagcgggacaucagcaccgagaucuaccaagccggcaacaccccuugcaacggcguggagggcuucaacugcuacuucccucugcagagcuacggcuuccagcccaccaacggcgugggcuaccagcccuaccgggugguggugcugagcuucgagcugcugcacgccccagccaccguguguggccccaagaagagcaccaaccuggugaagaacaagugcgugaacuucaacuucaacggccuuaccggcaccggcgugcugaccgagagcaacaagaaauuccugcccuuucagcaguucggccgggacaucgccgacaccaccgacgcugugcgggauccccagacccuggagauccuggacaucaccccuugcagcuucggcggcgugagcgugaucaccccaggcaccaacaccagcaaccagguggccgugcuguaccagggcgugaacugcaccgaggugcccguggccauccacgccgaccagcugacacccaccuggcgggucuacagcaccggcagcaacguguuccagacccgggccgguugccugaucggcgccgagcacgugaacaacagcuacgagugcgacauccccaucggcgccggcaucugugccagcuaccagacccagaccaauucaccccggagggcaaggagcguggccagccagagcaucaucgccuacaccaugagccugggcgccgagaacagcguggccuacagcaacaacagcaucgccauccccaccaacuucaccaucagcgugaccaccgagauucugcccgugagcaugaccaagaccagcguggacugcaccauguacaucugcggcgacagcaccgagugcagcaaccugcugcugcaguacggcagcuucugcacccagcugaaccgggcccugaccggcaucgccguggagcaggacaagaacacccaggagguguucgcccaggugaagcagaucuacaagaccccucccaucaaggacuucggcggcuucaacuucagccagauccugcccgaccccagcaagcccagcaagcggagcuucaucgaggaccugcuguucaacaaggugacccuagccgacgccggcuucaucaagcaguacggcgacugccucggcgacauagccgcccgggaccugaucugcgcccagaaguucaacggccugaccgugcugccuccccugcugaccgacgagaugaucgcccaguacaccagcgcccuguuagccggaaccaucaccagcggcuggacuuucggcgcuggagccgcucugcagauccccuucgccaugcagauggccuaccgguucaacggcaucggcgugacccagaacgugcuguacgagaaccagaagcugaucgccaaccaguucaacagcgccaucggcaagauccaggacagccugagcagcaccgcuagcgcccugggcaagcugcaggacguggugaaccagaacgcccaggcccugaacacccuggugaagcagcugagcagcaacuucggcgccaucagcagcgugcugaacgacauccugagccggcuggacaaggucgaggccgaggugcagaucgaccggcugaucacuggccggcugcagagccugcagaccuacgugacccagcagcugauccgggccgccgagauucgggccagcgccaaccuggccgccaccaagaugagcgagugcgugcugggccagagcaagcggguggacuucugcggcaagggcuaccaccugaugagcuuuccccagagcgcaccccacggagugguguuccugcacgugaccuacgugcccgcccaggagaagaacuucaccaccgccccagccaucugccacgacggcaaggcccacuuuccccgggagggcguguucgugagcaacggcacccacugguucgugacccagcggaacuucuacgagccccagaucaucaccaccgacaacaccuucgugagcggcaacugcgacguggugaucggcaucgugaacaacaccguguacgauccccugcagcccgagcuggacagcuucaaggaggagcuggacaaguacuucaagaaucacaccagccccgacguggaccugggcgacaucagcggcaucaacgccagcguggugaacauccagaaggagaucgaucggcugaacgagguggccaagaaccugaacgagagccugaucgaccugcaggagcugggcaaguacgagcaguacaucaaguggcccugguacaucuggcugggcuucaucgccggccugaucgccaucgugauggugaccaucaugcugugcugcaugaccagcugcugcagcugccugaagggcuguugcagcugcggcagcugcugcaaguucgacgaggacgacagcgagcccgugcugaagggcgugaagcugcacuacaccugaggacuaguuauaagacugacuagcccgaugggccucccaacgggcccuccuccccuccuugcaccgagauuaauagaucuaaaaaaaaaaaaaaaaaaaaaaaaaaaaaaaaaaaaaaaaaaaaaaaaaaaaaaaaaaaaaaaaaaaaaaaaaaaaaaaaaaaaaaaaaaaaaaaaaaaa

SEQ ID NO: 25650 - RNA, 4017 nt, Artificial Sequence
  SARS-CoV-2/Wuhan/WIV05/2019__EPI_ISL_402128 spike protein mRNA gc (1-1273)(N501Y_D614G)
aggagaaagcuuaccauguucguguuccuggugcugcugccccuggugagcagccagugcgugaaccugaccacccggacccagcugccaccagccuacaccaacagcuucacccggggcgucuacuaccccgacaagguguuccggagcagcguccugcacagcacccaggaccuguuccugcccuucuucagcaacgugaccugguuccacgccauccacgugagcggcaccaacggcaccaagcgguucgacaaccccgugcugcccuucaacgacggcguguacuucgccagcaccgagaagagcaacaucauccggggcuggaucuucggcaccacccuggacagcaagacccagagccugcugaucgugaauaacgccaccaacguggugaucaaggugugcgaguuccaguucugcaacgaccccuuccugggcguguacuaccacaagaacaacaagagcuggauggagagcgaguuccggguguacagcagcgccaacaacugcaccuucgaguacgugagccagcccuuccugauggaccuggagggcaagcagggcaacuucaagaaccugcgggaguucguguucaagaacaucgacggcuacuucaagaucuacagcaagcacaccccaaucaaccuggugcgggaucugccccagggcuucucagcccuggagccccugguggaccugcccaucggcaucaacaucacccgguuccagacccugcuggcccugcaccggagcuaccugaccccaggcgacagcagcagcggguggacagcaggcgcggcugcuuacuacgugggcuaccugcagccccggaccuuccugcugaaguacaacgagaacggcaccaucaccgacgccguggacugcgcccuggacccucugagcgagaccaagugcacccugaagagcuucaccguggagaagggcaucuaccagaccagcaacuuccgggugcagcccaccgagagcaucgugcgguuccccaacaucaccaaccugugccccuucggcgagguguucaacgccacccgguucgccagcguguacgccuggaaccggaagcggaucagcaacugcguggccgacuacagcgugcuguacaacagcgccagcuucagcaccuucaagugcuacggcgugagccccaccaagcugaacgaccugugcuucaccaacguguacgccgacagcuucgugauccguggcgacgaggugcggcagaucgcacccggccagacaggcaagaucgccgacuacaacuacaagcugcccgacgacuucaccggcugcgugaucgccuggaacagcaacaaccucgacagcaaggugggcggcaacuacaacuaccuguaccggcuguuccggaagagcaaccugaagcccuucgagcgggacaucagcaccgagaucuaccaagccggcuccaccccuugcaacggcguggagggcuucaacugcuacuucccucugcagagcuacggcuuccagcccaccuacggcgugggcuaccagcccuaccgggugguggugcugagcuucgagcugcugcacgccccagccaccguguguggccccaagaagagcaccaaccuggugaagaacaagugcgugaacuucaacuucaacggccuuaccggcaccggcgugcugaccgagagcaacaagaaauuccugcccuuucagcaguucggccgggacaucgccgacaccaccgacgcugugcgggauccccagacccuggagauccuggacaucaccccuugcagcuucggcggcgugagcgugaucaccccaggcaccaacaccagcaaccagguggccgugcuguaccagggcgugaacugcaccgaggugcccguggccauccacgccgaccagcugacacccaccuggcgggucuacagcaccggcagcaacguguuccagacccgggccgguugccugaucggcgccgagcacgugaacaacagcuacgagugcgacauccccaucggcgccggcaucugugccagcuaccagacccagaccaauucaccccggagggcaaggagcguggccagccagagcaucaucgccuacaccaugagccugggcgccgagaacagcguggccuacagcaacaacagcaucgccauccccaccaacuucaccaucagcgugaccaccgagauucugcccgugagcaugaccaagaccagcguggacugcaccauguacaucugcggcgacagcaccgagugcagcaaccugcugcugcaguacggcagcuucugcacccagcugaaccgggcccugaccggcaucgccguggagcaggacaagaacacccaggagguguucgcccaggugaagcagaucuacaagaccccucccaucaaggacuucggcggcuucaacuucagccagauccugcccgaccccagcaagcccagcaagcggagcuucaucgaggaccugcuguucaacaaggugacccuagccgacgccggcuucaucaagcaguacggcgacugccucggcgacauagccgcccgggaccugaucugcgcccagaaguucaacggccugaccgugcugccuccccugcugaccgacgagaugaucgcccaguacaccagcgcccuguuagccggaaccaucaccagcggcuggacuuucggcgcuggagccgcucugcagauccccuucgccaugcagauggccuaccgguucaacggcaucggcgugacccagaacgugcuguacgagaaccagaagcugaucgccaaccaguucaacagcgccaucggcaagauccaggacagccugagcagcaccgcuagcgcccugggcaagcugcaggacguggugaaccagaacgcccaggcccugaacacccuggugaagcagcugagcagcaacuucggcgccaucagcagcgugcugaacgacauccugagccggcuggacaaggucgaggccgaggugcagaucgaccggcugaucacuggccggcugcagagccugcagaccuacgugacccagcagcugauccgggccgccgagauucgggccagcgccaaccuggccgccaccaagaugagcgagugcgugcugggccagagcaagcggguggacuucugcggcaagggcuaccaccugaugagcuuuccccagagcgcaccccacggagugguguuccugcacgugaccuacgugcccgcccaggagaagaacuucaccaccgccccagccaucugccacgacggcaaggcccacuuuccccgggagggcguguucgugagcaacggcacccacugguucgugacccagcggaacuucuacgagccccagaucaucaccaccgacaacaccuucgugagcggcaacugcgacguggugaucggcaucgugaacaacaccguguacgauccccugcagcccgagcuggacagcuucaaggaggagcuggacaaguacuucaagaaucacaccagccccgacguggaccugggcgacaucagcggcaucaacgccagcguggugaacauccagaaggagaucgaucggcugaacgagguggccaagaaccugaacgagagccugaucgaccugcaggagcugggcaaguacgagcaguacaucaaguggcccugguacaucuggcugggcuucaucgccggccugaucgccaucgugauggugaccaucaugcugugcugcaugaccagcugcugcagcugccugaagggcuguugcagcugcggcagcugcugcaaguucgacgaggacgacagcgagcccgugcugaagggcgugaagcugcacuacaccugaggacuaguuauaagacugacuagcccgaugggccucccaacgggcccuccuccccuccuugcaccgagauuaauagaucuaaaaaaaaaaaaaaaaaaaaaaaaaaaaaaaaaaaaaaaaaaaaaaaaaaaaaaaaaaaaaaaaaaaaaaaaaaaaaaaaaaaaaaaaaaaaaaaaaaaa

SEQ ID NO: 25651 - RNA, 4011 nt, Artificial Sequence
  SARS-CoV-2/Wuhan/WIV05/2019__EPI_ISL_402128 spike protein mRNA gc (1-1273)(H69del_V70del_D614G)
aggagaaagcuuaccauguucguguuccuggugcugcugccccuggugagcagccagugcgugaaccugaccacccggacccagcugccaccagccuacaccaacagcuucacccggggcgucuacuaccccgacaagguguuccggagcagcguccugcacagcacccaggaccuguuccugcccuucuucagcaacgugaccugguuccacgccaucagcggcaccaacggcaccaagcgguucgacaaccccgugcugcccuucaacgacggcguguacuucgccagcaccgagaagagcaacaucauccggggcuggaucuucggcaccacccuggacagcaagacccagagccugcugaucgugaauaacgccaccaacguggugaucaaggugugcgaguuccaguucugcaacgaccccuuccugggcguguacuaccacaagaacaacaagagcuggauggagagcgaguuccggguguacagcagcgccaacaacugcaccuucgaguacgugagccagcccuuccugauggaccuggagggcaagcagggcaacuucaagaaccugcgggaguucguguucaagaacaucgacggcuacuucaagaucuacagcaagcacaccccaaucaaccuggugcgggaucugccccagggcuucucagcccuggagccccugguggaccugcccaucggcaucaacaucacccgguuccagacccugcuggcccugcaccggagcuaccugaccccaggcgacagcagcagcggguggacagcaggcgcggcugcuuacuacgugggcuaccugcagccccggaccuuccugcugaaguacaacgagaacggcaccaucaccgacgccguggacugcgcccuggacccucugagcgagaccaagugcacccugaagagcuucaccguggagaagggcaucuaccagaccagcaacuuccgggugcagcccaccgagagcaucgugcgguuccccaacaucaccaaccugugccccuucggcgagguguucaacgccacccgguucgccagcguguacgccuggaaccggaagcggaucagcaacugcguggccgacuacagcgugcuguacaacagcgccagcuucagcaccuucaagugcuacggcgugagccccaccaagcugaacgaccugugcuucaccaacguguacgccgacagcuucgugauccguggcgacgaggugcggcagaucgcacccggccagacaggcaagaucgccgacuacaacuacaagcugcccgacgacuucaccggcugcgugaucgccuggaacagcaacaaccucgacagcaaggugggcggcaacuacaacuaccuguaccggcuguuccggaagagcaaccugaagcccuucgagcgggacaucagcaccgagaucuaccaagccggcuccaccccuugcaacggcguggagggcuucaacugcuacuucccucugcagagcuacggcuuccagcccaccaacggcgugggcuaccagcccuaccgggugguggugcugagcuucgagcugcugcacgccccagccaccguguguggccccaagaagagcaccaaccuggugaagaacaagugcgugaacuucaacuucaacggccuuaccggcaccggcgugcugaccgagagcaacaagaaauuccugcccuuucagcaguucggccgggacaucgccgacaccaccgacgcugugcgggauccccagacccuggagauccuggacaucaccccuugcagcuucggcggcgugagcgugaucaccccaggcaccaacaccagcaaccagguggccgugcuguaccagggcgugaacugcaccgaggugcccguggccauccacgccgaccagcugacacccaccuggcgggucuacagcaccggcagcaacguguuccagacccgggccgguugccugaucggcgccgagcacgugaacaacagcuacgagugcgacauccccaucggcgccggcaucugugccagcuaccagacccagaccaauucaccccggagggcaaggagcguggccagccagagcaucaucgccuacaccaugagccugggcgccgagaacagcguggccuacagcaacaacagcaucgccauccccaccaacuucaccaucagcgugaccaccgagauucugcccgugagcaugaccaagaccagcguggacugcaccauguacaucugcggcgacagcaccgagugcagcaaccugcugcugcaguacggcagcuucugcacccagcugaaccgggcccugaccggcaucgccguggagcaggacaagaacacccaggagguguucgcccaggugaagcagaucuacaagaccccucccaucaaggacuucggcggcuucaacuucagccagauccugcccgaccccagcaagcccagcaagcggagcuucaucgaggaccugcuguucaacaaggugacccuagccgacgccggcuucaucaagcaguacggcgacugccucggcgacauagccgcccgggaccugaucugcgcccagaaguucaacggccugaccgugcugccuccccugcugaccgacgagaugaucgcccaguacaccagcgcccuguuagccggaaccaucaccagcggcuggacuuucggcgcuggagccgcucugcagauccccuucgccaugcagauggccuaccgguucaacggcaucggcgugacccagaacgugcuguacgagaaccagaagcugaucgccaaccaguucaacagcgccaucggcaagauccaggacagccugagcagcaccgcuagcgcccugggcaagcugcaggacguggugaaccagaacgcccaggcccugaacacccuggugaagcagcugagcagcaacuucggcgccaucagcagcgugcugaacgacauccugagccggcuggacaaggucgaggccgaggugcagaucgaccggcugaucacuggccggcugcagagccugcagaccuacgugacccagcagcugauccgggccgccgagauucgggccagcgccaaccuggccgccaccaagaugagcgagugcgugcugggccagagcaagcggguggacuucugcggcaagggcuaccaccugaugagcuuuccccagagcgcaccccacggagugguguuccugcacgugaccuacgugcccgcccaggagaagaacuucaccaccgccccagccaucugccacgacggcaaggcccacuuuccccgggagggcguguucgugagcaacggcacccacugguucgugacccagcggaacuucuacgagccccagaucaucaccaccgacaacaccuucgugagcggcaacugcgacguggugaucggcaucgugaacaacaccguguacgauccccugcagcccgagcuggacagcuucaaggaggagcuggacaaguacuucaagaaucacaccagccccgacguggaccugggcgacaucagcggcaucaacgccagcguggugaacauccagaaggagaucgaucggcugaacgagguggccaagaaccugaacgagagccugaucgaccugcaggagcugggcaaguacgagcaguacaucaaguggcccugguacaucuggcugggcuucaucgccggccugaucgccaucgugauggugaccaucaugcugugcugcaugaccagcugcugcagcugccugaagggcuguugcagcugcggcagcugcugcaaguucgacgaggacgacagcgagcccgugcugaagggcgugaagcugcacuacaccugaggacuaguuauaagacugacuagcccgaugggccucccaacgggcccuccuccccuccuugcaccgagauuaauagaucuaaaaaaaaaaaaaaaaaaaaaaaaaaaaaaaaaaaaaaaaaaaaaaaaaaaaaaaaaaaaaaaaaaaaaaaaaaaaaaaaaaaaaaaaaaaaaaaaaaaa

SEQ ID NO: 25652 - RNA, 4017 nt, Artificial Sequence
  SARS-CoV-2/Wuhan/WIV05/2019__EPI_ISL_402128 spike protein mRNA gc (1-1273)(Y453F_D614G)
aggagaaagcuuaccauguucguguuccuggugcugcugccccuggugagcagccagugcgugaaccugaccacccggacccagcugccaccagccuacaccaacagcuucacccggggcgucuacuaccccgacaagguguuccggagcagcguccugcacagcacccaggaccuguuccugcccuucuucagcaacgugaccugguuccacgccauccacgugagcggcaccaacggcaccaagcgguucgacaaccccgugcugcccuucaacgacggcguguacuucgccagcaccgagaagagcaacaucauccggggcuggaucuucggcaccacccuggacagcaagacccagagccugcugaucgugaauaacgccaccaacguggugaucaaggugugcgaguuccaguucugcaacgaccccuuccugggcguguacuaccacaagaacaacaagagcuggauggagagcgaguuccggguguacagcagcgccaacaacugcaccuucgaguacgugagccagcccuuccugauggaccuggagggcaagcagggcaacuucaagaaccugcgggaguucguguucaagaacaucgacggcuacuucaagaucuacagcaagcacaccccaaucaaccuggugcgggaucugccccagggcuucucagcccuggagccccugguggaccugcccaucggcaucaacaucacccgguuccagacccugcuggcccugcaccggagcuaccugaccccaggcgacagcagcagcggguggacagcaggcgcggcugcuuacuacgugggcuaccugcagccccggaccuuccugcugaaguacaacgagaacggcaccaucaccgacgccguggacugcgcccuggacccucugagcgagaccaagugcacccugaagagcuucaccguggagaagggcaucuaccagaccagcaacuuccgggugcagcccaccgagagcaucgugcgguuccccaacaucaccaaccugugccccuucggcgagguguucaacgccacccgguucgccagcguguacgccuggaaccggaagcggaucagcaacugcguggccgacuacagcgugcuguacaacagcgccagcuucagcaccuucaagugcuacggcgugagccccaccaagcugaacgaccugugcuucaccaacguguacgccgacagcuucgugauccguggcgacgaggugcggcagaucgcacccggccagacaggcaagaucgccgacuacaacuacaagcugcccgacgacuucaccggcugcgugaucgccuggaacagcaacaaccucgacagcaaggugggcggcaacuacaacuaccuguuccggcuguuccggaagagcaaccugaagcccuucgagcgggacaucagcaccgagaucuaccaagccggcuccaccccuugcaacggcguggagggcuucaacugcuacuucccucugcagagcuacggcuuccagcccaccaacggcgugggcuaccagcccuaccgggugguggugcugagcuucgagcugcugcacgccccagccaccguguguggccccaagaagagcaccaaccuggugaagaacaagugcgugaacuucaacuucaacggccuuaccggcaccggcgugcugaccgagagcaacaagaaauuccugcccuuucagcaguucggccgggacaucgccgacaccaccgacgcugugcgggauccccagacccuggagauccuggacaucaccccuugcagcuucggcggcgugagcgugaucaccccaggcaccaacaccagcaaccagguggccgugcuguaccagggcgugaacugcaccgaggugcccguggccauccacgccgaccagcugacacccaccuggcgggucuacagcaccggcagcaacguguuccagacccgggccgguugccugaucggcgccgagcacgugaacaacagcuacgagugcgacauccccaucggcgccggcaucugugccagcuaccagacccagaccaauucaccccggagggcaaggagcguggccagccagagcaucaucgccuacaccaugagccugggcgccgagaacagcguggccuacagcaacaacagcaucgccauccccaccaacuucaccaucagcgugaccaccgagauucugcccgugagcaugaccaagaccagcguggacugcaccauguacaucugcggcgacagcaccgagugcagcaaccugcugcugcaguacggcagcuucugcacccagcugaaccgggcccugaccggcaucgccguggagcaggacaagaacacccaggagguguucgcccaggugaagcagaucuacaagaccccucccaucaaggacuucggcggcuucaacuucagccagauccugcccgaccccagcaagcccagcaagcggagcuucaucgaggaccugcuguucaacaaggugacccuagccgacgccggcuucaucaagcaguacggcgacugccucggcgacauagccgcccgggaccugaucugcgcccagaaguucaacggccugaccgugcugccuccccugcugaccgacgagaugaucgcccaguacaccagcgcccuguuagccggaaccaucaccagcggcuggacuuucggcgcuggagccgcucugcagauccccuucgccaugcagauggccuaccgguucaacggcaucggcgugacccagaacgugcuguacgagaaccagaagcugaucgccaaccaguucaacagcgccaucggcaagauccaggacagccugagcagcaccgcuagcgcccugggcaagcugcaggacguggugaaccagaacgcccaggcccugaacacccuggugaagcagcugagcagcaacuucggcgccaucagcagcgugcugaacgacauccugagccggcuggacaaggucgaggccgaggugcagaucgaccggcugaucacuggccggcugcagagccugcagaccuacgugacccagcagcugauccgggccgccgagauucgggccagcgccaaccuggccgccaccaagaugagcgagugcgugcugggccagagcaagcggguggacuucugcggcaagggcuaccaccugaugagcuuuccccagagcgcaccccacggagugguguuccugcacgugaccuacgugcccgcccaggagaagaacuucaccaccgccccagccaucugccacgacggcaaggcccacuuuccccgggagggcguguucgugagcaacggcacccacugguucgugacccagcggaacuucuacgagccccagaucaucaccaccgacaacaccuucgugagcggcaacugcgacguggugaucggcaucgugaacaacaccguguacgauccccugcagcccgagcuggacagcuucaaggaggagcuggacaaguacuucaagaaucacaccagccccgacguggaccugggcgacaucagcggcaucaacgccagcguggugaacauccagaaggagaucgaucggcugaacgagguggccaagaaccugaacgagagccugaucgaccugcaggagcugggcaaguacgagcaguacaucaaguggcccugguacaucuggcugggcuucaucgccggccugaucgccaucgugauggugaccaucaugcugugcugcaugaccagcugcugcagcugccugaagggcuguugcagcugcggcagcugcugcaaguucgacgaggacgacagcgagcccgugcugaagggcgugaagcugcacuacaccugaggacuaguuauaagacugacuagcccgaugggccucccaacgggcccuccuccccuccuugcaccgagauuaauagaucuaaaaaaaaaaaaaaaaaaaaaaaaaaaaaaaaaaaaaaaaaaaaaaaaaaaaaaaaaaaaaaaaaaaaaaaaaaaaaaaaaaaaaaaaaaaaaaaaaaaa

SEQ ID NO: 25653 - RNA, 4017 nt, Artificial Sequence
  SARS-CoV-2/Wuhan/WIV05/2019__EPI_ISL_402128 spike protein mRNA gc (1-1273)(D614G_I692V)
aggagaaagcuuaccauguucguguuccuggugcugcugccccuggugagcagccagugcgugaaccugaccacccggacccagcugccaccagccuacaccaacagcuucacccggggcgucuacuaccccgacaagguguuccggagcagcguccugcacagcacccaggaccuguuccugcccuucuucagcaacgugaccugguuccacgccauccacgugagcggcaccaacggcaccaagcgguucgacaaccccgugcugcccuucaacgacggcguguacuucgccagcaccgagaagagcaacaucauccggggcuggaucuucggcaccacccuggacagcaagacccagagccugcugaucgugaauaacgccaccaacguggugaucaaggugugcgaguuccaguucugcaacgaccccuuccugggcguguacuaccacaagaacaacaagagcuggauggagagcgaguuccggguguacagcagcgccaacaacugcaccuucgaguacgugagccagcccuuccugauggaccuggagggcaagcagggcaacuucaagaaccugcgggaguucguguucaagaacaucgacggcuacuucaagaucuacagcaagcacaccccaaucaaccuggugcgggaucugccccagggcuucucagcccuggagccccugguggaccugcccaucggcaucaacaucacccgguuccagacccugcuggcccugcaccggagcuaccugaccccaggcgacagcagcagcggguggacagcaggcgcggcugcuuacuacgugggcuaccugcagccccggaccuuccugcugaaguacaacgagaacggcaccaucaccgacgccguggacugcgcccuggacccucugagcgagaccaagugcacccugaagagcuucaccguggagaagggcaucuaccagaccagcaacuuccgggugcagcccaccgagagcaucgugcgguuccccaacaucaccaaccugugccccuucggcgagguguucaacgccacccgguucgccagcguguacgccuggaaccggaagcggaucagcaacugcguggccgacuacagcgugcuguacaacagcgccagcuucagcaccuucaagugcuacggcgugagccccaccaagcugaacgaccugugcuucaccaacguguacgccgacagcuucgugauccguggcgacgaggugcggcagaucgcacccggccagacaggcaagaucgccgacuacaacuacaagcugcccgacgacuucaccggcugcgugaucgccuggaacagcaacaaccucgacagcaaggugggcggcaacuacaacuaccuguaccggcuguuccggaagagcaaccugaagcccuucgagcgggacaucagcaccgagaucuaccaagccggcuccaccccuugcaacggcguggagggcuucaacugcuacuucccucugcagagcuacggcuuccagcccaccaacggcgugggcuaccagcccuaccgggugguggugcugagcuucgagcugcugcacgccccagccaccguguguggccccaagaagagcaccaaccuggugaagaacaagugcgugaacuucaacuucaacggccuuaccggcaccggcgugcugaccgagagcaacaagaaauuccugcccuuucagcaguucggccgggacaucgccgacaccaccgacgcugugcgggauccccagacccuggagauccuggacaucaccccuugcagcuucggcggcgugagcgugaucaccccaggcaccaacaccagcaaccagguggccgugcuguaccagggcgugaacugcaccgaggugcccguggccauccacgccgaccagcugacacccaccuggcgggucuacagcaccggcagcaacguguuccagacccgggccgguugccugaucggcgccgagcacgugaacaacagcuacgagugcgacauccccaucggcgccggcaucugugccagcuaccagacccagaccaauucaccccggagggcaaggagcguggccagccagagcgugaucgccuacaccaugagccugggcgccgagaacagcguggccuacagcaacaacagcaucgccauccccaccaacuucaccaucagcgugaccaccgagauucugcccgugagcaugaccaagaccagcguggacugcaccauguacaucugcggcgacagcaccgagugcagcaaccugcugcugcaguacggcagcuucugcacccagcugaaccgggcccugaccggcaucgccguggagcaggacaagaacacccaggagguguucgcccaggugaagcagaucuacaagaccccucccaucaaggacuucggcggcuucaacuucagccagauccugcccgaccccagcaagcccagcaagcggagcuucaucgaggaccugcuguucaacaaggugacccuagccgacgccggcuucaucaagcaguacggcgacugccucggcgacauagccgcccgggaccugaucugcgcccagaaguucaacggccugaccgugcugccuccccugcugaccgacgagaugaucgcccaguacaccagcgcccuguuagccggaaccaucaccagcggcuggacuuucggcgcuggagccgcucugcagauccccuucgccaugcagauggccuaccgguucaacggcaucggcgugacccagaacgugcuguacgagaaccagaagcugaucgccaaccaguucaacagcgccaucggcaagauccaggacagccugagcagcaccgcuagcgcccugggcaagcugcaggacguggugaaccagaacgcccaggcccugaacacccuggugaagcagcugagcagcaacuucggcgccaucagcagcgugcugaacgacauccugagccggcuggacaaggucgaggccgaggugcagaucgaccggcugaucacuggccggcugcagagccugcagaccuacgugacccagcagcugauccgggccgccgagauucgggccagcgccaaccuggccgccaccaagaugagcgagugcgugcugggccagagcaagcggguggacuucugcggcaagggcuaccaccugaugagcuuuccccagagcgcaccccacggagugguguuccugcacgugaccuacgugcccgcccaggagaagaacuucaccaccgccccagccaucugccacgacggcaaggcccacuuuccccgggagggcguguucgugagcaacggcacccacugguucgugacccagcggaacuucuacgagccccagaucaucaccaccgacaacaccuucgugagcggcaacugcgacguggugaucggcaucgugaacaacaccguguacgauccccugcagcccgagcuggacagcuucaaggaggagcuggacaaguacuucaagaaucacaccagccccgacguggaccugggcgacaucagcggcaucaacgccagcguggugaacauccagaaggagaucgaucggcugaacgagguggccaagaaccugaacgagagccugaucgaccugcaggagcugggcaaguacgagcaguacaucaaguggcccugguacaucuggcugggcuucaucgccggccugaucgccaucgugauggugaccaucaugcugugcugcaugaccagcugcugcagcugccugaagggcuguugcagcugcggcagcugcugcaaguucgacgaggacgacagcgagcccgugcugaagggcgugaagcugcacuacaccugaggacuaguuauaagacugacuagcccgaugggccucccaacgggcccuccuccccuccuugcaccgagauuaauagaucuaaaaaaaaaaaaaaaaaaaaaaaaaaaaaaaaaaaaaaaaaaaaaaaaaaaaaaaaaaaaaaaaaaaaaaaaaaaaaaaaaaaaaaaaaaaaaaaaaaaa

SEQ ID NO: 25654 - RNA, 4017 nt, Artificial Sequence
  SARS-CoV-2/Wuhan/WIV05/2019__EPI_ISL_402128 spike protein mRNA gc (1-1273)(D614G_M1229I)
aggagaaagcuuaccauguucguguuccuggugcugcugccccuggugagcagccagugcgugaaccugaccacccggacccagcugccaccagccuacaccaacagcuucacccggggcgucuacuaccccgacaagguguuccggagcagcguccugcacagcacccaggaccuguuccugcccuucuucagcaacgugaccugguuccacgccauccacgugagcggcaccaacggcaccaagcgguucgacaaccccgugcugcccuucaacgacggcguguacuucgccagcaccgagaagagcaacaucauccggggcuggaucuucggcaccacccuggacagcaagacccagagccugcugaucgugaauaacgccaccaacguggugaucaaggugugcgaguuccaguucugcaacgaccccuuccugggcguguacuaccacaagaacaacaagagcuggauggagagcgaguuccggguguacagcagcgccaacaacugcaccuucgaguacgugagccagcccuuccugauggaccuggagggcaagcagggcaacuucaagaaccugcgggaguucguguucaagaacaucgacggcuacuucaagaucuacagcaagcacaccccaaucaaccuggugcgggaucugccccagggcuucucagcccuggagccccugguggaccugcccaucggcaucaacaucacccgguuccagacccugcuggcccugcaccggagcuaccugaccccaggcgacagcagcagcggguggacagcaggcgcggcugcuuacuacgugggcuaccugcagccccggaccuuccugcugaaguacaacgagaacggcaccaucaccgacgccguggacugcgcccuggacccucugagcgagaccaagugcacccugaagagcuucaccguggagaagggcaucuaccagaccagcaacuuccgggugcagcccaccgagagcaucgugcgguuccccaacaucaccaaccugugccccuucggcgagguguucaacgccacccgguucgccagcguguacgccuggaaccggaagcggaucagcaacugcguggccgacuacagcgugcuguacaacagcgccagcuucagcaccuucaagugcuacggcgugagccccaccaagcugaacgaccugugcuucaccaacguguacgccgacagcuucgugauccguggcgacgaggugcggcagaucgcacccggccagacaggcaagaucgccgacuacaacuacaagcugcccgacgacuucaccggcugcgugaucgccuggaacagcaacaaccucgacagcaaggugggcggcaacuacaacuaccuguaccggcuguuccggaagagcaaccugaagcccuucgagcgggacaucagcaccgagaucuaccaagccggcuccaccccuugcaacggcguggagggcuucaacugcuacuucccucugcagagcuacggcuuccagcccaccaacggcgugggcuaccagcccuaccgggugguggugcugagcuucgagcugcugcacgccccagccaccguguguggccccaagaagagcaccaaccuggugaagaacaagugcgugaacuucaacuucaacggccuuaccggcaccggcgugcugaccgagagcaacaagaaauuccugcccuuucagcaguucggccgggacaucgccgacaccaccgacgcugugcgggauccccagacccuggagauccuggacaucaccccuugcagcuucggcggcgugagcgugaucaccccaggcaccaacaccagcaaccagguggccgugcuguaccagggcgugaacugcaccgaggugcccguggccauccacgccgaccagcugacacccaccuggcgggucuacagcaccggcagcaacguguuccagacccgggccgguugccugaucggcgccgagcacgugaacaacagcuacgagugcgacauccccaucggcgccggcaucugugccagcuaccagacccagaccaauucaccccggagggcaaggagcguggccagccagagcaucaucgccuacaccaugagccugggcgccgagaacagcguggccuacagcaacaacagcaucgccauccccaccaacuucaccaucagcgugaccaccgagauucugcccgugagcaugaccaagaccagcguggacugcaccauguacaucugcggcgacagcaccgagugcagcaaccugcugcugcaguacggcagcuucugcacccagcugaaccgggcccugaccggcaucgccguggagcaggacaagaacacccaggagguguucgcccaggugaagcagaucuacaagaccccucccaucaaggacuucggcggcuucaacuucagccagauccugcccgaccccagcaagcccagcaagcggagcuucaucgaggaccugcuguucaacaaggugacccuagccgacgccggcuucaucaagcaguacggcgacugccucggcgacauagccgcccgggaccugaucugcgcccagaaguucaacggccugaccgugcugccuccccugcugaccgacgagaugaucgcccaguacaccagcgcccuguuagccggaaccaucaccagcggcuggacuuucggcgcuggagccgcucugcagauccccuucgccaugcagauggccuaccgguucaacggcaucggcgugacccagaacgugcuguacgagaaccagaagcugaucgccaaccaguucaacagcgccaucggcaagauccaggacagccugagcagcaccgcuagcgcccugggcaagcugcaggacguggugaaccagaacgcccaggcccugaacacccuggugaagcagcugagcagcaacuucggcgccaucagcagcgugcugaacgacauccugagccggcuggacaaggucgaggccgaggugcagaucgaccggcugaucacuggccggcugcagagccugcagaccuacgugacccagcagcugauccgggccgccgagauucgggccagcgccaaccuggccgccaccaagaugagcgagugcgugcugggccagagcaagcggguggacuucugcggcaagggcuaccaccugaugagcuuuccccagagcgcaccccacggagugguguuccugcacgugaccuacgugcccgcccaggagaagaacuucaccaccgccccagccaucugccacgacggcaaggcccacuuuccccgggagggcguguucgugagcaacggcacccacugguucgugacccagcggaacuucuacgagccccagaucaucaccaccgacaacaccuucgugagcggcaacugcgacguggugaucggcaucgugaacaacaccguguacgauccccugcagcccgagcuggacagcuucaaggaggagcuggacaaguacuucaagaaucacaccagccccgacguggaccugggcgacaucagcggcaucaacgccagcguggugaacauccagaaggagaucgaucggcugaacgagguggccaagaaccugaacgagagccugaucgaccugcaggagcugggcaaguacgagcaguacaucaaguggcccugguacaucuggcugggcuucaucgccggccugaucgccaucgugaucgugaccaucaugcugugcugcaugaccagcugcugcagcugccugaagggcuguugcagcugcggcagcugcugcaaguucgacgaggacgacagcgagcccgugcugaagggcgugaagcugcacuacaccugaggacuaguuauaagacugacuagcccgaugggccucccaacgggcccuccuccccuccuugcaccgagauuaauagaucuaaaaaaaaaaaaaaaaaaaaaaaaaaaaaaaaaaaaaaaaaaaaaaaaaaaaaaaaaaaaaaaaaaaaaaaaaaaaaaaaaaaaaaaaaaaaaaaaaaaa

SEQ ID NO: 25655 - RNA, 4011 nt, Artificial Sequence
  SARS-CoV-2/Wuhan/WIV05/2019__EPI_ISL_402128 spike protein mRNA gc (1-1273)(H69del_V70del_A222V_Y453F_S477N_D614G_I692V)
aggagaaagcuuaccauguucguguuccuggugcugcugccccuggugagcagccagugcgugaaccugaccacccggacccagcugccaccagccuacaccaacagcuucacccggggcgucuacuaccccgacaagguguuccggagcagcguccugcacagcacccaggaccuguuccugcccuucuucagcaacgugaccugguuccacgccaucagcggcaccaacggcaccaagcgguucgacaaccccgugcugcccuucaacgacggcguguacuucgccagcaccgagaagagcaacaucauccggggcuggaucuucggcaccacccuggacagcaagacccagagccugcugaucgugaauaacgccaccaacguggugaucaaggugugcgaguuccaguucugcaacgaccccuuccugggcguguacuaccacaagaacaacaagagcuggauggagagcgaguuccggguguacagcagcgccaacaacugcaccuucgaguacgugagccagcccuuccugauggaccuggagggcaagcagggcaacuucaagaaccugcgggaguucguguucaagaacaucgacggcuacuucaagaucuacagcaagcacaccccaaucaaccuggugcgggaucugccccagggcuucucagugcuggagccccugguggaccugcccaucggcaucaacaucacccgguuccagacccugcuggcccugcaccggagcuaccugaccccaggcgacagcagcagcggguggacagcaggcgcggcugcuuacuacgugggcuaccugcagccccggaccuuccugcugaaguacaacgagaacggcaccaucaccgacgccguggacugcgcccuggacccucugagcgagaccaagugcacccugaagagcuucaccguggagaagggcaucuaccagaccagcaacuuccgggugcagcccaccgagagcaucgugcgguuccccaacaucaccaaccugugccccuucggcgagguguucaacgccacccgguucgccagcguguacgccuggaaccggaagcggaucagcaacugcguggccgacuacagcgugcuguacaacagcgccagcuucagcaccuucaagugcuacggcgugagccccaccaagcugaacgaccugugcuucaccaacguguacgccgacagcuucgugauccguggcgacgaggugcggcagaucgcacccggccagacaggcaagaucgccgacuacaacuacaagcugcccgacgacuucaccggcugcgugaucgccuggaacagcaacaaccucgacagcaaggugggcggcaacuacaacuaccuguuccggcuguuccggaagagcaaccugaagcccuucgagcgggacaucagcaccgagaucuaccaagccggcaacaccccuugcaacggcguggagggcuucaacugcuacuucccucugcagagcuacggcuuccagcccaccaacggcgugggcuaccagcccuaccgggugguggugcugagcuucgagcugcugcacgccccagccaccguguguggccccaagaagagcaccaaccuggugaagaacaagugcgugaacuucaacuucaacggccuuaccggcaccggcgugcugaccgagagcaacaagaaauuccugcccuuucagcaguucggccgggacaucgccgacaccaccgacgcugugcgggauccccagacccuggagauccuggacaucaccccuugcagcuucggcggcgugagcgugaucaccccaggcaccaacaccagcaaccagguggccgugcuguaccagggcgugaacugcaccgaggugcccguggccauccacgccgaccagcugacacccaccuggcgggucuacagcaccggcagcaacguguuccagacccgggccgguugccugaucggcgccgagcacgugaacaacagcuacgagugcgacauccccaucggcgccggcaucugugccagcuaccagacccagaccaauucaccccggagggcaaggagcguggccagccagagcgugaucgccuacaccaugagccugggcgccgagaacagcguggccuacagcaacaacagcaucgccauccccaccaacuucaccaucagcgugaccaccgagauucugcccgugagcaugaccaagaccagcguggacugcaccauguacaucugcggcgacagcaccgagugcagcaaccugcugcugcaguacggcagcuucugcacccagcugaaccgggcccugaccggcaucgccguggagcaggacaagaacacccaggagguguucgcccaggugaagcagaucuacaagaccccucccaucaaggacuucggcggcuucaacuucagccagauccugcccgaccccagcaagcccagcaagcggagcuucaucgaggaccugcuguucaacaaggugacccuagccgacgccggcuucaucaagcaguacggcgacugccucggcgacauagccgcccgggaccugaucugcgcccagaaguucaacggccugaccgugcugccuccccugcugaccgacgagaugaucgcccaguacaccagcgcccuguuagccggaaccaucaccagcggcuggacuuucggcgcuggagccgcucugcagauccccuucgccaugcagauggccuaccgguucaacggcaucggcgugacccagaacgugcuguacgagaaccagaagcugaucgccaaccaguucaacagcgccaucggcaagauccaggacagccugagcagcaccgcuagcgcccugggcaagcugcaggacguggugaaccagaacgcccaggcccugaacacccuggugaagcagcugagcagcaacuucggcgccaucagcagcgugcugaacgacauccugagccggcuggacaaggucgaggccgaggugcagaucgaccggcugaucacuggccggcugcagagccugcagaccuacgugacccagcagcugauccgggccgccgagauucgggccagcgccaaccuggccgccaccaagaugagcgagugcgugcugggccagagcaagcggguggacuucugcggcaagggcuaccaccugaugagcuuuccccagagcgcaccccacggagugguguuccugcacgugaccuacgugcccgcccaggagaagaacuucaccaccgccccagccaucugccacgacggcaaggcccacuuuccccgggagggcguguucgugagcaacggcacccacugguucgugacccagcggaacuucuacgagccccagaucaucaccaccgacaacaccuucgugagcggcaacugcgacguggugaucggcaucgugaacaacaccguguacgauccccugcagcccgagcuggacagcuucaaggaggagcuggacaaguacuucaagaaucacaccagccccgacguggaccugggcgacaucagcggcaucaacgccagcguggugaacauccagaaggagaucgaucggcugaacgagguggccaagaaccugaacgagagccugaucgaccugcaggagcugggcaaguacgagcaguacaucaaguggcccugguacaucuggcugggcuucaucgccggccugaucgccaucgugauggugaccaucaugcugugcugcaugaccagcugcugcagcugccugaagggcuguugcagcugcggcagcugcugcaaguucgacgaggacgacagcgagcccgugcugaagggcgugaagcugcacuacaccugaggacuaguuauaagacugacuagcccgaugggccucccaacgggcccuccuccccuccuugcaccgagauuaauagaucuaaaaaaaaaaaaaaaaaaaaaaaaaaaaaaaaaaaaaaaaaaaaaaaaaaaaaaaaaaaaaaaaaaaaaaaaaaaaaaaaaaaaaaaaaaaaaaaaaaaa

SEQ ID NO: 25656 - RNA, 4011 nt, Artificial Sequence
  SARS-CoV-2/Wuhan/WIV05/2019__EPI_ISL_402128 spike protein mRNA gc (1-1273)(H69del_V70del_Y453F_D614G_I692V_M1229I)
aggagaaagcuuaccauguucguguuccuggugcugcugccccuggugagcagccagugcgugaaccugaccacccggacccagcugccaccagccuacaccaacagcuucacccggggcgucuacuaccccgacaagguguuccggagcagcguccugcacagcacccaggaccuguuccugcccuucuucagcaacgugaccugguuccacgccaucagcggcaccaacggcaccaagcgguucgacaaccccgugcugcccuucaacgacggcguguacuucgccagcaccgagaagagcaacaucauccggggcuggaucuucggcaccacccuggacagcaagacccagagccugcugaucgugaauaacgccaccaacguggugaucaaggugugcgaguuccaguucugcaacgaccccuuccugggcguguacuaccacaagaacaacaagagcuggauggagagcgaguuccggguguacagcagcgccaacaacugcaccuucgaguacgugagccagcccuuccugauggaccuggagggcaagcagggcaacuucaagaaccugcgggaguucguguucaagaacaucgacggcuacuucaagaucuacagcaagcacaccccaaucaaccuggugcgggaucugccccagggcuucucagcccuggagccccugguggaccugcccaucggcaucaacaucacccgguuccagacccugcuggcccugcaccggagcuaccugaccccaggcgacagcagcagcggguggacagcaggcgcggcugcuuacuacgugggcuaccugcagccccggaccuuccugcugaaguacaacgagaacggcaccaucaccgacgccguggacugcgcccuggacccucugagcgagaccaagugcacccugaagagcuucaccguggagaagggcaucuaccagaccagcaacuuccgggugcagcccaccgagagcaucgugcgguuccccaacaucaccaaccugugccccuucggcgagguguucaacgccacccgguucgccagcguguacgccuggaaccggaagcggaucagcaacugcguggccgacuacagcgugcuguacaacagcgccagcuucagcaccuucaagugcuacggcgugagccccaccaagcugaacgaccugugcuucaccaacguguacgccgacagcuucgugauccguggcgacgaggugcggcagaucgcacccggccagacaggcaagaucgccgacuacaacuacaagcugcccgacgacuucaccggcugcgugaucgccuggaacagcaacaaccucgacagcaaggugggcggcaacuacaacuaccuguuccggcuguuccggaagagcaaccugaagcccuucgagcgggacaucagcaccgagaucuaccaagccggcuccaccccuugcaacggcguggagggcuucaacugcuacuucccucugcagagcuacggcuuccagcccaccaacggcgugggcuaccagcccuaccgggugguggugcugagcuucgagcugcugcacgccccagccaccguguguggccccaagaagagcaccaaccuggugaagaacaagugcgugaacuucaacuucaacggccuuaccggcaccggcgugcugaccgagagcaacaagaaauuccugcccuuucagcaguucggccgggacaucgccgacaccaccgacgcugugcgggauccccagacccuggagauccuggacaucaccccuugcagcuucggcggcgugagcgugaucaccccaggcaccaacaccagcaaccagguggccgugcuguaccagggcgugaacugcaccgaggugcccguggccauccacgccgaccagcugacacccaccuggcgggucuacagcaccggcagcaacguguuccagacccgggccgguugccugaucggcgccgagcacgugaacaacagcuacgagugcgacauccccaucggcgccggcaucugugccagcuaccagacccagaccaauucaccccggagggcaaggagcguggccagccagagcgugaucgccuacaccaugagccugggcgccgagaacagcguggccuacagcaacaacagcaucgccauccccaccaacuucaccaucagcgugaccaccgagauucugcccgugagcaugaccaagaccagcguggacugcaccauguacaucugcggcgacagcaccgagugcagcaaccugcugcugcaguacggcagcuucugcacccagcugaaccgggcccugaccggcaucgccguggagcaggacaagaacacccaggagguguucgcccaggugaagcagaucuacaagaccccucccaucaaggacuucggcggcuucaacuucagccagauccugcccgaccccagcaagcccagcaagcggagcuucaucgaggaccugcuguucaacaaggugacccuagccgacgccggcuucaucaagcaguacggcgacugccucggcgacauagccgcccgggaccugaucugcgcccagaaguucaacggccugaccgugcugccuccccugcugaccgacgagaugaucgcccaguacaccagcgcccuguuagccggaaccaucaccagcggcuggacuuucggcgcuggagccgcucugcagauccccuucgccaugcagauggccuaccgguucaacggcaucggcgugacccagaacgugcuguacgagaaccagaagcugaucgccaaccaguucaacagcgccaucggcaagauccaggacagccugagcagcaccgcuagcgcccugggcaagcugcaggacguggugaaccagaacgcccaggcccugaacacccuggugaagcagcugagcagcaacuucggcgccaucagcagcgugcugaacgacauccugagccggcuggacaaggucgaggccgaggugcagaucgaccggcugaucacuggccggcugcagagccugcagaccuacgugacccagcagcugauccgggccgccgagauucgggccagcgccaaccuggccgccaccaagaugagcgagugcgugcugggccagagcaagcggguggacuucugcggcaagggcuaccaccugaugagcuuuccccagagcgcaccccacggagugguguuccugcacgugaccuacgugcccgcccaggagaagaacuucaccaccgccccagccaucugccacgacggcaaggcccacuuuccccgggagggcguguucgugagcaacggcacccacugguucgugacccagcggaacuucuacgagccccagaucaucaccaccgacaacaccuucgugagcggcaacugcgacguggugaucggcaucgugaacaacaccguguacgauccccugcagcccgagcuggacagcuucaaggaggagcuggacaaguacuucaagaaucacaccagccccgacguggaccugggcgacaucagcggcaucaacgccagcguggugaacauccagaaggagaucgaucggcugaacgagguggccaagaaccugaacgagagccugaucgaccugcaggagcugggcaaguacgagcaguacaucaaguggcccugguacaucuggcugggcuucaucgccggccugaucgccaucgugaucgugaccaucaugcugugcugcaugaccagcugcugcagcugccugaagggcuguugcagcugcggcagcugcugcaaguucgacgaggacgacagcgagcccgugcugaagggcgugaagcugcacuacaccugaggacuaguuauaagacugacuagcccgaugggccucccaacgggcccuccuccccuccuugcaccgagauuaauagaucuaaaaaaaaaaaaaaaaaaaaaaaaaaaaaaaaaaaaaaaaaaaaaaaaaaaaaaaaaaaaaaaaaaaaaaaaaaaaaaaaaaaaaaaaaaaaaaaaaaaa

SEQ ID NO: 25657 - RNA, 4008 nt, Artificial Sequence
  SARS-CoV-2/Wuhan/WIV05/2019__EPI_ISL_402128 spike protein mRNA gc (1-1273)(H69del_V70del_Y144del_N501Y_A570D_D614G_P681H_T716I_S982 A_D1118H)
aggagaaagcuuaccauguucguguuccuggugcugcugccccuggugagcagccagugcgugaaccugaccacccggacccagcugccaccagccuacaccaacagcuucacccggggcgucuacuaccccgacaagguguuccggagcagcguccugcacagcacccaggaccuguuccugcccuucuucagcaacgugaccugguuccacgccaucagcggcaccaacggcaccaagcgguucgacaaccccgugcugcccuucaacgacggcguguacuucgccagcaccgagaagagcaacaucauccggggcuggaucuucggcaccacccuggacagcaagacccagagccugcugaucgugaauaacgccaccaacguggugaucaaggugugcgaguuccaguucugcaacgaccccuuccugggcguguaccacaagaacaacaagagcuggauggagagcgaguuccggguguacagcagcgccaacaacugcaccuucgaguacgugagccagcccuuccugauggaccuggagggcaagcagggcaacuucaagaaccugcgggaguucguguucaagaacaucgacggcuacuucaagaucuacagcaagcacaccccaaucaaccuggugcgggaucugccccagggcuucucagcccuggagccccugguggaccugcccaucggcaucaacaucacccgguuccagacccugcuggcccugcaccggagcuaccugaccccaggcgacagcagcagcggguggacagcaggcgcggcugcuuacuacgugggcuaccugcagccccggaccuuccugcugaaguacaacgagaacggcaccaucaccgacgccguggacugcgcccuggacccucugagcgagaccaagugcacccugaagagcuucaccguggagaagggcaucuaccagaccagcaacuuccgggugcagcccaccgagagcaucgugcgguuccccaacaucaccaaccugugccccuucggcgagguguucaacgccacccgguucgccagcguguacgccuggaaccggaagcggaucagcaacugcguggccgacuacagcgugcuguacaacagcgccagcuucagcaccuucaagugcuacggcgugagccccaccaagcugaacgaccugugcuucaccaacguguacgccgacagcuucgugauccguggcgacgaggugcggcagaucgcacccggccagacaggcaagaucgccgacuacaacuacaagcugcccgacgacuucaccggcugcgugaucgccuggaacagcaacaaccucgacagcaaggugggcggcaacuacaacuaccuguaccggcuguuccggaagagcaaccugaagcccuucgagcgggacaucagcaccgagaucuaccaagccggcuccaccccuugcaacggcguggagggcuucaacugcuacuucccucugcagagcuacggcuuccagcccaccuacggcgugggcuaccagcccuaccgggugguggugcugagcuucgagcugcugcacgccccagccaccguguguggccccaagaagagcaccaaccuggugaagaacaagugcgugaacuucaacuucaacggccuuaccggcaccggcgugcugaccgagagcaacaagaaauuccugcccuuucagcaguucggccgggacaucgacgacaccaccgacgcugugcgggauccccagacccuggagauccuggacaucaccccuugcagcuucggcggcgugagcgugaucaccccaggcaccaacaccagcaaccagguggccgugcuguaccagggcgugaacugcaccgaggugcccguggccauccacgccgaccagcugacacccaccuggcgggucuacagcaccggcagcaacguguuccagacccgggccgguugccugaucggcgccgagcacgugaacaacagcuacgagugcgacauccccaucggcgccggcaucugugccagcuaccagacccagaccaauucacaccggagggcaaggagcguggccagccagagcaucaucgccuacaccaugagccugggcgccgagaacagcguggccuacagcaacaacagcaucgccauccccaucaacuucaccaucagcgugaccaccgagauucugcccgugagcaugaccaagaccagcguggacugcaccauguacaucugcggcgacagcaccgagugcagcaaccugcugcugcaguacggcagcuucugcacccagcugaaccgggcccugaccggcaucgccguggagcaggacaagaacacccaggagguguucgcccaggugaagcagaucuacaagaccccucccaucaaggacuucggcggcuucaacuucagccagauccugcccgaccccagcaagcccagcaagcggagcuucaucgaggaccugcuguucaacaaggugacccuagccgacgccggcuucaucaagcaguacggcgacugccucggcgacauagccgcccgggaccugaucugcgcccagaaguucaacggccugaccgugcugccuccccugcugaccgacgagaugaucgcccaguacaccagcgcccuguuagccggaaccaucaccagcggcuggacuuucggcgcuggagccgcucugcagauccccuucgccaugcagauggccuaccgguucaacggcaucggcgugacccagaacgugcuguacgagaaccagaagcugaucgccaaccaguucaacagcgccaucggcaagauccaggacagccugagcagcaccgcuagcgcccugggcaagcugcaggacguggugaaccagaacgcccaggcccugaacacccuggugaagcagcugagcagcaacuucggcgccaucagcagcgugcugaacgacauccuggcccggcuggacaaggucgaggccgaggugcagaucgaccggcugaucacuggccggcugcagagccugcagaccuacgugacccagcagcugauccgggccgccgagauucgggccagcgccaaccuggccgccaccaagaugagcgagugcgugcugggccagagcaagcggguggacuucugcggcaagggcuaccaccugaugagcuuuccccagagcgcaccccacggagugguguuccugcacgugaccuacgugcccgcccaggagaagaacuucaccaccgccccagccaucugccacgacggcaaggcccacuuuccccgggagggcguguucgugagcaacggcacccacugguucgugacccagcggaacuucuacgagccccagaucaucaccacccacaacaccuucgugagcggcaacugcgacguggugaucggcaucgugaacaacaccguguacgauccccugcagcccgagcuggacagcuucaaggaggagcuggacaaguacuucaagaaucacaccagccccgacguggaccugggcgacaucagcggcaucaacgccagcguggugaacauccagaaggagaucgaucggcugaacgagguggccaagaaccugaacgagagccugaucgaccugcaggagcugggcaaguacgagcaguacaucaaguggcccugguacaucuggcugggcuucaucgccggccugaucgccaucgugauggugaccaucaugcugugcugcaugaccagcugcugcagcugccugaagggcuguugcagcugcggcagcugcugcaaguucgacgaggacgacagcgagcccgugcugaagggcgugaagcugcacuacaccugaggacuaguuauaagacugacuagcccgaugggccucccaacgggcccuccuccccuccuugcaccgagauuaauagaucuaaaaaaaaaaaaaaaaaaaaaaaaaaaaaaaaaaaaaaaaaaaaaaaaaaaaaaaaaaaaaaaaaaaaaaaaaaaaaaaaaaaaaaaaaaaaaaaaaaaa

SEQ ID NO: 25658 - RNA, 4017 nt, Artificial Sequence
  SARS-CoV-2/Wuhan/WIV05/2019__EPI_ISL_402128 spike protein mRNA gc (1-1273)(K417N_E484K_N501Y_D614G)
aggagaaagcuuaccauguucguguuccuggugcugcugccccuggugagcagccagugcgugaaccugaccacccggacccagcugccaccagccuacaccaacagcuucacccggggcgucuacuaccccgacaagguguuccggagcagcguccugcacagcacccaggaccuguuccugcccuucuucagcaacgugaccugguuccacgccauccacgugagcggcaccaacggcaccaagcgguucgacaaccccgugcugcccuucaacgacggcguguacuucgccagcaccgagaagagcaacaucauccggggcuggaucuucggcaccacccuggacagcaagacccagagccugcugaucgugaauaacgccaccaacguggugaucaaggugugcgaguuccaguucugcaacgaccccuuccugggcguguacuaccacaagaacaacaagagcuggauggagagcgaguuccggguguacagcagcgccaacaacugcaccuucgaguacgugagccagcccuuccugauggaccuggagggcaagcagggcaacuucaagaaccugcgggaguucguguucaagaacaucgacggcuacuucaagaucuacagcaagcacaccccaaucaaccuggugcgggaucugccccagggcuucucagcccuggagccccugguggaccugcccaucggcaucaacaucacccgguuccagacccugcuggcccugcaccggagcuaccugaccccaggcgacagcagcagcggguggacagcaggcgcggcugcuuacuacgugggcuaccugcagccccggaccuuccugcugaaguacaacgagaacggcaccaucaccgacgccguggacugcgcccuggacccucugagcgagaccaagugcacccugaagagcuucaccguggagaagggcaucuaccagaccagcaacuuccgggugcagcccaccgagagcaucgugcgguuccccaacaucaccaaccugugccccuucggcgagguguucaacgccacccgguucgccagcguguacgccuggaaccggaagcggaucagcaacugcguggccgacuacagcgugcuguacaacagcgccagcuucagcaccuucaagugcuacggcgugagccccaccaagcugaacgaccugugcuucaccaacguguacgccgacagcuucgugauccguggcgacgaggugcggcagaucgcacccggccagacaggcaacaucgccgacuacaacuacaagcugcccgacgacuucaccggcugcgugaucgccuggaacagcaacaaccucgacagcaaggugggcggcaacuacaacuaccuguaccggcuguuccggaagagcaaccugaagcccuucgagcgggacaucagcaccgagaucuaccaagccggcuccaccccuugcaacggcgugaagggcuucaacugcuacuucccucugcagagcuacggcuuccagcccaccuacggcgugggcuaccagcccuaccgggugguggugcugagcuucgagcugcugcacgccccagccaccguguguggccccaagaagagcaccaaccuggugaagaacaagugcgugaacuucaacuucaacggccuuaccggcaccggcgugcugaccgagagcaacaagaaauuccugcccuuucagcaguucggccgggacaucgccgacaccaccgacgcugugcgggauccccagacccuggagauccuggacaucaccccuugcagcuucggcggcgugagcgugaucaccccaggcaccaacaccagcaaccagguggccgugcuguaccagggcgugaacugcaccgaggugcccguggccauccacgccgaccagcugacacccaccuggcgggucuacagcaccggcagcaacguguuccagacccgggccgguugccugaucggcgccgagcacgugaacaacagcuacgagugcgacauccccaucggcgccggcaucugugccagcuaccagacccagaccaauucaccccggagggcaaggagcguggccagccagagcaucaucgccuacaccaugagccugggcgccgagaacagcguggccuacagcaacaacagcaucgccauccccaccaacuucaccaucagcgugaccaccgagauucugcccgugagcaugaccaagaccagcguggacugcaccauguacaucugcggcgacagcaccgagugcagcaaccugcugcugcaguacggcagcuucugcacccagcugaaccgggcccugaccggcaucgccguggagcaggacaagaacacccaggagguguucgcccaggugaagcagaucuacaagaccccucccaucaaggacuucggcggcuucaacuucagccagauccugcccgaccccagcaagcccagcaagcggagcuucaucgaggaccugcuguucaacaaggugacccuagccgacgccggcuucaucaagcaguacggcgacugccucggcgacauagccgcccgggaccugaucugcgcccagaaguucaacggccugaccgugcugccuccccugcugaccgacgagaugaucgcccaguacaccagcgcccuguuagccggaaccaucaccagcggcuggacuuucggcgcuggagccgcucugcagauccccuucgccaugcagauggccuaccgguucaacggcaucggcgugacccagaacgugcuguacgagaaccagaagcugaucgccaaccaguucaacagcgccaucggcaagauccaggacagccugagcagcaccgcuagcgcccugggcaagcugcaggacguggugaaccagaacgcccaggcccugaacacccuggugaagcagcugagcagcaacuucggcgccaucagcagcgugcugaacgacauccugagccggcuggacaaggucgaggccgaggugcagaucgaccggcugaucacuggccggcugcagagccugcagaccuacgugacccagcagcugauccgggccgccgagauucgggccagcgccaaccuggccgccaccaagaugagcgagugcgugcugggccagagcaagcggguggacuucugcggcaagggcuaccaccugaugagcuuuccccagagcgcaccccacggagugguguuccugcacgugaccuacgugcccgcccaggagaagaacuucaccaccgccccagccaucugccacgacggcaaggcccacuuuccccgggagggcguguucgugagcaacggcacccacugguucgugacccagcggaacuucuacgagccccagaucaucaccaccgacaacaccuucgugagcggcaacugcgacguggugaucggcaucgugaacaacaccguguacgauccccugcagcccgagcuggacagcuucaaggaggagcuggacaaguacuucaagaaucacaccagccccgacguggaccugggcgacaucagcggcaucaacgccagcguggugaacauccagaaggagaucgaucggcugaacgagguggccaagaaccugaacgagagccugaucgaccugcaggagcugggcaaguacgagcaguacaucaaguggcccugguacaucuggcugggcuucaucgccggccugaucgccaucgugauggugaccaucaugcugugcugcaugaccagcugcugcagcugccugaagggcuguugcagcugcggcagcugcugcaaguucgacgaggacgacagcgagcccgugcugaagggcgugaagcugcacuacaccugaggacuaguuauaagacugacuagcccgaugggccucccaacgggcccuccuccccuccuugcaccgagauuaauagaucuaaaaaaaaaaaaaaaaaaaaaaaaaaaaaaaaaaaaaaaaaaaaaaaaaaaaaaaaaaaaaaaaaaaaaaaaaaaaaaaaaaaaaaaaaaaaaaaaaaaa

SEQ ID NO: 25659 - RNA, 4008 nt, Artificial Sequence
  SARS-CoV-2/Wuhan/WIV05/2019__EPI_ISL_402128 spike protein mRNA gc (1-1273)(L18F_D80A_D215G_L242del_A243del_L244del_R246I_K417N_E484 K_N501Y_D614G_A701V)
aggagaaagcuuaccauguucguguuccuggugcugcugccccuggugagcagccagugcgugaacuucaccacccggacccagcugccaccagccuacaccaacagcuucacccggggcgucuacuaccccgacaagguguuccggagcagcguccugcacagcacccaggaccuguuccugcccuucuucagcaacgugaccugguuccacgccauccacgugagcggcaccaacggcaccaagcgguucgccaaccccgugcugcccuucaacgacggcguguacuucgccagcaccgagaagagcaacaucauccggggcuggaucuucggcaccacccuggacagcaagacccagagccugcugaucgugaauaacgccaccaacguggugaucaaggugugcgaguuccaguucugcaacgaccccuuccugggcguguacuaccacaagaacaacaagagcuggauggagagcgaguuccggguguacagcagcgccaacaacugcaccuucgaguacgugagccagcccuuccugauggaccuggagggcaagcagggcaacuucaagaaccugcgggaguucguguucaagaacaucgacggcuacuucaagaucuacagcaagcacaccccaaucaaccuggugcggggccugccccagggcuucucagcccuggagccccugguggaccugcccaucggcaucaacaucacccgguuccagacccugcacaucagcuaccugaccccaggcgacagcagcagcggguggacagcaggcgcggcugcuuacuacgugggcuaccugcagccccggaccuuccugcugaaguacaacgagaacggcaccaucaccgacgccguggacugcgcccuggacccucugagcgagaccaagugcacccugaagagcuucaccguggagaagggcaucuaccagaccagcaacuuccgggugcagcccaccgagagcaucgugcgguuccccaacaucaccaaccugugccccuucggcgagguguucaacgccacccgguucgccagcguguacgccuggaaccggaagcggaucagcaacugcguggccgacuacagcgugcuguacaacagcgccagcuucagcaccuucaagugcuacggcgugagccccaccaagcugaacgaccugugcuucaccaacguguacgccgacagcuucgugauccguggcgacgaggugcggcagaucgcacccggccagacaggcaacaucgccgacuacaacuacaagcugcccgacgacuucaccggcugcgugaucgccuggaacagcaacaaccucgacagcaaggugggcggcaacuacaacuaccuguaccggcuguuccggaagagcaaccugaagcccuucgagcgggacaucagcaccgagaucuaccaagccggcuccaccccuugcaacggcgugaagggcuucaacugcuacuucccucugcagagcuacggcuuccagcccaccuacggcgugggcuaccagcccuaccgggugguggugcugagcuucgagcugcugcacgccccagccaccguguguggccccaagaagagcaccaaccuggugaagaacaagugcgugaacuucaacuucaacggccuuaccggcaccggcgugcugaccgagagcaacaagaaauuccugcccuuucagcaguucggccgggacaucgccgacaccaccgacgcugugcgggauccccagacccuggagauccuggacaucaccccuugcagcuucggcggcgugagcgugaucaccccaggcaccaacaccagcaaccagguggccgugcuguaccagggcgugaacugcaccgaggugcccguggccauccacgccgaccagcugacacccaccuggcgggucuacagcaccggcagcaacguguuccagacccgggccgguugccugaucggcgccgagcacgugaacaacagcuacgagugcgacauccccaucggcgccggcaucugugccagcuaccagacccagaccaauucaccccggagggcaaggagcguggccagccagagcaucaucgccuacaccaugagccugggcguggagaacagcguggccuacagcaacaacagcaucgccauccccaccaacuucaccaucagcgugaccaccgagauucugcccgugagcaugaccaagaccagcguggacugcaccauguacaucugcggcgacagcaccgagugcagcaaccugcugcugcaguacggcagcuucugcacccagcugaaccgggcccugaccggcaucgccguggagcaggacaagaacacccaggagguguucgcccaggugaagcagaucuacaagaccccucccaucaaggacuucggcggcuucaacuucagccagauccugcccgaccccagcaagcccagcaagcggagcuucaucgaggaccugcuguucaacaaggugacccuagccgacgccggcuucaucaagcaguacggcgacugccucggcgacauagccgcccgggaccugaucugcgcccagaaguucaacggccugaccgugcugccuccccugcugaccgacgagaugaucgcccaguacaccagcgcccuguuagccggaaccaucaccagcggcuggacuuucggcgcuggagccgcucugcagauccccuucgccaugcagauggccuaccgguucaacggcaucggcgugacccagaacgugcuguacgagaaccagaagcugaucgccaaccaguucaacagcgccaucggcaagauccaggacagccugagcagcaccgcuagcgcccugggcaagcugcaggacguggugaaccagaacgcccaggcccugaacacccuggugaagcagcugagcagcaacuucggcgccaucagcagcgugcugaacgacauccugagccggcuggacaaggucgaggccgaggugcagaucgaccggcugaucacuggccggcugcagagccugcagaccuacgugacccagcagcugauccgggccgccgagauucgggccagcgccaaccuggccgccaccaagaugagcgagugcgugcugggccagagcaagcggguggacuucugcggcaagggcuaccaccugaugagcuuuccccagagcgcaccccacggagugguguuccugcacgugaccuacgugcccgcccaggagaagaacuucaccaccgccccagccaucugccacgacggcaaggcccacuuuccccgggagggcguguucgugagcaacggcacccacugguucgugacccagcggaacuucuacgagccccagaucaucaccaccgacaacaccuucgugagcggcaacugcgacguggugaucggcaucgugaacaacaccguguacgauccccugcagcccgagcuggacagcuucaaggaggagcuggacaaguacuucaagaaucacaccagccccgacguggaccugggcgacaucagcggcaucaacgccagcguggugaacauccagaaggagaucgaucggcugaacgagguggccaagaaccugaacgagagccugaucgaccugcaggagcugggcaaguacgagcaguacaucaaguggcccugguacaucuggcugggcuucaucgccggccugaucgccaucgugauggugaccaucaugcugugcugcaugaccagcugcugcagcugccugaagggcuguugcagcugcggcagcugcugcaaguucgacgaggacgacagcgagcccgugcugaagggcgugaagcugcacuacaccugaggacuaguuauaagacugacuagcccgaugggccucccaacgggcccuccuccccuccuugcaccgagauuaauagaucuaaaaaaaaaaaaaaaaaaaaaaaaaaaaaaaaaaaaaaaaaaaaaaaaaaaaaaaaaaaaaaaaaaaaaaaaaaaaaaaaaaaaaaaaaaaaaaaaaaaa

SEQ ID NO: 25660 - RNA, 4017 nt, Artificial Sequence
  SARS-CoV-2/Wuhan/WIV05/2019__EPI_ISL_402128 spike protein mRNA gc (1-1273)(E484K_D614G)
aggagaaagcuuaccauguucguguuccuggugcugcugccccuggugagcagccagugcgugaaccugaccacccggacccagcugccaccagccuacaccaacagcuucacccggggcgucuacuaccccgacaagguguuccggagcagcguccugcacagcacccaggaccuguuccugcccuucuucagcaacgugaccugguuccacgccauccacgugagcggcaccaacggcaccaagcgguucgacaaccccgugcugcccuucaacgacggcguguacuucgccagcaccgagaagagcaacaucauccggggcuggaucuucggcaccacccuggacagcaagacccagagccugcugaucgugaauaacgccaccaacguggugaucaaggugugcgaguuccaguucugcaacgaccccuuccugggcguguacuaccacaagaacaacaagagcuggauggagagcgaguuccggguguacagcagcgccaacaacugcaccuucgaguacgugagccagcccuuccugauggaccuggagggcaagcagggcaacuucaagaaccugcgggaguucguguucaagaacaucgacggcuacuucaagaucuacagcaagcacaccccaaucaaccuggugcgggaucugccccagggcuucucagcccuggagccccugguggaccugcccaucggcaucaacaucacccgguuccagacccugcuggcccugcaccggagcuaccugaccccaggcgacagcagcagcggguggacagcaggcgcggcugcuuacuacgugggcuaccugcagccccggaccuuccugcugaaguacaacgagaacggcaccaucaccgacgccguggacugcgcccuggacccucugagcgagaccaagugcacccugaagagcuucaccguggagaagggcaucuaccagaccagcaacuuccgggugcagcccaccgagagcaucgugcgguuccccaacaucaccaaccugugccccuucggcgagguguucaacgccacccgguucgccagcguguacgccuggaaccggaagcggaucagcaacugcguggccgacuacagcgugcuguacaacagcgccagcuucagcaccuucaagugcuacggcgugagccccaccaagcugaacgaccugugcuucaccaacguguacgccgacagcuucgugauccguggcgacgaggugcggcagaucgcacccggccagacaggcaagaucgccgacuacaacuacaagcugcccgacgacuucaccggcugcgugaucgccuggaacagcaacaaccucgacagcaaggugggcggcaacuacaacuaccuguaccggcuguuccggaagagcaaccugaagcccuucgagcgggacaucagcaccgagaucuaccaagccggcuccaccccuugcaacggcgugaagggcuucaacugcuacuucccucugcagagcuacggcuuccagcccaccaacggcgugggcuaccagcccuaccgggugguggugcugagcuucgagcugcugcacgccccagccaccguguguggccccaagaagagcaccaaccuggugaagaacaagugcgugaacuucaacuucaacggccuuaccggcaccggcgugcugaccgagagcaacaagaaauuccugcccuuucagcaguucggccgggacaucgccgacaccaccgacgcugugcgggauccccagacccuggagauccuggacaucaccccuugcagcuucggcggcgugagcgugaucaccccaggcaccaacaccagcaaccagguggccgugcuguaccagggcgugaacugcaccgaggugcccguggccauccacgccgaccagcugacacccaccuggcgggucuacagcaccggcagcaacguguuccagacccgggccgguugccugaucggcgccgagcacgugaacaacagcuacgagugcgacauccccaucggcgccggcaucugugccagcuaccagacccagaccaauucaccccggagggcaaggagcguggccagccagagcaucaucgccuacaccaugagccugggcgccgagaacagcguggccuacagcaacaacagcaucgccauccccaccaacuucaccaucagcgugaccaccgagauucugcccgugagcaugaccaagaccagcguggacugcaccauguacaucugcggcgacagcaccgagugcagcaaccugcugcugcaguacggcagcuucugcacccagcugaaccgggcccugaccggcaucgccguggagcaggacaagaacacccaggagguguucgcccaggugaagcagaucuacaagaccccucccaucaaggacuucggcggcuucaacuucagccagauccugcccgaccccagcaagcccagcaagcggagcuucaucgaggaccugcuguucaacaaggugacccuagccgacgccggcuucaucaagcaguacggcgacugccucggcgacauagccgcccgggaccugaucugcgcccagaaguucaacggccugaccgugcugccuccccugcugaccgacgagaugaucgcccaguacaccagcgcccuguuagccggaaccaucaccagcggcuggacuuucggcgcuggagccgcucugcagauccccuucgccaugcagauggccuaccgguucaacggcaucggcgugacccagaacgugcuguacgagaaccagaagcugaucgccaaccaguucaacagcgccaucggcaagauccaggacagccugagcagcaccgcuagcgcccugggcaagcugcaggacguggugaaccagaacgcccaggcccugaacacccuggugaagcagcugagcagcaacuucggcgccaucagcagcgugcugaacgacauccugagccggcuggacaaggucgaggccgaggugcagaucgaccggcugaucacuggccggcugcagagccugcagaccuacgugacccagcagcugauccgggccgccgagauucgggccagcgccaaccuggccgccaccaagaugagcgagugcgugcugggccagagcaagcggguggacuucugcggcaagggcuaccaccugaugagcuuuccccagagcgcaccccacggagugguguuccugcacgugaccuacgugcccgcccaggagaagaacuucaccaccgccccagccaucugccacgacggcaaggcccacuuuccccgggagggcguguucgugagcaacggcacccacugguucgugacccagcggaacuucuacgagccccagaucaucaccaccgacaacaccuucgugagcggcaacugcgacguggugaucggcaucgugaacaacaccguguacgauccccugcagcccgagcuggacagcuucaaggaggagcuggacaaguacuucaagaaucacaccagccccgacguggaccugggcgacaucagcggcaucaacgccagcguggugaacauccagaaggagaucgaucggcugaacgagguggccaagaaccugaacgagagccugaucgaccugcaggagcugggcaaguacgagcaguacaucaaguggcccugguacaucuggcugggcuucaucgccggccugaucgccaucgugauggugaccaucaugcugugcugcaugaccagcugcugcagcugccugaagggcuguugcagcugcggcagcugcugcaaguucgacgaggacgacagcgagcccgugcugaagggcgugaagcugcacuacaccugaggacuaguuauaagacugacuagcccgaugggccucccaacgggcccuccuccccuccuugcaccgagauuaauagaucuaaaaaaaaaaaaaaaaaaaaaaaaaaaaaaaaaaaaaaaaaaaaaaaaaaaaaaaaaaaaaaaaaaaaaaaaaaaaaaaaaaaaaaaaaaaaaaaaaaaa

SEQ ID NO: 25661 - RNA, 4017 nt, Artificial Sequence
  SARS-CoV-2/Wuhan/WIV05/2019__EPI_ISL_402128 spike protein mRNA gc (1-1273)(L18F_T20N_P26S_D138Y_R190S_K417T_E484K_N501Y_D614G_H655Y _T1027I)
aggagaaagcuuaccauguucguguuccuggugcugcugccccuggugagcagccagugcgugaacuucaccaaccggacccagcugccaagcgccuacaccaacagcuucacccggggcgucuacuaccccgacaagguguuccggagcagcguccugcacagcacccaggaccuguuccugcccuucuucagcaacgugaccugguuccacgccauccacgugagcggcaccaacggcaccaagcgguucgacaaccccgugcugcccuucaacgacggcguguacuucgccagcaccgagaagagcaacaucauccggggcuggaucuucggcaccacccuggacagcaagacccagagccugcugaucgugaauaacgccaccaacguggugaucaaggugugcgaguuccaguucugcaacuaccccuuccugggcguguacuaccacaagaacaacaagagcuggauggagagcgaguuccggguguacagcagcgccaacaacugcaccuucgaguacgugagccagcccuuccugauggaccuggagggcaagcagggcaacuucaagaaccugagcgaguucguguucaagaacaucgacggcuacuucaagaucuacagcaagcacaccccaaucaaccuggugcgggaucugccccagggcuucucagcccuggagccccugguggaccugcccaucggcaucaacaucacccgguuccagacccugcuggcccugcaccggagcuaccugaccccaggcgacagcagcagcggguggacagcaggcgcggcugcuuacuacgugggcuaccugcagccccggaccuuccugcugaaguacaacgagaacggcaccaucaccgacgccguggacugcgcccuggacccucugagcgagaccaagugcacccugaagagcuucaccguggagaagggcaucuaccagaccagcaacuuccgggugcagcccaccgagagcaucgugcgguuccccaacaucaccaaccugugccccuucggcgagguguucaacgccacccgguucgccagcguguacgccuggaaccggaagcggaucagcaacugcguggccgacuacagcgugcuguacaacagcgccagcuucagcaccuucaagugcuacggcgugagccccaccaagcugaacgaccugugcuucaccaacguguacgccgacagcuucgugauccguggcgacgaggugcggcagaucgcacccggccagacaggcaccaucgccgacuacaacuacaagcugcccgacgacuucaccggcugcgugaucgccuggaacagcaacaaccucgacagcaaggugggcggcaacuacaacuaccuguaccggcuguuccggaagagcaaccugaagcccuucgagcgggacaucagcaccgagaucuaccaagccggcuccaccccuugcaacggcgugaagggcuucaacugcuacuucccucugcagagcuacggcuuccagcccaccuacggcgugggcuaccagcccuaccgggugguggugcugagcuucgagcugcugcacgccccagccaccguguguggccccaagaagagcaccaaccuggugaagaacaagugcgugaacuucaacuucaacggccuuaccggcaccggcgugcugaccgagagcaacaagaaauuccugcccuuucagcaguucggccgggacaucgccgacaccaccgacgcugugcgggauccccagacccuggagauccuggacaucaccccuugcagcuucggcggcgugagcgugaucaccccaggcaccaacaccagcaaccagguggccgugcuguaccagggcgugaacugcaccgaggugcccguggccauccacgccgaccagcugacacccaccuggcgggucuacagcaccggcagcaacguguuccagacccgggccgguugccugaucggcgccgaguacgugaacaacagcuacgagugcgacauccccaucggcgccggcaucugugccagcuaccagacccagaccaauucaccccggagggcaaggagcguggccagccagagcaucaucgccuacaccaugagccugggcgccgagaacagcguggccuacagcaacaacagcaucgccauccccaccaacuucaccaucagcgugaccaccgagauucugcccgugagcaugaccaagaccagcguggacugcaccauguacaucugcggcgacagcaccgagugcagcaaccugcugcugcaguacggcagcuucugcacccagcugaaccgggcccugaccggcaucgccguggagcaggacaagaacacccaggagguguucgcccaggugaagcagaucuacaagaccccucccaucaaggacuucggcggcuucaacuucagccagauccugcccgaccccagcaagcccagcaagcggagcuucaucgaggaccugcuguucaacaaggugacccuagccgacgccggcuucaucaagcaguacggcgacugccucggcgacauagccgcccgggaccugaucugcgcccagaaguucaacggccugaccgugcugccuccccugcugaccgacgagaugaucgcccaguacaccagcgcccuguuagccggaaccaucaccagcggcuggacuuucggcgcuggagccgcucugcagauccccuucgccaugcagauggccuaccgguucaacggcaucggcgugacccagaacgugcuguacgagaaccagaagcugaucgccaaccaguucaacagcgccaucggcaagauccaggacagccugagcagcaccgcuagcgcccugggcaagcugcaggacguggugaaccagaacgcccaggcccugaacacccuggugaagcagcugagcagcaacuucggcgccaucagcagcgugcugaacgacauccugagccggcuggacaaggucgaggccgaggugcagaucgaccggcugaucacuggccggcugcagagccugcagaccuacgugacccagcagcugauccgggccgccgagauucgggccagcgccaaccuggccgccaucaagaugagcgagugcgugcugggccagagcaagcggguggacuucugcggcaagggcuaccaccugaugagcuuuccccagagcgcaccccacggagugguguuccugcacgugaccuacgugcccgcccaggagaagaacuucaccaccgccccagccaucugccacgacggcaaggcccacuuuccccgggagggcguguucgugagcaacggcacccacugguucgugacccagcggaacuucuacgagccccagaucaucaccaccgacaacaccuucgugagcggcaacugcgacguggugaucggcaucgugaacaacaccguguacgauccccugcagcccgagcuggacagcuucaaggaggagcuggacaaguacuucaagaaucacaccagccccgacguggaccugggcgacaucagcggcaucaacgccagcguggugaacauccagaaggagaucgaucggcugaacgagguggccaagaaccugaacgagagccugaucgaccugcaggagcugggcaaguacgagcaguacaucaaguggcccugguacaucuggcugggcuucaucgccggccugaucgccaucgugauggugaccaucaugcugugcugcaugaccagcugcugcagcugccugaagggcuguugcagcugcggcagcugcugcaaguucgacgaggacgacagcgagcccgugcugaagggcgugaagcugcacuacaccugaggacuaguuauaagacugacuagcccgaugggccucccaacgggcccuccuccccuccuugcaccgagauuaauagaucuaaaaaaaaaaaaaaaaaaaaaaaaaaaaaaaaaaaaaaaaaaaaaaaaaaaaaaaaaaaaaaaaaaaaaaaaaaaaaaaaaaaaaaaaaaaaaaaaaaaa

SEQ ID NO: 25662 - RNA, 4017 nt, Artificial Sequence
  SARS-CoV-2/Wuhan/WIV05/2019__EPI_ISL_402128 spike protein mRNA gc (1-1273)(S13I_W152C_L452R_D614G)
aggagaaagcuuaccauguucguguuccuggugcugcugccccuggugagcauccagugcgugaaccugaccacccggacccagcugccaccagccuacaccaacagcuucacccggggcgucuacuaccccgacaagguguuccggagcagcguccugcacagcacccaggaccuguuccugcccuucuucagcaacgugaccugguuccacgccauccacgugagcggcaccaacggcaccaagcgguucgacaaccccgugcugcccuucaacgacggcguguacuucgccagcaccgagaagagcaacaucauccggggcuggaucuucggcaccacccuggacagcaagacccagagccugcugaucgugaauaacgccaccaacguggugaucaaggugugcgaguuccaguucugcaacgaccccuuccugggcguguacuaccacaagaacaacaagagcugcauggagagcgaguuccggguguacagcagcgccaacaacugcaccuucgaguacgugagccagcccuuccugauggaccuggagggcaagcagggcaacuucaagaaccugcgggaguucguguucaagaacaucgacggcuacuucaagaucuacagcaagcacaccccaaucaaccuggugcgggaucugccccagggcuucucagcccuggagccccugguggaccugcccaucggcaucaacaucacccgguuccagacccugcuggcccugcaccggagcuaccugaccccaggcgacagcagcagcggguggacagcaggcgcggcugcuuacuacgugggcuaccugcagccccggaccuuccugcugaaguacaacgagaacggcaccaucaccgacgccguggacugcgcccuggacccucugagcgagaccaagugcacccugaagagcuucaccguggagaagggcaucuaccagaccagcaacuuccgggugcagcccaccgagagcaucgugcgguuccccaacaucaccaaccugugccccuucggcgagguguucaacgccacccgguucgccagcguguacgccuggaaccggaagcggaucagcaacugcguggccgacuacagcgugcuguacaacagcgccagcuucagcaccuucaagugcuacggcgugagccccaccaagcugaacgaccugugcuucaccaacguguacgccgacagcuucgugauccguggcgacgaggugcggcagaucgcacccggccagacaggcaagaucgccgacuacaacuacaagcugcccgacgacuucaccggcugcgugaucgccuggaacagcaacaaccucgacagcaaggugggcggcaacuacaacuaccgcuaccggcuguuccggaagagcaaccugaagcccuucgagcgggacaucagcaccgagaucuaccaagccggcuccaccccuugcaacggcguggagggcuucaacugcuacuucccucugcagagcuacggcuuccagcccaccaacggcgugggcuaccagcccuaccgggugguggugcugagcuucgagcugcugcacgccccagccaccguguguggccccaagaagagcaccaaccuggugaagaacaagugcgugaacuucaacuucaacggccuuaccggcaccggcgugcugaccgagagcaacaagaaauuccugcccuuucagcaguucggccgggacaucgccgacaccaccgacgcugugcgggauccccagacccuggagauccuggacaucaccccuugcagcuucggcggcgugagcgugaucaccccaggcaccaacaccagcaaccagguggccgugcuguaccagggcgugaacugcaccgaggugcccguggccauccacgccgaccagcugacacccaccuggcgggucuacagcaccggcagcaacguguuccagacccgggccgguugccugaucggcgccgagcacgugaacaacagcuacgagugcgacauccccaucggcgccggcaucugugccagcuaccagacccagaccaauucaccccggagggcaaggagcguggccagccagagcaucaucgccuacaccaugagccugggcgccgagaacagcguggccuacagcaacaacagcaucgccauccccaccaacuucaccaucagcgugaccaccgagauucugcccgugagcaugaccaagaccagcguggacugcaccauguacaucugcggcgacagcaccgagugcagcaaccugcugcugcaguacggcagcuucugcacccagcugaaccgggcccugaccggcaucgccguggagcaggacaagaacacccaggagguguucgcccaggugaagcagaucuacaagaccccucccaucaaggacuucggcggcuucaacuucagccagauccugcccgaccccagcaagcccagcaagcggagcuucaucgaggaccugcuguucaacaaggugacccuagccgacgccggcuucaucaagcaguacggcgacugccucggcgacauagccgcccgggaccugaucugcgcccagaaguucaacggccugaccgugcugccuccccugcugaccgacgagaugaucgcccaguacaccagcgcccuguuagccggaaccaucaccagcggcuggacuuucggcgcuggagccgcucugcagauccccuucgccaugcagauggccuaccgguucaacggcaucggcgugacccagaacgugcuguacgagaaccagaagcugaucgccaaccaguucaacagcgccaucggcaagauccaggacagccugagcagcaccgcuagcgcccugggcaagcugcaggacguggugaaccagaacgcccaggcccugaacacccuggugaagcagcugagcagcaacuucggcgccaucagcagcgugcugaacgacauccugagccggcuggacaaggucgaggccgaggugcagaucgaccggcugaucacuggccggcugcagagccugcagaccuacgugacccagcagcugauccgggccgccgagauucgggccagcgccaaccuggccgccaccaagaugagcgagugcgugcugggccagagcaagcggguggacuucugcggcaagggcuaccaccugaugagcuuuccccagagcgcaccccacggagugguguuccugcacgugaccuacgugcccgcccaggagaagaacuucaccaccgccccagccaucugccacgacggcaaggcccacuuuccccgggagggcguguucgugagcaacggcacccacugguucgugacccagcggaacuucuacgagccccagaucaucaccaccgacaacaccuucgugagcggcaacugcgacguggugaucggcaucgugaacaacaccguguacgauccccugcagcccgagcuggacagcuucaaggaggagcuggacaaguacuucaagaaucacaccagccccgacguggaccugggcgacaucagcggcaucaacgccagcguggugaacauccagaaggagaucgaucggcugaacgagguggccaagaaccugaacgagagccugaucgaccugcaggagcugggcaaguacgagcaguacaucaaguggcccugguacaucuggcugggcuucaucgccggccugaucgccaucgugauggugaccaucaugcugugcugcaugaccagcugcugcagcugccugaagggcuguugcagcugcggcagcugcugcaaguucgacgaggacgacagcgagcccgugcugaagggcgugaagcugcacuacaccugaggacuaguuauaagacugacuagcccgaugggccucccaacgggcccuccuccccuccuugcaccgagauuaauagaucuaaaaaaaaaaaaaaaaaaaaaaaaaaaaaaaaaaaaaaaaaaaaaaaaaaaaaaaaaaaaaaaaaaaaaaaaaaaaaaaaaaaaaaaaaaaaaaaaaaaa

SEQ ID NO: 25663 - RNA, 4017 nt, Artificial Sequence
  SARS-CoV-2/Wuhan/WIV05/2019__EPI_ISL_402128 spike protein mRNA gc (1-1273)
aggagaaagcuuaccauguucguguuccuggugcugcugccccuggugagcagccagugcgugaaccugaccacccggacccagcugcccccugccuacaccaacagcuucacccggggcguguacuaccccgacaagguguuccggagcagcgugcugcacagcacccaggaccuguuccugcccuucuucagcaacgugaccugguuccacgccauccacgugagcggcaccaacggcaccaagcgguucgacaacccagugcugcccuucaacgacggcguguacuucgccagcaccgagaagucaaacaucauccggggcuggaucuucggcaccacccuggacagcaagacacagagccugcugaucgugaacaacgccaccaacguggugaucaaggugugcgaguuucaguucugcaacgaccccuuccugggcguguacuaccacaagaacaacaagagcuggauggagagcgaguuccgggucuacagcagcgcuaacaauugcaccuucgaguacgugagccagcccuuccugauggaccucgagggcaagcagggcaacuucaagaaccugcgggaguucguguucaagaacaucgauggcuacuucaagaucuacagcaagcacacccccaucaaccuggugcgggaccugccccagggauucagcgcccuggagccucugguggaccugcccaucggcaucaacaucaccagguuccagacccugcuggcccugcaccggagcuaccugacccccggcgacagcagcagcggcuggaccgccggcgccgccgcauacuacgugggcuaccugcagccacggaccuuccugcugaaguacaacgagaacggcaccaucaccgacgccguggacugcgcccuggacccccugagcgagaccaagugcacccuaaagagcuucaccguggagaagggcaucuaccagaccagcaacuuccgggugcagcccacugagagcaucgugcgguuccccaacauuaccaaccugugucccuucggcgagguguucaacgccacccgguucgccagcguguacgccuggaaccggaagcggaucagcaacugcguggccgacuacagcgugcuguacaacagcgccagcuucagcaccuucaagugcuacggcgugagcccuaccaagcugaacgaccugugcuucaccaacguguacgcugacagcuucgugauccggggcgacgaggugcggcagaucgcccccggccagaccggcaagaucgccgacuacaacuacaagcugcccgacgacuucaccggcugcgugaucgccuggaacagcaacaaccuggacagcaaggugggcggcaacuacaacuaccuguaccggcuguuccguaagagcaaccugaagccauucgagcgggacaucagcaccgagaucuaccaggccggcagcacccccugcaacgguguggagggcuuuaacugcuacuucccccugcagagcuacggcuuccagcccaccaacggcgugggcuaccagcccuaccgggugguggugcugagcuucgagcugcugcacgcccccgccaccgugugcggcccuaaaaagagcaccaaccuggugaagaacaagugcgugaacuucaauuucaacggccugaccggcaccggcgugcugaccgagagcaacaagaaguuccugcccuuccagcaguucggccgggauaucgccgacaccaccgacgcagugcgggacccccagacccuggagauccuggacaucaccccaugcagcuucggcggcgugagcgucaucacccccggcacaaacaccagcaaccagguggccgugcuguaccaggacgugaacugcaccgaggugcccguggccauccacgccgaccagcugacccccaccuggcggguguacagcaccggaagcaacguguuccagacccgggccggcugccugaucggcgccgagcacgugaacaacuccuacgagugcgacauccccaucggcgcuggcaucugcgccagcuaccagacccagaccaacagcccccggcgggcccggagcguggccagccagagcaucaucgccuacaccaugagcuuaggcgccgagaacagcguggccuacagcaacaacagcaucgcgaucccuaccaacuucaccaucagcgugaccaccgagauacugcccgugagcaugaccaagaccagcguggacuguaccauguacaucugcggcgacagcaccgagugcagcaaccugcugcugcaguacggcagcuucugcacccagcugaaccgggcccugaccggcaucgccguggagcaggacaagaacacccaagagguguucgcccaggugaagcagaucuacaagacucccccaaucaaggacuucggcggcuucaacuucagccagauccugcccgaccccagcaagcccagcaagcggagcuucaucgaggaccugcuguucaacaaggugacccuggccgacgccggcuucaucaagcaguacggcgauugccugggcgacaucgccgcucgggaccugaucugcgcccagaaguucaacgggcugaccgugcugcccccucugcugaccgacgagaugaucgcccaguacaccagcgcccugcuugccggcaccaucaccagcggcuggaccuucggcgccggcgcagcccugcagauccccuucgccaugcagauggccuaccgguucaacggcaucggcgugacccagaacgugcuguacgagaaccagaagcugaucgccaaccaguucaacagcgccaucggcaagauccaggacagccugagcagcaccgccagcgcccugggcaagcugcaggacguggugaaccagaacgcucaggcccugaacacccuggugaagcagcugagcagcaacuucggcgccaucagcucagugcugaaugacauccugagcaggcuggacaagguggaggccgaggugcagaucgaccggcugaucaccggccggcugcagagccugcagaccuacgugacccagcagcugauccgggccgccgagauccgggccagcgccaaccuggcagccaccaagaugagcgagugcgugcugggccagagcaagcggguggacuuuugcggcaagggcuaccaccugaugagcuucccccagagcgccccacacggcgugguguuccuccacgucacauacgugcccgcccaggagaagaacuucaccaccgcccccgccauuugccacgacggcaaggcucacuucccccgggagggcguguucgugagcaacggaacccacugguucgugacccagcggaacuucuacgagccccagaucaucaccaccgacaacaccuucgugagcggcaacugcgacguggugaucggcaucgugaacaacaccguguacgacccccugcagccugagcuggacagcuucaaggaggagcuggacaaguacuucaagaaccacaccagccccgauguggaccugggcgacaucagcggcaucaacgccagcguggugaacauccagaaggagaucgaccggcugaacgagguggccaagaaccugaacgagagccugaucgaccugcaggagcugggcaaguacgagcaguacaucaaguggcccugguacaucuggcugggcuucaucgccggccugaucgccaucgugauggugaccaucaugcugugcugcaugaccagcugcuguagcugccugaagggcugcugcagcugcggcagcugcugcaaguucgacgaggacgacagcgagccagugcugaagggcgugaagcugcacuacaccugaggacuaguuauaagacugacuagcccgaugggccucccaacgggcccuccuccccuccuugcaccgagauuaauagaucuaaaaaaaaaaaaaaaaaaaaaaaaaaaaaaaaaaaaaaaaaaaaaaaaaaaaaaaaaaaaaaaaaaaaaaaaaaaaaaaaaaaaaaaaaaaaaaaaaaaa

SEQ ID NO: 25664 - RNA, 4017 nt, Artificial Sequence
  SARS-CoV-2/Wuhan/WIV05/2019__EPI_ISL_402128 spike protein mRNA gc (1-1273)(D614G)
aggagaaagcuuaccauguucguguuccuggugcugcugccccuggugagcagccagugcgugaaccugaccacccggacccagcugcccccugccuacaccaacagcuucacccggggcguguacuaccccgacaagguguuccggagcagcgugcugcacagcacccaggaccuguuccugcccuucuucagcaacgugaccugguuccacgccauccacgugagcggcaccaacggcaccaagcgguucgacaacccagugcugcccuucaacgacggcguguacuucgccagcaccgagaagucaaacaucauccggggcuggaucuucggcaccacccuggacagcaagacacagagccugcugaucgugaacaacgccaccaacguggugaucaaggugugcgaguuucaguucugcaacgaccccuuccugggcguguacuaccacaagaacaacaagagcuggauggagagcgaguuccgggucuacagcagcgcuaacaauugcaccuucgaguacgugagccagcccuuccugauggaccucgagggcaagcagggcaacuucaagaaccugcgggaguucguguucaagaacaucgauggcuacuucaagaucuacagcaagcacacccccaucaaccuggugcgggaccugccccagggauucagcgcccuggagccucugguggaccugcccaucggcaucaacaucaccagguuccagacccugcuggcccugcaccggagcuaccugacccccggcgacagcagcagcggcuggaccgccggcgccgccgcauacuacgugggcuaccugcagccacggaccuuccugcugaaguacaacgagaacggcaccaucaccgacgccguggacugcgcccuggacccccugagcgagaccaagugcacccuaaagagcuucaccguggagaagggcaucuaccagaccagcaacuuccgggugcagcccacugagagcaucgugcgguuccccaacauuaccaaccugugucccuucggcgagguguucaacgccacccgguucgccagcguguacgccuggaaccggaagcggaucagcaacugcguggccgacuacagcgugcuguacaacagcgccagcuucagcaccuucaagugcuacggcgugagcccuaccaagcugaacgaccugugcuucaccaacguguacgcugacagcuucgugauccggggcgacgaggugcggcagaucgcccccggccagaccggcaagaucgccgacuacaacuacaagcugcccgacgacuucaccggcugcgugaucgccuggaacagcaacaaccuggacagcaaggugggcggcaacuacaacuaccuguaccggcuguuccguaagagcaaccugaagccauucgagcgggacaucagcaccgagaucuaccaggccggcagcacccccugcaacgguguggagggcuuuaacugcuacuucccccugcagagcuacggcuuccagcccaccaacggcgugggcuaccagcccuaccgggugguggugcugagcuucgagcugcugcacgcccccgccaccgugugcggcccuaaaaagagcaccaaccuggugaagaacaagugcgugaacuucaauuucaacggccugaccggcaccggcgugcugaccgagagcaacaagaaguuccugcccuuccagcaguucggccgggauaucgccgacaccaccgacgcagugcgggacccccagacccuggagauccuggacaucaccccaugcagcuucggcggcgugagcgucaucacccccggcacaaacaccagcaaccagguggccgugcuguaccagggagugaacugcaccgaggugcccguggccauccacgccgaccagcugacccccaccuggcggguguacagcaccggcagcaacguguuccagacccgggccggcugccugaucggcgccgagcacgugaacaacuccuacgagugcgacauccccaucggcgcuggcaucugcgccagcuaccagacccagaccaacagcccccggcgggcccggagcguggccagccagagcaucaucgccuacaccaugagcuuaggcgccgagaacagcguggccuacagcaacaacagcaucgcgaucccuaccaacuucaccaucagcgugaccaccgagauacugcccgugagcaugaccaagaccagcguggacuguaccauguacaucugcggcgacagcaccgagugcagcaaccugcugcugcaguacggcagcuucugcacccagcugaaccgggcccugaccggcaucgccguggagcaggacaagaacacccaagagguguucgcccaggugaagcagaucuacaagacucccccaaucaaggacuucggcggcuucaacuucagccagauccugcccgaccccagcaagcccagcaagcggagcuucaucgaggaccugcuguucaacaaggugacccuggccgacgccggcuucaucaagcaguacggcgacugccugggggauaucgccgcucgggaccugaucugcgcccagaaguucaacggccugaccgugcugcccccucugcugaccgacgagaugaucgcccaguacaccagcgcccugcuugccggcaccaucaccagcggcuggaccuucggcgccggcgcagcccugcagauccccuucgccaugcagauggccuaccgguucaacggcaucggcgugacccagaacgugcuguacgagaaccagaagcugaucgccaaccaguucaacagcgccaucggcaagauccaggacagccugagcagcaccgccagcgcccugggcaagcugcaggacguggugaaccagaacgcucaggcccugaacacccuggugaagcagcugagcagcaacuucggcgccaucagcucagugcugaaugacauccugagcaggcuggacaagguggaggccgaggugcagaucgaccggcugaucaccggccggcugcagagccugcagaccuacgugacccagcagcugauccgggccgccgagauccgggccagcgccaaccuggcagccaccaagaugagcgagugcgugcugggccagagcaagcggguggacuuuugcggcaagggcuaccaccugaugagcuucccccagagcgccccacacggcgugguguuccuccacgucacauacgugcccgcccaggagaagaacuucaccaccgcccccgccauuugccacgacggcaaggcucacuucccccgggagggaguguucgugagcaacggcacccacugguucgugacccagcggaacuucuacgagccccagaucaucaccaccgacaacaccuucgugagcggcaacugcgacguggugaucggcaucgugaacaacaccguguacgacccccugcagccugagcuggacagcuucaaggaggagcuggacaaguacuucaagaaccacaccagccccgacguggaucugggcgacaucagcggcaucaacgccagcguggugaacauccagaaggagaucgaccggcugaacgagguggccaagaaccugaacgagagccugaucgaccugcaggagcugggcaaguacgagcaguacaucaaguggcccugguacaucuggcugggcuucaucgccggccugaucgccaucgugauggugaccaucaugcugugcugcaugaccagcugcuguagcugccugaagggcugcugcagcugcggcagcugcugcaaguucgacgaggacgacagcgagccagugcugaagggcgugaagcugcacuacaccugaggacuaguuauaagacugacuagcccgaugggccucccaacgggcccuccuccccuccuugcaccgagauuaauagaucuaaaaaaaaaaaaaaaaaaaaaaaaaaaaaaaaaaaaaaaaaaaaaaaaaaaaaaaaaaaaaaaaaaaaaaaaaaaaaaaaaaaaaaaaaaaaaaaaaaaa

SEQ ID NO: 25665 - RNA, 4017 nt, Artificial Sequence
  SARS-CoV-2/Wuhan/WIV05/2019__EPI_ISL_402128 spike protein mRNA gc (1-1273)(A222V_D614G)
aggagaaagcuuaccauguucguguuccuggugcugcugccccuggugagcagccagugcgugaaccugaccacccggacccagcugcccccugccuacaccaacagcuucacccggggcguguacuaccccgacaagguguuccggagcagcgugcugcacagcacccaggaccuguuccugcccuucuucagcaacgugaccugguuccacgccauccacgugagcggcaccaacggcaccaagcgguucgacaacccagugcugcccuucaacgacggcguguacuucgccagcaccgagaagucaaacaucauccggggcuggaucuucggcaccacccuggacagcaagacacagagccugcugaucgugaacaacgccaccaacguggugaucaaggugugcgaguuucaguucugcaacgaccccuuccugggcguguacuaccacaagaacaacaagagcuggauggagagcgaguuccgggucuacagcagcgcuaacaauugcaccuucgaguacgugagccagcccuuccugauggaccucgagggcaagcagggcaacuucaagaaccugcgggaguucguguucaagaacaucgauggcuacuucaagaucuacagcaagcacacccccaucaaccuggugcgggaccugccccagggauucagcgugcuggagccucugguggaccugcccaucggcaucaacaucaccagguuccagacccugcuggcccugcaccggagcuaccugacccccggcgacagcagcagcggcuggaccgccggcgccgccgccuacuacgugggcuaccugcagccacggaccuuccugcugaaguacaacgagaacggcaccaucaccgacgcaguggacugcgcccuggacccccugagcgagaccaagugcacccuaaagagcuucaccguggagaagggcaucuaccagaccagcaacuuccgggugcagcccacugagagcaucgugcgguuccccaacauuaccaaccugugucccuucggcgagguguucaacgccacccgguucgccagcguguacgccuggaaccggaagcggaucagcaacugcguggccgacuacagcgugcuguacaacagcgccagcuucagcaccuucaagugcuacggcgugagcccuaccaagcugaacgaccugugcuucaccaacguguacgccgacagcuucgugauccggggcgacgaggugcggcagaucgcucccggccagaccggcaagaucgccgacuacaacuacaagcugcccgacgacuucaccggcugcgugaucgccuggaacagcaacaaccuggacagcaaggugggcggcaacuacaacuaccuguaccggcuguuccguaagagcaaccugaagccauucgagcgggacaucagcaccgagaucuaccaggccggcagcacccccugcaacgguguggagggcuuuaacugcuacuucccccugcagagcuacggcuuccagcccaccaacggcgugggcuaccagcccuaccgggugguggugcugagcuucgagcugcugcacgcccccgccaccgugugcggcccuaaaaagagcaccaaccuggugaagaacaagugcgugaacuucaauuucaacggccugaccggcaccggcgugcugaccgagagcaacaagaaguuccugcccuuccagcaguucggccgggauaucgccgacaccaccgacgccgugcgggacccccagacccuggagauccuggacaucaccccaugcagcuucggcggcgucagcgugaucacccccggcacaaacaccagcaaccagguggcagugcuguaccagggagugaacugcaccgaggugcccguggccauccacgccgaccagcugacccccaccuggcggguguacagcaccggcagcaacguguuccagacccgggccggcugccugaucggcgccgagcacgugaacaacuccuacgagugcgacauccccaucggcgccggcaucugcgcuagcuaccagacccagaccaacagcccccggcgggcccggagcguggccagccagagcaucaucgccuacaccaugagcuuaggcgccgagaacagcguggccuacagcaacaacagcaucgccaucccuaccaacuucaccaucagcgugaccaccgagauacugcccgugagcaugaccaagaccagcguggacuguaccauguacaucugcggcgacagcaccgagugcagcaaccugcugcugcaguacggcagcuucugcacccagcugaaccgggcgcugaccggcaucgccguggagcaggacaagaacacccaagagguguucgcccaggugaagcagaucuacaagacucccccaaucaaggacuucggcggcuucaacuucagccagauccugcccgaccccagcaagcccagcaagcggagcuucaucgaggaccugcuguucaacaaggugacccuggccgacgccggcuucaucaagcaguacggcgacugccugggggauaucgccgcccgggaccugaucugcgcucagaaguucaacggccugaccgugcugcccccucugcugaccgacgagaugaucgcccaguacaccagcgcccugcuugccggcaccaucaccagcggcuggaccuucggcgccggcgccgcacugcagauccccuucgccaugcagauggccuaccgguucaacggcaucggcgugacccagaacgugcuguacgagaaccagaagcugaucgccaaccaguucaacagcgccaucggcaagauccaggacagccugagcagcaccgccagcgcccugggcaagcugcaggacguggugaaccagaacgcccaggcucugaacacccuggugaagcagcugagcagcaacuucggcgccaucagcucagugcugaaugacauccugagcaggcuggacaagguggaggccgaggugcagaucgaccggcugaucaccggccggcugcagagccugcagaccuacgugacccagcagcugauccgggccgccgagauccgggccagcgccaaccuggccgcaaccaagaugagcgagugcgugcugggccagagcaagcggguggacuuuugcggcaagggcuaccaccugaugagcuucccccagagcgccccacacggcguggucuuccuccacgugacauacgugcccgcccaggagaagaacuucaccaccgcccccgccauuugccacgacggcaaggcccacuucccccgggagggaguguucgugagcaacggcacccacugguucgugacccagcggaacuucuacgagccccagaucaucaccaccgacaacaccuucgugagcggcaacugcgacguggugaucggcaucgugaacaacaccguguacgacccccugcagccugagcuggacagcuucaaggaggagcuggacaaguacuucaagaaccacaccagccccgacguggaucugggcgacaucagcggcaucaacgcuagcguggugaacauccagaaggagaucgaccggcugaacgagguggccaagaaccugaacgagagccugaucgaccugcaggagcugggcaaguacgagcaguacaucaaguggcccugguacaucuggcugggcuucaucgccggccugaucgccaucgugauggugaccaucaugcugugcugcaugaccagcugcuguagcugccugaagggcugcugcagcugcggcagcugcugcaaguucgacgaggacgacagcgagccagugcugaagggcgugaagcugcacuacaccugaggacuaguuauaagacugacuagcccgaugggccucccaacgggcccuccuccccuccuugcaccgagauuaauagaucuaaaaaaaaaaaaaaaaaaaaaaaaaaaaaaaaaaaaaaaaaaaaaaaaaaaaaaaaaaaaaaaaaaaaaaaaaaaaaaaaaaaaaaaaaaaaaaaaaaaa

SEQ ID NO: 25666 - RNA, 4017 nt, Artificial Sequence
  SARS-CoV-2/Wuhan/WIV05/2019__EPI_ISL_402128 spike protein mRNA gc (1-1273)(N439K_D614G)
aggagaaagcuuaccauguucguguuccuggugcugcugccccuggugagcagccagugcgugaaccugaccacccggacccagcugcccccugccuacaccaacagcuucacccggggcguguacuaccccgacaagguguuccggagcagcgugcugcacagcacccaggaccuguuccugcccuucuucagcaacgugaccugguuccacgccauccacgugagcggcaccaacggcaccaagcgguucgacaacccagugcugcccuucaacgacggcguguacuucgccagcaccgagaagucaaacaucauccggggcuggaucuucggcaccacccuggacagcaagacacagagccugcugaucgugaacaacgccaccaacguggugaucaaggugugcgaguuucaguucugcaacgaccccuuccugggcguguacuaccacaagaacaacaagagcuggauggagagcgaguuccgggucuacagcagcgcuaacaauugcaccuucgaguacgugagccagcccuuccugauggaccucgagggcaagcagggcaacuucaagaaccugcgggaguucguguucaagaacaucgauggcuacuucaagaucuacagcaagcacacccccaucaaccuggugcgggaccugccccagggauucagcgcccuggagccucugguggaccugcccaucggcaucaacaucaccagguuccagacccugcuggcccugcaccggagcuaccugacccccggcgacagcagcagcggcuggaccgccggcgccgccgcauacuacgugggcuaccugcagccacggaccuuccugcugaaguacaacgagaacggcaccaucaccgacgccguggacugcgcccuggacccccugagcgagaccaagugcacccuaaagagcuucaccguggagaagggcaucuaccagaccagcaacuuccgggugcagcccacugagagcaucgugcgguuccccaacauuaccaaccugugucccuucggcgagguguucaacgccacccgguucgccagcguguacgccuggaaccggaagcggaucagcaacugcguggccgacuacagcgugcuguacaacagcgccagcuucagcaccuucaagugcuacggcgugagcccuaccaagcugaacgaccugugcuucaccaacguguacgcugacagcuucgugauccggggcgacgaggugcggcagaucgcccccggccagaccggcaagaucgccgacuacaacuacaagcugcccgacgacuucaccggcugcgugaucgccuggaacagcaagaaccuggacagcaaggugggcggcaacuacaacuaccuguaccggcuguuccguaagagcaaccugaagccauucgagcgggacaucagcaccgagaucuaccaggccggcagcacccccugcaacgguguggagggcuuuaacugcuacuucccccugcagagcuacggcuuccagcccaccaacggcgugggcuaccagcccuaccgggugguggugcugagcuucgagcugcugcacgcccccgccaccgugugcggcccuaaaaagagcaccaaccuggugaagaacaagugcgugaacuucaacuucaauggccugaccggcaccggcgugcugaccgagagcaacaagaaguuccugcccuuccagcaguucggccgggauaucgccgacaccaccgacgcagugcgggacccccagacccuggagauccuggacaucaccccaugcagcuucggcggcgugagcgucaucacccccggcacaaacaccagcaaccagguggccgugcuguaccagggagugaacugcaccgaggugcccguggccauccacgccgaccagcugacccccaccuggcggguguacagcaccggcagcaacguguuccagacccgggccggcugccugaucggcgccgagcacgugaacaacuccuacgagugcgacauccccaucggcgcuggcaucugcgccagcuaccagacccagaccaacagcccccggcgggcccggagcguggccagccagagcaucaucgccuacaccaugagcuuaggcgccgagaacagcguggccuacagcaacaacagcaucgcgaucccuaccaacuucaccaucagcgugaccaccgagauacugcccgugagcaugaccaagaccagcguggacuguaccauguacaucugcggcgacagcaccgagugcagcaaccugcugcugcaguacggcagcuucugcacccagcugaaccgggcccugaccggcaucgccguggagcaggacaagaacacccaagagguguucgcccaggugaagcagaucuacaagacucccccaaucaaggacuucggcggcuucaacuucagccagauccugcccgaccccagcaagcccagcaagcggagcuucaucgaggaccugcuguucaacaaggugacccuggccgacgccggcuucaucaagcaguacggcgacugccugggggauaucgccgcucgggaccugaucugcgcccagaaguucaacggccugaccgugcugcccccucugcugaccgacgagaugaucgcccaguacaccagcgcccugcuugccggcaccaucaccagcggcuggaccuucggcgccggcgcagcccugcagauccccuucgccaugcagauggccuaccgguucaacggcaucggcgugacccagaacgugcuguacgagaaccagaagcugaucgccaaccaguucaacagcgccaucggcaagauccaggacagccugagcagcaccgccagcgcccugggcaagcugcaggacguggugaaccagaacgcucaggcccugaacacccuggugaagcagcugagcagcaacuucggcgccaucagcucagugcugaacgacauccugagcaggcuggacaagguggaggccgaggugcagaucgaccggcugaucaccggccggcugcagagccugcagaccuacgugacccagcagcugauccgggccgccgagauccgggccagcgccaaucuggcagccaccaagaugagcgagugcgugcugggccagagcaagcggguggacuuuugcggcaagggcuaccaccugaugagcuucccccagagcgccccacacggcgugguguuccuccacgucacauacgugcccgcccaggagaagaacuucaccaccgcccccgccauuugccacgacggcaaggcucacuucccccgggagggaguguucgugagcaacggcacccacugguucgugacccagcggaacuucuacgagccccagaucaucaccaccgacaacaccuucgugagcggcaacugcgacguggugaucggcaucgugaacaacaccguguacgacccccugcagccugagcuggacagcuucaaggaggagcuggacaaguacuucaagaaccacaccagccccgacguggaucugggcgacaucagcggcaucaacgccagcguggugaacauccagaaggagaucgaccggcugaacgagguggccaagaaccugaacgagagccugaucgaccugcaggagcugggcaaguacgagcaguacaucaaguggcccugguacaucuggcugggcuucaucgccggccugaucgccaucgugauggugaccaucaugcugugcugcaugaccagcugcuguagcugccugaagggcugcugcagcugcggcagcugcugcaaguucgacgaggacgacagcgagccagugcugaagggcgugaagcugcacuacaccugaggacuaguuauaagacugacuagcccgaugggccucccaacgggcccuccuccccuccuugcaccgagauuaauagaucuaaaaaaaaaaaaaaaaaaaaaaaaaaaaaaaaaaaaaaaaaaaaaaaaaaaaaaaaaaaaaaaaaaaaaaaaaaaaaaaaaaaaaaaaaaaaaaaaaaaa

SEQ ID NO: 25667 - RNA, 4017 nt, Artificial Sequence
  SARS-CoV-2/Wuhan/WIV05/2019__EPI_ISL_402128 spike protein mRNA gc (1-1273)(S477N_D614G)
aggagaaagcuuaccauguucguguuccuggugcugcugccccuggugagcagccagugcgugaaccugaccacccggacccagcugcccccugccuacaccaacagcuucacccggggcguguacuaccccgacaagguguuccggagcagcgugcugcacagcacccaggaccuguuccugcccuucuucagcaacgugaccugguuccacgccauccacgugagcggcaccaacggcaccaagcgguucgacaacccagugcugcccuucaacgacggcguguacuucgccagcaccgagaagucaaacaucauccggggcuggaucuucggcaccacccuggacagcaagacacagagccugcugaucgugaacaacgccaccaacguggugaucaaggugugcgaguuucaguucugcaacgaccccuuccugggcguguacuaccacaagaacaacaagagcuggauggagagcgaguuccgggucuacagcagcgcuaacaauugcaccuucgaguacgugagccagcccuuccugauggaccucgagggcaagcagggcaacuucaagaaccugcgggaguucguguucaagaacaucgauggcuacuucaagaucuacagcaagcacacccccaucaaccuggugcgggaccugccccagggauucagcgcccuggagccucugguggaccugcccaucggcaucaacaucaccagguuccagacccugcuggcccugcaccggagcuaccugacccccggcgacagcagcagcggcuggaccgccggcgccgccgcauacuacgugggcuaccugcagccacggaccuuccugcugaaguacaacgagaacggcaccaucaccgacgccguggacugcgcccuggacccccugagcgagaccaagugcacccuaaagagcuucaccguggagaagggcaucuaccagaccagcaacuuccgggugcagcccacugagagcaucgugcgguuccccaacauuaccaaccugugucccuucggcgagguguucaacgccacccgguucgccagcguguacgccuggaaccggaagcggaucagcaacugcguggccgacuacagcgugcuguacaacagcgccagcuucagcaccuucaagugcuacggcgugagcccuaccaagcugaacgaccugugcuucaccaacguguacgcugacagcuucgugauccggggcgacgaggugcggcagaucgcccccggccagaccggcaagaucgccgacuacaacuacaagcugcccgacgacuucaccggcugcgugaucgccuggaacagcaacaaccuggacagcaaggugggcggcaacuacaacuaccuguaccggcuguuccguaagagcaaccugaagccauucgagcgggacaucagcaccgagaucuaccaggccggcaacacccccugcaacgguguggagggcuuuaacugcuacuucccccugcagagcuacggcuuccagcccaccaacggcgugggcuaccagcccuaccgggugguggugcugagcuucgagcugcugcacgcccccgccaccgugugcggcccuaaaaagagcaccaaccuggugaagaacaagugcgugaauuucaacuucaacggccugaccggcaccggcgugcugaccgagagcaacaagaaguuccugcccuuccagcaguucggccgggauaucgccgacaccaccgacgcagugcgggacccccagacccuggagauccuggacaucaccccaugcagcuucggcggcgugagcgucaucacccccggcacaaacaccagcaaccagguggccgugcuguaccagggagugaacugcaccgaggugcccguggccauccacgccgaccagcugacccccaccuggcggguguacagcaccggcagcaacguguuccagacccgggccggcugccugaucggcgccgagcacgugaacaacagcuacgagugcgacauccccaucggcgcuggcaucugcgccuccuaccagacccagaccaacagcccccggcgggcccggagcguggccagccagagcaucaucgccuacaccaugagcuuaggcgccgagaacagcguggccuacagcaacaacagcaucgcgaucccuaccaacuucaccaucagcgugaccaccgagauacugcccgugagcaugaccaagaccagcguggacuguaccauguacaucugcggcgacagcaccgagugcagcaaccugcugcugcaguacggcagcuucugcacccagcugaaccgggcccugaccggcaucgccguggagcaggacaagaacacccaagagguguucgcccaggugaagcagaucuacaagacucccccaaucaaggacuucggcggcuucaacuucagccagauccugcccgaccccagcaagcccagcaagcggagcuucaucgaggaccugcuguucaacaaggugacccuggccgacgccggcuucaucaagcaguacggcgacugccugggggauaucgccgcucgggaccugaucugcgcccagaaguucaacggccugaccgugcugcccccucugcugaccgacgagaugaucgcccaguacaccagcgcccugcuugccggcaccaucaccagcggcuggaccuucggcgccggcgcagcccugcagauccccuucgccaugcagauggccuaccgguucaacggcaucggcgugacccagaacgugcuguacgagaaccagaagcugaucgccaaccaguucaacagcgccaucggcaagauccaggacagccugagcagcaccgccagcgcccugggcaagcugcaggacguggugaaccagaacgcucaggcccugaacacccuggugaagcagcugagcagcaauuucggcgccaucagcagcgugcugaacgacauccugucaaggcuggacaagguggaggccgaggugcagaucgaccggcugaucaccggccggcugcagagccugcagaccuacgugacccagcagcugauccgggccgccgagauccgggccagcgccaaccuggcagccaccaagaugagcgagugcgugcugggccagagcaagcggguggacuuuugcggcaagggcuaccaccugaugagcuucccccagagcgccccacacggcgugguguuccuccacgucacauacgugcccgcccaggagaagaacuucaccaccgcccccgccauuugccacgacggcaaggcucacuucccccgggagggaguguucgugagcaacggcacccacugguucgugacccagcggaacuucuacgagccccagaucaucaccaccgacaacaccuucgugagcggcaacugcgacguggugaucggcaucgugaacaacaccguguacgacccccugcagccugagcuggacagcuucaaggaggagcuggacaaguacuucaagaaccacaccagccccgacguggaucugggcgacaucagcggcaucaacgccagcguggugaacauccagaaggagaucgaccggcugaacgagguggccaagaaccugaacgagagccugaucgaccugcaggagcugggcaaguacgagcaguacaucaaguggcccugguacaucuggcugggcuucaucgccggccugaucgccaucgugauggugaccaucaugcugugcugcaugaccagcugcuguagcugccugaagggcugcugcagcugcggcagcugcugcaaguucgacgaggacgacagcgagccagugcugaagggcgugaagcugcacuacaccugaggacuaguuauaagacugacuagcccgaugggccucccaacgggcccuccuccccuccuugcaccgagauuaauagaucuaaaaaaaaaaaaaaaaaaaaaaaaaaaaaaaaaaaaaaaaaaaaaaaaaaaaaaaaaaaaaaaaaaaaaaaaaaaaaaaaaaaaaaaaaaaaaaaaaaaa

SEQ ID NO: 25668 - RNA, 4017 nt, Artificial Sequence
  SARS-CoV-2/Wuhan/WIV05/2019__EPI_ISL_402128 spike protein mRNA gc (1-1273)(N501Y_D614G)
aggagaaagcuuaccauguucguguuccuggugcugcugccccuggugagcagccagugcgugaaccugaccacccggacccagcugcccccugccuacaccaacagcuucacccggggcguguacuaccccgacaagguguuccggagcagcgugcugcacagcacccaggaccuguuccugcccuucuucagcaacgugaccugguuccacgccauccacgugagcggcaccaacggcaccaagcgguucgacaacccagugcugcccuucaacgacggcguguacuucgccagcaccgagaagucaaacaucauccggggcuggaucuucggcaccacccuggacagcaagacacagagccugcugaucgugaacaacgccaccaacguggugaucaaggugugcgaguuucaguucugcaacgaccccuuccugggcguguacuaccacaagaacaacaagagcuggauggagagcgaguuccgggucuacagcagcgcuaacaauugcaccuucgaguacgugagccagcccuuccugauggaccucgagggcaagcagggcaacuucaagaaccugcgggaguucguguucaagaacaucgauggcuacuucaagaucuacagcaagcacacccccaucaaccuggugcgggaccugccccagggauucagcgcccuggagccucugguggaccugcccaucggcaucaacaucaccagguuccagacccugcuggcccugcaccggagcuaccugacccccggcgacagcagcagcggcuggaccgccggcgccgccgcauacuacgugggcuaccugcagccacggaccuuccugcugaaguacaacgagaacggcaccaucaccgacgccguggacugcgcccuggacccccugagcgagaccaagugcacccuaaagagcuucaccguggagaagggcaucuaccagaccagcaacuuccgggugcagcccacugagagcaucgugcgguuccccaacauuaccaaccugugucccuucggcgagguguucaacgccacccgguucgccagcguguacgccuggaaccggaagcggaucagcaacugcguggccgacuacagcgugcuguacaacagcgccagcuucagcaccuucaagugcuacggcgugagcccuaccaagcugaacgaccugugcuucaccaacguguacgcugacagcuucgugauccggggcgacgaggugcggcagaucgcccccggccagaccggcaagaucgccgacuacaacuacaagcugcccgacgacuucaccggcugcgugaucgccuggaacagcaacaaccuggacagcaaggugggcggcaacuacaacuaccuguaccggcuguuccguaagagcaaccugaagccauucgagcgggacaucagcaccgagaucuaccaggccggcagcacccccugcaacgguguggagggcuuuaacugcuacuucccccugcagagcuacggcuuccagcccaccuacggcgugggcuaccagcccuaccgggugguggugcugagcuucgagcugcugcacgcccccgccaccgugugcggcccuaaaaagagcaccaaccuggugaagaacaagugcgugaacuucaacuucaauggccugaccggcaccggcgugcugaccgagagcaacaagaaguuccugcccuuccagcaguucggccgggauaucgccgacaccaccgacgcagugcgggacccccagacccuggagauccuggacaucaccccaugcagcuucggcggcgugagcgucaucacccccggcacaaacaccagcaaccagguggccgugcuguaccagggagugaacugcaccgaggugcccguggccauccacgccgaccagcugacccccaccuggcggguguacagcaccggcagcaacguguuccagacccgggccggcugccugaucggcgccgagcacgugaacaacuccuacgagugcgacauccccaucggcgcuggcaucugcgccagcuaccagacccagaccaacagcccccggcgggcccggagcguggccagccagagcaucaucgccuacaccaugagcuuaggcgccgagaacagcguggccuacagcaacaacagcaucgcgaucccuaccaacuucaccaucagcgugaccaccgagauacugcccgugagcaugaccaagaccagcguggacuguaccauguacaucugcggcgacagcaccgagugcagcaaccugcugcugcaguacggcagcuucugcacccagcugaaccgggcccugaccggcaucgccguggagcaggacaagaacacccaagagguguucgcccaggugaagcagaucuacaagacucccccaaucaaggacuucggcggcuucaacuucagccagauccugcccgaccccagcaagcccagcaagcggagcuucaucgaggaccugcuguucaacaaggugacccuggccgacgccggcuucaucaagcaguacggcgacugccugggggauaucgccgcucgggaccugaucugcgcccagaaguucaacggccugaccgugcugcccccucugcugaccgacgagaugaucgcccaguacaccagcgcccugcuugccggcaccaucaccagcggcuggaccuucggcgccggcgcagcccugcagauccccuucgccaugcagauggccuaccgguucaacggcaucggcgugacccagaacgugcuguacgagaaccagaagcugaucgccaaccaguucaacagcgccaucggcaagauccaggacagccugagcagcaccgccagcgcccugggcaagcugcaggacguggugaaccagaacgcucaggcccugaacacccuggugaagcagcugagcagcaacuucggcgccaucagcucagugcugaacgacauccugagcaggcuggacaagguggaggccgaggugcagaucgaccggcugaucaccggccggcugcagagccugcagaccuacgugacccagcagcugauccgggccgccgagauccgggccagcgccaaucuggcagccaccaagaugagcgagugcgugcugggccagagcaagcggguggacuuuugcggcaagggcuaccaccugaugagcuucccccagagcgccccacacggcgugguguuccuccacgucacauacgugcccgcccaggagaagaacuucaccaccgcccccgccauuugccacgacggcaaggcucacuucccccgggagggaguguucgugagcaacggcacccacugguucgugacccagcggaacuucuacgagccccagaucaucaccaccgacaacaccuucgugagcggcaacugcgacguggugaucggcaucgugaacaacaccguguacgacccccugcagccugagcuggacagcuucaaggaggagcuggacaaguacuucaagaaccacaccagccccgacguggaucugggcgacaucagcggcaucaacgccagcguggugaacauccagaaggagaucgaccggcugaacgagguggccaagaaccugaacgagagccugaucgaccugcaggagcugggcaaguacgagcaguacaucaaguggcccugguacaucuggcugggcuucaucgccggccugaucgccaucgugauggugaccaucaugcugugcugcaugaccagcugcuguagcugccugaagggcugcugcagcugcggcagcugcugcaaguucgacgaggacgacagcgagccagugcugaagggcgugaagcugcacuacaccugaggacuaguuauaagacugacuagcccgaugggccucccaacgggcccuccuccccuccuugcaccgagauuaauagaucuaaaaaaaaaaaaaaaaaaaaaaaaaaaaaaaaaaaaaaaaaaaaaaaaaaaaaaaaaaaaaaaaaaaaaaaaaaaaaaaaaaaaaaaaaaaaaaaaaaaa

SEQ ID NO: 25669 - RNA, 4011 nt, Artificial Sequence
  SARS-CoV-2/Wuhan/WIV05/2019__EPI_ISL_402128 spike protein mRNA gc (1-1273)(H69del_V70del_D614G)
aggagaaagcuuaccauguucguguuccuggugcugcugccccuggugagcagccagugcgugaaccugaccacccggacccagcugcccccugccuacaccaacagcuucacccggggcguguacuaccccgacaagguguuccggagcagcgugcugcacagcacccaggaccuguuccugcccuucuucagcaacgugaccugguuccacgccaucagcggcaccaacggcaccaagcgguucgacaacccagugcugcccuucaacgacggcguguacuucgccagcaccgagaagucaaacaucauccggggcuggaucuucggcaccacccuggacagcaagacacagagccugcugaucgugaacaacgccaccaacguggugaucaaggugugcgaguuucaguucugcaacgaccccuuccugggcguguacuaccacaagaacaacaagagcuggauggagagcgaguuccggguguacagcagcgcuaacaauugcaccuucgaguacgucagccagcccuuccugauggaccucgagggcaagcagggcaacuucaagaaccugcgggaguucguguucaagaacaucgauggcuacuucaagaucuacagcaagcacacccccaucaaccuggugcgggaccugccccagggauucagcgcccuggagccucugguggaccugcccaucggcaucaacaucaccagguuccagacccugcuggcccugcaccggagcuaccugacccccggcgacagcagcagcggcuggaccgccggcgccgccgcauacuacgugggcuaccugcagccacggaccuuccugcugaaguacaacgagaacggcaccaucaccgacgccguggacugcgcccuggacccccugagcgagaccaagugcacccuaaagagcuucaccguggagaagggcaucuaccagaccagcaacuuccgggugcagcccacugagagcaucgugcgguuccccaacauuaccaaccugugucccuucggcgagguguucaacgccacccgguucgccagcguguacgccuggaaccggaagcggaucagcaacugcguggccgacuacagcgugcuguacaacagcgccagcuucagcaccuucaagugcuacggcgugagcccuaccaagcugaacgaccugugcuucaccaacguguacgcugacagcuucgugauccggggcgacgaggugcggcagaucgcccccggccagaccggcaagaucgccgacuacaacuacaagcugcccgacgacuucaccggcugcgugaucgccuggaacagcaacaaccuggacagcaaggugggcggcaacuacaacuaccuguaccggcuguuccguaagagcaaccugaagccauucgagcgggacaucagcaccgagaucuaccaggccggcagcacccccugcaacgguguggagggcuuuaacugcuacuucccccugcagagcuacggcuuccagcccaccaacggcgugggcuaccagcccuaccgggugguggugcugagcuucgagcugcugcacgcccccgccaccgugugcggcccuaaaaagagcaccaaccuggugaagaacaagugcgugaacuucaauuucaacggccugaccggcaccggcgugcugaccgagagcaacaagaaguuccugcccuuccagcaguucggccgggauaucgccgacaccaccgacgcagugcgggacccccagacccuggagauccuggacaucaccccaugcagcuucggcggcgugagcgugaucacccccggcacaaacaccagcaaccaggucgccgugcuguaccagggagugaacugcaccgaggugcccguggccauccacgccgaccagcugacccccaccuggcggguguacagcaccggcagcaacguguuccagacccgggccggcugccugaucggcgccgagcacgugaacaacuccuacgagugcgacauccccaucggcgcuggcaucugcgccagcuaccagacccagaccaacagcccccggcgggcccggagcguggccagccagagcaucaucgccuacaccaugagcuuaggcgccgagaacagcguggccuacagcaacaacagcaucgcgaucccuaccaacuucaccaucagcgugaccaccgagauacugcccgugagcaugaccaagaccagcguggacuguaccauguacaucugcggcgacagcaccgagugcagcaaccugcugcugcaguacggcagcuucugcacccagcugaaccgggcccugaccggcaucgccguggagcaggacaagaacacccaagagguguucgcccaggugaagcagaucuacaagacucccccaaucaaggacuucggcggcuucaacuucagccagauccugcccgaccccagcaagcccagcaagcggagcuucaucgaggaccugcuguucaacaaggugacccuggccgacgccggcuucaucaagcaguacggcgacugccugggggauaucgccgcucgggaccugaucugcgcccagaaguucaacggccugaccgugcugcccccucugcugaccgacgagaugaucgcccaguacaccagcgcccugcuugccggcaccaucaccagcggcuggaccuucggcgccggcgcagcccugcagauccccuucgccaugcagauggccuaccgguucaacggcaucggcgugacccagaacgugcuguacgagaaccagaagcugaucgccaaccaguucaacagcgccaucggcaagauccaggacagccugagcagcaccgccagcgcccugggcaagcugcaggacguggugaaccagaacgcucaggcccugaacacccuggugaagcagcugagcagcaacuucggcgccaucagcucagugcugaaugacauccugagcaggcuggacaagguggaggccgaggugcagaucgaccggcugaucaccggccggcugcagagccugcagaccuacgugacccagcagcugauccgggccgccgagauccgggccagcgccaaccuggcagccaccaagaugagcgagugcgugcugggccagagcaagcggguggacuuuugcggcaagggcuaccaccugaugagcuucccccagagcgccccacacggcgugguguuccuccacgugacauacguccccgcccaggagaagaacuucaccaccgcccccgccauuugccacgacggcaaggcucacuucccccgggagggaguguucgugagcaacggcacccacugguucgugacccagcggaacuucuacgagccccagaucaucaccaccgacaacaccuucgugagcggcaacugcgacguggugaucggcaucgugaacaacaccguguacgacccccugcagccugagcuggacagcuucaaggaggagcuggacaaguacuucaagaaccacaccagccccgacguggaucugggcgacaucagcggcaucaacgccagcguggugaacauccagaaggagaucgaccggcugaacgagguggccaagaaccugaacgagagccugaucgaccugcaggagcugggcaaguacgagcaguacaucaaguggcccugguacaucuggcugggcuucaucgccggccugaucgccaucgugauggugaccaucaugcugugcugcaugaccagcugcuguagcugccugaagggcugcugcagcugcggcagcugcugcaaguucgacgaggacgacagcgagccagugcugaagggcgugaagcugcacuacaccugaggacuaguuauaagacugacuagcccgaugggccucccaacgggcccuccuccccuccuugcaccgagauuaauagaucuaaaaaaaaaaaaaaaaaaaaaaaaaaaaaaaaaaaaaaaaaaaaaaaaaaaaaaaaaaaaaaaaaaaaaaaaaaaaaaaaaaaaaaaaaaaaaaaaaaaa

SEQ ID NO: 25670 - RNA, 4017 nt, Artificial Sequence
  SARS-CoV-2/Wuhan/WIV05/2019__EPI_ISL_402128 spike protein mRNA gc (1-1273)(Y453F_D614G)
aggagaaagcuuaccauguucguguuccuggugcugcugccccuggugagcagccagugcgugaaccugaccacccggacccagcugcccccugccuacaccaacagcuucacccggggcguguacuaccccgacaagguguuccggagcagcgugcugcacagcacccaggaccuguuccugcccuucuucagcaacgugaccugguuccacgccauccacgugagcggcaccaacggcaccaagcgguucgacaacccagugcugcccuucaacgacggcguguacuucgccagcaccgagaagucaaacaucauccggggcuggaucuucggcaccacccuggacagcaagacacagagccugcugaucgugaacaacgccaccaacguggugaucaaggugugcgaguuucaguucugcaacgaccccuuccugggcguguacuaccacaagaacaacaagagcuggauggagagcgaguuccgggucuacagcagcgcuaacaauugcaccuucgaguacgugagccagcccuuccugauggaccucgagggcaagcagggcaacuucaagaaccugcgggaguucguguucaagaacaucgauggcuacuucaagaucuacagcaagcacacccccaucaaccuggugcgggaccugccccagggauucagcgcccuggagccucugguggaccugcccaucggcaucaacaucaccagguuccagacccugcuggcccugcaccggagcuaccugacccccggcgacagcagcagcggcuggaccgccggcgccgccgcauacuacgugggcuaccugcagccacggaccuuccugcugaaguacaacgagaacggcaccaucaccgacgccguggacugcgcccuggacccccugagcgagaccaagugcacccuaaagagcuucaccguggagaagggcaucuaccagaccagcaacuuccgggugcagcccacugagagcaucgugcgguuccccaacauuaccaaccugugucccuucggcgagguguucaacgccacccgguucgccagcguguacgccuggaaccggaagcggaucagcaacugcguggccgacuacagcgugcuguacaacagcgccagcuucagcaccuucaagugcuacggcgugagcccuaccaagcugaacgaccugugcuucaccaacguguacgcugacagcuucgugauccggggcgacgaggugcggcagaucgcccccggccagaccggcaagaucgccgacuacaacuacaagcugcccgacgacuucaccggcugcgugaucgccuggaacagcaacaaccuggacagcaaggugggcggcaacuacaacuaccuguuccggcuguuccguaagagcaaccugaagccauuugagcgggacaucagcaccgagaucuaccaggccggcagcacccccugcaacgguguggagggcuucaacugcuacuucccccugcagagcuacggcuuccagcccaccaacggcgugggcuaccagcccuaccgggugguggugcugagcuucgagcugcugcacgcccccgccaccgugugcggcccuaaaaagagcaccaaccuggugaagaacaagugcgugaacuucaauuucaacggccugaccggcaccggcgugcugaccgagagcaacaagaaguuccugcccuuccagcaguucggccgggauaucgccgacaccaccgacgcagugcgggacccccagacccuggagauccuggacaucaccccaugcagcuucggcggcgugagcgucaucacccccggcacaaacaccagcaaccagguggccgugcuguaccagggagugaacugcaccgaggugcccguggccauccacgccgaccagcugacccccaccuggcggguguacagcaccggcagcaacguguuccagacccgggccggcugccugaucggcgccgagcacgugaacaacuccuacgagugcgacauccccaucggcgcuggcaucugcgccagcuaccagacccagaccaacagcccccggcgggcccggagcguggccagccagagcaucaucgccuacaccaugagcuuaggcgccgagaacagcguggccuacagcaacaacagcaucgcgaucccuaccaacuucaccaucagcgugaccaccgagauacugcccgugagcaugaccaagaccagcguggacuguaccauguacaucugcggcgacagcaccgagugcagcaaccugcugcugcaguacggcagcuucugcacccagcugaaccgggcccugaccggcaucgccguggagcaggacaagaacacccaagagguguucgcccaggugaagcagaucuacaagacucccccaaucaaggacuucggcggcuucaacuucagccagauccugcccgaccccagcaagcccagcaagcggagcuucaucgaggaccugcuguucaacaaggugacccuggccgacgccggcuucaucaagcaguacggcgacugccugggggauaucgccgcucgggaccugaucugcgcccagaaguucaacggccugaccgugcugcccccucugcugaccgacgagaugaucgcccaguacaccagcgcccugcuugccggcaccaucaccagcggcuggaccuucggcgccggcgcagcccugcagauccccuucgccaugcagauggccuaccgguucaacggcaucggcgugacccagaacgugcuguacgagaaccagaagcugaucgccaaccaguucaacagcgccaucggcaagauccaggacagccugagcagcaccgccagcgcccugggcaagcugcaggacguggugaaccagaacgcucaggcccugaacacccuggugaagcagcugagcagcaacuuuggcgccaucagcucagugcugaaugacauccugagcaggcuggacaagguggaggccgaggugcagaucgaccggcugaucaccggccggcugcagagccugcagaccuacgugacccagcagcugauccgggccgccgagauccgggccagcgccaaccuggcagccaccaagaugagcgagugcgugcugggccagagcaagcggguggacuucugcggcaagggcuaccaccugaugagcuucccccagagcgccccacacggcgugguguuccuccacgucacauacgugcccgcccaggagaagaacuucaccaccgcccccgccauuugccacgacggcaaggcucacuucccccgggagggaguguucgugagcaacggcacccacugguucgugacccagcggaacuucuacgagccccagaucaucaccaccgacaacaccuucgugagcggcaacugcgacguggugaucggcaucgugaacaacaccguguacgacccccugcagccugagcuggacagcuucaaggaggagcuggacaaguacuucaagaaccacaccagccccgacguggaucugggcgacaucagcggcaucaacgccagcguggugaacauccagaaggagaucgaccggcugaacgagguggccaagaaccugaacgagagccugaucgaccugcaggagcugggcaaguacgagcaguacaucaaguggcccugguacaucuggcugggcuucaucgccggccugaucgccaucgugauggugaccaucaugcugugcugcaugaccagcugcuguagcugccugaagggcugcugcagcugcggcagcugcugcaaguucgacgaggacgacagcgagccagugcugaagggcgugaagcugcacuacaccugaggacuaguuauaagacugacuagcccgaugggccucccaacgggcccuccuccccuccuugcaccgagauuaauagaucuaaaaaaaaaaaaaaaaaaaaaaaaaaaaaaaaaaaaaaaaaaaaaaaaaaaaaaaaaaaaaaaaaaaaaaaaaaaaaaaaaaaaaaaaaaaaaaaaaaaa

SEQ ID NO: 25671 - RNA, 4017 nt, Artificial Sequence
  SARS-CoV-2/Wuhan/WIV05/2019__EPI_ISL_402128 spike protein mRNA gc (1-1273)(D614G_I692V)
aggagaaagcuuaccauguucguguuccuggugcugcugccccuggugagcagccagugcgugaaccugaccacccggacccagcugcccccugccuacaccaacagcuucacccggggcguguacuaccccgacaagguguuccggagcagcgugcugcacagcacccaggaccuguuccugcccuucuucagcaacgugaccugguuccacgccauccacgugagcggcaccaacggcaccaagcgguucgacaacccagugcugcccuucaacgacggcguguacuucgccagcaccgagaagucaaacaucauccggggcuggaucuucggcaccacccuggacagcaagacacagagccugcugaucgugaacaacgccaccaacguggugaucaaggugugcgaguuucaguucugcaacgaccccuuccugggcguguacuaccacaagaacaacaagagcuggauggagagcgaguuccgggucuacagcagcgcuaacaauugcaccuucgaguacgugagccagcccuuccugauggaccucgagggcaagcagggcaacuucaagaaccugcgggaguucguguucaagaacaucgauggcuacuucaagaucuacagcaagcacacccccaucaaccuggugcgggaccugccccagggauucagcgcccuggagccucugguggaccugcccaucggcaucaacaucaccagguuccagacccugcuggcccugcaccggagcuaccugacccccggcgacagcagcagcggcuggaccgccggcgccgccgcauacuacgugggcuaccugcagccacggaccuuccugcugaaguacaacgagaacggcaccaucaccgacgccguggacugcgcccuggacccccugagcgagaccaagugcacccuaaagagcuucaccguggagaagggcaucuaccagaccagcaacuuccgggugcagcccacugagagcaucgugcgguuccccaacauuaccaaccugugucccuucggcgagguguucaacgccacccgguucgccagcguguacgccuggaaccggaagcggaucagcaacugcguggccgacuacagcgugcuguacaacagcgccagcuucagcaccuucaagugcuacggcgugagcccuaccaagcugaacgaccugugcuucaccaacguguacgcugacagcuucgugauccggggcgacgaggugcggcagaucgcccccggccagaccggcaagaucgccgacuacaacuacaagcugcccgacgacuucaccggcugcgugaucgccuggaacagcaacaaccuggacagcaaggugggcggcaacuacaacuaccuguaccggcuguuccguaagagcaaccugaagccauucgagcgggacaucagcaccgagaucuaccaggccggcagcacccccugcaacgguguggagggcuuuaacugcuacuucccccugcagagcuacggcuuccagcccaccaacggcgugggcuaccagcccuaccgggugguggugcugagcuucgagcugcugcacgcccccgccaccgugugcggcccuaaaaagagcaccaaccuggugaagaacaagugcgugaacuucaauuucaacggccugaccggcaccggcgugcugaccgagagcaacaagaaguuccugcccuuccagcaguucggccgggauaucgccgacaccaccgacgcagugcgggacccccagacccuggagauccuggacaucaccccaugcagcuucggcggcgugagcgucaucacccccggcacaaacaccagcaaccagguggccgugcuguaccagggagugaacugcaccgaggugcccguggccauccacgccgaccagcugacccccaccuggcggguguacagcaccggcagcaacguguuccagacccgggccggcugccugaucggcgccgagcacgugaacaacuccuacgagugcgacauccccaucggcgcuggcaucugcgccagcuaccagacccagaccaacagcccccggcgggcccggagcguggccagccagagcgugaucgccuacaccaugagcuuaggcgccgagaacagcguggccuacagcaacaacagcaucgcgaucccuaccaacuucaccaucagcgugaccaccgagauccugcccgugagcaugaccaagaccagcguggacuguaccauguacauaugcggcgacagcaccgagugcagcaaccugcugcugcaguacggcagcuucugcacccagcugaaccgggcccugaccggcaucgccguggagcaggacaagaacacccaagagguguucgcccaggugaagcagaucuacaagacucccccaaucaaggacuucggcggcuucaacuucagccagauccugcccgaccccagcaagcccagcaagcggagcuucaucgaggaccugcuguucaacaaggugacccuggccgacgccggcuucaucaagcaguacggcgacugccugggggauaucgccgcucgggaccugaucugcgcccagaaguucaacggccugaccgugcugcccccucugcugaccgacgagaugaucgcccaguacaccagcgcccugcuugccggcaccaucaccagcggcuggaccuucggcgccggcgcagcccugcagauccccuucgccaugcagauggccuaccgguucaacggcaucggcgugacccagaacgugcuguacgagaaccagaagcugaucgccaaccaguucaacagcgccaucggcaagauccaggacagccugagcagcaccgccagcgcccugggcaagcugcaggacguggugaaccagaacgcucaggcccugaacacccuggugaagcagcugagcagcaacuucggcgccaucagcucagugcugaaugacauccugagcaggcuggacaagguggaggccgaggugcagaucgaccggcugaucaccggccggcugcagagccugcagaccuacgugacccagcagcugauccgggccgccgagauccgggccagcgccaaccuggcagccaccaagaugagcgagugcgugcugggccagagcaagcggguggacuuuugcggcaagggcuaccaccugaugagcuucccccagagcgccccacacggcguggucuuccuccacgugacauacgugcccgcccaggagaagaacuucaccaccgcccccgccaucugccacgacggcaaggcucacuucccccgggagggaguguucgugagcaacggcacccacugguucgugacccagcggaacuucuacgagccccagauuaucaccaccgacaacaccuucgugagcggcaacugcgacguggugaucggcaucgugaacaacaccguguacgacccccugcagccugagcuggacagcuucaaggaggagcuggacaaguacuucaagaaccacaccagccccgacguggaucugggcgacaucagcggcaucaacgccagcguggugaacauccagaaggagaucgaccggcugaacgagguggccaagaaccugaacgagagccugaucgaccugcaggagcugggcaaguacgagcaguacaucaaguggcccugguacaucuggcugggcuucaucgccggccugaucgccaucgugauggugaccaucaugcugugcugcaugaccagcugcuguagcugccugaagggcugcugcagcugcggcagcugcugcaaguucgacgaggacgacagcgagccagugcugaagggcgugaagcugcacuacaccugaggacuaguuauaagacugacuagcccgaugggccucccaacgggcccuccuccccuccuugcaccgagauuaauagaucuaaaaaaaaaaaaaaaaaaaaaaaaaaaaaaaaaaaaaaaaaaaaaaaaaaaaaaaaaaaaaaaaaaaaaaaaaaaaaaaaaaaaaaaaaaaaaaaaaaaa

SEQ ID NO: 25672 - RNA, 4017 nt, Artificial Sequence
  SARS-CoV-2/Wuhan/WIV05/2019__EPI_ISL_402128 spike protein mRNA gc (1-1273)(D614G_M1229I)
aggagaaagcuuaccauguucguguuccuggugcugcugccccuggugagcagccagugcgugaaccugaccacccggacccagcugcccccugccuacaccaacagcuucacccggggcguguacuaccccgacaagguguuccggagcagcgugcugcacagcacccaggaccuguuccugcccuucuucagcaacgugaccugguuccacgccauccacgugagcggcaccaacggcaccaagcgguucgacaacccagugcugcccuucaacgacggcguguacuucgccagcaccgagaagucaaacaucauccggggcuggaucuucggcaccacccuggacagcaagacacagagccugcugaucgugaacaacgccaccaacguggugaucaaggugugcgaguuucaguucugcaacgaccccuuccugggcguguacuaccacaagaacaacaagagcuggauggagagcgaguuccgggucuacagcagcgcuaacaauugcaccuucgaguacgugagccagcccuuccugauggaccucgagggcaagcagggcaacuucaagaaccugcgggaguucguguucaagaacaucgauggcuacuucaagaucuacagcaagcacacccccaucaaccuggugcgggaccugccccagggauucagcgcccuggagccucugguggaccugcccaucggcaucaacaucaccagguuccagacccugcuggcccugcaccggagcuaccugacccccggcgacagcagcagcggcuggaccgccggcgccgccgcauacuacgugggcuaccugcagccacggaccuuccugcugaaguacaacgagaacggcaccaucaccgacgccguggacugcgcccuggacccccugagcgagaccaagugcacccuaaagagcuucaccguggagaagggcaucuaccagaccagcaacuuccgggugcagcccacugagagcaucgugcgguuccccaacauuaccaaccugugucccuucggcgagguguucaacgccacccgguucgccagcguguacgccuggaaccggaagcggaucagcaacugcguggccgacuacagcgugcuguacaacagcgccagcuucagcaccuucaagugcuacggcgugagcccuaccaagcugaacgaccugugcuucaccaacguguacgcugacagcuucgugauccggggcgacgaggugcggcagaucgcccccggccagaccggcaagaucgccgacuacaacuacaagcugcccgacgacuucaccggcugcgugaucgccuggaacagcaacaaccuggacagcaaggugggcggcaacuacaacuaccuguaccggcuguuccguaagagcaaccugaagccauucgagcgggacaucagcaccgagaucuaccaggccggcagcacccccugcaacgguguggagggcuuuaacugcuacuucccccugcagagcuacggcuuccagcccaccaacggcgugggcuaccagcccuaccgggugguggugcugagcuucgagcugcugcacgcccccgccaccgugugcggcccuaaaaagagcaccaaccuggugaagaacaagugcgugaacuucaauuucaacggccugaccggcaccggcgugcugaccgagagcaacaagaaguuccugcccuuccagcaguucggccgggauaucgccgacaccaccgacgcagugcgggacccccagacccuggagauccuggacaucaccccaugcagcuucggcggcgugagcgucaucacccccggcacaaacaccagcaaccagguggccgugcuguaccagggagugaacugcaccgaggugcccguggccauccacgccgaccagcugacccccaccuggcggguguacagcaccggcagcaacguguuccagacccgggccggcugccugaucggcgccgagcacgugaacaacuccuacgagugcgacauccccaucggcgcuggcaucugcgccagcuaccagacccagaccaacagcccccggcgggcccggagcguggccagccagagcaucaucgccuacaccaugagcuuaggcgccgagaacagcguggccuacagcaacaacagcaucgcgaucccuaccaacuucaccaucagcgugaccaccgagauacugcccgugagcaugaccaagaccagcguggacuguaccauguacaucugcggcgacagcaccgagugcagcaaccugcugcugcaguacggcagcuucugcacccagcugaaccgggcccugaccggcaucgccguggagcaggacaagaacacccaagagguguucgcccaggugaagcagaucuacaagacucccccaaucaaggacuucggcggcuucaacuucagccagauccugcccgaccccagcaagcccagcaagcggagcuucaucgaggaccugcuguucaacaaggugacccuggccgacgccggcuucaucaagcaguacggcgacugccugggggauaucgccgcucgggaccugaucugcgcccagaaguucaacggccugaccgugcugcccccucugcugaccgacgagaugaucgcccaguacaccagcgcccugcuugccggcaccaucaccagcggcuggaccuucggcgccggcgcagcccugcagauccccuucgccaugcagauggccuaccgguucaacggcaucggcgugacccagaacgugcuguacgagaaccagaagcugaucgccaaccaguucaacagcgccaucggcaagauccaggacagccugagcagcaccgccagcgcccugggcaagcugcaggacguggugaaccagaacgcucaggcccugaacacccuggugaagcagcugagcagcaacuucggcgccaucagcucagugcugaaugacauccugagcaggcuggacaagguggaggccgaggugcagaucgaccggcugaucaccggccggcugcagagccugcagaccuacgugacccagcagcugauccgggccgccgagauccgggccagcgccaaccuggcagccaccaagaugagcgagugcgugcugggccagagcaagcggguggacuuuugcggcaagggcuaccaccugaugagcuucccccagagcgccccacacggcgugguguuccuccacgucacauacgugcccgcccaggagaagaacuucaccaccgcccccgccauuugccacgacggcaaggcucacuucccccgggagggaguguucgugagcaacggcacccacugguucgugacccagcggaacuucuacgagccccagaucaucaccaccgacaacaccuucgugagcggcaacugcgacguggugaucggcaucgugaacaacaccguguacgacccccugcagccugagcuggacagcuucaaggaggagcuggacaaguacuucaagaaccacaccagccccgacguggaucugggcgacaucagcggcaucaacgccagcguggugaacauccagaaggagaucgaccggcugaacgagguggccaagaaccugaacgagagccugaucgaccugcaggagcugggcaaguacgagcaguacaucaaguggcccugguacaucuggcugggcuucaucgccggccugaucgccaucgugaucgugaccaucaugcugugcugcaugaccagcugcuguagcugccugaagggcugcugcagcugcggcagcugcugcaaguucgacgaggacgacagcgagccagugcugaagggcgugaagcugcacuacaccugaggacuaguuauaagacugacuagcccgaugggccucccaacgggcccuccuccccuccuugcaccgagauuaauagaucuaaaaaaaaaaaaaaaaaaaaaaaaaaaaaaaaaaaaaaaaaaaaaaaaaaaaaaaaaaaaaaaaaaaaaaaaaaaaaaaaaaaaaaaaaaaaaaaaaaaa

SEQ ID NO: 25673 - RNA, 4011 nt, Artificial Sequence
  SARS-CoV-2/Wuhan/WIV05/2019__EPI_ISL_402128 spike protein mRNA gc (1-1273)(H69del_V70del_A222V_Y453F_S477N_D614G_I692V)
aggagaaagcuuaccauguucguguuccuggugcugcugccccuggugagcagccagugcgugaaccugaccacccggacccagcugcccccugccuacaccaacagcuucacccggggcguguacuaccccgacaagguguuccggagcagcgugcugcacagcacccaggaccuguuccugcccuucuucagcaacgugaccugguuccacgccaucagcggcaccaacggcaccaagcgguucgacaacccagugcugcccuucaacgacggcguguacuucgccagcaccgagaagucaaacaucauccggggcuggaucuucggcaccacccuggacagcaagacacagagccugcugaucgugaacaacgccaccaacguggugaucaaggugugcgaguuucaguucugcaacgaccccuuccugggcguguacuaccacaagaacaacaagagcuggauggagagcgaguuccggguguacagcagcgcuaacaauugcaccuucgaguacgucagccagcccuuccugauggaccucgagggcaagcagggcaacuucaagaaccugcgggaguucguguucaagaacaucgauggcuacuucaagaucuacagcaagcacacccccaucaaccuggugcgggaccugccccagggauucagcgugcuggagccucugguggaccugcccaucggcaucaacaucaccagguuccagacccugcuggcccugcaccggagcuaccugacccccggcgacagcagcagcggcuggaccgccggcgccgccgccuacuacgugggcuaccugcagccacggaccuuccugcugaaguacaacgagaacggcaccaucaccgacgcaguggacugcgcccuggacccccugagcgagaccaagugcacccuaaagagcuucaccguggagaagggcaucuaccagaccagcaacuuccgggugcagcccacugagagcaucgugcgguuccccaacauuaccaaccugugucccuucggcgagguguucaacgccacccgguucgccagcguguacgccuggaaccggaagcggaucagcaacugcguggccgacuacagcgugcuguacaacagcgccagcuucagcaccuucaagugcuacggcgugagcccuaccaagcugaacgaccugugcuucaccaacguguacgccgacagcuucgugauccggggcgacgaggugcggcagaucgcucccggccagaccggcaagaucgccgacuacaacuacaagcugcccgacgacuucaccggcugcgugaucgccuggaacagcaacaaccuggacagcaaggugggcggcaacuacaacuaccuguuccggcuguuccguaagagcaaccugaagccauuugagcgggacaucagcaccgagaucuaccaggccggcaacacccccugcaacgguguggagggcuucaacugcuacuucccccugcagagcuacggcuuccagcccaccaacggcgugggcuaccagcccuaccgggugguggugcugagcuucgagcugcugcacgcccccgccaccgugugcggcccuaaaaagagcaccaaccuggugaagaacaagugcgugaauuucaacuucaacggccugaccggcaccggcgugcugaccgagagcaacaagaaguuccugcccuuccagcaguucggccgggauaucgccgacaccaccgacgccgugcgggacccccagacccuggagauccuggacaucaccccaugcagcuucggcggcgugagcgucaucacccccggcacaaacaccagcaaccagguggcagugcuguaccagggagugaacugcaccgaggugcccguggccauccacgccgaccagcugacccccaccuggcggguguacagcaccggcagcaacguguuccagacccgggccggcugccugaucggcgccgagcacgugaacaacagcuacgagugcgacauccccaucggcgccggcaucugcgcuuccuaccagacccagaccaacagcccccggcgggcccggagcguggccagccagagcgugaucgccuacaccaugagcuuaggcgccgagaacagcguggccuacagcaacaacagcaucgccaucccuaccaacuucaccaucagcgugaccaccgagauccugcccgugagcaugaccaagaccagcguggacuguaccauguacauaugcggcgacagcaccgagugcagcaaccugcugcugcaguacggcagcuucugcacccagcugaaccgggcgcugaccggcaucgccguggagcaggacaagaacacccaagagguguucgcccaggugaagcagaucuacaagacucccccaaucaaggacuucggcggcuucaacuucagccagauccugcccgaccccagcaagcccagcaagcggagcuucaucgaggaccugcuguucaacaaggugacccuggccgacgccggcuucaucaagcaguacggcgacugccugggggauaucgccgcccgggaccugaucugcgcucagaaguucaacggccugaccgugcugcccccucugcugaccgacgagaugaucgcccaguacaccagcgcccugcuugccggcaccaucaccagcggcuggaccuucggcgccggcgccgcacugcagauccccuucgccaugcagauggccuaccgguucaacggcaucggcgugacccagaacgugcuguacgagaaccagaagcugaucgccaaccaguucaacagcgccaucggcaagauccaggacagccugagcagcaccgccagcgcccugggcaagcugcaggacguggugaaccagaacgcccaggcucugaacacccuggugaagcagcugagcagcaauuuuggcgccaucagcagcgugcugaacgacauccugucaaggcuggacaagguggaggccgaggugcagaucgaccggcugaucaccggccggcugcagagccugcagaccuacgugacccagcagcugauccgggccgccgagauccgggccagcgccaaccuggccgcaaccaagaugagcgagugcgugcugggccagagcaagcggguggacuucugcggcaagggcuaccaccugaugagcuucccccagagcgccccacacggcguggucuuccuccacgugacauacgugcccgcccaggagaagaacuucaccaccgcccccgccaucugccacgacggcaaggcccacuucccccgggagggaguguucgugagcaacggcacccacugguucgugacccagcggaacuucuacgagccccagauuaucaccaccgacaacaccuucgugagcggcaacugcgacguggugaucggcaucgugaacaacaccguguacgacccccugcagccugagcuggacagcuucaaggaggagcuggacaaguacuucaagaaccacaccagccccgacguggaucugggcgacaucagcggcaucaacgcuagcguggugaacauccagaaggagaucgaccggcugaacgagguggccaagaaccugaacgagagccugaucgaccugcaggagcugggcaaguacgagcaguacaucaaguggcccugguacaucuggcugggcuucaucgccggccugaucgccaucgugauggugaccaucaugcugugcugcaugaccagcugcuguagcugccugaagggcugcugcagcugcggcagcugcugcaaguucgacgaggacgacagcgagccagugcugaagggcgugaagcugcacuacaccugaggacuaguuauaagacugacuagcccgaugggccucccaacgggcccuccuccccuccuugcaccgagauuaauagaucuaaaaaaaaaaaaaaaaaaaaaaaaaaaaaaaaaaaaaaaaaaaaaaaaaaaaaaaaaaaaaaaaaaaaaaaaaaaaaaaaaaaaaaaaaaaaaaaaaaaa

SEQ ID NO: 25674 - RNA, 4011 nt, Artificial Sequence
  SARS-CoV-2/Wuhan/WIV05/2019__EPI_ISL_402128 spike protein mRNA gc (1-1273)(H69del_V70del_Y453F_D614G_I692V_M1229I)
aggagaaagcuuaccauguucguguuccuggugcugcugccccuggugagcagccagugcgugaaccugaccacccggacccagcugcccccugccuacaccaacagcuucacccggggcguguacuaccccgacaagguguuccggagcagcgugcugcacagcacccaggaccuguuccugcccuucuucagcaacgugaccugguuccacgccaucagcggcaccaacggcaccaagcgguucgacaacccagugcugcccuucaacgacggcguguacuucgccagcaccgagaagucaaacaucauccggggcuggaucuucggcaccacccuggacagcaagacacagagccugcugaucgugaacaacgccaccaacguggugaucaaggugugcgaguuucaguucugcaacgaccccuuccugggcguguacuaccacaagaacaacaagagcuggauggagagcgaguuccggguguacagcagcgcuaacaauugcaccuucgaguacgucagccagcccuuccugauggaccucgagggcaagcagggcaacuucaagaaccugcgggaguucguguucaagaacaucgauggcuacuucaagaucuacagcaagcacacccccaucaaccuggugcgggaccugccccagggauucagcgcccuggagccucugguggaccugcccaucggcaucaacaucaccagguuccagacccugcuggcccugcaccggagcuaccugacccccggcgacagcagcagcggcuggaccgccggcgccgccgcauacuacgugggcuaccugcagccacggaccuuccugcugaaguacaacgagaacggcaccaucaccgacgccguggacugcgcccuggacccccugagcgagaccaagugcacccuaaagagcuucaccguggagaagggcaucuaccagaccagcaacuuccgggugcagcccacugagagcaucgugcgguuccccaacauuaccaaccugugucccuucggcgagguguucaacgccacccgguucgccagcguguacgccuggaaccggaagcggaucagcaacugcguggccgacuacagcgugcuguacaacagcgccagcuucagcaccuucaagugcuacggcgugagcccuaccaagcugaacgaccugugcuucaccaacguguacgcugacagcuucgugauccggggcgacgaggugcggcagaucgcccccggccagaccggcaagaucgccgacuacaacuacaagcugcccgacgacuucaccggcugcgugaucgccuggaacagcaacaaccuggacagcaaggugggcggcaacuacaacuaccuguuccggcuguuccguaagagcaaccugaagccauuugagcgggacaucagcaccgagaucuaccaggccggcagcacccccugcaacgguguggagggcuucaacugcuacuucccccugcagagcuacggcuuccagcccaccaacggcgugggcuaccagcccuaccgggugguggugcugagcuucgagcugcugcacgcccccgccaccgugugcggcccuaaaaagagcaccaaccuggugaagaacaagugcgugaacuucaauuucaacggccugaccggcaccggcgugcugaccgagagcaacaagaaguuccugcccuuccagcaguucggccgggauaucgccgacaccaccgacgcagugcgggacccccagacccuggagauccuggacaucaccccaugcagcuucggcggcgugagcgugaucacccccggcacaaacaccagcaaccaggucgccgugcuguaccagggagugaacugcaccgaggugcccguggccauccacgccgaccagcugacccccaccuggcggguguacagcaccggcagcaacguguuccagacccgggccggcugccugaucggcgccgagcacgugaacaacuccuacgagugcgacauccccaucggcgcuggcaucugcgccagcuaccagacccagaccaacagcccccggcgggcccggagcguggccagccagagcgugaucgccuacaccaugagcuuaggcgccgagaacagcguggccuacagcaacaacagcaucgcgaucccuaccaacuucaccaucagcgugaccaccgagauccugcccgugagcaugaccaagaccagcguggacuguaccauguacauaugcggcgacagcaccgagugcagcaaccugcugcugcaguacggcagcuucugcacccagcugaaccgggcccugaccggcaucgccguggagcaggacaagaacacccaagagguguucgcccaggugaagcagaucuacaagacucccccaaucaaggacuucggcggcuucaacuucagccagauccugcccgaccccagcaagcccagcaagcggagcuucaucgaggaccugcuguucaacaaggugacccuggccgacgccggcuucaucaagcaguacggcgacugccugggggauaucgccgcucgggaccugaucugcgcccagaaguucaacggccugaccgugcugcccccucugcugaccgacgagaugaucgcccaguacaccagcgcccugcuugccggcaccaucaccagcggcuggaccuucggcgccggcgcagcccugcagauccccuucgccaugcagauggccuaccgguucaacggcaucggcgugacccagaacgugcuguacgagaaccagaagcugaucgccaaccaguucaacagcgccaucggcaagauccaggacagccugagcagcaccgccagcgcccugggcaagcugcaggacguggugaaccagaacgcucaggcccugaacacccuggugaagcagcugagcagcaacuuuggcgccaucagcucagugcugaaugacauccugagcaggcuggacaagguggaggccgaggugcagaucgaccggcugaucaccggccggcugcagagccugcagaccuacgugacccagcagcugauccgggccgccgagauccgggccagcgccaaccuggcagccaccaagaugagcgagugcgugcugggccagagcaagcggguggacuucugcggcaagggcuaccaccugaugagcuucccccagagcgccccacacggcgugguguuccuccacgucacauacgugcccgcccaggagaagaacuucaccaccgcccccgccaucugccacgacggcaaggcucacuucccccgggagggaguguucgugagcaacggcacccacugguucgugacccagcggaacuucuacgagccccagauuaucaccaccgacaacaccuucgugagcggcaacugcgacguggugaucggcaucgugaacaacaccguguacgacccccugcagccugagcuggacagcuucaaggaggagcuggacaaguacuucaagaaccacaccagccccgacguggaucugggcgacaucagcggcaucaacgccagcguggugaacauccagaaggagaucgaccggcugaacgagguggccaagaaccugaacgagagccugaucgaccugcaggagcugggcaaguacgagcaguacaucaaguggcccugguacaucuggcugggcuucaucgccggccugaucgccaucgugaucgugaccaucaugcugugcugcaugaccagcugcuguagcugccugaagggcugcugcagcugcggcagcugcugcaaguucgacgaggacgacagcgagccagugcugaagggcgugaagcugcacuacaccugaggacuaguuauaagacugacuagcccgaugggccucccaacgggcccuccuccccuccuugcaccgagauuaauagaucuaaaaaaaaaaaaaaaaaaaaaaaaaaaaaaaaaaaaaaaaaaaaaaaaaaaaaaaaaaaaaaaaaaaaaaaaaaaaaaaaaaaaaaaaaaaaaaaaaaaa

SEQ ID NO: 25675 - RNA, 4008 nt, Artificial Sequence
  SARS-CoV-2/Wuhan/WIV05/2019__EPI_ISL_402128 spike protein mRNA gc (1-1273)(H69del_V70del_Y144del_N501Y_A570D_D614G_P681H_T716I_S982 A_D1118H)
aggagaaagcuuaccauguucguguuccuggugcugcugccccuggugagcagccagugcgugaaccugaccacccggacccagcugcccccugccuacaccaacagcuucacccggggcguguacuaccccgacaagguguuccggagcagcgugcugcacagcacccaggaccuguuccugcccuucuucagcaacgugaccugguuccacgccaucagcggcaccaacggcaccaagcgguucgacaacccagugcugcccuucaacgacggcguguacuucgccagcaccgagaagucaaacaucauccggggcuggaucuucggcaccacccuggacagcaagacacagagccugcugaucgugaacaacgccaccaacguggugaucaaggugugcgaguuucaguucugcaacgaccccuuccugggcguguaccacaagaacaacaagagcuggauggagagcgaguuccggguguacagcagcgcuaacaauugcaccuucgaguacgucagccagcccuuccugauggaccucgagggcaagcagggcaacuucaagaaccugcgggaguucguguucaagaacaucgauggcuacuucaagaucuacagcaagcacacccccaucaaccuggugcgggaccugccccagggauucagcgcccuggagccucugguggaccugcccaucggcaucaacaucaccagguuccagacccugcuggcccugcaccggagcuaccugacccccggcgacagcagcagcggcuggaccgccggcgccgccgcauacuacgugggcuaccugcagccacggaccuuccugcugaaguacaacgagaacggcaccaucaccgacgccguggacugcgcccuggacccccugagcgagaccaagugcacccuaaagagcuucaccguggagaagggcaucuaccagaccagcaacuuccgggugcagcccacugagagcaucgugcgguuccccaacauuaccaaccugugucccuucggcgagguguucaacgccacccgguucgccagcguguacgccuggaaccggaagcggaucagcaacugcguggccgacuacagcgugcuguacaacagcgccagcuucagcaccuucaagugcuacggcgugagcccuaccaagcugaacgaccugugcuucaccaacguguacgcugacagcuucgugauccggggcgacgaggugcggcagaucgcccccggccagaccggcaagaucgccgacuacaacuacaagcugcccgacgacuucaccggcugcgugaucgccuggaacagcaacaaccuggacagcaaggugggcggcaacuacaacuaccuguaccggcuguuccguaagagcaaccugaagccauucgagcgggacaucagcaccgagaucuaccaggccggcagcacccccugcaacgguguggagggcuuuaacugcuacuucccccugcagagcuacggcuuccagcccaccuacggcgugggcuaccagcccuaccgggugguggugcugagcuucgagcugcugcacgcccccgccaccgugugcggcccuaaaaagagcaccaaccuggugaagaacaagugcgugaacuucaacuucaauggccugaccggcaccggcgugcugaccgagagcaacaagaaguuccugcccuuccagcaguucggccgggauaucgacgacaccaccgacgccgugcgggacccccagacccuggagauccuggacaucaccccaugcagcuucggcggcgugagcgugaucacccccggcacaaacaccagcaaccaggucgcagugcuguaccagggagugaacugcaccgaggugcccguggccauccacgccgaccagcugacccccaccuggcggguguacagcaccggcagcaacguguuccagacccgggccggcugccugaucggcgccgagcacgugaacaacuccuacgagugcgacauccccaucggcgccggcaucugcgcuagcuaccagacccagaccaacagccaccggcgggcccggagcguggccagccagagcaucaucgccuacaccaugagcuuaggcgccgagaacagcguggccuacagcaacaacagcaucgccauccccaucaacuucaccauaagcgugaccaccgagauccugccugugagcaugaccaagaccagcguggacuguaccauguacaucugcggcgacagcaccgagugcagcaaccugcugcugcaguacggcagcuucugcacccagcugaaccgggcgcugaccggcaucgccguggagcaggacaagaacacccaagagguguucgcccaggugaagcagaucuacaagaccccacccaucaaggacuucggcggcuucaacuucagccagauccugcccgaccccagcaagcccagcaagcggagcuucaucgaggaccugcuguucaacaaggugacucuggccgacgccggcuucaucaagcaguacggcgauugccugggggacaucgccgcccgggaccugaucugcgcucagaaguucaacggccugaccgugcugccuccccugcugaccgacgagaugaucgcccaguacaccagcgcccugcuugccggcaccaucaccagcggcuggaccuucggcgccggcgccgcacugcagauccccuucgccaugcagauggccuaccgguucaacggcaucggcgugacccagaacgugcuguacgagaaccagaagcugaucgccaaccaguucaacagcgccaucggcaagauccaggacagccugagcagcaccgccagcgcccugggcaagcugcaggacguggugaaccagaacgcccaggcucugaacacccuggugaagcagcugagcagcaacuucggcgccaucagcucagugcugaacgacauccuggccaggcuggacaagguggaggccgaggugcagaucgaccggcugaucaccggccggcugcagagccugcagaccuacgugacccagcagcugauccgggccgccgagauucgggccagcgccaaucuggcagccaccaagaugagcgagugcgugcugggccagagcaagcggguggacuuuugcggcaagggcuaccaccugaugagcuucccccagagcgcuccccacggcgugguguuccuccacgugaccuacgucccagcccaggagaagaacuucacaaccgcccccgccaucugccacgacggcaaggcccacuucccccgggagggaguguucgugagcaacggcacccacugguucgugacccagcggaacuucuacgagccccagaucaucaccacccacaacaccuucgugagcggcaacugcgacguggugaucggcaucgugaacaacaccguguacgacccccugcagcccgagcuggacagcuucaaggaggagcuggacaaguacuucaagaaccacaccagcccugacguggaucugggcgacaucagcggcaucaacgccagcguggugaacauccagaaggagaucgaccggcugaacgagguggccaagaaccugaacgagagccugaucgaccugcaggagcugggcaaguacgagcaguacaucaaguggcccugguacaucuggcugggcuucaucgccggccugaucgccaucgugauggugaccaucaugcugugcugcaugaccagcugcuguagcugccugaagggcugcugcagcugcggcagcugcugcaaguucgacgaggacgacagcgagcccgugcugaagggcgugaagcugcacuacaccugaggacuaguuauaagacugacuagcccgaugggccucccaacgggcccuccuccccuccuugcaccgagauuaauagaucuaaaaaaaaaaaaaaaaaaaaaaaaaaaaaaaaaaaaaaaaaaaaaaaaaaaaaaaaaaaaaaaaaaaaaaaaaaaaaaaaaaaaaaaaaaaaaaaaaaaa

SEQ ID NO: 25676 - RNA, 4017 nt, Artificial Sequence
  SARS-CoV-2/Wuhan/WIV05/2019__EPI_ISL_402128 spike protein mRNA gc (1-1273)(K417N_E484K_N501Y_D614G)
aggagaaagcuuaccauguucguguuccuggugcugcugccccuggugagcagccagugcgugaaccugaccacccggacccagcugcccccugccuacaccaacagcuucacccggggcguguacuaccccgacaagguguuccggagcagcgugcugcacagcacccaggaccuguuccugcccuucuucagcaacgugaccugguuccacgccauccacgugagcggcaccaacggcaccaagcgguucgacaacccagugcugcccuucaacgacggcguguacuucgccagcaccgagaagucaaacaucauccggggcuggaucuucggcaccacccuggacagcaagacacagagccugcugaucgugaacaacgccaccaacguggugaucaaggugugcgaguuucaguucugcaacgaccccuuccugggcguguacuaccacaagaacaacaagagcuggauggagagcgaguuccgggucuacagcagcgcuaacaauugcaccuucgaguacgugagccagcccuuccugauggaccucgagggcaagcagggcaacuucaagaaccugcgggaguucguguucaagaacaucgauggcuacuucaagaucuacagcaagcacacccccaucaaccuggugcgggaccugccccagggauucagcgcccuggagccucugguggaccugcccaucggcaucaacaucaccagguuccagacccugcuggcccugcaccggagcuaccugacccccggcgacagcagcagcggcuggaccgccggcgccgccgcauacuacgugggcuaccugcagccacggaccuuccugcugaaguacaacgagaacggcaccaucaccgacgccguggacugcgcccuggacccccugagcgagaccaagugcacccuaaagagcuucaccguggagaagggcaucuaccagaccagcaacuuccgggugcagcccacugagagcaucgugcgguuccccaacauuaccaaccugugucccuucggcgagguguucaacgccacccgguucgccagcguguacgccuggaaccggaagcggaucagcaacugcguggccgacuacagcgugcuguacaacagcgccagcuucagcaccuucaagugcuacggcgugagcccuaccaagcugaacgaccugugcuucaccaacguguacgcugacagcuucgugauccggggcgacgaggugcggcagaucgcccccggccagaccggcaacaucgccgacuacaacuacaagcugcccgacgacuucaccggcugcgugaucgccuggaacagcaacaaccuggacagcaaggugggcggcaacuacaacuaccuguaccggcuguuccguaagagcaaccugaagccauucgagcgggacaucagcaccgagaucuaccaggccggcagcacccccugcaacggugugaagggcuuuaacugcuacuucccccugcagagcuacggcuuccagcccaccuacggcgugggcuaccagcccuaccgggugguggugcugagcuucgagcugcugcacgcccccgccaccgugugcggcccuaaaaagagcaccaaccuggugaagaacaagugcgugaacuucaauuucaacggccugaccggcaccggcgugcugaccgagagcaacaagaaguuccugcccuuccagcaguucggccgggauaucgccgacaccaccgacgcagugcgggacccccagacccuggagauccuggacaucaccccaugcagcuucggcggcgugagcgucaucacccccggcacaaacaccagcaaccagguggccgugcuguaccagggagugaacugcaccgaggugcccguggccauccacgccgaccagcugacccccaccuggcggguguacagcaccggcagcaacguguuccagacccgggccggcugccugaucggcgccgagcacgugaacaacuccuacgagugcgacauccccaucggcgcuggcaucugcgccagcuaccagacccagaccaacagcccccggcgggcccggagcguggccagccagagcaucaucgccuacaccaugagcuuaggcgccgagaacagcguggccuacagcaacaacagcaucgcgaucccuaccaacuucaccaucagcgugaccaccgagauacugcccgugagcaugaccaagaccagcguggacuguaccauguacaucugcggcgacagcaccgagugcagcaaccugcugcugcaguacggcagcuucugcacccagcugaaccgggcccugaccggcaucgccguggagcaggacaagaacacccaagagguguucgcccaggugaagcagaucuacaagacucccccaaucaaggacuucggcggcuucaacuucagccagauccugcccgaccccagcaagcccagcaagcggagcuucaucgaggaccugcuguucaacaaggugacccuggccgacgccggcuucaucaagcaguacggcgacugccugggggauaucgccgcucgggaccugaucugcgcccagaaguucaacggccugaccgugcugcccccucugcugaccgacgagaugaucgcccaguacaccagcgcccugcuugccggcaccaucaccagcggcuggaccuucggcgccggcgcagcccugcagauccccuucgccaugcagauggccuaccgguucaacggcaucggcgugacccagaacgugcuguacgagaaccagaagcugaucgccaaccaguucaacagcgccaucggcaagauccaggacagccugagcagcaccgccagcgcccugggcaagcugcaggacguggugaaccagaacgcucaggcccugaacacccuggugaagcagcugagcagcaacuucggcgccaucagcucagugcugaaugacauccugagcaggcuggacaagguggaggccgaggugcagaucgaccggcugaucaccggccggcugcagagccugcagaccuacgugacccagcagcugauccgggccgccgagauccgggccagcgccaaccuggcagccaccaagaugagcgagugcgugcugggccagagcaagcggguggacuuuugcggcaagggcuaccaccugaugagcuucccccagagcgccccacacggcgugguguuccuccacgucacauacgugcccgcccaggagaagaacuucaccaccgcccccgccauuugccacgacggcaaggcucacuucccccgggagggaguguucgugagcaacggcacccacugguucgugacccagcggaacuucuacgagccccagaucaucaccaccgacaacaccuucgugagcggcaacugcgacguggugaucggcaucgugaacaacaccguguacgacccccugcagccugagcuggacagcuucaaggaggagcuggacaaguacuucaagaaccacaccagccccgacguggaucugggcgacaucagcggcaucaacgccagcguggugaacauccagaaggagaucgaccggcugaacgagguggccaagaaccugaacgagagccugaucgaccugcaggagcugggcaaguacgagcaguacaucaaguggcccugguacaucuggcugggcuucaucgccggccugaucgccaucgugauggugaccaucaugcugugcugcaugaccagcugcuguagcugccugaagggcugcugcagcugcggcagcugcugcaaguucgacgaggacgacagcgagccagugcugaagggcgugaagcugcacuacaccugaggacuaguuauaagacugacuagcccgaugggccucccaacgggcccuccuccccuccuugcaccgagauuaauagaucuaaaaaaaaaaaaaaaaaaaaaaaaaaaaaaaaaaaaaaaaaaaaaaaaaaaaaaaaaaaaaaaaaaaaaaaaaaaaaaaaaaaaaaaaaaaaaaaaaaaa

SEQ ID NO: 25677 - RNA, 4008 nt, Artificial Sequence
  SARS-CoV-2/Wuhan/WIV05/2019__EPI_ISL_402128 spike protein mRNA gc (1-1273)(L18F_D80A_D215G_L242del_A243del_L244del_R246I_K417N_E484 K_N501Y_D614G_A701V)
aggagaaagcuuaccauguucguguuccuggugcugcugccccuggugagcagccagugcgugaacuucaccacccggacccagcugcccccugccuacaccaacagcuucacccggggcguguacuaccccgacaagguguuccggagcagcgugcugcacagcacccaggaccuguuccugcccuucuucagcaacgugaccugguuccacgccauccacgugagcggcaccaacggcaccaagcgguucgccaacccagugcugcccuucaacgacggcguguacuucgccagcaccgagaagucaaacaucauccggggcuggaucuuuggcaccacccuggacagcaagacacagagccugcugaucgugaacaacgcuaccaacguggugaucaaggugugcgaguuccaguucugcaacgaccccuuccugggcguguacuaccacaagaacaacaagagcuggauggagagcgaguuccgggucuacagcagcgccaacaauugcaccuucgaguacgugagccagcccuuccugauggaccuggagggcaagcagggcaacuucaagaaccuccgggaguucguguucaagaacaucgacggcuacuucaagaucuacagcaagcacacccccaucaaccuggugcggggacugccccagggcuucagcgcccuggagccucugguggaucugcccaucggcaucaacaucaccagguuccagacccugcacaucagcuaccugacccccggcgacagcagcagcggcuggaccgccggcgccgccgcauacuacgugggcuaccugcagccacggaccuuccugcugaaguacaacgagaacggcaccaucaccgacgccguggacugcgcccuggacccccugagcgagaccaagugcacccuuaagagcuucaccguggagaagggcaucuaccagaccagcaacuuccgggugcagcccacugagagcauugugcgguuccccaacaucaccaaccugugucccuucggcgagguguucaacgccacccgguucgccagcguguacgccuggaaccggaagcggaucagcaacugcguggccgacuacagcgugcuguacaacagcgccagcuucagcaccuucaagugcuacggcgugagcccuaccaagcugaacgaccugugcuucaccaacguguacgcugacagcuucgugauccggggcgacgaggugcggcagaucgcccccggccagaccggcaacaucgccgacuacaacuacaagcugcccgacgacuucaccggcugcgugaucgccuggaacagcaacaaccuggacagcaaggugggcggcaacuacaacuaccuguaccggcuauuccguaagagcaaccugaagccauuugagcgggacaucagcaccgagaucuaccaggccgguagcacccccugcaacggcgugaagggcuucaacugcuacuucccccugcagagcuacggcuuccagcccaccuacggcgugggcuaccagcccuaccgggugguggugcugagcuucgagcugcugcacgcccccgccaccgugugcggcccuaaaaagagcaccaaccuggugaagaacaagugcgugaacuucaauuucaacggccugaccggcaccggcgugcugaccgagagcaacaagaaguuccugcccuuccagcaguucggccgggacaucgccgacaccaccgaugcagugcgggacccccagacccuggagauccuggacaucaccccaugcagcuucggcggcgugagcgucaucacccccggaacaaacaccagcaaccagguggccgugcuguaccagggcgugaacugcaccgaggugcccguggccauccacgccgaccagcugacccccaccuggcggguguacagcaccggcagcaacguguuccagacccgggccggcugccugaucggcgccgagcacgugaacaacuccuacgagugcgacauccccaucggcgcuggcaucugcgccagcuaccagacccagaccaacagcccccggcgggcccggagcguggccagccagagcaucaucgccuacaccaugagccugggcguggagaacagcguggccuacagcaacaacagcaucgccaucccuaccaacuucaccauaagcgugaccaccgagauccugcccgugagcaugaccaagaccagcguggacuguaccauguacaucugcggcgacagcaccgagugcagcaaccuguuacugcaguacggcagcuucugcacccagcugaaccgggcgcugaccggcaucgccguggagcaggacaagaacacccaagagguguucgcccaggugaagcagaucuacaagacucccccaaucaaggacuucggcggcuucaacuucagccagauccugcccgaccccagcaagcccagcaagcggagcuucaucgaggaccugcuguucaacaaggugacccuggccgacgccggcuucaucaagcaguacggggacugccugggcgacaucgccgcccgggaccugaucugcgcucagaaguucaacggccugaccgugcugcccccucugcugaccgaugagaugaucgcccaguacaccagcgcccugcuggccggcaccaucaccagcggcuggaccuucggcgccggcgccgcacugcagauccccuucgccaugcagauggccuaccgguucaacggcaucggcgugacccagaacgugcuguacgagaaccagaagcugaucgccaaccaguucaacagcgccaucggcaagauccaggacagccugagcagcaccgccagcgcccugggcaagcugcaggacguggugaaccagaacgcccaggcucugaacacccuggugaagcagcugagcagcaacuuuggcgccaucagcucagugcugaaugacauccugagccggcuggacaagguggaggccgaggugcagaucgacaggcugaucaccggccggcugcagagccugcagaccuacgugacccagcagcugauccgggccgccgagauucgggccagcgccaaccuggccgcaaccaagaugagcgagugcgugcugggccagagcaagcggguggacuucugcggcaagggcuaccaccugaugagcuucccccagagcgccccacacggcguggucuuccugcacgugacauacgugcccgcccaggagaagaacuucaccaccgcccccgccaucugccacgacggaaaggcccacuucccccgggagggcguguucgugagcaacggcacccacugguucgugacccagcggaacuucuacgagccccagaucaucaccaccgacaacaccuucgugagcggcaacugcgacguggugaucggcaucgugaacaacaccguguacgacccccugcagccugagcuggacagcuucaaggaggagcucgacaaguacuucaagaaccacaccagccccgacguggaccugggcgacaucagcggcaucaacgcuagcguggugaacauccagaaggagaucgaucggcugaacgagguggccaagaaccugaacgagagccugaucgaccugcaggagcugggcaaguacgagcaguacaucaaguggcccugguacaucuggcugggcuucaucgccggccugaucgccaucgugauggugaccaucaugcugugcugcaugaccagcugcuguagcugccugaagggcugcugcagcugcggcagcugcugcaaguucgacgaggacgacagcgagccagugcugaagggcgugaagcugcacuacaccugaggacuaguuauaagacugacuagcccgaugggccucccaacgggcccuccuccccuccuugcaccgagauuaauagaucuaaaaaaaaaaaaaaaaaaaaaaaaaaaaaaaaaaaaaaaaaaaaaaaaaaaaaaaaaaaaaaaaaaaaaaaaaaaaaaaaaaaaaaaaaaaaaaaaaaaa

SEQ ID NO: 25678 - RNA, 4017 nt, Artificial Sequence
  SARS-CoV-2/Wuhan/WIV05/2019__EPI_ISL_402128 spike protein mRNA gc (1-1273)(E484K_D614G)
aggagaaagcuuaccauguucguguuccuggugcugcugccccuggugagcagccagugcgugaaccugaccacccggacccagcugcccccugccuacaccaacagcuucacccggggcguguacuaccccgacaagguguuccggagcagcgugcugcacagcacccaggaccuguuccugcccuucuucagcaacgugaccugguuccacgccauccacgugagcggcaccaacggcaccaagcgguucgacaacccagugcugcccuucaacgacggcguguacuucgccagcaccgagaagucaaacaucauccggggcuggaucuucggcaccacccuggacagcaagacacagagccugcugaucgugaacaacgccaccaacguggugaucaaggugugcgaguuucaguucugcaacgaccccuuccugggcguguacuaccacaagaacaacaagagcuggauggagagcgaguuccgggucuacagcagcgcuaacaauugcaccuucgaguacgugagccagcccuuccugauggaccucgagggcaagcagggcaacuucaagaaccugcgggaguucguguucaagaacaucgauggcuacuucaagaucuacagcaagcacacccccaucaaccuggugcgggaccugccccagggauucagcgcccuggagccucugguggaccugcccaucggcaucaacaucaccagguuccagacccugcuggcccugcaccggagcuaccugacccccggcgacagcagcagcggcuggaccgccggcgccgccgcauacuacgugggcuaccugcagccacggaccuuccugcugaaguacaacgagaacggcaccaucaccgacgccguggacugcgcccuggacccccugagcgagaccaagugcacccuaaagagcuucaccguggagaagggcaucuaccagaccagcaacuuccgggugcagcccacugagagcaucgugcgguuccccaacauuaccaaccugugucccuucggcgagguguucaacgccacccgguucgccagcguguacgccuggaaccggaagcggaucagcaacugcguggccgacuacagcgugcuguacaacagcgccagcuucagcaccuucaagugcuacggcgugagcccuaccaagcugaacgaccugugcuucaccaacguguacgcugacagcuucgugauccggggcgacgaggugcggcagaucgcccccggccagaccggcaagaucgccgacuacaacuacaagcugcccgacgacuucaccggcugcgugaucgccuggaacagcaacaaccuggacagcaaggugggcggcaacuacaacuaccuguaccggcuguuccguaagagcaaccugaagccauucgagcgggacaucagcaccgagaucuaccaggccggcagcacccccugcaacggugugaagggcuuuaacugcuacuucccccugcagagcuacggcuuccagcccaccaacggcgugggcuaccagcccuaccgggugguggugcugagcuucgagcugcugcacgcccccgccaccgugugcggcccuaaaaagagcaccaaccuggugaagaacaagugcgugaacuucaauuucaacggccugaccggcaccggcgugcugaccgagagcaacaagaaguuccugcccuuccagcaguucggccgggauaucgccgacaccaccgacgcagugcgggacccccagacccuggagauccuggacaucaccccaugcagcuucggcggcgugagcgucaucacccccggcacaaacaccagcaaccagguggccgugcuguaccagggagugaacugcaccgaggugcccguggccauccacgccgaccagcugacccccaccuggcggguguacagcaccggcagcaacguguuccagacccgggccggcugccugaucggcgccgagcacgugaacaacuccuacgagugcgacauccccaucggcgcuggcaucugcgccagcuaccagacccagaccaacagcccccggcgggcccggagcguggccagccagagcaucaucgccuacaccaugagcuuaggcgccgagaacagcguggccuacagcaacaacagcaucgcgaucccuaccaacuucaccaucagcgugaccaccgagauacugcccgugagcaugaccaagaccagcguggacuguaccauguacaucugcggcgacagcaccgagugcagcaaccugcugcugcaguacggcagcuucugcacccagcugaaccgggcccugaccggcaucgccguggagcaggacaagaacacccaagagguguucgcccaggugaagcagaucuacaagacucccccaaucaaggacuucggcggcuucaacuucagccagauccugcccgaccccagcaagcccagcaagcggagcuucaucgaggaccugcuguucaacaaggugacccuggccgacgccggcuucaucaagcaguacggcgacugccugggggauaucgccgcucgggaccugaucugcgcccagaaguucaacggccugaccgugcugcccccucugcugaccgacgagaugaucgcccaguacaccagcgcccugcuugccggcaccaucaccagcggcuggaccuucggcgccggcgcagcccugcagauccccuucgccaugcagauggccuaccgguucaacggcaucggcgugacccagaacgugcuguacgagaaccagaagcugaucgccaaccaguucaacagcgccaucggcaagauccaggacagccugagcagcaccgccagcgcccugggcaagcugcaggacguggugaaccagaacgcucaggcccugaacacccuggugaagcagcugagcagcaacuucggcgccaucagcucagugcugaaugacauccugagcaggcuggacaagguggaggccgaggugcagaucgaccggcugaucaccggccggcugcagagccugcagaccuacgugacccagcagcugauccgggccgccgagauccgggccagcgccaaccuggcagccaccaagaugagcgagugcgugcugggccagagcaagcggguggacuuuugcggcaagggcuaccaccugaugagcuucccccagagcgccccacacggcgugguguuccuccacgucacauacgugcccgcccaggagaagaacuucaccaccgcccccgccauuugccacgacggcaaggcucacuucccccgggagggaguguucgugagcaacggcacccacugguucgugacccagcggaacuucuacgagccccagaucaucaccaccgacaacaccuucgugagcggcaacugcgacguggugaucggcaucgugaacaacaccguguacgacccccugcagccugagcuggacagcuucaaggaggagcuggacaaguacuucaagaaccacaccagccccgacguggaucugggcgacaucagcggcaucaacgccagcguggugaacauccagaaggagaucgaccggcugaacgagguggccaagaaccugaacgagagccugaucgaccugcaggagcugggcaaguacgagcaguacaucaaguggcccugguacaucuggcugggcuucaucgccggccugaucgccaucgugauggugaccaucaugcugugcugcaugaccagcugcuguagcugccugaagggcugcugcagcugcggcagcugcugcaaguucgacgaggacgacagcgagccagugcugaagggcgugaagcugcacuacaccugaggacuaguuauaagacugacuagcccgaugggccucccaacgggcccuccuccccuccuugcaccgagauuaauagaucuaaaaaaaaaaaaaaaaaaaaaaaaaaaaaaaaaaaaaaaaaaaaaaaaaaaaaaaaaaaaaaaaaaaaaaaaaaaaaaaaaaaaaaaaaaaaaaaaaaaa

SEQ ID NO: 25679 - RNA, 4017 nt, Artificial Sequence
  SARS-CoV-2/Wuhan/WIV05/2019__EPI_ISL_402128 spike protein mRNA gc (1-1273)(L18F_T20N_P26S_D138Y_R190S_K417T_E484K_N501Y_D614G_H655Y _T1027I)
aggagaaagcuuaccauguucguguuccuggugcugcugccccuggugagcagccagugcgugaacuucaccaaccggacccagcugcccagcgccuacaccaacagcuucacccggggcguguacuacccugacaagguguuccggagcagcgugcugcacagcacccaggaccuguuccugcccuucuucagcaacgugaccugguuccacgccauccacgugagcggcaccaacggcaccaagcgguucgacaaccccgugcugccauucaacgacggcguguacuucgccagcaccgagaagucaaacaucauccggggcuggaucuuuggcaccacccuggacagcaagacccagagccugcugaucgugaacaacgccacaaacguggugaucaaggugugcgaguuccaguucugcaacuaccccuuccugggcguguacuaccacaagaacaacaagagcuggauggagagcgaguuccgggucuacagcagcgcuaauaacugcaccuucgaguacgugagccagcccuuccugauggaccuggagggcaagcagggcaacuucaagaaccucagcgaguucguguucaagaacaucgacggcuacuucaagaucuacagcaagcacacccccaucaaccuggugcgggaucugccccagggauucagcgcccuggagccccugguggaccugccuaucggcaucaacaucacccgguuccagacccugcuggcccugcacaggagcuaccugacccccggcgacagcagcagcggcuggaccgccggcgccgccgcauacuacgugggcuaccugcagccccggaccuuccugcugaaguacaacgagaacggcaccaucaccgacgccguggacugcgcccuggacccacugagcgagaccaagugcacccuaaagagcuucaccguggagaagggcaucuaccagaccagcaacuuccgggugcagcccaccgagagcaucgugcgguuccccaacauuacuaaccugugucccuucggcgagguguucaacgccacccgguucgccagcguguacgccuggaaccggaagcggaucagcaacugcguggccgacuacagcgugcuguacaacagcgccagcuucagcaccuucaagugcuacggcgugagccccaccaagcugaacgaccugugcuucaccaacguguacgcugacagcuucgugauccggggcgacgaggugcggcagaucgccccuggccagaccggcaccaucgccgacuacaacuacaagcugcccgacgacuucaccggcugcgugaucgccuggaacagcaacaaccuggacagcaaggugggcggcaacuacaacuaccuguaccggcuguuccguaagagcaaccugaagcccuuugagcgggacaucagcaccgagaucuaccaggccggcagcaccccaugcaacggugugaagggcuucaacugcuacuucccccugcagagcuacggcuuccagcccaccuacggcgugggcuaccagcccuaccgggugguggugcugagcuucgagcugcugcacgcccccgccaccgugugcggccccaaaaagagcaccaaccuggugaagaacaagugcgugaacuucaauuucaacggccugaccggcaccggcgugcugaccgagagcaacaagaaguuccugccuuuccagcaguucggccgggacaucgccgauaccaccgacgcagugcgggacccccagacccuggagauccuggacaucacccccugcagcuucggcggcgugagcgucaucaccccaggcacaaacaccagcaaccagguggccgugcuguaccagggagugaacugcaccgaggugcccguggccauccacgccgaccagcugacccccaccuggcggguguacuccaccggcagcaacguguuccagacccgggccggcugccugaucggcgccgaguacgugaacaacagcuacgagugcgacauccccaucggcgcuggcaucugcgccagcuaccagacccagaccaacagcccccggcgggcccggagcguggccagccagagcaucaucgccuacaccaugagccugggcgccgagaacagcguggccuacagcaacaacagcaucgcgauccccaccaacuucaccaucagcgugaccaccgagauauuaccugugagcaugaccaagaccagcguggacuguaccauguacaucugcggcgacagcaccgagugcagcaaccugcugcugcaguacggcagcuucugcacccagcugaaccgggcccugaccggcaucgccguggagcaggacaagaacacccaagagguguucgcccaggugaagcagaucuacaagacuccacccaucaaggacuucggcggcuucaacuucagccagauccugcccgaccccagcaagcccagcaagcggagcuucaucgaggaccugcuguucaacaaggugacccuggccgacgccggcuucaucaagcaguacggcgacugccugggggacaucgccgcucgggaucugaucugcgcccagaaguucaacggccugaccgugcugccuccccugcugaccgacgagaugaucgcccaguacaccagcgcccugcuggccggcaccaucaccagcggcuggaccuucggcgccggcgcagcccuucagauccccuucgccaugcagauggccuaccgguucaacggcaucggcgugacccagaacgugcuguacgagaaccagaagcugaucgccaaccaguucaacagcgccaucggcaagauccaggacagccugagcagcaccgccagcgcccugggcaagcugcaggacguggugaaccagaacgcucaggcccugaacacccuggugaagcagcugagcucaaacuuuggcgccaucagcagcgugcugaaugacauccugagccggcuggacaagguggaggccgaggugcagaucgacaggcugaucaccggccggcugcagagccugcagaccuacgugacccagcagcugauccgggccgccgagauccgggccagcgccaaccuggcagccauuaagaugagcgagugcgugcugggccagagcaagcggguggacuucugcggcaagggcuaccaccugaugagcuucccccagagcgcuccccacggcgugguguuccugcacgucaccuacgugccagcccaggagaagaacuucacaaccgcccccgccaucugccacgacggcaaggcccacuucccccgggagggaguguucgugagcaacggcacccacugguucgugacccagcggaacuucuacgagccccagaucaucaccaccgacaacaccuucgugagcggcaacugcgacguggugaucggcaucgugaacaacaccguguacgacccccuccagcccgagcuggacagcuucaaggaggagcuggacaaguacuucaagaaccacaccagcccugacguggaccugggcgauaucagcggcaucaacgccagcguggugaacauccagaaggagaucgaccggcugaacgagguggccaagaaccugaacgagagccugaucgaccugcaggagcugggcaaguacgagcaguacaucaaguggcccugguacaucuggcugggcuucaucgccggccugaucgccaucgugauggugaccaucaugcugugcugcaugaccagcugcuguagcugccugaagggcugcugcagcugcggcagcugcugcaaguucgacgaggacgacagcgagcccgugcugaagggcgugaagcugcacuacaccugaggacuaguuauaagacugacuagcccgaugggccucccaacgggcccuccuccccuccuugcaccgagauuaauagaucuaaaaaaaaaaaaaaaaaaaaaaaaaaaaaaaaaaaaaaaaaaaaaaaaaaaaaaaaaaaaaaaaaaaaaaaaaaaaaaaaaaaaaaaaaaaaaaaaaaaa

SEQ ID NO: 25680 - RNA, 4017 nt, Artificial Sequence
  SARS-CoV-2/Wuhan/WIV05/2019__EPI_ISL_402128 spike protein mRNA gc (1-1273)(S13I_W152C_L452R_D614G)
aggagaaagcuuaccauguucguguuccuggugcugcugccccuggugagcauccagugcgugaaccugaccacccggacccagcugcccccugccuacaccaacagcuucacccggggcguguacuaccccgacaagguguuccggagcagcgugcugcacagcacccaggaccuguuccugcccuucuucagcaacgugaccugguuccacgccauccacgugagcggcaccaacggcaccaagcgguucgacaacccagugcugcccuucaacgacggcguguacuucgccagcaccgagaagucaaacaucauccggggcuggaucuucggcaccacccuggacagcaagacacagagccugcugaucgugaacaacgccaccaacguggugaucaaggugugcgaguuucaguucugcaacgaccccuuccugggcguguacuaccacaagaacaacaagagcugcauggagagcgaguuccgggucuacagcagcgcuaacaauugcaccuucgaguacgugagccagcccuuccugauggaccucgagggcaagcagggcaacuucaagaaccugcgggaguucguguucaagaacaucgauggcuacuucaagaucuacagcaagcacacccccaucaaccuggugcgggaccugccccagggauucagcgcccuggagccucugguggaccugcccaucggcaucaacaucaccagguuccagacccugcuggcccugcaccggagcuaccugacccccggcgacagcagcagcggcuggaccgccggcgccgccgcauacuacgugggcuaccugcagccacggaccuuccugcugaaguacaacgagaacggcaccaucaccgacgccguggacugcgcccuggacccccugagcgagaccaaguguacccuaaagagcuucaccguggagaagggcaucuaccagaccagcaacuuccgggugcagcccacugagagcauugugcgguuccccaacaucaccaaccugugccccuucggcgagguguucaacgccacccgguucgccagcguguacgccuggaaccggaagcggaucagcaacugcguggccgacuacagcgugcuguacaacagcgccagcuucagcaccuucaagugcuacggcgugagcccuaccaagcugaacgaccugugcuucaccaacguguacgcugacagcuucgugauccggggcgacgaggugcggcagaucgcccccggccagaccggcaagaucgccgacuacaacuacaagcugcccgacgacuucaccggcugcgugaucgccuggaacagcaacaaccuggacagcaaggugggcggcaacuacaacuaccgguaccggcuguuccguaagagcaaccugaagccauucgagcgggacaucagcaccgagaucuaccaggccggcagcacccccugcaacgguguggagggcuuuaacugcuacuucccccugcagagcuacggcuuccagcccaccaacggcgugggcuaccagcccuaccgggugguggugcugagcuucgagcugcugcacgcccccgccaccgugugcggcccuaaaaagagcaccaaccuggugaagaacaagugcgugaacuucaauuucaacggccugaccggcaccggcgugcugaccgagagcaacaagaaguuccugcccuuccagcaguucggccgggauaucgccgacaccaccgacgcagugcgggacccccagacccuggagauccuggacaucaccccaugcagcuucggcggcgugagcgucaucacccccggcacaaacaccagcaaccagguggccgugcuguaccagggagugaacugcaccgaggugcccguggccauccacgccgaccagcugacccccaccuggcggguguacagcaccggcagcaacguguuccagacccgggccggcugccugaucggcgccgagcacgugaacaacagcuacgagugcgacauccccaucggcgcuggcaucugugccuccuaccagacccagaccaacagcccccggcgggcccggagcguggccagccagagcaucaucgccuacaccaugagccugggcgccgagaacagcguggccuacagcaacaacagcaucgcgaucccuaccaacuucaccauaagcgugaccaccgagaucuuacccgugagcaugaccaagaccagcguggacugcaccauguacaucugcggcgacagcaccgagugcagcaaccugcugcugcaguacggcagcuucugcacccagcugaaccgggcccugaccggcaucgccguggagcaggacaagaacacccaagagguguucgcccaggugaagcagaucuacaagacucccccaaucaaggacuucggcggcuucaacuucagccagauccugcccgaccccagcaagcccagcaagcggagcuucaucgaggaccugcuguucaacaaggugacccuggccgacgccggcuucaucaagcaguacggcgacugccugggggauaucgccgcucgggaccugaucugcgcccagaaguucaacggccugaccgugcugcccccucugcugaccgacgagaugaucgcccaguacaccagcgcccugcuggccggcaccaucaccagcggcuggaccuucggcgccggcgcagcccuucagauccccuucgccaugcagauggccuacagguucaacggcaucggcgugacccagaacgugcuguacgagaaccagaagcugaucgccaaccaguucaacagcgccaucggcaagauccaggacagccugagcagcaccgccagcgcccugggcaagcugcaggacguggugaaccagaacgcucaggcccugaacacccuggugaagcagcugagcagcaacuucggcgccaucagcagcgugcugaaugacauccugucacggcuggacaagguggaggccgaggugcagaucgaccggcugaucaccggccggcugcagagccugcagaccuacgugacccagcagcugauccgggccgccgagauucgggccagcgccaaccuggcagccaccaagaugagcgagugcgugcugggccagagcaagcggguggacuuuugcggcaagggcuaccaccugaugagcuucccccagagcgccccacacggcgugguguuccugcacgucacauacgugcccgcccaggagaagaacuucaccaccgcccccgccaucugccacgacggcaaggcucacuucccccgggagggaguguucgugagcaacggcacccacugguucgugacccagcggaacuucuacgagccccagaucaucaccaccgacaacaccuucgugagcggcaacugcgacguggugaucggcaucgugaacaacaccguguacgacccccuccagccugagcuggacagcuucaaggaggagcuggacaaguacuucaagaaccacaccagccccgacguggaucugggcgacaucagcggcaucaacgccagcguggugaacauccagaaggagaucgaccggcugaacgagguggccaagaaccugaacgagagccugaucgaccugcaggagcugggcaaguacgagcaguacaucaaguggcccugguacaucuggcugggcuucaucgccggccugaucgccaucgugauggugaccaucaugcugugcugcaugaccagcuguugcagcugccugaagggcugcugcagcugcggcagcugcugcaaguucgacgaggacgacagcgagccagugcugaagggcgugaagcugcacuacaccugaggacuaguuauaagacugacuagcccgaugggccucccaacgggcccuccuccccuccuugcaccgagauuaauagaucuaaaaaaaaaaaaaaaaaaaaaaaaaaaaaaaaaaaaaaaaaaaaaaaaaaaaaaaaaaaaaaaaaaaaaaaaaaaaaaaaaaaaaaaaaaaaaaaaaaaa

SEQ ID NO: 25681 - RNA, 4017 nt, Artificial Sequence
  SARS-CoV-2/Wuhan/WIV05/2019__EPI_ISL_402128 spike protein mRNA gc mod (1-1273)
aggagaaagcuuaccauguucguguuucuggugcugcugccccugguguccagccagugugugaaccugaccaccagaacacagcugccuccagccuacaccaacagcuucaccagaggcguguacuaccccgacaagguguucagauccagcgugcugcacucuacccaggaccuguuccugccuuucuucagcaacgugaccugguuccacgccauccacguguccggcaccaauggcaccaagagauucgacaaccccgugcugcccuucaacgacgggguguacuuugccagcaccgagaaguccaacaucaucagaggcuggaucuucggcaccacacuggacagcaagacccagagccugcugaucgugaacaacgccaccaacguggucaucaaagugugcgaguuccaguucugcaacgaccccuuccugggcgucuacuaccacaagaacaacaagagcuggauggaaagcgaguuccggguguacagcagcgccaacaacugcaccuucgaguacgugucccagccuuuccugauggaccuggaaggcaagcagggcaacuucaagaaccugcgcgaguucguguucaagaacaucgacggcuacuucaaaaucuacagcaagcacaccccuaucaaccucgugcgggaucugccucagggcuucucugcucuggaaccccugguggaucugcccaucggcaucaacaucacccgguuucagacacugcuggcccugcacagaagcuaccugacaccuggcgauagcagcagcggauggacagcuggugccgccgcuuacuaugugggcuaccugcagccuagaaccuuccugcugaaguacaacgagaacggcaccaucaccgacgccguggauugugcucuggauccucugagcgagacaaagugcacccugaaguccuucaccguggaaaagggcaucuaccagaccagcaacuuccgggugcagcccaccgaauccaucgugcgguuccccaauaucaccaaucugugccccuucggcgagguguucaaugccaccagauucgccucuguguacgccuggaaccggaagcggaucagcaauugcguggccgacuacuccgugcuguacaacuccgccagcuucagcaccuucaagugcuacggcguguccccuaccaagcugaacgaccugugcuucacaaacguguacgccgacagcuucgugauccggggagaugaagugcggcagauugccccuggacagacaggcaagaucgccgacuacaacuacaagcugcccgacgacuucaccggcugugugauugccuggaacagcaacaaccuggacuccaaagucggcggcaacuacaauuaccuguaccggcuguuccggaaguccaaucugaagcccuucgagcgggacaucagcaccgaaaucuaucaggccggcagcaccccuugcaacggcguggaaggcuucaacugcuacuucccacugcaguccuacggcuuucagcccacaaauggcgugggcuaucagcccuacagagugguggugcugagcuucgaacugcugcaugcuccugccacagugugcggcccuaagaaaagcaccaaucucgugaagaacaaaugcgugaacuucaacuucaacggccugaccggcaccggcgugcugacagagagcaacaagaaguuccugccauuccagcaguuuggccgggauaucgccgauaccacagacgccguuagagauccccagacacuggaaauccuggacaucaccccaugcagcuucggcggagugucugugaucaccccuggcaccaacaccagcaaucagguggcagugcuguaccaggacgugaacuguaccgaagugcccguggccauucacgccgaucagcugacaccuacauggcggguguacuccaccggcagcaauguguuucagaccagagccggcugucugaucggagccgagcacgugaacaauagcuacgagugcgacauccccaucggcgcuggcaucugugccagcuaccagacacagacaaacagccccagacgggcuagaagcguggccagccagagcaucauugccuacacaaugucucugggcgccgagaacagcguggccuacuccaacaacucuaucgcuauccccaccaacuucaccaucagcgugaccaccgagauccugccuguguccaugaccaagaccagcguggacugcaccauguacaucugcggcgauuccaccgagugcuccaaccugcugcugcaguacggcagcuucugcacccagcugaauagagcccugacagggaucgccguggaacaggacaagaacacccaagagguguucgcccaagugaagcaaaucuacaagaccccuccuaucaaggacuucggcggcuucaauuucagccagauucugcccgauccuagcaagcccagcaagcggagcuucaucgaggaccugcuguucaacaaagugacacuggccgacgccggcuucaucaagcaguauggcgauugucugggcgacauugccgccagggaucugauuugcgcccagaaguuuaacggacugacagugcugccuccucugcugaccgaugagaugaucgcccaguacacaucugcccugcuggccggcacaaucacaagcggcuggacauuuggagcuggcgccgcucugcagauccccuuugcuaugcagauggccuaccgguucaacggcaucggagugacccagaaugugcuguacgagaaccagaagcugaucgccaaccaguucaacagcgccaucggcaagauccaggacagccugagcagcacagcaagcgcccugggaaagcugcaggacguggucaaccagaaugcccaggcacugaacacccuggucaagcagcuguccuccaacuucggcgccaucagcucugugcugaacgauauccugagcagacuggacaaggucgaggccgaggugcagaucgacagacugaucacaggcagacugcagagccuccagacauacgugacccagcagcugaucagagccgccgagauuagagccucugccaaucuggccgccaccaagaugucugagugugugcugggccagagcaagagaguggacuuuugcggcaagggcuaccaccugaugagcuucccucagucugccccucacggcgugguguuucugcacgugacauaugugcccgcucaagagaagaauuucaccaccgcuccagccaucugccacgacggcaaagcccacuuuccuagagaaggcguguucguguccaacggcacccauugguucgugacacagcggaacuucuacgagccccagaucaucaccaccgacaacaccuucgugucuggcaacugcgacguugugaucggcauugugaacaauaccguguacgacccucugcagcccgagcuggacagcuucaaagaggaacuggacaaguacuuuaagaaccacacaagccccgacguggaccugggcgauaucagcggaaucaaugccagcgucgugaacauccagaaagagaucgaccggcugaacgagguggccaagaaucugaacgagagccugaucgaccugcaagaacuggggaaguacgagcaguacaucaaguggcccugguacaucuggcugggcuuuaucgccggacugauugccaucgugauggucacaaucaugcuguguugcaugaccagcugcuguagcugccugaagggcuguuguagcuguggcagcugcugcaaguucgacgaggacgauucugagcccgugcugaagggcgugaaacugcacuacaccugaggacuaguuauaagacugacuagcccgaugggccucccaacgggcccuccuccccuccuugcaccgagauuaauagaucuaaaaaaaaaaaaaaaaaaaaaaaaaaaaaaaaaaaaaaaaaaaaaaaaaaaaaaaaaaaaaaaaaaaaaaaaaaaaaaaaaaaaaaaaaaaaaaaaaaaa

SEQ ID NO: 25682 - RNA, 4017 nt, Artificial Sequence
  SARS-CoV-2/Wuhan/WIV05/2019__EPI_ISL_402128 spike protein mRNA gc mod (1-1273)(D614G)
aggagaaagcuuaccauguucguguuucuggugcugcugccccugguguccagccagugugugaaccugaccaccagaacacagcugccuccagccuacaccaacagcuucaccagaggcguguacuaccccgacaagguguucagauccagcgugcugcacucuacccaggaccuguuccugccuuucuucagcaacgugaccugguuccacgccauccacguguccggcaccaauggcaccaagagauucgacaaccccgugcugcccuucaacgacgggguguacuuugccagcaccgagaaguccaacaucaucagaggcuggaucuucggcaccacacuggacagcaagacccagagccugcugaucgugaacaacgccaccaacguggucaucaaagugugcgaguuccaguucugcaacgaccccuuccugggcgucuacuaccacaagaacaacaagagcuggauggaaagcgaguuccggguguacagcagcgccaacaacugcaccuucgaguacgugucccagccuuuccugauggaccuggaaggcaagcagggcaacuucaagaaccugcgcgaguucguguucaagaacaucgacggcuacuucaaaaucuacagcaagcacaccccuaucaaccucgugcgggaucugccucagggcuucucugcucuggaaccccugguggaucugcccaucggcaucaacaucacccgguuucagacacugcuggcccugcacagaagcuaccugacaccuggcgauagcagcagcggauggacagcuggugccgccgcuuacuaugugggcuaccugcagccuagaaccuuccugcugaaguacaacgagaacggcaccaucaccgacgccguggauugugcucuggauccucugagcgagacaaagugcacccugaaguccuucaccguggaaaagggcaucuaccagaccagcaacuuccgggugcagcccaccgaauccaucgugcgguuccccaauaucaccaaucugugccccuucggcgagguguucaaugccaccagauucgccucuguguacgccuggaaccggaagcggaucagcaauugcguggccgacuacuccgugcuguacaacuccgccagcuucagcaccuucaagugcuacggcguguccccuaccaagcugaacgaccugugcuucacaaacguguacgccgacagcuucgugauccggggagaugaagugcggcagauugccccuggacagacaggcaagaucgccgacuacaacuacaagcugcccgacgacuucaccggcugugugauugccuggaacagcaacaaccuggacuccaaagucggcggcaacuacaauuaccuguaccggcuguuccggaaguccaaucugaagcccuucgagcgggacaucagcaccgaaaucuaucaggccggcagcaccccuugcaacggcguggaaggcuucaacugcuacuucccacugcaguccuacggcuuucagcccacaaauggcgugggcuaucagcccuacagagugguggugcugagcuucgaacugcugcaugcuccugccacagugugcggcccuaagaaaagcaccaaucucgugaagaacaaaugcgugaacuucaacuucaacggccugaccggcaccggcgugcugacagagagcaacaagaaguuccugccauuccagcaguuuggccgggauaucgccgauaccacagacgccguuagagauccccagacacuggaaauccuggacaucaccccaugcagcuucggcggagugucugugaucaccccuggcaccaacaccagcaaucagguggcagugcuguaccagggcgugaacuguaccgaagugcccguggccauucacgccgaucagcugacaccuacauggcggguguacuccaccggcagcaauguguuucagaccagagccggcugucugaucggagccgagcacgugaacaauagcuacgagugcgacauccccaucggcgcuggcaucugugccagcuaccagacacagacaaacagccccagacgggcuagaagcguggccagccagagcaucauugccuacacaaugucucugggcgccgagaacagcguggccuacuccaacaacucuaucgcuauccccaccaacuucaccaucagcgugaccaccgagauccugccuguguccaugaccaagaccagcguggacugcaccauguacaucugcggcgauuccaccgagugcuccaaccugcugcugcaguacggcagcuucugcacccagcugaauagagcccugacagggaucgccguggaacaggacaagaacacccaagagguguucgcccaagugaagcaaaucuacaagaccccuccuaucaaggacuucggcggcuucaauuucagccagauucugcccgauccuagcaagcccagcaagcggagcuucaucgaggaccugcuguucaacaaagugacacuggccgacgccggcuucaucaagcaguauggcgauugucugggcgacauugccgccagggaucugauuugcgcccagaaguuuaacggacugacagugcugccuccucugcugaccgaugagaugaucgcccaguacacaucugcccugcuggccggcacaaucacaagcggcuggacauuuggagcuggcgccgcucugcagauccccuuugcuaugcagauggccuaccgguucaacggcaucggagugacccagaaugugcuguacgagaaccagaagcugaucgccaaccaguucaacagcgccaucggcaagauccaggacagccugagcagcacagcaagcgcccugggaaagcugcaggacguggucaaccagaaugcccaggcacugaacacccuggucaagcagcuguccuccaacuucggcgccaucagcucugugcugaacgauauccugagcagacuggacaaggucgaggccgaggugcagaucgacagacugaucacaggcagacugcagagccuccagacauacgugacccagcagcugaucagagccgccgagauuagagccucugccaaucuggccgccaccaagaugucugagugugugcugggccagagcaagagaguggacuuuugcggcaagggcuaccaccugaugagcuucccucagucugccccucacggcgugguguuucugcacgugacauaugugcccgcucaagagaagaauuucaccaccgcuccagccaucugccacgacggcaaagcccacuuuccuagagaaggcguguucguguccaacggcacccauugguucgugacacagcggaacuucuacgagccccagaucaucaccaccgacaacaccuucgugucuggcaacugcgacguugugaucggcauugugaacaauaccguguacgacccucugcagcccgagcuggacagcuucaaagaggaacuggacaaguacuuuaagaaccacacaagccccgacguggaccugggcgauaucagcggaaucaaugccagcgucgugaacauccagaaagagaucgaccggcugaacgagguggccaagaaucugaacgagagccugaucgaccugcaagaacuggggaaguacgagcaguacaucaaguggcccugguacaucuggcugggcuuuaucgccggacugauugccaucgugauggucacaaucaugcuguguugcaugaccagcugcuguagcugccugaagggcuguuguagcuguggcagcugcugcaaguucgacgaggacgauucugagcccgugcugaagggcgugaaacugcacuacaccugaggacuaguuauaagacugacuagcccgaugggccucccaacgggcccuccuccccuccuugcaccgagauuaauagaucuaaaaaaaaaaaaaaaaaaaaaaaaaaaaaaaaaaaaaaaaaaaaaaaaaaaaaaaaaaaaaaaaaaaaaaaaaaaaaaaaaaaaaaaaaaaaaaaaaaaa

SEQ ID NO: 25683 - RNA, 4017 nt, Artificial Sequence
  SARS-CoV-2/Wuhan/WIV05/2019__EPI_ISL_402128 spike protein mRNA gc mod (1-1273)(A222V_D614G)
aggagaaagcuuaccauguucguguuucuggugcugcugccccugguguccagccagugugugaaccugaccaccagaacacagcugccuccagccuacaccaacagcuucaccagaggcguguacuaccccgacaagguguucagauccagcgugcugcacucuacccaggaccuguuccugccuuucuucagcaacgugaccugguuccacgccauccacguguccggcaccaauggcaccaagagauucgacaaccccgugcugcccuucaacgacgggguguacuuugccagcaccgagaaguccaacaucaucagaggcuggaucuucggcaccacacuggacagcaagacccagagccugcugaucgugaacaacgccaccaacguggucaucaaagugugcgaguuccaguucugcaacgaccccuuccugggcgucuacuaccacaagaacaacaagagcuggauggaaagcgaguuccggguguacagcagcgccaacaacugcaccuucgaguacgugucccagccuuuccugauggaccuggaaggcaagcagggcaacuucaagaaccugcgcgaguucguguucaagaacaucgacggcuacuucaaaaucuacagcaagcacaccccuaucaaccucgugcgggaucugccucagggcuucucugugcuggaaccccugguggaucugcccaucggcaucaacaucacccgguuucagacacugcuggcccugcacagaagcuaccugacaccuggcgauagcagcagcggauggacagcuggugccgccgcuuacuaugugggcuaccugcagccuagaaccuuccugcugaaguacaacgagaacggcaccaucaccgacgccguggauugugcucuggauccucugagcgagacaaagugcacccugaaguccuucaccguggaaaagggcaucuaccagaccagcaacuuccgggugcagcccaccgaauccaucgugcgguuccccaauaucaccaaucugugccccuucggcgagguguucaaugccaccagauucgccucuguguacgccuggaaccggaagcggaucagcaauugcguggccgacuacuccgugcuguacaacuccgccagcuucagcaccuucaagugcuacggcguguccccuaccaagcugaacgaccugugcuucacaaacguguacgccgacagcuucgugauccggggagaugaagugcggcagauugccccuggacagacaggcaagaucgccgacuacaacuacaagcugcccgacgacuucaccggcugugugauugccuggaacagcaacaaccuggacuccaaagucggcggcaacuacaauuaccuguaccggcuguuccggaaguccaaucugaagcccuucgagcgggacaucagcaccgaaaucuaucaggccggcagcaccccuugcaacggcguggaaggcuucaacugcuacuucccacugcaguccuacggcuuucagcccacaaauggcgugggcuaucagcccuacagagugguggugcugagcuucgaacugcugcaugcuccugccacagugugcggcccuaagaaaagcaccaaucucgugaagaacaaaugcgugaacuucaacuucaacggccugaccggcaccggcgugcugacagagagcaacaagaaguuccugccauuccagcaguuuggccgggauaucgccgauaccacagacgccguuagagauccccagacacuggaaauccuggacaucaccccaugcagcuucggcggagugucugugaucaccccuggcaccaacaccagcaaucagguggcagugcuguaccagggcgugaacuguaccgaagugcccguggccauucacgccgaucagcugacaccuacauggcggguguacuccaccggcagcaauguguuucagaccagagccggcugucugaucggagccgagcacgugaacaauagcuacgagugcgacauccccaucggcgcuggcaucugugccagcuaccagacacagacaaacagccccagacgggcuagaagcguggccagccagagcaucauugccuacacaaugucucugggcgccgagaacagcguggccuacuccaacaacucuaucgcuauccccaccaacuucaccaucagcgugaccaccgagauccugccuguguccaugaccaagaccagcguggacugcaccauguacaucugcggcgauuccaccgagugcuccaaccugcugcugcaguacggcagcuucugcacccagcugaauagagcccugacagggaucgccguggaacaggacaagaacacccaagagguguucgcccaagugaagcaaaucuacaagaccccuccuaucaaggacuucggcggcuucaauuucagccagauucugcccgauccuagcaagcccagcaagcggagcuucaucgaggaccugcuguucaacaaagugacacuggccgacgccggcuucaucaagcaguauggcgauugucugggcgacauugccgccagggaucugauuugcgcccagaaguuuaacggacugacagugcugccuccucugcugaccgaugagaugaucgcccaguacacaucugcccugcuggccggcacaaucacaagcggcuggacauuuggagcuggcgccgcucugcagauccccuuugcuaugcagauggccuaccgguucaacggcaucggagugacccagaaugugcuguacgagaaccagaagcugaucgccaaccaguucaacagcgccaucggcaagauccaggacagccugagcagcacagcaagcgcccugggaaagcugcaggacguggucaaccagaaugcccaggcacugaacacccuggucaagcagcuguccuccaacuucggcgccaucagcucugugcugaacgauauccugagcagacuggacaaggucgaggccgaggugcagaucgacagacugaucacaggcagacugcagagccuccagacauacgugacccagcagcugaucagagccgccgagauuagagccucugccaaucuggccgccaccaagaugucugagugugugcugggccagagcaagagaguggacuuuugcggcaagggcuaccaccugaugagcuucccucagucugccccucacggcgugguguuucugcacgugacauaugugcccgcucaagagaagaauuucaccaccgcuccagccaucugccacgacggcaaagcccacuuuccuagagaaggcguguucguguccaacggcacccauugguucgugacacagcggaacuucuacgagccccagaucaucaccaccgacaacaccuucgugucuggcaacugcgacguugugaucggcauugugaacaauaccguguacgacccucugcagcccgagcuggacagcuucaaagaggaacuggacaaguacuuuaagaaccacacaagccccgacguggaccugggcgauaucagcggaaucaaugccagcgucgugaacauccagaaagagaucgaccggcugaacgagguggccaagaaucugaacgagagccugaucgaccugcaagaacuggggaaguacgagcaguacaucaaguggcccugguacaucuggcugggcuuuaucgccggacugauugccaucgugauggucacaaucaugcuguguugcaugaccagcugcuguagcugccugaagggcuguuguagcuguggcagcugcugcaaguucgacgaggacgauucugagcccgugcugaagggcgugaaacugcacuacaccugaggacuaguuauaagacugacuagcccgaugggccucccaacgggcccuccuccccuccuugcaccgagauuaauagaucuaaaaaaaaaaaaaaaaaaaaaaaaaaaaaaaaaaaaaaaaaaaaaaaaaaaaaaaaaaaaaaaaaaaaaaaaaaaaaaaaaaaaaaaaaaaaaaaaaaaa

SEQ ID NO: 25684 - RNA, 4017 nt, Artificial Sequence
  SARS-CoV-2/Wuhan/WIV05/2019__EPI_ISL_402128 spike protein mRNA gc mod (1-1273)(N439K_D614G)
aggagaaagcuuaccauguucguguuucuggugcugcugccccugguguccagccagugugugaaccugaccaccagaacacagcugccuccagccuacaccaacagcuucaccagaggcguguacuaccccgacaagguguucagauccagcgugcugcacucuacccaggaccuguuccugccuuucuucagcaacgugaccugguuccacgccauccacguguccggcaccaauggcaccaagagauucgacaaccccgugcugcccuucaacgacgggguguacuuugccagcaccgagaaguccaacaucaucagaggcuggaucuucggcaccacacuggacagcaagacccagagccugcugaucgugaacaacgccaccaacguggucaucaaagugugcgaguuccaguucugcaacgaccccuuccugggcgucuacuaccacaagaacaacaagagcuggauggaaagcgaguuccggguguacagcagcgccaacaacugcaccuucgaguacgugucccagccuuuccugauggaccuggaaggcaagcagggcaacuucaagaaccugcgcgaguucguguucaagaacaucgacggcuacuucaaaaucuacagcaagcacaccccuaucaaccucgugcgggaucugccucagggcuucucugcucuggaaccccugguggaucugcccaucggcaucaacaucacccgguuucagacacugcuggcccugcacagaagcuaccugacaccuggcgauagcagcagcggauggacagcuggugccgccgcuuacuaugugggcuaccugcagccuagaaccuuccugcugaaguacaacgagaacggcaccaucaccgacgccguggauugugcucuggauccucugagcgagacaaagugcacccugaaguccuucaccguggaaaagggcaucuaccagaccagcaacuuccgggugcagcccaccgaauccaucgugcgguuccccaauaucaccaaucugugccccuucggcgagguguucaaugccaccagauucgccucuguguacgccuggaaccggaagcggaucagcaauugcguggccgacuacuccgugcuguacaacuccgccagcuucagcaccuucaagugcuacggcguguccccuaccaagcugaacgaccugugcuucacaaacguguacgccgacagcuucgugauccggggagaugaagugcggcagauugccccuggacagacaggcaagaucgccgacuacaacuacaagcugcccgacgacuucaccggcugugugauugccuggaacagcaagaaccuggacuccaaagucggcggcaacuacaauuaccuguaccggcuguuccggaaguccaaucugaagcccuucgagcgggacaucagcaccgaaaucuaucaggccggcagcaccccuugcaacggcguggaaggcuucaacugcuacuucccacugcaguccuacggcuuucagcccacaaauggcgugggcuaucagcccuacagagugguggugcugagcuucgaacugcugcaugcuccugccacagugugcggcccuaagaaaagcaccaaucucgugaagaacaaaugcgugaacuucaacuucaacggccugaccggcaccggcgugcugacagagagcaacaagaaguuccugccauuccagcaguuuggccgggauaucgccgauaccacagacgccguuagagauccccagacacuggaaauccuggacaucaccccaugcagcuucggcggagugucugugaucaccccuggcaccaacaccagcaaucagguggcagugcuguaccagggcgugaacuguaccgaagugcccguggccauucacgccgaucagcugacaccuacauggcggguguacuccaccggcagcaauguguuucagaccagagccggcugucugaucggagccgagcacgugaacaauagcuacgagugcgacauccccaucggcgcuggcaucugugccagcuaccagacacagacaaacagccccagacgggcuagaagcguggccagccagagcaucauugccuacacaaugucucugggcgccgagaacagcguggccuacuccaacaacucuaucgcuauccccaccaacuucaccaucagcgugaccaccgagauccugccuguguccaugaccaagaccagcguggacugcaccauguacaucugcggcgauuccaccgagugcuccaaccugcugcugcaguacggcagcuucugcacccagcugaauagagcccugacagggaucgccguggaacaggacaagaacacccaagagguguucgcccaagugaagcaaaucuacaagaccccuccuaucaaggacuucggcggcuucaauuucagccagauucugcccgauccuagcaagcccagcaagcggagcuucaucgaggaccugcuguucaacaaagugacacuggccgacgccggcuucaucaagcaguauggcgauugucugggcgacauugccgccagggaucugauuugcgcccagaaguuuaacggacugacagugcugccuccucugcugaccgaugagaugaucgcccaguacacaucugcccugcuggccggcacaaucacaagcggcuggacauuuggagcuggcgccgcucugcagauccccuuugcuaugcagauggccuaccgguucaacggcaucggagugacccagaaugugcuguacgagaaccagaagcugaucgccaaccaguucaacagcgccaucggcaagauccaggacagccugagcagcacagcaagcgcccugggaaagcugcaggacguggucaaccagaaugcccaggcacugaacacccuggucaagcagcuguccuccaacuucggcgccaucagcucugugcugaacgauauccugagcagacuggacaaggucgaggccgaggugcagaucgacagacugaucacaggcagacugcagagccuccagacauacgugacccagcagcugaucagagccgccgagauuagagccucugccaaucuggccgccaccaagaugucugagugugugcugggccagagcaagagaguggacuuuugcggcaagggcuaccaccugaugagcuucccucagucugccccucacggcgugguguuucugcacgugacauaugugcccgcucaagagaagaauuucaccaccgcuccagccaucugccacgacggcaaagcccacuuuccuagagaaggcguguucguguccaacggcacccauugguucgugacacagcggaacuucuacgagccccagaucaucaccaccgacaacaccuucgugucuggcaacugcgacguugugaucggcauugugaacaauaccguguacgacccucugcagcccgagcuggacagcuucaaagaggaacuggacaaguacuuuaagaaccacacaagccccgacguggaccugggcgauaucagcggaaucaaugccagcgucgugaacauccagaaagagaucgaccggcugaacgagguggccaagaaucugaacgagagccugaucgaccugcaagaacuggggaaguacgagcaguacaucaaguggcccugguacaucuggcugggcuuuaucgccggacugauugccaucgugauggucacaaucaugcuguguugcaugaccagcugcuguagcugccugaagggcuguuguagcuguggcagcugcugcaaguucgacgaggacgauucugagcccgugcugaagggcgugaaacugcacuacaccugaggacuaguuauaagacugacuagcccgaugggccucccaacgggcccuccuccccuccuugcaccgagauuaauagaucuaaaaaaaaaaaaaaaaaaaaaaaaaaaaaaaaaaaaaaaaaaaaaaaaaaaaaaaaaaaaaaaaaaaaaaaaaaaaaaaaaaaaaaaaaaaaaaaaaaaa

SEQ ID NO: 25685 - RNA, 4017 nt, Artificial Sequence
  SARS-CoV-2/Wuhan/WIV05/2019__EPI_ISL_402128 spike protein mRNA gc mod (1-1273)(S477N_D614G)
aggagaaagcuuaccauguucguguuucuggugcugcugccccugguguccagccagugugugaaccugaccaccagaacacagcugccuccagccuacaccaacagcuucaccagaggcguguacuaccccgacaagguguucagauccagcgugcugcacucuacccaggaccuguuccugccuuucuucagcaacgugaccugguuccacgccauccacguguccggcaccaauggcaccaagagauucgacaaccccgugcugcccuucaacgacgggguguacuuugccagcaccgagaaguccaacaucaucagaggcuggaucuucggcaccacacuggacagcaagacccagagccugcugaucgugaacaacgccaccaacguggucaucaaagugugcgaguuccaguucugcaacgaccccuuccugggcgucuacuaccacaagaacaacaagagcuggauggaaagcgaguuccggguguacagcagcgccaacaacugcaccuucgaguacgugucccagccuuuccugauggaccuggaaggcaagcagggcaacuucaagaaccugcgcgaguucguguucaagaacaucgacggcuacuucaaaaucuacagcaagcacaccccuaucaaccucgugcgggaucugccucagggcuucucugcucuggaaccccugguggaucugcccaucggcaucaacaucacccgguuucagacacugcuggcccugcacagaagcuaccugacaccuggcgauagcagcagcggauggacagcuggugccgccgcuuacuaugugggcuaccugcagccuagaaccuuccugcugaaguacaacgagaacggcaccaucaccgacgccguggauugugcucuggauccucugagcgagacaaagugcacccugaaguccuucaccguggaaaagggcaucuaccagaccagcaacuuccgggugcagcccaccgaauccaucgugcgguuccccaauaucaccaaucugugccccuucggcgagguguucaaugccaccagauucgccucuguguacgccuggaaccggaagcggaucagcaauugcguggccgacuacuccgugcuguacaacuccgccagcuucagcaccuucaagugcuacggcguguccccuaccaagcugaacgaccugugcuucacaaacguguacgccgacagcuucgugauccggggagaugaagugcggcagauugccccuggacagacaggcaagaucgccgacuacaacuacaagcugcccgacgacuucaccggcugugugauugccuggaacagcaacaaccuggacuccaaagucggcggcaacuacaauuaccuguaccggcuguuccggaaguccaaucugaagcccuucgagcgggacaucagcaccgaaaucuaucaggccggcaacaccccuugcaacggcguggaaggcuucaacugcuacuucccacugcaguccuacggcuuucagcccacaaauggcgugggcuaucagcccuacagagugguggugcugagcuucgaacugcugcaugcuccugccacagugugcggcccuaagaaaagcaccaaucucgugaagaacaaaugcgugaacuucaacuucaacggccugaccggcaccggcgugcugacagagagcaacaagaaguuccugccauuccagcaguuuggccgggauaucgccgauaccacagacgccguuagagauccccagacacuggaaauccuggacaucaccccaugcagcuucggcggagugucugugaucaccccuggcaccaacaccagcaaucagguggcagugcuguaccagggcgugaacuguaccgaagugcccguggccauucacgccgaucagcugacaccuacauggcggguguacuccaccggcagcaauguguuucagaccagagccggcugucugaucggagccgagcacgugaacaauagcuacgagugcgacauccccaucggcgcuggcaucugugccagcuaccagacacagacaaacagccccagacgggcuagaagcguggccagccagagcaucauugccuacacaaugucucugggcgccgagaacagcguggccuacuccaacaacucuaucgcuauccccaccaacuucaccaucagcgugaccaccgagauccugccuguguccaugaccaagaccagcguggacugcaccauguacaucugcggcgauuccaccgagugcuccaaccugcugcugcaguacggcagcuucugcacccagcugaauagagcccugacagggaucgccguggaacaggacaagaacacccaagagguguucgcccaagugaagcaaaucuacaagaccccuccuaucaaggacuucggcggcuucaauuucagccagauucugcccgauccuagcaagcccagcaagcggagcuucaucgaggaccugcuguucaacaaagugacacuggccgacgccggcuucaucaagcaguauggcgauugucugggcgacauugccgccagggaucugauuugcgcccagaaguuuaacggacugacagugcugccuccucugcugaccgaugagaugaucgcccaguacacaucugcccugcuggccggcacaaucacaagcggcuggacauuuggagcuggcgccgcucugcagauccccuuugcuaugcagauggccuaccgguucaacggcaucggagugacccagaaugugcuguacgagaaccagaagcugaucgccaaccaguucaacagcgccaucggcaagauccaggacagccugagcagcacagcaagcgcccugggaaagcugcaggacguggucaaccagaaugcccaggcacugaacacccuggucaagcagcuguccuccaacuucggcgccaucagcucugugcugaacgauauccugagcagacuggacaaggucgaggccgaggugcagaucgacagacugaucacaggcagacugcagagccuccagacauacgugacccagcagcugaucagagccgccgagauuagagccucugccaaucuggccgccaccaagaugucugagugugugcugggccagagcaagagaguggacuuuugcggcaagggcuaccaccugaugagcuucccucagucugccccucacggcgugguguuucugcacgugacauaugugcccgcucaagagaagaauuucaccaccgcuccagccaucugccacgacggcaaagcccacuuuccuagagaaggcguguucguguccaacggcacccauugguucgugacacagcggaacuucuacgagccccagaucaucaccaccgacaacaccuucgugucuggcaacugcgacguugugaucggcauugugaacaauaccguguacgacccucugcagcccgagcuggacagcuucaaagaggaacuggacaaguacuuuaagaaccacacaagccccgacguggaccugggcgauaucagcggaaucaaugccagcgucgugaacauccagaaagagaucgaccggcugaacgagguggccaagaaucugaacgagagccugaucgaccugcaagaacuggggaaguacgagcaguacaucaaguggcccugguacaucuggcugggcuuuaucgccggacugauugccaucgugauggucacaaucaugcuguguugcaugaccagcugcuguagcugccugaagggcuguuguagcuguggcagcugcugcaaguucgacgaggacgauucugagcccgugcugaagggcgugaaacugcacuacaccugaggacuaguuauaagacugacuagcccgaugggccucccaacgggcccuccuccccuccuugcaccgagauuaauagaucuaaaaaaaaaaaaaaaaaaaaaaaaaaaaaaaaaaaaaaaaaaaaaaaaaaaaaaaaaaaaaaaaaaaaaaaaaaaaaaaaaaaaaaaaaaaaaaaaaaaa

SEQ ID NO: 25686 - RNA, 4017 nt, Artificial Sequence
  SARS-CoV-2/Wuhan/WIV05/2019__EPI_ISL_402128 spike protein mRNA gc mod (1-1273)(N501Y_D614G)
aggagaaagcuuaccauguucguguuucuggugcugcugccccugguguccagccagugugugaaccugaccaccagaacacagcugccuccagccuacaccaacagcuucaccagaggcguguacuaccccgacaagguguucagauccagcgugcugcacucuacccaggaccuguuccugccuuucuucagcaacgugaccugguuccacgccauccacguguccggcaccaauggcaccaagagauucgacaaccccgugcugcccuucaacgacgggguguacuuugccagcaccgagaaguccaacaucaucagaggcuggaucuucggcaccacacuggacagcaagacccagagccugcugaucgugaacaacgccaccaacguggucaucaaagugugcgaguuccaguucugcaacgaccccuuccugggcgucuacuaccacaagaacaacaagagcuggauggaaagcgaguuccggguguacagcagcgccaacaacugcaccuucgaguacgugucccagccuuuccugauggaccuggaaggcaagcagggcaacuucaagaaccugcgcgaguucguguucaagaacaucgacggcuacuucaaaaucuacagcaagcacaccccuaucaaccucgugcgggaucugccucagggcuucucugcucuggaaccccugguggaucugcccaucggcaucaacaucacccgguuucagacacugcuggcccugcacagaagcuaccugacaccuggcgauagcagcagcggauggacagcuggugccgccgcuuacuaugugggcuaccugcagccuagaaccuuccugcugaaguacaacgagaacggcaccaucaccgacgccguggauugugcucuggauccucugagcgagacaaagugcacccugaaguccuucaccguggaaaagggcaucuaccagaccagcaacuuccgggugcagcccaccgaauccaucgugcgguuccccaauaucaccaaucugugccccuucggcgagguguucaaugccaccagauucgccucuguguacgccuggaaccggaagcggaucagcaauugcguggccgacuacuccgugcuguacaacuccgccagcuucagcaccuucaagugcuacggcguguccccuaccaagcugaacgaccugugcuucacaaacguguacgccgacagcuucgugauccggggagaugaagugcggcagauugccccuggacagacaggcaagaucgccgacuacaacuacaagcugcccgacgacuucaccggcugugugauugccuggaacagcaacaaccuggacuccaaagucggcggcaacuacaauuaccuguaccggcuguuccggaaguccaaucugaagcccuucgagcgggacaucagcaccgaaaucuaucaggccggcagcaccccuugcaacggcguggaaggcuucaacugcuacuucccacugcaguccuacggcuuucagcccacauacggcgugggcuaucagcccuacagagugguggugcugagcuucgaacugcugcaugcuccugccacagugugcggcccuaagaaaagcaccaaucucgugaagaacaaaugcgugaacuucaacuucaacggccugaccggcaccggcgugcugacagagagcaacaagaaguuccugccauuccagcaguuuggccgggauaucgccgauaccacagacgccguuagagauccccagacacuggaaauccuggacaucaccccaugcagcuucggcggagugucugugaucaccccuggcaccaacaccagcaaucagguggcagugcuguaccagggcgugaacuguaccgaagugcccguggccauucacgccgaucagcugacaccuacauggcggguguacuccaccggcagcaauguguuucagaccagagccggcugucugaucggagccgagcacgugaacaauagcuacgagugcgacauccccaucggcgcuggcaucugugccagcuaccagacacagacaaacagccccagacgggcuagaagcguggccagccagagcaucauugccuacacaaugucucugggcgccgagaacagcguggccuacuccaacaacucuaucgcuauccccaccaacuucaccaucagcgugaccaccgagauccugccuguguccaugaccaagaccagcguggacugcaccauguacaucugcggcgauuccaccgagugcuccaaccugcugcugcaguacggcagcuucugcacccagcugaauagagcccugacagggaucgccguggaacaggacaagaacacccaagagguguucgcccaagugaagcaaaucuacaagaccccuccuaucaaggacuucggcggcuucaauuucagccagauucugcccgauccuagcaagcccagcaagcggagcuucaucgaggaccugcuguucaacaaagugacacuggccgacgccggcuucaucaagcaguauggcgauugucugggcgacauugccgccagggaucugauuugcgcccagaaguuuaacggacugacagugcugccuccucugcugaccgaugagaugaucgcccaguacacaucugcccugcuggccggcacaaucacaagcggcuggacauuuggagcuggcgccgcucugcagauccccuuugcuaugcagauggccuaccgguucaacggcaucggagugacccagaaugugcuguacgagaaccagaagcugaucgccaaccaguucaacagcgccaucggcaagauccaggacagccugagcagcacagcaagcgcccugggaaagcugcaggacguggucaaccagaaugcccaggcacugaacacccuggucaagcagcuguccuccaacuucggcgccaucagcucugugcugaacgauauccugagcagacuggacaaggucgaggccgaggugcagaucgacagacugaucacaggcagacugcagagccuccagacauacgugacccagcagcugaucagagccgccgagauuagagccucugccaaucuggccgccaccaagaugucugagugugugcugggccagagcaagagaguggacuuuugcggcaagggcuaccaccugaugagcuucccucagucugccccucacggcgugguguuucugcacgugacauaugugcccgcucaagagaagaauuucaccaccgcuccagccaucugccacgacggcaaagcccacuuuccuagagaaggcguguucguguccaacggcacccauugguucgugacacagcggaacuucuacgagccccagaucaucaccaccgacaacaccuucgugucuggcaacugcgacguugugaucggcauugugaacaauaccguguacgacccucugcagcccgagcuggacagcuucaaagaggaacuggacaaguacuuuaagaaccacacaagccccgacguggaccugggcgauaucagcggaaucaaugccagcgucgugaacauccagaaagagaucgaccggcugaacgagguggccaagaaucugaacgagagccugaucgaccugcaagaacuggggaaguacgagcaguacaucaaguggcccugguacaucuggcugggcuuuaucgccggacugauugccaucgugauggucacaaucaugcuguguugcaugaccagcugcuguagcugccugaagggcuguuguagcuguggcagcugcugcaaguucgacgaggacgauucugagcccgugcugaagggcgugaaacugcacuacaccugaggacuaguuauaagacugacuagcccgaugggccucccaacgggcccuccuccccuccuugcaccgagauuaauagaucuaaaaaaaaaaaaaaaaaaaaaaaaaaaaaaaaaaaaaaaaaaaaaaaaaaaaaaaaaaaaaaaaaaaaaaaaaaaaaaaaaaaaaaaaaaaaaaaaaaaa

SEQ ID NO: 25687 - RNA, 4011 nt, Artificial Sequence
  SARS-CoV-2/Wuhan/WIV05/2019__EPI_ISL_402128 spike protein mRNA gc mod (1-1273)(H69del_V70del_D614G)
aggagaaagcuuaccauguucguguuucuggugcugcugccccugguguccagccagugugugaaccugaccaccagaacacagcugccuccagccuacaccaacagcuucaccagaggcguguacuaccccgacaagguguucagauccagcgugcugcacucuacccaggaccuguuccugccuuucuucagcaacgugaccugguuccacgccaucuccggcaccaauggcaccaagagauucgacaaccccgugcugcccuucaacgacgggguguacuuugccagcaccgagaaguccaacaucaucagaggcuggaucuucggcaccacacuggacagcaagacccagagccugcugaucgugaacaacgccaccaacguggucaucaaagugugcgaguuccaguucugcaacgaccccuuccugggcgucuacuaccacaagaacaacaagagcuggauggaaagcgaguuccggguguacagcagcgccaacaacugcaccuucgaguacgugucccagccuuuccugauggaccuggaaggcaagcagggcaacuucaagaaccugcgcgaguucguguucaagaacaucgacggcuacuucaaaaucuacagcaagcacaccccuaucaaccucgugcgggaucugccucagggcuucucugcucuggaaccccugguggaucugcccaucggcaucaacaucacccgguuucagacacugcuggcccugcacagaagcuaccugacaccuggcgauagcagcagcggauggacagcuggugccgccgcuuacuaugugggcuaccugcagccuagaaccuuccugcugaaguacaacgagaacggcaccaucaccgacgccguggauugugcucuggauccucugagcgagacaaagugcacccugaaguccuucaccguggaaaagggcaucuaccagaccagcaacuuccgggugcagcccaccgaauccaucgugcgguuccccaauaucaccaaucugugccccuucggcgagguguucaaugccaccagauucgccucuguguacgccuggaaccggaagcggaucagcaauugcguggccgacuacuccgugcuguacaacuccgccagcuucagcaccuucaagugcuacggcguguccccuaccaagcugaacgaccugugcuucacaaacguguacgccgacagcuucgugauccggggagaugaagugcggcagauugccccuggacagacaggcaagaucgccgacuacaacuacaagcugcccgacgacuucaccggcugugugauugccuggaacagcaacaaccuggacuccaaagucggcggcaacuacaauuaccuguaccggcuguuccggaaguccaaucugaagcccuucgagcgggacaucagcaccgaaaucuaucaggccggcagcaccccuugcaacggcguggaaggcuucaacugcuacuucccacugcaguccuacggcuuucagcccacaaauggcgugggcuaucagcccuacagagugguggugcugagcuucgaacugcugcaugcuccugccacagugugcggcccuaagaaaagcaccaaucucgugaagaacaaaugcgugaacuucaacuucaacggccugaccggcaccggcgugcugacagagagcaacaagaaguuccugccauuccagcaguuuggccgggauaucgccgauaccacagacgccguuagagauccccagacacuggaaauccuggacaucaccccaugcagcuucggcggagugucugugaucaccccuggcaccaacaccagcaaucagguggcagugcuguaccagggcgugaacuguaccgaagugcccguggccauucacgccgaucagcugacaccuacauggcggguguacuccaccggcagcaauguguuucagaccagagccggcugucugaucggagccgagcacgugaacaauagcuacgagugcgacauccccaucggcgcuggcaucugugccagcuaccagacacagacaaacagccccagacgggcuagaagcguggccagccagagcaucauugccuacacaaugucucugggcgccgagaacagcguggccuacuccaacaacucuaucgcuauccccaccaacuucaccaucagcgugaccaccgagauccugccuguguccaugaccaagaccagcguggacugcaccauguacaucugcggcgauuccaccgagugcuccaaccugcugcugcaguacggcagcuucugcacccagcugaauagagcccugacagggaucgccguggaacaggacaagaacacccaagagguguucgcccaagugaagcaaaucuacaagaccccuccuaucaaggacuucggcggcuucaauuucagccagauucugcccgauccuagcaagcccagcaagcggagcuucaucgaggaccugcuguucaacaaagugacacuggccgacgccggcuucaucaagcaguauggcgauugucugggcgacauugccgccagggaucugauuugcgcccagaaguuuaacggacugacagugcugccuccucugcugaccgaugagaugaucgcccaguacacaucugcccugcuggccggcacaaucacaagcggcuggacauuuggagcuggcgccgcucugcagauccccuuugcuaugcagauggccuaccgguucaacggcaucggagugacccagaaugugcuguacgagaaccagaagcugaucgccaaccaguucaacagcgccaucggcaagauccaggacagccugagcagcacagcaagcgcccugggaaagcugcaggacguggucaaccagaaugcccaggcacugaacacccuggucaagcagcuguccuccaacuucggcgccaucagcucugugcugaacgauauccugagcagacuggacaaggucgaggccgaggugcagaucgacagacugaucacaggcagacugcagagccuccagacauacgugacccagcagcugaucagagccgccgagauuagagccucugccaaucuggccgccaccaagaugucugagugugugcugggccagagcaagagaguggacuuuugcggcaagggcuaccaccugaugagcuucccucagucugccccucacggcgugguguuucugcacgugacauaugugcccgcucaagagaagaauuucaccaccgcuccagccaucugccacgacggcaaagcccacuuuccuagagaaggcguguucguguccaacggcacccauugguucgugacacagcggaacuucuacgagccccagaucaucaccaccgacaacaccuucgugucuggcaacugcgacguugugaucggcauugugaacaauaccguguacgacccucugcagcccgagcuggacagcuucaaagaggaacuggacaaguacuuuaagaaccacacaagccccgacguggaccugggcgauaucagcggaaucaaugccagcgucgugaacauccagaaagagaucgaccggcugaacgagguggccaagaaucugaacgagagccugaucgaccugcaagaacuggggaaguacgagcaguacaucaaguggcccugguacaucuggcugggcuuuaucgccggacugauugccaucgugauggucacaaucaugcuguguugcaugaccagcugcuguagcugccugaagggcuguuguagcuguggcagcugcugcaaguucgacgaggacgauucugagcccgugcugaagggcgugaaacugcacuacaccugaggacuaguuauaagacugacuagcccgaugggccucccaacgggcccuccuccccuccuugcaccgagauuaauagaucuaaaaaaaaaaaaaaaaaaaaaaaaaaaaaaaaaaaaaaaaaaaaaaaaaaaaaaaaaaaaaaaaaaaaaaaaaaaaaaaaaaaaaaaaaaaaaaaaaaaa

SEQ ID NO: 25688 - RNA, 4017 nt, Artificial Sequence
  SARS-CoV-2/Wuhan/WIV05/2019__EPI_ISL_402128 spike protein mRNA gc mod (1-1273)(Y453F_D614G)
aggagaaagcuuaccauguucguguuucuggugcugcugccccugguguccagccagugugugaaccugaccaccagaacacagcugccuccagccuacaccaacagcuucaccagaggcguguacuaccccgacaagguguucagauccagcgugcugcacucuacccaggaccuguuccugccuuucuucagcaacgugaccugguuccacgccauccacguguccggcaccaauggcaccaagagauucgacaaccccgugcugcccuucaacgacgggguguacuuugccagcaccgagaaguccaacaucaucagaggcuggaucuucggcaccacacuggacagcaagacccagagccugcugaucgugaacaacgccaccaacguggucaucaaagugugcgaguuccaguucugcaacgaccccuuccugggcgucuacuaccacaagaacaacaagagcuggauggaaagcgaguuccggguguacagcagcgccaacaacugcaccuucgaguacgugucccagccuuuccugauggaccuggaaggcaagcagggcaacuucaagaaccugcgcgaguucguguucaagaacaucgacggcuacuucaaaaucuacagcaagcacaccccuaucaaccucgugcgggaucugccucagggcuucucugcucuggaaccccugguggaucugcccaucggcaucaacaucacccgguuucagacacugcuggcccugcacagaagcuaccugacaccuggcgauagcagcagcggauggacagcuggugccgccgcuuacuaugugggcuaccugcagccuagaaccuuccugcugaaguacaacgagaacggcaccaucaccgacgccguggauugugcucuggauccucugagcgagacaaagugcacccugaaguccuucaccguggaaaagggcaucuaccagaccagcaacuuccgggugcagcccaccgaauccaucgugcgguuccccaauaucaccaaucugugccccuucggcgagguguucaaugccaccagauucgccucuguguacgccuggaaccggaagcggaucagcaauugcguggccgacuacuccgugcuguacaacuccgccagcuucagcaccuucaagugcuacggcguguccccuaccaagcugaacgaccugugcuucacaaacguguacgccgacagcuucgugauccggggagaugaagugcggcagauugccccuggacagacaggcaagaucgccgacuacaacuacaagcugcccgacgacuucaccggcugugugauugccuggaacagcaacaaccuggacuccaaagucggcggcaacuacaauuaccuguuccggcuguuccggaaguccaaucugaagcccuucgagcgggacaucagcaccgaaaucuaucaggccggcagcaccccuugcaacggcguggaaggcuucaacugcuacuucccacugcaguccuacggcuuucagcccacaaauggcgugggcuaucagcccuacagagugguggugcugagcuucgaacugcugcaugcuccugccacagugugcggcccuaagaaaagcaccaaucucgugaagaacaaaugcgugaacuucaacuucaacggccugaccggcaccggcgugcugacagagagcaacaagaaguuccugccauuccagcaguuuggccgggauaucgccgauaccacagacgccguuagagauccccagacacuggaaauccuggacaucaccccaugcagcuucggcggagugucugugaucaccccuggcaccaacaccagcaaucagguggcagugcuguaccagggcgugaacuguaccgaagugcccguggccauucacgccgaucagcugacaccuacauggcggguguacuccaccggcagcaauguguuucagaccagagccggcugucugaucggagccgagcacgugaacaauagcuacgagugcgacauccccaucggcgcuggcaucugugccagcuaccagacacagacaaacagccccagacgggcuagaagcguggccagccagagcaucauugccuacacaaugucucugggcgccgagaacagcguggccuacuccaacaacucuaucgcuauccccaccaacuucaccaucagcgugaccaccgagauccugccuguguccaugaccaagaccagcguggacugcaccauguacaucugcggcgauuccaccgagugcuccaaccugcugcugcaguacggcagcuucugcacccagcugaauagagcccugacagggaucgccguggaacaggacaagaacacccaagagguguucgcccaagugaagcaaaucuacaagaccccuccuaucaaggacuucggcggcuucaauuucagccagauucugcccgauccuagcaagcccagcaagcggagcuucaucgaggaccugcuguucaacaaagugacacuggccgacgccggcuucaucaagcaguauggcgauugucugggcgacauugccgccagggaucugauuugcgcccagaaguuuaacggacugacagugcugccuccucugcugaccgaugagaugaucgcccaguacacaucugcccugcuggccggcacaaucacaagcggcuggacauuuggagcuggcgccgcucugcagauccccuuugcuaugcagauggccuaccgguucaacggcaucggagugacccagaaugugcuguacgagaaccagaagcugaucgccaaccaguucaacagcgccaucggcaagauccaggacagccugagcagcacagcaagcgcccugggaaagcugcaggacguggucaaccagaaugcccaggcacugaacacccuggucaagcagcuguccuccaacuucggcgccaucagcucugugcugaacgauauccugagcagacuggacaaggucgaggccgaggugcagaucgacagacugaucacaggcagacugcagagccuccagacauacgugacccagcagcugaucagagccgccgagauuagagccucugccaaucuggccgccaccaagaugucugagugugugcugggccagagcaagagaguggacuuuugcggcaagggcuaccaccugaugagcuucccucagucugccccucacggcgugguguuucugcacgugacauaugugcccgcucaagagaagaauuucaccaccgcuccagccaucugccacgacggcaaagcccacuuuccuagagaaggcguguucguguccaacggcacccauugguucgugacacagcggaacuucuacgagccccagaucaucaccaccgacaacaccuucgugucuggcaacugcgacguugugaucggcauugugaacaauaccguguacgacccucugcagcccgagcuggacagcuucaaagaggaacuggacaaguacuuuaagaaccacacaagccccgacguggaccugggcgauaucagcggaaucaaugccagcgucgugaacauccagaaagagaucgaccggcugaacgagguggccaagaaucugaacgagagccugaucgaccugcaagaacuggggaaguacgagcaguacaucaaguggcccugguacaucuggcugggcuuuaucgccggacugauugccaucgugauggucacaaucaugcuguguugcaugaccagcugcuguagcugccugaagggcuguuguagcuguggcagcugcugcaaguucgacgaggacgauucugagcccgugcugaagggcgugaaacugcacuacaccugaggacuaguuauaagacugacuagcccgaugggccucccaacgggcccuccuccccuccuugcaccgagauuaauagaucuaaaaaaaaaaaaaaaaaaaaaaaaaaaaaaaaaaaaaaaaaaaaaaaaaaaaaaaaaaaaaaaaaaaaaaaaaaaaaaaaaaaaaaaaaaaaaaaaaaaa

SEQ ID NO: 25689 - RNA, 4017 nt, Artificial Sequence
  SARS-CoV-2/Wuhan/WIV05/2019__EPI_ISL_402128 spike protein mRNA gc mod (1-1273)(D614G_I692V)
aggagaaagcuuaccauguucguguuucuggugcugcugccccugguguccagccagugugugaaccugaccaccagaacacagcugccuccagccuacaccaacagcuucaccagaggcguguacuaccccgacaagguguucagauccagcgugcugcacucuacccaggaccuguuccugccuuucuucagcaacgugaccugguuccacgccauccacguguccggcaccaauggcaccaagagauucgacaaccccgugcugcccuucaacgacgggguguacuuugccagcaccgagaaguccaacaucaucagaggcuggaucuucggcaccacacuggacagcaagacccagagccugcugaucgugaacaacgccaccaacguggucaucaaagugugcgaguuccaguucugcaacgaccccuuccugggcgucuacuaccacaagaacaacaagagcuggauggaaagcgaguuccggguguacagcagcgccaacaacugcaccuucgaguacgugucccagccuuuccugauggaccuggaaggcaagcagggcaacuucaagaaccugcgcgaguucguguucaagaacaucgacggcuacuucaaaaucuacagcaagcacaccccuaucaaccucgugcgggaucugccucagggcuucucugcucuggaaccccugguggaucugcccaucggcaucaacaucacccgguuucagacacugcuggcccugcacagaagcuaccugacaccuggcgauagcagcagcggauggacagcuggugccgccgcuuacuaugugggcuaccugcagccuagaaccuuccugcugaaguacaacgagaacggcaccaucaccgacgccguggauugugcucuggauccucugagcgagacaaagugcacccugaaguccuucaccguggaaaagggcaucuaccagaccagcaacuuccgggugcagcccaccgaauccaucgugcgguuccccaauaucaccaaucugugccccuucggcgagguguucaaugccaccagauucgccucuguguacgccuggaaccggaagcggaucagcaauugcguggccgacuacuccgugcuguacaacuccgccagcuucagcaccuucaagugcuacggcguguccccuaccaagcugaacgaccugugcuucacaaacguguacgccgacagcuucgugauccggggagaugaagugcggcagauugccccuggacagacaggcaagaucgccgacuacaacuacaagcugcccgacgacuucaccggcugugugauugccuggaacagcaacaaccuggacuccaaagucggcggcaacuacaauuaccuguaccggcuguuccggaaguccaaucugaagcccuucgagcgggacaucagcaccgaaaucuaucaggccggcagcaccccuugcaacggcguggaaggcuucaacugcuacuucccacugcaguccuacggcuuucagcccacaaauggcgugggcuaucagcccuacagagugguggugcugagcuucgaacugcugcaugcuccugccacagugugcggcccuaagaaaagcaccaaucucgugaagaacaaaugcgugaacuucaacuucaacggccugaccggcaccggcgugcugacagagagcaacaagaaguuccugccauuccagcaguuuggccgggauaucgccgauaccacagacgccguuagagauccccagacacuggaaauccuggacaucaccccaugcagcuucggcggagugucugugaucaccccuggcaccaacaccagcaaucagguggcagugcuguaccagggcgugaacuguaccgaagugcccguggccauucacgccgaucagcugacaccuacauggcggguguacuccaccggcagcaauguguuucagaccagagccggcugucugaucggagccgagcacgugaacaauagcuacgagugcgacauccccaucggcgcuggcaucugugccagcuaccagacacagacaaacagccccagacgggcuagaagcguggccagccagagcgugauugccuacacaaugucucugggcgccgagaacagcguggccuacuccaacaacucuaucgcuauccccaccaacuucaccaucagcgugaccaccgagauccugccuguguccaugaccaagaccagcguggacugcaccauguacaucugcggcgauuccaccgagugcuccaaccugcugcugcaguacggcagcuucugcacccagcugaauagagcccugacagggaucgccguggaacaggacaagaacacccaagagguguucgcccaagugaagcaaaucuacaagaccccuccuaucaaggacuucggcggcuucaauuucagccagauucugcccgauccuagcaagcccagcaagcggagcuucaucgaggaccugcuguucaacaaagugacacuggccgacgccggcuucaucaagcaguauggcgauugucugggcgacauugccgccagggaucugauuugcgcccagaaguuuaacggacugacagugcugccuccucugcugaccgaugagaugaucgcccaguacacaucugcccugcuggccggcacaaucacaagcggcuggacauuuggagcuggcgccgcucugcagauccccuuugcuaugcagauggccuaccgguucaacggcaucggagugacccagaaugugcuguacgagaaccagaagcugaucgccaaccaguucaacagcgccaucggcaagauccaggacagccugagcagcacagcaagcgcccugggaaagcugcaggacguggucaaccagaaugcccaggcacugaacacccuggucaagcagcuguccuccaacuucggcgccaucagcucugugcugaacgauauccugagcagacuggacaaggucgaggccgaggugcagaucgacagacugaucacaggcagacugcagagccuccagacauacgugacccagcagcugaucagagccgccgagauuagagccucugccaaucuggccgccaccaagaugucugagugugugcugggccagagcaagagaguggacuuuugcggcaagggcuaccaccugaugagcuucccucagucugccccucacggcgugguguuucugcacgugacauaugugcccgcucaagagaagaauuucaccaccgcuccagccaucugccacgacggcaaagcccacuuuccuagagaaggcguguucguguccaacggcacccauugguucgugacacagcggaacuucuacgagccccagaucaucaccaccgacaacaccuucgugucuggcaacugcgacguugugaucggcauugugaacaauaccguguacgacccucugcagcccgagcuggacagcuucaaagaggaacuggacaaguacuuuaagaaccacacaagccccgacguggaccugggcgauaucagcggaaucaaugccagcgucgugaacauccagaaagagaucgaccggcugaacgagguggccaagaaucugaacgagagccugaucgaccugcaagaacuggggaaguacgagcaguacaucaaguggcccugguacaucuggcugggcuuuaucgccggacugauugccaucgugauggucacaaucaugcuguguugcaugaccagcugcuguagcugccugaagggcuguuguagcuguggcagcugcugcaaguucgacgaggacgauucugagcccgugcugaagggcgugaaacugcacuacaccugaggacuaguuauaagacugacuagcccgaugggccucccaacgggcccuccuccccuccuugcaccgagauuaauagaucuaaaaaaaaaaaaaaaaaaaaaaaaaaaaaaaaaaaaaaaaaaaaaaaaaaaaaaaaaaaaaaaaaaaaaaaaaaaaaaaaaaaaaaaaaaaaaaaaaaaa

SEQ ID NO: 25690 - RNA, 4017 nt, Artificial Sequence
  SARS-CoV-2/Wuhan/WIV05/2019__EPI_ISL_402128 spike protein mRNA gc mod (1-1273)(D614G_M1229I)
aggagaaagcuuaccauguucguguuucuggugcugcugccccugguguccagccagugugugaaccugaccaccagaacacagcugccuccagccuacaccaacagcuucaccagaggcguguacuaccccgacaagguguucagauccagcgugcugcacucuacccaggaccuguuccugccuuucuucagcaacgugaccugguuccacgccauccacguguccggcaccaauggcaccaagagauucgacaaccccgugcugcccuucaacgacgggguguacuuugccagcaccgagaaguccaacaucaucagaggcuggaucuucggcaccacacuggacagcaagacccagagccugcugaucgugaacaacgccaccaacguggucaucaaagugugcgaguuccaguucugcaacgaccccuuccugggcgucuacuaccacaagaacaacaagagcuggauggaaagcgaguuccggguguacagcagcgccaacaacugcaccuucgaguacgugucccagccuuuccugauggaccuggaaggcaagcagggcaacuucaagaaccugcgcgaguucguguucaagaacaucgacggcuacuucaaaaucuacagcaagcacaccccuaucaaccucgugcgggaucugccucagggcuucucugcucuggaaccccugguggaucugcccaucggcaucaacaucacccgguuucagacacugcuggcccugcacagaagcuaccugacaccuggcgauagcagcagcggauggacagcuggugccgccgcuuacuaugugggcuaccugcagccuagaaccuuccugcugaaguacaacgagaacggcaccaucaccgacgccguggauugugcucuggauccucugagcgagacaaagugcacccugaaguccuucaccguggaaaagggcaucuaccagaccagcaacuuccgggugcagcccaccgaauccaucgugcgguuccccaauaucaccaaucugugccccuucggcgagguguucaaugccaccagauucgccucuguguacgccuggaaccggaagcggaucagcaauugcguggccgacuacuccgugcuguacaacuccgccagcuucagcaccuucaagugcuacggcguguccccuaccaagcugaacgaccugugcuucacaaacguguacgccgacagcuucgugauccggggagaugaagugcggcagauugccccuggacagacaggcaagaucgccgacuacaacuacaagcugcccgacgacuucaccggcugugugauugccuggaacagcaacaaccuggacuccaaagucggcggcaacuacaauuaccuguaccggcuguuccggaaguccaaucugaagcccuucgagcgggacaucagcaccgaaaucuaucaggccggcagcaccccuugcaacggcguggaaggcuucaacugcuacuucccacugcaguccuacggcuuucagcccacaaauggcgugggcuaucagcccuacagagugguggugcugagcuucgaacugcugcaugcuccugccacagugugcggcccuaagaaaagcaccaaucucgugaagaacaaaugcgugaacuucaacuucaacggccugaccggcaccggcgugcugacagagagcaacaagaaguuccugccauuccagcaguuuggccgggauaucgccgauaccacagacgccguuagagauccccagacacuggaaauccuggacaucaccccaugcagcuucggcggagugucugugaucaccccuggcaccaacaccagcaaucagguggcagugcuguaccagggcgugaacuguaccgaagugcccguggccauucacgccgaucagcugacaccuacauggcggguguacuccaccggcagcaauguguuucagaccagagccggcugucugaucggagccgagcacgugaacaauagcuacgagugcgacauccccaucggcgcuggcaucugugccagcuaccagacacagacaaacagccccagacgggcuagaagcguggccagccagagcaucauugccuacacaaugucucugggcgccgagaacagcguggccuacuccaacaacucuaucgcuauccccaccaacuucaccaucagcgugaccaccgagauccugccuguguccaugaccaagaccagcguggacugcaccauguacaucugcggcgauuccaccgagugcuccaaccugcugcugcaguacggcagcuucugcacccagcugaauagagcccugacagggaucgccguggaacaggacaagaacacccaagagguguucgcccaagugaagcaaaucuacaagaccccuccuaucaaggacuucggcggcuucaauuucagccagauucugcccgauccuagcaagcccagcaagcggagcuucaucgaggaccugcuguucaacaaagugacacuggccgacgccggcuucaucaagcaguauggcgauugucugggcgacauugccgccagggaucugauuugcgcccagaaguuuaacggacugacagugcugccuccucugcugaccgaugagaugaucgcccaguacacaucugcccugcuggccggcacaaucacaagcggcuggacauuuggagcuggcgccgcucugcagauccccuuugcuaugcagauggccuaccgguucaacggcaucggagugacccagaaugugcuguacgagaaccagaagcugaucgccaaccaguucaacagcgccaucggcaagauccaggacagccugagcagcacagcaagcgcccugggaaagcugcaggacguggucaaccagaaugcccaggcacugaacacccuggucaagcagcuguccuccaacuucggcgccaucagcucugugcugaacgauauccugagcagacuggacaaggucgaggccgaggugcagaucgacagacugaucacaggcagacugcagagccuccagacauacgugacccagcagcugaucagagccgccgagauuagagccucugccaaucuggccgccaccaagaugucugagugugugcugggccagagcaagagaguggacuuuugcggcaagggcuaccaccugaugagcuucccucagucugccccucacggcgugguguuucugcacgugacauaugugcccgcucaagagaagaauuucaccaccgcuccagccaucugccacgacggcaaagcccacuuuccuagagaaggcguguucguguccaacggcacccauugguucgugacacagcggaacuucuacgagccccagaucaucaccaccgacaacaccuucgugucuggcaacugcgacguugugaucggcauugugaacaauaccguguacgacccucugcagcccgagcuggacagcuucaaagaggaacuggacaaguacuuuaagaaccacacaagccccgacguggaccugggcgauaucagcggaaucaaugccagcgucgugaacauccagaaagagaucgaccggcugaacgagguggccaagaaucugaacgagagccugaucgaccugcaagaacuggggaaguacgagcaguacaucaaguggcccugguacaucuggcugggcuuuaucgccggacugauugccaucgugaucgucacaaucaugcuguguugcaugaccagcugcuguagcugccugaagggcuguuguagcuguggcagcugcugcaaguucgacgaggacgauucugagcccgugcugaagggcgugaaacugcacuacaccugaggacuaguuauaagacugacuagcccgaugggccucccaacgggcccuccuccccuccuugcaccgagauuaauagaucuaaaaaaaaaaaaaaaaaaaaaaaaaaaaaaaaaaaaaaaaaaaaaaaaaaaaaaaaaaaaaaaaaaaaaaaaaaaaaaaaaaaaaaaaaaaaaaaaaaaa

SEQ ID NO: 25691 - RNA, 4011 nt, Artificial Sequence
  SARS-CoV-2/Wuhan/WIV05/2019__EPI_ISL_402128 spike protein mRNA gc mod (1-1273)(H69del_V70del_A222V_Y453F_S477N_D614G_I692V)
aggagaaagcuuaccauguucguguuucuggugcugcugccccugguguccagccagugugugaaccugaccaccagaacacagcugccuccagccuacaccaacagcuucaccagaggcguguacuaccccgacaagguguucagauccagcgugcugcacucuacccaggaccuguuccugccuuucuucagcaacgugaccugguuccacgccaucuccggcaccaauggcaccaagagauucgacaaccccgugcugcccuucaacgacgggguguacuuugccagcaccgagaaguccaacaucaucagaggcuggaucuucggcaccacacuggacagcaagacccagagccugcugaucgugaacaacgccaccaacguggucaucaaagugugcgaguuccaguucugcaacgaccccuuccugggcgucuacuaccacaagaacaacaagagcuggauggaaagcgaguuccggguguacagcagcgccaacaacugcaccuucgaguacgugucccagccuuuccugauggaccuggaaggcaagcagggcaacuucaagaaccugcgcgaguucguguucaagaacaucgacggcuacuucaaaaucuacagcaagcacaccccuaucaaccucgugcgggaucugccucagggcuucucugugcuggaaccccugguggaucugcccaucggcaucaacaucacccgguuucagacacugcuggcccugcacagaagcuaccugacaccuggcgauagcagcagcggauggacagcuggugccgccgcuuacuaugugggcuaccugcagccuagaaccuuccugcugaaguacaacgagaacggcaccaucaccgacgccguggauugugcucuggauccucugagcgagacaaagugcacccugaaguccuucaccguggaaaagggcaucuaccagaccagcaacuuccgggugcagcccaccgaauccaucgugcgguuccccaauaucaccaaucugugccccuucggcgagguguucaaugccaccagauucgccucuguguacgccuggaaccggaagcggaucagcaauugcguggccgacuacuccgugcuguacaacuccgccagcuucagcaccuucaagugcuacggcguguccccuaccaagcugaacgaccugugcuucacaaacguguacgccgacagcuucgugauccggggagaugaagugcggcagauugccccuggacagacaggcaagaucgccgacuacaacuacaagcugcccgacgacuucaccggcugugugauugccuggaacagcaacaaccuggacuccaaagucggcggcaacuacaauuaccuguuccggcuguuccggaaguccaaucugaagcccuucgagcgggacaucagcaccgaaaucuaucaggccggcaacaccccuugcaacggcguggaaggcuucaacugcuacuucccacugcaguccuacggcuuucagcccacaaauggcgugggcuaucagcccuacagagugguggugcugagcuucgaacugcugcaugcuccugccacagugugcggcccuaagaaaagcaccaaucucgugaagaacaaaugcgugaacuucaacuucaacggccugaccggcaccggcgugcugacagagagcaacaagaaguuccugccauuccagcaguuuggccgggauaucgccgauaccacagacgccguuagagauccccagacacuggaaauccuggacaucaccccaugcagcuucggcggagugucugugaucaccccuggcaccaacaccagcaaucagguggcagugcuguaccagggcgugaacuguaccgaagugcccguggccauucacgccgaucagcugacaccuacauggcggguguacuccaccggcagcaauguguuucagaccagagccggcugucugaucggagccgagcacgugaacaauagcuacgagugcgacauccccaucggcgcuggcaucugugccagcuaccagacacagacaaacagccccagacgggcuagaagcguggccagccagagcgugauugccuacacaaugucucugggcgccgagaacagcguggccuacuccaacaacucuaucgcuauccccaccaacuucaccaucagcgugaccaccgagauccugccuguguccaugaccaagaccagcguggacugcaccauguacaucugcggcgauuccaccgagugcuccaaccugcugcugcaguacggcagcuucugcacccagcugaauagagcccugacagggaucgccguggaacaggacaagaacacccaagagguguucgcccaagugaagcaaaucuacaagaccccuccuaucaaggacuucggcggcuucaauuucagccagauucugcccgauccuagcaagcccagcaagcggagcuucaucgaggaccugcuguucaacaaagugacacuggccgacgccggcuucaucaagcaguauggcgauugucugggcgacauugccgccagggaucugauuugcgcccagaaguuuaacggacugacagugcugccuccucugcugaccgaugagaugaucgcccaguacacaucugcccugcuggccggcacaaucacaagcggcuggacauuuggagcuggcgccgcucugcagauccccuuugcuaugcagauggccuaccgguucaacggcaucggagugacccagaaugugcuguacgagaaccagaagcugaucgccaaccaguucaacagcgccaucggcaagauccaggacagccugagcagcacagcaagcgcccugggaaagcugcaggacguggucaaccagaaugcccaggcacugaacacccuggucaagcagcuguccuccaacuucggcgccaucagcucugugcugaacgauauccugagcagacuggacaaggucgaggccgaggugcagaucgacagacugaucacaggcagacugcagagccuccagacauacgugacccagcagcugaucagagccgccgagauuagagccucugccaaucuggccgccaccaagaugucugagugugugcugggccagagcaagagaguggacuuuugcggcaagggcuaccaccugaugagcuucccucagucugccccucacggcgugguguuucugcacgugacauaugugcccgcucaagagaagaauuucaccaccgcuccagccaucugccacgacggcaaagcccacuuuccuagagaaggcguguucguguccaacggcacccauugguucgugacacagcggaacuucuacgagccccagaucaucaccaccgacaacaccuucgugucuggcaacugcgacguugugaucggcauugugaacaauaccguguacgacccucugcagcccgagcuggacagcuucaaagaggaacuggacaaguacuuuaagaaccacacaagccccgacguggaccugggcgauaucagcggaaucaaugccagcgucgugaacauccagaaagagaucgaccggcugaacgagguggccaagaaucugaacgagagccugaucgaccugcaagaacuggggaaguacgagcaguacaucaaguggcccugguacaucuggcugggcuuuaucgccggacugauugccaucgugauggucacaaucaugcuguguugcaugaccagcugcuguagcugccugaagggcuguuguagcuguggcagcugcugcaaguucgacgaggacgauucugagcccgugcugaagggcgugaaacugcacuacaccugaggacuaguuauaagacugacuagcccgaugggccucccaacgggcccuccuccccuccuugcaccgagauuaauagaucuaaaaaaaaaaaaaaaaaaaaaaaaaaaaaaaaaaaaaaaaaaaaaaaaaaaaaaaaaaaaaaaaaaaaaaaaaaaaaaaaaaaaaaaaaaaaaaaaaaaa

SEQ ID NO: 25692 - RNA, 4011 nt, Artificial Sequence
  SARS-CoV-2/Wuhan/WIV05/2019__EPI_ISL_402128 spike protein mRNA gc mod (1-1273)(H69del_V70del_Y453F_D614G_I692V_M1229I)
aggagaaagcuuaccauguucguguuucuggugcugcugccccugguguccagccagugugugaaccugaccaccagaacacagcugccuccagccuacaccaacagcuucaccagaggcguguacuaccccgacaagguguucagauccagcgugcugcacucuacccaggaccuguuccugccuuucuucagcaacgugaccugguuccacgccaucuccggcaccaauggcaccaagagauucgacaaccccgugcugcccuucaacgacgggguguacuuugccagcaccgagaaguccaacaucaucagaggcuggaucuucggcaccacacuggacagcaagacccagagccugcugaucgugaacaacgccaccaacguggucaucaaagugugcgaguuccaguucugcaacgaccccuuccugggcgucuacuaccacaagaacaacaagagcuggauggaaagcgaguuccggguguacagcagcgccaacaacugcaccuucgaguacgugucccagccuuuccugauggaccuggaaggcaagcagggcaacuucaagaaccugcgcgaguucguguucaagaacaucgacggcuacuucaaaaucuacagcaagcacaccccuaucaaccucgugcgggaucugccucagggcuucucugcucuggaaccccugguggaucugcccaucggcaucaacaucacccgguuucagacacugcuggcccugcacagaagcuaccugacaccuggcgauagcagcagcggauggacagcuggugccgccgcuuacuaugugggcuaccugcagccuagaaccuuccugcugaaguacaacgagaacggcaccaucaccgacgccguggauugugcucuggauccucugagcgagacaaagugcacccugaaguccuucaccguggaaaagggcaucuaccagaccagcaacuuccgggugcagcccaccgaauccaucgugcgguuccccaauaucaccaaucugugccccuucggcgagguguucaaugccaccagauucgccucuguguacgccuggaaccggaagcggaucagcaauugcguggccgacuacuccgugcuguacaacuccgccagcuucagcaccuucaagugcuacggcguguccccuaccaagcugaacgaccugugcuucacaaacguguacgccgacagcuucgugauccggggagaugaagugcggcagauugccccuggacagacaggcaagaucgccgacuacaacuacaagcugcccgacgacuucaccggcugugugauugccuggaacagcaacaaccuggacuccaaagucggcggcaacuacaauuaccuguuccggcuguuccggaaguccaaucugaagcccuucgagcgggacaucagcaccgaaaucuaucaggccggcagcaccccuugcaacggcguggaaggcuucaacugcuacuucccacugcaguccuacggcuuucagcccacaaauggcgugggcuaucagcccuacagagugguggugcugagcuucgaacugcugcaugcuccugccacagugugcggcccuaagaaaagcaccaaucucgugaagaacaaaugcgugaacuucaacuucaacggccugaccggcaccggcgugcugacagagagcaacaagaaguuccugccauuccagcaguuuggccgggauaucgccgauaccacagacgccguuagagauccccagacacuggaaauccuggacaucaccccaugcagcuucggcggagugucugugaucaccccuggcaccaacaccagcaaucagguggcagugcuguaccagggcgugaacuguaccgaagugcccguggccauucacgccgaucagcugacaccuacauggcggguguacuccaccggcagcaauguguuucagaccagagccggcugucugaucggagccgagcacgugaacaauagcuacgagugcgacauccccaucggcgcuggcaucugugccagcuaccagacacagacaaacagccccagacgggcuagaagcguggccagccagagcgugauugccuacacaaugucucugggcgccgagaacagcguggccuacuccaacaacucuaucgcuauccccaccaacuucaccaucagcgugaccaccgagauccugccuguguccaugaccaagaccagcguggacugcaccauguacaucugcggcgauuccaccgagugcuccaaccugcugcugcaguacggcagcuucugcacccagcugaauagagcccugacagggaucgccguggaacaggacaagaacacccaagagguguucgcccaagugaagcaaaucuacaagaccccuccuaucaaggacuucggcggcuucaauuucagccagauucugcccgauccuagcaagcccagcaagcggagcuucaucgaggaccugcuguucaacaaagugacacuggccgacgccggcuucaucaagcaguauggcgauugucugggcgacauugccgccagggaucugauuugcgcccagaaguuuaacggacugacagugcugccuccucugcugaccgaugagaugaucgcccaguacacaucugcccugcuggccggcacaaucacaagcggcuggacauuuggagcuggcgccgcucugcagauccccuuugcuaugcagauggccuaccgguucaacggcaucggagugacccagaaugugcuguacgagaaccagaagcugaucgccaaccaguucaacagcgccaucggcaagauccaggacagccugagcagcacagcaagcgcccugggaaagcugcaggacguggucaaccagaaugcccaggcacugaacacccuggucaagcagcuguccuccaacuucggcgccaucagcucugugcugaacgauauccugagcagacuggacaaggucgaggccgaggugcagaucgacagacugaucacaggcagacugcagagccuccagacauacgugacccagcagcugaucagagccgccgagauuagagccucugccaaucuggccgccaccaagaugucugagugugugcugggccagagcaagagaguggacuuuugcggcaagggcuaccaccugaugagcuucccucagucugccccucacggcgugguguuucugcacgugacauaugugcccgcucaagagaagaauuucaccaccgcuccagccaucugccacgacggcaaagcccacuuuccuagagaaggcguguucguguccaacggcacccauugguucgugacacagcggaacuucuacgagccccagaucaucaccaccgacaacaccuucgugucuggcaacugcgacguugugaucggcauugugaacaauaccguguacgacccucugcagcccgagcuggacagcuucaaagaggaacuggacaaguacuuuaagaaccacacaagccccgacguggaccugggcgauaucagcggaaucaaugccagcgucgugaacauccagaaagagaucgaccggcugaacgagguggccaagaaucugaacgagagccugaucgaccugcaagaacuggggaaguacgagcaguacaucaaguggcccugguacaucuggcugggcuuuaucgccggacugauugccaucgugaucgucacaaucaugcuguguugcaugaccagcugcuguagcugccugaagggcuguuguagcuguggcagcugcugcaaguucgacgaggacgauucugagcccgugcugaagggcgugaaacugcacuacaccugaggacuaguuauaagacugacuagcccgaugggccucccaacgggcccuccuccccuccuugcaccgagauuaauagaucuaaaaaaaaaaaaaaaaaaaaaaaaaaaaaaaaaaaaaaaaaaaaaaaaaaaaaaaaaaaaaaaaaaaaaaaaaaaaaaaaaaaaaaaaaaaaaaaaaaaa

SEQ ID NO: 25693 - RNA, 4008 nt, Artificial Sequence
  SARS-CoV-2/Wuhan/WIV05/2019__EPI_ISL_402128 spike protein mRNA gc mod (1-1273)(H69del_V70del_Y144del_N501Y_A570D_D614G_P681H_T716I_S982 A_D1118H)
aggagaaagcuuaccauguucguguuucuggugcugcugccccugguguccagccagugugugaaccugaccaccagaacacagcugccuccagccuacaccaacagcuucaccagaggcguguacuaccccgacaagguguucagauccagcgugcugcacucuacccaggaccuguuccugccuuucuucagcaacgugaccugguuccacgccaucuccggcaccaauggcaccaagagauucgacaaccccgugcugcccuucaacgacgggguguacuuugccagcaccgagaaguccaacaucaucagaggcuggaucuucggcaccacacuggacagcaagacccagagccugcugaucgugaacaacgccaccaacguggucaucaaagugugcgaguuccaguucugcaacgaccccuuccugggcgucuaccacaagaacaacaagagcuggauggaaagcgaguuccggguguacagcagcgccaacaacugcaccuucgaguacgugucccagccuuuccugauggaccuggaaggcaagcagggcaacuucaagaaccugcgcgaguucguguucaagaacaucgacggcuacuucaaaaucuacagcaagcacaccccuaucaaccucgugcgggaucugccucagggcuucucugcucuggaaccccugguggaucugcccaucggcaucaacaucacccgguuucagacacugcuggcccugcacagaagcuaccugacaccuggcgauagcagcagcggauggacagcuggugccgccgcuuacuaugugggcuaccugcagccuagaaccuuccugcugaaguacaacgagaacggcaccaucaccgacgccguggauugugcucuggauccucugagcgagacaaagugcacccugaaguccuucaccguggaaaagggcaucuaccagaccagcaacuuccgggugcagcccaccgaauccaucgugcgguuccccaauaucaccaaucugugccccuucggcgagguguucaaugccaccagauucgccucuguguacgccuggaaccggaagcggaucagcaauugcguggccgacuacuccgugcuguacaacuccgccagcuucagcaccuucaagugcuacggcguguccccuaccaagcugaacgaccugugcuucacaaacguguacgccgacagcuucgugauccggggagaugaagugcggcagauugccccuggacagacaggcaagaucgccgacuacaacuacaagcugcccgacgacuucaccggcugugugauugccuggaacagcaacaaccuggacuccaaagucggcggcaacuacaauuaccuguaccggcuguuccggaaguccaaucugaagcccuucgagcgggacaucagcaccgaaaucuaucaggccggcagcaccccuugcaacggcguggaaggcuucaacugcuacuucccacugcaguccuacggcuuucagcccacauacggcgugggcuaucagcccuacagagugguggugcugagcuucgaacugcugcaugcuccugccacagugugcggcccuaagaaaagcaccaaucucgugaagaacaaaugcgugaacuucaacuucaacggccugaccggcaccggcgugcugacagagagcaacaagaaguuccugccauuccagcaguuuggccgggauaucgacgauaccacagacgccguuagagauccccagacacuggaaauccuggacaucaccccaugcagcuucggcggagugucugugaucaccccuggcaccaacaccagcaaucagguggcagugcuguaccagggcgugaacuguaccgaagugcccguggccauucacgccgaucagcugacaccuacauggcggguguacuccaccggcagcaauguguuucagaccagagccggcugucugaucggagccgagcacgugaacaauagcuacgagugcgacauccccaucggcgcuggcaucugugccagcuaccagacacagacaaacagccacagacgggcuagaagcguggccagccagagcaucauugccuacacaaugucucugggcgccgagaacagcguggccuacuccaacaacucuaucgcuauccccaucaacuucaccaucagcgugaccaccgagauccugccuguguccaugaccaagaccagcguggacugcaccauguacaucugcggcgauuccaccgagugcuccaaccugcugcugcaguacggcagcuucugcacccagcugaauagagcccugacagggaucgccguggaacaggacaagaacacccaagagguguucgcccaagugaagcaaaucuacaagaccccuccuaucaaggacuucggcggcuucaauuucagccagauucugcccgauccuagcaagcccagcaagcggagcuucaucgaggaccugcuguucaacaaagugacacuggccgacgccggcuucaucaagcaguauggcgauugucugggcgacauugccgccagggaucugauuugcgcccagaaguuuaacggacugacagugcugccuccucugcugaccgaugagaugaucgcccaguacacaucugcccugcuggccggcacaaucacaagcggcuggacauuuggagcuggcgccgcucugcagauccccuuugcuaugcagauggccuaccgguucaacggcaucggagugacccagaaugugcuguacgagaaccagaagcugaucgccaaccaguucaacagcgccaucggcaagauccaggacagccugagcagcacagcaagcgcccugggaaagcugcaggacguggucaaccagaaugcccaggcacugaacacccuggucaagcagcuguccuccaacuucggcgccaucagcucugugcugaacgauauccuggccagacuggacaaggucgaggccgaggugcagaucgacagacugaucacaggcagacugcagagccuccagacauacgugacccagcagcugaucagagccgccgagauuagagccucugccaaucuggccgccaccaagaugucugagugugugcugggccagagcaagagaguggacuuuugcggcaagggcuaccaccugaugagcuucccucagucugccccucacggcgugguguuucugcacgugacauaugugcccgcucaagagaagaauuucaccaccgcuccagccaucugccacgacggcaaagcccacuuuccuagagaaggcguguucguguccaacggcacccauugguucgugacacagcggaacuucuacgagccccagaucaucaccacccacaacaccuucgugucuggcaacugcgacguugugaucggcauugugaacaauaccguguacgacccucugcagcccgagcuggacagcuucaaagaggaacuggacaaguacuuuaagaaccacacaagccccgacguggaccugggcgauaucagcggaaucaaugccagcgucgugaacauccagaaagagaucgaccggcugaacgagguggccaagaaucugaacgagagccugaucgaccugcaagaacuggggaaguacgagcaguacaucaaguggcccugguacaucuggcugggcuuuaucgccggacugauugccaucgugauggucacaaucaugcuguguugcaugaccagcugcuguagcugccugaagggcuguuguagcuguggcagcugcugcaaguucgacgaggacgauucugagcccgugcugaagggcgugaaacugcacuacaccugaggacuaguuauaagacugacuagcccgaugggccucccaacgggcccuccuccccuccuugcaccgagauuaauagaucuaaaaaaaaaaaaaaaaaaaaaaaaaaaaaaaaaaaaaaaaaaaaaaaaaaaaaaaaaaaaaaaaaaaaaaaaaaaaaaaaaaaaaaaaaaaaaaaaaaaa

SEQ ID NO: 25694 - RNA, 4017 nt, Artificial Sequence
  SARS-CoV-2/Wuhan/WIV05/2019__EPI_ISL_402128 spike protein mRNA gc mod (1-1273)(K417N_E484K_N501Y_D614G)
aggagaaagcuuaccauguucguguuucuggugcugcugccccugguguccagccagugugugaaccugaccaccagaacacagcugccuccagccuacaccaacagcuucaccagaggcguguacuaccccgacaagguguucagauccagcgugcugcacucuacccaggaccuguuccugccuuucuucagcaacgugaccugguuccacgccauccacguguccggcaccaauggcaccaagagauucgacaaccccgugcugcccuucaacgacgggguguacuuugccagcaccgagaaguccaacaucaucagaggcuggaucuucggcaccacacuggacagcaagacccagagccugcugaucgugaacaacgccaccaacguggucaucaaagugugcgaguuccaguucugcaacgaccccuuccugggcgucuacuaccacaagaacaacaagagcuggauggaaagcgaguuccggguguacagcagcgccaacaacugcaccuucgaguacgugucccagccuuuccugauggaccuggaaggcaagcagggcaacuucaagaaccugcgcgaguucguguucaagaacaucgacggcuacuucaaaaucuacagcaagcacaccccuaucaaccucgugcgggaucugccucagggcuucucugcucuggaaccccugguggaucugcccaucggcaucaacaucacccgguuucagacacugcuggcccugcacagaagcuaccugacaccuggcgauagcagcagcggauggacagcuggugccgccgcuuacuaugugggcuaccugcagccuagaaccuuccugcugaaguacaacgagaacggcaccaucaccgacgccguggauugugcucuggauccucugagcgagacaaagugcacccugaaguccuucaccguggaaaagggcaucuaccagaccagcaacuuccgggugcagcccaccgaauccaucgugcgguuccccaauaucaccaaucugugccccuucggcgagguguucaaugccaccagauucgccucuguguacgccuggaaccggaagcggaucagcaauugcguggccgacuacuccgugcuguacaacuccgccagcuucagcaccuucaagugcuacggcguguccccuaccaagcugaacgaccugugcuucacaaacguguacgccgacagcuucgugauccggggagaugaagugcggcagauugccccuggacagacaggcaacaucgccgacuacaacuacaagcugcccgacgacuucaccggcugugugauugccuggaacagcaacaaccuggacuccaaagucggcggcaacuacaauuaccuguaccggcuguuccggaaguccaaucugaagcccuucgagcgggacaucagcaccgaaaucuaucaggccggcagcaccccuugcaacggcgugaagggcuucaacugcuacuucccacugcaguccuacggcuuucagcccacauacggcgugggcuaucagcccuacagagugguggugcugagcuucgaacugcugcaugcuccugccacagugugcggcccuaagaaaagcaccaaucucgugaagaacaaaugcgugaacuucaacuucaacggccugaccggcaccggcgugcugacagagagcaacaagaaguuccugccauuccagcaguuuggccgggauaucgccgauaccacagacgccguuagagauccccagacacuggaaauccuggacaucaccccaugcagcuucggcggagugucugugaucaccccuggcaccaacaccagcaaucagguggcagugcuguaccagggcgugaacuguaccgaagugcccguggccauucacgccgaucagcugacaccuacauggcggguguacuccaccggcagcaauguguuucagaccagagccggcugucugaucggagccgagcacgugaacaauagcuacgagugcgacauccccaucggcgcuggcaucugugccagcuaccagacacagacaaacagccccagacgggcuagaagcguggccagccagagcaucauugccuacacaaugucucugggcgccgagaacagcguggccuacuccaacaacucuaucgcuauccccaccaacuucaccaucagcgugaccaccgagauccugccuguguccaugaccaagaccagcguggacugcaccauguacaucugcggcgauuccaccgagugcuccaaccugcugcugcaguacggcagcuucugcacccagcugaauagagcccugacagggaucgccguggaacaggacaagaacacccaagagguguucgcccaagugaagcaaaucuacaagaccccuccuaucaaggacuucggcggcuucaauuucagccagauucugcccgauccuagcaagcccagcaagcggagcuucaucgaggaccugcuguucaacaaagugacacuggccgacgccggcuucaucaagcaguauggcgauugucugggcgacauugccgccagggaucugauuugcgcccagaaguuuaacggacugacagugcugccuccucugcugaccgaugagaugaucgcccaguacacaucugcccugcuggccggcacaaucacaagcggcuggacauuuggagcuggcgccgcucugcagauccccuuugcuaugcagauggccuaccgguucaacggcaucggagugacccagaaugugcuguacgagaaccagaagcugaucgccaaccaguucaacagcgccaucggcaagauccaggacagccugagcagcacagcaagcgcccugggaaagcugcaggacguggucaaccagaaugcccaggcacugaacacccuggucaagcagcuguccuccaacuucggcgccaucagcucugugcugaacgauauccugagcagacuggacaaggucgaggccgaggugcagaucgacagacugaucacaggcagacugcagagccuccagacauacgugacccagcagcugaucagagccgccgagauuagagccucugccaaucuggccgccaccaagaugucugagugugugcugggccagagcaagagaguggacuuuugcggcaagggcuaccaccugaugagcuucccucagucugccccucacggcgugguguuucugcacgugacauaugugcccgcucaagagaagaauuucaccaccgcuccagccaucugccacgacggcaaagcccacuuuccuagagaaggcguguucguguccaacggcacccauugguucgugacacagcggaacuucuacgagccccagaucaucaccaccgacaacaccuucgugucuggcaacugcgacguugugaucggcauugugaacaauaccguguacgacccucugcagcccgagcuggacagcuucaaagaggaacuggacaaguacuuuaagaaccacacaagccccgacguggaccugggcgauaucagcggaaucaaugccagcgucgugaacauccagaaagagaucgaccggcugaacgagguggccaagaaucugaacgagagccugaucgaccugcaagaacuggggaaguacgagcaguacaucaaguggcccugguacaucuggcugggcuuuaucgccggacugauugccaucgugauggucacaaucaugcuguguugcaugaccagcugcuguagcugccugaagggcuguuguagcuguggcagcugcugcaaguucgacgaggacgauucugagcccgugcugaagggcgugaaacugcacuacaccugaggacuaguuauaagacugacuagcccgaugggccucccaacgggcccuccuccccuccuugcaccgagauuaauagaucuaaaaaaaaaaaaaaaaaaaaaaaaaaaaaaaaaaaaaaaaaaaaaaaaaaaaaaaaaaaaaaaaaaaaaaaaaaaaaaaaaaaaaaaaaaaaaaaaaaaa

SEQ ID NO: 25695 - RNA, 4008 nt, Artificial Sequence
  SARS-CoV-2/Wuhan/WIV05/2019__EPI_ISL_402128 spike protein mRNA gc mod (1-1273)(L18F_D80A_D215G_L242del_A243del_L244del_R246I_K417N_E484 K_N501Y_D614G_A701V)
aggagaaagcuuaccauguucguguuucuggugcugcugccccugguguccagccagugugugaacuucaccaccagaacacagcugccuccagccuacaccaacagcuucaccagaggcguguacuaccccgacaagguguucagauccagcgugcugcacucuacccaggaccuguuccugccuuucuucagcaacgugaccugguuccacgccauccacguguccggcaccaauggcaccaagagauucgccaaccccgugcugcccuucaacgacgggguguacuuugccagcaccgagaaguccaacaucaucagaggcuggaucuucggcaccacacuggacagcaagacccagagccugcugaucgugaacaacgccaccaacguggucaucaaagugugcgaguuccaguucugcaacgaccccuuccugggcgucuacuaccacaagaacaacaagagcuggauggaaagcgaguuccggguguacagcagcgccaacaacugcaccuucgaguacgugucccagccuuuccugauggaccuggaaggcaagcagggcaacuucaagaaccugcgcgaguucguguucaagaacaucgacggcuacuucaaaaucuacagcaagcacaccccuaucaaccucgugcggggccugccucagggcuucucugcucuggaaccccugguggaucugcccaucggcaucaacaucacccgguuucagacacugcacaucagcuaccugacaccuggcgauagcagcagcggauggacagcuggugccgccgcuuacuaugugggcuaccugcagccuagaaccuuccugcugaaguacaacgagaacggcaccaucaccgacgccguggauugugcucuggauccucugagcgagacaaagugcacccugaaguccuucaccguggaaaagggcaucuaccagaccagcaacuuccgggugcagcccaccgaauccaucgugcgguuccccaauaucaccaaucugugccccuucggcgagguguucaaugccaccagauucgccucuguguacgccuggaaccggaagcggaucagcaauugcguggccgacuacuccgugcuguacaacuccgccagcuucagcaccuucaagugcuacggcguguccccuaccaagcugaacgaccugugcuucacaaacguguacgccgacagcuucgugauccggggagaugaagugcggcagauugccccuggacagacaggcaacaucgccgacuacaacuacaagcugcccgacgacuucaccggcugugugauugccuggaacagcaacaaccuggacuccaaagucggcggcaacuacaauuaccuguaccggcuguuccggaaguccaaucugaagcccuucgagcgggacaucagcaccgaaaucuaucaggccggcagcaccccuugcaacggcgugaagggcuucaacugcuacuucccacugcaguccuacggcuuucagcccacauacggcgugggcuaucagcccuacagagugguggugcugagcuucgaacugcugcaugcuccugccacagugugcggcccuaagaaaagcaccaaucucgugaagaacaaaugcgugaacuucaacuucaacggccugaccggcaccggcgugcugacagagagcaacaagaaguuccugccauuccagcaguuuggccgggauaucgccgauaccacagacgccguuagagauccccagacacuggaaauccuggacaucaccccaugcagcuucggcggagugucugugaucaccccuggcaccaacaccagcaaucagguggcagugcuguaccagggcgugaacuguaccgaagugcccguggccauucacgccgaucagcugacaccuacauggcggguguacuccaccggcagcaauguguuucagaccagagccggcugucugaucggagccgagcacgugaacaauagcuacgagugcgacauccccaucggcgcuggcaucugugccagcuaccagacacagacaaacagccccagacgggcuagaagcguggccagccagagcaucauugccuacacaaugucucugggcguggagaacagcguggccuacuccaacaacucuaucgcuauccccaccaacuucaccaucagcgugaccaccgagauccugccuguguccaugaccaagaccagcguggacugcaccauguacaucugcggcgauuccaccgagugcuccaaccugcugcugcaguacggcagcuucugcacccagcugaauagagcccugacagggaucgccguggaacaggacaagaacacccaagagguguucgcccaagugaagcaaaucuacaagaccccuccuaucaaggacuucggcggcuucaauuucagccagauucugcccgauccuagcaagcccagcaagcggagcuucaucgaggaccugcuguucaacaaagugacacuggccgacgccggcuucaucaagcaguauggcgauugucugggcgacauugccgccagggaucugauuugcgcccagaaguuuaacggacugacagugcugccuccucugcugaccgaugagaugaucgcccaguacacaucugcccugcuggccggcacaaucacaagcggcuggacauuuggagcuggcgccgcucugcagauccccuuugcuaugcagauggccuaccgguucaacggcaucggagugacccagaaugugcuguacgagaaccagaagcugaucgccaaccaguucaacagcgccaucggcaagauccaggacagccugagcagcacagcaagcgcccugggaaagcugcaggacguggucaaccagaaugcccaggcacugaacacccuggucaagcagcuguccuccaacuucggcgccaucagcucugugcugaacgauauccugagcagacuggacaaggucgaggccgaggugcagaucgacagacugaucacaggcagacugcagagccuccagacauacgugacccagcagcugaucagagccgccgagauuagagccucugccaaucuggccgccaccaagaugucugagugugugcugggccagagcaagagaguggacuuuugcggcaagggcuaccaccugaugagcuucccucagucugccccucacggcgugguguuucugcacgugacauaugugcccgcucaagagaagaauuucaccaccgcuccagccaucugccacgacggcaaagcccacuuuccuagagaaggcguguucguguccaacggcacccauugguucgugacacagcggaacuucuacgagccccagaucaucaccaccgacaacaccuucgugucuggcaacugcgacguugugaucggcauugugaacaauaccguguacgacccucugcagcccgagcuggacagcuucaaagaggaacuggacaaguacuuuaagaaccacacaagccccgacguggaccugggcgauaucagcggaaucaaugccagcgucgugaacauccagaaagagaucgaccggcugaacgagguggccaagaaucugaacgagagccugaucgaccugcaagaacuggggaaguacgagcaguacaucaaguggcccugguacaucuggcugggcuuuaucgccggacugauugccaucgugauggucacaaucaugcuguguugcaugaccagcugcuguagcugccugaagggcuguuguagcuguggcagcugcugcaaguucgacgaggacgauucugagcccgugcugaagggcgugaaacugcacuacaccugaggacuaguuauaagacugacuagcccgaugggccucccaacgggcccuccuccccuccuugcaccgagauuaauagaucuaaaaaaaaaaaaaaaaaaaaaaaaaaaaaaaaaaaaaaaaaaaaaaaaaaaaaaaaaaaaaaaaaaaaaaaaaaaaaaaaaaaaaaaaaaaaaaaaaaaa

SEQ ID NO: 25696 - RNA, 4017 nt, Artificial Sequence
  SARS-CoV-2/Wuhan/WIV05/2019__EPI_ISL_402128 spike protein mRNA gc mod (1-1273)(E484K_D614G)
aggagaaagcuuaccauguucguguuucuggugcugcugccccugguguccagccagugugugaaccugaccaccagaacacagcugccuccagccuacaccaacagcuucaccagaggcguguacuaccccgacaagguguucagauccagcgugcugcacucuacccaggaccuguuccugccuuucuucagcaacgugaccugguuccacgccauccacguguccggcaccaauggcaccaagagauucgacaaccccgugcugcccuucaacgacgggguguacuuugccagcaccgagaaguccaacaucaucagaggcuggaucuucggcaccacacuggacagcaagacccagagccugcugaucgugaacaacgccaccaacguggucaucaaagugugcgaguuccaguucugcaacgaccccuuccugggcgucuacuaccacaagaacaacaagagcuggauggaaagcgaguuccggguguacagcagcgccaacaacugcaccuucgaguacgugucccagccuuuccugauggaccuggaaggcaagcagggcaacuucaagaaccugcgcgaguucguguucaagaacaucgacggcuacuucaaaaucuacagcaagcacaccccuaucaaccucgugcgggaucugccucagggcuucucugcucuggaaccccugguggaucugcccaucggcaucaacaucacccgguuucagacacugcuggcccugcacagaagcuaccugacaccuggcgauagcagcagcggauggacagcuggugccgccgcuuacuaugugggcuaccugcagccuagaaccuuccugcugaaguacaacgagaacggcaccaucaccgacgccguggauugugcucuggauccucugagcgagacaaagugcacccugaaguccuucaccguggaaaagggcaucuaccagaccagcaacuuccgggugcagcccaccgaauccaucgugcgguuccccaauaucaccaaucugugccccuucggcgagguguucaaugccaccagauucgccucuguguacgccuggaaccggaagcggaucagcaauugcguggccgacuacuccgugcuguacaacuccgccagcuucagcaccuucaagugcuacggcguguccccuaccaagcugaacgaccugugcuucacaaacguguacgccgacagcuucgugauccggggagaugaagugcggcagauugccccuggacagacaggcaagaucgccgacuacaacuacaagcugcccgacgacuucaccggcugugugauugccuggaacagcaacaaccuggacuccaaagucggcggcaacuacaauuaccuguaccggcuguuccggaaguccaaucugaagcccuucgagcgggacaucagcaccgaaaucuaucaggccggcagcaccccuugcaacggcgugaagggcuucaacugcuacuucccacugcaguccuacggcuuucagcccacaaauggcgugggcuaucagcccuacagagugguggugcugagcuucgaacugcugcaugcuccugccacagugugcggcccuaagaaaagcaccaaucucgugaagaacaaaugcgugaacuucaacuucaacggccugaccggcaccggcgugcugacagagagcaacaagaaguuccugccauuccagcaguuuggccgggauaucgccgauaccacagacgccguuagagauccccagacacuggaaauccuggacaucaccccaugcagcuucggcggagugucugugaucaccccuggcaccaacaccagcaaucagguggcagugcuguaccagggcgugaacuguaccgaagugcccguggccauucacgccgaucagcugacaccuacauggcggguguacuccaccggcagcaauguguuucagaccagagccggcugucugaucggagccgagcacgugaacaauagcuacgagugcgacauccccaucggcgcuggcaucugugccagcuaccagacacagacaaacagccccagacgggcuagaagcguggccagccagagcaucauugccuacacaaugucucugggcgccgagaacagcguggccuacuccaacaacucuaucgcuauccccaccaacuucaccaucagcgugaccaccgagauccugccuguguccaugaccaagaccagcguggacugcaccauguacaucugcggcgauuccaccgagugcuccaaccugcugcugcaguacggcagcuucugcacccagcugaauagagcccugacagggaucgccguggaacaggacaagaacacccaagagguguucgcccaagugaagcaaaucuacaagaccccuccuaucaaggacuucggcggcuucaauuucagccagauucugcccgauccuagcaagcccagcaagcggagcuucaucgaggaccugcuguucaacaaagugacacuggccgacgccggcuucaucaagcaguauggcgauugucugggcgacauugccgccagggaucugauuugcgcccagaaguuuaacggacugacagugcugccuccucugcugaccgaugagaugaucgcccaguacacaucugcccugcuggccggcacaaucacaagcggcuggacauuuggagcuggcgccgcucugcagauccccuuugcuaugcagauggccuaccgguucaacggcaucggagugacccagaaugugcuguacgagaaccagaagcugaucgccaaccaguucaacagcgccaucggcaagauccaggacagccugagcagcacagcaagcgcccugggaaagcugcaggacguggucaaccagaaugcccaggcacugaacacccuggucaagcagcuguccuccaacuucggcgccaucagcucugugcugaacgauauccugagcagacuggacaaggucgaggccgaggugcagaucgacagacugaucacaggcagacugcagagccuccagacauacgugacccagcagcugaucagagccgccgagauuagagccucugccaaucuggccgccaccaagaugucugagugugugcugggccagagcaagagaguggacuuuugcggcaagggcuaccaccugaugagcuucccucagucugccccucacggcgugguguuucugcacgugacauaugugcccgcucaagagaagaauuucaccaccgcuccagccaucugccacgacggcaaagcccacuuuccuagagaaggcguguucguguccaacggcacccauugguucgugacacagcggaacuucuacgagccccagaucaucaccaccgacaacaccuucgugucuggcaacugcgacguugugaucggcauugugaacaauaccguguacgacccucugcagcccgagcuggacagcuucaaagaggaacuggacaaguacuuuaagaaccacacaagccccgacguggaccugggcgauaucagcggaaucaaugccagcgucgugaacauccagaaagagaucgaccggcugaacgagguggccaagaaucugaacgagagccugaucgaccugcaagaacuggggaaguacgagcaguacaucaaguggcccugguacaucuggcugggcuuuaucgccggacugauugccaucgugauggucacaaucaugcuguguugcaugaccagcugcuguagcugccugaagggcuguuguagcuguggcagcugcugcaaguucgacgaggacgauucugagcccgugcugaagggcgugaaacugcacuacaccugaggacuaguuauaagacugacuagcccgaugggccucccaacgggcccuccuccccuccuugcaccgagauuaauagaucuaaaaaaaaaaaaaaaaaaaaaaaaaaaaaaaaaaaaaaaaaaaaaaaaaaaaaaaaaaaaaaaaaaaaaaaaaaaaaaaaaaaaaaaaaaaaaaaaaaaa

SEQ ID NO: 25697 - RNA, 4017 nt, Artificial Sequence
  SARS-CoV-2/Wuhan/WIV05/2019__EPI_ISL_402128 spike protein mRNA gc mod (1-1273)(L18F_T20N_P26S_D138Y_R190S_K417T_E484K_N501Y_D614G_H655Y _T1027I)
aggagaaagcuuaccauguucguguuucuggugcugcugccccugguguccagccagugugugaacuucaccaacagaacacagcugccuagcgccuacaccaacagcuucaccagaggcguguacuaccccgacaagguguucagauccagcgugcugcacucuacccaggaccuguuccugccuuucuucagcaacgugaccugguuccacgccauccacguguccggcaccaauggcaccaagagauucgacaaccccgugcugcccuucaacgacgggguguacuuugccagcaccgagaaguccaacaucaucagaggcuggaucuucggcaccacacuggacagcaagacccagagccugcugaucgugaacaacgccaccaacguggucaucaaagugugcgaguuccaguucugcaacuaccccuuccugggcgucuacuaccacaagaacaacaagagcuggauggaaagcgaguuccggguguacagcagcgccaacaacugcaccuucgaguacgugucccagccuuuccugauggaccuggaaggcaagcagggcaacuucaagaaccugagcgaguucguguucaagaacaucgacggcuacuucaaaaucuacagcaagcacaccccuaucaaccucgugcgggaucugccucagggcuucucugcucuggaaccccugguggaucugcccaucggcaucaacaucacccgguuucagacacugcuggcccugcacagaagcuaccugacaccuggcgauagcagcagcggauggacagcuggugccgccgcuuacuaugugggcuaccugcagccuagaaccuuccugcugaaguacaacgagaacggcaccaucaccgacgccguggauugugcucuggauccucugagcgagacaaagugcacccugaaguccuucaccguggaaaagggcaucuaccagaccagcaacuuccgggugcagcccaccgaauccaucgugcgguuccccaauaucaccaaucugugccccuucggcgagguguucaaugccaccagauucgccucuguguacgccuggaaccggaagcggaucagcaauugcguggccgacuacuccgugcuguacaacuccgccagcuucagcaccuucaagugcuacggcguguccccuaccaagcugaacgaccugugcuucacaaacguguacgccgacagcuucgugauccggggagaugaagugcggcagauugccccuggacagacaggcaccaucgccgacuacaacuacaagcugcccgacgacuucaccggcugugugauugccuggaacagcaacaaccuggacuccaaagucggcggcaacuacaauuaccuguaccggcuguuccggaaguccaaucugaagcccuucgagcgggacaucagcaccgaaaucuaucaggccggcagcaccccuugcaacggcgugaagggcuucaacugcuacuucccacugcaguccuacggcuuucagcccacauacggcgugggcuaucagcccuacagagugguggugcugagcuucgaacugcugcaugcuccugccacagugugcggcccuaagaaaagcaccaaucucgugaagaacaaaugcgugaacuucaacuucaacggccugaccggcaccggcgugcugacagagagcaacaagaaguuccugccauuccagcaguuuggccgggauaucgccgauaccacagacgccguuagagauccccagacacuggaaauccuggacaucaccccaugcagcuucggcggagugucugugaucaccccuggcaccaacaccagcaaucagguggcagugcuguaccagggcgugaacuguaccgaagugcccguggccauucacgccgaucagcugacaccuacauggcggguguacuccaccggcagcaauguguuucagaccagagccggcugucugaucggagccgaguacgugaacaauagcuacgagugcgacauccccaucggcgcuggcaucugugccagcuaccagacacagacaaacagccccagacgggcuagaagcguggccagccagagcaucauugccuacacaaugucucugggcgccgagaacagcguggccuacuccaacaacucuaucgcuauccccaccaacuucaccaucagcgugaccaccgagauccugccuguguccaugaccaagaccagcguggacugcaccauguacaucugcggcgauuccaccgagugcuccaaccugcugcugcaguacggcagcuucugcacccagcugaauagagcccugacagggaucgccguggaacaggacaagaacacccaagagguguucgcccaagugaagcaaaucuacaagaccccuccuaucaaggacuucggcggcuucaauuucagccagauucugcccgauccuagcaagcccagcaagcggagcuucaucgaggaccugcuguucaacaaagugacacuggccgacgccggcuucaucaagcaguauggcgauugucugggcgacauugccgccagggaucugauuugcgcccagaaguuuaacggacugacagugcugccuccucugcugaccgaugagaugaucgcccaguacacaucugcccugcuggccggcacaaucacaagcggcuggacauuuggagcuggcgccgcucugcagauccccuuugcuaugcagauggccuaccgguucaacggcaucggagugacccagaaugugcuguacgagaaccagaagcugaucgccaaccaguucaacagcgccaucggcaagauccaggacagccugagcagcacagcaagcgcccugggaaagcugcaggacguggucaaccagaaugcccaggcacugaacacccuggucaagcagcuguccuccaacuucggcgccaucagcucugugcugaacgauauccugagcagacuggacaaggucgaggccgaggugcagaucgacagacugaucacaggcagacugcagagccuccagacauacgugacccagcagcugaucagagccgccgagauuagagccucugccaaucuggccgccaucaagaugucugagugugugcugggccagagcaagagaguggacuuuugcggcaagggcuaccaccugaugagcuucccucagucugccccucacggcgugguguuucugcacgugacauaugugcccgcucaagagaagaauuucaccaccgcuccagccaucugccacgacggcaaagcccacuuuccuagagaaggcguguucguguccaacggcacccauugguucgugacacagcggaacuucuacgagccccagaucaucaccaccgacaacaccuucgugucuggcaacugcgacguugugaucggcauugugaacaauaccguguacgacccucugcagcccgagcuggacagcuucaaagaggaacuggacaaguacuuuaagaaccacacaagccccgacguggaccugggcgauaucagcggaaucaaugccagcgucgugaacauccagaaagagaucgaccggcugaacgagguggccaagaaucugaacgagagccugaucgaccugcaagaacuggggaaguacgagcaguacaucaaguggcccugguacaucuggcugggcuuuaucgccggacugauugccaucgugauggucacaaucaugcuguguugcaugaccagcugcuguagcugccugaagggcuguuguagcuguggcagcugcugcaaguucgacgaggacgauucugagcccgugcugaagggcgugaaacugcacuacaccugaggacuaguuauaagacugacuagcccgaugggccucccaacgggcccuccuccccuccuugcaccgagauuaauagaucuaaaaaaaaaaaaaaaaaaaaaaaaaaaaaaaaaaaaaaaaaaaaaaaaaaaaaaaaaaaaaaaaaaaaaaaaaaaaaaaaaaaaaaaaaaaaaaaaaaaa

SEQ ID NO: 25698 - RNA, 4017 nt, Artificial Sequence
  SARS-CoV-2/Wuhan/WIV05/2019__EPI_ISL_402128 spike protein mRNA gc mod (1-1273)(S13I_W152C_L452R_D614G)
aggagaaagcuuaccauguucguguuucuggugcugcugccccugguguccauccagugugugaaccugaccaccagaacacagcugccuccagccuacaccaacagcuucaccagaggcguguacuaccccgacaagguguucagauccagcgugcugcacucuacccaggaccuguuccugccuuucuucagcaacgugaccugguuccacgccauccacguguccggcaccaauggcaccaagagauucgacaaccccgugcugcccuucaacgacgggguguacuuugccagcaccgagaaguccaacaucaucagaggcuggaucuucggcaccacacuggacagcaagacccagagccugcugaucgugaacaacgccaccaacguggucaucaaagugugcgaguuccaguucugcaacgaccccuuccugggcgucuacuaccacaagaacaacaagagcugcauggaaagcgaguuccggguguacagcagcgccaacaacugcaccuucgaguacgugucccagccuuuccugauggaccuggaaggcaagcagggcaacuucaagaaccugcgcgaguucguguucaagaacaucgacggcuacuucaaaaucuacagcaagcacaccccuaucaaccucgugcgggaucugccucagggcuucucugcucuggaaccccugguggaucugcccaucggcaucaacaucacccgguuucagacacugcuggcccugcacagaagcuaccugacaccuggcgauagcagcagcggauggacagcuggugccgccgcuuacuaugugggcuaccugcagccuagaaccuuccugcugaaguacaacgagaacggcaccaucaccgacgccguggauugugcucuggauccucugagcgagacaaagugcacccugaaguccuucaccguggaaaagggcaucuaccagaccagcaacuuccgggugcagcccaccgaauccaucgugcgguuccccaauaucaccaaucugugccccuucggcgagguguucaaugccaccagauucgccucuguguacgccuggaaccggaagcggaucagcaauugcguggccgacuacuccgugcuguacaacuccgccagcuucagcaccuucaagugcuacggcguguccccuaccaagcugaacgaccugugcuucacaaacguguacgccgacagcuucgugauccggggagaugaagugcggcagauugccccuggacagacaggcaagaucgccgacuacaacuacaagcugcccgacgacuucaccggcugugugauugccuggaacagcaacaaccuggacuccaaagucggcggcaacuacaauuaccgcuaccggcuguuccggaaguccaaucugaagcccuucgagcgggacaucagcaccgaaaucuaucaggccggcagcaccccuugcaacggcguggaaggcuucaacugcuacuucccacugcaguccuacggcuuucagcccacaaauggcgugggcuaucagcccuacagagugguggugcugagcuucgaacugcugcaugcuccugccacagugugcggcccuaagaaaagcaccaaucucgugaagaacaaaugcgugaacuucaacuucaacggccugaccggcaccggcgugcugacagagagcaacaagaaguuccugccauuccagcaguuuggccgggauaucgccgauaccacagacgccguuagagauccccagacacuggaaauccuggacaucaccccaugcagcuucggcggagugucugugaucaccccuggcaccaacaccagcaaucagguggcagugcuguaccagggcgugaacuguaccgaagugcccguggccauucacgccgaucagcugacaccuacauggcggguguacuccaccggcagcaauguguuucagaccagagccggcugucugaucggagccgagcacgugaacaauagcuacgagugcgacauccccaucggcgcuggcaucugugccagcuaccagacacagacaaacagccccagacgggcuagaagcguggccagccagagcaucauugccuacacaaugucucugggcgccgagaacagcguggccuacuccaacaacucuaucgcuauccccaccaacuucaccaucagcgugaccaccgagauccugccuguguccaugaccaagaccagcguggacugcaccauguacaucugcggcgauuccaccgagugcuccaaccugcugcugcaguacggcagcuucugcacccagcugaauagagcccugacagggaucgccguggaacaggacaagaacacccaagagguguucgcccaagugaagcaaaucuacaagaccccuccuaucaaggacuucggcggcuucaauuucagccagauucugcccgauccuagcaagcccagcaagcggagcuucaucgaggaccugcuguucaacaaagugacacuggccgacgccggcuucaucaagcaguauggcgauugucugggcgacauugccgccagggaucugauuugcgcccagaaguuuaacggacugacagugcugccuccucugcugaccgaugagaugaucgcccaguacacaucugcccugcuggccggcacaaucacaagcggcuggacauuuggagcuggcgccgcucugcagauccccuuugcuaugcagauggccuaccgguucaacggcaucggagugacccagaaugugcuguacgagaaccagaagcugaucgccaaccaguucaacagcgccaucggcaagauccaggacagccugagcagcacagcaagcgcccugggaaagcugcaggacguggucaaccagaaugcccaggcacugaacacccuggucaagcagcuguccuccaacuucggcgccaucagcucugugcugaacgauauccugagcagacuggacaaggucgaggccgaggugcagaucgacagacugaucacaggcagacugcagagccuccagacauacgugacccagcagcugaucagagccgccgagauuagagccucugccaaucuggccgccaccaagaugucugagugugugcugggccagagcaagagaguggacuuuugcggcaagggcuaccaccugaugagcuucccucagucugccccucacggcgugguguuucugcacgugacauaugugcccgcucaagagaagaauuucaccaccgcuccagccaucugccacgacggcaaagcccacuuuccuagagaaggcguguucguguccaacggcacccauugguucgugacacagcggaacuucuacgagccccagaucaucaccaccgacaacaccuucgugucuggcaacugcgacguugugaucggcauugugaacaauaccguguacgacccucugcagcccgagcuggacagcuucaaagaggaacuggacaaguacuuuaagaaccacacaagccccgacguggaccugggcgauaucagcggaaucaaugccagcgucgugaacauccagaaagagaucgaccggcugaacgagguggccaagaaucugaacgagagccugaucgaccugcaagaacuggggaaguacgagcaguacaucaaguggcccugguacaucuggcugggcuuuaucgccggacugauugccaucgugauggucacaaucaugcuguguugcaugaccagcugcuguagcugccugaagggcuguuguagcuguggcagcugcugcaaguucgacgaggacgauucugagcccgugcugaagggcgugaaacugcacuacaccugaggacuaguuauaagacugacuagcccgaugggccucccaacgggcccuccuccccuccuugcaccgagauuaauagaucuaaaaaaaaaaaaaaaaaaaaaaaaaaaaaaaaaaaaaaaaaaaaaaaaaaaaaaaaaaaaaaaaaaaaaaaaaaaaaaaaaaaaaaaaaaaaaaaaaaaa

SEQ ID NO: 25699 - RNA, 4017 nt, Artificial Sequence
  SARS-CoV-2/Wuhan/WIV05/2019__EPI_ISL_402128 spike protein mRNA gc mod (1-1273)
aggagaaagcuuaccauguucguguuccuggugcugcugccucugguguccagccagugugugaaccugaccaccagaacacagcugccuccagccuacaccaacagcuuuaccagaggcguguacuaccccgacaagguguucagauccagcgugcugcacucuacccaggaccuguuccugccuuucuucagcaacgugaccugguuccacgccauccacguguccggcaccaauggcaccaagagauucgacaaccccgugcugcccuucaacgacgggguguacuuugccagcaccgagaaguccaacaucaucagaggcuggaucuucggcaccacacuggacagcaagacccagagccugcugaucgugaacaacgccaccaacguggucaucaaagugugcgaguuccaguucugcaacgaccccuuccugggcgucuacuaccacaagaacaacaagagcuggauggaaagcgaguuccggguguacagcagcgccaacaacugcaccuucgaguacgugucccagccuuuccugauggaccuggaaggcaagcagggcaacuucaagaaccugcgcgaguucguguuuaagaacaucgacggcuacuucaagaucuacagcaagcacaccccuaucaaccucgugcgggaucugccucagggcuucucugcucuggaaccccugguggaucugcccaucggcaucaacaucacccgguuucagacacugcuggcccugcacagaagcuaccugacaccuggcgauagcagcagcggauggacagcuggugccgccgcuuacuaugugggcuaccugcagccuagaaccuuccugcugaaguacaacgagaacggcaccaucaccgacgccguggauugugcucuggauccucugagcgagacaaagugcacccugaaguccuucaccguggaaaagggcaucuaccagaccagcaacuuccgggugcagcccaccgaauccaucgugcgguuccccaauaucaccaaucugugccccuucggcgagguguucaaugccaccagauucgccucuguguacgccuggaaccggaagcggaucagcaauugcguggccgacuacuccgugcuguacaacuccgccagcuucagcaccuucaagugcuacggcguguccccuaccaagcugaacgaccugugcuucacaaacguguacgccgacagcuucgugauccggggagaugaagugcggcagauugccccuggacagacaggcaagaucgccgacuacaacuacaagcugcccgacgacuucaccggcugugugauugccuggaacagcaacaaccuggacuccaaagucggcggcaacuacaauuaccuguaccggcuguuccggaaguccaaucugaagcccuucgagcgggacaucuccaccgagaucuaucaggccggcagcaccccuuguaacggcguggaaggcuucaacugcuacuucccacugcaguccuacggcuuucagcccacaaauggcgugggcuaucagcccuacagagugguggugcugagcuucgaacugcugcaugccccugccacagugugcggcccuaagaaaagcaccaaucucgugaagaacaaaugcgugaacuucaacuucaacggccugaccggcaccggcgugcugacagagagcaacaagaaguuccugccauuccagcaguuuggccgggauaucgccgauaccacagacgccguuagagauccccagacacuggaaauccuggacaucaccccuugcagcuucggcggagugucugugaucaccccuggcaccaacaccagcaaucagguggcagugcuguaccaggacgugaacuguaccgaagugcccguggccauucacgccgaucagcugacaccuacauggcggguguacuccaccggcagcaauguguuucagaccagagccggcugucugaucggagccgagcacgugaacaauagcuacgagugcgacauccccaucggcgcuggaaucugcgccagcuaccagacacagacaaacagcccucggagagccagaagcguggccagccagagcaucauugccuacacaaugucucugggcgccgagaacagcguggccuacuccaacaacucuaucgcuauccccaccaacuucaccaucagcgugaccacagagauccugccuguguccaugaccaagaccagcguggacugcaccauguacaucugcggcgauuccaccgagugcuccaaccugcugcugcaguacggcagcuucugcacccagcugaauagagcccugacagggaucgccguggaacaggacaagaacacccaagagguguucgcccaagugaagcagaucuacaagaccccuccuaucaaggacuucggcggcuucaauuucagccagauucugcccgauccuagcaagcccagcaagcggagcuucaucgaggaccugcuguucaacaaagugacacuggccgacgccggcuucaucaagcaguauggcgauugucugggcgacauugccgccagggaucugauuugcgcccagaaguuuaacggacugacagugcugccuccucugcugaccgaugagaugaucgcccaguacacaucugcccugcuggccggcacaaucacaagcggcuggacauuuggagcaggcgccgcucugcagauccccuuugcuaugcagauggccuaccgguucaacggcaucggagugacccagaaugugcuguacgagaaccagaagcugaucgccaaccaguucaacagcgccaucggcaagauccaggacagccugagcagcacagcaagcgcccugggaaagcugcaggacguggucaaccagaaugcccaggcacugaacacccuggucaagcagcuguccuccaacuucggcgccaucagcucugugcugaacgauauccugagcagacuggacaaggucgaggccgaggugcagaucgacagacugaucacaggcagacugcagagccuccagacauacgugacccagcagcugaucagagccgccgagauuagagccucugccaaucuggccgccaccaagaugucugagugugugcugggccagagcaagagaguggacuuuugcggcaagggcuaccaccugaugagcuucccucagucugccccucacggcgugguguuucugcacgugacauaugugcccgcucaagagaagaauuucaccaccgcuccagccaucugccacgacggcaaagcccacuuuccuagagaaggcguguucguguccaacggcacccauugguucgugacacagcggaacuucuacgagccccagaucaucaccaccgacaacaccuucgugucuggcaacugcgacgucgugaucggcauugugaacaauaccguguacgacccucugcagcccgagcuggacagcuucaaagaggaacuggacaaguacuuuaagaaccacacaagccccgacguggaccugggcgauaucagcggaaucaaugccagcgucgugaacauccagaaagagaucgaccggcugaacgagguggccaagaaucugaacgagagccugaucgaccugcaagaacuggggaaguacgagcaguacaucaaguggcccugguacaucuggcugggcuuuaucgccggacugauugccaucgugauggucacaaucaugcuguguugcaugaccagcugcuguagcugccugaagggcuguuguagcuguggcagcugcugcaaguucgacgaggacgauucugagcccgugcugaagggcgugaaacugcacuacacaugaggacuaguuauaagacugacuagcccgaugggccucccaacgggcccuccuccccuccuugcaccgagauuaauagaucuaaaaaaaaaaaaaaaaaaaaaaaaaaaaaaaaaaaaaaaaaaaaaaaaaaaaaaaaaaaaaaaaaaaaaaaaaaaaaaaaaaaaaaaaaaaaaaaaaaaa

SEQ ID NO: 25700 - RNA, 4017 nt, Artificial Sequence
  SARS-CoV-2/Wuhan/WIV05/2019__EPI_ISL_402128 spike protein mRNA gc mod (1-1273)(D614G)
aggagaaagcuuaccauguucguguuccuggugcugcugccucugguguccagccagugugugaaccugaccaccagaacacagcugccuccagccuacaccaacagcuuuaccagaggcguguacuaccccgacaagguguucagauccagcgugcugcacucuacccaggaccuguuccugccuuucuucagcaacgugaccugguuccacgccauccacguguccggcaccaauggcaccaagagauucgacaaccccgugcugcccuucaacgacgggguguacuuugccagcaccgagaaguccaacaucaucagaggcuggaucuucggcaccacacuggacagcaagacccagagccugcugaucgugaacaacgccaccaacguggucaucaaagugugcgaguuccaguucugcaacgaccccuuccugggcgucuacuaccacaagaacaacaagagcuggauggaaagcgaguuccggguguacagcagcgccaacaacugcaccuucgaguacgugucccagccuuuccugauggaccuggaaggcaagcagggcaacuucaagaaccugcgcgaguucguguuuaagaacaucgacggcuacuucaagaucuacagcaagcacaccccuaucaaccucgugcgggaucugccucagggcuucucugcucuggaaccccugguggaucugcccaucggcaucaacaucacccgguuucagacacugcuggcccugcacagaagcuaccugacaccuggcgauagcagcagcggauggacagcuggugccgccgcuuacuaugugggcuaccugcagccuagaaccuuccugcugaaguacaacgagaacggcaccaucaccgacgccguggauugugcucuggauccucugagcgagacaaagugcacccugaaguccuucaccguggaaaagggcaucuaccagaccagcaacuuccgggugcagcccaccgaauccaucgugcgguuccccaauaucaccaaucugugccccuucggcgagguguucaaugccaccagauucgccucuguguacgccuggaaccggaagcggaucagcaauugcguggccgacuacuccgugcuguacaacuccgccagcuucagcaccuucaagugcuacggcguguccccuaccaagcugaacgaccugugcuucacaaacguguacgccgacagcuucgugauccggggagaugaagugcggcagauugccccuggacagacaggcaagaucgccgacuacaacuacaagcugcccgacgacuucaccggcugugugauugccuggaacagcaacaaccuggacuccaaagucggcggcaacuacaauuaccuguaccggcuguuccggaaguccaaucugaagcccuucgagcgggacaucuccaccgagaucuaucaggccggcagcaccccuuguaacggcguggaaggcuucaacugcuacuucccacugcaguccuacggcuuucagcccacaaauggcgugggcuaucagcccuacagagugguggugcugagcuucgaacugcugcaugccccugccacagugugcggcccuaagaaaagcaccaaucucgugaagaacaaaugcgugaacuucaacuucaacggccugaccggcaccggcgugcugacagagagcaacaagaaguuccugccauuccagcaguuuggccgggauaucgccgauaccacagacgccguuagagauccccagacacuggaaauccuggacaucaccccuugcagcuucggcggagugucugugaucaccccuggcaccaacaccagcaaucagguggcagugcuguaccagggcgugaacuguaccgaagugcccguggccauucacgccgaucagcugacaccuacauggcggguguacuccaccggcagcaauguguuucagaccagagccggcugucugaucggagccgagcacgugaacaauagcuacgagugcgacauccccaucggcgcuggaaucugcgccagcuaccagacacagacaaacagcccucggagagccagaagcguggccagccagagcaucauugccuacacaaugucucugggcgccgagaacagcguggccuacuccaacaacucuaucgcuauccccaccaacuucaccaucagcgugaccacagagauccugccuguguccaugaccaagaccagcguggacugcaccauguacaucugcggcgauuccaccgagugcuccaaccugcugcugcaguacggcagcuucugcacccagcugaauagagcccugacagggaucgccguggaacaggacaagaacacccaagagguguucgcccaagugaagcagaucuacaagaccccuccuaucaaggacuucggcggcuucaauuucagccagauucugcccgauccuagcaagcccagcaagcggagcuucaucgaggaccugcuguucaacaaagugacacuggccgacgccggcuucaucaagcaguauggcgauugucugggcgacauugccgccagggaucugauuugcgcccagaaguuuaacggacugacagugcugccuccucugcugaccgaugagaugaucgcccaguacacaucugcccugcuggccggcacaaucacaagcggcuggacauuuggagcaggcgccgcucugcagauccccuuugcuaugcagauggccuaccgguucaacggcaucggagugacccagaaugugcuguacgagaaccagaagcugaucgccaaccaguucaacagcgccaucggcaagauccaggacagccugagcagcacagcaagcgcccugggaaagcugcaggacguggucaaccagaaugcccaggcacugaacacccuggucaagcagcuguccuccaacuucggcgccaucagcucugugcugaacgauauccugagcagacuggacaaggucgaggccgaggugcagaucgacagacugaucacaggcagacugcagagccuccagacauacgugacccagcagcugaucagagccgccgagauuagagccucugccaaucuggccgccaccaagaugucugagugugugcugggccagagcaagagaguggacuuuugcggcaagggcuaccaccugaugagcuucccucagucugccccucacggcgugguguuucugcacgugacauaugugcccgcucaagagaagaauuucaccaccgcuccagccaucugccacgacggcaaagcccacuuuccuagagaaggcguguucguguccaacggcacccauugguucgugacacagcggaacuucuacgagccccagaucaucaccaccgacaacaccuucgugucuggcaacugcgacgucgugaucggcauugugaacaauaccguguacgacccucugcagcccgagcuggacagcuucaaagaggaacuggacaaguacuuuaagaaccacacaagccccgacguggaccugggcgauaucagcggaaucaaugccagcgucgugaacauccagaaagagaucgaccggcugaacgagguggccaagaaucugaacgagagccugaucgaccugcaagaacuggggaaguacgagcaguacaucaaguggcccugguacaucuggcugggcuuuaucgccggacugauugccaucgugauggucacaaucaugcuguguugcaugaccagcugcuguagcugccugaagggcuguuguagcuguggcagcugcugcaaguucgacgaggacgauucugagcccgugcugaagggcgugaaacugcacuacacaugaggacuaguuauaagacugacuagcccgaugggccucccaacgggcccuccuccccuccuugcaccgagauuaauagaucuaaaaaaaaaaaaaaaaaaaaaaaaaaaaaaaaaaaaaaaaaaaaaaaaaaaaaaaaaaaaaaaaaaaaaaaaaaaaaaaaaaaaaaaaaaaaaaaaaaaa

SEQ ID NO: 25701 - RNA, 4017 nt, Artificial Sequence
  SARS-CoV-2/Wuhan/WIV05/2019__EPI_ISL_402128 spike protein mRNA gc mod (1-1273)(A222V_D614G)
aggagaaagcuuaccauguucguguuccuggugcugcugccucugguguccagccagugugugaaccugaccaccagaacacagcugccuccagccuacaccaacagcuuuaccagaggcguguacuaccccgacaagguguucagauccagcgugcugcacucuacccaggaccuguuccugccuuucuucagcaacgugaccugguuccacgccauccacguguccggcaccaauggcaccaagagauucgacaaccccgugcugcccuucaacgacgggguguacuuugccagcaccgagaaguccaacaucaucagaggcuggaucuucggcaccacacuggacagcaagacccagagccugcugaucgugaacaacgccaccaacguggucaucaaagugugcgaguuccaguucugcaacgaccccuuccugggcgucuacuaccacaagaacaacaagagcuggauggaaagcgaguuccggguguacagcagcgccaacaacugcaccuucgaguacgugucccagccuuuccugauggaccuggaaggcaagcagggcaacuucaagaaccugcgcgaguucguguuuaagaacaucgacggcuacuucaagaucuacagcaagcacaccccuaucaaccucgugcgggaucugccucagggcuucucugugcuggaaccccugguggaucugcccaucggcaucaacaucacccgguuucagacacugcuggcccugcacagaagcuaccugacaccuggcgauagcagcagcggauggacagcuggugccgccgcuuacuaugugggcuaccugcagccuagaaccuuccugcugaaguacaacgagaacggcaccaucaccgacgccguggauugugcucuggauccucugagcgagacaaagugcacccugaaguccuucaccguggaaaagggcaucuaccagaccagcaacuuccgggugcagcccaccgaauccaucgugcgguuccccaauaucaccaaucugugccccuucggcgagguguucaaugccaccagauucgccucuguguacgccuggaaccggaagcggaucagcaauugcguggccgacuacuccgugcuguacaacuccgccagcuucagcaccuucaagugcuacggcguguccccuaccaagcugaacgaccugugcuucacaaacguguacgccgacagcuucgugauccggggagaugaagugcggcagauugccccuggacagacaggcaagaucgccgacuacaacuacaagcugcccgacgacuucaccggcugugugauugccuggaacagcaacaaccuggacuccaaagucggcggcaacuacaauuaccuguaccggcuguuccggaaguccaaucugaagcccuucgagcgggacaucuccaccgagaucuaucaggccggcagcaccccuuguaacggcguggaaggcuucaacugcuacuucccacugcaguccuacggcuuucagcccacaaauggcgugggcuaucagcccuacagagugguggugcugagcuucgaacugcugcaugccccugccacagugugcggcccuaagaaaagcaccaaucucgugaagaacaaaugcgugaacuucaacuucaacggccugaccggcaccggcgugcugacagagagcaacaagaaguuccugccauuccagcaguuuggccgggauaucgccgauaccacagacgccguuagagauccccagacacuggaaauccuggacaucaccccuugcagcuucggcggagugucugugaucaccccuggcaccaacaccagcaaucagguggcagugcuguaccagggcgugaacuguaccgaagugcccguggccauucacgccgaucagcugacaccuacauggcggguguacuccaccggcagcaauguguuucagaccagagccggcugucugaucggagccgagcacgugaacaauagcuacgagugcgacauccccaucggcgcuggaaucugcgccagcuaccagacacagacaaacagcccucggagagccagaagcguggccagccagagcaucauugccuacacaaugucucugggcgccgagaacagcguggccuacuccaacaacucuaucgcuauccccaccaacuucaccaucagcgugaccacagagauccugccuguguccaugaccaagaccagcguggacugcaccauguacaucugcggcgauuccaccgagugcuccaaccugcugcugcaguacggcagcuucugcacccagcugaauagagcccugacagggaucgccguggaacaggacaagaacacccaagagguguucgcccaagugaagcagaucuacaagaccccuccuaucaaggacuucggcggcuucaauuucagccagauucugcccgauccuagcaagcccagcaagcggagcuucaucgaggaccugcuguucaacaaagugacacuggccgacgccggcuucaucaagcaguauggcgauugucugggcgacauugccgccagggaucugauuugcgcccagaaguuuaacggacugacagugcugccuccucugcugaccgaugagaugaucgcccaguacacaucugcccugcuggccggcacaaucacaagcggcuggacauuuggagcaggcgccgcucugcagauccccuuugcuaugcagauggccuaccgguucaacggcaucggagugacccagaaugugcuguacgagaaccagaagcugaucgccaaccaguucaacagcgccaucggcaagauccaggacagccugagcagcacagcaagcgcccugggaaagcugcaggacguggucaaccagaaugcccaggcacugaacacccuggucaagcagcuguccuccaacuucggcgccaucagcucugugcugaacgauauccugagcagacuggacaaggucgaggccgaggugcagaucgacagacugaucacaggcagacugcagagccuccagacauacgugacccagcagcugaucagagccgccgagauuagagccucugccaaucuggccgccaccaagaugucugagugugugcugggccagagcaagagaguggacuuuugcggcaagggcuaccaccugaugagcuucccucagucugccccucacggcgugguguuucugcacgugacauaugugcccgcucaagagaagaauuucaccaccgcuccagccaucugccacgacggcaaagcccacuuuccuagagaaggcguguucguguccaacggcacccauugguucgugacacagcggaacuucuacgagccccagaucaucaccaccgacaacaccuucgugucuggcaacugcgacgucgugaucggcauugugaacaauaccguguacgacccucugcagcccgagcuggacagcuucaaagaggaacuggacaaguacuuuaagaaccacacaagccccgacguggaccugggcgauaucagcggaaucaaugccagcgucgugaacauccagaaagagaucgaccggcugaacgagguggccaagaaucugaacgagagccugaucgaccugcaagaacuggggaaguacgagcaguacaucaaguggcccugguacaucuggcugggcuuuaucgccggacugauugccaucgugauggucacaaucaugcuguguugcaugaccagcugcuguagcugccugaagggcuguuguagcuguggcagcugcugcaaguucgacgaggacgauucugagcccgugcugaagggcgugaaacugcacuacacaugaggacuaguuauaagacugacuagcccgaugggccucccaacgggcccuccuccccuccuugcaccgagauuaauagaucuaaaaaaaaaaaaaaaaaaaaaaaaaaaaaaaaaaaaaaaaaaaaaaaaaaaaaaaaaaaaaaaaaaaaaaaaaaaaaaaaaaaaaaaaaaaaaaaaaaaa

SEQ ID NO: 25702 - RNA, 4017 nt, Artificial Sequence
  SARS-CoV-2/Wuhan/WIV05/2019__EPI_ISL_402128 spike protein mRNA gc mod (1-1273)(N439K_D614G)
aggagaaagcuuaccauguucguguuccuggugcugcugccucugguguccagccagugugugaaccugaccaccagaacacagcugccuccagccuacaccaacagcuuuaccagaggcguguacuaccccgacaagguguucagauccagcgugcugcacucuacccaggaccuguuccugccuuucuucagcaacgugaccugguuccacgccauccacguguccggcaccaauggcaccaagagauucgacaaccccgugcugcccuucaacgacgggguguacuuugccagcaccgagaaguccaacaucaucagaggcuggaucuucggcaccacacuggacagcaagacccagagccugcugaucgugaacaacgccaccaacguggucaucaaagugugcgaguuccaguucugcaacgaccccuuccugggcgucuacuaccacaagaacaacaagagcuggauggaaagcgaguuccggguguacagcagcgccaacaacugcaccuucgaguacgugucccagccuuuccugauggaccuggaaggcaagcagggcaacuucaagaaccugcgcgaguucguguuuaagaacaucgacggcuacuucaagaucuacagcaagcacaccccuaucaaccucgugcgggaucugccucagggcuucucugcucuggaaccccugguggaucugcccaucggcaucaacaucacccgguuucagacacugcuggcccugcacagaagcuaccugacaccuggcgauagcagcagcggauggacagcuggugccgccgcuuacuaugugggcuaccugcagccuagaaccuuccugcugaaguacaacgagaacggcaccaucaccgacgccguggauugugcucuggauccucugagcgagacaaagugcacccugaaguccuucaccguggaaaagggcaucuaccagaccagcaacuuccgggugcagcccaccgaauccaucgugcgguuccccaauaucaccaaucugugccccuucggcgagguguucaaugccaccagauucgccucuguguacgccuggaaccggaagcggaucagcaauugcguggccgacuacuccgugcuguacaacuccgccagcuucagcaccuucaagugcuacggcguguccccuaccaagcugaacgaccugugcuucacaaacguguacgccgacagcuucgugauccggggagaugaagugcggcagauugccccuggacagacaggcaagaucgccgacuacaacuacaagcugcccgacgacuucaccggcugugugauugccuggaacagcaagaaccuggacuccaaagucggcggcaacuacaauuaccuguaccggcuguuccggaaguccaaucugaagcccuucgagcgggacaucuccaccgagaucuaucaggccggcagcaccccuuguaacggcguggaaggcuucaacugcuacuucccacugcaguccuacggcuuucagcccacaaauggcgugggcuaucagcccuacagagugguggugcugagcuucgaacugcugcaugccccugccacagugugcggcccuaagaaaagcaccaaucucgugaagaacaaaugcgugaacuucaacuucaacggccugaccggcaccggcgugcugacagagagcaacaagaaguuccugccauuccagcaguuuggccgggauaucgccgauaccacagacgccguuagagauccccagacacuggaaauccuggacaucaccccuugcagcuucggcggagugucugugaucaccccuggcaccaacaccagcaaucagguggcagugcuguaccagggcgugaacuguaccgaagugcccguggccauucacgccgaucagcugacaccuacauggcggguguacuccaccggcagcaauguguuucagaccagagccggcugucugaucggagccgagcacgugaacaauagcuacgagugcgacauccccaucggcgcuggaaucugcgccagcuaccagacacagacaaacagcccucggagagccagaagcguggccagccagagcaucauugccuacacaaugucucugggcgccgagaacagcguggccuacuccaacaacucuaucgcuauccccaccaacuucaccaucagcgugaccacagagauccugccuguguccaugaccaagaccagcguggacugcaccauguacaucugcggcgauuccaccgagugcuccaaccugcugcugcaguacggcagcuucugcacccagcugaauagagcccugacagggaucgccguggaacaggacaagaacacccaagagguguucgcccaagugaagcagaucuacaagaccccuccuaucaaggacuucggcggcuucaauuucagccagauucugcccgauccuagcaagcccagcaagcggagcuucaucgaggaccugcuguucaacaaagugacacuggccgacgccggcuucaucaagcaguauggcgauugucugggcgacauugccgccagggaucugauuugcgcccagaaguuuaacggacugacagugcugccuccucugcugaccgaugagaugaucgcccaguacacaucugcccugcuggccggcacaaucacaagcggcuggacauuuggagcaggcgccgcucugcagauccccuuugcuaugcagauggccuaccgguucaacggcaucggagugacccagaaugugcuguacgagaaccagaagcugaucgccaaccaguucaacagcgccaucggcaagauccaggacagccugagcagcacagcaagcgcccugggaaagcugcaggacguggucaaccagaaugcccaggcacugaacacccuggucaagcagcuguccuccaacuucggcgccaucagcucugugcugaacgauauccugagcagacuggacaaggucgaggccgaggugcagaucgacagacugaucacaggcagacugcagagccuccagacauacgugacccagcagcugaucagagccgccgagauuagagccucugccaaucuggccgccaccaagaugucugagugugugcugggccagagcaagagaguggacuuuugcggcaagggcuaccaccugaugagcuucccucagucugccccucacggcgugguguuucugcacgugacauaugugcccgcucaagagaagaauuucaccaccgcuccagccaucugccacgacggcaaagcccacuuuccuagagaaggcguguucguguccaacggcacccauugguucgugacacagcggaacuucuacgagccccagaucaucaccaccgacaacaccuucgugucuggcaacugcgacgucgugaucggcauugugaacaauaccguguacgacccucugcagcccgagcuggacagcuucaaagaggaacuggacaaguacuuuaagaaccacacaagccccgacguggaccugggcgauaucagcggaaucaaugccagcgucgugaacauccagaaagagaucgaccggcugaacgagguggccaagaaucugaacgagagccugaucgaccugcaagaacuggggaaguacgagcaguacaucaaguggcccugguacaucuggcugggcuuuaucgccggacugauugccaucgugauggucacaaucaugcuguguugcaugaccagcugcuguagcugccugaagggcuguuguagcuguggcagcugcugcaaguucgacgaggacgauucugagcccgugcugaagggcgugaaacugcacuacacaugaggacuaguuauaagacugacuagcccgaugggccucccaacgggcccuccuccccuccuugcaccgagauuaauagaucuaaaaaaaaaaaaaaaaaaaaaaaaaaaaaaaaaaaaaaaaaaaaaaaaaaaaaaaaaaaaaaaaaaaaaaaaaaaaaaaaaaaaaaaaaaaaaaaaaaaa

SEQ ID NO: 25703 - RNA, 4017 nt, Artificial Sequence
  SARS-CoV-2/Wuhan/WIV05/2019__EPI_ISL_402128 spike protein mRNA gc mod (1-1273)(S477N_D614G)
aggagaaagcuuaccauguucguguuccuggugcugcugccucugguguccagccagugugugaaccugaccaccagaacacagcugccuccagccuacaccaacagcuuuaccagaggcguguacuaccccgacaagguguucagauccagcgugcugcacucuacccaggaccuguuccugccuuucuucagcaacgugaccugguuccacgccauccacguguccggcaccaauggcaccaagagauucgacaaccccgugcugcccuucaacgacgggguguacuuugccagcaccgagaaguccaacaucaucagaggcuggaucuucggcaccacacuggacagcaagacccagagccugcugaucgugaacaacgccaccaacguggucaucaaagugugcgaguuccaguucugcaacgaccccuuccugggcgucuacuaccacaagaacaacaagagcuggauggaaagcgaguuccggguguacagcagcgccaacaacugcaccuucgaguacgugucccagccuuuccugauggaccuggaaggcaagcagggcaacuucaagaaccugcgcgaguucguguuuaagaacaucgacggcuacuucaagaucuacagcaagcacaccccuaucaaccucgugcgggaucugccucagggcuucucugcucuggaaccccugguggaucugcccaucggcaucaacaucacccgguuucagacacugcuggcccugcacagaagcuaccugacaccuggcgauagcagcagcggauggacagcuggugccgccgcuuacuaugugggcuaccugcagccuagaaccuuccugcugaaguacaacgagaacggcaccaucaccgacgccguggauugugcucuggauccucugagcgagacaaagugcacccugaaguccuucaccguggaaaagggcaucuaccagaccagcaacuuccgggugcagcccaccgaauccaucgugcgguuccccaauaucaccaaucugugccccuucggcgagguguucaaugccaccagauucgccucuguguacgccuggaaccggaagcggaucagcaauugcguggccgacuacuccgugcuguacaacuccgccagcuucagcaccuucaagugcuacggcguguccccuaccaagcugaacgaccugugcuucacaaacguguacgccgacagcuucgugauccggggagaugaagugcggcagauugccccuggacagacaggcaagaucgccgacuacaacuacaagcugcccgacgacuucaccggcugugugauugccuggaacagcaacaaccuggacuccaaagucggcggcaacuacaauuaccuguaccggcuguuccggaaguccaaucugaagcccuucgagcgggacaucuccaccgagaucuaucaggccggcaacaccccuuguaacggcguggaaggcuucaacugcuacuucccacugcaguccuacggcuuucagcccacaaauggcgugggcuaucagcccuacagagugguggugcugagcuucgaacugcugcaugccccugccacagugugcggcccuaagaaaagcaccaaucucgugaagaacaaaugcgugaacuucaacuucaacggccugaccggcaccggcgugcugacagagagcaacaagaaguuccugccauuccagcaguuuggccgggauaucgccgauaccacagacgccguuagagauccccagacacuggaaauccuggacaucaccccuugcagcuucggcggagugucugugaucaccccuggcaccaacaccagcaaucagguggcagugcuguaccagggcgugaacuguaccgaagugcccguggccauucacgccgaucagcugacaccuacauggcggguguacuccaccggcagcaauguguuucagaccagagccggcugucugaucggagccgagcacgugaacaauagcuacgagugcgacauccccaucggcgcuggaaucugcgccagcuaccagacacagacaaacagcccucggagagccagaagcguggccagccagagcaucauugccuacacaaugucucugggcgccgagaacagcguggccuacuccaacaacucuaucgcuauccccaccaacuucaccaucagcgugaccacagagauccugccuguguccaugaccaagaccagcguggacugcaccauguacaucugcggcgauuccaccgagugcuccaaccugcugcugcaguacggcagcuucugcacccagcugaauagagcccugacagggaucgccguggaacaggacaagaacacccaagagguguucgcccaagugaagcagaucuacaagaccccuccuaucaaggacuucggcggcuucaauuucagccagauucugcccgauccuagcaagcccagcaagcggagcuucaucgaggaccugcuguucaacaaagugacacuggccgacgccggcuucaucaagcaguauggcgauugucugggcgacauugccgccagggaucugauuugcgcccagaaguuuaacggacugacagugcugccuccucugcugaccgaugagaugaucgcccaguacacaucugcccugcuggccggcacaaucacaagcggcuggacauuuggagcaggcgccgcucugcagauccccuuugcuaugcagauggccuaccgguucaacggcaucggagugacccagaaugugcuguacgagaaccagaagcugaucgccaaccaguucaacagcgccaucggcaagauccaggacagccugagcagcacagcaagcgcccugggaaagcugcaggacguggucaaccagaaugcccaggcacugaacacccuggucaagcagcuguccuccaacuucggcgccaucagcucugugcugaacgauauccugagcagacuggacaaggucgaggccgaggugcagaucgacagacugaucacaggcagacugcagagccuccagacauacgugacccagcagcugaucagagccgccgagauuagagccucugccaaucuggccgccaccaagaugucugagugugugcugggccagagcaagagaguggacuuuugcggcaagggcuaccaccugaugagcuucccucagucugccccucacggcgugguguuucugcacgugacauaugugcccgcucaagagaagaauuucaccaccgcuccagccaucugccacgacggcaaagcccacuuuccuagagaaggcguguucguguccaacggcacccauugguucgugacacagcggaacuucuacgagccccagaucaucaccaccgacaacaccuucgugucuggcaacugcgacgucgugaucggcauugugaacaauaccguguacgacccucugcagcccgagcuggacagcuucaaagaggaacuggacaaguacuuuaagaaccacacaagccccgacguggaccugggcgauaucagcggaaucaaugccagcgucgugaacauccagaaagagaucgaccggcugaacgagguggccaagaaucugaacgagagccugaucgaccugcaagaacuggggaaguacgagcaguacaucaaguggcccugguacaucuggcugggcuuuaucgccggacugauugccaucgugauggucacaaucaugcuguguugcaugaccagcugcuguagcugccugaagggcuguuguagcuguggcagcugcugcaaguucgacgaggacgauucugagcccgugcugaagggcgugaaacugcacuacacaugaggacuaguuauaagacugacuagcccgaugggccucccaacgggcccuccuccccuccuugcaccgagauuaauagaucuaaaaaaaaaaaaaaaaaaaaaaaaaaaaaaaaaaaaaaaaaaaaaaaaaaaaaaaaaaaaaaaaaaaaaaaaaaaaaaaaaaaaaaaaaaaaaaaaaaaa

SEQ ID NO: 25704 - RNA, 4017 nt, Artificial Sequence
  SARS-CoV-2/Wuhan/WIV05/2019__EPI_ISL_402128 spike protein mRNA gc mod (1-1273)(N501Y_D614G)
aggagaaagcuuaccauguucguguuccuggugcugcugccucugguguccagccagugugugaaccugaccaccagaacacagcugccuccagccuacaccaacagcuuuaccagaggcguguacuaccccgacaagguguucagauccagcgugcugcacucuacccaggaccuguuccugccuuucuucagcaacgugaccugguuccacgccauccacguguccggcaccaauggcaccaagagauucgacaaccccgugcugcccuucaacgacgggguguacuuugccagcaccgagaaguccaacaucaucagaggcuggaucuucggcaccacacuggacagcaagacccagagccugcugaucgugaacaacgccaccaacguggucaucaaagugugcgaguuccaguucugcaacgaccccuuccugggcgucuacuaccacaagaacaacaagagcuggauggaaagcgaguuccggguguacagcagcgccaacaacugcaccuucgaguacgugucccagccuuuccugauggaccuggaaggcaagcagggcaacuucaagaaccugcgcgaguucguguuuaagaacaucgacggcuacuucaagaucuacagcaagcacaccccuaucaaccucgugcgggaucugccucagggcuucucugcucuggaaccccugguggaucugcccaucggcaucaacaucacccgguuucagacacugcuggcccugcacagaagcuaccugacaccuggcgauagcagcagcggauggacagcuggugccgccgcuuacuaugugggcuaccugcagccuagaaccuuccugcugaaguacaacgagaacggcaccaucaccgacgccguggauugugcucuggauccucugagcgagacaaagugcacccugaaguccuucaccguggaaaagggcaucuaccagaccagcaacuuccgggugcagcccaccgaauccaucgugcgguuccccaauaucaccaaucugugccccuucggcgagguguucaaugccaccagauucgccucuguguacgccuggaaccggaagcggaucagcaauugcguggccgacuacuccgugcuguacaacuccgccagcuucagcaccuucaagugcuacggcguguccccuaccaagcugaacgaccugugcuucacaaacguguacgccgacagcuucgugauccggggagaugaagugcggcagauugccccuggacagacaggcaagaucgccgacuacaacuacaagcugcccgacgacuucaccggcugugugauugccuggaacagcaacaaccuggacuccaaagucggcggcaacuacaauuaccuguaccggcuguuccggaaguccaaucugaagcccuucgagcgggacaucuccaccgagaucuaucaggccggcagcaccccuuguaacggcguggaaggcuucaacugcuacuucccacugcaguccuacggcuuucagcccacauacggcgugggcuaucagcccuacagagugguggugcugagcuucgaacugcugcaugccccugccacagugugcggcccuaagaaaagcaccaaucucgugaagaacaaaugcgugaacuucaacuucaacggccugaccggcaccggcgugcugacagagagcaacaagaaguuccugccauuccagcaguuuggccgggauaucgccgauaccacagacgccguuagagauccccagacacuggaaauccuggacaucaccccuugcagcuucggcggagugucugugaucaccccuggcaccaacaccagcaaucagguggcagugcuguaccagggcgugaacuguaccgaagugcccguggccauucacgccgaucagcugacaccuacauggcggguguacuccaccggcagcaauguguuucagaccagagccggcugucugaucggagccgagcacgugaacaauagcuacgagugcgacauccccaucggcgcuggaaucugcgccagcuaccagacacagacaaacagcccucggagagccagaagcguggccagccagagcaucauugccuacacaaugucucugggcgccgagaacagcguggccuacuccaacaacucuaucgcuauccccaccaacuucaccaucagcgugaccacagagauccugccuguguccaugaccaagaccagcguggacugcaccauguacaucugcggcgauuccaccgagugcuccaaccugcugcugcaguacggcagcuucugcacccagcugaauagagcccugacagggaucgccguggaacaggacaagaacacccaagagguguucgcccaagugaagcagaucuacaagaccccuccuaucaaggacuucggcggcuucaauuucagccagauucugcccgauccuagcaagcccagcaagcggagcuucaucgaggaccugcuguucaacaaagugacacuggccgacgccggcuucaucaagcaguauggcgauugucugggcgacauugccgccagggaucugauuugcgcccagaaguuuaacggacugacagugcugccuccucugcugaccgaugagaugaucgcccaguacacaucugcccugcuggccggcacaaucacaagcggcuggacauuuggagcaggcgccgcucugcagauccccuuugcuaugcagauggccuaccgguucaacggcaucggagugacccagaaugugcuguacgagaaccagaagcugaucgccaaccaguucaacagcgccaucggcaagauccaggacagccugagcagcacagcaagcgcccugggaaagcugcaggacguggucaaccagaaugcccaggcacugaacacccuggucaagcagcuguccuccaacuucggcgccaucagcucugugcugaacgauauccugagcagacuggacaaggucgaggccgaggugcagaucgacagacugaucacaggcagacugcagagccuccagacauacgugacccagcagcugaucagagccgccgagauuagagccucugccaaucuggccgccaccaagaugucugagugugugcugggccagagcaagagaguggacuuuugcggcaagggcuaccaccugaugagcuucccucagucugccccucacggcgugguguuucugcacgugacauaugugcccgcucaagagaagaauuucaccaccgcuccagccaucugccacgacggcaaagcccacuuuccuagagaaggcguguucguguccaacggcacccauugguucgugacacagcggaacuucuacgagccccagaucaucaccaccgacaacaccuucgugucuggcaacugcgacgucgugaucggcauugugaacaauaccguguacgacccucugcagcccgagcuggacagcuucaaagaggaacuggacaaguacuuuaagaaccacacaagccccgacguggaccugggcgauaucagcggaaucaaugccagcgucgugaacauccagaaagagaucgaccggcugaacgagguggccaagaaucugaacgagagccugaucgaccugcaagaacuggggaaguacgagcaguacaucaaguggcccugguacaucuggcugggcuuuaucgccggacugauugccaucgugauggucacaaucaugcuguguugcaugaccagcugcuguagcugccugaagggcuguuguagcuguggcagcugcugcaaguucgacgaggacgauucugagcccgugcugaagggcgugaaacugcacuacacaugaggacuaguuauaagacugacuagcccgaugggccucccaacgggcccuccuccccuccuugcaccgagauuaauagaucuaaaaaaaaaaaaaaaaaaaaaaaaaaaaaaaaaaaaaaaaaaaaaaaaaaaaaaaaaaaaaaaaaaaaaaaaaaaaaaaaaaaaaaaaaaaaaaaaaaaa

SEQ ID NO: 25705 - RNA, 4011 nt, Artificial Sequence
  SARS-CoV-2/Wuhan/WIV05/2019__EPI_ISL_402128 spike protein mRNA gc mod (1-1273)(H69del_V70del_D614G)
aggagaaagcuuaccauguucguguuccuggugcugcugccucugguguccagccagugugugaaccugaccaccagaacacagcugccuccagccuacaccaacagcuuuaccagaggcguguacuaccccgacaagguguucagauccagcgugcugcacucuacccaggaccuguuccugccuuucuucagcaacgugaccugguuccacgccaucuccggcaccaauggcaccaagagauucgacaaccccgugcugcccuucaacgacgggguguacuuugccagcaccgagaaguccaacaucaucagaggcuggaucuucggcaccacacuggacagcaagacccagagccugcugaucgugaacaacgccaccaacguggucaucaaagugugcgaguuccaguucugcaacgaccccuuccugggcgucuacuaccacaagaacaacaagagcuggauggaaagcgaguuccggguguacagcagcgccaacaacugcaccuucgaguacgugucccagccuuuccugauggaccuggaaggcaagcagggcaacuucaagaaccugcgcgaguucguguuuaagaacaucgacggcuacuucaagaucuacagcaagcacaccccuaucaaccucgugcgggaucugccucagggcuucucugcucuggaaccccugguggaucugcccaucggcaucaacaucacccgguuucagacacugcuggcccugcacagaagcuaccugacaccuggcgauagcagcagcggauggacagcuggugccgccgcuuacuaugugggcuaccugcagccuagaaccuuccugcugaaguacaacgagaacggcaccaucaccgacgccguggauugugcucuggauccucugagcgagacaaagugcacccugaaguccuucaccguggaaaagggcaucuaccagaccagcaacuuccgggugcagcccaccgaauccaucgugcgguuccccaauaucaccaaucugugccccuucggcgagguguucaaugccaccagauucgccucuguguacgccuggaaccggaagcggaucagcaauugcguggccgacuacuccgugcuguacaacuccgccagcuucagcaccuucaagugcuacggcguguccccuaccaagcugaacgaccugugcuucacaaacguguacgccgacagcuucgugauccggggagaugaagugcggcagauugccccuggacagacaggcaagaucgccgacuacaacuacaagcugcccgacgacuucaccggcugugugauugccuggaacagcaacaaccuggacuccaaagucggcggcaacuacaauuaccuguaccggcuguuccggaaguccaaucugaagcccuucgagcgggacaucuccaccgagaucuaucaggccggcagcaccccuuguaacggcguggaaggcuucaacugcuacuucccacugcaguccuacggcuuucagcccacaaauggcgugggcuaucagcccuacagagugguggugcugagcuucgaacugcugcaugccccugccacagugugcggcccuaagaaaagcaccaaucucgugaagaacaaaugcgugaacuucaacuucaacggccugaccggcaccggcgugcugacagagagcaacaagaaguuccugccauuccagcaguuuggccgggauaucgccgauaccacagacgccguuagagauccccagacacuggaaauccuggacaucaccccuugcagcuucggcggagugucugugaucaccccuggcaccaacaccagcaaucagguggcagugcuguaccagggcgugaacuguaccgaagugcccguggccauucacgccgaucagcugacaccuacauggcggguguacuccaccggcagcaauguguuucagaccagagccggcugucugaucggagccgagcacgugaacaauagcuacgagugcgacauccccaucggcgcuggaaucugcgccagcuaccagacacagacaaacagcccucggagagccagaagcguggccagccagagcaucauugccuacacaaugucucugggcgccgagaacagcguggccuacuccaacaacucuaucgcuauccccaccaacuucaccaucagcgugaccacagagauccugccuguguccaugaccaagaccagcguggacugcaccauguacaucugcggcgauuccaccgagugcuccaaccugcugcugcaguacggcagcuucugcacccagcugaauagagcccugacagggaucgccguggaacaggacaagaacacccaagagguguucgcccaagugaagcagaucuacaagaccccuccuaucaaggacuucggcggcuucaauuucagccagauucugcccgauccuagcaagcccagcaagcggagcuucaucgaggaccugcuguucaacaaagugacacuggccgacgccggcuucaucaagcaguauggcgauugucugggcgacauugccgccagggaucugauuugcgcccagaaguuuaacggacugacagugcugccuccucugcugaccgaugagaugaucgcccaguacacaucugcccugcuggccggcacaaucacaagcggcuggacauuuggagcaggcgccgcucugcagauccccuuugcuaugcagauggccuaccgguucaacggcaucggagugacccagaaugugcuguacgagaaccagaagcugaucgccaaccaguucaacagcgccaucggcaagauccaggacagccugagcagcacagcaagcgcccugggaaagcugcaggacguggucaaccagaaugcccaggcacugaacacccuggucaagcagcuguccuccaacuucggcgccaucagcucugugcugaacgauauccugagcagacuggacaaggucgaggccgaggugcagaucgacagacugaucacaggcagacugcagagccuccagacauacgugacccagcagcugaucagagccgccgagauuagagccucugccaaucuggccgccaccaagaugucugagugugugcugggccagagcaagagaguggacuuuugcggcaagggcuaccaccugaugagcuucccucagucugccccucacggcgugguguuucugcacgugacauaugugcccgcucaagagaagaauuucaccaccgcuccagccaucugccacgacggcaaagcccacuuuccuagagaaggcguguucguguccaacggcacccauugguucgugacacagcggaacuucuacgagccccagaucaucaccaccgacaacaccuucgugucuggcaacugcgacgucgugaucggcauugugaacaauaccguguacgacccucugcagcccgagcuggacagcuucaaagaggaacuggacaaguacuuuaagaaccacacaagccccgacguggaccugggcgauaucagcggaaucaaugccagcgucgugaacauccagaaagagaucgaccggcugaacgagguggccaagaaucugaacgagagccugaucgaccugcaagaacuggggaaguacgagcaguacaucaaguggcccugguacaucuggcugggcuuuaucgccggacugauugccaucgugauggucacaaucaugcuguguugcaugaccagcugcuguagcugccugaagggcuguuguagcuguggcagcugcugcaaguucgacgaggacgauucugagcccgugcugaagggcgugaaacugcacuacacaugaggacuaguuauaagacugacuagcccgaugggccucccaacgggcccuccuccccuccuugcaccgagauuaauagaucuaaaaaaaaaaaaaaaaaaaaaaaaaaaaaaaaaaaaaaaaaaaaaaaaaaaaaaaaaaaaaaaaaaaaaaaaaaaaaaaaaaaaaaaaaaaaaaaaaaaa

SEQ ID NO: 25706 - RNA, 4017 nt, Artificial Sequence
  SARS-CoV-2/Wuhan/WIV05/2019__EPI_ISL_402128 spike protein mRNA gc mod (1-1273)(Y453F_D614G)
aggagaaagcuuaccauguucguguuccuggugcugcugccucugguguccagccagugugugaaccugaccaccagaacacagcugccuccagccuacaccaacagcuuuaccagaggcguguacuaccccgacaagguguucagauccagcgugcugcacucuacccaggaccuguuccugccuuucuucagcaacgugaccugguuccacgccauccacguguccggcaccaauggcaccaagagauucgacaaccccgugcugcccuucaacgacgggguguacuuugccagcaccgagaaguccaacaucaucagaggcuggaucuucggcaccacacuggacagcaagacccagagccugcugaucgugaacaacgccaccaacguggucaucaaagugugcgaguuccaguucugcaacgaccccuuccugggcgucuacuaccacaagaacaacaagagcuggauggaaagcgaguuccggguguacagcagcgccaacaacugcaccuucgaguacgugucccagccuuuccugauggaccuggaaggcaagcagggcaacuucaagaaccugcgcgaguucguguuuaagaacaucgacggcuacuucaagaucuacagcaagcacaccccuaucaaccucgugcgggaucugccucagggcuucucugcucuggaaccccugguggaucugcccaucggcaucaacaucacccgguuucagacacugcuggcccugcacagaagcuaccugacaccuggcgauagcagcagcggauggacagcuggugccgccgcuuacuaugugggcuaccugcagccuagaaccuuccugcugaaguacaacgagaacggcaccaucaccgacgccguggauugugcucuggauccucugagcgagacaaagugcacccugaaguccuucaccguggaaaagggcaucuaccagaccagcaacuuccgggugcagcccaccgaauccaucgugcgguuccccaauaucaccaaucugugccccuucggcgagguguucaaugccaccagauucgccucuguguacgccuggaaccggaagcggaucagcaauugcguggccgacuacuccgugcuguacaacuccgccagcuucagcaccuucaagugcuacggcguguccccuaccaagcugaacgaccugugcuucacaaacguguacgccgacagcuucgugauccggggagaugaagugcggcagauugccccuggacagacaggcaagaucgccgacuacaacuacaagcugcccgacgacuucaccggcugugugauugccuggaacagcaacaaccuggacuccaaagucggcggcaacuacaauuaccuguuccggcuguuccggaaguccaaucugaagcccuucgagcgggacaucuccaccgagaucuaucaggccggcagcaccccuuguaacggcguggaaggcuucaacugcuacuucccacugcaguccuacggcuuucagcccacaaauggcgugggcuaucagcccuacagagugguggugcugagcuucgaacugcugcaugccccugccacagugugcggcccuaagaaaagcaccaaucucgugaagaacaaaugcgugaacuucaacuucaacggccugaccggcaccggcgugcugacagagagcaacaagaaguuccugccauuccagcaguuuggccgggauaucgccgauaccacagacgccguuagagauccccagacacuggaaauccuggacaucaccccuugcagcuucggcggagugucugugaucaccccuggcaccaacaccagcaaucagguggcagugcuguaccagggcgugaacuguaccgaagugcccguggccauucacgccgaucagcugacaccuacauggcggguguacuccaccggcagcaauguguuucagaccagagccggcugucugaucggagccgagcacgugaacaauagcuacgagugcgacauccccaucggcgcuggaaucugcgccagcuaccagacacagacaaacagcccucggagagccagaagcguggccagccagagcaucauugccuacacaaugucucugggcgccgagaacagcguggccuacuccaacaacucuaucgcuauccccaccaacuucaccaucagcgugaccacagagauccugccuguguccaugaccaagaccagcguggacugcaccauguacaucugcggcgauuccaccgagugcuccaaccugcugcugcaguacggcagcuucugcacccagcugaauagagcccugacagggaucgccguggaacaggacaagaacacccaagagguguucgcccaagugaagcagaucuacaagaccccuccuaucaaggacuucggcggcuucaauuucagccagauucugcccgauccuagcaagcccagcaagcggagcuucaucgaggaccugcuguucaacaaagugacacuggccgacgccggcuucaucaagcaguauggcgauugucugggcgacauugccgccagggaucugauuugcgcccagaaguuuaacggacugacagugcugccuccucugcugaccgaugagaugaucgcccaguacacaucugcccugcuggccggcacaaucacaagcggcuggacauuuggagcaggcgccgcucugcagauccccuuugcuaugcagauggccuaccgguucaacggcaucggagugacccagaaugugcuguacgagaaccagaagcugaucgccaaccaguucaacagcgccaucggcaagauccaggacagccugagcagcacagcaagcgcccugggaaagcugcaggacguggucaaccagaaugcccaggcacugaacacccuggucaagcagcuguccuccaacuucggcgccaucagcucugugcugaacgauauccugagcagacuggacaaggucgaggccgaggugcagaucgacagacugaucacaggcagacugcagagccuccagacauacgugacccagcagcugaucagagccgccgagauuagagccucugccaaucuggccgccaccaagaugucugagugugugcugggccagagcaagagaguggacuuuugcggcaagggcuaccaccugaugagcuucccucagucugccccucacggcgugguguuucugcacgugacauaugugcccgcucaagagaagaauuucaccaccgcuccagccaucugccacgacggcaaagcccacuuuccuagagaaggcguguucguguccaacggcacccauugguucgugacacagcggaacuucuacgagccccagaucaucaccaccgacaacaccuucgugucuggcaacugcgacgucgugaucggcauugugaacaauaccguguacgacccucugcagcccgagcuggacagcuucaaagaggaacuggacaaguacuuuaagaaccacacaagccccgacguggaccugggcgauaucagcggaaucaaugccagcgucgugaacauccagaaagagaucgaccggcugaacgagguggccaagaaucugaacgagagccugaucgaccugcaagaacuggggaaguacgagcaguacaucaaguggcccugguacaucuggcugggcuuuaucgccggacugauugccaucgugauggucacaaucaugcuguguugcaugaccagcugcuguagcugccugaagggcuguuguagcuguggcagcugcugcaaguucgacgaggacgauucugagcccgugcugaagggcgugaaacugcacuacacaugaggacuaguuauaagacugacuagcccgaugggccucccaacgggcccuccuccccuccuugcaccgagauuaauagaucuaaaaaaaaaaaaaaaaaaaaaaaaaaaaaaaaaaaaaaaaaaaaaaaaaaaaaaaaaaaaaaaaaaaaaaaaaaaaaaaaaaaaaaaaaaaaaaaaaaaa

SEQ ID NO: 25707 - RNA, 4017 nt, Artificial Sequence
  SARS-CoV-2/Wuhan/WIV05/2019__EPI_ISL_402128 spike protein mRNA gc mod (1-1273)(D614G_I692V)
aggagaaagcuuaccauguucguguuccuggugcugcugccucugguguccagccagugugugaaccugaccaccagaacacagcugccuccagccuacaccaacagcuuuaccagaggcguguacuaccccgacaagguguucagauccagcgugcugcacucuacccaggaccuguuccugccuuucuucagcaacgugaccugguuccacgccauccacguguccggcaccaauggcaccaagagauucgacaaccccgugcugcccuucaacgacgggguguacuuugccagcaccgagaaguccaacaucaucagaggcuggaucuucggcaccacacuggacagcaagacccagagccugcugaucgugaacaacgccaccaacguggucaucaaagugugcgaguuccaguucugcaacgaccccuuccugggcgucuacuaccacaagaacaacaagagcuggauggaaagcgaguuccggguguacagcagcgccaacaacugcaccuucgaguacgugucccagccuuuccugauggaccuggaaggcaagcagggcaacuucaagaaccugcgcgaguucguguuuaagaacaucgacggcuacuucaagaucuacagcaagcacaccccuaucaaccucgugcgggaucugccucagggcuucucugcucuggaaccccugguggaucugcccaucggcaucaacaucacccgguuucagacacugcuggcccugcacagaagcuaccugacaccuggcgauagcagcagcggauggacagcuggugccgccgcuuacuaugugggcuaccugcagccuagaaccuuccugcugaaguacaacgagaacggcaccaucaccgacgccguggauugugcucuggauccucugagcgagacaaagugcacccugaaguccuucaccguggaaaagggcaucuaccagaccagcaacuuccgggugcagcccaccgaauccaucgugcgguuccccaauaucaccaaucugugccccuucggcgagguguucaaugccaccagauucgccucuguguacgccuggaaccggaagcggaucagcaauugcguggccgacuacuccgugcuguacaacuccgccagcuucagcaccuucaagugcuacggcguguccccuaccaagcugaacgaccugugcuucacaaacguguacgccgacagcuucgugauccggggagaugaagugcggcagauugccccuggacagacaggcaagaucgccgacuacaacuacaagcugcccgacgacuucaccggcugugugauugccuggaacagcaacaaccuggacuccaaagucggcggcaacuacaauuaccuguaccggcuguuccggaaguccaaucugaagcccuucgagcgggacaucuccaccgagaucuaucaggccggcagcaccccuuguaacggcguggaaggcuucaacugcuacuucccacugcaguccuacggcuuucagcccacaaauggcgugggcuaucagcccuacagagugguggugcugagcuucgaacugcugcaugccccugccacagugugcggcccuaagaaaagcaccaaucucgugaagaacaaaugcgugaacuucaacuucaacggccugaccggcaccggcgugcugacagagagcaacaagaaguuccugccauuccagcaguuuggccgggauaucgccgauaccacagacgccguuagagauccccagacacuggaaauccuggacaucaccccuugcagcuucggcggagugucugugaucaccccuggcaccaacaccagcaaucagguggcagugcuguaccagggcgugaacuguaccgaagugcccguggccauucacgccgaucagcugacaccuacauggcggguguacuccaccggcagcaauguguuucagaccagagccggcugucugaucggagccgagcacgugaacaauagcuacgagugcgacauccccaucggcgcuggaaucugcgccagcuaccagacacagacaaacagcccucggagagccagaagcguggccagccagagcgugauugccuacacaaugucucugggcgccgagaacagcguggccuacuccaacaacucuaucgcuauccccaccaacuucaccaucagcgugaccacagagauccugccuguguccaugaccaagaccagcguggacugcaccauguacaucugcggcgauuccaccgagugcuccaaccugcugcugcaguacggcagcuucugcacccagcugaauagagcccugacagggaucgccguggaacaggacaagaacacccaagagguguucgcccaagugaagcagaucuacaagaccccuccuaucaaggacuucggcggcuucaauuucagccagauucugcccgauccuagcaagcccagcaagcggagcuucaucgaggaccugcuguucaacaaagugacacuggccgacgccggcuucaucaagcaguauggcgauugucugggcgacauugccgccagggaucugauuugcgcccagaaguuuaacggacugacagugcugccuccucugcugaccgaugagaugaucgcccaguacacaucugcccugcuggccggcacaaucacaagcggcuggacauuuggagcaggcgccgcucugcagauccccuuugcuaugcagauggccuaccgguucaacggcaucggagugacccagaaugugcuguacgagaaccagaagcugaucgccaaccaguucaacagcgccaucggcaagauccaggacagccugagcagcacagcaagcgcccugggaaagcugcaggacguggucaaccagaaugcccaggcacugaacacccuggucaagcagcuguccuccaacuucggcgccaucagcucugugcugaacgauauccugagcagacuggacaaggucgaggccgaggugcagaucgacagacugaucacaggcagacugcagagccuccagacauacgugacccagcagcugaucagagccgccgagauuagagccucugccaaucuggccgccaccaagaugucugagugugugcugggccagagcaagagaguggacuuuugcggcaagggcuaccaccugaugagcuucccucagucugccccucacggcgugguguuucugcacgugacauaugugcccgcucaagagaagaauuucaccaccgcuccagccaucugccacgacggcaaagcccacuuuccuagagaaggcguguucguguccaacggcacccauugguucgugacacagcggaacuucuacgagccccagaucaucaccaccgacaacaccuucgugucuggcaacugcgacgucgugaucggcauugugaacaauaccguguacgacccucugcagcccgagcuggacagcuucaaagaggaacuggacaaguacuuuaagaaccacacaagccccgacguggaccugggcgauaucagcggaaucaaugccagcgucgugaacauccagaaagagaucgaccggcugaacgagguggccaagaaucugaacgagagccugaucgaccugcaagaacuggggaaguacgagcaguacaucaaguggcccugguacaucuggcugggcuuuaucgccggacugauugccaucgugauggucacaaucaugcuguguugcaugaccagcugcuguagcugccugaagggcuguuguagcuguggcagcugcugcaaguucgacgaggacgauucugagcccgugcugaagggcgugaaacugcacuacacaugaggacuaguuauaagacugacuagcccgaugggccucccaacgggcccuccuccccuccuugcaccgagauuaauagaucuaaaaaaaaaaaaaaaaaaaaaaaaaaaaaaaaaaaaaaaaaaaaaaaaaaaaaaaaaaaaaaaaaaaaaaaaaaaaaaaaaaaaaaaaaaaaaaaaaaaa

SEQ ID NO: 25708 - RNA, 4017 nt, Artificial Sequence
  SARS-CoV-2/Wuhan/WIV05/2019__EPI_ISL_402128 spike protein mRNA gc mod (1-1273)(D614G_M1229I)
aggagaaagcuuaccauguucguguuccuggugcugcugccucugguguccagccagugugugaaccugaccaccagaacacagcugccuccagccuacaccaacagcuuuaccagaggcguguacuaccccgacaagguguucagauccagcgugcugcacucuacccaggaccuguuccugccuuucuucagcaacgugaccugguuccacgccauccacguguccggcaccaauggcaccaagagauucgacaaccccgugcugcccuucaacgacgggguguacuuugccagcaccgagaaguccaacaucaucagaggcuggaucuucggcaccacacuggacagcaagacccagagccugcugaucgugaacaacgccaccaacguggucaucaaagugugcgaguuccaguucugcaacgaccccuuccugggcgucuacuaccacaagaacaacaagagcuggauggaaagcgaguuccggguguacagcagcgccaacaacugcaccuucgaguacgugucccagccuuuccugauggaccuggaaggcaagcagggcaacuucaagaaccugcgcgaguucguguuuaagaacaucgacggcuacuucaagaucuacagcaagcacaccccuaucaaccucgugcgggaucugccucagggcuucucugcucuggaaccccugguggaucugcccaucggcaucaacaucacccgguuucagacacugcuggcccugcacagaagcuaccugacaccuggcgauagcagcagcggauggacagcuggugccgccgcuuacuaugugggcuaccugcagccuagaaccuuccugcugaaguacaacgagaacggcaccaucaccgacgccguggauugugcucuggauccucugagcgagacaaagugcacccugaaguccuucaccguggaaaagggcaucuaccagaccagcaacuuccgggugcagcccaccgaauccaucgugcgguuccccaauaucaccaaucugugccccuucggcgagguguucaaugccaccagauucgccucuguguacgccuggaaccggaagcggaucagcaauugcguggccgacuacuccgugcuguacaacuccgccagcuucagcaccuucaagugcuacggcguguccccuaccaagcugaacgaccugugcuucacaaacguguacgccgacagcuucgugauccggggagaugaagugcggcagauugccccuggacagacaggcaagaucgccgacuacaacuacaagcugcccgacgacuucaccggcugugugauugccuggaacagcaacaaccuggacuccaaagucggcggcaacuacaauuaccuguaccggcuguuccggaaguccaaucugaagcccuucgagcgggacaucuccaccgagaucuaucaggccggcagcaccccuuguaacggcguggaaggcuucaacugcuacuucccacugcaguccuacggcuuucagcccacaaauggcgugggcuaucagcccuacagagugguggugcugagcuucgaacugcugcaugccccugccacagugugcggcccuaagaaaagcaccaaucucgugaagaacaaaugcgugaacuucaacuucaacggccugaccggcaccggcgugcugacagagagcaacaagaaguuccugccauuccagcaguuuggccgggauaucgccgauaccacagacgccguuagagauccccagacacuggaaauccuggacaucaccccuugcagcuucggcggagugucugugaucaccccuggcaccaacaccagcaaucagguggcagugcuguaccagggcgugaacuguaccgaagugcccguggccauucacgccgaucagcugacaccuacauggcggguguacuccaccggcagcaauguguuucagaccagagccggcugucugaucggagccgagcacgugaacaauagcuacgagugcgacauccccaucggcgcuggaaucugcgccagcuaccagacacagacaaacagcccucggagagccagaagcguggccagccagagcaucauugccuacacaaugucucugggcgccgagaacagcguggccuacuccaacaacucuaucgcuauccccaccaacuucaccaucagcgugaccacagagauccugccuguguccaugaccaagaccagcguggacugcaccauguacaucugcggcgauuccaccgagugcuccaaccugcugcugcaguacggcagcuucugcacccagcugaauagagcccugacagggaucgccguggaacaggacaagaacacccaagagguguucgcccaagugaagcagaucuacaagaccccuccuaucaaggacuucggcggcuucaauuucagccagauucugcccgauccuagcaagcccagcaagcggagcuucaucgaggaccugcuguucaacaaagugacacuggccgacgccggcuucaucaagcaguauggcgauugucugggcgacauugccgccagggaucugauuugcgcccagaaguuuaacggacugacagugcugccuccucugcugaccgaugagaugaucgcccaguacacaucugcccugcuggccggcacaaucacaagcggcuggacauuuggagcaggcgccgcucugcagauccccuuugcuaugcagauggccuaccgguucaacggcaucggagugacccagaaugugcuguacgagaaccagaagcugaucgccaaccaguucaacagcgccaucggcaagauccaggacagccugagcagcacagcaagcgcccugggaaagcugcaggacguggucaaccagaaugcccaggcacugaacacccuggucaagcagcuguccuccaacuucggcgccaucagcucugugcugaacgauauccugagcagacuggacaaggucgaggccgaggugcagaucgacagacugaucacaggcagacugcagagccuccagacauacgugacccagcagcugaucagagccgccgagauuagagccucugccaaucuggccgccaccaagaugucugagugugugcugggccagagcaagagaguggacuuuugcggcaagggcuaccaccugaugagcuucccucagucugccccucacggcgugguguuucugcacgugacauaugugcccgcucaagagaagaauuucaccaccgcuccagccaucugccacgacggcaaagcccacuuuccuagagaaggcguguucguguccaacggcacccauugguucgugacacagcggaacuucuacgagccccagaucaucaccaccgacaacaccuucgugucuggcaacugcgacgucgugaucggcauugugaacaauaccguguacgacccucugcagcccgagcuggacagcuucaaagaggaacuggacaaguacuuuaagaaccacacaagccccgacguggaccugggcgauaucagcggaaucaaugccagcgucgugaacauccagaaagagaucgaccggcugaacgagguggccaagaaucugaacgagagccugaucgaccugcaagaacuggggaaguacgagcaguacaucaaguggcccugguacaucuggcugggcuuuaucgccggacugauugccaucgugaucgucacaaucaugcuguguugcaugaccagcugcuguagcugccugaagggcuguuguagcuguggcagcugcugcaaguucgacgaggacgauucugagcccgugcugaagggcgugaaacugcacuacacaugaggacuaguuauaagacugacuagcccgaugggccucccaacgggcccuccuccccuccuugcaccgagauuaauagaucuaaaaaaaaaaaaaaaaaaaaaaaaaaaaaaaaaaaaaaaaaaaaaaaaaaaaaaaaaaaaaaaaaaaaaaaaaaaaaaaaaaaaaaaaaaaaaaaaaaaa

SEQ ID NO: 25709 - RNA, 4011 nt, Artificial Sequence
  SARS-CoV-2/Wuhan/WIV05/2019__EPI_ISL_402128 spike protein mRNA gc mod (1-1273)(H69del_V70del_A222V_Y453F_S477N_D614G_I692V)
aggagaaagcuuaccauguucguguuccuggugcugcugccucugguguccagccagugugugaaccugaccaccagaacacagcugccuccagccuacaccaacagcuuuaccagaggcguguacuaccccgacaagguguucagauccagcgugcugcacucuacccaggaccuguuccugccuuucuucagcaacgugaccugguuccacgccaucuccggcaccaauggcaccaagagauucgacaaccccgugcugcccuucaacgacgggguguacuuugccagcaccgagaaguccaacaucaucagaggcuggaucuucggcaccacacuggacagcaagacccagagccugcugaucgugaacaacgccaccaacguggucaucaaagugugcgaguuccaguucugcaacgaccccuuccugggcgucuacuaccacaagaacaacaagagcuggauggaaagcgaguuccggguguacagcagcgccaacaacugcaccuucgaguacgugucccagccuuuccugauggaccuggaaggcaagcagggcaacuucaagaaccugcgcgaguucguguuuaagaacaucgacggcuacuucaagaucuacagcaagcacaccccuaucaaccucgugcgggaucugccucagggcuucucugugcuggaaccccugguggaucugcccaucggcaucaacaucacccgguuucagacacugcuggcccugcacagaagcuaccugacaccuggcgauagcagcagcggauggacagcuggugccgccgcuuacuaugugggcuaccugcagccuagaaccuuccugcugaaguacaacgagaacggcaccaucaccgacgccguggauugugcucuggauccucugagcgagacaaagugcacccugaaguccuucaccguggaaaagggcaucuaccagaccagcaacuuccgggugcagcccaccgaauccaucgugcgguuccccaauaucaccaaucugugccccuucggcgagguguucaaugccaccagauucgccucuguguacgccuggaaccggaagcggaucagcaauugcguggccgacuacuccgugcuguacaacuccgccagcuucagcaccuucaagugcuacggcguguccccuaccaagcugaacgaccugugcuucacaaacguguacgccgacagcuucgugauccggggagaugaagugcggcagauugccccuggacagacaggcaagaucgccgacuacaacuacaagcugcccgacgacuucaccggcugugugauugccuggaacagcaacaaccuggacuccaaagucggcggcaacuacaauuaccuguuccggcuguuccggaaguccaaucugaagcccuucgagcgggacaucuccaccgagaucuaucaggccggcaacaccccuuguaacggcguggaaggcuucaacugcuacuucccacugcaguccuacggcuuucagcccacaaauggcgugggcuaucagcccuacagagugguggugcugagcuucgaacugcugcaugccccugccacagugugcggcccuaagaaaagcaccaaucucgugaagaacaaaugcgugaacuucaacuucaacggccugaccggcaccggcgugcugacagagagcaacaagaaguuccugccauuccagcaguuuggccgggauaucgccgauaccacagacgccguuagagauccccagacacuggaaauccuggacaucaccccuugcagcuucggcggagugucugugaucaccccuggcaccaacaccagcaaucagguggcagugcuguaccagggcgugaacuguaccgaagugcccguggccauucacgccgaucagcugacaccuacauggcggguguacuccaccggcagcaauguguuucagaccagagccggcugucugaucggagccgagcacgugaacaauagcuacgagugcgacauccccaucggcgcuggaaucugcgccagcuaccagacacagacaaacagcccucggagagccagaagcguggccagccagagcgugauugccuacacaaugucucugggcgccgagaacagcguggccuacuccaacaacucuaucgcuauccccaccaacuucaccaucagcgugaccacagagauccugccuguguccaugaccaagaccagcguggacugcaccauguacaucugcggcgauuccaccgagugcuccaaccugcugcugcaguacggcagcuucugcacccagcugaauagagcccugacagggaucgccguggaacaggacaagaacacccaagagguguucgcccaagugaagcagaucuacaagaccccuccuaucaaggacuucggcggcuucaauuucagccagauucugcccgauccuagcaagcccagcaagcggagcuucaucgaggaccugcuguucaacaaagugacacuggccgacgccggcuucaucaagcaguauggcgauugucugggcgacauugccgccagggaucugauuugcgcccagaaguuuaacggacugacagugcugccuccucugcugaccgaugagaugaucgcccaguacacaucugcccugcuggccggcacaaucacaagcggcuggacauuuggagcaggcgccgcucugcagauccccuuugcuaugcagauggccuaccgguucaacggcaucggagugacccagaaugugcuguacgagaaccagaagcugaucgccaaccaguucaacagcgccaucggcaagauccaggacagccugagcagcacagcaagcgcccugggaaagcugcaggacguggucaaccagaaugcccaggcacugaacacccuggucaagcagcuguccuccaacuucggcgccaucagcucugugcugaacgauauccugagcagacuggacaaggucgaggccgaggugcagaucgacagacugaucacaggcagacugcagagccuccagacauacgugacccagcagcugaucagagccgccgagauuagagccucugccaaucuggccgccaccaagaugucugagugugugcugggccagagcaagagaguggacuuuugcggcaagggcuaccaccugaugagcuucccucagucugccccucacggcgugguguuucugcacgugacauaugugcccgcucaagagaagaauuucaccaccgcuccagccaucugccacgacggcaaagcccacuuuccuagagaaggcguguucguguccaacggcacccauugguucgugacacagcggaacuucuacgagccccagaucaucaccaccgacaacaccuucgugucuggcaacugcgacgucgugaucggcauugugaacaauaccguguacgacccucugcagcccgagcuggacagcuucaaagaggaacuggacaaguacuuuaagaaccacacaagccccgacguggaccugggcgauaucagcggaaucaaugccagcgucgugaacauccagaaagagaucgaccggcugaacgagguggccaagaaucugaacgagagccugaucgaccugcaagaacuggggaaguacgagcaguacaucaaguggcccugguacaucuggcugggcuuuaucgccggacugauugccaucgugauggucacaaucaugcuguguugcaugaccagcugcuguagcugccugaagggcuguuguagcuguggcagcugcugcaaguucgacgaggacgauucugagcccgugcugaagggcgugaaacugcacuacacaugaggacuaguuauaagacugacuagcccgaugggccucccaacgggcccuccuccccuccuugcaccgagauuaauagaucuaaaaaaaaaaaaaaaaaaaaaaaaaaaaaaaaaaaaaaaaaaaaaaaaaaaaaaaaaaaaaaaaaaaaaaaaaaaaaaaaaaaaaaaaaaaaaaaaaaaa

SEQ ID NO: 25710 - RNA, 4011 nt, Artificial Sequence
  SARS-CoV-2/Wuhan/WIV05/2019__EPI_ISL_402128 spike protein mRNA gc mod (1-1273)(H69del_V70del_Y453F_D614G_I692V_M1229I)
aggagaaagcuuaccauguucguguuccuggugcugcugccucugguguccagccagugugugaaccugaccaccagaacacagcugccuccagccuacaccaacagcuuuaccagaggcguguacuaccccgacaagguguucagauccagcgugcugcacucuacccaggaccuguuccugccuuucuucagcaacgugaccugguuccacgccaucuccggcaccaauggcaccaagagauucgacaaccccgugcugcccuucaacgacgggguguacuuugccagcaccgagaaguccaacaucaucagaggcuggaucuucggcaccacacuggacagcaagacccagagccugcugaucgugaacaacgccaccaacguggucaucaaagugugcgaguuccaguucugcaacgaccccuuccugggcgucuacuaccacaagaacaacaagagcuggauggaaagcgaguuccggguguacagcagcgccaacaacugcaccuucgaguacgugucccagccuuuccugauggaccuggaaggcaagcagggcaacuucaagaaccugcgcgaguucguguuuaagaacaucgacggcuacuucaagaucuacagcaagcacaccccuaucaaccucgugcgggaucugccucagggcuucucugcucuggaaccccugguggaucugcccaucggcaucaacaucacccgguuucagacacugcuggcccugcacagaagcuaccugacaccuggcgauagcagcagcggauggacagcuggugccgccgcuuacuaugugggcuaccugcagccuagaaccuuccugcugaaguacaacgagaacggcaccaucaccgacgccguggauugugcucuggauccucugagcgagacaaagugcacccugaaguccuucaccguggaaaagggcaucuaccagaccagcaacuuccgggugcagcccaccgaauccaucgugcgguuccccaauaucaccaaucugugccccuucggcgagguguucaaugccaccagauucgccucuguguacgccuggaaccggaagcggaucagcaauugcguggccgacuacuccgugcuguacaacuccgccagcuucagcaccuucaagugcuacggcguguccccuaccaagcugaacgaccugugcuucacaaacguguacgccgacagcuucgugauccggggagaugaagugcggcagauugccccuggacagacaggcaagaucgccgacuacaacuacaagcugcccgacgacuucaccggcugugugauugccuggaacagcaacaaccuggacuccaaagucggcggcaacuacaauuaccuguuccggcuguuccggaaguccaaucugaagcccuucgagcgggacaucuccaccgagaucuaucaggccggcagcaccccuuguaacggcguggaaggcuucaacugcuacuucccacugcaguccuacggcuuucagcccacaaauggcgugggcuaucagcccuacagagugguggugcugagcuucgaacugcugcaugccccugccacagugugcggcccuaagaaaagcaccaaucucgugaagaacaaaugcgugaacuucaacuucaacggccugaccggcaccggcgugcugacagagagcaacaagaaguuccugccauuccagcaguuuggccgggauaucgccgauaccacagacgccguuagagauccccagacacuggaaauccuggacaucaccccuugcagcuucggcggagugucugugaucaccccuggcaccaacaccagcaaucagguggcagugcuguaccagggcgugaacuguaccgaagugcccguggccauucacgccgaucagcugacaccuacauggcggguguacuccaccggcagcaauguguuucagaccagagccggcugucugaucggagccgagcacgugaacaauagcuacgagugcgacauccccaucggcgcuggaaucugcgccagcuaccagacacagacaaacagcccucggagagccagaagcguggccagccagagcgugauugccuacacaaugucucugggcgccgagaacagcguggccuacuccaacaacucuaucgcuauccccaccaacuucaccaucagcgugaccacagagauccugccuguguccaugaccaagaccagcguggacugcaccauguacaucugcggcgauuccaccgagugcuccaaccugcugcugcaguacggcagcuucugcacccagcugaauagagcccugacagggaucgccguggaacaggacaagaacacccaagagguguucgcccaagugaagcagaucuacaagaccccuccuaucaaggacuucggcggcuucaauuucagccagauucugcccgauccuagcaagcccagcaagcggagcuucaucgaggaccugcuguucaacaaagugacacuggccgacgccggcuucaucaagcaguauggcgauugucugggcgacauugccgccagggaucugauuugcgcccagaaguuuaacggacugacagugcugccuccucugcugaccgaugagaugaucgcccaguacacaucugcccugcuggccggcacaaucacaagcggcuggacauuuggagcaggcgccgcucugcagauccccuuugcuaugcagauggccuaccgguucaacggcaucggagugacccagaaugugcuguacgagaaccagaagcugaucgccaaccaguucaacagcgccaucggcaagauccaggacagccugagcagcacagcaagcgcccugggaaagcugcaggacguggucaaccagaaugcccaggcacugaacacccuggucaagcagcuguccuccaacuucggcgccaucagcucugugcugaacgauauccugagcagacuggacaaggucgaggccgaggugcagaucgacagacugaucacaggcagacugcagagccuccagacauacgugacccagcagcugaucagagccgccgagauuagagccucugccaaucuggccgccaccaagaugucugagugugugcugggccagagcaagagaguggacuuuugcggcaagggcuaccaccugaugagcuucccucagucugccccucacggcgugguguuucugcacgugacauaugugcccgcucaagagaagaauuucaccaccgcuccagccaucugccacgacggcaaagcccacuuuccuagagaaggcguguucguguccaacggcacccauugguucgugacacagcggaacuucuacgagccccagaucaucaccaccgacaacaccuucgugucuggcaacugcgacgucgugaucggcauugugaacaauaccguguacgacccucugcagcccgagcuggacagcuucaaagaggaacuggacaaguacuuuaagaaccacacaagccccgacguggaccugggcgauaucagcggaaucaaugccagcgucgugaacauccagaaagagaucgaccggcugaacgagguggccaagaaucugaacgagagccugaucgaccugcaagaacuggggaaguacgagcaguacaucaaguggcccugguacaucuggcugggcuuuaucgccggacugauugccaucgugaucgucacaaucaugcuguguugcaugaccagcugcuguagcugccugaagggcuguuguagcuguggcagcugcugcaaguucgacgaggacgauucugagcccgugcugaagggcgugaaacugcacuacacaugaggacuaguuauaagacugacuagcccgaugggccucccaacgggcccuccuccccuccuugcaccgagauuaauagaucuaaaaaaaaaaaaaaaaaaaaaaaaaaaaaaaaaaaaaaaaaaaaaaaaaaaaaaaaaaaaaaaaaaaaaaaaaaaaaaaaaaaaaaaaaaaaaaaaaaaa

SEQ ID NO: 25711 - RNA, 4008 nt, Artificial Sequence
  SARS-CoV-2/Wuhan/WIV05/2019__EPI_ISL_402128 spike protein mRNA gc mod (1-1273)(H69del_V70del_Y144del_N501Y_A570D_D614G_P681H_T716I_S982 A_D1118H)
aggagaaagcuuaccauguucguguuccuggugcugcugccucugguguccagccagugugugaaccugaccaccagaacacagcugccuccagccuacaccaacagcuuuaccagaggcguguacuaccccgacaagguguucagauccagcgugcugcacucuacccaggaccuguuccugccuuucuucagcaacgugaccugguuccacgccaucuccggcaccaauggcaccaagagauucgacaaccccgugcugcccuucaacgacgggguguacuuugccagcaccgagaaguccaacaucaucagaggcuggaucuucggcaccacacuggacagcaagacccagagccugcugaucgugaacaacgccaccaacguggucaucaaagugugcgaguuccaguucugcaacgaccccuuccugggcgucuaccacaagaacaacaagagcuggauggaaagcgaguuccggguguacagcagcgccaacaacugcaccuucgaguacgugucccagccuuuccugauggaccuggaaggcaagcagggcaacuucaagaaccugcgcgaguucguguuuaagaacaucgacggcuacuucaagaucuacagcaagcacaccccuaucaaccucgugcgggaucugccucagggcuucucugcucuggaaccccugguggaucugcccaucggcaucaacaucacccgguuucagacacugcuggcccugcacagaagcuaccugacaccuggcgauagcagcagcggauggacagcuggugccgccgcuuacuaugugggcuaccugcagccuagaaccuuccugcugaaguacaacgagaacggcaccaucaccgacgccguggauugugcucuggauccucugagcgagacaaagugcacccugaaguccuucaccguggaaaagggcaucuaccagaccagcaacuuccgggugcagcccaccgaauccaucgugcgguuccccaauaucaccaaucugugccccuucggcgagguguucaaugccaccagauucgccucuguguacgccuggaaccggaagcggaucagcaauugcguggccgacuacuccgugcuguacaacuccgccagcuucagcaccuucaagugcuacggcguguccccuaccaagcugaacgaccugugcuucacaaacguguacgccgacagcuucgugauccggggagaugaagugcggcagauugccccuggacagacaggcaagaucgccgacuacaacuacaagcugcccgacgacuucaccggcugugugauugccuggaacagcaacaaccuggacuccaaagucggcggcaacuacaauuaccuguaccggcuguuccggaaguccaaucugaagcccuucgagcgggacaucuccaccgagaucuaucaggccggcagcaccccuuguaacggcguggaaggcuucaacugcuacuucccacugcaguccuacggcuuucagcccacauacggcgugggcuaucagcccuacagagugguggugcugagcuucgaacugcugcaugccccugccacagugugcggcccuaagaaaagcaccaaucucgugaagaacaaaugcgugaacuucaacuucaacggccugaccggcaccggcgugcugacagagagcaacaagaaguuccugccauuccagcaguuuggccgggauaucgacgauaccacagacgccguuagagauccccagacacuggaaauccuggacaucaccccuugcagcuucggcggagugucugugaucaccccuggcaccaacaccagcaaucagguggcagugcuguaccagggcgugaacuguaccgaagugcccguggccauucacgccgaucagcugacaccuacauggcggguguacuccaccggcagcaauguguuucagaccagagccggcugucugaucggagccgagcacgugaacaauagcuacgagugcgacauccccaucggcgcuggaaucugcgccagcuaccagacacagacaaacagccaccggagagccagaagcguggccagccagagcaucauugccuacacaaugucucugggcgccgagaacagcguggccuacuccaacaacucuaucgcuauccccaucaacuucaccaucagcgugaccacagagauccugccuguguccaugaccaagaccagcguggacugcaccauguacaucugcggcgauuccaccgagugcuccaaccugcugcugcaguacggcagcuucugcacccagcugaauagagcccugacagggaucgccguggaacaggacaagaacacccaagagguguucgcccaagugaagcagaucuacaagaccccuccuaucaaggacuucggcggcuucaauuucagccagauucugcccgauccuagcaagcccagcaagcggagcuucaucgaggaccugcuguucaacaaagugacacuggccgacgccggcuucaucaagcaguauggcgauugucugggcgacauugccgccagggaucugauuugcgcccagaaguuuaacggacugacagugcugccuccucugcugaccgaugagaugaucgcccaguacacaucugcccugcuggccggcacaaucacaagcggcuggacauuuggagcaggcgccgcucugcagauccccuuugcuaugcagauggccuaccgguucaacggcaucggagugacccagaaugugcuguacgagaaccagaagcugaucgccaaccaguucaacagcgccaucggcaagauccaggacagccugagcagcacagcaagcgcccugggaaagcugcaggacguggucaaccagaaugcccaggcacugaacacccuggucaagcagcuguccuccaacuucggcgccaucagcucugugcugaacgauauccuggccagacuggacaaggucgaggccgaggugcagaucgacagacugaucacaggcagacugcagagccuccagacauacgugacccagcagcugaucagagccgccgagauuagagccucugccaaucuggccgccaccaagaugucugagugugugcugggccagagcaagagaguggacuuuugcggcaagggcuaccaccugaugagcuucccucagucugccccucacggcgugguguuucugcacgugacauaugugcccgcucaagagaagaauuucaccaccgcuccagccaucugccacgacggcaaagcccacuuuccuagagaaggcguguucguguccaacggcacccauugguucgugacacagcggaacuucuacgagccccagaucaucaccacccacaacaccuucgugucuggcaacugcgacgucgugaucggcauugugaacaauaccguguacgacccucugcagcccgagcuggacagcuucaaagaggaacuggacaaguacuuuaagaaccacacaagccccgacguggaccugggcgauaucagcggaaucaaugccagcgucgugaacauccagaaagagaucgaccggcugaacgagguggccaagaaucugaacgagagccugaucgaccugcaagaacuggggaaguacgagcaguacaucaaguggcccugguacaucuggcugggcuuuaucgccggacugauugccaucgugauggucacaaucaugcuguguugcaugaccagcugcuguagcugccugaagggcuguuguagcuguggcagcugcugcaaguucgacgaggacgauucugagcccgugcugaagggcgugaaacugcacuacacaugaggacuaguuauaagacugacuagcccgaugggccucccaacgggcccuccuccccuccuugcaccgagauuaauagaucuaaaaaaaaaaaaaaaaaaaaaaaaaaaaaaaaaaaaaaaaaaaaaaaaaaaaaaaaaaaaaaaaaaaaaaaaaaaaaaaaaaaaaaaaaaaaaaaaaaaa

SEQ ID NO: 25712 - RNA, 4017 nt, Artificial Sequence
  SARS-CoV-2/Wuhan/WIV05/2019__EPI_ISL_402128 spike protein mRNA gc mod (1-1273)(K417N_E484K_N501Y_D614G)
aggagaaagcuuaccauguucguguuccuggugcugcugccucugguguccagccagugugugaaccugaccaccagaacacagcugccuccagccuacaccaacagcuuuaccagaggcguguacuaccccgacaagguguucagauccagcgugcugcacucuacccaggaccuguuccugccuuucuucagcaacgugaccugguuccacgccauccacguguccggcaccaauggcaccaagagauucgacaaccccgugcugcccuucaacgacgggguguacuuugccagcaccgagaaguccaacaucaucagaggcuggaucuucggcaccacacuggacagcaagacccagagccugcugaucgugaacaacgccaccaacguggucaucaaagugugcgaguuccaguucugcaacgaccccuuccugggcgucuacuaccacaagaacaacaagagcuggauggaaagcgaguuccggguguacagcagcgccaacaacugcaccuucgaguacgugucccagccuuuccugauggaccuggaaggcaagcagggcaacuucaagaaccugcgcgaguucguguuuaagaacaucgacggcuacuucaagaucuacagcaagcacaccccuaucaaccucgugcgggaucugccucagggcuucucugcucuggaaccccugguggaucugcccaucggcaucaacaucacccgguuucagacacugcuggcccugcacagaagcuaccugacaccuggcgauagcagcagcggauggacagcuggugccgccgcuuacuaugugggcuaccugcagccuagaaccuuccugcugaaguacaacgagaacggcaccaucaccgacgccguggauugugcucuggauccucugagcgagacaaagugcacccugaaguccuucaccguggaaaagggcaucuaccagaccagcaacuuccgggugcagcccaccgaauccaucgugcgguuccccaauaucaccaaucugugccccuucggcgagguguucaaugccaccagauucgccucuguguacgccuggaaccggaagcggaucagcaauugcguggccgacuacuccgugcuguacaacuccgccagcuucagcaccuucaagugcuacggcguguccccuaccaagcugaacgaccugugcuucacaaacguguacgccgacagcuucgugauccggggagaugaagugcggcagauugccccuggacagacaggcaacaucgccgacuacaacuacaagcugcccgacgacuucaccggcugugugauugccuggaacagcaacaaccuggacuccaaagucggcggcaacuacaauuaccuguaccggcuguuccggaaguccaaucugaagcccuucgagcgggacaucuccaccgagaucuaucaggccggcagcaccccuuguaacggcgugaagggcuucaacugcuacuucccacugcaguccuacggcuuucagcccacauacggcgugggcuaucagcccuacagagugguggugcugagcuucgaacugcugcaugccccugccacagugugcggcccuaagaaaagcaccaaucucgugaagaacaaaugcgugaacuucaacuucaacggccugaccggcaccggcgugcugacagagagcaacaagaaguuccugccauuccagcaguuuggccgggauaucgccgauaccacagacgccguuagagauccccagacacuggaaauccuggacaucaccccuugcagcuucggcggagugucugugaucaccccuggcaccaacaccagcaaucagguggcagugcuguaccagggcgugaacuguaccgaagugcccguggccauucacgccgaucagcugacaccuacauggcggguguacuccaccggcagcaauguguuucagaccagagccggcugucugaucggagccgagcacgugaacaauagcuacgagugcgacauccccaucggcgcuggaaucugcgccagcuaccagacacagacaaacagcccucggagagccagaagcguggccagccagagcaucauugccuacacaaugucucugggcgccgagaacagcguggccuacuccaacaacucuaucgcuauccccaccaacuucaccaucagcgugaccacagagauccugccuguguccaugaccaagaccagcguggacugcaccauguacaucugcggcgauuccaccgagugcuccaaccugcugcugcaguacggcagcuucugcacccagcugaauagagcccugacagggaucgccguggaacaggacaagaacacccaagagguguucgcccaagugaagcagaucuacaagaccccuccuaucaaggacuucggcggcuucaauuucagccagauucugcccgauccuagcaagcccagcaagcggagcuucaucgaggaccugcuguucaacaaagugacacuggccgacgccggcuucaucaagcaguauggcgauugucugggcgacauugccgccagggaucugauuugcgcccagaaguuuaacggacugacagugcugccuccucugcugaccgaugagaugaucgcccaguacacaucugcccugcuggccggcacaaucacaagcggcuggacauuuggagcaggcgccgcucugcagauccccuuugcuaugcagauggccuaccgguucaacggcaucggagugacccagaaugugcuguacgagaaccagaagcugaucgccaaccaguucaacagcgccaucggcaagauccaggacagccugagcagcacagcaagcgcccugggaaagcugcaggacguggucaaccagaaugcccaggcacugaacacccuggucaagcagcuguccuccaacuucggcgccaucagcucugugcugaacgauauccugagcagacuggacaaggucgaggccgaggugcagaucgacagacugaucacaggcagacugcagagccuccagacauacgugacccagcagcugaucagagccgccgagauuagagccucugccaaucuggccgccaccaagaugucugagugugugcugggccagagcaagagaguggacuuuugcggcaagggcuaccaccugaugagcuucccucagucugccccucacggcgugguguuucugcacgugacauaugugcccgcucaagagaagaauuucaccaccgcuccagccaucugccacgacggcaaagcccacuuuccuagagaaggcguguucguguccaacggcacccauugguucgugacacagcggaacuucuacgagccccagaucaucaccaccgacaacaccuucgugucuggcaacugcgacgucgugaucggcauugugaacaauaccguguacgacccucugcagcccgagcuggacagcuucaaagaggaacuggacaaguacuuuaagaaccacacaagccccgacguggaccugggcgauaucagcggaaucaaugccagcgucgugaacauccagaaagagaucgaccggcugaacgagguggccaagaaucugaacgagagccugaucgaccugcaagaacuggggaaguacgagcaguacaucaaguggcccugguacaucuggcugggcuuuaucgccggacugauugccaucgugauggucacaaucaugcuguguugcaugaccagcugcuguagcugccugaagggcuguuguagcuguggcagcugcugcaaguucgacgaggacgauucugagcccgugcugaagggcgugaaacugcacuacacaugaggacuaguuauaagacugacuagcccgaugggccucccaacgggcccuccuccccuccuugcaccgagauuaauagaucuaaaaaaaaaaaaaaaaaaaaaaaaaaaaaaaaaaaaaaaaaaaaaaaaaaaaaaaaaaaaaaaaaaaaaaaaaaaaaaaaaaaaaaaaaaaaaaaaaaaa

SEQ ID NO: 25713 - RNA, 4008 nt, Artificial Sequence
  SARS-CoV-2/Wuhan/WIV05/2019__EPI_ISL_402128 spike protein mRNA gc mod (1-1273)(L18F_D80A_D215G_L242del_A243del_L244del_R246I_K417N_E484 K_N501Y_D614G_A701V)
aggagaaagcuuaccauguucguguuccuggugcugcugccucugguguccagccagugugugaacuucaccaccagaacacagcugccuccagccuacaccaacagcuuuaccagaggcguguacuaccccgacaagguguucagauccagcgugcugcacucuacccaggaccuguuccugccuuucuucagcaacgugaccugguuccacgccauccacguguccggcaccaauggcaccaagagauucgccaaccccgugcugcccuucaacgacgggguguacuuugccagcaccgagaaguccaacaucaucagaggcuggaucuucggcaccacacuggacagcaagacccagagccugcugaucgugaacaacgccaccaacguggucaucaaagugugcgaguuccaguucugcaacgaccccuuccugggcgucuacuaccacaagaacaacaagagcuggauggaaagcgaguuccggguguacagcagcgccaacaacugcaccuucgaguacgugucccagccuuuccugauggaccuggaaggcaagcagggcaacuucaagaaccugcgcgaguucguguuuaagaacaucgacggcuacuucaagaucuacagcaagcacaccccuaucaaccucgugcggggccugccucagggcuucucugcucuggaaccccugguggaucugcccaucggcaucaacaucacccgguuucagacacugcacaucagcuaccugacaccuggcgauagcagcagcggauggacagcuggugccgccgcuuacuaugugggcuaccugcagccuagaaccuuccugcugaaguacaacgagaacggcaccaucaccgacgccguggauugugcucuggauccucugagcgagacaaagugcacccugaaguccuucaccguggaaaagggcaucuaccagaccagcaacuuccgggugcagcccaccgaauccaucgugcgguuccccaauaucaccaaucugugccccuucggcgagguguucaaugccaccagauucgccucuguguacgccuggaaccggaagcggaucagcaauugcguggccgacuacuccgugcuguacaacuccgccagcuucagcaccuucaagugcuacggcguguccccuaccaagcugaacgaccugugcuucacaaacguguacgccgacagcuucgugauccggggagaugaagugcggcagauugccccuggacagacaggcaacaucgccgacuacaacuacaagcugcccgacgacuucaccggcugugugauugccuggaacagcaacaaccuggacuccaaagucggcggcaacuacaauuaccuguaccggcuguuccggaaguccaaucugaagcccuucgagcgggacaucuccaccgagaucuaucaggccggcagcaccccuuguaacggcgugaagggcuucaacugcuacuucccacugcaguccuacggcuuucagcccacauacggcgugggcuaucagcccuacagagugguggugcugagcuucgaacugcugcaugccccugccacagugugcggcccuaagaaaagcaccaaucucgugaagaacaaaugcgugaacuucaacuucaacggccugaccggcaccggcgugcugacagagagcaacaagaaguuccugccauuccagcaguuuggccgggauaucgccgauaccacagacgccguuagagauccccagacacuggaaauccuggacaucaccccuugcagcuucggcggagugucugugaucaccccuggcaccaacaccagcaaucagguggcagugcuguaccagggcgugaacuguaccgaagugcccguggccauucacgccgaucagcugacaccuacauggcggguguacuccaccggcagcaauguguuucagaccagagccggcugucugaucggagccgagcacgugaacaauagcuacgagugcgacauccccaucggcgcuggaaucugcgccagcuaccagacacagacaaacagcccucggagagccagaagcguggccagccagagcaucauugccuacacaaugucucugggcguggagaacagcguggccuacuccaacaacucuaucgcuauccccaccaacuucaccaucagcgugaccacagagauccugccuguguccaugaccaagaccagcguggacugcaccauguacaucugcggcgauuccaccgagugcuccaaccugcugcugcaguacggcagcuucugcacccagcugaauagagcccugacagggaucgccguggaacaggacaagaacacccaagagguguucgcccaagugaagcagaucuacaagaccccuccuaucaaggacuucggcggcuucaauuucagccagauucugcccgauccuagcaagcccagcaagcggagcuucaucgaggaccugcuguucaacaaagugacacuggccgacgccggcuucaucaagcaguauggcgauugucugggcgacauugccgccagggaucugauuugcgcccagaaguuuaacggacugacagugcugccuccucugcugaccgaugagaugaucgcccaguacacaucugcccugcuggccggcacaaucacaagcggcuggacauuuggagcaggcgccgcucugcagauccccuuugcuaugcagauggccuaccgguucaacggcaucggagugacccagaaugugcuguacgagaaccagaagcugaucgccaaccaguucaacagcgccaucggcaagauccaggacagccugagcagcacagcaagcgcccugggaaagcugcaggacguggucaaccagaaugcccaggcacugaacacccuggucaagcagcuguccuccaacuucggcgccaucagcucugugcugaacgauauccugagcagacuggacaaggucgaggccgaggugcagaucgacagacugaucacaggcagacugcagagccuccagacauacgugacccagcagcugaucagagccgccgagauuagagccucugccaaucuggccgccaccaagaugucugagugugugcugggccagagcaagagaguggacuuuugcggcaagggcuaccaccugaugagcuucccucagucugccccucacggcgugguguuucugcacgugacauaugugcccgcucaagagaagaauuucaccaccgcuccagccaucugccacgacggcaaagcccacuuuccuagagaaggcguguucguguccaacggcacccauugguucgugacacagcggaacuucuacgagccccagaucaucaccaccgacaacaccuucgugucuggcaacugcgacgucgugaucggcauugugaacaauaccguguacgacccucugcagcccgagcuggacagcuucaaagaggaacuggacaaguacuuuaagaaccacacaagccccgacguggaccugggcgauaucagcggaaucaaugccagcgucgugaacauccagaaagagaucgaccggcugaacgagguggccaagaaucugaacgagagccugaucgaccugcaagaacuggggaaguacgagcaguacaucaaguggcccugguacaucuggcugggcuuuaucgccggacugauugccaucgugauggucacaaucaugcuguguugcaugaccagcugcuguagcugccugaagggcuguuguagcuguggcagcugcugcaaguucgacgaggacgauucugagcccgugcugaagggcgugaaacugcacuacacaugaggacuaguuauaagacugacuagcccgaugggccucccaacgggcccuccuccccuccuugcaccgagauuaauagaucuaaaaaaaaaaaaaaaaaaaaaaaaaaaaaaaaaaaaaaaaaaaaaaaaaaaaaaaaaaaaaaaaaaaaaaaaaaaaaaaaaaaaaaaaaaaaaaaaaaaa

SEQ ID NO: 25714 - RNA, 4017 nt, Artificial Sequence
  SARS-CoV-2/Wuhan/WIV05/2019__EPI_ISL_402128 spike protein mRNA gc mod (1-1273)(E484K_D614G)
aggagaaagcuuaccauguucguguuccuggugcugcugccucugguguccagccagugugugaaccugaccaccagaacacagcugccuccagccuacaccaacagcuuuaccagaggcguguacuaccccgacaagguguucagauccagcgugcugcacucuacccaggaccuguuccugccuuucuucagcaacgugaccugguuccacgccauccacguguccggcaccaauggcaccaagagauucgacaaccccgugcugcccuucaacgacgggguguacuuugccagcaccgagaaguccaacaucaucagaggcuggaucuucggcaccacacuggacagcaagacccagagccugcugaucgugaacaacgccaccaacguggucaucaaagugugcgaguuccaguucugcaacgaccccuuccugggcgucuacuaccacaagaacaacaagagcuggauggaaagcgaguuccggguguacagcagcgccaacaacugcaccuucgaguacgugucccagccuuuccugauggaccuggaaggcaagcagggcaacuucaagaaccugcgcgaguucguguuuaagaacaucgacggcuacuucaagaucuacagcaagcacaccccuaucaaccucgugcgggaucugccucagggcuucucugcucuggaaccccugguggaucugcccaucggcaucaacaucacccgguuucagacacugcuggcccugcacagaagcuaccugacaccuggcgauagcagcagcggauggacagcuggugccgccgcuuacuaugugggcuaccugcagccuagaaccuuccugcugaaguacaacgagaacggcaccaucaccgacgccguggauugugcucuggauccucugagcgagacaaagugcacccugaaguccuucaccguggaaaagggcaucuaccagaccagcaacuuccgggugcagcccaccgaauccaucgugcgguuccccaauaucaccaaucugugccccuucggcgagguguucaaugccaccagauucgccucuguguacgccuggaaccggaagcggaucagcaauugcguggccgacuacuccgugcuguacaacuccgccagcuucagcaccuucaagugcuacggcguguccccuaccaagcugaacgaccugugcuucacaaacguguacgccgacagcuucgugauccggggagaugaagugcggcagauugccccuggacagacaggcaagaucgccgacuacaacuacaagcugcccgacgacuucaccggcugugugauugccuggaacagcaacaaccuggacuccaaagucggcggcaacuacaauuaccuguaccggcuguuccggaaguccaaucugaagcccuucgagcgggacaucuccaccgagaucuaucaggccggcagcaccccuuguaacggcgugaagggcuucaacugcuacuucccacugcaguccuacggcuuucagcccacaaauggcgugggcuaucagcccuacagagugguggugcugagcuucgaacugcugcaugccccugccacagugugcggcccuaagaaaagcaccaaucucgugaagaacaaaugcgugaacuucaacuucaacggccugaccggcaccggcgugcugacagagagcaacaagaaguuccugccauuccagcaguuuggccgggauaucgccgauaccacagacgccguuagagauccccagacacuggaaauccuggacaucaccccuugcagcuucggcggagugucugugaucaccccuggcaccaacaccagcaaucagguggcagugcuguaccagggcgugaacuguaccgaagugcccguggccauucacgccgaucagcugacaccuacauggcggguguacuccaccggcagcaauguguuucagaccagagccggcugucugaucggagccgagcacgugaacaauagcuacgagugcgacauccccaucggcgcuggaaucugcgccagcuaccagacacagacaaacagcccucggagagccagaagcguggccagccagagcaucauugccuacacaaugucucugggcgccgagaacagcguggccuacuccaacaacucuaucgcuauccccaccaacuucaccaucagcgugaccacagagauccugccuguguccaugaccaagaccagcguggacugcaccauguacaucugcggcgauuccaccgagugcuccaaccugcugcugcaguacggcagcuucugcacccagcugaauagagcccugacagggaucgccguggaacaggacaagaacacccaagagguguucgcccaagugaagcagaucuacaagaccccuccuaucaaggacuucggcggcuucaauuucagccagauucugcccgauccuagcaagcccagcaagcggagcuucaucgaggaccugcuguucaacaaagugacacuggccgacgccggcuucaucaagcaguauggcgauugucugggcgacauugccgccagggaucugauuugcgcccagaaguuuaacggacugacagugcugccuccucugcugaccgaugagaugaucgcccaguacacaucugcccugcuggccggcacaaucacaagcggcuggacauuuggagcaggcgccgcucugcagauccccuuugcuaugcagauggccuaccgguucaacggcaucggagugacccagaaugugcuguacgagaaccagaagcugaucgccaaccaguucaacagcgccaucggcaagauccaggacagccugagcagcacagcaagcgcccugggaaagcugcaggacguggucaaccagaaugcccaggcacugaacacccuggucaagcagcuguccuccaacuucggcgccaucagcucugugcugaacgauauccugagcagacuggacaaggucgaggccgaggugcagaucgacagacugaucacaggcagacugcagagccuccagacauacgugacccagcagcugaucagagccgccgagauuagagccucugccaaucuggccgccaccaagaugucugagugugugcugggccagagcaagagaguggacuuuugcggcaagggcuaccaccugaugagcuucccucagucugccccucacggcgugguguuucugcacgugacauaugugcccgcucaagagaagaauuucaccaccgcuccagccaucugccacgacggcaaagcccacuuuccuagagaaggcguguucguguccaacggcacccauugguucgugacacagcggaacuucuacgagccccagaucaucaccaccgacaacaccuucgugucuggcaacugcgacgucgugaucggcauugugaacaauaccguguacgacccucugcagcccgagcuggacagcuucaaagaggaacuggacaaguacuuuaagaaccacacaagccccgacguggaccugggcgauaucagcggaaucaaugccagcgucgugaacauccagaaagagaucgaccggcugaacgagguggccaagaaucugaacgagagccugaucgaccugcaagaacuggggaaguacgagcaguacaucaaguggcccugguacaucuggcugggcuuuaucgccggacugauugccaucgugauggucacaaucaugcuguguugcaugaccagcugcuguagcugccugaagggcuguuguagcuguggcagcugcugcaaguucgacgaggacgauucugagcccgugcugaagggcgugaaacugcacuacacaugaggacuaguuauaagacugacuagcccgaugggccucccaacgggcccuccuccccuccuugcaccgagauuaauagaucuaaaaaaaaaaaaaaaaaaaaaaaaaaaaaaaaaaaaaaaaaaaaaaaaaaaaaaaaaaaaaaaaaaaaaaaaaaaaaaaaaaaaaaaaaaaaaaaaaaaa

SEQ ID NO: 25715 - RNA, 4017 nt, Artificial Sequence
  SARS-CoV-2/Wuhan/WIV05/2019__EPI_ISL_402128 spike protein mRNA gc mod (1-1273)(L18F_T20N_P26S_D138Y_R190S_K417T_E484K_N501Y_D614G_H655Y _T1027I)
aggagaaagcuuaccauguucguguuccuggugcugcugccucugguguccagccagugugugaacuucaccaacagaacacagcugccuagcgccuacaccaacagcuuuaccagaggcguguacuaccccgacaagguguucagauccagcgugcugcacucuacccaggaccuguuccugccuuucuucagcaacgugaccugguuccacgccauccacguguccggcaccaauggcaccaagagauucgacaaccccgugcugcccuucaacgacgggguguacuuugccagcaccgagaaguccaacaucaucagaggcuggaucuucggcaccacacuggacagcaagacccagagccugcugaucgugaacaacgccaccaacguggucaucaaagugugcgaguuccaguucugcaacuaccccuuccugggcgucuacuaccacaagaacaacaagagcuggauggaaagcgaguuccggguguacagcagcgccaacaacugcaccuucgaguacgugucccagccuuuccugauggaccuggaaggcaagcagggcaacuucaagaaccugagcgaguucguguuuaagaacaucgacggcuacuucaagaucuacagcaagcacaccccuaucaaccucgugcgggaucugccucagggcuucucugcucuggaaccccugguggaucugcccaucggcaucaacaucacccgguuucagacacugcuggcccugcacagaagcuaccugacaccuggcgauagcagcagcggauggacagcuggugccgccgcuuacuaugugggcuaccugcagccuagaaccuuccugcugaaguacaacgagaacggcaccaucaccgacgccguggauugugcucuggauccucugagcgagacaaagugcacccugaaguccuucaccguggaaaagggcaucuaccagaccagcaacuuccgggugcagcccaccgaauccaucgugcgguuccccaauaucaccaaucugugccccuucggcgagguguucaaugccaccagauucgccucuguguacgccuggaaccggaagcggaucagcaauugcguggccgacuacuccgugcuguacaacuccgccagcuucagcaccuucaagugcuacggcguguccccuaccaagcugaacgaccugugcuucacaaacguguacgccgacagcuucgugauccggggagaugaagugcggcagauugccccuggacagacaggcaccaucgccgacuacaacuacaagcugcccgacgacuucaccggcugugugauugccuggaacagcaacaaccuggacuccaaagucggcggcaacuacaauuaccuguaccggcuguuccggaaguccaaucugaagcccuucgagcgggacaucuccaccgagaucuaucaggccggcagcaccccuuguaacggcgugaagggcuucaacugcuacuucccacugcaguccuacggcuuucagcccacauacggcgugggcuaucagcccuacagagugguggugcugagcuucgaacugcugcaugccccugccacagugugcggcccuaagaaaagcaccaaucucgugaagaacaaaugcgugaacuucaacuucaacggccugaccggcaccggcgugcugacagagagcaacaagaaguuccugccauuccagcaguuuggccgggauaucgccgauaccacagacgccguuagagauccccagacacuggaaauccuggacaucaccccuugcagcuucggcggagugucugugaucaccccuggcaccaacaccagcaaucagguggcagugcuguaccagggcgugaacuguaccgaagugcccguggccauucacgccgaucagcugacaccuacauggcggguguacuccaccggcagcaauguguuucagaccagagccggcugucugaucggagccgaguacgugaacaauagcuacgagugcgacauccccaucggcgcuggaaucugcgccagcuaccagacacagacaaacagcccucggagagccagaagcguggccagccagagcaucauugccuacacaaugucucugggcgccgagaacagcguggccuacuccaacaacucuaucgcuauccccaccaacuucaccaucagcgugaccacagagauccugccuguguccaugaccaagaccagcguggacugcaccauguacaucugcggcgauuccaccgagugcuccaaccugcugcugcaguacggcagcuucugcacccagcugaauagagcccugacagggaucgccguggaacaggacaagaacacccaagagguguucgcccaagugaagcagaucuacaagaccccuccuaucaaggacuucggcggcuucaauuucagccagauucugcccgauccuagcaagcccagcaagcggagcuucaucgaggaccugcuguucaacaaagugacacuggccgacgccggcuucaucaagcaguauggcgauugucugggcgacauugccgccagggaucugauuugcgcccagaaguuuaacggacugacagugcugccuccucugcugaccgaugagaugaucgcccaguacacaucugcccugcuggccggcacaaucacaagcggcuggacauuuggagcaggcgccgcucugcagauccccuuugcuaugcagauggccuaccgguucaacggcaucggagugacccagaaugugcuguacgagaaccagaagcugaucgccaaccaguucaacagcgccaucggcaagauccaggacagccugagcagcacagcaagcgcccugggaaagcugcaggacguggucaaccagaaugcccaggcacugaacacccuggucaagcagcuguccuccaacuucggcgccaucagcucugugcugaacgauauccugagcagacuggacaaggucgaggccgaggugcagaucgacagacugaucacaggcagacugcagagccuccagacauacgugacccagcagcugaucagagccgccgagauuagagccucugccaaucuggccgccaucaagaugucugagugugugcugggccagagcaagagaguggacuuuugcggcaagggcuaccaccugaugagcuucccucagucugccccucacggcgugguguuucugcacgugacauaugugcccgcucaagagaagaauuucaccaccgcuccagccaucugccacgacggcaaagcccacuuuccuagagaaggcguguucguguccaacggcacccauugguucgugacacagcggaacuucuacgagccccagaucaucaccaccgacaacaccuucgugucuggcaacugcgacgucgugaucggcauugugaacaauaccguguacgacccucugcagcccgagcuggacagcuucaaagaggaacuggacaaguacuuuaagaaccacacaagccccgacguggaccugggcgauaucagcggaaucaaugccagcgucgugaacauccagaaagagaucgaccggcugaacgagguggccaagaaucugaacgagagccugaucgaccugcaagaacuggggaaguacgagcaguacaucaaguggcccugguacaucuggcugggcuuuaucgccggacugauugccaucgugauggucacaaucaugcuguguugcaugaccagcugcuguagcugccugaagggcuguuguagcuguggcagcugcugcaaguucgacgaggacgauucugagcccgugcugaagggcgugaaacugcacuacacaugaggacuaguuauaagacugacuagcccgaugggccucccaacgggcccuccuccccuccuugcaccgagauuaauagaucuaaaaaaaaaaaaaaaaaaaaaaaaaaaaaaaaaaaaaaaaaaaaaaaaaaaaaaaaaaaaaaaaaaaaaaaaaaaaaaaaaaaaaaaaaaaaaaaaaaaa

SEQ ID NO: 25716 - RNA, 4017 nt, Artificial Sequence
  SARS-CoV-2/Wuhan/WIV05/2019__EPI_ISL_402128 spike protein mRNA gc mod (1-1273)(S13I_W152C_L452R_D614G)
aggagaaagcuuaccauguucguguuccuggugcugcugccucugguguccauccagugugugaaccugaccaccagaacacagcugccuccagccuacaccaacagcuuuaccagaggcguguacuaccccgacaagguguucagauccagcgugcugcacucuacccaggaccuguuccugccuuucuucagcaacgugaccugguuccacgccauccacguguccggcaccaauggcaccaagagauucgacaaccccgugcugcccuucaacgacgggguguacuuugccagcaccgagaaguccaacaucaucagaggcuggaucuucggcaccacacuggacagcaagacccagagccugcugaucgugaacaacgccaccaacguggucaucaaagugugcgaguuccaguucugcaacgaccccuuccugggcgucuacuaccacaagaacaacaagagcugcauggaaagcgaguuccggguguacagcagcgccaacaacugcaccuucgaguacgugucccagccuuuccugauggaccuggaaggcaagcagggcaacuucaagaaccugcgcgaguucguguuuaagaacaucgacggcuacuucaagaucuacagcaagcacaccccuaucaaccucgugcgggaucugccucagggcuucucugcucuggaaccccugguggaucugcccaucggcaucaacaucacccgguuucagacacugcuggcccugcacagaagcuaccugacaccuggcgauagcagcagcggauggacagcuggugccgccgcuuacuaugugggcuaccugcagccuagaaccuuccugcugaaguacaacgagaacggcaccaucaccgacgccguggauugugcucuggauccucugagcgagacaaagugcacccugaaguccuucaccguggaaaagggcaucuaccagaccagcaacuuccgggugcagcccaccgaauccaucgugcgguuccccaauaucaccaaucugugccccuucggcgagguguucaaugccaccagauucgccucuguguacgccuggaaccggaagcggaucagcaauugcguggccgacuacuccgugcuguacaacuccgccagcuucagcaccuucaagugcuacggcguguccccuaccaagcugaacgaccugugcuucacaaacguguacgccgacagcuucgugauccggggagaugaagugcggcagauugccccuggacagacaggcaagaucgccgacuacaacuacaagcugcccgacgacuucaccggcugugugauugccuggaacagcaacaaccuggacuccaaagucggcggcaacuacaauuaccgcuaccggcuguuccggaaguccaaucugaagcccuucgagcgggacaucuccaccgagaucuaucaggccggcagcaccccuuguaacggcguggaaggcuucaacugcuacuucccacugcaguccuacggcuuucagcccacaaauggcgugggcuaucagcccuacagagugguggugcugagcuucgaacugcugcaugccccugccacagugugcggcccuaagaaaagcaccaaucucgugaagaacaaaugcgugaacuucaacuucaacggccugaccggcaccggcgugcugacagagagcaacaagaaguuccugccauuccagcaguuuggccgggauaucgccgauaccacagacgccguuagagauccccagacacuggaaauccuggacaucaccccuugcagcuucggcggagugucugugaucaccccuggcaccaacaccagcaaucagguggcagugcuguaccagggcgugaacuguaccgaagugcccguggccauucacgccgaucagcugacaccuacauggcggguguacuccaccggcagcaauguguuucagaccagagccggcugucugaucggagccgagcacgugaacaauagcuacgagugcgacauccccaucggcgcuggaaucugcgccagcuaccagacacagacaaacagcccucggagagccagaagcguggccagccagagcaucauugccuacacaaugucucugggcgccgagaacagcguggccuacuccaacaacucuaucgcuauccccaccaacuucaccaucagcgugaccacagagauccugccuguguccaugaccaagaccagcguggacugcaccauguacaucugcggcgauuccaccgagugcuccaaccugcugcugcaguacggcagcuucugcacccagcugaauagagcccugacagggaucgccguggaacaggacaagaacacccaagagguguucgcccaagugaagcagaucuacaagaccccuccuaucaaggacuucggcggcuucaauuucagccagauucugcccgauccuagcaagcccagcaagcggagcuucaucgaggaccugcuguucaacaaagugacacuggccgacgccggcuucaucaagcaguauggcgauugucugggcgacauugccgccagggaucugauuugcgcccagaaguuuaacggacugacagugcugccuccucugcugaccgaugagaugaucgcccaguacacaucugcccugcuggccggcacaaucacaagcggcuggacauuuggagcaggcgccgcucugcagauccccuuugcuaugcagauggccuaccgguucaacggcaucggagugacccagaaugugcuguacgagaaccagaagcugaucgccaaccaguucaacagcgccaucggcaagauccaggacagccugagcagcacagcaagcgcccugggaaagcugcaggacguggucaaccagaaugcccaggcacugaacacccuggucaagcagcuguccuccaacuucggcgccaucagcucugugcugaacgauauccugagcagacuggacaaggucgaggccgaggugcagaucgacagacugaucacaggcagacugcagagccuccagacauacgugacccagcagcugaucagagccgccgagauuagagccucugccaaucuggccgccaccaagaugucugagugugugcugggccagagcaagagaguggacuuuugcggcaagggcuaccaccugaugagcuucccucagucugccccucacggcgugguguuucugcacgugacauaugugcccgcucaagagaagaauuucaccaccgcuccagccaucugccacgacggcaaagcccacuuuccuagagaaggcguguucguguccaacggcacccauugguucgugacacagcggaacuucuacgagccccagaucaucaccaccgacaacaccuucgugucuggcaacugcgacgucgugaucggcauugugaacaauaccguguacgacccucugcagcccgagcuggacagcuucaaagaggaacuggacaaguacuuuaagaaccacacaagccccgacguggaccugggcgauaucagcggaaucaaugccagcgucgugaacauccagaaagagaucgaccggcugaacgagguggccaagaaucugaacgagagccugaucgaccugcaagaacuggggaaguacgagcaguacaucaaguggcccugguacaucuggcugggcuuuaucgccggacugauugccaucgugauggucacaaucaugcuguguugcaugaccagcugcuguagcugccugaagggcuguuguagcuguggcagcugcugcaaguucgacgaggacgauucugagcccgugcugaagggcgugaaacugcacuacacaugaggacuaguuauaagacugacuagcccgaugggccucccaacgggcccuccuccccuccuugcaccgagauuaauagaucuaaaaaaaaaaaaaaaaaaaaaaaaaaaaaaaaaaaaaaaaaaaaaaaaaaaaaaaaaaaaaaaaaaaaaaaaaaaaaaaaaaaaaaaaaaaaaaaaaaaa

SEQ ID NO: 25717 - RNA, 4017 nt, Artificial Sequence
  SARS-CoV-2/Wuhan/WIV05/2019__EPI_ISL_402128 spike protein mRNA gc (1-1273)(K986P_V987P) R10154
aggagaaagcuuaccauguucguguuccugguccuccugccccuggugagcucccagugcgugaaccucaccacccgcacgcagcugccgcccgccuacaccaacagcuucacccggggcgucuacuaccccgacaagguguuccgcuccagcgugcugcacuccacccaggaccucuuccugcccuucuucagcaacgucacgugguuccacgccauccacguguccgggaccaacggcaccaagcgguucgacaacccggugcugcccuucaacgacggggucuacuucgcgagcaccgagaaguccaacaucauccgcggcuggaucuucgggacgacccucgacagcaagacccagucccugcugaucgugaacaacgccaccaacguggucaucaaggugugcgaguuccaguucugcaacgaccccuuccucggcguguacuaccacaagaacaacaagagcuggauggaguccgaguuccgggucuacagcuccgccaacaacugcacguucgaguacgugagccagcccuuccugauggaccuggagggcaagcaggggaacuucaagaaccuccgcgaguucguguucaagaacaucgacggcuacuucaagaucuacuccaagcacaccccgaucaaccugguccgggaccugccccagggguucagcgcccucgagccccugguggaccugcccaucggcaucaacaucacccgcuuccagacccuccuggcccugcaccgguccuaccucacgccgggggacagcagcuccggcuggaccgcgggcgccgccgccuacuacgugggguaccugcagccccgcaccuuccugcucaaguacaacgagaacggcaccaucacggacgcggucgacugcgcccuggacccccugagcgagaccaagugcacccucaaguccuucaccguggagaaggggaucuaccagacgagcaacuuccgggugcagcccaccgaguccaucguccgcuucccgaacaucaccaaccugugccccuucggcgagguguucaacgccacccgguucgccagcgucuacgccuggaaccgcaagcggaucuccaacugcguggcggacuacagcgugcuguacaacuccgccagcuucuccacguucaagugcuacggcgucagccccaccaagcucaacgaccugugcuucaccaacguguacgccgacuccuucgugauccgcggggacgagguccggcagaucgcccccggccagaccgggaagaucgccgacuacaacuacaagcugccggacgacuucacgggcugcgugaucgcguggaacagcaacaaccucgacuccaaggucgggggcaacuacaacuaccuguaccgccuguuccgcaagagcaaccucaagcccuucgagcgggacaucuccaccgagaucuaccaggccggcagcacccccugcaacgggguggagggcuucaacugcuacuucccccugcaguccuacggguuccagccgaccaacggcgugggguaccagcccuaccggguggucgugcugagcuucgagcuccugcacgcccccgccacggugugcggccccaagaaguccaccaaccuggucaagaacaagugcgugaacuucaacuucaacggccucaccgggaccggcgugcugaccgagagcaacaagaaguuccugccguuccagcaguucgggcgcgacaucgccgacacgaccgacgcgguccgcgacccccagacccuggagauccucgacaucacccccugcagcuucggcgggguguccgugaucacgccgggcaccaacaccagcaaccaggucgccgugcuguaccaggacgugaacugcaccgagguccccguggccauccacgccgaccagcugacgcccaccuggcggguguacuccaccggcagcaacgucuuccagacccgcgccgggugccucaucggcgcggagcacgugaacaacuccuacgagugcgacauccccaucggggccggcaucugcgccagcuaccagacgcagaccaacuccccgcggcgcgcccggagcguggcgucccagagcaucaucgccuacaccaugucccugggcgccgagaacagcgucgccuacuccaacaacagcaucgccauccccaccaacuucacgaucuccgugaccaccgagauccugcccgugagcaugaccaagacgagcgucgacugcaccauguacaucugcggggacuccaccgagugcagcaaccuccugcugcaguacggcuccuucugcacccagcucaaccgcgcgcugacggggaucgccguggagcaggacaagaacacccaggagguguucgcccaggucaagcagaucuacaagacgcccccgaucaaggacuucggcggguucaacuucagccagauccugcccgaccccuccaagcccagcaagcgguccuucaucgaggaccuccuguucaacaaggugacccuggccgacgccggcuucaucaagcaguacggcgacugccucggggacaucgcggcccgcgaccugaucugcgcccagaaguucaacggccugaccgugcucccgccccugcugaccgacgagaugaucgcccaguacaccagcgcccuccuggcggggaccaucacguccggcuggaccuucggggccggcgccgcccugcagauccccuucgcgaugcagauggccuaccgguucaacggcaucggggucacccagaacgugcucuacgagaaccagaagcugaucgccaaccaguucaacagcgccaucggcaagauccaggacucccugagcuccaccgccagcgcgcucgggaagcugcaggacguggucaaccagaacgcccaggcccugaacacgcucgugaagcagcuguccagcaacuucggcgccaucuccagcgugcugaacgacauccucucccgccuggacccgcccgaggccgaggugcagaucgaccggcugaucaccgggcgccuccagagccugcagaccuacgugacccagcagcugauccgggcggccgagauccgcgccagcgccaaccucgccgcgaccaagauguccgagugcguccugggccagagcaagcggguggacuucugcggcaagggguaccaccugauguccuucccccagagcgccccgcacggcguggucuuccuccacgugacguacguccccgcccaggagaagaacuucaccaccgcccccgcgaucugccacgacgggaaggcccacuucccccgcgagggcguguucguguccaacgggacccacugguucgucacgcagcggaacuucuacgagccgcagaucaucaccaccgacaacaccuucgugagcggcaacugcgacguggucaucggcaucgugaacaacacgguguacgacccccugcagcccgagcuggacuccuucaaggaggagcucgacaaguacuucaagaaccacaccagccccgacgucgaccugggggacaucuccggcaucaacgccagcguggugaacauccagaaggagaucgaccgccugaacgaggucgccaagaaccucaacgagucccugaucgaccugcaggagcucgggaaguacgagcaguacaucaaguggccgugguacaucuggcugggcuucaucgccggccugaucgcgaucgugauggugaccaucaugcucugcugcaugaccagcugcugcuccugccugaaggggugcugcagcugcggcuccugcugcaaguucgacgaggacgacagcgagcccguccugaagggggugaagcuccacuacacgugaggacuaguuauaagacugacuagcccgaugggccucccaacgggcccuccuccccuccuugcaccgagauuaauagaucuaaaaaaaaaaaaaaaaaaaaaaaaaaaaaaaaaaaaaaaaaaaaaaaaaaaaaaaaaaaaaaaaaaaaaaaaaaaaaaaaaaaaaaaaaaaaaaaaaaaa

SEQ ID NO: 25718 - RNA, 4017 nt, Artificial Sequence
  SARS-CoV-2/Wuhan/WIV05/2019__EPI_ISL_402128 spike protein mRNA gc (1-1273)(K986P_V987P_ D614G)
aggagaaagcuuaccauguucguguuccugguccuccugccccuggugagcucccagugcgugaaccucaccacccgcacgcagcugccgcccgccuacaccaacagcuucacccggggcgucuacuaccccgacaagguguuccgcuccagcgugcugcacuccacccaggaccucuuccugcccuucuucagcaacgucacgugguuccacgccauccacguguccgggaccaacggcaccaagcgguucgacaacccggugcugcccuucaacgacggggucuacuucgcgagcaccgagaaguccaacaucauccgcggcuggaucuucgggacgacccucgacagcaagacccagucccugcugaucgugaacaacgccaccaacguggucaucaaggugugcgaguuccaguucugcaacgaccccuuccucggcguguacuaccacaagaacaacaagagcuggauggaguccgaguuccgggucuacagcuccgccaacaacugcacguucgaguacgugagccagcccuuccugauggaccuggagggcaagcaggggaacuucaagaaccuccgcgaguucguguucaagaacaucgacggcuacuucaagaucuacuccaagcacaccccgaucaaccugguccgggaccugccccagggguucagcgcccucgagccccugguggaccugcccaucggcaucaacaucacccgcuuccagacccuccuggcccugcaccgguccuaccucacgccgggggacagcagcuccggcuggaccgcgggcgccgccgccuacuacgugggguaccugcagccccgcaccuuccugcucaaguacaacgagaacggcaccaucacggacgcggucgacugcgcccuggacccccugagcgagaccaagugcacccucaaguccuucaccguggagaaggggaucuaccagacgagcaacuuccgggugcagcccaccgaguccaucguccgcuucccgaacaucaccaaccugugccccuucggcgagguguucaacgccacccgguucgccagcgucuacgccuggaaccgcaagcggaucuccaacugcguggcggacuacagcgugcuguacaacuccgccagcuucuccacguucaagugcuacggcgucagccccaccaagcucaacgaccugugcuucaccaacguguacgccgacuccuucgugauccgcggggacgagguccggcagaucgcccccggccagaccgggaagaucgccgacuacaacuacaagcugccggacgacuucacgggcugcgugaucgcguggaacagcaacaaccucgacuccaaggucgggggcaacuacaacuaccuguaccgccuguuccgcaagagcaaccucaagcccuucgagcgggacaucuccaccgagaucuaccaggccggcagcacccccugcaacgggguggagggcuucaacugcuacuucccccugcaguccuacggguuccagccgaccaacggcgugggguaccagcccuaccggguggucgugcugagcuucgagcuccugcacgcccccgccacggugugcggccccaagaaguccaccaaccuggucaagaacaagugcgugaacuucaacuucaacggccucaccgggaccggcgugcugaccgagagcaacaagaaguuccugccguuccagcaguucgggcgcgacaucgccgacacgaccgacgcgguccgcgacccccagacccuggagauccucgacaucacccccugcagcuucggcgggguguccgugaucacgccgggcaccaacaccagcaaccaggucgccgugcuguaccagggcgugaacugcaccgagguccccguggccauccacgccgaccagcugacgcccaccuggcggguguacuccaccggcagcaacgucuuccagacccgcgccgggugccucaucggcgcggagcacgugaacaacuccuacgagugcgacauccccaucggggccggcaucugcgccagcuaccagacgcagaccaacuccccgcggcgcgcccggagcguggcgucccagagcaucaucgccuacaccaugucccugggcgccgagaacagcgucgccuacuccaacaacagcaucgccauccccaccaacuucacgaucuccgugaccaccgagauccugcccgugagcaugaccaagacgagcgucgacugcaccauguacaucugcggggacuccaccgagugcagcaaccuccugcugcaguacggcuccuucugcacccagcucaaccgcgcgcugacggggaucgccguggagcaggacaagaacacccaggagguguucgcccaggucaagcagaucuacaagacgcccccgaucaaggacuucggcggguucaacuucagccagauccugcccgaccccuccaagcccagcaagcgguccuucaucgaggaccuccuguucaacaaggugacccuggccgacgccggcuucaucaagcaguacggcgacugccucggggacaucgcggcccgcgaccugaucugcgcccagaaguucaacggccugaccgugcucccgccccugcugaccgacgagaugaucgcccaguacaccagcgcccuccuggcggggaccaucacguccggcuggaccuucggggccggcgccgcccugcagauccccuucgcgaugcagauggccuaccgguucaacggcaucggggucacccagaacgugcucuacgagaaccagaagcugaucgccaaccaguucaacagcgccaucggcaagauccaggacucccugagcuccaccgccagcgcgcucgggaagcugcaggacguggucaaccagaacgcccaggcccugaacacgcucgugaagcagcuguccagcaacuucggcgccaucuccagcgugcugaacgacauccucucccgccuggacccgcccgaggccgaggugcagaucgaccggcugaucaccgggcgccuccagagccugcagaccuacgugacccagcagcugauccgggcggccgagauccgcgccagcgccaaccucgccgcgaccaagauguccgagugcguccugggccagagcaagcggguggacuucugcggcaagggguaccaccugauguccuucccccagagcgccccgcacggcguggucuuccuccacgugacguacguccccgcccaggagaagaacuucaccaccgcccccgcgaucugccacgacgggaaggcccacuucccccgcgagggcguguucguguccaacgggacccacugguucgucacgcagcggaacuucuacgagccgcagaucaucaccaccgacaacaccuucgugagcggcaacugcgacguggucaucggcaucgugaacaacacgguguacgacccccugcagcccgagcuggacuccuucaaggaggagcucgacaaguacuucaagaaccacaccagccccgacgucgaccugggggacaucuccggcaucaacgccagcguggugaacauccagaaggagaucgaccgccugaacgaggucgccaagaaccucaacgagucccugaucgaccugcaggagcucgggaaguacgagcaguacaucaaguggccgugguacaucuggcugggcuucaucgccggccugaucgcgaucgugauggugaccaucaugcucugcugcaugaccagcugcugcuccugccugaaggggugcugcagcugcggcuccugcugcaaguucgacgaggacgacagcgagcccguccugaagggggugaagcuccacuacacgugaggacuaguuauaagacugacuagcccgaugggccucccaacgggcccuccuccccuccuugcaccgagauuaauagaucuaaaaaaaaaaaaaaaaaaaaaaaaaaaaaaaaaaaaaaaaaaaaaaaaaaaaaaaaaaaaaaaaaaaaaaaaaaaaaaaaaaaaaaaaaaaaaaaaaaaa

SEQ ID NO: 25719 - RNA, 4017 nt, Artificial Sequence
  SARS-CoV-2/Wuhan/WIV05/2019__EPI_ISL_402128 spike protein mRNA gc (1-1273)(K986P_V987P_A222V_D614G)
aggagaaagcuuaccauguucguguuccugguccuccugccccuggugagcucccagugcgugaaccucaccacccgcacgcagcugccgcccgccuacaccaacagcuucacccggggcgucuacuaccccgacaagguguuccgcuccagcgugcugcacuccacccaggaccucuuccugcccuucuucagcaacgucacgugguuccacgccauccacguguccgggaccaacggcaccaagcgguucgacaacccggugcugcccuucaacgacggggucuacuucgcgagcaccgagaaguccaacaucauccgcggcuggaucuucgggacgacccucgacagcaagacccagucccugcugaucgugaacaacgccaccaacguggucaucaaggugugcgaguuccaguucugcaacgaccccuuccucggcguguacuaccacaagaacaacaagagcuggauggaguccgaguuccgggucuacagcuccgccaacaacugcacguucgaguacgugagccagcccuuccugauggaccuggagggcaagcaggggaacuucaagaaccuccgcgaguucguguucaagaacaucgacggcuacuucaagaucuacuccaagcacaccccgaucaaccugguccgggaccugccccagggguucagcguccucgagccccugguggaccugcccaucggcaucaacaucacccgcuuccagacccuccuggcccugcaccgguccuaccucacgccgggggacagcagcuccggcuggaccgcgggcgccgccgccuacuacgugggguaccugcagccccgcaccuuccugcucaaguacaacgagaacggcaccaucacggacgcggucgacugcgcccuggacccccugagcgagaccaagugcacccucaaguccuucaccguggagaaggggaucuaccagacgagcaacuuccgggugcagcccaccgaguccaucguccgcuucccgaacaucaccaaccugugccccuucggcgagguguucaacgccacccgguucgccagcgucuacgccuggaaccgcaagcggaucuccaacugcguggcggacuacagcgugcuguacaacuccgccagcuucuccacguucaagugcuacggcgucagccccaccaagcucaacgaccugugcuucaccaacguguacgccgacuccuucgugauccgcggggacgagguccggcagaucgcccccggccagaccgggaagaucgccgacuacaacuacaagcugccggacgacuucacgggcugcgugaucgcguggaacagcaacaaccucgacuccaaggucgggggcaacuacaacuaccuguaccgccuguuccgcaagagcaaccucaagcccuucgagcgggacaucuccaccgagaucuaccaggccggcagcacccccugcaacgggguggagggcuucaacugcuacuucccccugcaguccuacggguuccagccgaccaacggcgugggguaccagcccuaccggguggucgugcugagcuucgagcuccugcacgcccccgccacggugugcggccccaagaaguccaccaaccuggucaagaacaagugcgugaacuucaacuucaacggccucaccgggaccggcgugcugaccgagagcaacaagaaguuccugccguuccagcaguucgggcgcgacaucgccgacacgaccgacgcgguccgcgacccccagacccuggagauccucgacaucacccccugcagcuucggcgggguguccgugaucacgccgggcaccaacaccagcaaccaggucgccgugcuguaccagggcgugaacugcaccgagguccccguggccauccacgccgaccagcugacgcccaccuggcggguguacuccaccggcagcaacgucuuccagacccgcgccgggugccucaucggcgcggagcacgugaacaacuccuacgagugcgacauccccaucggggccggcaucugcgccagcuaccagacgcagaccaacuccccgcggcgcgcccggagcguggcgucccagagcaucaucgccuacaccaugucccugggcgccgagaacagcgucgccuacuccaacaacagcaucgccauccccaccaacuucacgaucuccgugaccaccgagauccugcccgugagcaugaccaagacgagcgucgacugcaccauguacaucugcggggacuccaccgagugcagcaaccuccugcugcaguacggcuccuucugcacccagcucaaccgcgcgcugacggggaucgccguggagcaggacaagaacacccaggagguguucgcccaggucaagcagaucuacaagacgcccccgaucaaggacuucggcggguucaacuucagccagauccugcccgaccccuccaagcccagcaagcgguccuucaucgaggaccuccuguucaacaaggugacccuggccgacgccggcuucaucaagcaguacggcgacugccucggggacaucgcggcccgcgaccugaucugcgcccagaaguucaacggccugaccgugcucccgccccugcugaccgacgagaugaucgcccaguacaccagcgcccuccuggcggggaccaucacguccggcuggaccuucggggccggcgccgcccugcagauccccuucgcgaugcagauggccuaccgguucaacggcaucggggucacccagaacgugcucuacgagaaccagaagcugaucgccaaccaguucaacagcgccaucggcaagauccaggacucccugagcuccaccgccagcgcgcucgggaagcugcaggacguggucaaccagaacgcccaggcccugaacacgcucgugaagcagcuguccagcaacuucggcgccaucuccagcgugcugaacgacauccucucccgccuggacccgcccgaggccgaggugcagaucgaccggcugaucaccgggcgccuccagagccugcagaccuacgugacccagcagcugauccgggcggccgagauccgcgccagcgccaaccucgccgcgaccaagauguccgagugcguccugggccagagcaagcggguggacuucugcggcaagggguaccaccugauguccuucccccagagcgccccgcacggcguggucuuccuccacgugacguacguccccgcccaggagaagaacuucaccaccgcccccgcgaucugccacgacgggaaggcccacuucccccgcgagggcguguucguguccaacgggacccacugguucgucacgcagcggaacuucuacgagccgcagaucaucaccaccgacaacaccuucgugagcggcaacugcgacguggucaucggcaucgugaacaacacgguguacgacccccugcagcccgagcuggacuccuucaaggaggagcucgacaaguacuucaagaaccacaccagccccgacgucgaccugggggacaucuccggcaucaacgccagcguggugaacauccagaaggagaucgaccgccugaacgaggucgccaagaaccucaacgagucccugaucgaccugcaggagcucgggaaguacgagcaguacaucaaguggccgugguacaucuggcugggcuucaucgccggccugaucgcgaucgugauggugaccaucaugcucugcugcaugaccagcugcugcuccugccugaaggggugcugcagcugcggcuccugcugcaaguucgacgaggacgacagcgagcccguccugaagggggugaagcuccacuacacgugaggacuaguuauaagacugacuagcccgaugggccucccaacgggcccuccuccccuccuugcaccgagauuaauagaucuaaaaaaaaaaaaaaaaaaaaaaaaaaaaaaaaaaaaaaaaaaaaaaaaaaaaaaaaaaaaaaaaaaaaaaaaaaaaaaaaaaaaaaaaaaaaaaaaaaaa

SEQ ID NO: 25720 - RNA, 4017 nt, Artificial Sequence
  SARS-CoV-2/Wuhan/WIV05/2019__EPI_ISL_402128 spike protein mRNA gc (1-1273)(K986P_V987P_N439K_D614G)
aggagaaagcuuaccauguucguguuccugguccuccugccccuggugagcucccagugcgugaaccucaccacccgcacgcagcugccgcccgccuacaccaacagcuucacccggggcgucuacuaccccgacaagguguuccgcuccagcgugcugcacuccacccaggaccucuuccugcccuucuucagcaacgucacgugguuccacgccauccacguguccgggaccaacggcaccaagcgguucgacaacccggugcugcccuucaacgacggggucuacuucgcgagcaccgagaaguccaacaucauccgcggcuggaucuucgggacgacccucgacagcaagacccagucccugcugaucgugaacaacgccaccaacguggucaucaaggugugcgaguuccaguucugcaacgaccccuuccucggcguguacuaccacaagaacaacaagagcuggauggaguccgaguuccgggucuacagcuccgccaacaacugcacguucgaguacgugagccagcccuuccugauggaccuggagggcaagcaggggaacuucaagaaccuccgcgaguucguguucaagaacaucgacggcuacuucaagaucuacuccaagcacaccccgaucaaccugguccgggaccugccccagggguucagcgcccucgagccccugguggaccugcccaucggcaucaacaucacccgcuuccagacccuccuggcccugcaccgguccuaccucacgccgggggacagcagcuccggcuggaccgcgggcgccgccgccuacuacgugggguaccugcagccccgcaccuuccugcucaaguacaacgagaacggcaccaucacggacgcggucgacugcgcccuggacccccugagcgagaccaagugcacccucaaguccuucaccguggagaaggggaucuaccagacgagcaacuuccgggugcagcccaccgaguccaucguccgcuucccgaacaucaccaaccugugccccuucggcgagguguucaacgccacccgguucgccagcgucuacgccuggaaccgcaagcggaucuccaacugcguggcggacuacagcgugcuguacaacuccgccagcuucuccacguucaagugcuacggcgucagccccaccaagcucaacgaccugugcuucaccaacguguacgccgacuccuucgugauccgcggggacgagguccggcagaucgcccccggccagaccgggaagaucgccgacuacaacuacaagcugccggacgacuucacgggcugcgugaucgcguggaacagcaagaaccucgacuccaaggucgggggcaacuacaacuaccuguaccgccuguuccgcaagagcaaccucaagcccuucgagcgggacaucuccaccgagaucuaccaggccggcagcacccccugcaacgggguggagggcuucaacugcuacuucccccugcaguccuacggguuccagccgaccaacggcgugggguaccagcccuaccggguggucgugcugagcuucgagcuccugcacgcccccgccacggugugcggccccaagaaguccaccaaccuggucaagaacaagugcgugaacuucaacuucaacggccucaccgggaccggcgugcugaccgagagcaacaagaaguuccugccguuccagcaguucgggcgcgacaucgccgacacgaccgacgcgguccgcgacccccagacccuggagauccucgacaucacccccugcagcuucggcgggguguccgugaucacgccgggcaccaacaccagcaaccaggucgccgugcuguaccagggcgugaacugcaccgagguccccguggccauccacgccgaccagcugacgcccaccuggcggguguacuccaccggcagcaacgucuuccagacccgcgccgggugccucaucggcgcggagcacgugaacaacuccuacgagugcgacauccccaucggggccggcaucugcgccagcuaccagacgcagaccaacuccccgcggcgcgcccggagcguggcgucccagagcaucaucgccuacaccaugucccugggcgccgagaacagcgucgccuacuccaacaacagcaucgccauccccaccaacuucacgaucuccgugaccaccgagauccugcccgugagcaugaccaagacgagcgucgacugcaccauguacaucugcggggacuccaccgagugcagcaaccuccugcugcaguacggcuccuucugcacccagcucaaccgcgcgcugacggggaucgccguggagcaggacaagaacacccaggagguguucgcccaggucaagcagaucuacaagacgcccccgaucaaggacuucggcggguucaacuucagccagauccugcccgaccccuccaagcccagcaagcgguccuucaucgaggaccuccuguucaacaaggugacccuggccgacgccggcuucaucaagcaguacggcgacugccucggggacaucgcggcccgcgaccugaucugcgcccagaaguucaacggccugaccgugcucccgccccugcugaccgacgagaugaucgcccaguacaccagcgcccuccuggcggggaccaucacguccggcuggaccuucggggccggcgccgcccugcagauccccuucgcgaugcagauggccuaccgguucaacggcaucggggucacccagaacgugcucuacgagaaccagaagcugaucgccaaccaguucaacagcgccaucggcaagauccaggacucccugagcuccaccgccagcgcgcucgggaagcugcaggacguggucaaccagaacgcccaggcccugaacacgcucgugaagcagcuguccagcaacuucggcgccaucuccagcgugcugaacgacauccucucccgccuggacccgcccgaggccgaggugcagaucgaccggcugaucaccgggcgccuccagagccugcagaccuacgugacccagcagcugauccgggcggccgagauccgcgccagcgccaaccucgccgcgaccaagauguccgagugcguccugggccagagcaagcggguggacuucugcggcaagggguaccaccugauguccuucccccagagcgccccgcacggcguggucuuccuccacgugacguacguccccgcccaggagaagaacuucaccaccgcccccgcgaucugccacgacgggaaggcccacuucccccgcgagggcguguucguguccaacgggacccacugguucgucacgcagcggaacuucuacgagccgcagaucaucaccaccgacaacaccuucgugagcggcaacugcgacguggucaucggcaucgugaacaacacgguguacgacccccugcagcccgagcuggacuccuucaaggaggagcucgacaaguacuucaagaaccacaccagccccgacgucgaccugggggacaucuccggcaucaacgccagcguggugaacauccagaaggagaucgaccgccugaacgaggucgccaagaaccucaacgagucccugaucgaccugcaggagcucgggaaguacgagcaguacaucaaguggccgugguacaucuggcugggcuucaucgccggccugaucgcgaucgugauggugaccaucaugcucugcugcaugaccagcugcugcuccugccugaaggggugcugcagcugcggcuccugcugcaaguucgacgaggacgacagcgagcccguccugaagggggugaagcuccacuacacgugaggacuaguuauaagacugacuagcccgaugggccucccaacgggcccuccuccccuccuugcaccgagauuaauagaucuaaaaaaaaaaaaaaaaaaaaaaaaaaaaaaaaaaaaaaaaaaaaaaaaaaaaaaaaaaaaaaaaaaaaaaaaaaaaaaaaaaaaaaaaaaaaaaaaaaaa

SEQ ID NO: 25721 - RNA, 4017 nt, Artificial Sequence
  SARS-CoV-2/Wuhan/WIV05/2019__EPI_ISL_402128 spike protein mRNA gc (1-1273)(K986P_V987P_S477N_D614G)
aggagaaagcuuaccauguucguguuccugguccuccugccccuggugagcucccagugcgugaaccucaccacccgcacgcagcugccgcccgccuacaccaacagcuucacccggggcgucuacuaccccgacaagguguuccgcuccagcgugcugcacuccacccaggaccucuuccugcccuucuucagcaacgucacgugguuccacgccauccacguguccgggaccaacggcaccaagcgguucgacaacccggugcugcccuucaacgacggggucuacuucgcgagcaccgagaaguccaacaucauccgcggcuggaucuucgggacgacccucgacagcaagacccagucccugcugaucgugaacaacgccaccaacguggucaucaaggugugcgaguuccaguucugcaacgaccccuuccucggcguguacuaccacaagaacaacaagagcuggauggaguccgaguuccgggucuacagcuccgccaacaacugcacguucgaguacgugagccagcccuuccugauggaccuggagggcaagcaggggaacuucaagaaccuccgcgaguucguguucaagaacaucgacggcuacuucaagaucuacuccaagcacaccccgaucaaccugguccgggaccugccccagggguucagcgcccucgagccccugguggaccugcccaucggcaucaacaucacccgcuuccagacccuccuggcccugcaccgguccuaccucacgccgggggacagcagcuccggcuggaccgcgggcgccgccgccuacuacgugggguaccugcagccccgcaccuuccugcucaaguacaacgagaacggcaccaucacggacgcggucgacugcgcccuggacccccugagcgagaccaagugcacccucaaguccuucaccguggagaaggggaucuaccagacgagcaacuuccgggugcagcccaccgaguccaucguccgcuucccgaacaucaccaaccugugccccuucggcgagguguucaacgccacccgguucgccagcgucuacgccuggaaccgcaagcggaucuccaacugcguggcggacuacagcgugcuguacaacuccgccagcuucuccacguucaagugcuacggcgucagccccaccaagcucaacgaccugugcuucaccaacguguacgccgacuccuucgugauccgcggggacgagguccggcagaucgcccccggccagaccgggaagaucgccgacuacaacuacaagcugccggacgacuucacgggcugcgugaucgcguggaacagcaacaaccucgacuccaaggucgggggcaacuacaacuaccuguaccgccuguuccgcaagagcaaccucaagcccuucgagcgggacaucuccaccgagaucuaccaggccggcaacacccccugcaacgggguggagggcuucaacugcuacuucccccugcaguccuacggguuccagccgaccaacggcgugggguaccagcccuaccggguggucgugcugagcuucgagcuccugcacgcccccgccacggugugcggccccaagaaguccaccaaccuggucaagaacaagugcgugaacuucaacuucaacggccucaccgggaccggcgugcugaccgagagcaacaagaaguuccugccguuccagcaguucgggcgcgacaucgccgacacgaccgacgcgguccgcgacccccagacccuggagauccucgacaucacccccugcagcuucggcgggguguccgugaucacgccgggcaccaacaccagcaaccaggucgccgugcuguaccagggcgugaacugcaccgagguccccguggccauccacgccgaccagcugacgcccaccuggcggguguacuccaccggcagcaacgucuuccagacccgcgccgggugccucaucggcgcggagcacgugaacaacuccuacgagugcgacauccccaucggggccggcaucugcgccagcuaccagacgcagaccaacuccccgcggcgcgcccggagcguggcgucccagagcaucaucgccuacaccaugucccugggcgccgagaacagcgucgccuacuccaacaacagcaucgccauccccaccaacuucacgaucuccgugaccaccgagauccugcccgugagcaugaccaagacgagcgucgacugcaccauguacaucugcggggacuccaccgagugcagcaaccuccugcugcaguacggcuccuucugcacccagcucaaccgcgcgcugacggggaucgccguggagcaggacaagaacacccaggagguguucgcccaggucaagcagaucuacaagacgcccccgaucaaggacuucggcggguucaacuucagccagauccugcccgaccccuccaagcccagcaagcgguccuucaucgaggaccuccuguucaacaaggugacccuggccgacgccggcuucaucaagcaguacggcgacugccucggggacaucgcggcccgcgaccugaucugcgcccagaaguucaacggccugaccgugcucccgccccugcugaccgacgagaugaucgcccaguacaccagcgcccuccuggcggggaccaucacguccggcuggaccuucggggccggcgccgcccugcagauccccuucgcgaugcagauggccuaccgguucaacggcaucggggucacccagaacgugcucuacgagaaccagaagcugaucgccaaccaguucaacagcgccaucggcaagauccaggacucccugagcuccaccgccagcgcgcucgggaagcugcaggacguggucaaccagaacgcccaggcccugaacacgcucgugaagcagcuguccagcaacuucggcgccaucuccagcgugcugaacgacauccucucccgccuggacccgcccgaggccgaggugcagaucgaccggcugaucaccgggcgccuccagagccugcagaccuacgugacccagcagcugauccgggcggccgagauccgcgccagcgccaaccucgccgcgaccaagauguccgagugcguccugggccagagcaagcggguggacuucugcggcaagggguaccaccugauguccuucccccagagcgccccgcacggcguggucuuccuccacgugacguacguccccgcccaggagaagaacuucaccaccgcccccgcgaucugccacgacgggaaggcccacuucccccgcgagggcguguucguguccaacgggacccacugguucgucacgcagcggaacuucuacgagccgcagaucaucaccaccgacaacaccuucgugagcggcaacugcgacguggucaucggcaucgugaacaacacgguguacgacccccugcagcccgagcuggacuccuucaaggaggagcucgacaaguacuucaagaaccacaccagccccgacgucgaccugggggacaucuccggcaucaacgccagcguggugaacauccagaaggagaucgaccgccugaacgaggucgccaagaaccucaacgagucccugaucgaccugcaggagcucgggaaguacgagcaguacaucaaguggccgugguacaucuggcugggcuucaucgccggccugaucgcgaucgugauggugaccaucaugcucugcugcaugaccagcugcugcuccugccugaaggggugcugcagcugcggcuccugcugcaaguucgacgaggacgacagcgagcccguccugaagggggugaagcuccacuacacgugaggacuaguuauaagacugacuagcccgaugggccucccaacgggcccuccuccccuccuugcaccgagauuaauagaucuaaaaaaaaaaaaaaaaaaaaaaaaaaaaaaaaaaaaaaaaaaaaaaaaaaaaaaaaaaaaaaaaaaaaaaaaaaaaaaaaaaaaaaaaaaaaaaaaaaaa

SEQ ID NO: 25722 - RNA, 4017 nt, Artificial Sequence
  SARS-CoV-2/Wuhan/WIV05/2019__EPI_ISL_402128 spike protein mRNA gc (1-1273)(K986P_V987P_N501Y_D614G)
aggagaaagcuuaccauguucguguuccugguccuccugccccuggugagcucccagugcgugaaccucaccacccgcacgcagcugccgcccgccuacaccaacagcuucacccggggcgucuacuaccccgacaagguguuccgcuccagcgugcugcacuccacccaggaccucuuccugcccuucuucagcaacgucacgugguuccacgccauccacguguccgggaccaacggcaccaagcgguucgacaacccggugcugcccuucaacgacggggucuacuucgcgagcaccgagaaguccaacaucauccgcggcuggaucuucgggacgacccucgacagcaagacccagucccugcugaucgugaacaacgccaccaacguggucaucaaggugugcgaguuccaguucugcaacgaccccuuccucggcguguacuaccacaagaacaacaagagcuggauggaguccgaguuccgggucuacagcuccgccaacaacugcacguucgaguacgugagccagcccuuccugauggaccuggagggcaagcaggggaacuucaagaaccuccgcgaguucguguucaagaacaucgacggcuacuucaagaucuacuccaagcacaccccgaucaaccugguccgggaccugccccagggguucagcgcccucgagccccugguggaccugcccaucggcaucaacaucacccgcuuccagacccuccuggcccugcaccgguccuaccucacgccgggggacagcagcuccggcuggaccgcgggcgccgccgccuacuacgugggguaccugcagccccgcaccuuccugcucaaguacaacgagaacggcaccaucacggacgcggucgacugcgcccuggacccccugagcgagaccaagugcacccucaaguccuucaccguggagaaggggaucuaccagacgagcaacuuccgggugcagcccaccgaguccaucguccgcuucccgaacaucaccaaccugugccccuucggcgagguguucaacgccacccgguucgccagcgucuacgccuggaaccgcaagcggaucuccaacugcguggcggacuacagcgugcuguacaacuccgccagcuucuccacguucaagugcuacggcgucagccccaccaagcucaacgaccugugcuucaccaacguguacgccgacuccuucgugauccgcggggacgagguccggcagaucgcccccggccagaccgggaagaucgccgacuacaacuacaagcugccggacgacuucacgggcugcgugaucgcguggaacagcaacaaccucgacuccaaggucgggggcaacuacaacuaccuguaccgccuguuccgcaagagcaaccucaagcccuucgagcgggacaucuccaccgagaucuaccaggccggcagcacccccugcaacgggguggagggcuucaacugcuacuucccccugcaguccuacggguuccagccgaccuacggcgugggguaccagcccuaccggguggucgugcugagcuucgagcuccugcacgcccccgccacggugugcggccccaagaaguccaccaaccuggucaagaacaagugcgugaacuucaacuucaacggccucaccgggaccggcgugcugaccgagagcaacaagaaguuccugccguuccagcaguucgggcgcgacaucgccgacacgaccgacgcgguccgcgacccccagacccuggagauccucgacaucacccccugcagcuucggcgggguguccgugaucacgccgggcaccaacaccagcaaccaggucgccgugcuguaccagggcgugaacugcaccgagguccccguggccauccacgccgaccagcugacgcccaccuggcggguguacuccaccggcagcaacgucuuccagacccgcgccgggugccucaucggcgcggagcacgugaacaacuccuacgagugcgacauccccaucggggccggcaucugcgccagcuaccagacgcagaccaacuccccgcggcgcgcccggagcguggcgucccagagcaucaucgccuacaccaugucccugggcgccgagaacagcgucgccuacuccaacaacagcaucgccauccccaccaacuucacgaucuccgugaccaccgagauccugcccgugagcaugaccaagacgagcgucgacugcaccauguacaucugcggggacuccaccgagugcagcaaccuccugcugcaguacggcuccuucugcacccagcucaaccgcgcgcugacggggaucgccguggagcaggacaagaacacccaggagguguucgcccaggucaagcagaucuacaagacgcccccgaucaaggacuucggcggguucaacuucagccagauccugcccgaccccuccaagcccagcaagcgguccuucaucgaggaccuccuguucaacaaggugacccuggccgacgccggcuucaucaagcaguacggcgacugccucggggacaucgcggcccgcgaccugaucugcgcccagaaguucaacggccugaccgugcucccgccccugcugaccgacgagaugaucgcccaguacaccagcgcccuccuggcggggaccaucacguccggcuggaccuucggggccggcgccgcccugcagauccccuucgcgaugcagauggccuaccgguucaacggcaucggggucacccagaacgugcucuacgagaaccagaagcugaucgccaaccaguucaacagcgccaucggcaagauccaggacucccugagcuccaccgccagcgcgcucgggaagcugcaggacguggucaaccagaacgcccaggcccugaacacgcucgugaagcagcuguccagcaacuucggcgccaucuccagcgugcugaacgacauccucucccgccuggacccgcccgaggccgaggugcagaucgaccggcugaucaccgggcgccuccagagccugcagaccuacgugacccagcagcugauccgggcggccgagauccgcgccagcgccaaccucgccgcgaccaagauguccgagugcguccugggccagagcaagcggguggacuucugcggcaagggguaccaccugauguccuucccccagagcgccccgcacggcguggucuuccuccacgugacguacguccccgcccaggagaagaacuucaccaccgcccccgcgaucugccacgacgggaaggcccacuucccccgcgagggcguguucguguccaacgggacccacugguucgucacgcagcggaacuucuacgagccgcagaucaucaccaccgacaacaccuucgugagcggcaacugcgacguggucaucggcaucgugaacaacacgguguacgacccccugcagcccgagcuggacuccuucaaggaggagcucgacaaguacuucaagaaccacaccagccccgacgucgaccugggggacaucuccggcaucaacgccagcguggugaacauccagaaggagaucgaccgccugaacgaggucgccaagaaccucaacgagucccugaucgaccugcaggagcucgggaaguacgagcaguacaucaaguggccgugguacaucuggcugggcuucaucgccggccugaucgcgaucgugauggugaccaucaugcucugcugcaugaccagcugcugcuccugccugaaggggugcugcagcugcggcuccugcugcaaguucgacgaggacgacagcgagcccguccugaagggggugaagcuccacuacacgugaggacuaguuauaagacugacuagcccgaugggccucccaacgggcccuccuccccuccuugcaccgagauuaauagaucuaaaaaaaaaaaaaaaaaaaaaaaaaaaaaaaaaaaaaaaaaaaaaaaaaaaaaaaaaaaaaaaaaaaaaaaaaaaaaaaaaaaaaaaaaaaaaaaaaaaa

SEQ ID NO: 25723 - RNA, 4011 nt, Artificial Sequence
  SARS-CoV-2/Wuhan/WIV05/2019__EPI_ISL_402128 spike protein mRNA gc (1-1273)(K986P_V987P_H69del_V70del_D614G)
aggagaaagcuuaccauguucguguuccugguccuccugccccuggugagcucccagugcgugaaccucaccacccgcacgcagcugccgcccgccuacaccaacagcuucacccggggcgucuacuaccccgacaagguguuccgcuccagcgugcugcacuccacccaggaccucuuccugcccuucuucagcaacgucacgugguuccacgccaucuccgggaccaacggcaccaagcgguucgacaacccggugcugcccuucaacgacggggucuacuucgcgagcaccgagaaguccaacaucauccgcggcuggaucuucgggacgacccucgacagcaagacccagucccugcugaucgugaacaacgccaccaacguggucaucaaggugugcgaguuccaguucugcaacgaccccuuccucggcguguacuaccacaagaacaacaagagcuggauggaguccgaguuccgggucuacagcuccgccaacaacugcacguucgaguacgugagccagcccuuccugauggaccuggagggcaagcaggggaacuucaagaaccuccgcgaguucguguucaagaacaucgacggcuacuucaagaucuacuccaagcacaccccgaucaaccugguccgggaccugccccagggguucagcgcccucgagccccugguggaccugcccaucggcaucaacaucacccgcuuccagacccuccuggcccugcaccgguccuaccucacgccgggggacagcagcuccggcuggaccgcgggcgccgccgccuacuacgugggguaccugcagccccgcaccuuccugcucaaguacaacgagaacggcaccaucacggacgcggucgacugcgcccuggacccccugagcgagaccaagugcacccucaaguccuucaccguggagaaggggaucuaccagacgagcaacuuccgggugcagcccaccgaguccaucguccgcuucccgaacaucaccaaccugugccccuucggcgagguguucaacgccacccgguucgccagcgucuacgccuggaaccgcaagcggaucuccaacugcguggcggacuacagcgugcuguacaacuccgccagcuucuccacguucaagugcuacggcgucagccccaccaagcucaacgaccugugcuucaccaacguguacgccgacuccuucgugauccgcggggacgagguccggcagaucgcccccggccagaccgggaagaucgccgacuacaacuacaagcugccggacgacuucacgggcugcgugaucgcguggaacagcaacaaccucgacuccaaggucgggggcaacuacaacuaccuguaccgccuguuccgcaagagcaaccucaagcccuucgagcgggacaucuccaccgagaucuaccaggccggcagcacccccugcaacgggguggagggcuucaacugcuacuucccccugcaguccuacggguuccagccgaccaacggcgugggguaccagcccuaccggguggucgugcugagcuucgagcuccugcacgcccccgccacggugugcggccccaagaaguccaccaaccuggucaagaacaagugcgugaacuucaacuucaacggccucaccgggaccggcgugcugaccgagagcaacaagaaguuccugccguuccagcaguucgggcgcgacaucgccgacacgaccgacgcgguccgcgacccccagacccuggagauccucgacaucacccccugcagcuucggcgggguguccgugaucacgccgggcaccaacaccagcaaccaggucgccgugcuguaccagggcgugaacugcaccgagguccccguggccauccacgccgaccagcugacgcccaccuggcggguguacuccaccggcagcaacgucuuccagacccgcgccgggugccucaucggcgcggagcacgugaacaacuccuacgagugcgacauccccaucggggccggcaucugcgccagcuaccagacgcagaccaacuccccgcggcgcgcccggagcguggcgucccagagcaucaucgccuacaccaugucccugggcgccgagaacagcgucgccuacuccaacaacagcaucgccauccccaccaacuucacgaucuccgugaccaccgagauccugcccgugagcaugaccaagacgagcgucgacugcaccauguacaucugcggggacuccaccgagugcagcaaccuccugcugcaguacggcuccuucugcacccagcucaaccgcgcgcugacggggaucgccguggagcaggacaagaacacccaggagguguucgcccaggucaagcagaucuacaagacgcccccgaucaaggacuucggcggguucaacuucagccagauccugcccgaccccuccaagcccagcaagcgguccuucaucgaggaccuccuguucaacaaggugacccuggccgacgccggcuucaucaagcaguacggcgacugccucggggacaucgcggcccgcgaccugaucugcgcccagaaguucaacggccugaccgugcucccgccccugcugaccgacgagaugaucgcccaguacaccagcgcccuccuggcggggaccaucacguccggcuggaccuucggggccggcgccgcccugcagauccccuucgcgaugcagauggccuaccgguucaacggcaucggggucacccagaacgugcucuacgagaaccagaagcugaucgccaaccaguucaacagcgccaucggcaagauccaggacucccugagcuccaccgccagcgcgcucgggaagcugcaggacguggucaaccagaacgcccaggcccugaacacgcucgugaagcagcuguccagcaacuucggcgccaucuccagcgugcugaacgacauccucucccgccuggacccgcccgaggccgaggugcagaucgaccggcugaucaccgggcgccuccagagccugcagaccuacgugacccagcagcugauccgggcggccgagauccgcgccagcgccaaccucgccgcgaccaagauguccgagugcguccugggccagagcaagcggguggacuucugcggcaagggguaccaccugauguccuucccccagagcgccccgcacggcguggucuuccuccacgugacguacguccccgcccaggagaagaacuucaccaccgcccccgcgaucugccacgacgggaaggcccacuucccccgcgagggcguguucguguccaacgggacccacugguucgucacgcagcggaacuucuacgagccgcagaucaucaccaccgacaacaccuucgugagcggcaacugcgacguggucaucggcaucgugaacaacacgguguacgacccccugcagcccgagcuggacuccuucaaggaggagcucgacaaguacuucaagaaccacaccagccccgacgucgaccugggggacaucuccggcaucaacgccagcguggugaacauccagaaggagaucgaccgccugaacgaggucgccaagaaccucaacgagucccugaucgaccugcaggagcucgggaaguacgagcaguacaucaaguggccgugguacaucuggcugggcuucaucgccggccugaucgcgaucgugauggugaccaucaugcucugcugcaugaccagcugcugcuccugccugaaggggugcugcagcugcggcuccugcugcaaguucgacgaggacgacagcgagcccguccugaagggggugaagcuccacuacacgugaggacuaguuauaagacugacuagcccgaugggccucccaacgggcccuccuccccuccuugcaccgagauuaauagaucuaaaaaaaaaaaaaaaaaaaaaaaaaaaaaaaaaaaaaaaaaaaaaaaaaaaaaaaaaaaaaaaaaaaaaaaaaaaaaaaaaaaaaaaaaaaaaaaaaaaa

SEQ ID NO: 25724 - RNA, 4017 nt, Artificial Sequence
  SARS-CoV-2/Wuhan/WIV05/2019__EPI_ISL_402128 spike protein mRNA gc (1-1273)(K986P_V987P_Y453F_D614G)
aggagaaagcuuaccauguucguguuccugguccuccugccccuggugagcucccagugcgugaaccucaccacccgcacgcagcugccgcccgccuacaccaacagcuucacccggggcgucuacuaccccgacaagguguuccgcuccagcgugcugcacuccacccaggaccucuuccugcccuucuucagcaacgucacgugguuccacgccauccacguguccgggaccaacggcaccaagcgguucgacaacccggugcugcccuucaacgacggggucuacuucgcgagcaccgagaaguccaacaucauccgcggcuggaucuucgggacgacccucgacagcaagacccagucccugcugaucgugaacaacgccaccaacguggucaucaaggugugcgaguuccaguucugcaacgaccccuuccucggcguguacuaccacaagaacaacaagagcuggauggaguccgaguuccgggucuacagcuccgccaacaacugcacguucgaguacgugagccagcccuuccugauggaccuggagggcaagcaggggaacuucaagaaccuccgcgaguucguguucaagaacaucgacggcuacuucaagaucuacuccaagcacaccccgaucaaccugguccgggaccugccccagggguucagcgcccucgagccccugguggaccugcccaucggcaucaacaucacccgcuuccagacccuccuggcccugcaccgguccuaccucacgccgggggacagcagcuccggcuggaccgcgggcgccgccgccuacuacgugggguaccugcagccccgcaccuuccugcucaaguacaacgagaacggcaccaucacggacgcggucgacugcgcccuggacccccugagcgagaccaagugcacccucaaguccuucaccguggagaaggggaucuaccagacgagcaacuuccgggugcagcccaccgaguccaucguccgcuucccgaacaucaccaaccugugccccuucggcgagguguucaacgccacccgguucgccagcgucuacgccuggaaccgcaagcggaucuccaacugcguggcggacuacagcgugcuguacaacuccgccagcuucuccacguucaagugcuacggcgucagccccaccaagcucaacgaccugugcuucaccaacguguacgccgacuccuucgugauccgcggggacgagguccggcagaucgcccccggccagaccgggaagaucgccgacuacaacuacaagcugccggacgacuucacgggcugcgugaucgcguggaacagcaacaaccucgacuccaaggucgggggcaacuacaacuaccuguuccgccuguuccgcaagagcaaccucaagcccuucgagcgggacaucuccaccgagaucuaccaggccggcagcacccccugcaacgggguggagggcuucaacugcuacuucccccugcaguccuacggguuccagccgaccaacggcgugggguaccagcccuaccggguggucgugcugagcuucgagcuccugcacgcccccgccacggugugcggccccaagaaguccaccaaccuggucaagaacaagugcgugaacuucaacuucaacggccucaccgggaccggcgugcugaccgagagcaacaagaaguuccugccguuccagcaguucgggcgcgacaucgccgacacgaccgacgcgguccgcgacccccagacccuggagauccucgacaucacccccugcagcuucggcgggguguccgugaucacgccgggcaccaacaccagcaaccaggucgccgugcuguaccagggcgugaacugcaccgagguccccguggccauccacgccgaccagcugacgcccaccuggcggguguacuccaccggcagcaacgucuuccagacccgcgccgggugccucaucggcgcggagcacgugaacaacuccuacgagugcgacauccccaucggggccggcaucugcgccagcuaccagacgcagaccaacuccccgcggcgcgcccggagcguggcgucccagagcaucaucgccuacaccaugucccugggcgccgagaacagcgucgccuacuccaacaacagcaucgccauccccaccaacuucacgaucuccgugaccaccgagauccugcccgugagcaugaccaagacgagcgucgacugcaccauguacaucugcggggacuccaccgagugcagcaaccuccugcugcaguacggcuccuucugcacccagcucaaccgcgcgcugacggggaucgccguggagcaggacaagaacacccaggagguguucgcccaggucaagcagaucuacaagacgcccccgaucaaggacuucggcggguucaacuucagccagauccugcccgaccccuccaagcccagcaagcgguccuucaucgaggaccuccuguucaacaaggugacccuggccgacgccggcuucaucaagcaguacggcgacugccucggggacaucgcggcccgcgaccugaucugcgcccagaaguucaacggccugaccgugcucccgccccugcugaccgacgagaugaucgcccaguacaccagcgcccuccuggcggggaccaucacguccggcuggaccuucggggccggcgccgcccugcagauccccuucgcgaugcagauggccuaccgguucaacggcaucggggucacccagaacgugcucuacgagaaccagaagcugaucgccaaccaguucaacagcgccaucggcaagauccaggacucccugagcuccaccgccagcgcgcucgggaagcugcaggacguggucaaccagaacgcccaggcccugaacacgcucgugaagcagcuguccagcaacuucggcgccaucuccagcgugcugaacgacauccucucccgccuggacccgcccgaggccgaggugcagaucgaccggcugaucaccgggcgccuccagagccugcagaccuacgugacccagcagcugauccgggcggccgagauccgcgccagcgccaaccucgccgcgaccaagauguccgagugcguccugggccagagcaagcggguggacuucugcggcaagggguaccaccugauguccuucccccagagcgccccgcacggcguggucuuccuccacgugacguacguccccgcccaggagaagaacuucaccaccgcccccgcgaucugccacgacgggaaggcccacuucccccgcgagggcguguucguguccaacgggacccacugguucgucacgcagcggaacuucuacgagccgcagaucaucaccaccgacaacaccuucgugagcggcaacugcgacguggucaucggcaucgugaacaacacgguguacgacccccugcagcccgagcuggacuccuucaaggaggagcucgacaaguacuucaagaaccacaccagccccgacgucgaccugggggacaucuccggcaucaacgccagcguggugaacauccagaaggagaucgaccgccugaacgaggucgccaagaaccucaacgagucccugaucgaccugcaggagcucgggaaguacgagcaguacaucaaguggccgugguacaucuggcugggcuucaucgccggccugaucgcgaucgugauggugaccaucaugcucugcugcaugaccagcugcugcuccugccugaaggggugcugcagcugcggcuccugcugcaaguucgacgaggacgacagcgagcccguccugaagggggugaagcuccacuacacgugaggacuaguuauaagacugacuagcccgaugggccucccaacgggcccuccuccccuccuugcaccgagauuaauagaucuaaaaaaaaaaaaaaaaaaaaaaaaaaaaaaaaaaaaaaaaaaaaaaaaaaaaaaaaaaaaaaaaaaaaaaaaaaaaaaaaaaaaaaaaaaaaaaaaaaaa

SEQ ID NO: 25725 - RNA, 4017 nt, Artificial Sequence
  SARS-CoV-2/Wuhan/WIV05/2019__EPI_ISL_402128 spike protein mRNA gc (1-1273)(K986P_V987P_D614G_I692V)
aggagaaagcuuaccauguucguguuccugguccuccugccccuggugagcucccagugcgugaaccucaccacccgcacgcagcugccgcccgccuacaccaacagcuucacccggggcgucuacuaccccgacaagguguuccgcuccagcgugcugcacuccacccaggaccucuuccugcccuucuucagcaacgucacgugguuccacgccauccacguguccgggaccaacggcaccaagcgguucgacaacccggugcugcccuucaacgacggggucuacuucgcgagcaccgagaaguccaacaucauccgcggcuggaucuucgggacgacccucgacagcaagacccagucccugcugaucgugaacaacgccaccaacguggucaucaaggugugcgaguuccaguucugcaacgaccccuuccucggcguguacuaccacaagaacaacaagagcuggauggaguccgaguuccgggucuacagcuccgccaacaacugcacguucgaguacgugagccagcccuuccugauggaccuggagggcaagcaggggaacuucaagaaccuccgcgaguucguguucaagaacaucgacggcuacuucaagaucuacuccaagcacaccccgaucaaccugguccgggaccugccccagggguucagcgcccucgagccccugguggaccugcccaucggcaucaacaucacccgcuuccagacccuccuggcccugcaccgguccuaccucacgccgggggacagcagcuccggcuggaccgcgggcgccgccgccuacuacgugggguaccugcagccccgcaccuuccugcucaaguacaacgagaacggcaccaucacggacgcggucgacugcgcccuggacccccugagcgagaccaagugcacccucaaguccuucaccguggagaaggggaucuaccagacgagcaacuuccgggugcagcccaccgaguccaucguccgcuucccgaacaucaccaaccugugccccuucggcgagguguucaacgccacccgguucgccagcgucuacgccuggaaccgcaagcggaucuccaacugcguggcggacuacagcgugcuguacaacuccgccagcuucuccacguucaagugcuacggcgucagccccaccaagcucaacgaccugugcuucaccaacguguacgccgacuccuucgugauccgcggggacgagguccggcagaucgcccccggccagaccgggaagaucgccgacuacaacuacaagcugccggacgacuucacgggcugcgugaucgcguggaacagcaacaaccucgacuccaaggucgggggcaacuacaacuaccuguaccgccuguuccgcaagagcaaccucaagcccuucgagcgggacaucuccaccgagaucuaccaggccggcagcacccccugcaacgggguggagggcuucaacugcuacuucccccugcaguccuacggguuccagccgaccaacggcgugggguaccagcccuaccggguggucgugcugagcuucgagcuccugcacgcccccgccacggugugcggccccaagaaguccaccaaccuggucaagaacaagugcgugaacuucaacuucaacggccucaccgggaccggcgugcugaccgagagcaacaagaaguuccugccguuccagcaguucgggcgcgacaucgccgacacgaccgacgcgguccgcgacccccagacccuggagauccucgacaucacccccugcagcuucggcgggguguccgugaucacgccgggcaccaacaccagcaaccaggucgccgugcuguaccagggcgugaacugcaccgagguccccguggccauccacgccgaccagcugacgcccaccuggcggguguacuccaccggcagcaacgucuuccagacccgcgccgggugccucaucggcgcggagcacgugaacaacuccuacgagugcgacauccccaucggggccggcaucugcgccagcuaccagacgcagaccaacuccccgcggcgcgcccggagcguggcgucccagagcgucaucgccuacaccaugucccugggcgccgagaacagcgucgccuacuccaacaacagcaucgccauccccaccaacuucacgaucuccgugaccaccgagauccugcccgugagcaugaccaagacgagcgucgacugcaccauguacaucugcggggacuccaccgagugcagcaaccuccugcugcaguacggcuccuucugcacccagcucaaccgcgcgcugacggggaucgccguggagcaggacaagaacacccaggagguguucgcccaggucaagcagaucuacaagacgcccccgaucaaggacuucggcggguucaacuucagccagauccugcccgaccccuccaagcccagcaagcgguccuucaucgaggaccuccuguucaacaaggugacccuggccgacgccggcuucaucaagcaguacggcgacugccucggggacaucgcggcccgcgaccugaucugcgcccagaaguucaacggccugaccgugcucccgccccugcugaccgacgagaugaucgcccaguacaccagcgcccuccuggcggggaccaucacguccggcuggaccuucggggccggcgccgcccugcagauccccuucgcgaugcagauggccuaccgguucaacggcaucggggucacccagaacgugcucuacgagaaccagaagcugaucgccaaccaguucaacagcgccaucggcaagauccaggacucccugagcuccaccgccagcgcgcucgggaagcugcaggacguggucaaccagaacgcccaggcccugaacacgcucgugaagcagcuguccagcaacuucggcgccaucuccagcgugcugaacgacauccucucccgccuggacccgcccgaggccgaggugcagaucgaccggcugaucaccgggcgccuccagagccugcagaccuacgugacccagcagcugauccgggcggccgagauccgcgccagcgccaaccucgccgcgaccaagauguccgagugcguccugggccagagcaagcggguggacuucugcggcaagggguaccaccugauguccuucccccagagcgccccgcacggcguggucuuccuccacgugacguacguccccgcccaggagaagaacuucaccaccgcccccgcgaucugccacgacgggaaggcccacuucccccgcgagggcguguucguguccaacgggacccacugguucgucacgcagcggaacuucuacgagccgcagaucaucaccaccgacaacaccuucgugagcggcaacugcgacguggucaucggcaucgugaacaacacgguguacgacccccugcagcccgagcuggacuccuucaaggaggagcucgacaaguacuucaagaaccacaccagccccgacgucgaccugggggacaucuccggcaucaacgccagcguggugaacauccagaaggagaucgaccgccugaacgaggucgccaagaaccucaacgagucccugaucgaccugcaggagcucgggaaguacgagcaguacaucaaguggccgugguacaucuggcugggcuucaucgccggccugaucgcgaucgugauggugaccaucaugcucugcugcaugaccagcugcugcuccugccugaaggggugcugcagcugcggcuccugcugcaaguucgacgaggacgacagcgagcccguccugaagggggugaagcuccacuacacgugaggacuaguuauaagacugacuagcccgaugggccucccaacgggcccuccuccccuccuugcaccgagauuaauagaucuaaaaaaaaaaaaaaaaaaaaaaaaaaaaaaaaaaaaaaaaaaaaaaaaaaaaaaaaaaaaaaaaaaaaaaaaaaaaaaaaaaaaaaaaaaaaaaaaaaaa

SEQ ID NO: 25726 - RNA, 4017 nt, Artificial Sequence
  SARS-CoV-2/Wuhan/WIV05/2019__EPI_ISL_402128 spike protein mRNA gc (1-1273)(K986P_V987P_D614G_M1229I)
aggagaaagcuuaccauguucguguuccugguccuccugccccuggugagcucccagugcgugaaccucaccacccgcacgcagcugccgcccgccuacaccaacagcuucacccggggcgucuacuaccccgacaagguguuccgcuccagcgugcugcacuccacccaggaccucuuccugcccuucuucagcaacgucacgugguuccacgccauccacguguccgggaccaacggcaccaagcgguucgacaacccggugcugcccuucaacgacggggucuacuucgcgagcaccgagaaguccaacaucauccgcggcuggaucuucgggacgacccucgacagcaagacccagucccugcugaucgugaacaacgccaccaacguggucaucaaggugugcgaguuccaguucugcaacgaccccuuccucggcguguacuaccacaagaacaacaagagcuggauggaguccgaguuccgggucuacagcuccgccaacaacugcacguucgaguacgugagccagcccuuccugauggaccuggagggcaagcaggggaacuucaagaaccuccgcgaguucguguucaagaacaucgacggcuacuucaagaucuacuccaagcacaccccgaucaaccugguccgggaccugccccagggguucagcgcccucgagccccugguggaccugcccaucggcaucaacaucacccgcuuccagacccuccuggcccugcaccgguccuaccucacgccgggggacagcagcuccggcuggaccgcgggcgccgccgccuacuacgugggguaccugcagccccgcaccuuccugcucaaguacaacgagaacggcaccaucacggacgcggucgacugcgcccuggacccccugagcgagaccaagugcacccucaaguccuucaccguggagaaggggaucuaccagacgagcaacuuccgggugcagcccaccgaguccaucguccgcuucccgaacaucaccaaccugugccccuucggcgagguguucaacgccacccgguucgccagcgucuacgccuggaaccgcaagcggaucuccaacugcguggcggacuacagcgugcuguacaacuccgccagcuucuccacguucaagugcuacggcgucagccccaccaagcucaacgaccugugcuucaccaacguguacgccgacuccuucgugauccgcggggacgagguccggcagaucgcccccggccagaccgggaagaucgccgacuacaacuacaagcugccggacgacuucacgggcugcgugaucgcguggaacagcaacaaccucgacuccaaggucgggggcaacuacaacuaccuguaccgccuguuccgcaagagcaaccucaagcccuucgagcgggacaucuccaccgagaucuaccaggccggcagcacccccugcaacgggguggagggcuucaacugcuacuucccccugcaguccuacggguuccagccgaccaacggcgugggguaccagcccuaccggguggucgugcugagcuucgagcuccugcacgcccccgccacggugugcggccccaagaaguccaccaaccuggucaagaacaagugcgugaacuucaacuucaacggccucaccgggaccggcgugcugaccgagagcaacaagaaguuccugccguuccagcaguucgggcgcgacaucgccgacacgaccgacgcgguccgcgacccccagacccuggagauccucgacaucacccccugcagcuucggcgggguguccgugaucacgccgggcaccaacaccagcaaccaggucgccgugcuguaccagggcgugaacugcaccgagguccccguggccauccacgccgaccagcugacgcccaccuggcggguguacuccaccggcagcaacgucuuccagacccgcgccgggugccucaucggcgcggagcacgugaacaacuccuacgagugcgacauccccaucggggccggcaucugcgccagcuaccagacgcagaccaacuccccgcggcgcgcccggagcguggcgucccagagcaucaucgccuacaccaugucccugggcgccgagaacagcgucgccuacuccaacaacagcaucgccauccccaccaacuucacgaucuccgugaccaccgagauccugcccgugagcaugaccaagacgagcgucgacugcaccauguacaucugcggggacuccaccgagugcagcaaccuccugcugcaguacggcuccuucugcacccagcucaaccgcgcgcugacggggaucgccguggagcaggacaagaacacccaggagguguucgcccaggucaagcagaucuacaagacgcccccgaucaaggacuucggcggguucaacuucagccagauccugcccgaccccuccaagcccagcaagcgguccuucaucgaggaccuccuguucaacaaggugacccuggccgacgccggcuucaucaagcaguacggcgacugccucggggacaucgcggcccgcgaccugaucugcgcccagaaguucaacggccugaccgugcucccgccccugcugaccgacgagaugaucgcccaguacaccagcgcccuccuggcggggaccaucacguccggcuggaccuucggggccggcgccgcccugcagauccccuucgcgaugcagauggccuaccgguucaacggcaucggggucacccagaacgugcucuacgagaaccagaagcugaucgccaaccaguucaacagcgccaucggcaagauccaggacucccugagcuccaccgccagcgcgcucgggaagcugcaggacguggucaaccagaacgcccaggcccugaacacgcucgugaagcagcuguccagcaacuucggcgccaucuccagcgugcugaacgacauccucucccgccuggacccgcccgaggccgaggugcagaucgaccggcugaucaccgggcgccuccagagccugcagaccuacgugacccagcagcugauccgggcggccgagauccgcgccagcgccaaccucgccgcgaccaagauguccgagugcguccugggccagagcaagcggguggacuucugcggcaagggguaccaccugauguccuucccccagagcgccccgcacggcguggucuuccuccacgugacguacguccccgcccaggagaagaacuucaccaccgcccccgcgaucugccacgacgggaaggcccacuucccccgcgagggcguguucguguccaacgggacccacugguucgucacgcagcggaacuucuacgagccgcagaucaucaccaccgacaacaccuucgugagcggcaacugcgacguggucaucggcaucgugaacaacacgguguacgacccccugcagcccgagcuggacuccuucaaggaggagcucgacaaguacuucaagaaccacaccagccccgacgucgaccugggggacaucuccggcaucaacgccagcguggugaacauccagaaggagaucgaccgccugaacgaggucgccaagaaccucaacgagucccugaucgaccugcaggagcucgggaaguacgagcaguacaucaaguggccgugguacaucuggcugggcuucaucgccggccugaucgcgaucgugaucgugaccaucaugcucugcugcaugaccagcugcugcuccugccugaaggggugcugcagcugcggcuccugcugcaaguucgacgaggacgacagcgagcccguccugaagggggugaagcuccacuacacgugaggacuaguuauaagacugacuagcccgaugggccucccaacgggcccuccuccccuccuugcaccgagauuaauagaucuaaaaaaaaaaaaaaaaaaaaaaaaaaaaaaaaaaaaaaaaaaaaaaaaaaaaaaaaaaaaaaaaaaaaaaaaaaaaaaaaaaaaaaaaaaaaaaaaaaaa

SEQ ID NO: 25727 - RNA, 4011 nt, Artificial Sequence
  SARS-CoV-2/Wuhan/WIV05/2019__EPI_ISL_402128 spike protein mRNA gc (1-1273)(K986P_V987P_H69del_V70del_A222V_Y453F_S477N_D614G_I692V)
aggagaaagcuuaccauguucguguuccugguccuccugccccuggugagcucccagugcgugaaccucaccacccgcacgcagcugccgcccgccuacaccaacagcuucacccggggcgucuacuaccccgacaagguguuccgcuccagcgugcugcacuccacccaggaccucuuccugcccuucuucagcaacgucacgugguuccacgccaucuccgggaccaacggcaccaagcgguucgacaacccggugcugcccuucaacgacggggucuacuucgcgagcaccgagaaguccaacaucauccgcggcuggaucuucgggacgacccucgacagcaagacccagucccugcugaucgugaacaacgccaccaacguggucaucaaggugugcgaguuccaguucugcaacgaccccuuccucggcguguacuaccacaagaacaacaagagcuggauggaguccgaguuccgggucuacagcuccgccaacaacugcacguucgaguacgugagccagcccuuccugauggaccuggagggcaagcaggggaacuucaagaaccuccgcgaguucguguucaagaacaucgacggcuacuucaagaucuacuccaagcacaccccgaucaaccugguccgggaccugccccagggguucagcguccucgagccccugguggaccugcccaucggcaucaacaucacccgcuuccagacccuccuggcccugcaccgguccuaccucacgccgggggacagcagcuccggcuggaccgcgggcgccgccgccuacuacgugggguaccugcagccccgcaccuuccugcucaaguacaacgagaacggcaccaucacggacgcggucgacugcgcccuggacccccugagcgagaccaagugcacccucaaguccuucaccguggagaaggggaucuaccagacgagcaacuuccgggugcagcccaccgaguccaucguccgcuucccgaacaucaccaaccugugccccuucggcgagguguucaacgccacccgguucgccagcgucuacgccuggaaccgcaagcggaucuccaacugcguggcggacuacagcgugcuguacaacuccgccagcuucuccacguucaagugcuacggcgucagccccaccaagcucaacgaccugugcuucaccaacguguacgccgacuccuucgugauccgcggggacgagguccggcagaucgcccccggccagaccgggaagaucgccgacuacaacuacaagcugccggacgacuucacgggcugcgugaucgcguggaacagcaacaaccucgacuccaaggucgggggcaacuacaacuaccuguuccgccuguuccgcaagagcaaccucaagcccuucgagcgggacaucuccaccgagaucuaccaggccggcaacacccccugcaacgggguggagggcuucaacugcuacuucccccugcaguccuacggguuccagccgaccaacggcgugggguaccagcccuaccggguggucgugcugagcuucgagcuccugcacgcccccgccacggugugcggccccaagaaguccaccaaccuggucaagaacaagugcgugaacuucaacuucaacggccucaccgggaccggcgugcugaccgagagcaacaagaaguuccugccguuccagcaguucgggcgcgacaucgccgacacgaccgacgcgguccgcgacccccagacccuggagauccucgacaucacccccugcagcuucggcgggguguccgugaucacgccgggcaccaacaccagcaaccaggucgccgugcuguaccagggcgugaacugcaccgagguccccguggccauccacgccgaccagcugacgcccaccuggcggguguacuccaccggcagcaacgucuuccagacccgcgccgggugccucaucggcgcggagcacgugaacaacuccuacgagugcgacauccccaucggggccggcaucugcgccagcuaccagacgcagaccaacuccccgcggcgcgcccggagcguggcgucccagagcgucaucgccuacaccaugucccugggcgccgagaacagcgucgccuacuccaacaacagcaucgccauccccaccaacuucacgaucuccgugaccaccgagauccugcccgugagcaugaccaagacgagcgucgacugcaccauguacaucugcggggacuccaccgagugcagcaaccuccugcugcaguacggcuccuucugcacccagcucaaccgcgcgcugacggggaucgccguggagcaggacaagaacacccaggagguguucgcccaggucaagcagaucuacaagacgcccccgaucaaggacuucggcggguucaacuucagccagauccugcccgaccccuccaagcccagcaagcgguccuucaucgaggaccuccuguucaacaaggugacccuggccgacgccggcuucaucaagcaguacggcgacugccucggggacaucgcggcccgcgaccugaucugcgcccagaaguucaacggccugaccgugcucccgccccugcugaccgacgagaugaucgcccaguacaccagcgcccuccuggcggggaccaucacguccggcuggaccuucggggccggcgccgcccugcagauccccuucgcgaugcagauggccuaccgguucaacggcaucggggucacccagaacgugcucuacgagaaccagaagcugaucgccaaccaguucaacagcgccaucggcaagauccaggacucccugagcuccaccgccagcgcgcucgggaagcugcaggacguggucaaccagaacgcccaggcccugaacacgcucgugaagcagcuguccagcaacuucggcgccaucuccagcgugcugaacgacauccucucccgccuggacccgcccgaggccgaggugcagaucgaccggcugaucaccgggcgccuccagagccugcagaccuacgugacccagcagcugauccgggcggccgagauccgcgccagcgccaaccucgccgcgaccaagauguccgagugcguccugggccagagcaagcggguggacuucugcggcaagggguaccaccugauguccuucccccagagcgccccgcacggcguggucuuccuccacgugacguacguccccgcccaggagaagaacuucaccaccgcccccgcgaucugccacgacgggaaggcccacuucccccgcgagggcguguucguguccaacgggacccacugguucgucacgcagcggaacuucuacgagccgcagaucaucaccaccgacaacaccuucgugagcggcaacugcgacguggucaucggcaucgugaacaacacgguguacgacccccugcagcccgagcuggacuccuucaaggaggagcucgacaaguacuucaagaaccacaccagccccgacgucgaccugggggacaucuccggcaucaacgccagcguggugaacauccagaaggagaucgaccgccugaacgaggucgccaagaaccucaacgagucccugaucgaccugcaggagcucgggaaguacgagcaguacaucaaguggccgugguacaucuggcugggcuucaucgccggccugaucgcgaucgugauggugaccaucaugcucugcugcaugaccagcugcugcuccugccugaaggggugcugcagcugcggcuccugcugcaaguucgacgaggacgacagcgagcccguccugaagggggugaagcuccacuacacgugaggacuaguuauaagacugacuagcccgaugggccucccaacgggcccuccuccccuccuugcaccgagauuaauagaucuaaaaaaaaaaaaaaaaaaaaaaaaaaaaaaaaaaaaaaaaaaaaaaaaaaaaaaaaaaaaaaaaaaaaaaaaaaaaaaaaaaaaaaaaaaaaaaaaaaaa

SEQ ID NO: 25728 - RNA, 4011 nt, Artificial Sequence
  SARS-CoV-2/Wuhan/WIV05/2019__EPI_ISL_402128 spike protein mRNA gc (1-1273)(K986P_V987P_H69del_V70del_Y453F_D614G_I692V_M1229I)
aggagaaagcuuaccauguucguguuccugguccuccugccccuggugagcucccagugcgugaaccucaccacccgcacgcagcugccgcccgccuacaccaacagcuucacccggggcgucuacuaccccgacaagguguuccgcuccagcgugcugcacuccacccaggaccucuuccugcccuucuucagcaacgucacgugguuccacgccaucuccgggaccaacggcaccaagcgguucgacaacccggugcugcccuucaacgacggggucuacuucgcgagcaccgagaaguccaacaucauccgcggcuggaucuucgggacgacccucgacagcaagacccagucccugcugaucgugaacaacgccaccaacguggucaucaaggugugcgaguuccaguucugcaacgaccccuuccucggcguguacuaccacaagaacaacaagagcuggauggaguccgaguuccgggucuacagcuccgccaacaacugcacguucgaguacgugagccagcccuuccugauggaccuggagggcaagcaggggaacuucaagaaccuccgcgaguucguguucaagaacaucgacggcuacuucaagaucuacuccaagcacaccccgaucaaccugguccgggaccugccccagggguucagcgcccucgagccccugguggaccugcccaucggcaucaacaucacccgcuuccagacccuccuggcccugcaccgguccuaccucacgccgggggacagcagcuccggcuggaccgcgggcgccgccgccuacuacgugggguaccugcagccccgcaccuuccugcucaaguacaacgagaacggcaccaucacggacgcggucgacugcgcccuggacccccugagcgagaccaagugcacccucaaguccuucaccguggagaaggggaucuaccagacgagcaacuuccgggugcagcccaccgaguccaucguccgcuucccgaacaucaccaaccugugccccuucggcgagguguucaacgccacccgguucgccagcgucuacgccuggaaccgcaagcggaucuccaacugcguggcggacuacagcgugcuguacaacuccgccagcuucuccacguucaagugcuacggcgucagccccaccaagcucaacgaccugugcuucaccaacguguacgccgacuccuucgugauccgcggggacgagguccggcagaucgcccccggccagaccgggaagaucgccgacuacaacuacaagcugccggacgacuucacgggcugcgugaucgcguggaacagcaacaaccucgacuccaaggucgggggcaacuacaacuaccuguuccgccuguuccgcaagagcaaccucaagcccuucgagcgggacaucuccaccgagaucuaccaggccggcagcacccccugcaacgggguggagggcuucaacugcuacuucccccugcaguccuacggguuccagccgaccaacggcgugggguaccagcccuaccggguggucgugcugagcuucgagcuccugcacgcccccgccacggugugcggccccaagaaguccaccaaccuggucaagaacaagugcgugaacuucaacuucaacggccucaccgggaccggcgugcugaccgagagcaacaagaaguuccugccguuccagcaguucgggcgcgacaucgccgacacgaccgacgcgguccgcgacccccagacccuggagauccucgacaucacccccugcagcuucggcgggguguccgugaucacgccgggcaccaacaccagcaaccaggucgccgugcuguaccagggcgugaacugcaccgagguccccguggccauccacgccgaccagcugacgcccaccuggcggguguacuccaccggcagcaacgucuuccagacccgcgccgggugccucaucggcgcggagcacgugaacaacuccuacgagugcgacauccccaucggggccggcaucugcgccagcuaccagacgcagaccaacuccccgcggcgcgcccggagcguggcgucccagagcgugaucgccuacaccaugucccugggcgccgagaacagcgucgccuacuccaacaacagcaucgccauccccaccaacuucacgaucuccgugaccaccgagauccugcccgugagcaugaccaagacgagcgucgacugcaccauguacaucugcggggacuccaccgagugcagcaaccuccugcugcaguacggcuccuucugcacccagcucaaccgcgcgcugacggggaucgccguggagcaggacaagaacacccaggagguguucgcccaggucaagcagaucuacaagacgcccccgaucaaggacuucggcggguucaacuucagccagauccugcccgaccccuccaagcccagcaagcgguccuucaucgaggaccuccuguucaacaaggugacccuggccgacgccggcuucaucaagcaguacggcgacugccucggggacaucgcggcccgcgaccugaucugcgcccagaaguucaacggccugaccgugcucccgccccugcugaccgacgagaugaucgcccaguacaccagcgcccuccuggcggggaccaucacguccggcuggaccuucggggccggcgccgcccugcagauccccuucgcgaugcagauggccuaccgguucaacggcaucggggucacccagaacgugcucuacgagaaccagaagcugaucgccaaccaguucaacagcgccaucggcaagauccaggacucccugagcuccaccgccagcgcgcucgggaagcugcaggacguggucaaccagaacgcccaggcccugaacacgcucgugaagcagcuguccagcaacuucggcgccaucuccagcgugcugaacgacauccucucccgccuggacccgcccgaggccgaggugcagaucgaccggcugaucaccgggcgccuccagagccugcagaccuacgugacccagcagcugauccgggcggccgagauccgcgccagcgccaaccucgccgcgaccaagauguccgagugcguccugggccagagcaagcggguggacuucugcggcaagggguaccaccugauguccuucccccagagcgccccgcacggcguggucuuccuccacgugacguacguccccgcccaggagaagaacuucaccaccgcccccgcgaucugccacgacgggaaggcccacuucccccgcgagggcguguucguguccaacgggacccacugguucgucacgcagcggaacuucuacgagccgcagaucaucaccaccgacaacaccuucgugagcggcaacugcgacguggucaucggcaucgugaacaacacgguguacgacccccugcagcccgagcuggacuccuucaaggaggagcucgacaaguacuucaagaaccacaccagccccgacgucgaccugggggacaucuccggcaucaacgccagcguggugaacauccagaaggagaucgaccgccugaacgaggucgccaagaaccucaacgagucccugaucgaccugcaggagcucgggaaguacgagcaguacaucaaguggccgugguacaucuggcugggcuucaucgccggccugaucgcgaucgugaucgugaccaucaugcucugcugcaugaccagcugcugcuccugccugaaggggugcugcagcugcggcuccugcugcaaguucgacgaggacgacagcgagcccguccugaagggggugaagcuccacuacacgugaggacuaguuauaagacugacuagcccgaugggccucccaacgggcccuccuccccuccuugcaccgagauuaauagaucuaaaaaaaaaaaaaaaaaaaaaaaaaaaaaaaaaaaaaaaaaaaaaaaaaaaaaaaaaaaaaaaaaaaaaaaaaaaaaaaaaaaaaaaaaaaaaaaaaaaa

SEQ ID NO: 25729 - RNA, 4008 nt, Artificial Sequence
  SARS-CoV-2/Wuhan/WIV05/2019__EPI_ISL_402128 spike protein mRNA gc (1-1273)(K986P_V987P_K986P_V987P_H69del_V70del_Y144del_N501Y_A570 D_D614G_P681H_T716I_S982A_D1118H)
aggagaaagcuuaccauguucguguuccugguccuccugccccuggugagcucccagugcgugaaccucaccacccgcacgcagcugccgcccgccuacaccaacagcuucacccggggcgucuacuaccccgacaagguguuccgcuccagcgugcugcacuccacccaggaccucuuccugcccuucuucagcaacgucacgugguuccacgccaucuccgggaccaacggcaccaagcgguucgacaacccggugcugcccuucaacgacggggucuacuucgcgagcaccgagaaguccaacaucauccgcggcuggaucuucgggacgacccucgacagcaagacccagucccugcugaucgugaacaacgccaccaacguggucaucaaggugugcgaguuccaguucugcaacgaccccuuccucggcguguaccacaagaacaacaagagcuggauggaguccgaguuccgggucuacagcuccgccaacaacugcacguucgaguacgugagccagcccuuccugauggaccuggagggcaagcaggggaacuucaagaaccuccgcgaguucguguucaagaacaucgacggcuacuucaagaucuacuccaagcacaccccgaucaaccugguccgggaccugccccagggguucagcgcccucgagccccugguggaccugcccaucggcaucaacaucacccgcuuccagacccuccuggcccugcaccgguccuaccucacgccgggggacagcagcuccggcuggaccgcgggcgccgccgccuacuacgugggguaccugcagccccgcaccuuccugcucaaguacaacgagaacggcaccaucacggacgcggucgacugcgcccuggacccccugagcgagaccaagugcacccucaaguccuucaccguggagaaggggaucuaccagacgagcaacuuccgggugcagcccaccgaguccaucguccgcuucccgaacaucaccaaccugugccccuucggcgagguguucaacgccacccgguucgccagcgucuacgccuggaaccgcaagcggaucuccaacugcguggcggacuacagcgugcuguacaacuccgccagcuucuccacguucaagugcuacggcgucagccccaccaagcucaacgaccugugcuucaccaacguguacgccgacuccuucgugauccgcggggacgagguccggcagaucgcccccggccagaccgggaagaucgccgacuacaacuacaagcugccggacgacuucacgggcugcgugaucgcguggaacagcaacaaccucgacuccaaggucgggggcaacuacaacuaccuguaccgccuguuccgcaagagcaaccucaagcccuucgagcgggacaucuccaccgagaucuaccaggccggcagcacccccugcaacgggguggagggcuucaacugcuacuucccccugcaguccuacggguuccagccgaccuacggcgugggguaccagcccuaccggguggucgugcugagcuucgagcuccugcacgcccccgccacggugugcggccccaagaaguccaccaaccuggucaagaacaagugcgugaacuucaacuucaacggccucaccgggaccggcgugcugaccgagagcaacaagaaguuccugccguuccagcaguucgggcgcgacaucgacgacacgaccgacgcgguccgcgacccccagacccuggagauccucgacaucacccccugcagcuucggcgggguguccgugaucacgccgggcaccaacaccagcaaccaggucgccgugcuguaccagggcgugaacugcaccgagguccccguggccauccacgccgaccagcugacgcccaccuggcggguguacuccaccggcagcaacgucuuccagacccgcgccgggugccucaucggcgcggagcacgugaacaacuccuacgagugcgacauccccaucggggccggcaucugcgccagcuaccagacgcagaccaacucccaccggcgcgcccggagcguggcgucccagagcaucaucgccuacaccaugucccugggcgccgagaacagcgucgccuacuccaacaacagcaucgccauccccaucaacuucacgaucuccgugaccaccgagauccugcccgugagcaugaccaagacgagcgucgacugcaccauguacaucugcggggacuccaccgagugcagcaaccuccugcugcaguacggcuccuucugcacccagcucaaccgcgcgcugacggggaucgccguggagcaggacaagaacacccaggagguguucgcccaggucaagcagaucuacaagacgcccccgaucaaggacuucggcggguucaacuucagccagauccugcccgaccccuccaagcccagcaagcgguccuucaucgaggaccuccuguucaacaaggugacccuggccgacgccggcuucaucaagcaguacggcgacugccucggggacaucgcggcccgcgaccugaucugcgcccagaaguucaacggccugaccgugcucccgccccugcugaccgacgagaugaucgcccaguacaccagcgcccuccuggcggggaccaucacguccggcuggaccuucggggccggcgccgcccugcagauccccuucgcgaugcagauggccuaccgguucaacggcaucggggucacccagaacgugcucuacgagaaccagaagcugaucgccaaccaguucaacagcgccaucggcaagauccaggacucccugagcuccaccgccagcgcgcucgggaagcugcaggacguggucaaccagaacgcccaggcccugaacacgcucgugaagcagcuguccagcaacuucggcgccaucuccagcgugcugaacgacauccucgcccgccuggacccgcccgaggccgaggugcagaucgaccggcugaucaccgggcgccuccagagccugcagaccuacgugacccagcagcugauccgggcggccgagauccgcgccagcgccaaccucgccgcgaccaagauguccgagugcguccugggccagagcaagcggguggacuucugcggcaagggguaccaccugauguccuucccccagagcgccccgcacggcguggucuuccuccacgugacguacguccccgcccaggagaagaacuucaccaccgcccccgcgaucugccacgacgggaaggcccacuucccccgcgagggcguguucguguccaacgggacccacugguucgucacgcagcggaacuucuacgagccgcagaucaucaccacccacaacaccuucgugagcggcaacugcgacguggucaucggcaucgugaacaacacgguguacgacccccugcagcccgagcuggacuccuucaaggaggagcucgacaaguacuucaagaaccacaccagccccgacgucgaccugggggacaucuccggcaucaacgccagcguggugaacauccagaaggagaucgaccgccugaacgaggucgccaagaaccucaacgagucccugaucgaccugcaggagcucgggaaguacgagcaguacaucaaguggccgugguacaucuggcugggcuucaucgccggccugaucgcgaucgugauggugaccaucaugcucugcugcaugaccagcugcugcuccugccugaaggggugcugcagcugcggcuccugcugcaaguucgacgaggacgacagcgagcccguccugaagggggugaagcuccacuacacgugaggacuaguuauaagacugacuagcccgaugggccucccaacgggcccuccuccccuccuugcaccgagauuaauagaucuaaaaaaaaaaaaaaaaaaaaaaaaaaaaaaaaaaaaaaaaaaaaaaaaaaaaaaaaaaaaaaaaaaaaaaaaaaaaaaaaaaaaaaaaaaaaaaaaaaaa

SEQ ID NO: 25730 - RNA, 4017 nt, Artificial Sequence
  SARS-CoV-2/Wuhan/WIV05/2019__EPI_ISL_402128 spike protein mRNA gc (1-1273)(K986P_V987P_K986P_V987P_K417N_E484K_N501Y_D614G)
aggagaaagcuuaccauguucguguuccugguccuccugccccuggugagcucccagugcgugaaccucaccacccgcacgcagcugccgcccgccuacaccaacagcuucacccggggcgucuacuaccccgacaagguguuccgcuccagcgugcugcacuccacccaggaccucuuccugcccuucuucagcaacgucacgugguuccacgccauccacguguccgggaccaacggcaccaagcgguucgacaacccggugcugcccuucaacgacggggucuacuucgcgagcaccgagaaguccaacaucauccgcggcuggaucuucgggacgacccucgacagcaagacccagucccugcugaucgugaacaacgccaccaacguggucaucaaggugugcgaguuccaguucugcaacgaccccuuccucggcguguacuaccacaagaacaacaagagcuggauggaguccgaguuccgggucuacagcuccgccaacaacugcacguucgaguacgugagccagcccuuccugauggaccuggagggcaagcaggggaacuucaagaaccuccgcgaguucguguucaagaacaucgacggcuacuucaagaucuacuccaagcacaccccgaucaaccugguccgggaccugccccagggguucagcgcccucgagccccugguggaccugcccaucggcaucaacaucacccgcuuccagacccuccuggcccugcaccgguccuaccucacgccgggggacagcagcuccggcuggaccgcgggcgccgccgccuacuacgugggguaccugcagccccgcaccuuccugcucaaguacaacgagaacggcaccaucacggacgcggucgacugcgcccuggacccccugagcgagaccaagugcacccucaaguccuucaccguggagaaggggaucuaccagacgagcaacuuccgggugcagcccaccgaguccaucguccgcuucccgaacaucaccaaccugugccccuucggcgagguguucaacgccacccgguucgccagcgucuacgccuggaaccgcaagcggaucuccaacugcguggcggacuacagcgugcuguacaacuccgccagcuucuccacguucaagugcuacggcgucagccccaccaagcucaacgaccugugcuucaccaacguguacgccgacuccuucgugauccgcggggacgagguccggcagaucgcccccggccagaccgggaacaucgccgacuacaacuacaagcugccggacgacuucacgggcugcgugaucgcguggaacagcaacaaccucgacuccaaggucgggggcaacuacaacuaccuguaccgccuguuccgcaagagcaaccucaagcccuucgagcgggacaucuccaccgagaucuaccaggccggcagcacccccugcaacggggugaagggcuucaacugcuacuucccccugcaguccuacggguuccagccgaccuacggcgugggguaccagcccuaccggguggucgugcugagcuucgagcuccugcacgcccccgccacggugugcggccccaagaaguccaccaaccuggucaagaacaagugcgugaacuucaacuucaacggccucaccgggaccggcgugcugaccgagagcaacaagaaguuccugccguuccagcaguucgggcgcgacaucgccgacacgaccgacgcgguccgcgacccccagacccuggagauccucgacaucacccccugcagcuucggcgggguguccgugaucacgccgggcaccaacaccagcaaccaggucgccgugcuguaccagggcgugaacugcaccgagguccccguggccauccacgccgaccagcugacgcccaccuggcggguguacuccaccggcagcaacgucuuccagacccgcgccgggugccucaucggcgcggagcacgugaacaacuccuacgagugcgacauccccaucggggccggcaucugcgccagcuaccagacgcagaccaacuccccgcggcgcgcccggagcguggcgucccagagcaucaucgccuacaccaugucccugggcgccgagaacagcgucgccuacuccaacaacagcaucgccauccccaccaacuucacgaucuccgugaccaccgagauccugcccgugagcaugaccaagacgagcgucgacugcaccauguacaucugcggggacuccaccgagugcagcaaccuccugcugcaguacggcuccuucugcacccagcucaaccgcgcgcugacggggaucgccguggagcaggacaagaacacccaggagguguucgcccaggucaagcagaucuacaagacgcccccgaucaaggacuucggcggguucaacuucagccagauccugcccgaccccuccaagcccagcaagcgguccuucaucgaggaccuccuguucaacaaggugacccuggccgacgccggcuucaucaagcaguacggcgacugccucggggacaucgcggcccgcgaccugaucugcgcccagaaguucaacggccugaccgugcucccgccccugcugaccgacgagaugaucgcccaguacaccagcgcccuccuggcggggaccaucacguccggcuggaccuucggggccggcgccgcccugcagauccccuucgcgaugcagauggccuaccgguucaacggcaucggggucacccagaacgugcucuacgagaaccagaagcugaucgccaaccaguucaacagcgccaucggcaagauccaggacucccugagcuccaccgccagcgcgcucgggaagcugcaggacguggucaaccagaacgcccaggcccugaacacgcucgugaagcagcuguccagcaacuucggcgccaucuccagcgugcugaacgacauccucucccgccuggacccgcccgaggccgaggugcagaucgaccggcugaucaccgggcgccuccagagccugcagaccuacgugacccagcagcugauccgggcggccgagauccgcgccagcgccaaccucgccgcgaccaagauguccgagugcguccugggccagagcaagcggguggacuucugcggcaagggguaccaccugauguccuucccccagagcgccccgcacggcguggucuuccuccacgugacguacguccccgcccaggagaagaacuucaccaccgcccccgcgaucugccacgacgggaaggcccacuucccccgcgagggcguguucguguccaacgggacccacugguucgucacgcagcggaacuucuacgagccgcagaucaucaccaccgacaacaccuucgugagcggcaacugcgacguggucaucggcaucgugaacaacacgguguacgacccccugcagcccgagcuggacuccuucaaggaggagcucgacaaguacuucaagaaccacaccagccccgacgucgaccugggggacaucuccggcaucaacgccagcguggugaacauccagaaggagaucgaccgccugaacgaggucgccaagaaccucaacgagucccugaucgaccugcaggagcucgggaaguacgagcaguacaucaaguggccgugguacaucuggcugggcuucaucgccggccugaucgcgaucgugauggugaccaucaugcucugcugcaugaccagcugcugcuccugccugaaggggugcugcagcugcggcuccugcugcaaguucgacgaggacgacagcgagcccguccugaagggggugaagcuccacuacacgugaggacuaguuauaagacugacuagcccgaugggccucccaacgggcccuccuccccuccuugcaccgagauuaauagaucuaaaaaaaaaaaaaaaaaaaaaaaaaaaaaaaaaaaaaaaaaaaaaaaaaaaaaaaaaaaaaaaaaaaaaaaaaaaaaaaaaaaaaaaaaaaaaaaaaaaa

SEQ ID NO: 25731 - RNA, 4008 nt, Artificial Sequence
  SARS-CoV-2/Wuhan/WIV05/2019__EPI_ISL_402128 spike protein mRNA gc (1-1273)(K986P_V987P_K986P_V987P_L18F_D80A_D215G_L242del_A243del_ L244del_R246I_K417N_E484K_N501Y_D614G_A701V)
aggagaaagcuuaccauguucguguuccugguccuccugccccuggugagcucccagugcgugaacuucaccacccgcacgcagcugccgcccgccuacaccaacagcuucacccggggcgucuacuaccccgacaagguguuccgcuccagcgugcugcacuccacccaggaccucuuccugcccuucuucagcaacgucacgugguuccacgccauccacguguccgggaccaacggcaccaagcgguucgccaacccggugcugcccuucaacgacggggucuacuucgcgagcaccgagaaguccaacaucauccgcggcuggaucuucgggacgacccucgacagcaagacccagucccugcugaucgugaacaacgccaccaacguggucaucaaggugugcgaguuccaguucugcaacgaccccuuccucggcguguacuaccacaagaacaacaagagcuggauggaguccgaguuccgggucuacagcuccgccaacaacugcacguucgaguacgugagccagcccuuccugauggaccuggagggcaagcaggggaacuucaagaaccuccgcgaguucguguucaagaacaucgacggcuacuucaagaucuacuccaagcacaccccgaucaaccugguccggggccugccccagggguucagcgcccucgagccccugguggaccugcccaucggcaucaacaucacccgcuuccagacccuccacaucuccuaccucacgccgggggacagcagcuccggcuggaccgcgggcgccgccgccuacuacgugggguaccugcagccccgcaccuuccugcucaaguacaacgagaacggcaccaucacggacgcggucgacugcgcccuggacccccugagcgagaccaagugcacccucaaguccuucaccguggagaaggggaucuaccagacgagcaacuuccgggugcagcccaccgaguccaucguccgcuucccgaacaucaccaaccugugccccuucggcgagguguucaacgccacccgguucgccagcgucuacgccuggaaccgcaagcggaucuccaacugcguggcggacuacagcgugcuguacaacuccgccagcuucuccacguucaagugcuacggcgucagccccaccaagcucaacgaccugugcuucaccaacguguacgccgacuccuucgugauccgcggggacgagguccggcagaucgcccccggccagaccgggaacaucgccgacuacaacuacaagcugccggacgacuucacgggcugcgugaucgcguggaacagcaacaaccucgacuccaaggucgggggcaacuacaacuaccuguaccgccuguuccgcaagagcaaccucaagcccuucgagcgggacaucuccaccgagaucuaccaggccggcagcacccccugcaacggggugaagggcuucaacugcuacuucccccugcaguccuacggguuccagccgaccuacggcgugggguaccagcccuaccggguggucgugcugagcuucgagcuccugcacgcccccgccacggugugcggccccaagaaguccaccaaccuggucaagaacaagugcgugaacuucaacuucaacggccucaccgggaccggcgugcugaccgagagcaacaagaaguuccugccguuccagcaguucgggcgcgacaucgccgacacgaccgacgcgguccgcgacccccagacccuggagauccucgacaucacccccugcagcuucggcgggguguccgugaucacgccgggcaccaacaccagcaaccaggucgccgugcuguaccagggcgugaacugcaccgagguccccguggccauccacgccgaccagcugacgcccaccuggcggguguacuccaccggcagcaacgucuuccagacccgcgccgggugccucaucggcgcggagcacgugaacaacuccuacgagugcgacauccccaucggggccggcaucugcgccagcuaccagacgcagaccaacuccccgcggcgcgcccggagcguggcgucccagagcaucaucgccuacaccaugucccugggcguggagaacagcgucgccuacuccaacaacagcaucgccauccccaccaacuucacgaucuccgugaccaccgagauccugcccgugagcaugaccaagacgagcgucgacugcaccauguacaucugcggggacuccaccgagugcagcaaccuccugcugcaguacggcuccuucugcacccagcucaaccgcgcgcugacggggaucgccguggagcaggacaagaacacccaggagguguucgcccaggucaagcagaucuacaagacgcccccgaucaaggacuucggcggguucaacuucagccagauccugcccgaccccuccaagcccagcaagcgguccuucaucgaggaccuccuguucaacaaggugacccuggccgacgccggcuucaucaagcaguacggcgacugccucggggacaucgcggcccgcgaccugaucugcgcccagaaguucaacggccugaccgugcucccgccccugcugaccgacgagaugaucgcccaguacaccagcgcccuccuggcggggaccaucacguccggcuggaccuucggggccggcgccgcccugcagauccccuucgcgaugcagauggccuaccgguucaacggcaucggggucacccagaacgugcucuacgagaaccagaagcugaucgccaaccaguucaacagcgccaucggcaagauccaggacucccugagcuccaccgccagcgcgcucgggaagcugcaggacguggucaaccagaacgcccaggcccugaacacgcucgugaagcagcuguccagcaacuucggcgccaucuccagcgugcugaacgacauccucucccgccuggacccgcccgaggccgaggugcagaucgaccggcugaucaccgggcgccuccagagccugcagaccuacgugacccagcagcugauccgggcggccgagauccgcgccagcgccaaccucgccgcgaccaagauguccgagugcguccugggccagagcaagcggguggacuucugcggcaagggguaccaccugauguccuucccccagagcgccccgcacggcguggucuuccuccacgugacguacguccccgcccaggagaagaacuucaccaccgcccccgcgaucugccacgacgggaaggcccacuucccccgcgagggcguguucguguccaacgggacccacugguucgucacgcagcggaacuucuacgagccgcagaucaucaccaccgacaacaccuucgugagcggcaacugcgacguggucaucggcaucgugaacaacacgguguacgacccccugcagcccgagcuggacuccuucaaggaggagcucgacaaguacuucaagaaccacaccagccccgacgucgaccugggggacaucuccggcaucaacgccagcguggugaacauccagaaggagaucgaccgccugaacgaggucgccaagaaccucaacgagucccugaucgaccugcaggagcucgggaaguacgagcaguacaucaaguggccgugguacaucuggcugggcuucaucgccggccugaucgcgaucgugauggugaccaucaugcucugcugcaugaccagcugcugcuccugccugaaggggugcugcagcugcggcuccugcugcaaguucgacgaggacgacagcgagcccguccugaagggggugaagcuccacuacacgugaggacuaguuauaagacugacuagcccgaugggccucccaacgggcccuccuccccuccuugcaccgagauuaauagaucuaaaaaaaaaaaaaaaaaaaaaaaaaaaaaaaaaaaaaaaaaaaaaaaaaaaaaaaaaaaaaaaaaaaaaaaaaaaaaaaaaaaaaaaaaaaaaaaaaaaa

SEQ ID NO: 25732 - RNA, 4017 nt, Artificial Sequence
  SARS-CoV-2/Wuhan/WIV05/2019__EPI_ISL_402128 spike protein mRNA gc (1-1273)(K986P_V987P_K986P_V987P_E484K_D614G)
aggagaaagcuuaccauguucguguuccugguccuccugccccuggugagcucccagugcgugaaccucaccacccgcacgcagcugccgcccgccuacaccaacagcuucacccggggcgucuacuaccccgacaagguguuccgcuccagcgugcugcacuccacccaggaccucuuccugcccuucuucagcaacgucacgugguuccacgccauccacguguccgggaccaacggcaccaagcgguucgacaacccggugcugcccuucaacgacggggucuacuucgcgagcaccgagaaguccaacaucauccgcggcuggaucuucgggacgacccucgacagcaagacccagucccugcugaucgugaacaacgccaccaacguggucaucaaggugugcgaguuccaguucugcaacgaccccuuccucggcguguacuaccacaagaacaacaagagcuggauggaguccgaguuccgggucuacagcuccgccaacaacugcacguucgaguacgugagccagcccuuccugauggaccuggagggcaagcaggggaacuucaagaaccuccgcgaguucguguucaagaacaucgacggcuacuucaagaucuacuccaagcacaccccgaucaaccugguccgggaccugccccagggguucagcgcccucgagccccugguggaccugcccaucggcaucaacaucacccgcuuccagacccuccuggcccugcaccgguccuaccucacgccgggggacagcagcuccggcuggaccgcgggcgccgccgccuacuacgugggguaccugcagccccgcaccuuccugcucaaguacaacgagaacggcaccaucacggacgcggucgacugcgcccuggacccccugagcgagaccaagugcacccucaaguccuucaccguggagaaggggaucuaccagacgagcaacuuccgggugcagcccaccgaguccaucguccgcuucccgaacaucaccaaccugugccccuucggcgagguguucaacgccacccgguucgccagcgucuacgccuggaaccgcaagcggaucuccaacugcguggcggacuacagcgugcuguacaacuccgccagcuucuccacguucaagugcuacggcgucagccccaccaagcucaacgaccugugcuucaccaacguguacgccgacuccuucgugauccgcggggacgagguccggcagaucgcccccggccagaccgggaagaucgccgacuacaacuacaagcugccggacgacuucacgggcugcgugaucgcguggaacagcaacaaccucgacuccaaggucgggggcaacuacaacuaccuguaccgccuguuccgcaagagcaaccucaagcccuucgagcgggacaucuccaccgagaucuaccaggccggcagcacccccugcaacggggugaagggcuucaacugcuacuucccccugcaguccuacggguuccagccgaccaacggcgugggguaccagcccuaccggguggucgugcugagcuucgagcuccugcacgcccccgccacggugugcggccccaagaaguccaccaaccuggucaagaacaagugcgugaacuucaacuucaacggccucaccgggaccggcgugcugaccgagagcaacaagaaguuccugccguuccagcaguucgggcgcgacaucgccgacacgaccgacgcgguccgcgacccccagacccuggagauccucgacaucacccccugcagcuucggcgggguguccgugaucacgccgggcaccaacaccagcaaccaggucgccgugcuguaccagggcgugaacugcaccgagguccccguggccauccacgccgaccagcugacgcccaccuggcggguguacuccaccggcagcaacgucuuccagacccgcgccgggugccucaucggcgcggagcacgugaacaacuccuacgagugcgacauccccaucggggccggcaucugcgccagcuaccagacgcagaccaacuccccgcggcgcgcccggagcguggcgucccagagcaucaucgccuacaccaugucccugggcgccgagaacagcgucgccuacuccaacaacagcaucgccauccccaccaacuucacgaucuccgugaccaccgagauccugcccgugagcaugaccaagacgagcgucgacugcaccauguacaucugcggggacuccaccgagugcagcaaccuccugcugcaguacggcuccuucugcacccagcucaaccgcgcgcugacggggaucgccguggagcaggacaagaacacccaggagguguucgcccaggucaagcagaucuacaagacgcccccgaucaaggacuucggcggguucaacuucagccagauccugcccgaccccuccaagcccagcaagcgguccuucaucgaggaccuccuguucaacaaggugacccuggccgacgccggcuucaucaagcaguacggcgacugccucggggacaucgcggcccgcgaccugaucugcgcccagaaguucaacggccugaccgugcucccgccccugcugaccgacgagaugaucgcccaguacaccagcgcccuccuggcggggaccaucacguccggcuggaccuucggggccggcgccgcccugcagauccccuucgcgaugcagauggccuaccgguucaacggcaucggggucacccagaacgugcucuacgagaaccagaagcugaucgccaaccaguucaacagcgccaucggcaagauccaggacucccugagcuccaccgccagcgcgcucgggaagcugcaggacguggucaaccagaacgcccaggcccugaacacgcucgugaagcagcuguccagcaacuucggcgccaucuccagcgugcugaacgacauccucucccgccuggacccgcccgaggccgaggugcagaucgaccggcugaucaccgggcgccuccagagccugcagaccuacgugacccagcagcugauccgggcggccgagauccgcgccagcgccaaccucgccgcgaccaagauguccgagugcguccugggccagagcaagcggguggacuucugcggcaagggguaccaccugauguccuucccccagagcgccccgcacggcguggucuuccuccacgugacguacguccccgcccaggagaagaacuucaccaccgcccccgcgaucugccacgacgggaaggcccacuucccccgcgagggcguguucguguccaacgggacccacugguucgucacgcagcggaacuucuacgagccgcagaucaucaccaccgacaacaccuucgugagcggcaacugcgacguggucaucggcaucgugaacaacacgguguacgacccccugcagcccgagcuggacuccuucaaggaggagcucgacaaguacuucaagaaccacaccagccccgacgucgaccugggggacaucuccggcaucaacgccagcguggugaacauccagaaggagaucgaccgccugaacgaggucgccaagaaccucaacgagucccugaucgaccugcaggagcucgggaaguacgagcaguacaucaaguggccgugguacaucuggcugggcuucaucgccggccugaucgcgaucgugauggugaccaucaugcucugcugcaugaccagcugcugcuccugccugaaggggugcugcagcugcggcuccugcugcaaguucgacgaggacgacagcgagcccguccugaagggggugaagcuccacuacacgugaggacuaguuauaagacugacuagcccgaugggccucccaacgggcccuccuccccuccuugcaccgagauuaauagaucuaaaaaaaaaaaaaaaaaaaaaaaaaaaaaaaaaaaaaaaaaaaaaaaaaaaaaaaaaaaaaaaaaaaaaaaaaaaaaaaaaaaaaaaaaaaaaaaaaaaa

SEQ ID NO: 25733 - RNA, 4017 nt, Artificial Sequence
  SARS-CoV-2/Wuhan/WIV05/2019__EPI_ISL_402128 spike protein mRNA gc (1-1273)(K986P_V987P_K986P_V987P_L18F_T20N_P26S_D138Y_R190S_K417T _E484K_N501Y_D614G_H655Y_T1027I)
aggagaaagcuuaccauguucguguuccugguccuccugccccuggugagcucccagugcgugaacuucaccaaccgcacgcagcugccgagcgccuacaccaacagcuucacccggggcgucuacuaccccgacaagguguuccgcuccagcgugcugcacuccacccaggaccucuuccugcccuucuucagcaacgucacgugguuccacgccauccacguguccgggaccaacggcaccaagcgguucgacaacccggugcugcccuucaacgacggggucuacuucgcgagcaccgagaaguccaacaucauccgcggcuggaucuucgggacgacccucgacagcaagacccagucccugcugaucgugaacaacgccaccaacguggucaucaaggugugcgaguuccaguucugcaacuaccccuuccucggcguguacuaccacaagaacaacaagagcuggauggaguccgaguuccgggucuacagcuccgccaacaacugcacguucgaguacgugagccagcccuuccugauggaccuggagggcaagcaggggaacuucaagaaccucagcgaguucguguucaagaacaucgacggcuacuucaagaucuacuccaagcacaccccgaucaaccugguccgggaccugccccagggguucagcgcccucgagccccugguggaccugcccaucggcaucaacaucacccgcuuccagacccuccuggcccugcaccgguccuaccucacgccgggggacagcagcuccggcuggaccgcgggcgccgccgccuacuacgugggguaccugcagccccgcaccuuccugcucaaguacaacgagaacggcaccaucacggacgcggucgacugcgcccuggacccccugagcgagaccaagugcacccucaaguccuucaccguggagaaggggaucuaccagacgagcaacuuccgggugcagcccaccgaguccaucguccgcuucccgaacaucaccaaccugugccccuucggcgagguguucaacgccacccgguucgccagcgucuacgccuggaaccgcaagcggaucuccaacugcguggcggacuacagcgugcuguacaacuccgccagcuucuccacguucaagugcuacggcgucagccccaccaagcucaacgaccugugcuucaccaacguguacgccgacuccuucgugauccgcggggacgagguccggcagaucgcccccggccagaccgggaccaucgccgacuacaacuacaagcugccggacgacuucacgggcugcgugaucgcguggaacagcaacaaccucgacuccaaggucgggggcaacuacaacuaccuguaccgccuguuccgcaagagcaaccucaagcccuucgagcgggacaucuccaccgagaucuaccaggccggcagcacccccugcaacggggugaagggcuucaacugcuacuucccccugcaguccuacggguuccagccgaccuacggcgugggguaccagcccuaccggguggucgugcugagcuucgagcuccugcacgcccccgccacggugugcggccccaagaaguccaccaaccuggucaagaacaagugcgugaacuucaacuucaacggccucaccgggaccggcgugcugaccgagagcaacaagaaguuccugccguuccagcaguucgggcgcgacaucgccgacacgaccgacgcgguccgcgacccccagacccuggagauccucgacaucacccccugcagcuucggcgggguguccgugaucacgccgggcaccaacaccagcaaccaggucgccgugcuguaccagggcgugaacugcaccgagguccccguggccauccacgccgaccagcugacgcccaccuggcggguguacuccaccggcagcaacgucuuccagacccgcgccgggugccucaucggcgcggaguacgugaacaacuccuacgagugcgacauccccaucggggccggcaucugcgccagcuaccagacgcagaccaacuccccgcggcgcgcccggagcguggcgucccagagcaucaucgccuacaccaugucccugggcgccgagaacagcgucgccuacuccaacaacagcaucgccauccccaccaacuucacgaucuccgugaccaccgagauccugcccgugagcaugaccaagacgagcgucgacugcaccauguacaucugcggggacuccaccgagugcagcaaccuccugcugcaguacggcuccuucugcacccagcucaaccgcgcgcugacggggaucgccguggagcaggacaagaacacccaggagguguucgcccaggucaagcagaucuacaagacgcccccgaucaaggacuucggcggguucaacuucagccagauccugcccgaccccuccaagcccagcaagcgguccuucaucgaggaccuccuguucaacaaggugacccuggccgacgccggcuucaucaagcaguacggcgacugccucggggacaucgcggcccgcgaccugaucugcgcccagaaguucaacggccugaccgugcucccgccccugcugaccgacgagaugaucgcccaguacaccagcgcccuccuggcggggaccaucacguccggcuggaccuucggggccggcgccgcccugcagauccccuucgcgaugcagauggccuaccgguucaacggcaucggggucacccagaacgugcucuacgagaaccagaagcugaucgccaaccaguucaacagcgccaucggcaagauccaggacucccugagcuccaccgccagcgcgcucgggaagcugcaggacguggucaaccagaacgcccaggcccugaacacgcucgugaagcagcuguccagcaacuucggcgccaucuccagcgugcugaacgacauccucucccgccuggacccgcccgaggccgaggugcagaucgaccggcugaucaccgggcgccuccagagccugcagaccuacgugacccagcagcugauccgggcggccgagauccgcgccagcgccaaccucgccgcgaucaagauguccgagugcguccugggccagagcaagcggguggacuucugcggcaagggguaccaccugauguccuucccccagagcgccccgcacggcguggucuuccuccacgugacguacguccccgcccaggagaagaacuucaccaccgcccccgcgaucugccacgacgggaaggcccacuucccccgcgagggcguguucguguccaacgggacccacugguucgucacgcagcggaacuucuacgagccgcagaucaucaccaccgacaacaccuucgugagcggcaacugcgacguggucaucggcaucgugaacaacacgguguacgacccccugcagcccgagcuggacuccuucaaggaggagcucgacaaguacuucaagaaccacaccagccccgacgucgaccugggggacaucuccggcaucaacgccagcguggugaacauccagaaggagaucgaccgccugaacgaggucgccaagaaccucaacgagucccugaucgaccugcaggagcucgggaaguacgagcaguacaucaaguggccgugguacaucuggcugggcuucaucgccggccugaucgcgaucgugauggugaccaucaugcucugcugcaugaccagcugcugcuccugccugaaggggugcugcagcugcggcuccugcugcaaguucgacgaggacgacagcgagcccguccugaagggggugaagcuccacuacacgugaggacuaguuauaagacugacuagcccgaugggccucccaacgggcccuccuccccuccuugcaccgagauuaauagaucuaaaaaaaaaaaaaaaaaaaaaaaaaaaaaaaaaaaaaaaaaaaaaaaaaaaaaaaaaaaaaaaaaaaaaaaaaaaaaaaaaaaaaaaaaaaaaaaaaaaa

SEQ ID NO: 25734 - RNA, 4017 nt, Artificial Sequence
  SARS-CoV-2/Wuhan/WIV05/2019__EPI_ISL_402128 spike protein mRNA gc (1-1273)(K986P_V987P_K986P_V987P_S13I_W152C_L452R_D614G)
aggagaaagcuuaccauguucguguuccugguccuccugccccuggugagcauccagugcgugaaccucaccacccgcacgcagcugccgcccgccuacaccaacagcuucacccggggcgucuacuaccccgacaagguguuccgcuccagcgugcugcacuccacccaggaccucuuccugcccuucuucagcaacgucacgugguuccacgccauccacguguccgggaccaacggcaccaagcgguucgacaacccggugcugcccuucaacgacggggucuacuucgcgagcaccgagaaguccaacaucauccgcggcuggaucuucgggacgacccucgacagcaagacccagucccugcugaucgugaacaacgccaccaacguggucaucaaggugugcgaguuccaguucugcaacgaccccuuccucggcguguacuaccacaagaacaacaagagcugcauggaguccgaguuccgggucuacagcuccgccaacaacugcacguucgaguacgugagccagcccuuccugauggaccuggagggcaagcaggggaacuucaagaaccuccgcgaguucguguucaagaacaucgacggcuacuucaagaucuacuccaagcacaccccgaucaaccugguccgggaccugccccagggguucagcgcccucgagccccugguggaccugcccaucggcaucaacaucacccgcuuccagacccuccuggcccugcaccgguccuaccucacgccgggggacagcagcuccggcuggaccgcgggcgccgccgccuacuacgugggguaccugcagccccgcaccuuccugcucaaguacaacgagaacggcaccaucacggacgcggucgacugcgcccuggacccccugagcgagaccaagugcacccucaaguccuucaccguggagaaggggaucuaccagacgagcaacuuccgggugcagcccaccgaguccaucguccgcuucccgaacaucaccaaccugugccccuucggcgagguguucaacgccacccgguucgccagcgucuacgccuggaaccgcaagcggaucuccaacugcguggcggacuacagcgugcuguacaacuccgccagcuucuccacguucaagugcuacggcgucagccccaccaagcucaacgaccugugcuucaccaacguguacgccgacuccuucgugauccgcggggacgagguccggcagaucgcccccggccagaccgggaagaucgccgacuacaacuacaagcugccggacgacuucacgggcugcgugaucgcguggaacagcaacaaccucgacuccaaggucgggggcaacuacaacuaccgcuaccgccuguuccgcaagagcaaccucaagcccuucgagcgggacaucuccaccgagaucuaccaggccggcagcacccccugcaacgggguggagggcuucaacugcuacuucccccugcaguccuacggguuccagccgaccaacggcgugggguaccagcccuaccggguggucgugcugagcuucgagcuccugcacgcccccgccacggugugcggccccaagaaguccaccaaccuggucaagaacaagugcgugaacuucaacuucaacggccucaccgggaccggcgugcugaccgagagcaacaagaaguuccugccguuccagcaguucgggcgcgacaucgccgacacgaccgacgcgguccgcgacccccagacccuggagauccucgacaucacccccugcagcuucggcgggguguccgugaucacgccgggcaccaacaccagcaaccaggucgccgugcuguaccagggcgugaacugcaccgagguccccguggccauccacgccgaccagcugacgcccaccuggcggguguacuccaccggcagcaacgucuuccagacccgcgccgggugccucaucggcgcggagcacgugaacaacuccuacgagugcgacauccccaucggggccggcaucugcgccagcuaccagacgcagaccaacuccccgcggcgcgcccggagcguggcgucccagagcaucaucgccuacaccaugucccugggcgccgagaacagcgucgccuacuccaacaacagcaucgccauccccaccaacuucacgaucuccgugaccaccgagauccugcccgugagcaugaccaagacgagcgucgacugcaccauguacaucugcggggacuccaccgagugcagcaaccuccugcugcaguacggcuccuucugcacccagcucaaccgcgcgcugacggggaucgccguggagcaggacaagaacacccaggagguguucgcccaggucaagcagaucuacaagacgcccccgaucaaggacuucggcggguucaacuucagccagauccugcccgaccccuccaagcccagcaagcgguccuucaucgaggaccuccuguucaacaaggugacccuggccgacgccggcuucaucaagcaguacggcgacugccucggggacaucgcggcccgcgaccugaucugcgcccagaaguucaacggccugaccgugcucccgccccugcugaccgacgagaugaucgcccaguacaccagcgcccuccuggcggggaccaucacguccggcuggaccuucggggccggcgccgcccugcagauccccuucgcgaugcagauggccuaccgguucaacggcaucggggucacccagaacgugcucuacgagaaccagaagcugaucgccaaccaguucaacagcgccaucggcaagauccaggacucccugagcuccaccgccagcgcgcucgggaagcugcaggacguggucaaccagaacgcccaggcccugaacacgcucgugaagcagcuguccagcaacuucggcgccaucuccagcgugcugaacgacauccucucccgccuggacccgcccgaggccgaggugcagaucgaccggcugaucaccgggcgccuccagagccugcagaccuacgugacccagcagcugauccgggcggccgagauccgcgccagcgccaaccucgccgcgaccaagauguccgagugcguccugggccagagcaagcggguggacuucugcggcaagggguaccaccugauguccuucccccagagcgccccgcacggcguggucuuccuccacgugacguacguccccgcccaggagaagaacuucaccaccgcccccgcgaucugccacgacgggaaggcccacuucccccgcgagggcguguucguguccaacgggacccacugguucgucacgcagcggaacuucuacgagccgcagaucaucaccaccgacaacaccuucgugagcggcaacugcgacguggucaucggcaucgugaacaacacgguguacgacccccugcagcccgagcuggacuccuucaaggaggagcucgacaaguacuucaagaaccacaccagccccgacgucgaccugggggacaucuccggcaucaacgccagcguggugaacauccagaaggagaucgaccgccugaacgaggucgccaagaaccucaacgagucccugaucgaccugcaggagcucgggaaguacgagcaguacaucaaguggccgugguacaucuggcugggcuucaucgccggccugaucgcgaucgugauggugaccaucaugcucugcugcaugaccagcugcugcuccugccugaaggggugcugcagcugcggcuccugcugcaaguucgacgaggacgacagcgagcccguccugaagggggugaagcuccacuacacgugaggacuaguuauaagacugacuagcccgaugggccucccaacgggcccuccuccccuccuugcaccgagauuaauagaucuaaaaaaaaaaaaaaaaaaaaaaaaaaaaaaaaaaaaaaaaaaaaaaaaaaaaaaaaaaaaaaaaaaaaaaaaaaaaaaaaaaaaaaaaaaaaaaaaaaaa

SEQ ID NO: 25735 - RNA, 4017 nt, Artificial Sequence
  SARS-CoV-2/Wuhan/WIV05/2019__EPI_ISL_402128 spike protein mRNA gc (1-1273)(K986P_V987P)
aggagaaagcuuaccauguucguguuccugguccuccugccccuggugagcucccagugcgugaaccucaccacccgcacgcagcugccgcccgccuacaccaacagcuucacccggggcgucuacuaccccgacaagguguuccgcuccagcgugcugcacuccacccaggaccucuuccugcccuucuucagcaacgucacgugguuccacgccauccacguguccgggaccaacggcaccaagcgguucgacaacccggugcugcccuucaacgacggggucuacuucgcgagcaccgagaaguccaacaucauccgcggcuggaucuucgggacgacccucgacagcaagacccagucccugcugaucgugaacaacgccaccaacguggucaucaaggugugcgaguuccaguucugcaacgaccccuuccucggcguguacuaccacaagaacaacaagagcuggauggaguccgaguuccgggucuacagcuccgccaacaacugcacguucgaguacgugagccagcccuuccugauggaccuggagggcaagcaggggaacuucaagaaccuccgcgaguucguguucaagaacaucgacggcuacuucaagaucuacuccaagcacaccccgaucaaccugguccgggaccugccccagggguucagcgcccucgagccccugguggaccugcccaucggcaucaacaucacccgcuuccagacccuccuggcccugcaccgguccuaccucacgccgggggacagcagcuccggcuggaccgcgggcgccgccgccuacuacgugggguaccugcagccccgcaccuuccugcucaaguacaacgagaacggcaccaucacggacgcggucgacugcgcccuggacccccugagcgagaccaagugcacccucaaguccuucaccguggagaaggggaucuaccagacgagcaacuuccgggugcagcccaccgaguccaucguccgcuucccgaacaucaccaaccugugccccuucggcgagguguucaacgccacccgguucgccagcgucuacgccuggaaccgcaagcggaucuccaacugcguggcggacuacagcgugcuguacaacuccgccagcuucuccacguucaagugcuacggcgucagccccaccaagcucaacgaccugugcuucaccaacguguacgccgacuccuucgugauccgcggggacgagguccggcagaucgcccccggccagaccgggaagaucgccgacuacaacuacaagcugccggacgacuucacgggcugcgugaucgcguggaacagcaacaaccucgacuccaaggucgggggcaacuacaacuaccuguaccgccuguuccgcaagagcaaccucaagcccuucgagcgggacaucuccaccgagaucuaccaggccggcagcacccccugcaacgggguggagggcuucaacugcuacuucccccugcaguccuacggguuccagccgaccaacggcgugggguaccagcccuaccggguggucgugcugagcuucgagcuccugcacgcccccgccacggugugcggccccaagaaguccaccaaccuggucaagaacaagugcgugaacuucaacuucaacggccucaccgggaccggcgugcugaccgagagcaacaagaaguuccugccguuccagcaguucgggcgcgacaucgccgacacgaccgacgcgguccgcgacccccagacccuggagauccucgacaucacccccugcagcuucggcgggguguccgugaucacgccgggcaccaacaccagcaaccaggucgccgugcuguaccaggacgugaacugcaccgagguccccguggccauccacgccgaccagcugacgcccaccuggcggguguacuccaccggcagcaacgucuuccagacccgcgccgggugccucaucggcgcggagcacgugaacaacuccuacgagugcgacauccccaucggggccggcaucugcgccagcuaccagacgcagaccaacuccccgcggcgcgcccggagcguggcgucccagagcaucaucgccuacaccaugucccugggcgccgagaacagcgucgccuacuccaacaacagcaucgccauccccaccaacuucacgaucuccgugaccaccgagauccugcccgugagcaugaccaagacgagcgucgacugcaccauguacaucugcggggacuccaccgagugcagcaaccuccugcugcaguacggcuccuucugcacccagcucaaccgcgcgcugacggggaucgccguggagcaggacaagaacacccaggagguguucgcccaggucaagcagaucuacaagacgcccccgaucaaggacuucggcggguucaacuucagccagauccugcccgaccccuccaagcccagcaagcgguccuucaucgaggaccuccuguucaacaaggugacccuggccgacgccggcuucaucaagcaguacggcgacugccucggggacaucgcggcccgcgaccugaucugcgcccagaaguucaacggccugaccgugcucccgccccugcugaccgacgagaugaucgcccaguacaccagcgcccuccuggcggggaccaucacguccggcuggaccuucggggccggcgccgcccugcagauccccuucgcgaugcagauggccuaccgguucaacggcaucggggucacccagaacgugcucuacgagaaccagaagcugaucgccaaccaguucaacagcgccaucggcaagauccaggacucccugagcuccaccgccagcgcgcucgggaagcugcaggacguggucaaccagaacgcccaggcccugaacacgcucgugaagcagcuguccagcaacuucggcgccaucuccagcgugcugaacgacauccucucccgccuggacccgcccgaggccgagguccagaucgaccggcugaucaccgggcgccuccagagccugcagaccuacgugacccagcagcugauccgggcggccgagauccgcgccagcgccaaccucgccgcgaccaagauguccgagugcgugcugggccagagcaagcgggucgacuucugcggcaagggguaccaccugauguccuucccccagagcgcgccccacggcgugguguuccuccacgucacguacgugcccgcccaggagaagaacuucaccaccgccccggccaucugccacgacgggaaggcccacuucccccgcgagggcgucuucguguccaacgggacccacugguucgugacgcagcggaacuucuacgagccccagaucaucaccaccgacaacaccuucgucagcggcaacugcgacguggugaucggcaucgucaacaacacgguguacgacccccugcagccggagcuggacuccuucaaggaggagcucgacaaguacuucaagaaccacaccagccccgacguggaccugggggacaucuccggcaucaacgccagcgucgugaacauccagaaggagaucgaccgccugaacgagguggccaagaaccucaacgagucccugaucgaccugcaggagcucgggaaguacgagcaguacaucaaguggcccugguacaucuggcugggcuucaucgccggccugaucgcgaucgucauggugaccaucaugcucugcugcaugaccagcugcugcuccugccugaaggggugcugcagcugcggcuccugcugcaaguucgacgaggacgacagcgagccggugcugaagggggucaagcuccacuacacgugaggacuaguuauaagacugacuagcccgaugggccucccaacgggcccuccuccccuccuugcaccgagauuaauagaucuaaaaaaaaaaaaaaaaaaaaaaaaaaaaaaaaaaaaaaaaaaaaaaaaaaaaaaaaaaaaaaaaaaaaaaaaaaaaaaaaaaaaaaaaaaaaaaaaaaaa

SEQ ID NO: 25736 - RNA, 4017 nt, Artificial Sequence
  SARS-CoV-2/Wuhan/WIV05/2019__EPI_ISL_402128 spike protein mRNA gc (1-1273)(K986P_V987P_ D614G)
aggagaaagcuuaccauguucguguuccugguccuccugccccuggugagcucccagugcgugaaccucaccacccgcacgcagcugccgcccgccuacaccaacagcuucacccggggcgucuacuaccccgacaagguguuccgcuccagcgugcugcacuccacccaggaccucuuccugcccuucuucagcaacgucacgugguuccacgccauccacguguccgggaccaacggcaccaagcgguucgacaacccggugcugcccuucaacgacggggucuacuucgcgagcaccgagaaguccaacaucauccgcggcuggaucuucgggacgacccucgacagcaagacccagucccugcugaucgugaacaacgccaccaacguggucaucaaggugugcgaguuccaguucugcaacgaccccuuccucggcguguacuaccacaagaacaacaagagcuggauggaguccgaguuccgggucuacagcuccgccaacaacugcacguucgaguacgugagccagcccuuccugauggaccuggagggcaagcaggggaacuucaagaaccuccgcgaguucguguucaagaacaucgacggcuacuucaagaucuacuccaagcacaccccgaucaaccugguccgggaccugccccagggguucagcgcccucgagccccugguggaccugcccaucggcaucaacaucacccgcuuccagacccuccuggcccugcaccgguccuaccucacgccgggggacagcagcuccggcuggaccgcgggcgccgccgccuacuacgugggguaccugcagccccgcaccuuccugcucaaguacaacgagaacggcaccaucacggacgcggucgacugcgcccuggacccccugagcgagaccaagugcacccucaaguccuucaccguggagaaggggaucuaccagacgagcaacuuccgggugcagcccaccgaguccaucguccgcuucccgaacaucaccaaccugugccccuucggcgagguguucaacgccacccgguucgccagcgucuacgccuggaaccgcaagcggaucuccaacugcguggcggacuacagcgugcuguacaacuccgccagcuucuccacguucaagugcuacggcgucagccccaccaagcucaacgaccugugcuucaccaacguguacgccgacuccuucgugauccgcggggacgagguccggcagaucgcccccggccagaccgggaagaucgccgacuacaacuacaagcugccggacgacuucacgggcugcgugaucgcguggaacagcaacaaccucgacuccaaggucgggggcaacuacaacuaccuguaccgccuguuccgcaagagcaaccucaagcccuucgagcgggacaucuccaccgagaucuaccaggccggcagcacccccugcaacgggguggagggcuucaacugcuacuucccccugcaguccuacggguuccagccgaccaacggcgugggguaccagcccuaccggguggucgugcugagcuucgagcuccugcacgcccccgccacggugugcggccccaagaaguccaccaaccuggucaagaacaagugcgugaacuucaacuucaacggccucaccgggaccggcgugcugaccgagagcaacaagaaguuccugccguuccagcaguucgggcgcgacaucgccgacacgaccgacgcgguccgcgacccccagacccuggagauccucgacaucacccccugcagcuucggcgggguguccgugaucacgccgggcaccaacaccagcaaccaggucgccgugcuguaccagggcgugaacugcaccgagguccccguggccauccacgccgaccagcugacgcccaccuggcggguguacuccaccgggagcaacgucuuccagacccgcgccggcugccucaucggggcggagcacgugaacaacuccuacgagugcgacauccccaucggcgccggcaucugcgccagcuaccagacgcagaccaacuccccgcggcgcgcccggagcguggcgucccagagcaucaucgccuacaccaugucccugggggccgagaacagcgucgccuacuccaacaacagcaucgccauccccaccaacuucacgaucuccgugaccaccgagauccugcccgugagcaugaccaagacgagcgucgacugcaccauguacaucugcggcgacuccaccgagugcagcaaccuccugcugcaguacggguccuucugcacccagcucaaccgcgcgcugacgggcaucgccguggagcaggacaagaacacccaggagguguucgcccaggucaagcagaucuacaagacgcccccgaucaaggacuucgggggcuucaacuucagccagauccugcccgaccccuccaagcccagcaagcgguccuucaucgaggaccuccuguucaacaaggugacccuggccgacgccggcuucaucaagcaguacggggacugccucggcgacaucgcggcccgcgaccugaucugcgcccagaaguucaacgggcugaccgugcucccgccccugcugaccgacgagaugaucgcccaguacaccagcgcccuccuggcgggcaccaucacguccggguggaccuucggcgccggcgccgcccugcagauccccuucgcgaugcagauggccuaccgguucaacgggaucggcgucacccagaacgugcucuacgagaaccagaagcugaucgccaaccaguucaacagcgccaucgggaagauccaggacucccugagcuccaccgccagcgcgcucggcaagcugcaggacguggucaaccagaacgcccaggcccugaacacgcucgugaagcagcuguccagcaacuucggggccaucuccagcgugcugaacgacauccucucccgccuggacccgcccgaggccgagguccagaucgaccggcugaucaccggccgccuccagagccugcagaccuacgugacccagcagcugauccgggcggccgagauccgcgccagcgccaaccucgccgcgaccaagauguccgagugcgugcugggccagagcaagcgggucgacuucugcgggaagggcuaccaccugauguccuucccccagagcgcgccccacggggugguguuccuccacgucacguacgugcccgcccaggagaagaacuucaccaccgccccggccaucugccacgacggcaaggcccacuucccccgcgagggggucuucguguccaacggcacccacugguucgugacgcagcggaacuucuacgagccccagaucaucaccaccgacaacaccuucgucagcggcaacugcgacguggugaucgggaucgucaacaacacgguguacgacccccugcagccggagcuggacuccuucaaggaggagcucgacaaguacuucaagaaccacaccagccccgacguggaccugggcgacaucuccgggaucaacgccagcgucgugaacauccagaaggagaucgaccgccugaacgagguggccaagaaccucaacgagucccugaucgaccugcaggagcucggcaaguacgagcaguacaucaaguggcccugguacaucuggcugggcuucaucgccgggcugaucgcgaucgucauggugaccaucaugcucugcugcaugaccagcugcugcuccugccugaagggcugcugcagcugcggguccugcugcaaguucgacgaggacgacagcgagccggugcugaagggcgucaagcuccacuacacgugaggacuaguuauaagacugacuagcccgaugggccucccaacgggcccuccuccccuccuugcaccgagauuaauagaucuaaaaaaaaaaaaaaaaaaaaaaaaaaaaaaaaaaaaaaaaaaaaaaaaaaaaaaaaaaaaaaaaaaaaaaaaaaaaaaaaaaaaaaaaaaaaaaaaaaaa

SEQ ID NO: 25737 - RNA, 4017 nt, Artificial Sequence
  SARS-CoV-2/Wuhan/WIV05/2019__EPI_ISL_402128 spike protein mRNA gc (1-1273)(K986P_V987P_A222V_D614G)
aggagaaagcuuaccauguucguguuccugguccuccugccccuggugagcucccagugcgugaaccucaccacccgcacgcagcugccgcccgccuacaccaacagcuucacccggggcgucuacuaccccgacaagguguuccgcuccagcgugcugcacuccacccaggaccucuuccugcccuucuucagcaacgucacgugguuccacgccauccacguguccgggaccaacggcaccaagcgguucgacaacccggugcugcccuucaacgacggggucuacuucgcgagcaccgagaaguccaacaucauccgcggcuggaucuucgggacgacccucgacagcaagacccagucccugcugaucgugaacaacgccaccaacguggucaucaaggugugcgaguuccaguucugcaacgaccccuuccucggcguguacuaccacaagaacaacaagagcuggauggaguccgaguuccgggucuacagcuccgccaacaacugcacguucgaguacgugagccagcccuuccugauggaccuggagggcaagcaggggaacuucaagaaccuccgcgaguucguguucaagaacaucgacggcuacuucaagaucuacuccaagcacaccccgaucaaccugguccgggaccugccccagggguucagcgugcucgagccccugguggaccugcccaucggcaucaacaucacccgcuuccagacccuccuggcccugcaccgguccuaccucacgccgggggacagcagcuccggcuggaccgccggcgcggccgccuacuacgucggguaccugcagccccgcaccuuccugcucaaguacaacgagaacggcaccaucacggacgccguggacugcgcgcuggacccccugagcgagaccaagugcacccucaaguccuucaccguggagaaggggaucuaccagacgagcaacuuccggguccagcccaccgaguccaucgugcgcuucccgaacaucaccaaccugugccccuucggcgaggucuucaacgccacccgguucgccagcguguacgccuggaaccgcaagcggaucuccaacugcguggccgacuacagcguccuguacaacuccgcgagcuucuccacguucaagugcuacggcgugagccccaccaagcucaacgaccugugcuucaccaacguguacgccgacuccuucgucauccgcggggacgaggugcggcagaucgcccccggccagaccgggaagaucgccgacuacaacuacaagcugccggacgacuucacgggcugcgugaucgccuggaacagcaacaaccucgacuccaaggucgggggcaacuacaacuaccuguaccgccuguuccgcaagagcaaccucaagcccuucgagcgggacaucuccaccgagaucuaccaggcgggcagcacccccugcaacgggguggagggcuucaacugcuacuucccccugcaguccuacggguuccagccgaccaacggcgugggguaccagcccuaccgggucguggugcugagcuucgagcuccugcacgcccccgccacggucugcggccccaagaaguccaccaaccuggugaagaacaagugcgugaacuucaacuucaacggccucaccgggaccggcguccugaccgagagcaacaagaaguuccugccguuccagcaguucgggcgcgacaucgccgacacgaccgacgccgugcgcgacccccagacccuggagauccucgacaucacccccugcagcuucggcgggguguccgucaucacgccgggcaccaacaccagcaaccagguggcggugcuguaccagggcgucaacugcaccgaggugcccguggccauccacgccgaccagcugacgcccaccuggcgggucuacuccaccgggagcaacguguuccagacccgcgccggcugccucaucggggccgagcacgugaacaacuccuacgagugcgacauccccaucggcgcgggcaucugcgccagcuaccagacgcagaccaacuccccgcggcgcgcccggagcgucgccucccagagcaucaucgcguacaccaugucccugggggccgagaacagcguggccuacuccaacaacagcaucgccauccccaccaacuucacgaucuccgugaccaccgagauccugcccgucagcaugaccaagacgagcguggacugcaccauguacaucugcggcgacuccaccgagugcagcaaccuccugcugcaguacggguccuucugcacccagcucaaccgcgcccugacgggcaucgcgguggagcaggacaagaacacccaggaggucuucgcccaggugaagcagaucuacaagacgcccccgaucaaggacuucgggggcuucaacuucagccagauccugcccgaccccuccaagcccagcaagcgguccuucaucgaggaccuccuguucaacaaggugacccuggccgacgccggcuucaucaagcaguacggggacugccucggcgacaucgccgcgcgcgaccugaucugcgcccagaaguucaacgggcugaccguccucccgccccugcugaccgacgagaugaucgcccaguacaccagcgcccuccuggccggcaccaucacguccggguggaccuucggcgcgggcgccgcccugcagauccccuucgccaugcagauggcguaccgguucaacgggaucggcgugacccagaacgugcucuacgagaaccagaagcugaucgccaaccaguucaacagcgccaucgggaagauccaggacucccugagcuccaccgccagcgcccucggcaagcugcaggacgucgugaaccagaacgcgcaggcccugaacacgcucgugaagcagcuguccagcaacuucggggccaucuccagcguccugaacgacauccucucccgccuggacccgcccgaggccgaggugcagaucgaccggcugaucaccggccgccuccagagccugcagaccuacgugacccagcagcugauccgggccgcggagauccgcgccagcgccaaccucgccgccaccaagauguccgagugcguccugggccagagcaagcggguggacuucugcgggaagggcuaccaccugauguccuucccccagagcgcgccccacgggguggucuuccuccacgugacguacguccccgcccaggagaagaacuucaccaccgccccggccaucugccacgacggcaaggcgcacuucccccgcgaggggguguucguguccaacggcacccacugguucgucacgcagcggaacuucuacgagccccagaucaucaccaccgacaacaccuucgugagcggcaacugcgacguggucaucgggaucgugaacaacacgguguacgacccccugcagccggagcuggacuccuucaaggaggagcucgacaaguacuucaagaaccacaccagccccgacgucgaccugggcgacaucuccgggaucaacgccagcguggugaacauccagaaggagaucgaccgccugaacgaggucgccaagaaccucaacgagucccugaucgaccugcaggagcucggcaaguacgagcaguacaucaaguggcccugguacaucuggcugggcuucaucgccgggcugaucgccaucgugauggugaccaucaugcucugcugcaugaccagcugcugcuccugccugaagggcugcugcagcugcggguccugcugcaaguucgacgaggacgacagcgagccgguccugaagggcgugaagcuccacuacacgugaggacuaguuauaagacugacuagcccgaugggccucccaacgggcccuccuccccuccuugcaccgagauuaauagaucuaaaaaaaaaaaaaaaaaaaaaaaaaaaaaaaaaaaaaaaaaaaaaaaaaaaaaaaaaaaaaaaaaaaaaaaaaaaaaaaaaaaaaaaaaaaaaaaaaaaa

SEQ ID NO: 25738 - RNA, 4017 nt, Artificial Sequence
  SARS-CoV-2/Wuhan/WIV05/2019__EPI_ISL_402128 spike protein mRNA gc (1-1273)(K986P_V987P_N439K_D614G)
aggagaaagcuuaccauguucguguuccugguccuccugccccuggugagcucccagugcgugaaccucaccacccgcacgcagcugccgcccgccuacaccaacagcuucacccggggcgucuacuaccccgacaagguguuccgcuccagcgugcugcacuccacccaggaccucuuccugcccuucuucagcaacgucacgugguuccacgccauccacguguccgggaccaacggcaccaagcgguucgacaacccggugcugcccuucaacgacggggucuacuucgcgagcaccgagaaguccaacaucauccgcggcuggaucuucgggacgacccucgacagcaagacccagucccugcugaucgugaacaacgccaccaacguggucaucaaggugugcgaguuccaguucugcaacgaccccuuccucggcguguacuaccacaagaacaacaagagcuggauggaguccgaguuccgggucuacagcuccgccaacaacugcacguucgaguacgugagccagcccuuccugauggaccuggagggcaagcaggggaacuucaagaaccuccgcgaguucguguucaagaacaucgacggcuacuucaagaucuacuccaagcacaccccgaucaaccugguccgggaccugccccagggguucagcgcccucgagccccugguggaccugcccaucggcaucaacaucacccgcuuccagacccuccuggcccugcaccgguccuaccucacgccgggggacagcagcuccggcuggaccgcgggcgccgccgccuacuacgugggguaccugcagccccgcaccuuccugcucaaguacaacgagaacggcaccaucacggacgcggucgacugcgcccuggacccccugagcgagaccaagugcacccucaaguccuucaccguggagaaggggaucuaccagacgagcaacuuccgggugcagcccaccgaguccaucguccgcuucccgaacaucaccaaccugugccccuucggcgagguguucaacgccacccgguucgccagcgucuacgccuggaaccgcaagcggaucuccaacugcguggcggacuacagcgugcuguacaacuccgccagcuucuccacguucaagugcuacggcgucagccccaccaagcucaacgaccugugcuucaccaacguguacgccgacuccuucgugauccgcggggacgagguccggcagaucgcccccggccagaccgggaagaucgccgacuacaacuacaagcugccggacgacuucacgggcugcgugaucgcguggaacagcaagaaccucgacuccaaggucgggggcaacuacaacuaccuguaccgccuguuccgcaagagcaaccucaagcccuucgagcgggacaucuccaccgagaucuaccaggccggcagcacccccugcaacgggguggagggcuucaacugcuacuucccccugcaguccuacggguuccagccgaccaacggcgugggguaccagcccuaccggguggucgugcugagcuucgagcuccugcacgcccccgccacggugugcggccccaagaaguccaccaaccuggucaagaacaagugcgugaacuucaacuucaacggccucaccgggaccggcgugcugaccgagagcaacaagaaguuccugccguuccagcaguucgggcgcgacaucgccgacacgaccgacgcgguccgcgacccccagacccuggagauccucgacaucacccccugcagcuucggcgggguguccgugaucacgccgggcaccaacaccagcaaccaggucgccgugcuguaccagggcgugaacugcaccgagguccccguggccauccacgccgaccagcugacgcccaccuggcggguguacuccaccgggagcaacgucuuccagacccgcgccggcugccucaucggggcggagcacgugaacaacuccuacgagugcgacauccccaucggcgccggcaucugcgccagcuaccagacgcagaccaacuccccgcggcgcgcccggagcguggcgucccagagcaucaucgccuacaccaugucccugggggccgagaacagcgucgccuacuccaacaacagcaucgccauccccaccaacuucacgaucuccgugaccaccgagauccugcccgugagcaugaccaagacgagcgucgacugcaccauguacaucugcggcgacuccaccgagugcagcaaccuccugcugcaguacggguccuucugcacccagcucaaccgcgcgcugacgggcaucgccguggagcaggacaagaacacccaggagguguucgcccaggucaagcagaucuacaagacgcccccgaucaaggacuucgggggcuucaacuucagccagauccugcccgaccccuccaagcccagcaagcgguccuucaucgaggaccuccuguucaacaaggugacccuggccgacgccggcuucaucaagcaguacggggacugccucggcgacaucgcggcccgcgaccugaucugcgcccagaaguucaacgggcugaccgugcucccgccccugcugaccgacgagaugaucgcccaguacaccagcgcccuccuggcgggcaccaucacguccggguggaccuucggcgccggcgccgcccugcagauccccuucgcgaugcagauggccuaccgguucaacgggaucggcgucacccagaacgugcucuacgagaaccagaagcugaucgccaaccaguucaacagcgccaucgggaagauccaggacucccugagcuccaccgccagcgcgcucggcaagcugcaggacguggucaaccagaacgcccaggcccugaacacgcucgugaagcagcuguccagcaacuucggggccaucuccagcgugcugaacgacauccucucccgccuggacccgcccgaggccgagguccagaucgaccggcugaucaccggccgccuccagagccugcagaccuacgugacccagcagcugauccgggcggccgagauccgcgccagcgccaaccucgccgcgaccaagauguccgagugcgugcugggccagagcaagcgggucgacuucugcgggaagggcuaccaccugauguccuucccccagagcgcgccccacggggugguguuccuccacgucacguacgugcccgcccaggagaagaacuucaccaccgccccggccaucugccacgacggcaaggcccacuucccccgcgagggggucuucguguccaacggcacccacugguucgugacgcagcggaacuucuacgagccccagaucaucaccaccgacaacaccuucgucagcggcaacugcgacguggugaucgggaucgucaacaacacgguguacgacccccugcagccggagcuggacuccuucaaggaggagcucgacaaguacuucaagaaccacaccagccccgacguggaccugggcgacaucuccgggaucaacgccagcgucgugaacauccagaaggagaucgaccgccugaacgagguggccaagaaccucaacgagucccugaucgaccugcaggagcucggcaaguacgagcaguacaucaaguggcccugguacaucuggcugggcuucaucgccgggcugaucgcgaucgucauggugaccaucaugcucugcugcaugaccagcugcugcuccugccugaagggcugcugcagcugcggguccugcugcaaguucgacgaggacgacagcgagccggugcugaagggcgucaagcuccacuacacgugaggacuaguuauaagacugacuagcccgaugggccucccaacgggcccuccuccccuccuugcaccgagauuaauagaucuaaaaaaaaaaaaaaaaaaaaaaaaaaaaaaaaaaaaaaaaaaaaaaaaaaaaaaaaaaaaaaaaaaaaaaaaaaaaaaaaaaaaaaaaaaaaaaaaaaaa

SEQ ID NO: 25739 - RNA, 4017 nt, Artificial Sequence
  SARS-CoV-2/Wuhan/WIV05/2019__EPI_ISL_402128 spike protein mRNA gc (1-1273)(K986P_V987P_S477N_D614G)
aggagaaagcuuaccauguucguguuccugguccuccugccccuggugagcucccagugcgugaaccucaccacccgcacgcagcugccgcccgccuacaccaacagcuucacccggggcgucuacuaccccgacaagguguuccgcuccagcgugcugcacuccacccaggaccucuuccugcccuucuucagcaacgucacgugguuccacgccauccacguguccgggaccaacggcaccaagcgguucgacaacccggugcugcccuucaacgacggggucuacuucgcgagcaccgagaaguccaacaucauccgcggcuggaucuucgggacgacccucgacagcaagacccagucccugcugaucgugaacaacgccaccaacguggucaucaaggugugcgaguuccaguucugcaacgaccccuuccucggcguguacuaccacaagaacaacaagagcuggauggaguccgaguuccgggucuacagcuccgccaacaacugcacguucgaguacgugagccagcccuuccugauggaccuggagggcaagcaggggaacuucaagaaccuccgcgaguucguguucaagaacaucgacggcuacuucaagaucuacuccaagcacaccccgaucaaccugguccgggaccugccccagggguucagcgcccucgagccccugguggaccugcccaucggcaucaacaucacccgcuuccagacccuccuggcccugcaccgguccuaccucacgccgggggacagcagcuccggcuggaccgcgggcgccgccgccuacuacgugggguaccugcagccccgcaccuuccugcucaaguacaacgagaacggcaccaucacggacgcggucgacugcgcccuggacccccugagcgagaccaagugcacccucaaguccuucaccguggagaaggggaucuaccagacgagcaacuuccgggugcagcccaccgaguccaucguccgcuucccgaacaucaccaaccugugccccuucggcgagguguucaacgccacccgguucgccagcgucuacgccuggaaccgcaagcggaucuccaacugcguggcggacuacagcgugcuguacaacuccgccagcuucuccacguucaagugcuacggcgucagccccaccaagcucaacgaccugugcuucaccaacguguacgccgacuccuucgugauccgcggggacgagguccggcagaucgcccccggccagaccgggaagaucgccgacuacaacuacaagcugccggacgacuucacgggcugcgugaucgcguggaacagcaacaaccucgacuccaaggucgggggcaacuacaacuaccuguaccgccuguuccgcaagagcaaccucaagcccuucgagcgggacaucuccaccgagaucuaccaggccggcaacacccccugcaacgggguggagggcuucaacugcuacuucccccugcagagcuacggguuccagccgaccaacggcgugggguaccagcccuaccggguggucgugcuguccuucgagcuccugcacgcccccgccacggugugcggccccaagaaguccaccaaccuggucaagaacaagugcgugaacuucaacuucaacggccucaccgggaccggcgugcugaccgagagcaacaagaaguuccugccguuccagcaguucgggcgcgacaucgccgacacgaccgacgcgguccgcgacccccagacccuggagauccucgacaucacccccugcagcuucggcggggugagcgugaucacgccgggcaccaacaccuccaaccaggucgccgugcuguaccagggcgugaacugcaccgagguccccguggccauccacgccgaccagcugacgcccaccuggcggguguacagcaccggguccaacgucuuccagacccgcgccggcugccucaucggggcggagcacgugaacaacagcuacgagugcgacauccccaucggcgccggcaucugcgccuccuaccagacgcagaccaacagcccgcggcgcgcccgguccguggcgagccaguccaucaucgccuacaccaugagccugggggccgagaacuccgucgccuacagcaacaacuccaucgccauccccaccaacuucacgaucagcgugaccaccgagauccugcccguguccaugaccaagacgagcgucgacugcaccauguacaucugcggcgacagcaccgagugcuccaaccuccugcugcaguacgggagcuucugcacccagcucaaccgcgcgcugacgggcaucgccguggagcaggacaagaacacccaggagguguucgcccaggucaagcagaucuacaagacgcccccgaucaaggacuucgggggcuucaacuucucccagauccugcccgaccccagcaagcccuccaagcggagcuucaucgaggaccuccuguucaacaaggugacccuggccgacgccggcuucaucaagcaguacggggacugccucggcgacaucgcggcccgcgaccugaucugcgcccagaaguucaacgggcugaccgugcucccgccccugcugaccgacgagaugaucgcccaguacaccuccgcccuccuggcgggcaccaucacgagcggguggaccuucggcgccggcgccgcccugcagauccccuucgcgaugcagauggccuaccgguucaacgggaucggcgucacccagaacgugcucuacgagaaccagaagcugaucgccaaccaguucaacuccgccaucgggaagauccaggacagccuguccagcaccgccuccgcgcucggcaagcugcaggacguggucaaccagaacgcccaggcccugaacacgcucgugaagcagcugagcuccaacuucggggccaucagcuccgugcugaacgacauccucagccgccuggacccgcccgaggccgagguccagaucgaccggcugaucaccggccgccuccagucccugcagaccuacgugacccagcagcugauccgggcggccgagauccgcgccagcgccaaccucgccgcgaccaagaugagcgagugcgugcugggccaguccaagcgggucgacuucugcgggaagggcuaccaccugaugagcuucccccaguccgcgccccacggggugguguuccuccacgucacguacgugcccgcccaggagaagaacuucaccaccgccccggccaucugccacgacggcaaggcccacuucccccgcgagggggucuucgugagcaacggcacccacugguucgugacgcagcggaacuucuacgagccccagaucaucaccaccgacaacaccuucgucuccggcaacugcgacguggugaucgggaucgucaacaacacgguguacgacccccugcagccggagcuggacagcuucaaggaggagcucgacaaguacuucaagaaccacaccucccccgacguggaccugggcgacaucagcgggaucaacgccuccgucgugaacauccagaaggagaucgaccgccugaacgagguggccaagaaccucaacgagagccugaucgaccugcaggagcucggcaaguacgagcaguacaucaaguggcccugguacaucuggcugggcuucaucgccgggcugaucgcgaucgucauggugaccaucaugcucugcugcaugaccuccugcugcagcugccugaagggcugcugcuccugcgggagcugcugcaaguucgacgaggacgacuccgagccggugcugaagggcgucaagcuccacuacacgugaggacuaguuauaagacugacuagcccgaugggccucccaacgggcccuccuccccuccuugcaccgagauuaauagaucuaaaaaaaaaaaaaaaaaaaaaaaaaaaaaaaaaaaaaaaaaaaaaaaaaaaaaaaaaaaaaaaaaaaaaaaaaaaaaaaaaaaaaaaaaaaaaaaaaaaa

SEQ ID NO: 25740 - RNA, 4017 nt, Artificial Sequence
  SARS-CoV-2/Wuhan/WIV05/2019__EPI_ISL_402128 spike protein mRNA gc (1-1273)(K986P_V987P_N501Y_D614G)
aggagaaagcuuaccauguucguguuccugguccuccugccccuggugagcucccagugcgugaaccucaccacccgcacgcagcugccgcccgccuacaccaacagcuucacccggggcgucuacuaccccgacaagguguuccgcuccagcgugcugcacuccacccaggaccucuuccugcccuucuucagcaacgucacgugguuccacgccauccacguguccgggaccaacggcaccaagcgguucgacaacccggugcugcccuucaacgacggggucuacuucgcgagcaccgagaaguccaacaucauccgcggcuggaucuucgggacgacccucgacagcaagacccagucccugcugaucgugaacaacgccaccaacguggucaucaaggugugcgaguuccaguucugcaacgaccccuuccucggcguguacuaccacaagaacaacaagagcuggauggaguccgaguuccgggucuacagcuccgccaacaacugcacguucgaguacgugagccagcccuuccugauggaccuggagggcaagcaggggaacuucaagaaccuccgcgaguucguguucaagaacaucgacggcuacuucaagaucuacuccaagcacaccccgaucaaccugguccgggaccugccccagggguucagcgcccucgagccccugguggaccugcccaucggcaucaacaucacccgcuuccagacccuccuggcccugcaccgguccuaccucacgccgggggacagcagcuccggcuggaccgcgggcgccgccgccuacuacgugggguaccugcagccccgcaccuuccugcucaaguacaacgagaacggcaccaucacggacgcggucgacugcgcccuggacccccugagcgagaccaagugcacccucaaguccuucaccguggagaaggggaucuaccagacgagcaacuuccgggugcagcccaccgaguccaucguccgcuucccgaacaucaccaaccugugccccuucggcgagguguucaacgccacccgguucgccagcgucuacgccuggaaccgcaagcggaucuccaacugcguggcggacuacagcgugcuguacaacuccgccagcuucuccacguucaagugcuacggcgucagccccaccaagcucaacgaccugugcuucaccaacguguacgccgacuccuucgugauccgcggggacgagguccggcagaucgcccccggccagaccgggaagaucgccgacuacaacuacaagcugccggacgacuucacgggcugcgugaucgcguggaacagcaacaaccucgacuccaaggucgggggcaacuacaacuaccuguaccgccuguuccgcaagagcaaccucaagcccuucgagcgggacaucuccaccgagaucuaccaggccggcagcacccccugcaacgggguggagggcuucaacugcuacuucccccugcaguccuacggguuccagccgaccuacggcgugggguaccagcccuaccggguggucgugcugagcuucgagcuccugcacgcccccgccacggugugcggccccaagaaguccaccaaccuggucaagaacaagugcgugaacuucaacuucaacggccucaccgggaccggcgugcugaccgagagcaacaagaaguuccugccguuccagcaguucgggcgcgacaucgccgacacgaccgacgcgguccgcgacccccagacccuggagauccucgacaucacccccugcagcuucggcgggguguccgugaucacgccgggcaccaacaccagcaaccaggucgccgugcuguaccagggcgugaacugcaccgagguccccguggccauccacgccgaccagcugacgcccaccuggcggguguacuccaccgggagcaacgucuuccagacccgcgccggcugccucaucggggcggagcacgugaacaacuccuacgagugcgacauccccaucggcgccggcaucugcgccagcuaccagacgcagaccaacuccccgcggcgcgcccggagcguggcgucccagagcaucaucgccuacaccaugucccugggggccgagaacagcgucgccuacuccaacaacagcaucgccauccccaccaacuucacgaucuccgugaccaccgagauccugcccgugagcaugaccaagacgagcgucgacugcaccauguacaucugcggcgacuccaccgagugcagcaaccuccugcugcaguacggguccuucugcacccagcucaaccgcgcgcugacgggcaucgccguggagcaggacaagaacacccaggagguguucgcccaggucaagcagaucuacaagacgcccccgaucaaggacuucgggggcuucaacuucagccagauccugcccgaccccuccaagcccagcaagcgguccuucaucgaggaccuccuguucaacaaggugacccuggccgacgccggcuucaucaagcaguacggggacugccucggcgacaucgcggcccgcgaccugaucugcgcccagaaguucaacgggcugaccgugcucccgccccugcugaccgacgagaugaucgcccaguacaccagcgcccuccuggcgggcaccaucacguccggguggaccuucggcgccggcgccgcccugcagauccccuucgcgaugcagauggccuaccgguucaacgggaucggcgucacccagaacgugcucuacgagaaccagaagcugaucgccaaccaguucaacagcgccaucgggaagauccaggacucccugagcuccaccgccagcgcgcucggcaagcugcaggacguggucaaccagaacgcccaggcccugaacacgcucgugaagcagcuguccagcaacuucggggccaucuccagcgugcugaacgacauccucucccgccuggacccgcccgaggccgagguccagaucgaccggcugaucaccggccgccuccagagccugcagaccuacgugacccagcagcugauccgggcggccgagauccgcgccagcgccaaccucgccgcgaccaagauguccgagugcgugcugggccagagcaagcgggucgacuucugcgggaagggcuaccaccugauguccuucccccagagcgcgccccacggggugguguuccuccacgucacguacgugcccgcccaggagaagaacuucaccaccgccccggccaucugccacgacggcaaggcccacuucccccgcgagggggucuucguguccaacggcacccacugguucgugacgcagcggaacuucuacgagccccagaucaucaccaccgacaacaccuucgucagcggcaacugcgacguggugaucgggaucgucaacaacacgguguacgacccccugcagccggagcuggacuccuucaaggaggagcucgacaaguacuucaagaaccacaccagccccgacguggaccugggcgacaucuccgggaucaacgccagcgucgugaacauccagaaggagaucgaccgccugaacgagguggccaagaaccucaacgagucccugaucgaccugcaggagcucggcaaguacgagcaguacaucaaguggcccugguacaucuggcugggcuucaucgccgggcugaucgcgaucgucauggugaccaucaugcucugcugcaugaccagcugcugcuccugccugaagggcugcugcagcugcggguccugcugcaaguucgacgaggacgacagcgagccggugcugaagggcgucaagcuccacuacacgugaggacuaguuauaagacugacuagcccgaugggccucccaacgggcccuccuccccuccuugcaccgagauuaauagaucuaaaaaaaaaaaaaaaaaaaaaaaaaaaaaaaaaaaaaaaaaaaaaaaaaaaaaaaaaaaaaaaaaaaaaaaaaaaaaaaaaaaaaaaaaaaaaaaaaaaa

SEQ ID NO: 25741 - RNA, 4011 nt, Artificial Sequence
  SARS-CoV-2/Wuhan/WIV05/2019__EPI_ISL_402128 spike protein mRNA gc (1-1273)(K986P_V987P_H69del_V70del_D614G)
aggagaaagcuuaccauguucguguuccugguccuccugccccuggugagcucccagugcgugaaccucaccacccgcacgcagcugccgcccgccuacaccaacagcuucacccggggcgucuacuaccccgacaagguguuccgcuccagcgugcugcacuccacccaggaccucuuccugcccuucuucagcaacgucacgugguuccacgccaucuccgggaccaacggcaccaagcgguucgacaacccggugcugcccuucaacgacgggguguacuucgcgagcaccgagaaguccaacaucauccgcggcuggaucuucgggacgacccucgacagcaagacccagucccugcugaucgucaacaacgccaccaacguggugaucaaggucugcgaguuccaguucugcaacgaccccuuccucggcguguacuaccacaagaacaacaagagcuggauggaguccgaguuccggguguacagcuccgccaacaacugcacguucgaguacgucagccagcccuuccugauggaccuggagggcaagcaggggaacuucaagaaccuccgcgaguucguguucaagaacaucgacggcuacuucaagaucuacuccaagcacaccccgaucaaccuggugcgggaccugccccagggguucagcgcccucgagccccuggucgaccugcccaucggcaucaacaucacccgcuuccagacccuccuggcccugcaccgguccuaccucacgccgggggacagcagcuccggcuggaccgcgggcgccgccgccuacuacgugggguaccugcagccccgcaccuuccugcucaaguacaacgagaacggcaccaucacggacgcgguggacugcgcccuggacccccugagcgagaccaagugcacccucaaguccuucaccgucgagaaggggaucuaccagacgagcaacuuccgggugcagcccaccgaguccaucgugcgcuucccgaacaucaccaaccugugccccuucggcgaggucuucaacgccacccgguucgccagcguguacgccuggaaccgcaagcggaucuccaacugcgucgcggacuacagcgugcuguacaacuccgccagcuucuccacguucaagugcuacggcgugagccccaccaagcucaacgaccugugcuucaccaacgucuacgccgacuccuucgugauccgcggggacgaggugcggcagaucgcccccggccagaccgggaagaucgccgacuacaacuacaagcugccggacgacuucacgggcugcgucaucgcguggaacagcaacaaccucgacuccaaggucgggggcaacuacaacuaccuguaccgccuguuccgcaagagcaaccucaagcccuucgagcgggacaucuccaccgagaucuaccaggccggcagcacccccugcaacgggguggagggcuucaacugcuacuucccccugcaguccuacggguuccagccgaccaacggcgugggguaccagcccuaccggguggugguccugagcuucgagcuccugcacgcccccgccacggugugcggccccaagaaguccaccaaccuggugaagaacaagugcgucaacuucaacuucaacggccucaccgggaccggcgugcugaccgagagcaacaagaaguuccugccguuccagcaguucgggcgcgacaucgccgacacgaccgacgcggugcgcgacccccagacccuggagauccucgacaucacccccugcagcuucggcggggucuccgugaucacgccgggcaccaacaccagcaaccagguggccguccuguaccagggcgugaacugcaccgaggugcccgucgccauccacgccgaccagcugacgcccaccuggcggguguacuccaccgggagcaacguguuccagacccgcgccggcugccucaucggggcggagcacgucaacaacuccuacgagugcgacauccccaucggcgccggcaucugcgccagcuaccagacgcagaccaacuccccgcggcgcgcccggagcguggcgucccagagcaucaucgccuacaccaugucccugggggccgagaacagcguggccuacuccaacaacagcaucgccauccccaccaacuucacgaucuccgucaccaccgagauccugcccgugagcaugaccaagacgagcguggacugcaccauguacaucugcggcgacuccaccgagugcagcaaccuccugcugcaguacggguccuucugcacccagcucaaccgcgcgcugacgggcaucgccgucgagcaggacaagaacacccaggagguguucgcccaggugaagcagaucuacaagacgcccccgaucaaggacuucgggggcuucaacuucagccagauccugcccgaccccuccaagcccagcaagcgguccuucaucgaggaccuccuguucaacaaggucacccuggccgacgccggcuucaucaagcaguacggggacugccucggcgacaucgcggcccgcgaccugaucugcgcccagaaguucaacgggcugaccgugcucccgccccugcugaccgacgagaugaucgcccaguacaccagcgcccuccuggcgggcaccaucacguccggguggaccuucggcgccggcgccgcccugcagauccccuucgcgaugcagauggccuaccgguucaacgggaucggcgugacccagaacguccucuacgagaaccagaagcugaucgccaaccaguucaacagcgccaucgggaagauccaggacucccugagcuccaccgccagcgcgcucggcaagcugcaggacguggugaaccagaacgcccaggcccugaacacgcucgucaagcagcuguccagcaacuucggggccaucuccagcgugcugaacgacauccucucccgccuggacccgcccgaggccgaggugcagaucgaccggcugaucaccggccgccuccagagccugcagaccuacgucacccagcagcugauccgggcggccgagauccgcgccagcgccaaccucgccgcgaccaagauguccgagugcgugcugggccagagcaagcggguggacuucugcgggaagggcuaccaccugauguccuucccccagagcgcgccccacggggucguguuccuccacgugacguacguccccgcccaggagaagaacuucaccaccgccccggccaucugccacgacggcaaggcccacuucccccgcgaggggguguucgucuccaacggcacccacugguucgugacgcagcggaacuucuacgagccccagaucaucaccaccgacaacaccuucgugagcggcaacugcgacgucgugaucgggaucgugaacaacacggucuacgacccccugcagccggagcuggacuccuucaaggaggagcucgacaaguacuucaagaaccacaccagccccgacguggaccugggcgacaucuccgggaucaacgccagcguggucaacauccagaaggagaucgaccgccugaacgagguggccaagaaccucaacgagucccugaucgaccugcaggagcucggcaaguacgagcaguacaucaaguggcccugguacaucuggcugggcuucaucgccgggcugaucgcgaucgugauggucaccaucaugcucugcugcaugaccagcugcugcuccugccugaagggcugcugcagcugcggguccugcugcaaguucgacgaggacgacagcgagccggugcugaagggcgugaagcuccacuacacgugaggacuaguuauaagacugacuagcccgaugggccucccaacgggcccuccuccccuccuugcaccgagauuaauagaucuaaaaaaaaaaaaaaaaaaaaaaaaaaaaaaaaaaaaaaaaaaaaaaaaaaaaaaaaaaaaaaaaaaaaaaaaaaaaaaaaaaaaaaaaaaaaaaaaaaaa

SEQ ID NO: 25742 - RNA, 4017 nt, Artificial Sequence
  SARS-CoV-2/Wuhan/WIV05/2019__EPI_ISL_402128 spike protein mRNA gc (1-1273)(K986P_V987P_Y453F_D614G)
aggagaaagcuuaccauguucguguuccugguccuccugccccuggugagcucccagugcgugaaccucaccacccgcacgcagcugccgcccgccuacaccaacagcuucacccggggcgucuacuaccccgacaagguguuccgcuccagcgugcugcacuccacccaggaccucuuccugcccuucuucagcaacgucacgugguuccacgccauccacguguccgggaccaacggcaccaagcgguucgacaacccggugcugcccuucaacgacggggucuacuucgcgagcaccgagaaguccaacaucauccgcggcuggaucuucgggacgacccucgacagcaagacccagucccugcugaucgugaacaacgccaccaacguggucaucaaggugugcgaguuccaguucugcaacgaccccuuccucggcguguacuaccacaagaacaacaagagcuggauggaguccgaguuccgggucuacagcuccgccaacaacugcacguucgaguacgugagccagcccuuccugauggaccuggagggcaagcaggggaacuucaagaaccuccgcgaguucguguucaagaacaucgacggcuacuucaagaucuacuccaagcacaccccgaucaaccugguccgggaccugccccagggguucagcgcccucgagccccugguggaccugcccaucggcaucaacaucacccgcuuccagacccuccuggcccugcaccgguccuaccucacgccgggggacagcagcuccggcuggaccgcgggcgccgccgccuacuacgugggguaccugcagccccgcaccuuccugcucaaguacaacgagaacggcaccaucacggacgcggucgacugcgcccuggacccccugagcgagaccaagugcacccucaaguccuucaccguggagaaggggaucuaccagacgagcaacuuccgggugcagcccaccgaguccaucguccgcuucccgaacaucaccaaccugugccccuucggcgagguguucaacgccacccgguucgccagcgucuacgccuggaaccgcaagcggaucuccaacugcguggcggacuacagcgugcuguacaacuccgccagcuucuccacguucaagugcuacggcgucagccccaccaagcucaacgaccugugcuucaccaacguguacgccgacuccuucgugauccgcggggacgagguccggcagaucgcccccggccagaccgggaagaucgccgacuacaacuacaagcugccggacgacuucacgggcugcgugaucgcguggaacagcaacaaccucgacuccaaggucgggggcaacuacaacuaccuguuccgccuguuccgcaagagcaaccucaagcccuucgagcgggacaucuccaccgagaucuaccaggccggcagcacccccugcaacgggguggagggcuucaacugcuacuucccccugcaguccuacggguuccagccgaccaacggcgugggguaccagcccuaccggguggucgugcugagcuucgagcuccugcacgcccccgccacggugugcggccccaagaaguccaccaaccuggucaagaacaagugcgugaacuucaacuucaacggccucaccgggaccggcgugcugaccgagagcaacaagaaguuccugccguuccagcaguucgggcgcgacaucgccgacacgaccgacgcgguccgcgacccccagacccuggagauccucgacaucacccccugcagcuucggcgggguguccgugaucacgccgggcaccaacaccagcaaccaggucgccgugcuguaccagggcgugaacugcaccgagguccccguggccauccacgccgaccagcugacgcccaccuggcggguguacuccaccgggagcaacgucuuccagacccgcgccggcugccucaucggggcggagcacgugaacaacuccuacgagugcgacauccccaucggcgccggcaucugcgccagcuaccagacgcagaccaacuccccgcggcgcgcccggagcguggcgucccagagcaucaucgccuacaccaugucccugggggccgagaacagcgucgccuacuccaacaacagcaucgccauccccaccaacuucacgaucuccgugaccaccgagauccugcccgugagcaugaccaagacgagcgucgacugcaccauguacaucugcggcgacuccaccgagugcagcaaccuccugcugcaguacggguccuucugcacccagcucaaccgcgcgcugacgggcaucgccguggagcaggacaagaacacccaggagguguucgcccaggucaagcagaucuacaagacgcccccgaucaaggacuucgggggcuucaacuucagccagauccugcccgaccccuccaagcccagcaagcgguccuucaucgaggaccuccuguucaacaaggugacccuggccgacgccggcuucaucaagcaguacggggacugccucggcgacaucgcggcccgcgaccugaucugcgcccagaaguucaacgggcugaccgugcucccgccccugcugaccgacgagaugaucgcccaguacaccagcgcccuccuggcgggcaccaucacguccggguggaccuucggcgccggcgccgcccugcagauccccuucgcgaugcagauggccuaccgguucaacgggaucggcgucacccagaacgugcucuacgagaaccagaagcugaucgccaaccaguucaacagcgccaucgggaagauccaggacucccugagcuccaccgccagcgcgcucggcaagcugcaggacguggucaaccagaacgcccaggcccugaacacgcucgugaagcagcuguccagcaacuucggggccaucuccagcgugcugaacgacauccucucccgccuggacccgcccgaggccgagguccagaucgaccggcugaucaccggccgccuccagagccugcagaccuacgugacccagcagcugauccgggcggccgagauccgcgccagcgccaaccucgccgcgaccaagauguccgagugcgugcugggccagagcaagcgggucgacuucugcgggaagggcuaccaccugauguccuucccccagagcgcgccccacggggugguguuccuccacgucacguacgugcccgcccaggagaagaacuucaccaccgccccggccaucugccacgacggcaaggcccacuucccccgcgagggggucuucguguccaacggcacccacugguucgugacgcagcggaacuucuacgagccccagaucaucaccaccgacaacaccuucgucagcggcaacugcgacguggugaucgggaucgucaacaacacgguguacgacccccugcagccggagcuggacuccuucaaggaggagcucgacaaguacuucaagaaccacaccagccccgacguggaccugggcgacaucuccgggaucaacgccagcgucgugaacauccagaaggagaucgaccgccugaacgagguggccaagaaccucaacgagucccugaucgaccugcaggagcucggcaaguacgagcaguacaucaaguggcccugguacaucuggcugggcuucaucgccgggcugaucgcgaucgucauggugaccaucaugcucugcugcaugaccagcugcugcuccugccugaagggcugcugcagcugcggguccugcugcaaguucgacgaggacgacagcgagccggugcugaagggcgucaagcuccacuacacgugaggacuaguuauaagacugacuagcccgaugggccucccaacgggcccuccuccccuccuugcaccgagauuaauagaucuaaaaaaaaaaaaaaaaaaaaaaaaaaaaaaaaaaaaaaaaaaaaaaaaaaaaaaaaaaaaaaaaaaaaaaaaaaaaaaaaaaaaaaaaaaaaaaaaaaaa

SEQ ID NO: 25743 - RNA, 4017 nt, Artificial Sequence
  SARS-CoV-2/Wuhan/WIV05/2019__EPI_ISL_402128 spike protein mRNA gc (1-1273)(K986P_V987P_D614G_I692V)
aggagaaagcuuaccauguucguguuccugguccuccugccccuggugagcucccagugcgugaaccucaccacccgcacgcagcugccgcccgccuacaccaacagcuucacccggggcgucuacuaccccgacaagguguuccgcuccagcgugcugcacuccacccaggaccucuuccugcccuucuucagcaacgucacgugguuccacgccauccacguguccgggaccaacggcaccaagcgguucgacaacccggugcugcccuucaacgacggggucuacuucgcgagcaccgagaaguccaacaucauccgcggcuggaucuucgggacgacccucgacagcaagacccagucccugcugaucgugaacaacgccaccaacguggucaucaaggugugcgaguuccaguucugcaacgaccccuuccucggcguguacuaccacaagaacaacaagagcuggauggaguccgaguuccgggucuacagcuccgccaacaacugcacguucgaguacgugagccagcccuuccugauggaccuggagggcaagcaggggaacuucaagaaccuccgcgaguucguguucaagaacaucgacggcuacuucaagaucuacuccaagcacaccccgaucaaccugguccgggaccugccccagggguucagcgcccucgagccccugguggaccugcccaucggcaucaacaucacccgcuuccagacccuccuggcccugcaccgguccuaccucacgccgggggacagcagcuccggcuggaccgcgggcgccgccgccuacuacgugggguaccugcagccccgcaccuuccugcucaaguacaacgagaacggcaccaucacggacgcggucgacugcgcccuggacccccugagcgagaccaagugcacccucaaguccuucaccguggagaaggggaucuaccagacgagcaacuuccgggugcagcccaccgaguccaucguccgcuucccgaacaucaccaaccugugccccuucggcgagguguucaacgccacccgguucgccagcgucuacgccuggaaccgcaagcggaucuccaacugcguggcggacuacagcgugcuguacaacuccgccagcuucuccacguucaagugcuacggcgucagccccaccaagcucaacgaccugugcuucaccaacguguacgccgacuccuucgugauccgcggggacgagguccggcagaucgcccccggccagaccgggaagaucgccgacuacaacuacaagcugccggacgacuucacgggcugcgugaucgcguggaacagcaacaaccucgacuccaaggucgggggcaacuacaacuaccuguaccgccuguuccgcaagagcaaccucaagcccuucgagcgggacaucuccaccgagaucuaccaggccggcagcacccccugcaacgggguggagggcuucaacugcuacuucccccugcaguccuacggguuccagccgaccaacggcgugggguaccagcccuaccggguggucgugcugagcuucgagcuccugcacgcccccgccacggugugcggccccaagaaguccaccaaccuggucaagaacaagugcgugaacuucaacuucaacggccucaccgggaccggcgugcugaccgagagcaacaagaaguuccugccguuccagcaguucgggcgcgacaucgccgacacgaccgacgcgguccgcgacccccagacccuggagauccucgacaucacccccugcagcuucggcgggguguccgugaucacgccgggcaccaacaccagcaaccaggucgccgugcuguaccagggcgugaacugcaccgagguccccguggccauccacgccgaccagcugacgcccaccuggcggguguacuccaccgggagcaacgucuuccagacccgcgccggcugccucaucggggcggagcacgugaacaacuccuacgagugcgacauccccaucggcgccggcaucugcgccagcuaccagacgcagaccaacuccccgcggcgcgcccggagcguggcgucccagagcgucaucgccuacaccaugucccugggggccgagaacagcguggccuacuccaacaacagcaucgccauccccaccaacuucacgaucuccgugaccaccgagauccugcccgucagcaugaccaagacgagcguggacugcaccauguacaucugcggcgacuccaccgagugcagcaaccuccugcugcaguacggguccuucugcacccagcucaaccgcgcgcugacgggcaucgccguggagcaggacaagaacacccaggaggucuucgcccaggugaagcagaucuacaagacgcccccgaucaaggacuucgggggcuucaacuucagccagauccugcccgaccccuccaagcccagcaagcgguccuucaucgaggaccuccuguucaacaaggugacccuggccgacgccggcuucaucaagcaguacggggacugccucggcgacaucgcggcccgcgaccugaucugcgcccagaaguucaacgggcugaccguccucccgccccugcugaccgacgagaugaucgcccaguacaccagcgcccuccuggcgggcaccaucacguccggguggaccuucggcgccggcgccgcccugcagauccccuucgcgaugcagauggccuaccgguucaacgggaucggcgugacccagaacgugcucuacgagaaccagaagcugaucgccaaccaguucaacagcgccaucgggaagauccaggacucccugagcuccaccgccagcgcgcucggcaagcugcaggacgucgugaaccagaacgcccaggcccugaacacgcucgugaagcagcuguccagcaacuucggggccaucuccagcguccugaacgacauccucucccgccuggacccgcccgaggccgaggugcagaucgaccggcugaucaccggccgccuccagagccugcagaccuacgugacccagcagcugauccgggcggccgagauccgcgccagcgccaaccucgccgcgaccaagauguccgagugcguccugggccagagcaagcggguggacuucugcgggaagggcuaccaccugauguccuucccccagagcgcgccccacgggguggucuuccuccacgugacguacguccccgcccaggagaagaacuucaccaccgccccggccaucugccacgacggcaaggcccacuucccccgcgaggggguguucguguccaacggcacccacugguucgucacgcagcggaacuucuacgagccccagaucaucaccaccgacaacaccuucgugagcggcaacugcgacguggucaucgggaucgugaacaacacgguguacgacccccugcagccggagcuggacuccuucaaggaggagcucgacaaguacuucaagaaccacaccagccccgacgucgaccugggcgacaucuccgggaucaacgccagcguggugaacauccagaaggagaucgaccgccugaacgaggucgccaagaaccucaacgagucccugaucgaccugcaggagcucggcaaguacgagcaguacaucaaguggcccugguacaucuggcugggcuucaucgccgggcugaucgcgaucgugauggugaccaucaugcucugcugcaugaccagcugcugcuccugccugaagggcugcugcagcugcggguccugcugcaaguucgacgaggacgacagcgagccgguccugaagggcgugaagcuccacuacacgugaggacuaguuauaagacugacuagcccgaugggccucccaacgggcccuccuccccuccuugcaccgagauuaauagaucuaaaaaaaaaaaaaaaaaaaaaaaaaaaaaaaaaaaaaaaaaaaaaaaaaaaaaaaaaaaaaaaaaaaaaaaaaaaaaaaaaaaaaaaaaaaaaaaaaaaa

SEQ ID NO: 25744 - RNA, 4017 nt, Artificial Sequence
  SARS-CoV-2/Wuhan/WIV05/2019__EPI_ISL_402128 spike protein mRNA gc (1-1273)(K986P_V987P_D614G_M1229I)
aggagaaagcuuaccauguucguguuccugguccuccugccccuggugagcucccagugcgugaaccucaccacccgcacgcagcugccgcccgccuacaccaacagcuucacccggggcgucuacuaccccgacaagguguuccgcuccagcgugcugcacuccacccaggaccucuuccugcccuucuucagcaacgucacgugguuccacgccauccacguguccgggaccaacggcaccaagcgguucgacaacccggugcugcccuucaacgacggggucuacuucgcgagcaccgagaaguccaacaucauccgcggcuggaucuucgggacgacccucgacagcaagacccagucccugcugaucgugaacaacgccaccaacguggucaucaaggugugcgaguuccaguucugcaacgaccccuuccucggcguguacuaccacaagaacaacaagagcuggauggaguccgaguuccgggucuacagcuccgccaacaacugcacguucgaguacgugagccagcccuuccugauggaccuggagggcaagcaggggaacuucaagaaccuccgcgaguucguguucaagaacaucgacggcuacuucaagaucuacuccaagcacaccccgaucaaccugguccgggaccugccccagggguucagcgcccucgagccccugguggaccugcccaucggcaucaacaucacccgcuuccagacccuccuggcccugcaccgguccuaccucacgccgggggacagcagcuccggcuggaccgcgggcgccgccgccuacuacgugggguaccugcagccccgcaccuuccugcucaaguacaacgagaacggcaccaucacggacgcggucgacugcgcccuggacccccugagcgagaccaagugcacccucaaguccuucaccguggagaaggggaucuaccagacgagcaacuuccgggugcagcccaccgaguccaucguccgcuucccgaacaucaccaaccugugccccuucggcgagguguucaacgccacccgguucgccagcgucuacgccuggaaccgcaagcggaucuccaacugcguggcggacuacagcgugcuguacaacuccgccagcuucuccacguucaagugcuacggcgucagccccaccaagcucaacgaccugugcuucaccaacguguacgccgacuccuucgugauccgcggggacgagguccggcagaucgcccccggccagaccgggaagaucgccgacuacaacuacaagcugccggacgacuucacgggcugcgugaucgcguggaacagcaacaaccucgacuccaaggucgggggcaacuacaacuaccuguaccgccuguuccgcaagagcaaccucaagcccuucgagcgggacaucuccaccgagaucuaccaggccggcagcacccccugcaacgggguggagggcuucaacugcuacuucccccugcaguccuacggguuccagccgaccaacggcgugggguaccagcccuaccggguggucgugcugagcuucgagcuccugcacgcccccgccacggugugcggccccaagaaguccaccaaccuggucaagaacaagugcgugaacuucaacuucaacggccucaccgggaccggcgugcugaccgagagcaacaagaaguuccugccguuccagcaguucgggcgcgacaucgccgacacgaccgacgcgguccgcgacccccagacccuggagauccucgacaucacccccugcagcuucggcgggguguccgugaucacgccgggcaccaacaccagcaaccaggucgccgugcuguaccagggcgugaacugcaccgagguccccguggccauccacgccgaccagcugacgcccaccuggcggguguacuccaccgggagcaacgucuuccagacccgcgccggcugccucaucggggcggagcacgugaacaacuccuacgagugcgacauccccaucggcgccggcaucugcgccagcuaccagacgcagaccaacuccccgcggcgcgcccggagcguggcgucccagagcaucaucgccuacaccaugucccugggggccgagaacagcgucgccuacuccaacaacagcaucgccauccccaccaacuucacgaucuccgugaccaccgagauccugcccgugagcaugaccaagacgagcgucgacugcaccauguacaucugcggcgacuccaccgagugcagcaaccuccugcugcaguacggguccuucugcacccagcucaaccgcgcgcugacgggcaucgccguggagcaggacaagaacacccaggagguguucgcccaggucaagcagaucuacaagacgcccccgaucaaggacuucgggggcuucaacuucagccagauccugcccgaccccuccaagcccagcaagcgguccuucaucgaggaccuccuguucaacaaggugacccuggccgacgccggcuucaucaagcaguacggggacugccucggcgacaucgcggcccgcgaccugaucugcgcccagaaguucaacgggcugaccgugcucccgccccugcugaccgacgagaugaucgcccaguacaccagcgcccuccuggcgggcaccaucacguccggguggaccuucggcgccggcgccgcccugcagauccccuucgcgaugcagauggccuaccgguucaacgggaucggcgucacccagaacgugcucuacgagaaccagaagcugaucgccaaccaguucaacagcgccaucgggaagauccaggacucccugagcuccaccgccagcgcgcucggcaagcugcaggacguggucaaccagaacgcccaggcccugaacacgcucgugaagcagcuguccagcaacuucggggccaucuccagcgugcugaacgacauccucucccgccuggacccgcccgaggccgagguccagaucgaccggcugaucaccggccgccuccagagccugcagaccuacgugacccagcagcugauccgggcggccgagauccgcgccagcgccaaccucgccgcgaccaagauguccgagugcgugcugggccagagcaagcgggucgacuucugcgggaagggcuaccaccugauguccuucccccagagcgcgccccacggggugguguuccuccacgucacguacgugcccgcccaggagaagaacuucaccaccgccccggccaucugccacgacggcaaggcccacuucccccgcgagggggucuucguguccaacggcacccacugguucgugacgcagcggaacuucuacgagccccagaucaucaccaccgacaacaccuucgucagcggcaacugcgacguggugaucgggaucgucaacaacacgguguacgacccccugcagccggagcuggacuccuucaaggaggagcucgacaaguacuucaagaaccacaccagccccgacguggaccugggcgacaucuccgggaucaacgccagcgucgugaacauccagaaggagaucgaccgccugaacgagguggccaagaaccucaacgagucccugaucgaccugcaggagcucggcaaguacgagcaguacaucaaguggcccugguacaucuggcugggcuucaucgccgggcugaucgcgaucgucaucgugaccaucaugcucugcugcaugaccagcugcugcuccugccugaagggcugcugcagcugcggguccugcugcaaguucgacgaggacgacagcgagccggugcugaagggcgucaagcuccacuacacgugaggacuaguuauaagacugacuagcccgaugggccucccaacgggcccuccuccccuccuugcaccgagauuaauagaucuaaaaaaaaaaaaaaaaaaaaaaaaaaaaaaaaaaaaaaaaaaaaaaaaaaaaaaaaaaaaaaaaaaaaaaaaaaaaaaaaaaaaaaaaaaaaaaaaaaaa

SEQ ID NO: 25745 - RNA, 4011 nt, Artificial Sequence
  SARS-CoV-2/Wuhan/WIV05/2019__EPI_ISL_402128 spike protein mRNA gc (1-1273)(K986P_V987P_H69del_V70del_A222V_Y453F_S477N_D614G_I692V)
aggagaaagcuuaccauguucguguuccugguccuccugccccuggugagcucccagugcgugaaccucaccacccgcacgcagcugccgcccgccuacaccaacagcuucacccggggcgucuacuaccccgacaagguguuccgcuccagcgugcugcacuccacccaggaccucuuccugcccuucuucagcaacgucacgugguuccacgccaucuccgggaccaacggcaccaagcgguucgacaacccggugcugcccuucaacgacgggguguacuucgcgagcaccgagaaguccaacaucauccgcggcuggaucuucgggacgacccucgacagcaagacccagucccugcugaucgucaacaacgccaccaacguggugaucaaggucugcgaguuccaguucugcaacgaccccuuccucggcguguacuaccacaagaacaacaagagcuggauggaguccgaguuccggguguacagcuccgccaacaacugcacguucgaguacgucagccagcccuuccugauggaccuggagggcaagcaggggaacuucaagaaccuccgcgaguucguguucaagaacaucgacggcuacuucaagaucuacuccaagcacaccccgaucaaccuggugcgggaccugccccagggguucagcguccucgagccccugguggaccugcccaucggcaucaacaucacccgcuuccagacccuccuggcccugcaccgguccuaccucacgccgggggacagcagcuccggcuggaccgccggcgcggccgccuacuacgugggguaccugcagccccgcaccuuccugcucaaguacaacgagaacggcaccaucacggacgccgucgacugcgcgcuggacccccugagcgagaccaagugcacccucaaguccuucaccguggagaaggggaucuaccagacgagcaacuuccgggugcagcccaccgaguccaucguccgcuucccgaacaucaccaaccugugccccuucggcgagguguucaacgccacccgguucgccagcgucuacgccuggaaccgcaagcggaucuccaacugcguggccgacuacagcgugcuguacaacuccgcgagcuucuccacguucaagugcuacggcgucagccccaccaagcucaacgaccugugcuucaccaacguguacgccgacuccuucgugauccgcggggacgagguccggcagaucgcccccggccagaccgggaagaucgccgacuacaacuacaagcugccggacgacuucacgggcugcgugaucgccuggaacagcaacaaccucgacuccaaggucgggggcaacuacaacuaccuguuccgccuguuccgcaagagcaaccucaagcccuucgagcgggacaucuccaccgagaucuaccaggcgggcaacacccccugcaacgggguggagggcuucaacugcuacuucccccugcagagcuacggguuccagccgaccaacggcgugggguaccagcccuaccggguggucgugcuguccuucgagcuccugcacgcccccgccacggugugcggccccaagaaguccaccaaccuggucaagaacaagugcgugaacuucaacuucaacggccucaccgggaccggcgugcugaccgagagcaacaagaaguuccugccguuccagcaguucgggcgcgacaucgccgacacgaccgacgccguccgcgacccccagacccuggagauccucgacaucacccccugcagcuucggcggggugagcgugaucacgccgggcaccaacaccuccaaccaggucgcggugcuguaccagggcgugaacugcaccgagguccccguggccauccacgccgaccagcugacgcccaccuggcggguguacagcaccggguccaacgucuuccagacccgcgccggcugccucaucggggccgagcacgugaacaacagcuacgagugcgacauccccaucggcgcgggcaucugcgccuccuaccagacgcagaccaacagcccgcggcgcgcccgguccguggccagccaguccgucaucgcguacaccaugagccugggggccgagaacuccguggccuacagcaacaacuccaucgccauccccaccaacuucacgaucagcgugaccaccgagauccugcccgucuccaugaccaagacgagcguggacugcaccauguacaucugcggcgacagcaccgagugcuccaaccuccugcugcaguacgggagcuucugcacccagcucaaccgcgcccugacgggcaucgcgguggagcaggacaagaacacccaggaggucuucgcccaggugaagcagaucuacaagacgcccccgaucaaggacuucgggggcuucaacuucucccagauccugcccgaccccagcaagcccuccaagcggagcuucaucgaggaccuccuguucaacaaggugacccuggccgacgccggcuucaucaagcaguacggggacugccucggcgacaucgccgcgcgcgaccugaucugcgcccagaaguucaacgggcugaccguccucccgccccugcugaccgacgagaugaucgcccaguacaccuccgcccuccuggccggcaccaucacgagcggguggaccuucggcgcgggcgccgcccugcagauccccuucgccaugcagauggcguaccgguucaacgggaucggcgugacccagaacgugcucuacgagaaccagaagcugaucgccaaccaguucaacuccgccaucgggaagauccaggacagccuguccagcaccgccuccgcccucggcaagcugcaggacgucgugaaccagaacgcgcaggcccugaacacgcucgugaagcagcugagcuccaacuucggggccaucagcuccguccugaacgacauccucagccgccuggacccgcccgaggccgaggugcagaucgaccggcugaucaccggccgccuccagucccugcagaccuacgugacccagcagcugauccgggccgcggagauccgcgccagcgccaaccucgccgccaccaagaugagcgagugcguccugggccaguccaagcggguggacuucugcgggaagggcuaccaccugaugagcuucccccaguccgcgccccacgggguggucuuccuccacgugacguacguccccgcccaggagaagaacuucaccaccgccccggccaucugccacgacggcaaggcgcacuucccccgcgaggggguguucgugagcaacggcacccacugguucgucacgcagcggaacuucuacgagccccagaucaucaccaccgacaacaccuucguguccggcaacugcgacguggucaucgggaucgugaacaacacgguguacgacccccugcagccggagcuggacagcuucaaggaggagcucgacaaguacuucaagaaccacaccucccccgacgucgaccugggcgacaucagcgggaucaacgccuccguggugaacauccagaaggagaucgaccgccugaacgaggucgccaagaaccucaacgagagccugaucgaccugcaggagcucggcaaguacgagcaguacaucaaguggcccugguacaucuggcugggcuucaucgccgggcugaucgccaucgugauggugaccaucaugcucugcugcaugaccuccugcugcagcugccugaagggcugcugcuccugcgggagcugcugcaaguucgacgaggacgacuccgagccgguccugaagggcgugaagcuccacuacacgugaggacuaguuauaagacugacuagcccgaugggccucccaacgggcccuccuccccuccuugcaccgagauuaauagaucuaaaaaaaaaaaaaaaaaaaaaaaaaaaaaaaaaaaaaaaaaaaaaaaaaaaaaaaaaaaaaaaaaaaaaaaaaaaaaaaaaaaaaaaaaaaaaaaaaaaa

SEQ ID NO: 25746 - RNA, 4011 nt, Artificial Sequence
  SARS-CoV-2/Wuhan/WIV05/2019__EPI_ISL_402128 spike protein mRNA gc (1-1273)(K986P_V987P_H69del_V70del_Y453F_D614G_I692V_M1229I)
aggagaaagcuuaccauguucguguuccugguccuccugccccuggugagcucccagugcgugaaccucaccacccgcacgcagcugccgcccgccuacaccaacagcuucacccggggcgucuacuaccccgacaagguguuccgcuccagcgugcugcacuccacccaggaccucuuccugcccuucuucagcaacgucacgugguuccacgccaucuccgggaccaacggcaccaagcgguucgacaacccggugcugcccuucaacgacgggguguacuucgcgagcaccgagaaguccaacaucauccgcggcuggaucuucgggacgacccucgacagcaagacccagucccugcugaucgucaacaacgccaccaacguggugaucaaggucugcgaguuccaguucugcaacgaccccuuccucggcguguacuaccacaagaacaacaagagcuggauggaguccgaguuccggguguacagcuccgccaacaacugcacguucgaguacgucagccagcccuuccugauggaccuggagggcaagcaggggaacuucaagaaccuccgcgaguucguguucaagaacaucgacggcuacuucaagaucuacuccaagcacaccccgaucaaccuggugcgggaccugccccagggguucagcgcccucgagccccuggucgaccugcccaucggcaucaacaucacccgcuuccagacccuccuggcccugcaccgguccuaccucacgccgggggacagcagcuccggcuggaccgcgggcgccgccgccuacuacgugggguaccugcagccccgcaccuuccugcucaaguacaacgagaacggcaccaucacggacgcgguggacugcgcccuggacccccugagcgagaccaagugcacccucaaguccuucaccgucgagaaggggaucuaccagacgagcaacuuccgggugcagcccaccgaguccaucgugcgcuucccgaacaucaccaaccugugccccuucggcgaggucuucaacgccacccgguucgccagcguguacgccuggaaccgcaagcggaucuccaacugcgucgcggacuacagcgugcuguacaacuccgccagcuucuccacguucaagugcuacggcgugagccccaccaagcucaacgaccugugcuucaccaacgucuacgccgacuccuucgugauccgcggggacgaggugcggcagaucgcccccggccagaccgggaagaucgccgacuacaacuacaagcugccggacgacuucacgggcugcgucaucgcguggaacagcaacaaccucgacuccaaggucgggggcaacuacaacuaccuguuccgccuguuccgcaagagcaaccucaagcccuucgagcgggacaucuccaccgagaucuaccaggccggcagcacccccugcaacgggguggagggcuucaacugcuacuucccccugcaguccuacggguuccagccgaccaacggcgugggguaccagcccuaccggguggugguccugagcuucgagcuccugcacgcccccgccacggugugcggccccaagaaguccaccaaccuggugaagaacaagugcgucaacuucaacuucaacggccucaccgggaccggcgugcugaccgagagcaacaagaaguuccugccguuccagcaguucgggcgcgacaucgccgacacgaccgacgcggugcgcgacccccagacccuggagauccucgacaucacccccugcagcuucggcggggucuccgugaucacgccgggcaccaacaccagcaaccagguggccguccuguaccagggcgugaacugcaccgaggugcccgucgccauccacgccgaccagcugacgcccaccuggcggguguacuccaccgggagcaacguguuccagacccgcgccggcugccucaucggggcggagcacgucaacaacuccuacgagugcgacauccccaucggcgccggcaucugcgccagcuaccagacgcagaccaacuccccgcggcgcgcccggagcguggcgucccagagcgugaucgccuacaccaugucccugggggccgagaacagcgucgccuacuccaacaacagcaucgccauccccaccaacuucacgaucuccgugaccaccgagauccugcccgugagcaugaccaagacgagcgucgacugcaccauguacaucugcggcgacuccaccgagugcagcaaccuccugcugcaguacggguccuucugcacccagcucaaccgcgcgcugacgggcaucgccguggagcaggacaagaacacccaggagguguucgcccaggucaagcagaucuacaagacgcccccgaucaaggacuucgggggcuucaacuucagccagauccugcccgaccccuccaagcccagcaagcgguccuucaucgaggaccuccuguucaacaaggugacccuggccgacgccggcuucaucaagcaguacggggacugccucggcgacaucgcggcccgcgaccugaucugcgcccagaaguucaacgggcugaccgugcucccgccccugcugaccgacgagaugaucgcccaguacaccagcgcccuccuggcgggcaccaucacguccggguggaccuucggcgccggcgccgcccugcagauccccuucgcgaugcagauggccuaccgguucaacgggaucggcgucacccagaacgugcucuacgagaaccagaagcugaucgccaaccaguucaacagcgccaucgggaagauccaggacucccugagcuccaccgccagcgcgcucggcaagcugcaggacguggucaaccagaacgcccaggcccugaacacgcucgugaagcagcuguccagcaacuucggggccaucuccagcgugcugaacgacauccucucccgccuggacccgcccgaggccgagguccagaucgaccggcugaucaccggccgccuccagagccugcagaccuacgugacccagcagcugauccgggcggccgagauccgcgccagcgccaaccucgccgcgaccaagauguccgagugcgugcugggccagagcaagcgggucgacuucugcgggaagggcuaccaccugauguccuucccccagagcgcgccccacggggugguguuccuccacgucacguacgugcccgcccaggagaagaacuucaccaccgccccggccaucugccacgacggcaaggcccacuucccccgcgagggggucuucguguccaacggcacccacugguucgugacgcagcggaacuucuacgagccccagaucaucaccaccgacaacaccuucgucagcggcaacugcgacguggugaucgggaucgucaacaacacgguguacgacccccugcagccggagcuggacuccuucaaggaggagcucgacaaguacuucaagaaccacaccagccccgacguggaccugggcgacaucuccgggaucaacgccagcgucgugaacauccagaaggagaucgaccgccugaacgagguggccaagaaccucaacgagucccugaucgaccugcaggagcucggcaaguacgagcaguacaucaaguggcccugguacaucuggcugggcuucaucgccgggcugaucgcgaucgucaucgugaccaucaugcucugcugcaugaccagcugcugcuccugccugaagggcugcugcagcugcggguccugcugcaaguucgacgaggacgacagcgagccggugcugaagggcgucaagcuccacuacacgugaggacuaguuauaagacugacuagcccgaugggccucccaacgggcccuccuccccuccuugcaccgagauuaauagaucuaaaaaaaaaaaaaaaaaaaaaaaaaaaaaaaaaaaaaaaaaaaaaaaaaaaaaaaaaaaaaaaaaaaaaaaaaaaaaaaaaaaaaaaaaaaaaaaaaaaa

SEQ ID NO: 25747 - RNA, 4008 nt, Artificial Sequence
  SARS-CoV-2/Wuhan/WIV05/2019__EPI_ISL_402128 spike protein mRNA gc (1-1273)(K986P_V987P_K986P_V987P_H69del_V70del_Y144del_N501Y_A570 D_D614G_P681H_T716I_S982A_D1118H)
aggagaaagcuuaccauguucguguuccugguccuccugccccuggugagcucccagugcgugaaccucaccacccgcacgcagcugccgcccgccuacaccaacagcuucacccggggcgucuacuaccccgacaagguguuccgcuccagcgugcugcacuccacccaggaccucuuccugcccuucuucagcaacgucacgugguuccacgccaucuccgggaccaacggcaccaagcgguucgacaacccggugcugcccuucaacgacgggguguacuucgcgagcaccgagaaguccaacaucauccgcggcuggaucuucgggacgacccucgacagcaagacccagucccugcugaucgucaacaacgccaccaacguggugaucaaggucugcgaguuccaguucugcaacgaccccuuccucggcguguaccacaagaacaacaagagcuggauggaguccgaguuccggguguacagcuccgccaacaacugcacguucgaguacgucagccagcccuuccugauggaccuggagggcaagcaggggaacuucaagaaccuccgcgaguucguguucaagaacaucgacggcuacuucaagaucuacuccaagcacaccccgaucaaccuggugcgggaccugccccagggguucagcgcccucgagccccuggucgaccugcccaucggcaucaacaucacccgcuuccagacccuccuggcccugcaccgguccuaccucacgccgggggacagcagcuccggcuggaccgcgggcgccgccgccuacuacgugggguaccugcagccccgcaccuuccugcucaaguacaacgagaacggcaccaucacggacgcgguggacugcgcccuggacccccugagcgagaccaagugcacccucaaguccuucaccgucgagaaggggaucuaccagacgagcaacuuccgggugcagcccaccgaguccaucgugcgcuucccgaacaucaccaaccugugccccuucggcgaggucuucaacgccacccgguucgccagcguguacgccuggaaccgcaagcggaucuccaacugcgucgcggacuacagcgugcuguacaacuccgccagcuucuccacguucaagugcuacggcgugagccccaccaagcucaacgaccugugcuucaccaacgucuacgccgacuccuucgugauccgcggggacgaggugcggcagaucgcccccggccagaccgggaagaucgccgacuacaacuacaagcugccggacgacuucacgggcugcgucaucgcguggaacagcaacaaccucgacuccaaggucgggggcaacuacaacuaccuguaccgccuguuccgcaagagcaaccucaagcccuucgagcgggacaucuccaccgagaucuaccaggccggcagcacccccugcaacgggguggagggcuucaacugcuacuucccccugcaguccuacggguuccagccgaccuacggcgugggguaccagcccuaccggguggugguccugagcuucgagcuccugcacgcccccgccacggugugcggccccaagaaguccaccaaccuggugaagaacaagugcgucaacuucaacuucaacggccucaccgggaccggcgugcugaccgagagcaacaagaaguuccugccguuccagcaguucgggcgcgacaucgacgacacgaccgacgccgugcgcgacccccagacccuggagauccucgacaucacccccugcagcuucggcggggucuccgugaucacgccgggcaccaacaccagcaaccagguggcgguccuguaccagggcgugaacugcaccgaggugcccgucgccauccacgccgaccagcugacgcccaccuggcggguguacuccaccgggagcaacguguuccagacccgcgccggcugccucaucggggccgagcacgucaacaacuccuacgagugcgacauccccaucggcgcgggcaucugcgccagcuaccagacgcagaccaacucccaccggcgcgcccggagcguggccucccagagcaucaucgcguacaccaugucccugggggccgagaacagcguggccuacuccaacaacagcaucgccaucccgaucaacuucaccaucuccgucacgaccgagauccugcccgugagcaugaccaagaccagcguggacugcacgauguacaucugcggcgacuccaccgagugcagcaaccuccugcugcaguacggguccuucugcacccagcucaaccgcgcccugaccggcaucgcggucgagcaggacaagaacacgcaggagguguucgcccaggugaagcagaucuacaagaccccgcccaucaaggacuucgggggcuucaacuucagccagauccugcccgaccccuccaagcccagcaagcgguccuucaucgaggaccuccuguucaacaaggucacccuggccgacgccggcuucaucaagcaguacggggacugccucggcgacaucgccgcgcgcgaccugaucugcgcccagaaguucaacgggcugaccgugcugcccccgcuccugacggacgagaugaucgcccaguacaccagcgcccuccuggccggcaccaucaccuccggguggacguucggcgcgggcgccgcccugcagauccccuucgccaugcagauggcguaccgguucaacgggaucggcgugacccagaacguccucuacgagaaccagaagcugaucgccaaccaguucaacagcgccaucgggaagauccaggacucccugagcuccaccgccagcgcccucggcaagcugcaggacguggugaaccagaacgcgcaggcccugaacacccucgucaagcagcuguccagcaacuucggggccaucuccagcgugcugaacgacauccucgcccgccuggacccgcccgaggccgaggugcagaucgaccggcugaucacgggccgccuccagucccugcagaccuacgucacccagcagcugauccgggcggccgagauccgcgccagcgccaaccucgccgcgaccaagaugagcgagugcgugcugggccaguccaagcggguggacuucugcgggaagggcuaccaccugaugagcuucccccaguccgcgccccacggggucguguuccuccacgugaccuacguccccgcccaggagaagaacuucacgaccgcccccgccaucugccacgacggcaaggcccacuucccgcgcgaggggguguucgucagcaacggcacccacugguucgugacccagcggaacuucuacgagccccagaucaucacgacccacaacaccuucguguccggcaacugcgacgucgugaucgggaucgugaacaacaccgucuacgacccccugcagcccgagcuggacagcuucaaggaggagcucgacaaguacuucaagaaccacacguccccggacguggaccugggcgacaucagcgggaucaacgccuccguggucaacauccagaaggagaucgaccgccugaacgagguggccaagaaccucaacgagagccugaucgaccugcaggagcucggcaaguacgagcaguacaucaaguggcccugguacaucuggcugggcuucaucgccgggcugaucgcgaucgugauggucaccaucaugcucugcugcaugaccuccugcugcagcugccugaagggcugcugcuccugcgggagcugcugcaaguucgacgaggacgacuccgagcccgugcugaagggcgugaagcuccacuacaccugaggacuaguuauaagacugacuagcccgaugggccucccaacgggcccuccuccccuccuugcaccgagauuaauagaucuaaaaaaaaaaaaaaaaaaaaaaaaaaaaaaaaaaaaaaaaaaaaaaaaaaaaaaaaaaaaaaaaaaaaaaaaaaaaaaaaaaaaaaaaaaaaaaaaaaaa

SEQ ID NO: 25748 - RNA, 4017 nt, Artificial Sequence
  SARS-CoV-2/Wuhan/WIV05/2019__EPI_ISL_402128 spike protein mRNA gc (1-1273)(K986P_V987P_K986P_V987P_K417N_E484K_N501Y_D614G)
aggagaaagcuuaccauguucguguuccugguccuccugccccuggugagcucccagugcgugaaccucaccacccgcacgcagcugccgcccgccuacaccaacagcuucacccggggcgucuacuaccccgacaagguguuccgcuccagcgugcugcacuccacccaggaccucuuccugcccuucuucagcaacgucacgugguuccacgccauccacguguccgggaccaacggcaccaagcgguucgacaacccggugcugcccuucaacgacggggucuacuucgcgagcaccgagaaguccaacaucauccgcggcuggaucuucgggacgacccucgacagcaagacccagucccugcugaucgugaacaacgccaccaacguggucaucaaggugugcgaguuccaguucugcaacgaccccuuccucggcguguacuaccacaagaacaacaagagcuggauggaguccgaguuccgggucuacagcuccgccaacaacugcacguucgaguacgugagccagcccuuccugauggaccuggagggcaagcaggggaacuucaagaaccuccgcgaguucguguucaagaacaucgacggcuacuucaagaucuacuccaagcacaccccgaucaaccugguccgggaccugccccagggguucagcgcccucgagccccugguggaccugcccaucggcaucaacaucacccgcuuccagacccuccuggcccugcaccgguccuaccucacgccgggggacagcagcuccggcuggaccgcgggcgccgccgccuacuacgugggguaccugcagccccgcaccuuccugcucaaguacaacgagaacggcaccaucacggacgcggucgacugcgcccuggacccccugagcgagaccaagugcacccucaaguccuucaccguggagaaggggaucuaccagacgagcaacuuccgggugcagcccaccgaguccaucguccgcuucccgaacaucaccaaccugugccccuucggcgagguguucaacgccacccgguucgccagcgucuacgccuggaaccgcaagcggaucuccaacugcguggcggacuacagcgugcuguacaacuccgccagcuucuccacguucaagugcuacggcgucagccccaccaagcucaacgaccugugcuucaccaacguguacgccgacuccuucgugauccgcggggacgagguccggcagaucgcccccggccagaccgggaacaucgccgacuacaacuacaagcugccggacgacuucacgggcugcgugaucgcguggaacagcaacaaccucgacuccaaggucgggggcaacuacaacuaccuguaccgccuguuccgcaagagcaaccucaagcccuucgagcgggacaucuccaccgagaucuaccaggccggcagcacccccugcaacggggugaagggcuucaacugcuacuucccccugcaguccuacggguuccagccgaccuacggcgugggguaccagcccuaccggguggucgugcugagcuucgagcuccugcacgcccccgccacggugugcggccccaagaaguccaccaaccuggucaagaacaagugcgugaacuucaacuucaacggccucaccgggaccggcgugcugaccgagagcaacaagaaguuccugccguuccagcaguucgggcgcgacaucgccgacacgaccgacgcgguccgcgacccccagacccuggagauccucgacaucacccccugcagcuucggcgggguguccgugaucacgccgggcaccaacaccagcaaccaggucgccgugcuguaccagggcgugaacugcaccgagguccccguggccauccacgccgaccagcugacgcccaccuggcggguguacuccaccgggagcaacgucuuccagacccgcgccggcugccucaucggggcggagcacgugaacaacuccuacgagugcgacauccccaucggcgccggcaucugcgccagcuaccagacgcagaccaacuccccgcggcgcgcccggagcguggcgucccagagcaucaucgccuacaccaugucccugggggccgagaacagcgucgccuacuccaacaacagcaucgccauccccaccaacuucacgaucuccgugaccaccgagauccugcccgugagcaugaccaagacgagcgucgacugcaccauguacaucugcggcgacuccaccgagugcagcaaccuccugcugcaguacggguccuucugcacccagcucaaccgcgcgcugacgggcaucgccguggagcaggacaagaacacccaggagguguucgcccaggucaagcagaucuacaagacgcccccgaucaaggacuucgggggcuucaacuucagccagauccugcccgaccccuccaagcccagcaagcgguccuucaucgaggaccuccuguucaacaaggugacccuggccgacgccggcuucaucaagcaguacggggacugccucggcgacaucgcggcccgcgaccugaucugcgcccagaaguucaacgggcugaccgugcucccgccccugcugaccgacgagaugaucgcccaguacaccagcgcccuccuggcgggcaccaucacguccggguggaccuucggcgccggcgccgcccugcagauccccuucgcgaugcagauggccuaccgguucaacgggaucggcgucacccagaacgugcucuacgagaaccagaagcugaucgccaaccaguucaacagcgccaucgggaagauccaggacucccugagcuccaccgccagcgcgcucggcaagcugcaggacguggucaaccagaacgcccaggcccugaacacgcucgugaagcagcuguccagcaacuucggggccaucuccagcgugcugaacgacauccucucccgccuggacccgcccgaggccgagguccagaucgaccggcugaucaccggccgccuccagagccugcagaccuacgugacccagcagcugauccgggcggccgagauccgcgccagcgccaaccucgccgcgaccaagauguccgagugcgugcugggccagagcaagcgggucgacuucugcgggaagggcuaccaccugauguccuucccccagagcgcgccccacggggugguguuccuccacgucacguacgugcccgcccaggagaagaacuucaccaccgccccggccaucugccacgacggcaaggcccacuucccccgcgagggggucuucguguccaacggcacccacugguucgugacgcagcggaacuucuacgagccccagaucaucaccaccgacaacaccuucgucagcggcaacugcgacguggugaucgggaucgucaacaacacgguguacgacccccugcagccggagcuggacuccuucaaggaggagcucgacaaguacuucaagaaccacaccagccccgacguggaccugggcgacaucuccgggaucaacgccagcgucgugaacauccagaaggagaucgaccgccugaacgagguggccaagaaccucaacgagucccugaucgaccugcaggagcucggcaaguacgagcaguacaucaaguggcccugguacaucuggcugggcuucaucgccgggcugaucgcgaucgucauggugaccaucaugcucugcugcaugaccagcugcugcuccugccugaagggcugcugcagcugcggguccugcugcaaguucgacgaggacgacagcgagccggugcugaagggcgucaagcuccacuacacgugaggacuaguuauaagacugacuagcccgaugggccucccaacgggcccuccuccccuccuugcaccgagauuaauagaucuaaaaaaaaaaaaaaaaaaaaaaaaaaaaaaaaaaaaaaaaaaaaaaaaaaaaaaaaaaaaaaaaaaaaaaaaaaaaaaaaaaaaaaaaaaaaaaaaaaaa

SEQ ID NO: 25749 - RNA, 4008 nt, Artificial Sequence
  SARS-CoV-2/Wuhan/WIV05/2019__EPI_ISL_402128 spike protein mRNA gc (1-1273)(K986P_V987P_K986P_V987P_L18F_D80A_D215G_L242del_A243del_ L244del_R246I_K417N_E484K_N501Y_D614G_A701V)
aggagaaagcuuaccauguucguguuccugguccuccugccccuggugagcucccagugcgugaacuucaccacccgcacgcagcucccgcccgccuacaccaacagcuucacccggggcgucuacuaccccgacaagguguuccgcuccagcgugcugcacuccacccaggaccuguuccuccccuucuucagcaacgucacgugguuccacgccauccacguguccgggaccaacggcaccaagcgguucgcgaacccggugcugcccuucaacgacggggucuacuucgccagcaccgagaaguccaacaucauccgcggcuggaucuucgggacgacccuggacagcaagacccagucccuccugaucgugaacaacgccaccaacguggucaucaaggugugcgaguuccaguucugcaacgaccccuuccugggcguguacuaccacaagaacaacaagagcuggauggaguccgaguuccgggucuacagcuccgccaacaacugcacguucgaguacgugagccagcccuuccucauggaccuggagggcaagcaggggaacuucaagaaccugcgcgaguucguguucaagaacaucgacggcuacuucaagaucuacuccaagcacaccccgaucaaccucguccgggggcugccccagggcuucagcgcccuggagccccucguggaccugcccaucgggaucaacaucacccgcuuccagacccugcacaucuccuaccucacgccgggcgacagcagcuccggcuggaccgcgggggccgccgccuacuacgugggcuaccugcagccccggaccuuccugcucaaguacaacgagaacgggaccaucacggacgcggucgacugcgcccuggacccccugagcgagaccaagugcacccucaaguccuucaccguggagaagggcaucuaccagacgagcaacuuccgcgugcagcccaccgaguccaucguccgguucccgaacaucaccaaccugugccccuucggcgagguguucaacgccacccgcuucgccagcgucuacgccuggaaccggaagcgcaucuccaacugcguggcggacuacagcgugcuguacaacuccgccagcuucuccacguucaagugcuacggggucagccccaccaagcucaacgaccugugcuucaccaacguguacgccgacuccuucgugauccggggcgacgagguccgccagaucgcccccgggcagaccggcaacaucgccgacuacaacuacaagcugccggacgacuucacggggugcgugaucgcguggaacagcaacaaccucgacuccaaggugggcggcaacuacaacuaccuguaccggcuguuccgcaagagcaaccucaagcccuucgagcgggacaucuccaccgagaucuaccaggccgggagcacccccugcaacggcgucaagggguucaacugcuacuucccccugcaguccuacggcuuccagccgaccuacggggugggcuaccagcccuaccgcguggucgugcugagcuucgagcuccugcacgcccccgccacggugugcggccccaagaaguccaccaaccuggucaagaacaagugcgugaacuucaacuucaacgggcucaccggcaccggggugcugaccgagagcaacaagaaguuccugccguuccagcaguucggccgggacaucgccgacacgaccgacgcgguccgcgacccccagacccucgagauccuggacaucacccccugcagcuucgggggcguguccgugaucacgccgggcaccaacaccagcaaccaggucgccgugcuguaccagggggugaacugcaccgagguccccguggccauccacgccgaccagcugacgcccaccuggcgcguguacuccaccggcagcaacgucuuccagacccgggccgggugccucaucggcgcggagcacgugaacaacuccuacgagugcgacauccccaucggcgccgggaucugcgccagcuaccagacgcagaccaacuccccgcgccgggcccgcagcguggcgucccagagcaucaucgccuacaccaugucccugggcgucgagaacagcguggccuacuccaacaacagcaucgccauccccaccaacuucacgaucuccgugaccaccgagauccugcccgucagcaugaccaagacgagcguggacugcaccauguacaucugcggggacuccaccgagugcagcaaccuccugcugcaguacggcuccuucugcacccagcucaaccgggcccugacggggaucgcgguggagcaggacaagaacacccaggaggucuucgcccaggugaagcagaucuacaagacgcccccgaucaaggacuucggcggcuucaacuucagccagauccugcccgaccccuccaagcccagcaagcgcuccuucaucgaggaccuccuguucaacaaggugacccuggccgacgccggguucaucaagcaguacggcgacugccucggggacaucgccgcgcgggaccugaucugcgcccagaaguucaacggccugaccguccucccgccccugcugaccgacgagaugaucgcccaguacaccagcgcccuccuggccgggaccaucacguccggcuggaccuucggcgcgggggccgcccugcagauccccuucgccaugcagauggcguaccgcuucaacggcaucggggugacccagaacgugcucuacgagaaccagaagcugaucgccaaccaguucaacagcgccaucggcaagauccaggacucccugagcuccaccgccagcgcccucgggaagcugcaggacgucgugaaccagaacgcgcaggcccugaacacgcucgugaagcagcuguccagcaacuucggcgccaucuccagcguccugaacgacauccucucccggcuggacccgcccgaggccgaggugcagaucgaccgccugaucaccggccggcuccagagccugcagaccuacgugacccagcagcugauccgcgccgcggagauccgggccagcgccaaccucgccgccaccaagauguccgagugcguccuggggcagagcaagcgcguggacuucugcggcaagggguaccaccugauguccuucccccagagcgcgccccacggcguggucuuccuccacgugacguacguccccgcccaggagaagaacuucaccaccgccccggccaucugccacgacgggaaggcgcacuucccccgggagggcguguucguguccaacggcacccacugguucgucacgcagcgcaacuucuacgagccccagaucaucaccaccgacaacaccuucgugagcgggaacugcgacguggucaucggcaucgugaacaacacgguguacgacccccugcagccggagcuggacuccuucaaggaggagcucgacaaguacuucaagaaccacaccagccccgacgucgaccugggggacaucuccggcaucaacgccagcguggugaacauccagaaggagaucgaccggcugaacgaggucgccaagaaccucaacgagucccugaucgaccugcaggagcucggcaaguacgagcaguacaucaaguggcccugguacaucuggcugggguucaucgccggccugaucgccaucgugauggugaccaucaugcucugcugcaugaccagcugcugcuccugccugaaggggugcugcagcugcggcuccugcugcaaguucgacgaggacgacagcgagccgguccugaagggggugaagcuccacuacacgugaggacuaguuauaagacugacuagcccgaugggccucccaacgggcccuccuccccuccuugcaccgagauuaauagaucuaaaaaaaaaaaaaaaaaaaaaaaaaaaaaaaaaaaaaaaaaaaaaaaaaaaaaaaaaaaaaaaaaaaaaaaaaaaaaaaaaaaaaaaaaaaaaaaaaaaa

SEQ ID NO: 25750 - RNA, 4017 nt, Artificial Sequence
  SARS-CoV-2/Wuhan/WIV05/2019__EPI_ISL_402128 spike protein mRNA gc (1-1273)(K986P_V987P_K986P_V987P_E484K_D614G)
aggagaaagcuuaccauguucguguuccugguccuccugccccuggugagcucccagugcgugaaccucaccacccgcacgcagcugccgcccgccuacaccaacagcuucacccggggcgucuacuaccccgacaagguguuccgcuccagcgugcugcacuccacccaggaccucuuccugcccuucuucagcaacgucacgugguuccacgccauccacguguccgggaccaacggcaccaagcgguucgacaacccggugcugcccuucaacgacggggucuacuucgcgagcaccgagaaguccaacaucauccgcggcuggaucuucgggacgacccucgacagcaagacccagucccugcugaucgugaacaacgccaccaacguggucaucaaggugugcgaguuccaguucugcaacgaccccuuccucggcguguacuaccacaagaacaacaagagcuggauggaguccgaguuccgggucuacagcuccgccaacaacugcacguucgaguacgugagccagcccuuccugauggaccuggagggcaagcaggggaacuucaagaaccuccgcgaguucguguucaagaacaucgacggcuacuucaagaucuacuccaagcacaccccgaucaaccugguccgggaccugccccagggguucagcgcccucgagccccugguggaccugcccaucggcaucaacaucacccgcuuccagacccuccuggcccugcaccgguccuaccucacgccgggggacagcagcuccggcuggaccgcgggcgccgccgccuacuacgugggguaccugcagccccgcaccuuccugcucaaguacaacgagaacggcaccaucacggacgcggucgacugcgcccuggacccccugagcgagaccaagugcacccucaaguccuucaccguggagaaggggaucuaccagacgagcaacuuccgggugcagcccaccgaguccaucguccgcuucccgaacaucaccaaccugugccccuucggcgagguguucaacgccacccgguucgccagcgucuacgccuggaaccgcaagcggaucuccaacugcguggcggacuacagcgugcuguacaacuccgccagcuucuccacguucaagugcuacggcgucagccccaccaagcucaacgaccugugcuucaccaacguguacgccgacuccuucgugauccgcggggacgagguccggcagaucgcccccggccagaccgggaagaucgccgacuacaacuacaagcugccggacgacuucacgggcugcgugaucgcguggaacagcaacaaccucgacuccaaggucgggggcaacuacaacuaccuguaccgccuguuccgcaagagcaaccucaagcccuucgagcgggacaucuccaccgagaucuaccaggccggcagcacccccugcaacggggugaagggcuucaacugcuacuucccccugcaguccuacggguuccagccgaccaacggcgugggguaccagcccuaccggguggucgugcugagcuucgagcuccugcacgcccccgccacggugugcggccccaagaaguccaccaaccuggucaagaacaagugcgugaacuucaacuucaacggccucaccgggaccggcgugcugaccgagagcaacaagaaguuccugccguuccagcaguucgggcgcgacaucgccgacacgaccgacgcgguccgcgacccccagacccuggagauccucgacaucacccccugcagcuucggcgggguguccgugaucacgccgggcaccaacaccagcaaccaggucgccgugcuguaccagggcgugaacugcaccgagguccccguggccauccacgccgaccagcugacgcccaccuggcggguguacuccaccgggagcaacgucuuccagacccgcgccggcugccucaucggggcggagcacgugaacaacuccuacgagugcgacauccccaucggcgccggcaucugcgccagcuaccagacgcagaccaacuccccgcggcgcgcccggagcguggcgucccagagcaucaucgccuacaccaugucccugggggccgagaacagcgucgccuacuccaacaacagcaucgccauccccaccaacuucacgaucuccgugaccaccgagauccugcccgugagcaugaccaagacgagcgucgacugcaccauguacaucugcggcgacuccaccgagugcagcaaccuccugcugcaguacggguccuucugcacccagcucaaccgcgcgcugacgggcaucgccguggagcaggacaagaacacccaggagguguucgcccaggucaagcagaucuacaagacgcccccgaucaaggacuucgggggcuucaacuucagccagauccugcccgaccccuccaagcccagcaagcgguccuucaucgaggaccuccuguucaacaaggugacccuggccgacgccggcuucaucaagcaguacggggacugccucggcgacaucgcggcccgcgaccugaucugcgcccagaaguucaacgggcugaccgugcucccgccccugcugaccgacgagaugaucgcccaguacaccagcgcccuccuggcgggcaccaucacguccggguggaccuucggcgccggcgccgcccugcagauccccuucgcgaugcagauggccuaccgguucaacgggaucggcgucacccagaacgugcucuacgagaaccagaagcugaucgccaaccaguucaacagcgccaucgggaagauccaggacucccugagcuccaccgccagcgcgcucggcaagcugcaggacguggucaaccagaacgcccaggcccugaacacgcucgugaagcagcuguccagcaacuucggggccaucuccagcgugcugaacgacauccucucccgccuggacccgcccgaggccgagguccagaucgaccggcugaucaccggccgccuccagagccugcagaccuacgugacccagcagcugauccgggcggccgagauccgcgccagcgccaaccucgccgcgaccaagauguccgagugcgugcugggccagagcaagcgggucgacuucugcgggaagggcuaccaccugauguccuucccccagagcgcgccccacggggugguguuccuccacgucacguacgugcccgcccaggagaagaacuucaccaccgccccggccaucugccacgacggcaaggcccacuucccccgcgagggggucuucguguccaacggcacccacugguucgugacgcagcggaacuucuacgagccccagaucaucaccaccgacaacaccuucgucagcggcaacugcgacguggugaucgggaucgucaacaacacgguguacgacccccugcagccggagcuggacuccuucaaggaggagcucgacaaguacuucaagaaccacaccagccccgacguggaccugggcgacaucuccgggaucaacgccagcgucgugaacauccagaaggagaucgaccgccugaacgagguggccaagaaccucaacgagucccugaucgaccugcaggagcucggcaaguacgagcaguacaucaaguggcccugguacaucuggcugggcuucaucgccgggcugaucgcgaucgucauggugaccaucaugcucugcugcaugaccagcugcugcuccugccugaagggcugcugcagcugcggguccugcugcaaguucgacgaggacgacagcgagccggugcugaagggcgucaagcuccacuacacgugaggacuaguuauaagacugacuagcccgaugggccucccaacgggcccuccuccccuccuugcaccgagauuaauagaucuaaaaaaaaaaaaaaaaaaaaaaaaaaaaaaaaaaaaaaaaaaaaaaaaaaaaaaaaaaaaaaaaaaaaaaaaaaaaaaaaaaaaaaaaaaaaaaaaaaaa

SEQ ID NO: 25751 - RNA, 4017 nt, Artificial Sequence
  SARS-CoV-2/Wuhan/WIV05/2019__EPI_ISL_402128 spike protein mRNA gc (1-1273)(K986P_V987P_K986P_V987P_L18F_T20N_P26S_D138Y_R190S_K417T _E484K_N501Y_D614G_H655Y_T1027I)
aggagaaagcuuaccauguucguguuccugguccuccugccccuggugagcucccagugcgugaacuucaccaaccgcacccagcucccgagcgccuacacgaacuccuucacccggggcgucuacuaccccgacaagguguuccgcagcuccgugcugcacagcacccaggaccuguuccuccccuucuucuccaacgucaccugguuccacgccauccacgugagcgggacgaacggcaccaagcgguucgacaaccccgugcugccguucaacgacggggucuacuucgcguccaccgagaaguccaacaucauccgcggcuggaucuucgggaccacgcuggacuccaagacccagagccuccugaucgugaacaacgccaccaacguggucaucaaggugugcgaguuccaguucugcaacuaccccuuccugggcguguacuaccacaagaacaacaaguccuggauggagagcgaguuccgggucuacuccagcgccaacaacugcaccuucgaguacgugucccagcccuuccucauggaccuggagggcaagcaggggaacuucaagaaccugagcgaguucguguucaagaacaucgacggcuacuucaagaucuacuccaagcacacgcccaucaaccucguccgcgaccugccgcagggguucagcgcccuggagccccucguggaccugcccaucggcaucaacaucacccgguuccagacccugcucgcccugcaccgcagcuaccugacccccggggacuccagcuccggcuggacggcgggcgccgccgccuacuacgugggguaccuccagccgcggaccuuccugcugaaguacaacgagaacggcaccaucaccgacgcggucgacugcgcccucgacccccugagcgagacgaagugcacccugaaguccuucaccguggagaaggggaucuaccagaccagcaacuuccgcgugcagcccacggaguccaucguccgguuccccaacaucaccaaccucugcccguucggcgagguguucaacgccacccgcuucgccagcgucuacgccuggaaccggaagcgcaucuccaacugcguggcggacuacagcgugcuguacaacuccgccagcuucuccaccuucaagugcuacggcgucagccccacgaagcugaacgaccucugcuucaccaacguguacgccgacuccuucgugauccgcggggacgagguccggcagaucgcccccggccagaccgggaccaucgccgacuacaacuacaagcugcccgacgacuucacgggcugcgugaucgcguggaacagcaacaaccuggacuccaaggucgggggcaacuacaacuaccucuaccggcuguuccgcaagagcaaccugaagccguucgagcgggacaucuccaccgagaucuaccaggccggcagcacccccugcaacggggugaagggcuucaacugcuacuucccccuccagagcuacggguuccagcccaccuacggcgugggguaccagccguaccgcguggucgugcuguccuucgagcugcuccacgcccccgccacggugugcggccccaagaaguccaccaaccuggucaagaacaagugcgugaacuucaacuucaacggccugaccgggaccggcgugcucaccgagagcaacaagaaguuccugcccuuccagcaguucgggcgggacaucgccgacacgaccgacgcgguccgcgacccgcagacccuggagauccuggacaucacccccugcagcuucggcgggguguccgugaucacgcccggcaccaacaccagcaaccaggucgccgugcucuaccagggcgugaacugcaccgaggucccgguggccauccacgccgaccagcugacgcccaccuggcgcguguacuccaccgggagcaacgucuuccagacccgggccggcugccugaucggggcggaguacgugaacaacuccuacgagugcgacauccccaucggcgccggcaucugcgccagcuaccagacgcagaccaacagcccccgccgggcccgcagcguggcgucccagagcaucaucgccuacaccaugucccucggggccgagaacagcgucgccuacuccaacaacagcaucgccaucccgaccaacuucacgaucagcgugaccaccgagauccugcccguguccaugaccaagacgagcgucgacugcaccauguacaucugcggcgacuccaccgagugcagcaaccugcuccugcaguacggguccuucugcacccagcugaaccgggcgcucacgggcaucgccguggagcaggacaagaacacccaggagguguucgcccaggucaagcagaucuacaagaccccgcccaucaaggacuucgggggcuucaacuucagccagauccugcccgaccccuccaagcccagcaagcgcuccuucaucgaggaccuccuguucaacaaggugacccuggccgacgccggcuucaucaagcaguacggggacugccugggcgacaucgcggcccgggaccucaucugcgcccagaaguucaacgggcugacggugcugcccccgcuccugaccgacgagaugaucgcccaguacaccagcgcccugcucgcgggcaccaucacguccggguggaccuucggcgccggcgccgcccugcagauccccuucgcgaugcagauggccuaccgcuucaacgggaucggcgucacccagaacgugcuguacgagaaccagaagcucaucgccaaccaguucaacagcgccaucgggaagauccaggacucccugagcuccaccgccagcgcgcugggcaagcuccaggacguggucaaccagaacgcccaggcccugaacacgcuggugaagcagcucuccagcaacuucggggccaucuccagcgugcugaacgacauccugagccggcucgacccgcccgaggccgagguccagaucgaccgccugaucaccggccggcugcagucccuccagaccuacgugacccagcagcugauccgcgcggccgagauccgggccagcgccaaccuggccgcgaucaagauguccgagugcgugcucggccagagcaagcgcgucgacuucugcgggaagggcuaccaccugauguccuucccccagagcgcgccccacggggugguguuccugcacgucaccuacgugcccgcccaggagaagaacuucacgaccgcccccgccaucugccacgacggcaaggcccacuucccgcgggagggggucuucguguccaacggcacccacugguucgugacccagcgcaacuucuacgagccccagaucaucacgaccgacaacaccuucgucagcggcaacugcgacguggugaucgggaucgucaacaacaccguguacgacccccuccagcccgagcuggacuccuucaaggaggagcuggacaaguacuucaagaaccacacgagcccggacguggaccucggcgacaucuccgggaucaacgccagcgucgugaacauccagaaggagaucgaccggcugaacgagguggccaagaaccugaacgagucccucaucgaccugcaggagcugggcaaguacgagcaguacaucaaguggcccugguacaucuggcucggcuucaucgccgggcugaucgcgaucgucauggugaccaucaugcugugcugcaugaccagcugcugcuccugccucaagggcugcugcagcugcggguccugcugcaaguucgacgaggacgacagcgagcccgugcugaagggcgucaagcugcacuacaccugaggacuaguuauaagacugacuagcccgaugggccucccaacgggcccuccuccccuccuugcaccgagauuaauagaucuaaaaaaaaaaaaaaaaaaaaaaaaaaaaaaaaaaaaaaaaaaaaaaaaaaaaaaaaaaaaaaaaaaaaaaaaaaaaaaaaaaaaaaaaaaaaaaaaaaaa

SEQ ID NO: 25752 - RNA, 4017 nt, Artificial Sequence
  SARS-CoV-2/Wuhan/WIV05/2019__EPI_ISL_402128 spike protein mRNA gc (1-1273)(K986P_V987P_K986P_V987P_S13I_W152C_L452R_D614G)
aggagaaagcuuaccauguucguguuccugguccuccugccccuggugagcauccagugcgugaaccucaccacccgcacgcagcugccgcccgccuacaccaacuccuucacccggggcgucuacuaccccgacaagguguuccgcagcuccgugcugcacagcacccaggaccucuuccugcccuucuucuccaacgucacgugguuccacgccauccacgugagcgggaccaacggcaccaagcgguucgacaacccggugcugcccuucaacgacggggucuacuucgcguccaccgagaaguccaacaucauccgcggcuggaucuucgggacgacccucgacagcaagacccagagccugcugaucgugaacaacgccaccaacguggucaucaaggugugcgaguuccaguucugcaacgaccccuuccucggcguguacuaccacaagaacaacaaguccugcauggagagcgaguuccgggucuacuccagcgccaacaacugcacguucgaguacgugucccagcccuuccugauggaccuggagggcaagcaggggaacuucaagaaccuccgcgaguucguguucaagaacaucgacggcuacuucaagaucuacagcaagcacaccccgaucaaccugguccgggaccugccccagggguucuccgcccucgagccccugguggaccugcccaucggcaucaacaucacccgcuuccagacccuccuggcccugcaccggagcuaccucacgccgggggacuccagcagcggcuggaccgcgggcgccgccgccuacuacgugggguaccugcagccccgcaccuuccugcucaaguacaacgagaacggcaccaucacggacgcggucgacugcgcccuggacccccuguccgagaccaagugcacccucaagagcuucaccguggagaaggggaucuaccagacguccaacuuccgggugcagcccaccgagagcaucguccgcuucccgaacaucaccaaccugugccccuucggcgagguguucaacgccacccgguucgccuccgucuacgccuggaaccgcaagcggaucagcaacugcguggcggacuacuccgugcuguacaacagcgccuccuucagcacguucaagugcuacggcgucucccccaccaagcucaacgaccugugcuucaccaacguguacgccgacagcuucgugauccgcggggacgagguccggcagaucgcccccggccagaccgggaagaucgccgacuacaacuacaagcugccggacgacuucacgggcugcgugaucgcguggaacuccaacaaccucgacagcaaggucgggggcaacuacaacuaccgcuaccggcuguuccgcaaguccaaccugaagcccuucgagcgggacaucagcaccgagaucuaccaggccggcuccacccccugcaacgggguggagggcuucaacugcuacuucccccuccagagcuacggguuccagccgaccaacggcgugggguaccagcccuaccgcguggucgugcuguccuucgagcugcuccacgcccccgccacggugugcggccccaagaaguccaccaaccuggucaagaacaagugcgugaacuucaacuucaacggccugaccgggaccggcgugcucaccgagagcaacaagaaguuccugccguuccagcaguucgggcgcgacaucgccgacacgaccgacgcgguccgggacccccagacccuggagauccuggacaucacccccugcagcuucggcggggugagcgugaucacgccgggcaccaacaccuccaaccaggucgccgugcucuaccagggcgugaacugcaccgagguccccguggccauccacgccgaccagcugacgcccaccuggcgcguguacagcaccggguccaacgucuuccagacccgggccggcugccugaucggggcggagcacgugaacaacagcuacgagugcgacauccccaucggcgccggcaucugcgccuccuaccagacgcagaccaacagcccgcgccgggcccgcuccguggcgagccaguccaucaucgccuacaccaugagccucggggccgagaacuccgucgccuacagcaacaacuccaucgccauccccaccaacuucacgaucagcgugaccaccgagauccugcccguguccaugaccaagacgagcgucgacugcaccauguacaucugcggcgacagcaccgagugcuccaaccugcuccugcaguacgggagcuucugcacccagcugaaccgggcgcucacgggcaucgccguggagcaggacaagaacacccaggagguguucgcccaggucaagcagaucuacaagacgcccccgaucaaggacuucgggggcuucaacuucucccagauccugcccgaccccagcaagcccuccaagcgcagcuucaucgaggaccuccuguucaacaaggugacccuggccgacgccggcuucaucaagcaguacggggacugccugggcgacaucgcggcccgggaccucaucugcgcccagaaguucaacgggcugaccgugcugccgccccuccugaccgacgagaugaucgcccaguacaccuccgcccugcucgcgggcaccaucacgagcggguggaccuucggcgccggcgccgcccugcagauccccuucgcgaugcagauggccuaccgcuucaacgggaucggcgucacccagaacgugcuguacgagaaccagaagcucaucgccaaccaguucaacuccgccaucgggaagauccaggacagccuguccagcaccgccuccgcgcugggcaagcuccaggacguggucaaccagaacgcccaggcccugaacacgcuggugaagcagcucagcuccaacuucggggccaucagcuccgugcugaacgacauccugagccggcucgacccgcccgaggccgagguccagaucgaccgccugaucaccggccggcugcagucccuccagaccuacgugacccagcagcugauccgcgcggccgagauccgggccagcgccaaccuggccgcgaccaagaugagcgagugcgugcucggccaguccaagcgcgucgacuucugcgggaagggcuaccaccugaugagcuucccccaguccgcgccccacggggugguguuccugcacgucacguacgugcccgcccaggagaagaacuucaccaccgccccggccaucugccacgacggcaaggcccacuucccccgggagggggucuucgugagcaacggcacccacugguucgugacgcagcgcaacuucuacgagccccagaucaucaccaccgacaacaccuucgucuccggcaacugcgacguggugaucgggaucgucaacaacacgguguacgacccccuccagccggagcuggacagcuucaaggaggagcuggacaaguacuucaagaaccacaccucccccgacguggaccucggcgacaucagcgggaucaacgccuccgucgugaacauccagaaggagaucgaccggcugaacgagguggccaagaaccugaacgagagccucaucgaccugcaggagcugggcaaguacgagcaguacaucaaguggcccugguacaucuggcucggcuucaucgccgggcugaucgcgaucgucauggugaccaucaugcugugcugcaugaccuccugcugcagcugccucaagggcugcugcuccugcgggagcugcugcaaguucgacgaggacgacuccgagccggugcugaagggcgucaagcugcacuacacgugaggacuaguuauaagacugacuagcccgaugggccucccaacgggcccuccuccccuccuugcaccgagauuaauagaucuaaaaaaaaaaaaaaaaaaaaaaaaaaaaaaaaaaaaaaaaaaaaaaaaaaaaaaaaaaaaaaaaaaaaaaaaaaaaaaaaaaaaaaaaaaaaaaaaaaaa

SEQ ID NO: 25753 - RNA, 4017 nt, Artificial Sequence
  SARS-CoV-2/Wuhan/WIV05/2019__EPI_ISL_402128 spike protein mRNA gc (1-1273)(K986P_V987P)
aggagaaagcuuaccauguucguguuccuggugcugcugccccuggugagcagccagugcgugaaccugaccacccggacccagcugccaccagccuacaccaacagcuucacccggggcgucuacuaccccgacaagguguuccggagcagcguccugcacagcacccaggaccuguuccugcccuucuucagcaacgugaccugguuccacgccauccacgugagcggcaccaacggcaccaagcgguucgacaaccccgugcugcccuucaacgacggcguguacuucgccagcaccgagaagagcaacaucauccggggcuggaucuucggcaccacccuggacagcaagacccagagccugcugaucgugaauaacgccaccaacguggugaucaaggugugcgaguuccaguucugcaacgaccccuuccugggcguguacuaccacaagaacaacaagagcuggauggagagcgaguuccggguguacagcagcgccaacaacugcaccuucgaguacgugagccagcccuuccugauggaccuggagggcaagcagggcaacuucaagaaccugcgggaguucguguucaagaacaucgacggcuacuucaagaucuacagcaagcacaccccaaucaaccuggugcgggaucugccccagggcuucucagcccuggagccccugguggaccugcccaucggcaucaacaucacccgguuccagacccugcuggcccugcaccggagcuaccugaccccaggcgacagcagcagcggguggacagcaggcgcggcugcuuacuacgugggcuaccugcagccccggaccuuccugcugaaguacaacgagaacggcaccaucaccgacgccguggacugcgcccuggacccucugagcgagaccaagugcacccugaagagcuucaccguggagaagggcaucuaccagaccagcaacuuccgggugcagcccaccgagagcaucgugcgguuccccaacaucaccaaccugugccccuucggcgagguguucaacgccacccgguucgccagcguguacgccuggaaccggaagcggaucagcaacugcguggccgacuacagcgugcuguacaacagcgccagcuucagcaccuucaagugcuacggcgugagccccaccaagcugaacgaccugugcuucaccaacguguacgccgacagcuucgugauccguggcgacgaggugcggcagaucgcacccggccagacaggcaagaucgccgacuacaacuacaagcugcccgacgacuucaccggcugcgugaucgccuggaacagcaacaaccucgacagcaaggugggcggcaacuacaacuaccuguaccggcuguuccggaagagcaaccugaagcccuucgagcgggacaucagcaccgagaucuaccaagccggcuccaccccuugcaacggcguggagggcuucaacugcuacuucccucugcagagcuacggcuuccagcccaccaacggcgugggcuaccagcccuaccgggugguggugcugagcuucgagcugcugcacgccccagccaccguguguggccccaagaagagcaccaaccuggugaagaacaagugcgugaacuucaacuucaacggccuuaccggcaccggcgugcugaccgagagcaacaagaaauuccugcccuuucagcaguucggccgggacaucgccgacaccaccgacgcugugcgggauccccagacccuggagauccuggacaucaccccuugcagcuucggcggcgugagcgugaucaccccaggcaccaacaccagcaaccagguggccgugcuguaccaggacgugaacugcaccgaggugcccguggccauccacgccgaccagcugacacccaccuggcgggucuacagcaccggcagcaacguguuccagacccgggccgguugccugaucggcgccgagcacgugaacaacagcuacgagugcgacauccccaucggcgccggcaucugugccagcuaccagacccagaccaauucaccccggagggcaaggagcguggccagccagagcaucaucgccuacaccaugagccugggcgccgagaacagcguggccuacagcaacaacagcaucgccauccccaccaacuucaccaucagcgugaccaccgagauucugcccgugagcaugaccaagaccagcguggacugcaccauguacaucugcggcgacagcaccgagugcagcaaccugcugcugcaguacggcagcuucugcacccagcugaaccgggcccugaccggcaucgccguggagcaggacaagaacacccaggagguguucgcccaggugaagcagaucuacaagaccccucccaucaaggacuucggcggcuucaacuucagccagauccugcccgaccccagcaagcccagcaagcggagcuucaucgaggaccugcuguucaacaaggugacccuagccgacgccggcuucaucaagcaguacggcgacugccucggcgacauagccgcccgggaccugaucugcgcccagaaguucaacggccugaccgugcugccuccccugcugaccgacgagaugaucgcccaguacaccagcgcccuguuagccggaaccaucaccagcggcuggacuuucggcgcuggagccgcucugcagauccccuucgccaugcagauggccuaccgguucaacggcaucggcgugacccagaacgugcuguacgagaaccagaagcugaucgccaaccaguucaacagcgccaucggcaagauccaggacagccugagcagcaccgcuagcgcccugggcaagcugcaggacguggugaaccagaacgcccaggcccugaacacccuggugaagcagcugagcagcaacuucggcgccaucagcagcgugcugaacgacauccugagccggcuggacccucccgaggccgaggugcagaucgaccggcugaucacuggccggcugcagagccugcagaccuacgugacccagcagcugauccgggccgccgagauucgggccagcgccaaccuggccgccaccaagaugagcgagugcgugcugggccagagcaagcggguggacuucugcggcaagggcuaccaccugaugagcuuuccccagagcgcaccccacggagugguguuccugcacgugaccuacgugcccgcccaggagaagaacuucaccaccgccccagccaucugccacgacggcaaggcccacuuuccccgggagggcguguucgugagcaacggcacccacugguucgugacccagcggaacuucuacgagccccagaucaucaccaccgacaacaccuucgugagcggcaacugcgacguggugaucggcaucgugaacaacaccguguacgauccccugcagcccgagcuggacagcuucaaggaggagcuggacaaguacuucaagaaucacaccagccccgacguggaccugggcgacaucagcggcaucaacgccagcguggugaacauccagaaggagaucgaucggcugaacgagguggccaagaaccugaacgagagccugaucgaccugcaggagcugggcaaguacgagcaguacaucaaguggcccugguacaucuggcugggcuucaucgccggccugaucgccaucgugauggugaccaucaugcugugcugcaugaccagcugcugcagcugccugaagggcuguugcagcugcggcagcugcugcaaguucgacgaggacgacagcgagcccgugcugaagggcgugaagcugcacuacaccugaggacuaguuauaagacugacuagcccgaugggccucccaacgggcccuccuccccuccuugcaccgagauuaauagaucuaaaaaaaaaaaaaaaaaaaaaaaaaaaaaaaaaaaaaaaaaaaaaaaaaaaaaaaaaaaaaaaaaaaaaaaaaaaaaaaaaaaaaaaaaaaaaaaaaaaa

SEQ ID NO: 25754 - RNA, 4017 nt, Artificial Sequence
  SARS-CoV-2/Wuhan/WIV05/2019__EPI_ISL_402128 spike protein mRNA gc (1-1273)(K986P_V987P_ D614G)
aggagaaagcuuaccauguucguguuccuggugcugcugccccuggugagcagccagugcgugaaccugaccacccggacccagcugccaccagccuacaccaacagcuucacccggggcgucuacuaccccgacaagguguuccggagcagcguccugcacagcacccaggaccuguuccugcccuucuucagcaacgugaccugguuccacgccauccacgugagcggcaccaacggcaccaagcgguucgacaaccccgugcugcccuucaacgacggcguguacuucgccagcaccgagaagagcaacaucauccggggcuggaucuucggcaccacccuggacagcaagacccagagccugcugaucgugaauaacgccaccaacguggugaucaaggugugcgaguuccaguucugcaacgaccccuuccugggcguguacuaccacaagaacaacaagagcuggauggagagcgaguuccggguguacagcagcgccaacaacugcaccuucgaguacgugagccagcccuuccugauggaccuggagggcaagcagggcaacuucaagaaccugcgggaguucguguucaagaacaucgacggcuacuucaagaucuacagcaagcacaccccaaucaaccuggugcgggaucugccccagggcuucucagcccuggagccccugguggaccugcccaucggcaucaacaucacccgguuccagacccugcuggcccugcaccggagcuaccugaccccaggcgacagcagcagcggguggacagcaggcgcggcugcuuacuacgugggcuaccugcagccccggaccuuccugcugaaguacaacgagaacggcaccaucaccgacgccguggacugcgcccuggacccucugagcgagaccaagugcacccugaagagcuucaccguggagaagggcaucuaccagaccagcaacuuccgggugcagcccaccgagagcaucgugcgguuccccaacaucaccaaccugugccccuucggcgagguguucaacgccacccgguucgccagcguguacgccuggaaccggaagcggaucagcaacugcguggccgacuacagcgugcuguacaacagcgccagcuucagcaccuucaagugcuacggcgugagccccaccaagcugaacgaccugugcuucaccaacguguacgccgacagcuucgugauccguggcgacgaggugcggcagaucgcacccggccagacaggcaagaucgccgacuacaacuacaagcugcccgacgacuucaccggcugcgugaucgccuggaacagcaacaaccucgacagcaaggugggcggcaacuacaacuaccuguaccggcuguuccggaagagcaaccugaagcccuucgagcgggacaucagcaccgagaucuaccaagccggcuccaccccuugcaacggcguggagggcuucaacugcuacuucccucugcagagcuacggcuuccagcccaccaacggcgugggcuaccagcccuaccgggugguggugcugagcuucgagcugcugcacgccccagccaccguguguggccccaagaagagcaccaaccuggugaagaacaagugcgugaacuucaacuucaacggccuuaccggcaccggcgugcugaccgagagcaacaagaaauuccugcccuuucagcaguucggccgggacaucgccgacaccaccgacgcugugcgggauccccagacccuggagauccuggacaucaccccuugcagcuucggcggcgugagcgugaucaccccaggcaccaacaccagcaaccagguggccgugcuguaccagggcgugaacugcaccgaggugcccguggccauccacgccgaccagcugacacccaccuggcgggucuacagcaccggcagcaacguguuccagacccgggccgguugccugaucggcgccgagcacgugaacaacagcuacgagugcgacauccccaucggcgccggcaucugugccagcuaccagacccagaccaauucaccccggagggcaaggagcguggccagccagagcaucaucgccuacaccaugagccugggcgccgagaacagcguggccuacagcaacaacagcaucgccauccccaccaacuucaccaucagcgugaccaccgagauucugcccgugagcaugaccaagaccagcguggacugcaccauguacaucugcggcgacagcaccgagugcagcaaccugcugcugcaguacggcagcuucugcacccagcugaaccgggcccugaccggcaucgccguggagcaggacaagaacacccaggagguguucgcccaggugaagcagaucuacaagaccccucccaucaaggacuucggcggcuucaacuucagccagauccugcccgaccccagcaagcccagcaagcggagcuucaucgaggaccugcuguucaacaaggugacccuagccgacgccggcuucaucaagcaguacggcgacugccucggcgacauagccgcccgggaccugaucugcgcccagaaguucaacggccugaccgugcugccuccccugcugaccgacgagaugaucgcccaguacaccagcgcccuguuagccggaaccaucaccagcggcuggacuuucggcgcuggagccgcucugcagauccccuucgccaugcagauggccuaccgguucaacggcaucggcgugacccagaacgugcuguacgagaaccagaagcugaucgccaaccaguucaacagcgccaucggcaagauccaggacagccugagcagcaccgcuagcgcccugggcaagcugcaggacguggugaaccagaacgcccaggcccugaacacccuggugaagcagcugagcagcaacuucggcgccaucagcagcgugcugaacgacauccugagccggcuggacccucccgaggccgaggugcagaucgaccggcugaucacuggccggcugcagagccugcagaccuacgugacccagcagcugauccgggccgccgagauucgggccagcgccaaccuggccgccaccaagaugagcgagugcgugcugggccagagcaagcggguggacuucugcggcaagggcuaccaccugaugagcuuuccccagagcgcaccccacggagugguguuccugcacgugaccuacgugcccgcccaggagaagaacuucaccaccgccccagccaucugccacgacggcaaggcccacuuuccccgggagggcguguucgugagcaacggcacccacugguucgugacccagcggaacuucuacgagccccagaucaucaccaccgacaacaccuucgugagcggcaacugcgacguggugaucggcaucgugaacaacaccguguacgauccccugcagcccgagcuggacagcuucaaggaggagcuggacaaguacuucaagaaucacaccagccccgacguggaccugggcgacaucagcggcaucaacgccagcguggugaacauccagaaggagaucgaucggcugaacgagguggccaagaaccugaacgagagccugaucgaccugcaggagcugggcaaguacgagcaguacaucaaguggcccugguacaucuggcugggcuucaucgccggccugaucgccaucgugauggugaccaucaugcugugcugcaugaccagcugcugcagcugccugaagggcuguugcagcugcggcagcugcugcaaguucgacgaggacgacagcgagcccgugcugaagggcgugaagcugcacuacaccugaggacuaguuauaagacugacuagcccgaugggccucccaacgggcccuccuccccuccuugcaccgagauuaauagaucuaaaaaaaaaaaaaaaaaaaaaaaaaaaaaaaaaaaaaaaaaaaaaaaaaaaaaaaaaaaaaaaaaaaaaaaaaaaaaaaaaaaaaaaaaaaaaaaaaaaa

SEQ ID NO: 25755 - RNA, 4017 nt, Artificial Sequence
  SARS-CoV-2/Wuhan/WIV05/2019__EPI_ISL_402128 spike protein mRNA gc (1-1273)(K986P_V987P_A222V_D614G)
aggagaaagcuuaccauguucguguuccuggugcugcugccccuggugagcagccagugcgugaaccugaccacccggacccagcugccaccagccuacaccaacagcuucacccggggcgucuacuaccccgacaagguguuccggagcagcguccugcacagcacccaggaccuguuccugcccuucuucagcaacgugaccugguuccacgccauccacgugagcggcaccaacggcaccaagcgguucgacaaccccgugcugcccuucaacgacggcguguacuucgccagcaccgagaagagcaacaucauccggggcuggaucuucggcaccacccuggacagcaagacccagagccugcugaucgugaauaacgccaccaacguggugaucaaggugugcgaguuccaguucugcaacgaccccuuccugggcguguacuaccacaagaacaacaagagcuggauggagagcgaguuccggguguacagcagcgccaacaacugcaccuucgaguacgugagccagcccuuccugauggaccuggagggcaagcagggcaacuucaagaaccugcgggaguucguguucaagaacaucgacggcuacuucaagaucuacagcaagcacaccccaaucaaccuggugcgggaucugccccagggcuucucagugcuggagccccugguggaccugcccaucggcaucaacaucacccgguuccagacccugcuggcccugcaccggagcuaccugaccccaggcgacagcagcagcggguggacagcaggcgcggcugcuuacuacgugggcuaccugcagccccggaccuuccugcugaaguacaacgagaacggcaccaucaccgacgccguggacugcgcccuggacccucugagcgagaccaagugcacccugaagagcuucaccguggagaagggcaucuaccagaccagcaacuuccgggugcagcccaccgagagcaucgugcgguuccccaacaucaccaaccugugccccuucggcgagguguucaacgccacccgguucgccagcguguacgccuggaaccggaagcggaucagcaacugcguggccgacuacagcgugcuguacaacagcgccagcuucagcaccuucaagugcuacggcgugagccccaccaagcugaacgaccugugcuucaccaacguguacgccgacagcuucgugauccguggcgacgaggugcggcagaucgcacccggccagacaggcaagaucgccgacuacaacuacaagcugcccgacgacuucaccggcugcgugaucgccuggaacagcaacaaccucgacagcaaggugggcggcaacuacaacuaccuguaccggcuguuccggaagagcaaccugaagcccuucgagcgggacaucagcaccgagaucuaccaagccggcuccaccccuugcaacggcguggagggcuucaacugcuacuucccucugcagagcuacggcuuccagcccaccaacggcgugggcuaccagcccuaccgggugguggugcugagcuucgagcugcugcacgccccagccaccguguguggccccaagaagagcaccaaccuggugaagaacaagugcgugaacuucaacuucaacggccuuaccggcaccggcgugcugaccgagagcaacaagaaauuccugcccuuucagcaguucggccgggacaucgccgacaccaccgacgcugugcgggauccccagacccuggagauccuggacaucaccccuugcagcuucggcggcgugagcgugaucaccccaggcaccaacaccagcaaccagguggccgugcuguaccagggcgugaacugcaccgaggugcccguggccauccacgccgaccagcugacacccaccuggcgggucuacagcaccggcagcaacguguuccagacccgggccgguugccugaucggcgccgagcacgugaacaacagcuacgagugcgacauccccaucggcgccggcaucugugccagcuaccagacccagaccaauucaccccggagggcaaggagcguggccagccagagcaucaucgccuacaccaugagccugggcgccgagaacagcguggccuacagcaacaacagcaucgccauccccaccaacuucaccaucagcgugaccaccgagauucugcccgugagcaugaccaagaccagcguggacugcaccauguacaucugcggcgacagcaccgagugcagcaaccugcugcugcaguacggcagcuucugcacccagcugaaccgggcccugaccggcaucgccguggagcaggacaagaacacccaggagguguucgcccaggugaagcagaucuacaagaccccucccaucaaggacuucggcggcuucaacuucagccagauccugcccgaccccagcaagcccagcaagcggagcuucaucgaggaccugcuguucaacaaggugacccuagccgacgccggcuucaucaagcaguacggcgacugccucggcgacauagccgcccgggaccugaucugcgcccagaaguucaacggccugaccgugcugccuccccugcugaccgacgagaugaucgcccaguacaccagcgcccuguuagccggaaccaucaccagcggcuggacuuucggcgcuggagccgcucugcagauccccuucgccaugcagauggccuaccgguucaacggcaucggcgugacccagaacgugcuguacgagaaccagaagcugaucgccaaccaguucaacagcgccaucggcaagauccaggacagccugagcagcaccgcuagcgcccugggcaagcugcaggacguggugaaccagaacgcccaggcccugaacacccuggugaagcagcugagcagcaacuucggcgccaucagcagcgugcugaacgacauccugagccggcuggacccucccgaggccgaggugcagaucgaccggcugaucacuggccggcugcagagccugcagaccuacgugacccagcagcugauccgggccgccgagauucgggccagcgccaaccuggccgccaccaagaugagcgagugcgugcugggccagagcaagcggguggacuucugcggcaagggcuaccaccugaugagcuuuccccagagcgcaccccacggagugguguuccugcacgugaccuacgugcccgcccaggagaagaacuucaccaccgccccagccaucugccacgacggcaaggcccacuuuccccgggagggcguguucgugagcaacggcacccacugguucgugacccagcggaacuucuacgagccccagaucaucaccaccgacaacaccuucgugagcggcaacugcgacguggugaucggcaucgugaacaacaccguguacgauccccugcagcccgagcuggacagcuucaaggaggagcuggacaaguacuucaagaaucacaccagccccgacguggaccugggcgacaucagcggcaucaacgccagcguggugaacauccagaaggagaucgaucggcugaacgagguggccaagaaccugaacgagagccugaucgaccugcaggagcugggcaaguacgagcaguacaucaaguggcccugguacaucuggcugggcuucaucgccggccugaucgccaucgugauggugaccaucaugcugugcugcaugaccagcugcugcagcugccugaagggcuguugcagcugcggcagcugcugcaaguucgacgaggacgacagcgagcccgugcugaagggcgugaagcugcacuacaccugaggacuaguuauaagacugacuagcccgaugggccucccaacgggcccuccuccccuccuugcaccgagauuaauagaucuaaaaaaaaaaaaaaaaaaaaaaaaaaaaaaaaaaaaaaaaaaaaaaaaaaaaaaaaaaaaaaaaaaaaaaaaaaaaaaaaaaaaaaaaaaaaaaaaaaaa

SEQ ID NO: 25756 - RNA, 4017 nt, Artificial Sequence
  SARS-CoV-2/Wuhan/WIV05/2019__EPI_ISL_402128 spike protein mRNA gc (1-1273)(K986P_V987P_N439K_D614G)
aggagaaagcuuaccauguucguguuccuggugcugcugccccuggugagcagccagugcgugaaccugaccacccggacccagcugccaccagccuacaccaacagcuucacccggggcgucuacuaccccgacaagguguuccggagcagcguccugcacagcacccaggaccuguuccugcccuucuucagcaacgugaccugguuccacgccauccacgugagcggcaccaacggcaccaagcgguucgacaaccccgugcugcccuucaacgacggcguguacuucgccagcaccgagaagagcaacaucauccggggcuggaucuucggcaccacccuggacagcaagacccagagccugcugaucgugaauaacgccaccaacguggugaucaaggugugcgaguuccaguucugcaacgaccccuuccugggcguguacuaccacaagaacaacaagagcuggauggagagcgaguuccggguguacagcagcgccaacaacugcaccuucgaguacgugagccagcccuuccugauggaccuggagggcaagcagggcaacuucaagaaccugcgggaguucguguucaagaacaucgacggcuacuucaagaucuacagcaagcacaccccaaucaaccuggugcgggaucugccccagggcuucucagcccuggagccccugguggaccugcccaucggcaucaacaucacccgguuccagacccugcuggcccugcaccggagcuaccugaccccaggcgacagcagcagcggguggacagcaggcgcggcugcuuacuacgugggcuaccugcagccccggaccuuccugcugaaguacaacgagaacggcaccaucaccgacgccguggacugcgcccuggacccucugagcgagaccaagugcacccugaagagcuucaccguggagaagggcaucuaccagaccagcaacuuccgggugcagcccaccgagagcaucgugcgguuccccaacaucaccaaccugugccccuucggcgagguguucaacgccacccgguucgccagcguguacgccuggaaccggaagcggaucagcaacugcguggccgacuacagcgugcuguacaacagcgccagcuucagcaccuucaagugcuacggcgugagccccaccaagcugaacgaccugugcuucaccaacguguacgccgacagcuucgugauccguggcgacgaggugcggcagaucgcacccggccagacaggcaagaucgccgacuacaacuacaagcugcccgacgacuucaccggcugcgugaucgccuggaacagcaagaaccucgacagcaaggugggcggcaacuacaacuaccuguaccggcuguuccggaagagcaaccugaagcccuucgagcgggacaucagcaccgagaucuaccaagccggcuccaccccuugcaacggcguggagggcuucaacugcuacuucccucugcagagcuacggcuuccagcccaccaacggcgugggcuaccagcccuaccgggugguggugcugagcuucgagcugcugcacgccccagccaccguguguggccccaagaagagcaccaaccuggugaagaacaagugcgugaacuucaacuucaacggccuuaccggcaccggcgugcugaccgagagcaacaagaaauuccugcccuuucagcaguucggccgggacaucgccgacaccaccgacgcugugcgggauccccagacccuggagauccuggacaucaccccuugcagcuucggcggcgugagcgugaucaccccaggcaccaacaccagcaaccagguggccgugcuguaccagggcgugaacugcaccgaggugcccguggccauccacgccgaccagcugacacccaccuggcgggucuacagcaccggcagcaacguguuccagacccgggccgguugccugaucggcgccgagcacgugaacaacagcuacgagugcgacauccccaucggcgccggcaucugugccagcuaccagacccagaccaauucaccccggagggcaaggagcguggccagccagagcaucaucgccuacaccaugagccugggcgccgagaacagcguggccuacagcaacaacagcaucgccauccccaccaacuucaccaucagcgugaccaccgagauucugcccgugagcaugaccaagaccagcguggacugcaccauguacaucugcggcgacagcaccgagugcagcaaccugcugcugcaguacggcagcuucugcacccagcugaaccgggcccugaccggcaucgccguggagcaggacaagaacacccaggagguguucgcccaggugaagcagaucuacaagaccccucccaucaaggacuucggcggcuucaacuucagccagauccugcccgaccccagcaagcccagcaagcggagcuucaucgaggaccugcuguucaacaaggugacccuagccgacgccggcuucaucaagcaguacggcgacugccucggcgacauagccgcccgggaccugaucugcgcccagaaguucaacggccugaccgugcugccuccccugcugaccgacgagaugaucgcccaguacaccagcgcccuguuagccggaaccaucaccagcggcuggacuuucggcgcuggagccgcucugcagauccccuucgccaugcagauggccuaccgguucaacggcaucggcgugacccagaacgugcuguacgagaaccagaagcugaucgccaaccaguucaacagcgccaucggcaagauccaggacagccugagcagcaccgcuagcgcccugggcaagcugcaggacguggugaaccagaacgcccaggcccugaacacccuggugaagcagcugagcagcaacuucggcgccaucagcagcgugcugaacgacauccugagccggcuggacccucccgaggccgaggugcagaucgaccggcugaucacuggccggcugcagagccugcagaccuacgugacccagcagcugauccgggccgccgagauucgggccagcgccaaccuggccgccaccaagaugagcgagugcgugcugggccagagcaagcggguggacuucugcggcaagggcuaccaccugaugagcuuuccccagagcgcaccccacggagugguguuccugcacgugaccuacgugcccgcccaggagaagaacuucaccaccgccccagccaucugccacgacggcaaggcccacuuuccccgggagggcguguucgugagcaacggcacccacugguucgugacccagcggaacuucuacgagccccagaucaucaccaccgacaacaccuucgugagcggcaacugcgacguggugaucggcaucgugaacaacaccguguacgauccccugcagcccgagcuggacagcuucaaggaggagcuggacaaguacuucaagaaucacaccagccccgacguggaccugggcgacaucagcggcaucaacgccagcguggugaacauccagaaggagaucgaucggcugaacgagguggccaagaaccugaacgagagccugaucgaccugcaggagcugggcaaguacgagcaguacaucaaguggcccugguacaucuggcugggcuucaucgccggccugaucgccaucgugauggugaccaucaugcugugcugcaugaccagcugcugcagcugccugaagggcuguugcagcugcggcagcugcugcaaguucgacgaggacgacagcgagcccgugcugaagggcgugaagcugcacuacaccugaggacuaguuauaagacugacuagcccgaugggccucccaacgggcccuccuccccuccuugcaccgagauuaauagaucuaaaaaaaaaaaaaaaaaaaaaaaaaaaaaaaaaaaaaaaaaaaaaaaaaaaaaaaaaaaaaaaaaaaaaaaaaaaaaaaaaaaaaaaaaaaaaaaaaaaa

SEQ ID NO: 25757 - RNA, 4017 nt, Artificial Sequence
  SARS-CoV-2/Wuhan/WIV05/2019__EPI_ISL_402128 spike protein mRNA gc (1-1273)(K986P_V987P_S477N_D614G)
aggagaaagcuuaccauguucguguuccuggugcugcugccccuggugagcagccagugcgugaaccugaccacccggacccagcugccaccagccuacaccaacagcuucacccggggcgucuacuaccccgacaagguguuccggagcagcguccugcacagcacccaggaccuguuccugcccuucuucagcaacgugaccugguuccacgccauccacgugagcggcaccaacggcaccaagcgguucgacaaccccgugcugcccuucaacgacggcguguacuucgccagcaccgagaagagcaacaucauccggggcuggaucuucggcaccacccuggacagcaagacccagagccugcugaucgugaauaacgccaccaacguggugaucaaggugugcgaguuccaguucugcaacgaccccuuccugggcguguacuaccacaagaacaacaagagcuggauggagagcgaguuccggguguacagcagcgccaacaacugcaccuucgaguacgugagccagcccuuccugauggaccuggagggcaagcagggcaacuucaagaaccugcgggaguucguguucaagaacaucgacggcuacuucaagaucuacagcaagcacaccccaaucaaccuggugcgggaucugccccagggcuucucagcccuggagccccugguggaccugcccaucggcaucaacaucacccgguuccagacccugcuggcccugcaccggagcuaccugaccccaggcgacagcagcagcggguggacagcaggcgcggcugcuuacuacgugggcuaccugcagccccggaccuuccugcugaaguacaacgagaacggcaccaucaccgacgccguggacugcgcccuggacccucugagcgagaccaagugcacccugaagagcuucaccguggagaagggcaucuaccagaccagcaacuuccgggugcagcccaccgagagcaucgugcgguuccccaacaucaccaaccugugccccuucggcgagguguucaacgccacccgguucgccagcguguacgccuggaaccggaagcggaucagcaacugcguggccgacuacagcgugcuguacaacagcgccagcuucagcaccuucaagugcuacggcgugagccccaccaagcugaacgaccugugcuucaccaacguguacgccgacagcuucgugauccguggcgacgaggugcggcagaucgcacccggccagacaggcaagaucgccgacuacaacuacaagcugcccgacgacuucaccggcugcgugaucgccuggaacagcaacaaccucgacagcaaggugggcggcaacuacaacuaccuguaccggcuguuccggaagagcaaccugaagcccuucgagcgggacaucagcaccgagaucuaccaagccggcaacaccccuugcaacggcguggagggcuucaacugcuacuucccucugcagagcuacggcuuccagcccaccaacggcgugggcuaccagcccuaccgggugguggugcugagcuucgagcugcugcacgccccagccaccguguguggccccaagaagagcaccaaccuggugaagaacaagugcgugaacuucaacuucaacggccuuaccggcaccggcgugcugaccgagagcaacaagaaauuccugcccuuucagcaguucggccgggacaucgccgacaccaccgacgcugugcgggauccccagacccuggagauccuggacaucaccccuugcagcuucggcggcgugagcgugaucaccccaggcaccaacaccagcaaccagguggccgugcuguaccagggcgugaacugcaccgaggugcccguggccauccacgccgaccagcugacacccaccuggcgggucuacagcaccggcagcaacguguuccagacccgggccgguugccugaucggcgccgagcacgugaacaacagcuacgagugcgacauccccaucggcgccggcaucugugccagcuaccagacccagaccaauucaccccggagggcaaggagcguggccagccagagcaucaucgccuacaccaugagccugggcgccgagaacagcguggccuacagcaacaacagcaucgccauccccaccaacuucaccaucagcgugaccaccgagauucugcccgugagcaugaccaagaccagcguggacugcaccauguacaucugcggcgacagcaccgagugcagcaaccugcugcugcaguacggcagcuucugcacccagcugaaccgggcccugaccggcaucgccguggagcaggacaagaacacccaggagguguucgcccaggugaagcagaucuacaagaccccucccaucaaggacuucggcggcuucaacuucagccagauccugcccgaccccagcaagcccagcaagcggagcuucaucgaggaccugcuguucaacaaggugacccuagccgacgccggcuucaucaagcaguacggcgacugccucggcgacauagccgcccgggaccugaucugcgcccagaaguucaacggccugaccgugcugccuccccugcugaccgacgagaugaucgcccaguacaccagcgcccuguuagccggaaccaucaccagcggcuggacuuucggcgcuggagccgcucugcagauccccuucgccaugcagauggccuaccgguucaacggcaucggcgugacccagaacgugcuguacgagaaccagaagcugaucgccaaccaguucaacagcgccaucggcaagauccaggacagccugagcagcaccgcuagcgcccugggcaagcugcaggacguggugaaccagaacgcccaggcccugaacacccuggugaagcagcugagcagcaacuucggcgccaucagcagcgugcugaacgacauccugagccggcuggacccucccgaggccgaggugcagaucgaccggcugaucacuggccggcugcagagccugcagaccuacgugacccagcagcugauccgggccgccgagauucgggccagcgccaaccuggccgccaccaagaugagcgagugcgugcugggccagagcaagcggguggacuucugcggcaagggcuaccaccugaugagcuuuccccagagcgcaccccacggagugguguuccugcacgugaccuacgugcccgcccaggagaagaacuucaccaccgccccagccaucugccacgacggcaaggcccacuuuccccgggagggcguguucgugagcaacggcacccacugguucgugacccagcggaacuucuacgagccccagaucaucaccaccgacaacaccuucgugagcggcaacugcgacguggugaucggcaucgugaacaacaccguguacgauccccugcagcccgagcuggacagcuucaaggaggagcuggacaaguacuucaagaaucacaccagccccgacguggaccugggcgacaucagcggcaucaacgccagcguggugaacauccagaaggagaucgaucggcugaacgagguggccaagaaccugaacgagagccugaucgaccugcaggagcugggcaaguacgagcaguacaucaaguggcccugguacaucuggcugggcuucaucgccggccugaucgccaucgugauggugaccaucaugcugugcugcaugaccagcugcugcagcugccugaagggcuguugcagcugcggcagcugcugcaaguucgacgaggacgacagcgagcccgugcugaagggcgugaagcugcacuacaccugaggacuaguuauaagacugacuagcccgaugggccucccaacgggcccuccuccccuccuugcaccgagauuaauagaucuaaaaaaaaaaaaaaaaaaaaaaaaaaaaaaaaaaaaaaaaaaaaaaaaaaaaaaaaaaaaaaaaaaaaaaaaaaaaaaaaaaaaaaaaaaaaaaaaaaaa

SEQ ID NO: 25758 - RNA, 4017 nt, Artificial Sequence
  SARS-CoV-2/Wuhan/WIV05/2019__EPI_ISL_402128 spike protein mRNA gc (1-1273)(K986P_V987P_N501Y_D614G)
aggagaaagcuuaccauguucguguuccuggugcugcugccccuggugagcagccagugcgugaaccugaccacccggacccagcugccaccagccuacaccaacagcuucacccggggcgucuacuaccccgacaagguguuccggagcagcguccugcacagcacccaggaccuguuccugcccuucuucagcaacgugaccugguuccacgccauccacgugagcggcaccaacggcaccaagcgguucgacaaccccgugcugcccuucaacgacggcguguacuucgccagcaccgagaagagcaacaucauccggggcuggaucuucggcaccacccuggacagcaagacccagagccugcugaucgugaauaacgccaccaacguggugaucaaggugugcgaguuccaguucugcaacgaccccuuccugggcguguacuaccacaagaacaacaagagcuggauggagagcgaguuccggguguacagcagcgccaacaacugcaccuucgaguacgugagccagcccuuccugauggaccuggagggcaagcagggcaacuucaagaaccugcgggaguucguguucaagaacaucgacggcuacuucaagaucuacagcaagcacaccccaaucaaccuggugcgggaucugccccagggcuucucagcccuggagccccugguggaccugcccaucggcaucaacaucacccgguuccagacccugcuggcccugcaccggagcuaccugaccccaggcgacagcagcagcggguggacagcaggcgcggcugcuuacuacgugggcuaccugcagccccggaccuuccugcugaaguacaacgagaacggcaccaucaccgacgccguggacugcgcccuggacccucugagcgagaccaagugcacccugaagagcuucaccguggagaagggcaucuaccagaccagcaacuuccgggugcagcccaccgagagcaucgugcgguuccccaacaucaccaaccugugccccuucggcgagguguucaacgccacccgguucgccagcguguacgccuggaaccggaagcggaucagcaacugcguggccgacuacagcgugcuguacaacagcgccagcuucagcaccuucaagugcuacggcgugagccccaccaagcugaacgaccugugcuucaccaacguguacgccgacagcuucgugauccguggcgacgaggugcggcagaucgcacccggccagacaggcaagaucgccgacuacaacuacaagcugcccgacgacuucaccggcugcgugaucgccuggaacagcaacaaccucgacagcaaggugggcggcaacuacaacuaccuguaccggcuguuccggaagagcaaccugaagcccuucgagcgggacaucagcaccgagaucuaccaagccggcuccaccccuugcaacggcguggagggcuucaacugcuacuucccucugcagagcuacggcuuccagcccaccuacggcgugggcuaccagcccuaccgggugguggugcugagcuucgagcugcugcacgccccagccaccguguguggccccaagaagagcaccaaccuggugaagaacaagugcgugaacuucaacuucaacggccuuaccggcaccggcgugcugaccgagagcaacaagaaauuccugcccuuucagcaguucggccgggacaucgccgacaccaccgacgcugugcgggauccccagacccuggagauccuggacaucaccccuugcagcuucggcggcgugagcgugaucaccccaggcaccaacaccagcaaccagguggccgugcuguaccagggcgugaacugcaccgaggugcccguggccauccacgccgaccagcugacacccaccuggcgggucuacagcaccggcagcaacguguuccagacccgggccgguugccugaucggcgccgagcacgugaacaacagcuacgagugcgacauccccaucggcgccggcaucugugccagcuaccagacccagaccaauucaccccggagggcaaggagcguggccagccagagcaucaucgccuacaccaugagccugggcgccgagaacagcguggccuacagcaacaacagcaucgccauccccaccaacuucaccaucagcgugaccaccgagauucugcccgugagcaugaccaagaccagcguggacugcaccauguacaucugcggcgacagcaccgagugcagcaaccugcugcugcaguacggcagcuucugcacccagcugaaccgggcccugaccggcaucgccguggagcaggacaagaacacccaggagguguucgcccaggugaagcagaucuacaagaccccucccaucaaggacuucggcggcuucaacuucagccagauccugcccgaccccagcaagcccagcaagcggagcuucaucgaggaccugcuguucaacaaggugacccuagccgacgccggcuucaucaagcaguacggcgacugccucggcgacauagccgcccgggaccugaucugcgcccagaaguucaacggccugaccgugcugccuccccugcugaccgacgagaugaucgcccaguacaccagcgcccuguuagccggaaccaucaccagcggcuggacuuucggcgcuggagccgcucugcagauccccuucgccaugcagauggccuaccgguucaacggcaucggcgugacccagaacgugcuguacgagaaccagaagcugaucgccaaccaguucaacagcgccaucggcaagauccaggacagccugagcagcaccgcuagcgcccugggcaagcugcaggacguggugaaccagaacgcccaggcccugaacacccuggugaagcagcugagcagcaacuucggcgccaucagcagcgugcugaacgacauccugagccggcuggacccucccgaggccgaggugcagaucgaccggcugaucacuggccggcugcagagccugcagaccuacgugacccagcagcugauccgggccgccgagauucgggccagcgccaaccuggccgccaccaagaugagcgagugcgugcugggccagagcaagcggguggacuucugcggcaagggcuaccaccugaugagcuuuccccagagcgcaccccacggagugguguuccugcacgugaccuacgugcccgcccaggagaagaacuucaccaccgccccagccaucugccacgacggcaaggcccacuuuccccgggagggcguguucgugagcaacggcacccacugguucgugacccagcggaacuucuacgagccccagaucaucaccaccgacaacaccuucgugagcggcaacugcgacguggugaucggcaucgugaacaacaccguguacgauccccugcagcccgagcuggacagcuucaaggaggagcuggacaaguacuucaagaaucacaccagccccgacguggaccugggcgacaucagcggcaucaacgccagcguggugaacauccagaaggagaucgaucggcugaacgagguggccaagaaccugaacgagagccugaucgaccugcaggagcugggcaaguacgagcaguacaucaaguggcccugguacaucuggcugggcuucaucgccggccugaucgccaucgugauggugaccaucaugcugugcugcaugaccagcugcugcagcugccugaagggcuguugcagcugcggcagcugcugcaaguucgacgaggacgacagcgagcccgugcugaagggcgugaagcugcacuacaccugaggacuaguuauaagacugacuagcccgaugggccucccaacgggcccuccuccccuccuugcaccgagauuaauagaucuaaaaaaaaaaaaaaaaaaaaaaaaaaaaaaaaaaaaaaaaaaaaaaaaaaaaaaaaaaaaaaaaaaaaaaaaaaaaaaaaaaaaaaaaaaaaaaaaaaaa

SEQ ID NO: 25759 - RNA, 4011 nt, Artificial Sequence
  SARS-CoV-2/Wuhan/WIV05/2019__EPI_ISL_402128 spike protein mRNA gc (1-1273)(K986P_V987P_H69del_V70del_D614G)
aggagaaagcuuaccauguucguguuccuggugcugcugccccuggugagcagccagugcgugaaccugaccacccggacccagcugccaccagccuacaccaacagcuucacccggggcgucuacuaccccgacaagguguuccggagcagcguccugcacagcacccaggaccuguuccugcccuucuucagcaacgugaccugguuccacgccaucagcggcaccaacggcaccaagcgguucgacaaccccgugcugcccuucaacgacggcguguacuucgccagcaccgagaagagcaacaucauccggggcuggaucuucggcaccacccuggacagcaagacccagagccugcugaucgugaauaacgccaccaacguggugaucaaggugugcgaguuccaguucugcaacgaccccuuccugggcguguacuaccacaagaacaacaagagcuggauggagagcgaguuccggguguacagcagcgccaacaacugcaccuucgaguacgugagccagcccuuccugauggaccuggagggcaagcagggcaacuucaagaaccugcgggaguucguguucaagaacaucgacggcuacuucaagaucuacagcaagcacaccccaaucaaccuggugcgggaucugccccagggcuucucagcccuggagccccugguggaccugcccaucggcaucaacaucacccgguuccagacccugcuggcccugcaccggagcuaccugaccccaggcgacagcagcagcggguggacagcaggcgcggcugcuuacuacgugggcuaccugcagccccggaccuuccugcugaaguacaacgagaacggcaccaucaccgacgccguggacugcgcccuggacccucugagcgagaccaagugcacccugaagagcuucaccguggagaagggcaucuaccagaccagcaacuuccgggugcagcccaccgagagcaucgugcgguuccccaacaucaccaaccugugccccuucggcgagguguucaacgccacccgguucgccagcguguacgccuggaaccggaagcggaucagcaacugcguggccgacuacagcgugcuguacaacagcgccagcuucagcaccuucaagugcuacggcgugagccccaccaagcugaacgaccugugcuucaccaacguguacgccgacagcuucgugauccguggcgacgaggugcggcagaucgcacccggccagacaggcaagaucgccgacuacaacuacaagcugcccgacgacuucaccggcugcgugaucgccuggaacagcaacaaccucgacagcaaggugggcggcaacuacaacuaccuguaccggcuguuccggaagagcaaccugaagcccuucgagcgggacaucagcaccgagaucuaccaagccggcuccaccccuugcaacggcguggagggcuucaacugcuacuucccucugcagagcuacggcuuccagcccaccaacggcgugggcuaccagcccuaccgggugguggugcugagcuucgagcugcugcacgccccagccaccguguguggccccaagaagagcaccaaccuggugaagaacaagugcgugaacuucaacuucaacggccuuaccggcaccggcgugcugaccgagagcaacaagaaauuccugcccuuucagcaguucggccgggacaucgccgacaccaccgacgcugugcgggauccccagacccuggagauccuggacaucaccccuugcagcuucggcggcgugagcgugaucaccccaggcaccaacaccagcaaccagguggccgugcuguaccagggcgugaacugcaccgaggugcccguggccauccacgccgaccagcugacacccaccuggcgggucuacagcaccggcagcaacguguuccagacccgggccgguugccugaucggcgccgagcacgugaacaacagcuacgagugcgacauccccaucggcgccggcaucugugccagcuaccagacccagaccaauucaccccggagggcaaggagcguggccagccagagcaucaucgccuacaccaugagccugggcgccgagaacagcguggccuacagcaacaacagcaucgccauccccaccaacuucaccaucagcgugaccaccgagauucugcccgugagcaugaccaagaccagcguggacugcaccauguacaucugcggcgacagcaccgagugcagcaaccugcugcugcaguacggcagcuucugcacccagcugaaccgggcccugaccggcaucgccguggagcaggacaagaacacccaggagguguucgcccaggugaagcagaucuacaagaccccucccaucaaggacuucggcggcuucaacuucagccagauccugcccgaccccagcaagcccagcaagcggagcuucaucgaggaccugcuguucaacaaggugacccuagccgacgccggcuucaucaagcaguacggcgacugccucggcgacauagccgcccgggaccugaucugcgcccagaaguucaacggccugaccgugcugccuccccugcugaccgacgagaugaucgcccaguacaccagcgcccuguuagccggaaccaucaccagcggcuggacuuucggcgcuggagccgcucugcagauccccuucgccaugcagauggccuaccgguucaacggcaucggcgugacccagaacgugcuguacgagaaccagaagcugaucgccaaccaguucaacagcgccaucggcaagauccaggacagccugagcagcaccgcuagcgcccugggcaagcugcaggacguggugaaccagaacgcccaggcccugaacacccuggugaagcagcugagcagcaacuucggcgccaucagcagcgugcugaacgacauccugagccggcuggacccucccgaggccgaggugcagaucgaccggcugaucacuggccggcugcagagccugcagaccuacgugacccagcagcugauccgggccgccgagauucgggccagcgccaaccuggccgccaccaagaugagcgagugcgugcugggccagagcaagcggguggacuucugcggcaagggcuaccaccugaugagcuuuccccagagcgcaccccacggagugguguuccugcacgugaccuacgugcccgcccaggagaagaacuucaccaccgccccagccaucugccacgacggcaaggcccacuuuccccgggagggcguguucgugagcaacggcacccacugguucgugacccagcggaacuucuacgagccccagaucaucaccaccgacaacaccuucgugagcggcaacugcgacguggugaucggcaucgugaacaacaccguguacgauccccugcagcccgagcuggacagcuucaaggaggagcuggacaaguacuucaagaaucacaccagccccgacguggaccugggcgacaucagcggcaucaacgccagcguggugaacauccagaaggagaucgaucggcugaacgagguggccaagaaccugaacgagagccugaucgaccugcaggagcugggcaaguacgagcaguacaucaaguggcccugguacaucuggcugggcuucaucgccggccugaucgccaucgugauggugaccaucaugcugugcugcaugaccagcugcugcagcugccugaagggcuguugcagcugcggcagcugcugcaaguucgacgaggacgacagcgagcccgugcugaagggcgugaagcugcacuacaccugaggacuaguuauaagacugacuagcccgaugggccucccaacgggcccuccuccccuccuugcaccgagauuaauagaucuaaaaaaaaaaaaaaaaaaaaaaaaaaaaaaaaaaaaaaaaaaaaaaaaaaaaaaaaaaaaaaaaaaaaaaaaaaaaaaaaaaaaaaaaaaaaaaaaaaaa

SEQ ID NO: 25760 - RNA, 4017 nt, Artificial Sequence
  SARS-CoV-2/Wuhan/WIV05/2019__EPI_ISL_402128 spike protein mRNA gc (1-1273)(K986P_V987P_Y453F_D614G)
aggagaaagcuuaccauguucguguuccuggugcugcugccccuggugagcagccagugcgugaaccugaccacccggacccagcugccaccagccuacaccaacagcuucacccggggcgucuacuaccccgacaagguguuccggagcagcguccugcacagcacccaggaccuguuccugcccuucuucagcaacgugaccugguuccacgccauccacgugagcggcaccaacggcaccaagcgguucgacaaccccgugcugcccuucaacgacggcguguacuucgccagcaccgagaagagcaacaucauccggggcuggaucuucggcaccacccuggacagcaagacccagagccugcugaucgugaauaacgccaccaacguggugaucaaggugugcgaguuccaguucugcaacgaccccuuccugggcguguacuaccacaagaacaacaagagcuggauggagagcgaguuccggguguacagcagcgccaacaacugcaccuucgaguacgugagccagcccuuccugauggaccuggagggcaagcagggcaacuucaagaaccugcgggaguucguguucaagaacaucgacggcuacuucaagaucuacagcaagcacaccccaaucaaccuggugcgggaucugccccagggcuucucagcccuggagccccugguggaccugcccaucggcaucaacaucacccgguuccagacccugcuggcccugcaccggagcuaccugaccccaggcgacagcagcagcggguggacagcaggcgcggcugcuuacuacgugggcuaccugcagccccggaccuuccugcugaaguacaacgagaacggcaccaucaccgacgccguggacugcgcccuggacccucugagcgagaccaagugcacccugaagagcuucaccguggagaagggcaucuaccagaccagcaacuuccgggugcagcccaccgagagcaucgugcgguuccccaacaucaccaaccugugccccuucggcgagguguucaacgccacccgguucgccagcguguacgccuggaaccggaagcggaucagcaacugcguggccgacuacagcgugcuguacaacagcgccagcuucagcaccuucaagugcuacggcgugagccccaccaagcugaacgaccugugcuucaccaacguguacgccgacagcuucgugauccguggcgacgaggugcggcagaucgcacccggccagacaggcaagaucgccgacuacaacuacaagcugcccgacgacuucaccggcugcgugaucgccuggaacagcaacaaccucgacagcaaggugggcggcaacuacaacuaccuguuccggcuguuccggaagagcaaccugaagcccuucgagcgggacaucagcaccgagaucuaccaagccggcuccaccccuugcaacggcguggagggcuucaacugcuacuucccucugcagagcuacggcuuccagcccaccaacggcgugggcuaccagcccuaccgggugguggugcugagcuucgagcugcugcacgccccagccaccguguguggccccaagaagagcaccaaccuggugaagaacaagugcgugaacuucaacuucaacggccuuaccggcaccggcgugcugaccgagagcaacaagaaauuccugcccuuucagcaguucggccgggacaucgccgacaccaccgacgcugugcgggauccccagacccuggagauccuggacaucaccccuugcagcuucggcggcgugagcgugaucaccccaggcaccaacaccagcaaccagguggccgugcuguaccagggcgugaacugcaccgaggugcccguggccauccacgccgaccagcugacacccaccuggcgggucuacagcaccggcagcaacguguuccagacccgggccgguugccugaucggcgccgagcacgugaacaacagcuacgagugcgacauccccaucggcgccggcaucugugccagcuaccagacccagaccaauucaccccggagggcaaggagcguggccagccagagcaucaucgccuacaccaugagccugggcgccgagaacagcguggccuacagcaacaacagcaucgccauccccaccaacuucaccaucagcgugaccaccgagauucugcccgugagcaugaccaagaccagcguggacugcaccauguacaucugcggcgacagcaccgagugcagcaaccugcugcugcaguacggcagcuucugcacccagcugaaccgggcccugaccggcaucgccguggagcaggacaagaacacccaggagguguucgcccaggugaagcagaucuacaagaccccucccaucaaggacuucggcggcuucaacuucagccagauccugcccgaccccagcaagcccagcaagcggagcuucaucgaggaccugcuguucaacaaggugacccuagccgacgccggcuucaucaagcaguacggcgacugccucggcgacauagccgcccgggaccugaucugcgcccagaaguucaacggccugaccgugcugccuccccugcugaccgacgagaugaucgcccaguacaccagcgcccuguuagccggaaccaucaccagcggcuggacuuucggcgcuggagccgcucugcagauccccuucgccaugcagauggccuaccgguucaacggcaucggcgugacccagaacgugcuguacgagaaccagaagcugaucgccaaccaguucaacagcgccaucggcaagauccaggacagccugagcagcaccgcuagcgcccugggcaagcugcaggacguggugaaccagaacgcccaggcccugaacacccuggugaagcagcugagcagcaacuucggcgccaucagcagcgugcugaacgacauccugagccggcuggacccucccgaggccgaggugcagaucgaccggcugaucacuggccggcugcagagccugcagaccuacgugacccagcagcugauccgggccgccgagauucgggccagcgccaaccuggccgccaccaagaugagcgagugcgugcugggccagagcaagcggguggacuucugcggcaagggcuaccaccugaugagcuuuccccagagcgcaccccacggagugguguuccugcacgugaccuacgugcccgcccaggagaagaacuucaccaccgccccagccaucugccacgacggcaaggcccacuuuccccgggagggcguguucgugagcaacggcacccacugguucgugacccagcggaacuucuacgagccccagaucaucaccaccgacaacaccuucgugagcggcaacugcgacguggugaucggcaucgugaacaacaccguguacgauccccugcagcccgagcuggacagcuucaaggaggagcuggacaaguacuucaagaaucacaccagccccgacguggaccugggcgacaucagcggcaucaacgccagcguggugaacauccagaaggagaucgaucggcugaacgagguggccaagaaccugaacgagagccugaucgaccugcaggagcugggcaaguacgagcaguacaucaaguggcccugguacaucuggcugggcuucaucgccggccugaucgccaucgugauggugaccaucaugcugugcugcaugaccagcugcugcagcugccugaagggcuguugcagcugcggcagcugcugcaaguucgacgaggacgacagcgagcccgugcugaagggcgugaagcugcacuacaccugaggacuaguuauaagacugacuagcccgaugggccucccaacgggcccuccuccccuccuugcaccgagauuaauagaucuaaaaaaaaaaaaaaaaaaaaaaaaaaaaaaaaaaaaaaaaaaaaaaaaaaaaaaaaaaaaaaaaaaaaaaaaaaaaaaaaaaaaaaaaaaaaaaaaaaaa

SEQ ID NO: 25761 - RNA, 4017 nt, Artificial Sequence
  SARS-CoV-2/Wuhan/WIV05/2019__EPI_ISL_402128 spike protein mRNA gc (1-1273)(K986P_V987P_D614G_I692V)
aggagaaagcuuaccauguucguguuccuggugcugcugccccuggugagcagccagugcgugaaccugaccacccggacccagcugccaccagccuacaccaacagcuucacccggggcgucuacuaccccgacaagguguuccggagcagcguccugcacagcacccaggaccuguuccugcccuucuucagcaacgugaccugguuccacgccauccacgugagcggcaccaacggcaccaagcgguucgacaaccccgugcugcccuucaacgacggcguguacuucgccagcaccgagaagagcaacaucauccggggcuggaucuucggcaccacccuggacagcaagacccagagccugcugaucgugaauaacgccaccaacguggugaucaaggugugcgaguuccaguucugcaacgaccccuuccugggcguguacuaccacaagaacaacaagagcuggauggagagcgaguuccggguguacagcagcgccaacaacugcaccuucgaguacgugagccagcccuuccugauggaccuggagggcaagcagggcaacuucaagaaccugcgggaguucguguucaagaacaucgacggcuacuucaagaucuacagcaagcacaccccaaucaaccuggugcgggaucugccccagggcuucucagcccuggagccccugguggaccugcccaucggcaucaacaucacccgguuccagacccugcuggcccugcaccggagcuaccugaccccaggcgacagcagcagcggguggacagcaggcgcggcugcuuacuacgugggcuaccugcagccccggaccuuccugcugaaguacaacgagaacggcaccaucaccgacgccguggacugcgcccuggacccucugagcgagaccaagugcacccugaagagcuucaccguggagaagggcaucuaccagaccagcaacuuccgggugcagcccaccgagagcaucgugcgguuccccaacaucaccaaccugugccccuucggcgagguguucaacgccacccgguucgccagcguguacgccuggaaccggaagcggaucagcaacugcguggccgacuacagcgugcuguacaacagcgccagcuucagcaccuucaagugcuacggcgugagccccaccaagcugaacgaccugugcuucaccaacguguacgccgacagcuucgugauccguggcgacgaggugcggcagaucgcacccggccagacaggcaagaucgccgacuacaacuacaagcugcccgacgacuucaccggcugcgugaucgccuggaacagcaacaaccucgacagcaaggugggcggcaacuacaacuaccuguaccggcuguuccggaagagcaaccugaagcccuucgagcgggacaucagcaccgagaucuaccaagccggcuccaccccuugcaacggcguggagggcuucaacugcuacuucccucugcagagcuacggcuuccagcccaccaacggcgugggcuaccagcccuaccgggugguggugcugagcuucgagcugcugcacgccccagccaccguguguggccccaagaagagcaccaaccuggugaagaacaagugcgugaacuucaacuucaacggccuuaccggcaccggcgugcugaccgagagcaacaagaaauuccugcccuuucagcaguucggccgggacaucgccgacaccaccgacgcugugcgggauccccagacccuggagauccuggacaucaccccuugcagcuucggcggcgugagcgugaucaccccaggcaccaacaccagcaaccagguggccgugcuguaccagggcgugaacugcaccgaggugcccguggccauccacgccgaccagcugacacccaccuggcgggucuacagcaccggcagcaacguguuccagacccgggccgguugccugaucggcgccgagcacgugaacaacagcuacgagugcgacauccccaucggcgccggcaucugugccagcuaccagacccagaccaauucaccccggagggcaaggagcguggccagccagagcgugaucgccuacaccaugagccugggcgccgagaacagcguggccuacagcaacaacagcaucgccauccccaccaacuucaccaucagcgugaccaccgagauucugcccgugagcaugaccaagaccagcguggacugcaccauguacaucugcggcgacagcaccgagugcagcaaccugcugcugcaguacggcagcuucugcacccagcugaaccgggcccugaccggcaucgccguggagcaggacaagaacacccaggagguguucgcccaggugaagcagaucuacaagaccccucccaucaaggacuucggcggcuucaacuucagccagauccugcccgaccccagcaagcccagcaagcggagcuucaucgaggaccugcuguucaacaaggugacccuagccgacgccggcuucaucaagcaguacggcgacugccucggcgacauagccgcccgggaccugaucugcgcccagaaguucaacggccugaccgugcugccuccccugcugaccgacgagaugaucgcccaguacaccagcgcccuguuagccggaaccaucaccagcggcuggacuuucggcgcuggagccgcucugcagauccccuucgccaugcagauggccuaccgguucaacggcaucggcgugacccagaacgugcuguacgagaaccagaagcugaucgccaaccaguucaacagcgccaucggcaagauccaggacagccugagcagcaccgcuagcgcccugggcaagcugcaggacguggugaaccagaacgcccaggcccugaacacccuggugaagcagcugagcagcaacuucggcgccaucagcagcgugcugaacgacauccugagccggcuggacccucccgaggccgaggugcagaucgaccggcugaucacuggccggcugcagagccugcagaccuacgugacccagcagcugauccgggccgccgagauucgggccagcgccaaccuggccgccaccaagaugagcgagugcgugcugggccagagcaagcggguggacuucugcggcaagggcuaccaccugaugagcuuuccccagagcgcaccccacggagugguguuccugcacgugaccuacgugcccgcccaggagaagaacuucaccaccgccccagccaucugccacgacggcaaggcccacuuuccccgggagggcguguucgugagcaacggcacccacugguucgugacccagcggaacuucuacgagccccagaucaucaccaccgacaacaccuucgugagcggcaacugcgacguggugaucggcaucgugaacaacaccguguacgauccccugcagcccgagcuggacagcuucaaggaggagcuggacaaguacuucaagaaucacaccagccccgacguggaccugggcgacaucagcggcaucaacgccagcguggugaacauccagaaggagaucgaucggcugaacgagguggccaagaaccugaacgagagccugaucgaccugcaggagcugggcaaguacgagcaguacaucaaguggcccugguacaucuggcugggcuucaucgccggccugaucgccaucgugauggugaccaucaugcugugcugcaugaccagcugcugcagcugccugaagggcuguugcagcugcggcagcugcugcaaguucgacgaggacgacagcgagcccgugcugaagggcgugaagcugcacuacaccugaggacuaguuauaagacugacuagcccgaugggccucccaacgggcccuccuccccuccuugcaccgagauuaauagaucuaaaaaaaaaaaaaaaaaaaaaaaaaaaaaaaaaaaaaaaaaaaaaaaaaaaaaaaaaaaaaaaaaaaaaaaaaaaaaaaaaaaaaaaaaaaaaaaaaaaa

SEQ ID NO: 25762 - RNA, 4017 nt, Artificial Sequence
  SARS-CoV-2/Wuhan/WIV05/2019__EPI_ISL_402128 spike protein mRNA gc (1-1273)(K986P_V987P_D614G_M1229I)
aggagaaagcuuaccauguucguguuccuggugcugcugccccuggugagcagccagugcgugaaccugaccacccggacccagcugccaccagccuacaccaacagcuucacccggggcgucuacuaccccgacaagguguuccggagcagcguccugcacagcacccaggaccuguuccugcccuucuucagcaacgugaccugguuccacgccauccacgugagcggcaccaacggcaccaagcgguucgacaaccccgugcugcccuucaacgacggcguguacuucgccagcaccgagaagagcaacaucauccggggcuggaucuucggcaccacccuggacagcaagacccagagccugcugaucgugaauaacgccaccaacguggugaucaaggugugcgaguuccaguucugcaacgaccccuuccugggcguguacuaccacaagaacaacaagagcuggauggagagcgaguuccggguguacagcagcgccaacaacugcaccuucgaguacgugagccagcccuuccugauggaccuggagggcaagcagggcaacuucaagaaccugcgggaguucguguucaagaacaucgacggcuacuucaagaucuacagcaagcacaccccaaucaaccuggugcgggaucugccccagggcuucucagcccuggagccccugguggaccugcccaucggcaucaacaucacccgguuccagacccugcuggcccugcaccggagcuaccugaccccaggcgacagcagcagcggguggacagcaggcgcggcugcuuacuacgugggcuaccugcagccccggaccuuccugcugaaguacaacgagaacggcaccaucaccgacgccguggacugcgcccuggacccucugagcgagaccaagugcacccugaagagcuucaccguggagaagggcaucuaccagaccagcaacuuccgggugcagcccaccgagagcaucgugcgguuccccaacaucaccaaccugugccccuucggcgagguguucaacgccacccgguucgccagcguguacgccuggaaccggaagcggaucagcaacugcguggccgacuacagcgugcuguacaacagcgccagcuucagcaccuucaagugcuacggcgugagccccaccaagcugaacgaccugugcuucaccaacguguacgccgacagcuucgugauccguggcgacgaggugcggcagaucgcacccggccagacaggcaagaucgccgacuacaacuacaagcugcccgacgacuucaccggcugcgugaucgccuggaacagcaacaaccucgacagcaaggugggcggcaacuacaacuaccuguaccggcuguuccggaagagcaaccugaagcccuucgagcgggacaucagcaccgagaucuaccaagccggcuccaccccuugcaacggcguggagggcuucaacugcuacuucccucugcagagcuacggcuuccagcccaccaacggcgugggcuaccagcccuaccgggugguggugcugagcuucgagcugcugcacgccccagccaccguguguggccccaagaagagcaccaaccuggugaagaacaagugcgugaacuucaacuucaacggccuuaccggcaccggcgugcugaccgagagcaacaagaaauuccugcccuuucagcaguucggccgggacaucgccgacaccaccgacgcugugcgggauccccagacccuggagauccuggacaucaccccuugcagcuucggcggcgugagcgugaucaccccaggcaccaacaccagcaaccagguggccgugcuguaccagggcgugaacugcaccgaggugcccguggccauccacgccgaccagcugacacccaccuggcgggucuacagcaccggcagcaacguguuccagacccgggccgguugccugaucggcgccgagcacgugaacaacagcuacgagugcgacauccccaucggcgccggcaucugugccagcuaccagacccagaccaauucaccccggagggcaaggagcguggccagccagagcaucaucgccuacaccaugagccugggcgccgagaacagcguggccuacagcaacaacagcaucgccauccccaccaacuucaccaucagcgugaccaccgagauucugcccgugagcaugaccaagaccagcguggacugcaccauguacaucugcggcgacagcaccgagugcagcaaccugcugcugcaguacggcagcuucugcacccagcugaaccgggcccugaccggcaucgccguggagcaggacaagaacacccaggagguguucgcccaggugaagcagaucuacaagaccccucccaucaaggacuucggcggcuucaacuucagccagauccugcccgaccccagcaagcccagcaagcggagcuucaucgaggaccugcuguucaacaaggugacccuagccgacgccggcuucaucaagcaguacggcgacugccucggcgacauagccgcccgggaccugaucugcgcccagaaguucaacggccugaccgugcugccuccccugcugaccgacgagaugaucgcccaguacaccagcgcccuguuagccggaaccaucaccagcggcuggacuuucggcgcuggagccgcucugcagauccccuucgccaugcagauggccuaccgguucaacggcaucggcgugacccagaacgugcuguacgagaaccagaagcugaucgccaaccaguucaacagcgccaucggcaagauccaggacagccugagcagcaccgcuagcgcccugggcaagcugcaggacguggugaaccagaacgcccaggcccugaacacccuggugaagcagcugagcagcaacuucggcgccaucagcagcgugcugaacgacauccugagccggcuggacccucccgaggccgaggugcagaucgaccggcugaucacuggccggcugcagagccugcagaccuacgugacccagcagcugauccgggccgccgagauucgggccagcgccaaccuggccgccaccaagaugagcgagugcgugcugggccagagcaagcggguggacuucugcggcaagggcuaccaccugaugagcuuuccccagagcgcaccccacggagugguguuccugcacgugaccuacgugcccgcccaggagaagaacuucaccaccgccccagccaucugccacgacggcaaggcccacuuuccccgggagggcguguucgugagcaacggcacccacugguucgugacccagcggaacuucuacgagccccagaucaucaccaccgacaacaccuucgugagcggcaacugcgacguggugaucggcaucgugaacaacaccguguacgauccccugcagcccgagcuggacagcuucaaggaggagcuggacaaguacuucaagaaucacaccagccccgacguggaccugggcgacaucagcggcaucaacgccagcguggugaacauccagaaggagaucgaucggcugaacgagguggccaagaaccugaacgagagccugaucgaccugcaggagcugggcaaguacgagcaguacaucaaguggcccugguacaucuggcugggcuucaucgccggccugaucgccaucgugaucgugaccaucaugcugugcugcaugaccagcugcugcagcugccugaagggcuguugcagcugcggcagcugcugcaaguucgacgaggacgacagcgagcccgugcugaagggcgugaagcugcacuacaccugaggacuaguuauaagacugacuagcccgaugggccucccaacgggcccuccuccccuccuugcaccgagauuaauagaucuaaaaaaaaaaaaaaaaaaaaaaaaaaaaaaaaaaaaaaaaaaaaaaaaaaaaaaaaaaaaaaaaaaaaaaaaaaaaaaaaaaaaaaaaaaaaaaaaaaaa

SEQ ID NO: 25763 - RNA, 4011 nt, Artificial Sequence
  SARS-CoV-2/Wuhan/WIV05/2019__EPI_ISL_402128 spike protein mRNA gc (1-1273)(K986P_V987P_H69del_V70del_A222V_Y453F_S477N_D614G_I692V)
aggagaaagcuuaccauguucguguuccuggugcugcugccccuggugagcagccagugcgugaaccugaccacccggacccagcugccaccagccuacaccaacagcuucacccggggcgucuacuaccccgacaagguguuccggagcagcguccugcacagcacccaggaccuguuccugcccuucuucagcaacgugaccugguuccacgccaucagcggcaccaacggcaccaagcgguucgacaaccccgugcugcccuucaacgacggcguguacuucgccagcaccgagaagagcaacaucauccggggcuggaucuucggcaccacccuggacagcaagacccagagccugcugaucgugaauaacgccaccaacguggugaucaaggugugcgaguuccaguucugcaacgaccccuuccugggcguguacuaccacaagaacaacaagagcuggauggagagcgaguuccggguguacagcagcgccaacaacugcaccuucgaguacgugagccagcccuuccugauggaccuggagggcaagcagggcaacuucaagaaccugcgggaguucguguucaagaacaucgacggcuacuucaagaucuacagcaagcacaccccaaucaaccuggugcgggaucugccccagggcuucucagugcuggagccccugguggaccugcccaucggcaucaacaucacccgguuccagacccugcuggcccugcaccggagcuaccugaccccaggcgacagcagcagcggguggacagcaggcgcggcugcuuacuacgugggcuaccugcagccccggaccuuccugcugaaguacaacgagaacggcaccaucaccgacgccguggacugcgcccuggacccucugagcgagaccaagugcacccugaagagcuucaccguggagaagggcaucuaccagaccagcaacuuccgggugcagcccaccgagagcaucgugcgguuccccaacaucaccaaccugugccccuucggcgagguguucaacgccacccgguucgccagcguguacgccuggaaccggaagcggaucagcaacugcguggccgacuacagcgugcuguacaacagcgccagcuucagcaccuucaagugcuacggcgugagccccaccaagcugaacgaccugugcuucaccaacguguacgccgacagcuucgugauccguggcgacgaggugcggcagaucgcacccggccagacaggcaagaucgccgacuacaacuacaagcugcccgacgacuucaccggcugcgugaucgccuggaacagcaacaaccucgacagcaaggugggcggcaacuacaacuaccuguuccggcuguuccggaagagcaaccugaagcccuucgagcgggacaucagcaccgagaucuaccaagccggcaacaccccuugcaacggcguggagggcuucaacugcuacuucccucugcagagcuacggcuuccagcccaccaacggcgugggcuaccagcccuaccgggugguggugcugagcuucgagcugcugcacgccccagccaccguguguggccccaagaagagcaccaaccuggugaagaacaagugcgugaacuucaacuucaacggccuuaccggcaccggcgugcugaccgagagcaacaagaaauuccugcccuuucagcaguucggccgggacaucgccgacaccaccgacgcugugcgggauccccagacccuggagauccuggacaucaccccuugcagcuucggcggcgugagcgugaucaccccaggcaccaacaccagcaaccagguggccgugcuguaccagggcgugaacugcaccgaggugcccguggccauccacgccgaccagcugacacccaccuggcgggucuacagcaccggcagcaacguguuccagacccgggccgguugccugaucggcgccgagcacgugaacaacagcuacgagugcgacauccccaucggcgccggcaucugugccagcuaccagacccagaccaauucaccccggagggcaaggagcguggccagccagagcgugaucgccuacaccaugagccugggcgccgagaacagcguggccuacagcaacaacagcaucgccauccccaccaacuucaccaucagcgugaccaccgagauucugcccgugagcaugaccaagaccagcguggacugcaccauguacaucugcggcgacagcaccgagugcagcaaccugcugcugcaguacggcagcuucugcacccagcugaaccgggcccugaccggcaucgccguggagcaggacaagaacacccaggagguguucgcccaggugaagcagaucuacaagaccccucccaucaaggacuucggcggcuucaacuucagccagauccugcccgaccccagcaagcccagcaagcggagcuucaucgaggaccugcuguucaacaaggugacccuagccgacgccggcuucaucaagcaguacggcgacugccucggcgacauagccgcccgggaccugaucugcgcccagaaguucaacggccugaccgugcugccuccccugcugaccgacgagaugaucgcccaguacaccagcgcccuguuagccggaaccaucaccagcggcuggacuuucggcgcuggagccgcucugcagauccccuucgccaugcagauggccuaccgguucaacggcaucggcgugacccagaacgugcuguacgagaaccagaagcugaucgccaaccaguucaacagcgccaucggcaagauccaggacagccugagcagcaccgcuagcgcccugggcaagcugcaggacguggugaaccagaacgcccaggcccugaacacccuggugaagcagcugagcagcaacuucggcgccaucagcagcgugcugaacgacauccugagccggcuggacccucccgaggccgaggugcagaucgaccggcugaucacuggccggcugcagagccugcagaccuacgugacccagcagcugauccgggccgccgagauucgggccagcgccaaccuggccgccaccaagaugagcgagugcgugcugggccagagcaagcggguggacuucugcggcaagggcuaccaccugaugagcuuuccccagagcgcaccccacggagugguguuccugcacgugaccuacgugcccgcccaggagaagaacuucaccaccgccccagccaucugccacgacggcaaggcccacuuuccccgggagggcguguucgugagcaacggcacccacugguucgugacccagcggaacuucuacgagccccagaucaucaccaccgacaacaccuucgugagcggcaacugcgacguggugaucggcaucgugaacaacaccguguacgauccccugcagcccgagcuggacagcuucaaggaggagcuggacaaguacuucaagaaucacaccagccccgacguggaccugggcgacaucagcggcaucaacgccagcguggugaacauccagaaggagaucgaucggcugaacgagguggccaagaaccugaacgagagccugaucgaccugcaggagcugggcaaguacgagcaguacaucaaguggcccugguacaucuggcugggcuucaucgccggccugaucgccaucgugauggugaccaucaugcugugcugcaugaccagcugcugcagcugccugaagggcuguugcagcugcggcagcugcugcaaguucgacgaggacgacagcgagcccgugcugaagggcgugaagcugcacuacaccugaggacuaguuauaagacugacuagcccgaugggccucccaacgggcccuccuccccuccuugcaccgagauuaauagaucuaaaaaaaaaaaaaaaaaaaaaaaaaaaaaaaaaaaaaaaaaaaaaaaaaaaaaaaaaaaaaaaaaaaaaaaaaaaaaaaaaaaaaaaaaaaaaaaaaaaa

SEQ ID NO: 25764 - RNA, 4011 nt, Artificial Sequence
  SARS-CoV-2/Wuhan/WIV05/2019__EPI_ISL_402128 spike protein mRNA gc (1-1273)(K986P_V987P_H69del_V70del_Y453F_D614G_I692V_M1229I)
aggagaaagcuuaccauguucguguuccuggugcugcugccccuggugagcagccagugcgugaaccugaccacccggacccagcugccaccagccuacaccaacagcuucacccggggcgucuacuaccccgacaagguguuccggagcagcguccugcacagcacccaggaccuguuccugcccuucuucagcaacgugaccugguuccacgccaucagcggcaccaacggcaccaagcgguucgacaaccccgugcugcccuucaacgacggcguguacuucgccagcaccgagaagagcaacaucauccggggcuggaucuucggcaccacccuggacagcaagacccagagccugcugaucgugaauaacgccaccaacguggugaucaaggugugcgaguuccaguucugcaacgaccccuuccugggcguguacuaccacaagaacaacaagagcuggauggagagcgaguuccggguguacagcagcgccaacaacugcaccuucgaguacgugagccagcccuuccugauggaccuggagggcaagcagggcaacuucaagaaccugcgggaguucguguucaagaacaucgacggcuacuucaagaucuacagcaagcacaccccaaucaaccuggugcgggaucugccccagggcuucucagcccuggagccccugguggaccugcccaucggcaucaacaucacccgguuccagacccugcuggcccugcaccggagcuaccugaccccaggcgacagcagcagcggguggacagcaggcgcggcugcuuacuacgugggcuaccugcagccccggaccuuccugcugaaguacaacgagaacggcaccaucaccgacgccguggacugcgcccuggacccucugagcgagaccaagugcacccugaagagcuucaccguggagaagggcaucuaccagaccagcaacuuccgggugcagcccaccgagagcaucgugcgguuccccaacaucaccaaccugugccccuucggcgagguguucaacgccacccgguucgccagcguguacgccuggaaccggaagcggaucagcaacugcguggccgacuacagcgugcuguacaacagcgccagcuucagcaccuucaagugcuacggcgugagccccaccaagcugaacgaccugugcuucaccaacguguacgccgacagcuucgugauccguggcgacgaggugcggcagaucgcacccggccagacaggcaagaucgccgacuacaacuacaagcugcccgacgacuucaccggcugcgugaucgccuggaacagcaacaaccucgacagcaaggugggcggcaacuacaacuaccuguuccggcuguuccggaagagcaaccugaagcccuucgagcgggacaucagcaccgagaucuaccaagccggcuccaccccuugcaacggcguggagggcuucaacugcuacuucccucugcagagcuacggcuuccagcccaccaacggcgugggcuaccagcccuaccgggugguggugcugagcuucgagcugcugcacgccccagccaccguguguggccccaagaagagcaccaaccuggugaagaacaagugcgugaacuucaacuucaacggccuuaccggcaccggcgugcugaccgagagcaacaagaaauuccugcccuuucagcaguucggccgggacaucgccgacaccaccgacgcugugcgggauccccagacccuggagauccuggacaucaccccuugcagcuucggcggcgugagcgugaucaccccaggcaccaacaccagcaaccagguggccgugcuguaccagggcgugaacugcaccgaggugcccguggccauccacgccgaccagcugacacccaccuggcgggucuacagcaccggcagcaacguguuccagacccgggccgguugccugaucggcgccgagcacgugaacaacagcuacgagugcgacauccccaucggcgccggcaucugugccagcuaccagacccagaccaauucaccccggagggcaaggagcguggccagccagagcgugaucgccuacaccaugagccugggcgccgagaacagcguggccuacagcaacaacagcaucgccauccccaccaacuucaccaucagcgugaccaccgagauucugcccgugagcaugaccaagaccagcguggacugcaccauguacaucugcggcgacagcaccgagugcagcaaccugcugcugcaguacggcagcuucugcacccagcugaaccgggcccugaccggcaucgccguggagcaggacaagaacacccaggagguguucgcccaggugaagcagaucuacaagaccccucccaucaaggacuucggcggcuucaacuucagccagauccugcccgaccccagcaagcccagcaagcggagcuucaucgaggaccugcuguucaacaaggugacccuagccgacgccggcuucaucaagcaguacggcgacugccucggcgacauagccgcccgggaccugaucugcgcccagaaguucaacggccugaccgugcugccuccccugcugaccgacgagaugaucgcccaguacaccagcgcccuguuagccggaaccaucaccagcggcuggacuuucggcgcuggagccgcucugcagauccccuucgccaugcagauggccuaccgguucaacggcaucggcgugacccagaacgugcuguacgagaaccagaagcugaucgccaaccaguucaacagcgccaucggcaagauccaggacagccugagcagcaccgcuagcgcccugggcaagcugcaggacguggugaaccagaacgcccaggcccugaacacccuggugaagcagcugagcagcaacuucggcgccaucagcagcgugcugaacgacauccugagccggcuggacccucccgaggccgaggugcagaucgaccggcugaucacuggccggcugcagagccugcagaccuacgugacccagcagcugauccgggccgccgagauucgggccagcgccaaccuggccgccaccaagaugagcgagugcgugcugggccagagcaagcggguggacuucugcggcaagggcuaccaccugaugagcuuuccccagagcgcaccccacggagugguguuccugcacgugaccuacgugcccgcccaggagaagaacuucaccaccgccccagccaucugccacgacggcaaggcccacuuuccccgggagggcguguucgugagcaacggcacccacugguucgugacccagcggaacuucuacgagccccagaucaucaccaccgacaacaccuucgugagcggcaacugcgacguggugaucggcaucgugaacaacaccguguacgauccccugcagcccgagcuggacagcuucaaggaggagcuggacaaguacuucaagaaucacaccagccccgacguggaccugggcgacaucagcggcaucaacgccagcguggugaacauccagaaggagaucgaucggcugaacgagguggccaagaaccugaacgagagccugaucgaccugcaggagcugggcaaguacgagcaguacaucaaguggcccugguacaucuggcugggcuucaucgccggccugaucgccaucgugaucgugaccaucaugcugugcugcaugaccagcugcugcagcugccugaagggcuguugcagcugcggcagcugcugcaaguucgacgaggacgacagcgagcccgugcugaagggcgugaagcugcacuacaccugaggacuaguuauaagacugacuagcccgaugggccucccaacgggcccuccuccccuccuugcaccgagauuaauagaucuaaaaaaaaaaaaaaaaaaaaaaaaaaaaaaaaaaaaaaaaaaaaaaaaaaaaaaaaaaaaaaaaaaaaaaaaaaaaaaaaaaaaaaaaaaaaaaaaaaaa

SEQ ID NO: 25765 - RNA, 4008 nt, Artificial Sequence
  SARS-CoV-2/Wuhan/WIV05/2019__EPI_ISL_402128 spike protein mRNA gc (1-1273)(K986P_V987P_K986P_V987P_H69del_V70del_Y144del_N501Y_A570 D_D614G_P681H_T716I_S982A_D1118H)
aggagaaagcuuaccauguucguguuccuggugcugcugccccuggugagcagccagugcgugaaccugaccacccggacccagcugccaccagccuacaccaacagcuucacccggggcgucuacuaccccgacaagguguuccggagcagcguccugcacagcacccaggaccuguuccugcccuucuucagcaacgugaccugguuccacgccaucagcggcaccaacggcaccaagcgguucgacaaccccgugcugcccuucaacgacggcguguacuucgccagcaccgagaagagcaacaucauccggggcuggaucuucggcaccacccuggacagcaagacccagagccugcugaucgugaauaacgccaccaacguggugaucaaggugugcgaguuccaguucugcaacgaccccuuccugggcguguaccacaagaacaacaagagcuggauggagagcgaguuccggguguacagcagcgccaacaacugcaccuucgaguacgugagccagcccuuccugauggaccuggagggcaagcagggcaacuucaagaaccugcgggaguucguguucaagaacaucgacggcuacuucaagaucuacagcaagcacaccccaaucaaccuggugcgggaucugccccagggcuucucagcccuggagccccugguggaccugcccaucggcaucaacaucacccgguuccagacccugcuggcccugcaccggagcuaccugaccccaggcgacagcagcagcggguggacagcaggcgcggcugcuuacuacgugggcuaccugcagccccggaccuuccugcugaaguacaacgagaacggcaccaucaccgacgccguggacugcgcccuggacccucugagcgagaccaagugcacccugaagagcuucaccguggagaagggcaucuaccagaccagcaacuuccgggugcagcccaccgagagcaucgugcgguuccccaacaucaccaaccugugccccuucggcgagguguucaacgccacccgguucgccagcguguacgccuggaaccggaagcggaucagcaacugcguggccgacuacagcgugcuguacaacagcgccagcuucagcaccuucaagugcuacggcgugagccccaccaagcugaacgaccugugcuucaccaacguguacgccgacagcuucgugauccguggcgacgaggugcggcagaucgcacccggccagacaggcaagaucgccgacuacaacuacaagcugcccgacgacuucaccggcugcgugaucgccuggaacagcaacaaccucgacagcaaggugggcggcaacuacaacuaccuguaccggcuguuccggaagagcaaccugaagcccuucgagcgggacaucagcaccgagaucuaccaagccggcuccaccccuugcaacggcguggagggcuucaacugcuacuucccucugcagagcuacggcuuccagcccaccuacggcgugggcuaccagcccuaccgggugguggugcugagcuucgagcugcugcacgccccagccaccguguguggccccaagaagagcaccaaccuggugaagaacaagugcgugaacuucaacuucaacggccuuaccggcaccggcgugcugaccgagagcaacaagaaauuccugcccuuucagcaguucggccgggacaucgacgacaccaccgacgcugugcgggauccccagacccuggagauccuggacaucaccccuugcagcuucggcggcgugagcgugaucaccccaggcaccaacaccagcaaccagguggccgugcuguaccagggcgugaacugcaccgaggugcccguggccauccacgccgaccagcugacacccaccuggcgggucuacagcaccggcagcaacguguuccagacccgggccgguugccugaucggcgccgagcacgugaacaacagcuacgagugcgacauccccaucggcgccggcaucugugccagcuaccagacccagaccaauucacaccggagggcaaggagcguggccagccagagcaucaucgccuacaccaugagccugggcgccgagaacagcguggccuacagcaacaacagcaucgccauccccaucaacuucaccaucagcgugaccaccgagauucugcccgugagcaugaccaagaccagcguggacugcaccauguacaucugcggcgacagcaccgagugcagcaaccugcugcugcaguacggcagcuucugcacccagcugaaccgggcccugaccggcaucgccguggagcaggacaagaacacccaggagguguucgcccaggugaagcagaucuacaagaccccucccaucaaggacuucggcggcuucaacuucagccagauccugcccgaccccagcaagcccagcaagcggagcuucaucgaggaccugcuguucaacaaggugacccuagccgacgccggcuucaucaagcaguacggcgacugccucggcgacauagccgcccgggaccugaucugcgcccagaaguucaacggccugaccgugcugccuccccugcugaccgacgagaugaucgcccaguacaccagcgcccuguuagccggaaccaucaccagcggcuggacuuucggcgcuggagccgcucugcagauccccuucgccaugcagauggccuaccgguucaacggcaucggcgugacccagaacgugcuguacgagaaccagaagcugaucgccaaccaguucaacagcgccaucggcaagauccaggacagccugagcagcaccgcuagcgcccugggcaagcugcaggacguggugaaccagaacgcccaggcccugaacacccuggugaagcagcugagcagcaacuucggcgccaucagcagcgugcugaacgacauccuggcccggcuggacccucccgaggccgaggugcagaucgaccggcugaucacuggccggcugcagagccugcagaccuacgugacccagcagcugauccgggccgccgagauucgggccagcgccaaccuggccgccaccaagaugagcgagugcgugcugggccagagcaagcggguggacuucugcggcaagggcuaccaccugaugagcuuuccccagagcgcaccccacggagugguguuccugcacgugaccuacgugcccgcccaggagaagaacuucaccaccgccccagccaucugccacgacggcaaggcccacuuuccccgggagggcguguucgugagcaacggcacccacugguucgugacccagcggaacuucuacgagccccagaucaucaccacccacaacaccuucgugagcggcaacugcgacguggugaucggcaucgugaacaacaccguguacgauccccugcagcccgagcuggacagcuucaaggaggagcuggacaaguacuucaagaaucacaccagccccgacguggaccugggcgacaucagcggcaucaacgccagcguggugaacauccagaaggagaucgaucggcugaacgagguggccaagaaccugaacgagagccugaucgaccugcaggagcugggcaaguacgagcaguacaucaaguggcccugguacaucuggcugggcuucaucgccggccugaucgccaucgugauggugaccaucaugcugugcugcaugaccagcugcugcagcugccugaagggcuguugcagcugcggcagcugcugcaaguucgacgaggacgacagcgagcccgugcugaagggcgugaagcugcacuacaccugaggacuaguuauaagacugacuagcccgaugggccucccaacgggcccuccuccccuccuugcaccgagauuaauagaucuaaaaaaaaaaaaaaaaaaaaaaaaaaaaaaaaaaaaaaaaaaaaaaaaaaaaaaaaaaaaaaaaaaaaaaaaaaaaaaaaaaaaaaaaaaaaaaaaaaaa

SEQ ID NO: 25766 - RNA, 4017 nt, Artificial Sequence
  SARS-CoV-2/Wuhan/WIV05/2019__EPI_ISL_402128 spike protein mRNA gc (1-1273)(K986P_V987P_K986P_V987P_K417N_E484K_N501Y_D614G)
aggagaaagcuuaccauguucguguuccuggugcugcugccccuggugagcagccagugcgugaaccugaccacccggacccagcugccaccagccuacaccaacagcuucacccggggcgucuacuaccccgacaagguguuccggagcagcguccugcacagcacccaggaccuguuccugcccuucuucagcaacgugaccugguuccacgccauccacgugagcggcaccaacggcaccaagcgguucgacaaccccgugcugcccuucaacgacggcguguacuucgccagcaccgagaagagcaacaucauccggggcuggaucuucggcaccacccuggacagcaagacccagagccugcugaucgugaauaacgccaccaacguggugaucaaggugugcgaguuccaguucugcaacgaccccuuccugggcguguacuaccacaagaacaacaagagcuggauggagagcgaguuccggguguacagcagcgccaacaacugcaccuucgaguacgugagccagcccuuccugauggaccuggagggcaagcagggcaacuucaagaaccugcgggaguucguguucaagaacaucgacggcuacuucaagaucuacagcaagcacaccccaaucaaccuggugcgggaucugccccagggcuucucagcccuggagccccugguggaccugcccaucggcaucaacaucacccgguuccagacccugcuggcccugcaccggagcuaccugaccccaggcgacagcagcagcggguggacagcaggcgcggcugcuuacuacgugggcuaccugcagccccggaccuuccugcugaaguacaacgagaacggcaccaucaccgacgccguggacugcgcccuggacccucugagcgagaccaagugcacccugaagagcuucaccguggagaagggcaucuaccagaccagcaacuuccgggugcagcccaccgagagcaucgugcgguuccccaacaucaccaaccugugccccuucggcgagguguucaacgccacccgguucgccagcguguacgccuggaaccggaagcggaucagcaacugcguggccgacuacagcgugcuguacaacagcgccagcuucagcaccuucaagugcuacggcgugagccccaccaagcugaacgaccugugcuucaccaacguguacgccgacagcuucgugauccguggcgacgaggugcggcagaucgcacccggccagacaggcaacaucgccgacuacaacuacaagcugcccgacgacuucaccggcugcgugaucgccuggaacagcaacaaccucgacagcaaggugggcggcaacuacaacuaccuguaccggcuguuccggaagagcaaccugaagcccuucgagcgggacaucagcaccgagaucuaccaagccggcuccaccccuugcaacggcgugaagggcuucaacugcuacuucccucugcagagcuacggcuuccagcccaccuacggcgugggcuaccagcccuaccgggugguggugcugagcuucgagcugcugcacgccccagccaccguguguggccccaagaagagcaccaaccuggugaagaacaagugcgugaacuucaacuucaacggccuuaccggcaccggcgugcugaccgagagcaacaagaaauuccugcccuuucagcaguucggccgggacaucgccgacaccaccgacgcugugcgggauccccagacccuggagauccuggacaucaccccuugcagcuucggcggcgugagcgugaucaccccaggcaccaacaccagcaaccagguggccgugcuguaccagggcgugaacugcaccgaggugcccguggccauccacgccgaccagcugacacccaccuggcgggucuacagcaccggcagcaacguguuccagacccgggccgguugccugaucggcgccgagcacgugaacaacagcuacgagugcgacauccccaucggcgccggcaucugugccagcuaccagacccagaccaauucaccccggagggcaaggagcguggccagccagagcaucaucgccuacaccaugagccugggcgccgagaacagcguggccuacagcaacaacagcaucgccauccccaccaacuucaccaucagcgugaccaccgagauucugcccgugagcaugaccaagaccagcguggacugcaccauguacaucugcggcgacagcaccgagugcagcaaccugcugcugcaguacggcagcuucugcacccagcugaaccgggcccugaccggcaucgccguggagcaggacaagaacacccaggagguguucgcccaggugaagcagaucuacaagaccccucccaucaaggacuucggcggcuucaacuucagccagauccugcccgaccccagcaagcccagcaagcggagcuucaucgaggaccugcuguucaacaaggugacccuagccgacgccggcuucaucaagcaguacggcgacugccucggcgacauagccgcccgggaccugaucugcgcccagaaguucaacggccugaccgugcugccuccccugcugaccgacgagaugaucgcccaguacaccagcgcccuguuagccggaaccaucaccagcggcuggacuuucggcgcuggagccgcucugcagauccccuucgccaugcagauggccuaccgguucaacggcaucggcgugacccagaacgugcuguacgagaaccagaagcugaucgccaaccaguucaacagcgccaucggcaagauccaggacagccugagcagcaccgcuagcgcccugggcaagcugcaggacguggugaaccagaacgcccaggcccugaacacccuggugaagcagcugagcagcaacuucggcgccaucagcagcgugcugaacgacauccugagccggcuggacccucccgaggccgaggugcagaucgaccggcugaucacuggccggcugcagagccugcagaccuacgugacccagcagcugauccgggccgccgagauucgggccagcgccaaccuggccgccaccaagaugagcgagugcgugcugggccagagcaagcggguggacuucugcggcaagggcuaccaccugaugagcuuuccccagagcgcaccccacggagugguguuccugcacgugaccuacgugcccgcccaggagaagaacuucaccaccgccccagccaucugccacgacggcaaggcccacuuuccccgggagggcguguucgugagcaacggcacccacugguucgugacccagcggaacuucuacgagccccagaucaucaccaccgacaacaccuucgugagcggcaacugcgacguggugaucggcaucgugaacaacaccguguacgauccccugcagcccgagcuggacagcuucaaggaggagcuggacaaguacuucaagaaucacaccagccccgacguggaccugggcgacaucagcggcaucaacgccagcguggugaacauccagaaggagaucgaucggcugaacgagguggccaagaaccugaacgagagccugaucgaccugcaggagcugggcaaguacgagcaguacaucaaguggcccugguacaucuggcugggcuucaucgccggccugaucgccaucgugauggugaccaucaugcugugcugcaugaccagcugcugcagcugccugaagggcuguugcagcugcggcagcugcugcaaguucgacgaggacgacagcgagcccgugcugaagggcgugaagcugcacuacaccugaggacuaguuauaagacugacuagcccgaugggccucccaacgggcccuccuccccuccuugcaccgagauuaauagaucuaaaaaaaaaaaaaaaaaaaaaaaaaaaaaaaaaaaaaaaaaaaaaaaaaaaaaaaaaaaaaaaaaaaaaaaaaaaaaaaaaaaaaaaaaaaaaaaaaaaa

SEQ ID NO: 25767 - RNA, 4008 nt, Artificial Sequence
  SARS-CoV-2/Wuhan/WIV05/2019__EPI_ISL_402128 spike protein mRNA gc (1-1273)(K986P_V987P_K986P_V987P_L18F_D80A_D215G_L242del_A243del_ L244del_R246I_K417N_E484K_N501Y_D614G_A701V)
aggagaaagcuuaccauguucguguuccuggugcugcugccccuggugagcagccagugcgugaacuucaccacccggacccagcugccaccagccuacaccaacagcuucacccggggcgucuacuaccccgacaagguguuccggagcagcguccugcacagcacccaggaccuguuccugcccuucuucagcaacgugaccugguuccacgccauccacgugagcggcaccaacggcaccaagcgguucgccaaccccgugcugcccuucaacgacggcguguacuucgccagcaccgagaagagcaacaucauccggggcuggaucuucggcaccacccuggacagcaagacccagagccugcugaucgugaauaacgccaccaacguggugaucaaggugugcgaguuccaguucugcaacgaccccuuccugggcguguacuaccacaagaacaacaagagcuggauggagagcgaguuccggguguacagcagcgccaacaacugcaccuucgaguacgugagccagcccuuccugauggaccuggagggcaagcagggcaacuucaagaaccugcgggaguucguguucaagaacaucgacggcuacuucaagaucuacagcaagcacaccccaaucaaccuggugcggggccugccccagggcuucucagcccuggagccccugguggaccugcccaucggcaucaacaucacccgguuccagacccugcacaucagcuaccugaccccaggcgacagcagcagcggguggacagcaggcgcggcugcuuacuacgugggcuaccugcagccccggaccuuccugcugaaguacaacgagaacggcaccaucaccgacgccguggacugcgcccuggacccucugagcgagaccaagugcacccugaagagcuucaccguggagaagggcaucuaccagaccagcaacuuccgggugcagcccaccgagagcaucgugcgguuccccaacaucaccaaccugugccccuucggcgagguguucaacgccacccgguucgccagcguguacgccuggaaccggaagcggaucagcaacugcguggccgacuacagcgugcuguacaacagcgccagcuucagcaccuucaagugcuacggcgugagccccaccaagcugaacgaccugugcuucaccaacguguacgccgacagcuucgugauccguggcgacgaggugcggcagaucgcacccggccagacaggcaacaucgccgacuacaacuacaagcugcccgacgacuucaccggcugcgugaucgccuggaacagcaacaaccucgacagcaaggugggcggcaacuacaacuaccuguaccggcuguuccggaagagcaaccugaagcccuucgagcgggacaucagcaccgagaucuaccaagccggcuccaccccuugcaacggcgugaagggcuucaacugcuacuucccucugcagagcuacggcuuccagcccaccuacggcgugggcuaccagcccuaccgggugguggugcugagcuucgagcugcugcacgccccagccaccguguguggccccaagaagagcaccaaccuggugaagaacaagugcgugaacuucaacuucaacggccuuaccggcaccggcgugcugaccgagagcaacaagaaauuccugcccuuucagcaguucggccgggacaucgccgacaccaccgacgcugugcgggauccccagacccuggagauccuggacaucaccccuugcagcuucggcggcgugagcgugaucaccccaggcaccaacaccagcaaccagguggccgugcuguaccagggcgugaacugcaccgaggugcccguggccauccacgccgaccagcugacacccaccuggcgggucuacagcaccggcagcaacguguuccagacccgggccgguugccugaucggcgccgagcacgugaacaacagcuacgagugcgacauccccaucggcgccggcaucugugccagcuaccagacccagaccaauucaccccggagggcaaggagcguggccagccagagcaucaucgccuacaccaugagccugggcguggagaacagcguggccuacagcaacaacagcaucgccauccccaccaacuucaccaucagcgugaccaccgagauucugcccgugagcaugaccaagaccagcguggacugcaccauguacaucugcggcgacagcaccgagugcagcaaccugcugcugcaguacggcagcuucugcacccagcugaaccgggcccugaccggcaucgccguggagcaggacaagaacacccaggagguguucgcccaggugaagcagaucuacaagaccccucccaucaaggacuucggcggcuucaacuucagccagauccugcccgaccccagcaagcccagcaagcggagcuucaucgaggaccugcuguucaacaaggugacccuagccgacgccggcuucaucaagcaguacggcgacugccucggcgacauagccgcccgggaccugaucugcgcccagaaguucaacggccugaccgugcugccuccccugcugaccgacgagaugaucgcccaguacaccagcgcccuguuagccggaaccaucaccagcggcuggacuuucggcgcuggagccgcucugcagauccccuucgccaugcagauggccuaccgguucaacggcaucggcgugacccagaacgugcuguacgagaaccagaagcugaucgccaaccaguucaacagcgccaucggcaagauccaggacagccugagcagcaccgcuagcgcccugggcaagcugcaggacguggugaaccagaacgcccaggcccugaacacccuggugaagcagcugagcagcaacuucggcgccaucagcagcgugcugaacgacauccugagccggcuggacccucccgaggccgaggugcagaucgaccggcugaucacuggccggcugcagagccugcagaccuacgugacccagcagcugauccgggccgccgagauucgggccagcgccaaccuggccgccaccaagaugagcgagugcgugcugggccagagcaagcggguggacuucugcggcaagggcuaccaccugaugagcuuuccccagagcgcaccccacggagugguguuccugcacgugaccuacgugcccgcccaggagaagaacuucaccaccgccccagccaucugccacgacggcaaggcccacuuuccccgggagggcguguucgugagcaacggcacccacugguucgugacccagcggaacuucuacgagccccagaucaucaccaccgacaacaccuucgugagcggcaacugcgacguggugaucggcaucgugaacaacaccguguacgauccccugcagcccgagcuggacagcuucaaggaggagcuggacaaguacuucaagaaucacaccagccccgacguggaccugggcgacaucagcggcaucaacgccagcguggugaacauccagaaggagaucgaucggcugaacgagguggccaagaaccugaacgagagccugaucgaccugcaggagcugggcaaguacgagcaguacaucaaguggcccugguacaucuggcugggcuucaucgccggccugaucgccaucgugauggugaccaucaugcugugcugcaugaccagcugcugcagcugccugaagggcuguugcagcugcggcagcugcugcaaguucgacgaggacgacagcgagcccgugcugaagggcgugaagcugcacuacaccugaggacuaguuauaagacugacuagcccgaugggccucccaacgggcccuccuccccuccuugcaccgagauuaauagaucuaaaaaaaaaaaaaaaaaaaaaaaaaaaaaaaaaaaaaaaaaaaaaaaaaaaaaaaaaaaaaaaaaaaaaaaaaaaaaaaaaaaaaaaaaaaaaaaaaaaa

SEQ ID NO: 25768 - RNA, 4017 nt, Artificial Sequence
  SARS-CoV-2/Wuhan/WIV05/2019__EPI_ISL_402128 spike protein mRNA gc (1-1273)(K986P_V987P_K986P_V987P_E484K_D614G)
aggagaaagcuuaccauguucguguuccuggugcugcugccccuggugagcagccagugcgugaaccugaccacccggacccagcugccaccagccuacaccaacagcuucacccggggcgucuacuaccccgacaagguguuccggagcagcguccugcacagcacccaggaccuguuccugcccuucuucagcaacgugaccugguuccacgccauccacgugagcggcaccaacggcaccaagcgguucgacaaccccgugcugcccuucaacgacggcguguacuucgccagcaccgagaagagcaacaucauccggggcuggaucuucggcaccacccuggacagcaagacccagagccugcugaucgugaauaacgccaccaacguggugaucaaggugugcgaguuccaguucugcaacgaccccuuccugggcguguacuaccacaagaacaacaagagcuggauggagagcgaguuccggguguacagcagcgccaacaacugcaccuucgaguacgugagccagcccuuccugauggaccuggagggcaagcagggcaacuucaagaaccugcgggaguucguguucaagaacaucgacggcuacuucaagaucuacagcaagcacaccccaaucaaccuggugcgggaucugccccagggcuucucagcccuggagccccugguggaccugcccaucggcaucaacaucacccgguuccagacccugcuggcccugcaccggagcuaccugaccccaggcgacagcagcagcggguggacagcaggcgcggcugcuuacuacgugggcuaccugcagccccggaccuuccugcugaaguacaacgagaacggcaccaucaccgacgccguggacugcgcccuggacccucugagcgagaccaagugcacccugaagagcuucaccguggagaagggcaucuaccagaccagcaacuuccgggugcagcccaccgagagcaucgugcgguuccccaacaucaccaaccugugccccuucggcgagguguucaacgccacccgguucgccagcguguacgccuggaaccggaagcggaucagcaacugcguggccgacuacagcgugcuguacaacagcgccagcuucagcaccuucaagugcuacggcgugagccccaccaagcugaacgaccugugcuucaccaacguguacgccgacagcuucgugauccguggcgacgaggugcggcagaucgcacccggccagacaggcaagaucgccgacuacaacuacaagcugcccgacgacuucaccggcugcgugaucgccuggaacagcaacaaccucgacagcaaggugggcggcaacuacaacuaccuguaccggcuguuccggaagagcaaccugaagcccuucgagcgggacaucagcaccgagaucuaccaagccggcuccaccccuugcaacggcgugaagggcuucaacugcuacuucccucugcagagcuacggcuuccagcccaccaacggcgugggcuaccagcccuaccgggugguggugcugagcuucgagcugcugcacgccccagccaccguguguggccccaagaagagcaccaaccuggugaagaacaagugcgugaacuucaacuucaacggccuuaccggcaccggcgugcugaccgagagcaacaagaaauuccugcccuuucagcaguucggccgggacaucgccgacaccaccgacgcugugcgggauccccagacccuggagauccuggacaucaccccuugcagcuucggcggcgugagcgugaucaccccaggcaccaacaccagcaaccagguggccgugcuguaccagggcgugaacugcaccgaggugcccguggccauccacgccgaccagcugacacccaccuggcgggucuacagcaccggcagcaacguguuccagacccgggccgguugccugaucggcgccgagcacgugaacaacagcuacgagugcgacauccccaucggcgccggcaucugugccagcuaccagacccagaccaauucaccccggagggcaaggagcguggccagccagagcaucaucgccuacaccaugagccugggcgccgagaacagcguggccuacagcaacaacagcaucgccauccccaccaacuucaccaucagcgugaccaccgagauucugcccgugagcaugaccaagaccagcguggacugcaccauguacaucugcggcgacagcaccgagugcagcaaccugcugcugcaguacggcagcuucugcacccagcugaaccgggcccugaccggcaucgccguggagcaggacaagaacacccaggagguguucgcccaggugaagcagaucuacaagaccccucccaucaaggacuucggcggcuucaacuucagccagauccugcccgaccccagcaagcccagcaagcggagcuucaucgaggaccugcuguucaacaaggugacccuagccgacgccggcuucaucaagcaguacggcgacugccucggcgacauagccgcccgggaccugaucugcgcccagaaguucaacggccugaccgugcugccuccccugcugaccgacgagaugaucgcccaguacaccagcgcccuguuagccggaaccaucaccagcggcuggacuuucggcgcuggagccgcucugcagauccccuucgccaugcagauggccuaccgguucaacggcaucggcgugacccagaacgugcuguacgagaaccagaagcugaucgccaaccaguucaacagcgccaucggcaagauccaggacagccugagcagcaccgcuagcgcccugggcaagcugcaggacguggugaaccagaacgcccaggcccugaacacccuggugaagcagcugagcagcaacuucggcgccaucagcagcgugcugaacgacauccugagccggcuggacccucccgaggccgaggugcagaucgaccggcugaucacuggccggcugcagagccugcagaccuacgugacccagcagcugauccgggccgccgagauucgggccagcgccaaccuggccgccaccaagaugagcgagugcgugcugggccagagcaagcggguggacuucugcggcaagggcuaccaccugaugagcuuuccccagagcgcaccccacggagugguguuccugcacgugaccuacgugcccgcccaggagaagaacuucaccaccgccccagccaucugccacgacggcaaggcccacuuuccccgggagggcguguucgugagcaacggcacccacugguucgugacccagcggaacuucuacgagccccagaucaucaccaccgacaacaccuucgugagcggcaacugcgacguggugaucggcaucgugaacaacaccguguacgauccccugcagcccgagcuggacagcuucaaggaggagcuggacaaguacuucaagaaucacaccagccccgacguggaccugggcgacaucagcggcaucaacgccagcguggugaacauccagaaggagaucgaucggcugaacgagguggccaagaaccugaacgagagccugaucgaccugcaggagcugggcaaguacgagcaguacaucaaguggcccugguacaucuggcugggcuucaucgccggccugaucgccaucgugauggugaccaucaugcugugcugcaugaccagcugcugcagcugccugaagggcuguugcagcugcggcagcugcugcaaguucgacgaggacgacagcgagcccgugcugaagggcgugaagcugcacuacaccugaggacuaguuauaagacugacuagcccgaugggccucccaacgggcccuccuccccuccuugcaccgagauuaauagaucuaaaaaaaaaaaaaaaaaaaaaaaaaaaaaaaaaaaaaaaaaaaaaaaaaaaaaaaaaaaaaaaaaaaaaaaaaaaaaaaaaaaaaaaaaaaaaaaaaaaa

SEQ ID NO: 25769 - RNA, 4017 nt, Artificial Sequence
  SARS-CoV-2/Wuhan/WIV05/2019__EPI_ISL_402128 spike protein mRNA gc (1-1273)(K986P_V987P_K986P_V987P_L18F_T20N_P26S_D138Y_R190S_K417T _E484K_N501Y_D614G_H655Y_T1027I)
aggagaaagcuuaccauguucguguuccuggugcugcugccccuggugagcagccagugcgugaacuucaccaaccggacccagcugccaagcgccuacaccaacagcuucacccggggcgucuacuaccccgacaagguguuccggagcagcguccugcacagcacccaggaccuguuccugcccuucuucagcaacgugaccugguuccacgccauccacgugagcggcaccaacggcaccaagcgguucgacaaccccgugcugcccuucaacgacggcguguacuucgccagcaccgagaagagcaacaucauccggggcuggaucuucggcaccacccuggacagcaagacccagagccugcugaucgugaauaacgccaccaacguggugaucaaggugugcgaguuccaguucugcaacuaccccuuccugggcguguacuaccacaagaacaacaagagcuggauggagagcgaguuccggguguacagcagcgccaacaacugcaccuucgaguacgugagccagcccuuccugauggaccuggagggcaagcagggcaacuucaagaaccugagcgaguucguguucaagaacaucgacggcuacuucaagaucuacagcaagcacaccccaaucaaccuggugcgggaucugccccagggcuucucagcccuggagccccugguggaccugcccaucggcaucaacaucacccgguuccagacccugcuggcccugcaccggagcuaccugaccccaggcgacagcagcagcggguggacagcaggcgcggcugcuuacuacgugggcuaccugcagccccggaccuuccugcugaaguacaacgagaacggcaccaucaccgacgccguggacugcgcccuggacccucugagcgagaccaagugcacccugaagagcuucaccguggagaagggcaucuaccagaccagcaacuuccgggugcagcccaccgagagcaucgugcgguuccccaacaucaccaaccugugccccuucggcgagguguucaacgccacccgguucgccagcguguacgccuggaaccggaagcggaucagcaacugcguggccgacuacagcgugcuguacaacagcgccagcuucagcaccuucaagugcuacggcgugagccccaccaagcugaacgaccugugcuucaccaacguguacgccgacagcuucgugauccguggcgacgaggugcggcagaucgcacccggccagacaggcaccaucgccgacuacaacuacaagcugcccgacgacuucaccggcugcgugaucgccuggaacagcaacaaccucgacagcaaggugggcggcaacuacaacuaccuguaccggcuguuccggaagagcaaccugaagcccuucgagcgggacaucagcaccgagaucuaccaagccggcuccaccccuugcaacggcgugaagggcuucaacugcuacuucccucugcagagcuacggcuuccagcccaccuacggcgugggcuaccagcccuaccgggugguggugcugagcuucgagcugcugcacgccccagccaccguguguggccccaagaagagcaccaaccuggugaagaacaagugcgugaacuucaacuucaacggccuuaccggcaccggcgugcugaccgagagcaacaagaaauuccugcccuuucagcaguucggccgggacaucgccgacaccaccgacgcugugcgggauccccagacccuggagauccuggacaucaccccuugcagcuucggcggcgugagcgugaucaccccaggcaccaacaccagcaaccagguggccgugcuguaccagggcgugaacugcaccgaggugcccguggccauccacgccgaccagcugacacccaccuggcgggucuacagcaccggcagcaacguguuccagacccgggccgguugccugaucggcgccgaguacgugaacaacagcuacgagugcgacauccccaucggcgccggcaucugugccagcuaccagacccagaccaauucaccccggagggcaaggagcguggccagccagagcaucaucgccuacaccaugagccugggcgccgagaacagcguggccuacagcaacaacagcaucgccauccccaccaacuucaccaucagcgugaccaccgagauucugcccgugagcaugaccaagaccagcguggacugcaccauguacaucugcggcgacagcaccgagugcagcaaccugcugcugcaguacggcagcuucugcacccagcugaaccgggcccugaccggcaucgccguggagcaggacaagaacacccaggagguguucgcccaggugaagcagaucuacaagaccccucccaucaaggacuucggcggcuucaacuucagccagauccugcccgaccccagcaagcccagcaagcggagcuucaucgaggaccugcuguucaacaaggugacccuagccgacgccggcuucaucaagcaguacggcgacugccucggcgacauagccgcccgggaccugaucugcgcccagaaguucaacggccugaccgugcugccuccccugcugaccgacgagaugaucgcccaguacaccagcgcccuguuagccggaaccaucaccagcggcuggacuuucggcgcuggagccgcucugcagauccccuucgccaugcagauggccuaccgguucaacggcaucggcgugacccagaacgugcuguacgagaaccagaagcugaucgccaaccaguucaacagcgccaucggcaagauccaggacagccugagcagcaccgcuagcgcccugggcaagcugcaggacguggugaaccagaacgcccaggcccugaacacccuggugaagcagcugagcagcaacuucggcgccaucagcagcgugcugaacgacauccugagccggcuggacccucccgaggccgaggugcagaucgaccggcugaucacuggccggcugcagagccugcagaccuacgugacccagcagcugauccgggccgccgagauucgggccagcgccaaccuggccgccaucaagaugagcgagugcgugcugggccagagcaagcggguggacuucugcggcaagggcuaccaccugaugagcuuuccccagagcgcaccccacggagugguguuccugcacgugaccuacgugcccgcccaggagaagaacuucaccaccgccccagccaucugccacgacggcaaggcccacuuuccccgggagggcguguucgugagcaacggcacccacugguucgugacccagcggaacuucuacgagccccagaucaucaccaccgacaacaccuucgugagcggcaacugcgacguggugaucggcaucgugaacaacaccguguacgauccccugcagcccgagcuggacagcuucaaggaggagcuggacaaguacuucaagaaucacaccagccccgacguggaccugggcgacaucagcggcaucaacgccagcguggugaacauccagaaggagaucgaucggcugaacgagguggccaagaaccugaacgagagccugaucgaccugcaggagcugggcaaguacgagcaguacaucaaguggcccugguacaucuggcugggcuucaucgccggccugaucgccaucgugauggugaccaucaugcugugcugcaugaccagcugcugcagcugccugaagggcuguugcagcugcggcagcugcugcaaguucgacgaggacgacagcgagcccgugcugaagggcgugaagcugcacuacaccugaggacuaguuauaagacugacuagcccgaugggccucccaacgggcccuccuccccuccuugcaccgagauuaauagaucuaaaaaaaaaaaaaaaaaaaaaaaaaaaaaaaaaaaaaaaaaaaaaaaaaaaaaaaaaaaaaaaaaaaaaaaaaaaaaaaaaaaaaaaaaaaaaaaaaaaa

SEQ ID NO: 25770 - RNA, 4017 nt, Artificial Sequence
  SARS-CoV-2/Wuhan/WIV05/2019__EPI_ISL_402128 spike protein mRNA gc (1-1273)(K986P_V987P_K986P_V987P_S13I_W152C_L452R_D614G)
aggagaaagcuuaccauguucguguuccuggugcugcugccccuggugagcauccagugcgugaaccugaccacccggacccagcugccaccagccuacaccaacagcuucacccggggcgucuacuaccccgacaagguguuccggagcagcguccugcacagcacccaggaccuguuccugcccuucuucagcaacgugaccugguuccacgccauccacgugagcggcaccaacggcaccaagcgguucgacaaccccgugcugcccuucaacgacggcguguacuucgccagcaccgagaagagcaacaucauccggggcuggaucuucggcaccacccuggacagcaagacccagagccugcugaucgugaauaacgccaccaacguggugaucaaggugugcgaguuccaguucugcaacgaccccuuccugggcguguacuaccacaagaacaacaagagcugcauggagagcgaguuccggguguacagcagcgccaacaacugcaccuucgaguacgugagccagcccuuccugauggaccuggagggcaagcagggcaacuucaagaaccugcgggaguucguguucaagaacaucgacggcuacuucaagaucuacagcaagcacaccccaaucaaccuggugcgggaucugccccagggcuucucagcccuggagccccugguggaccugcccaucggcaucaacaucacccgguuccagacccugcuggcccugcaccggagcuaccugaccccaggcgacagcagcagcggguggacagcaggcgcggcugcuuacuacgugggcuaccugcagccccggaccuuccugcugaaguacaacgagaacggcaccaucaccgacgccguggacugcgcccuggacccucugagcgagaccaagugcacccugaagagcuucaccguggagaagggcaucuaccagaccagcaacuuccgggugcagcccaccgagagcaucgugcgguuccccaacaucaccaaccugugccccuucggcgagguguucaacgccacccgguucgccagcguguacgccuggaaccggaagcggaucagcaacugcguggccgacuacagcgugcuguacaacagcgccagcuucagcaccuucaagugcuacggcgugagccccaccaagcugaacgaccugugcuucaccaacguguacgccgacagcuucgugauccguggcgacgaggugcggcagaucgcacccggccagacaggcaagaucgccgacuacaacuacaagcugcccgacgacuucaccggcugcgugaucgccuggaacagcaacaaccucgacagcaaggugggcggcaacuacaacuaccgcuaccggcuguuccggaagagcaaccugaagcccuucgagcgggacaucagcaccgagaucuaccaagccggcuccaccccuugcaacggcguggagggcuucaacugcuacuucccucugcagagcuacggcuuccagcccaccaacggcgugggcuaccagcccuaccgggugguggugcugagcuucgagcugcugcacgccccagccaccguguguggccccaagaagagcaccaaccuggugaagaacaagugcgugaacuucaacuucaacggccuuaccggcaccggcgugcugaccgagagcaacaagaaauuccugcccuuucagcaguucggccgggacaucgccgacaccaccgacgcugugcgggauccccagacccuggagauccuggacaucaccccuugcagcuucggcggcgugagcgugaucaccccaggcaccaacaccagcaaccagguggccgugcuguaccagggcgugaacugcaccgaggugcccguggccauccacgccgaccagcugacacccaccuggcgggucuacagcaccggcagcaacguguuccagacccgggccgguugccugaucggcgccgagcacgugaacaacagcuacgagugcgacauccccaucggcgccggcaucugugccagcuaccagacccagaccaauucaccccggagggcaaggagcguggccagccagagcaucaucgccuacaccaugagccugggcgccgagaacagcguggccuacagcaacaacagcaucgccauccccaccaacuucaccaucagcgugaccaccgagauucugcccgugagcaugaccaagaccagcguggacugcaccauguacaucugcggcgacagcaccgagugcagcaaccugcugcugcaguacggcagcuucugcacccagcugaaccgggcccugaccggcaucgccguggagcaggacaagaacacccaggagguguucgcccaggugaagcagaucuacaagaccccucccaucaaggacuucggcggcuucaacuucagccagauccugcccgaccccagcaagcccagcaagcggagcuucaucgaggaccugcuguucaacaaggugacccuagccgacgccggcuucaucaagcaguacggcgacugccucggcgacauagccgcccgggaccugaucugcgcccagaaguucaacggccugaccgugcugccuccccugcugaccgacgagaugaucgcccaguacaccagcgcccuguuagccggaaccaucaccagcggcuggacuuucggcgcuggagccgcucugcagauccccuucgccaugcagauggccuaccgguucaacggcaucggcgugacccagaacgugcuguacgagaaccagaagcugaucgccaaccaguucaacagcgccaucggcaagauccaggacagccugagcagcaccgcuagcgcccugggcaagcugcaggacguggugaaccagaacgcccaggcccugaacacccuggugaagcagcugagcagcaacuucggcgccaucagcagcgugcugaacgacauccugagccggcuggacccucccgaggccgaggugcagaucgaccggcugaucacuggccggcugcagagccugcagaccuacgugacccagcagcugauccgggccgccgagauucgggccagcgccaaccuggccgccaccaagaugagcgagugcgugcugggccagagcaagcggguggacuucugcggcaagggcuaccaccugaugagcuuuccccagagcgcaccccacggagugguguuccugcacgugaccuacgugcccgcccaggagaagaacuucaccaccgccccagccaucugccacgacggcaaggcccacuuuccccgggagggcguguucgugagcaacggcacccacugguucgugacccagcggaacuucuacgagccccagaucaucaccaccgacaacaccuucgugagcggcaacugcgacguggugaucggcaucgugaacaacaccguguacgauccccugcagcccgagcuggacagcuucaaggaggagcuggacaaguacuucaagaaucacaccagccccgacguggaccugggcgacaucagcggcaucaacgccagcguggugaacauccagaaggagaucgaucggcugaacgagguggccaagaaccugaacgagagccugaucgaccugcaggagcugggcaaguacgagcaguacaucaaguggcccugguacaucuggcugggcuucaucgccggccugaucgccaucgugauggugaccaucaugcugugcugcaugaccagcugcugcagcugccugaagggcuguugcagcugcggcagcugcugcaaguucgacgaggacgacagcgagcccgugcugaagggcgugaagcugcacuacaccugaggacuaguuauaagacugacuagcccgaugggccucccaacgggcccuccuccccuccuugcaccgagauuaauagaucuaaaaaaaaaaaaaaaaaaaaaaaaaaaaaaaaaaaaaaaaaaaaaaaaaaaaaaaaaaaaaaaaaaaaaaaaaaaaaaaaaaaaaaaaaaaaaaaaaaaa

SEQ ID NO: 25771 - RNA, 4017 nt, Artificial Sequence
  SARS-CoV-2/Wuhan/WIV05/2019__EPI_ISL_402128 spike protein mRNA gc (1-1273)(K986P_V987P)
aggagaaagcuuaccauguucguguuccuggugcugcugccccuggugagcagccagugcgugaaccugaccacccggacccagcugcccccugccuacaccaacagcuucacccggggcguguacuaccccgacaagguguuccggagcagcgugcugcacagcacccaggaccuguuccugcccuucuucagcaacgugaccugguuccacgccauccacgugagcggcaccaacggcaccaagcgguucgacaacccagugcugcccuucaacgacggcguguacuucgccagcaccgagaagucaaacaucauccggggcuggaucuucggcaccacccuggacagcaagacacagagccugcugaucgugaacaacgccaccaacguggugaucaaggugugcgaguuucaguucugcaacgaccccuuccugggcguguacuaccacaagaacaacaagagcuggauggagagcgaguuccgggucuacagcagcgcuaacaauugcaccuucgaguacgugagccagcccuuccugauggaccucgagggcaagcagggcaacuucaagaaccugcgggaguucguguucaagaacaucgauggcuacuucaagaucuacagcaagcacacccccaucaaccuggugcgggaccugccccagggauucagcgcccuggagccucugguggaccugcccaucggcaucaacaucaccagguuccagacccugcuggcccugcaccggagcuaccugacccccggcgacagcagcagcggcuggaccgccggcgccgccgcauacuacgugggcuaccugcagccacggaccuuccugcugaaguacaacgagaacggcaccaucaccgacgccguggacugcgcccuggacccccugagcgagaccaagugcacccuaaagagcuucaccguggagaagggcaucuaccagaccagcaacuuccgggugcagcccacugagagcaucgugcgguuccccaacauuaccaaccugugucccuucggcgagguguucaacgccacccgguucgccagcguguacgccuggaaccggaagcggaucagcaacugcguggccgacuacagcgugcuguacaacagcgccagcuucagcaccuucaagugcuacggcgugagcccuaccaagcugaacgaccugugcuucaccaacguguacgcugacagcuucgugauccggggcgacgaggugcggcagaucgcccccggccagaccggcaagaucgccgacuacaacuacaagcugcccgacgacuucaccggcugcgugaucgccuggaacagcaacaaccuggacagcaaggugggcggcaacuacaacuaccuguaccggcuguuccguaagagcaaccugaagccauucgagcgggacaucagcaccgagaucuaccaggccggcagcacccccugcaacgguguggagggcuuuaacugcuacuucccccugcagagcuacggcuuccagcccaccaacggcgugggcuaccagcccuaccgggugguggugcugagcuucgagcugcugcacgcccccgccaccgugugcggcccuaaaaagagcaccaaccuggugaagaacaagugcgugaacuucaauuucaacggccugaccggcaccggcgugcugaccgagagcaacaagaaguuccugcccuuccagcaguucggccgggauaucgccgacaccaccgacgcagugcgggacccccagacccuggagauccuggacaucaccccaugcagcuucggcggcgugagcgucaucacccccggcacaaacaccagcaaccagguggccgugcuguaccaggacgugaacugcaccgaggugcccguggccauccacgccgaccagcugacccccaccuggcggguguacagcaccggaagcaacguguuccagacccgggccggcugccugaucggcgccgagcacgugaacaacuccuacgagugcgacauccccaucggcgcuggcaucugcgccagcuaccagacccagaccaacagcccccggcgggcccggagcguggccagccagagcaucaucgccuacaccaugagcuuaggcgccgagaacagcguggccuacagcaacaacagcaucgcgaucccuaccaacuucaccaucagcgugaccaccgagauacugcccgugagcaugaccaagaccagcguggacuguaccauguacaucugcggcgacagcaccgagugcagcaaccugcugcugcaguacggcagcuucugcacccagcugaaccgggcccugaccggcaucgccguggagcaggacaagaacacccaagagguguucgcccaggugaagcagaucuacaagacucccccaaucaaggacuucggcggcuucaacuucagccagauccugcccgaccccagcaagcccagcaagcggagcuucaucgaggaccugcuguucaacaaggugacccuggccgacgccggcuucaucaagcaguacggcgauugccugggcgacaucgccgcucgggaccugaucugcgcccagaaguucaacgggcugaccgugcugcccccucugcugaccgacgagaugaucgcccaguacaccagcgcccugcuugccggcaccaucaccagcggcuggaccuucggcgccggcgcagcccugcagauccccuucgccaugcagauggccuaccgguucaacggcaucggcgugacccagaacgugcuguacgagaaccagaagcugaucgccaaccaguucaacagcgccaucggcaagauccaggacagccugagcagcaccgccagcgcccugggcaagcugcaggacguggugaaccagaacgcucaggcccugaacacccuggugaagcagcugagcagcaacuucggcgccaucagcucagugcugaaugacauccugagcaggcuggaucccccagaggccgaggugcagaucgaccggcugaucaccggccggcugcagagccugcagaccuacgugacccagcagcugauccgggccgccgagauccgggccagcgccaaccuggcagccaccaagaugagcgagugcgugcugggccagagcaagcggguggacuuuugcggcaagggcuaccaccugaugagcuucccccagagcgcuccccacggcgugguguuccuccacgugacauacguccccgcccaggagaagaacuucaccaccgcccccgccauuugccacgacggcaaggcccacuucccccgggagggcguguucgugagcaacggaacccacugguucgugacccagcggaacuucuacgagccucagaucaucaccaccgacaacaccuucgugagcggcaacugcgacguggugaucggcaucgugaacaacaccguguacgacccccugcagcccgagcuggacagcuucaaggaggagcuggacaaguacuucaagaaccacaccagcccagacguggaccugggcgacaucagcggcaucaacgccagcguggugaacauccagaaggagaucgaccggcugaacgagguggccaagaaccugaacgagagccugaucgaccugcaggagcugggcaaguacgagcaguacaucaaguggcccugguacaucuggcugggcuucaucgccggccugaucgccaucgugauggugaccaucaugcugugcugcaugaccagcugcuguagcugccugaagggcugcugcagcugcggcagcugcugcaaguucgacgaggacgacagcgagcccgugcugaagggcgugaagcugcacuacaccugaggacuaguuauaagacugacuagcccgaugggccucccaacgggcccuccuccccuccuugcaccgagauuaauagaucuaaaaaaaaaaaaaaaaaaaaaaaaaaaaaaaaaaaaaaaaaaaaaaaaaaaaaaaaaaaaaaaaaaaaaaaaaaaaaaaaaaaaaaaaaaaaaaaaaaaa

SEQ ID NO: 25772 - RNA, 4017 nt, Artificial Sequence
  SARS-CoV-2/Wuhan/WIV05/2019__EPI_ISL_402128 spike protein mRNA gc (1-1273)(K986P_V987P_ D614G)
aggagaaagcuuaccauguucguguuccuggugcugcugccccuggugagcagccagugcgugaaccugaccacccggacccagcugcccccugccuacaccaacagcuucacccggggcguguacuaccccgacaagguguuccggagcagcgugcugcacagcacccaggaccuguuccugcccuucuucagcaacgugaccugguuccacgccauccacgugagcggcaccaacggcaccaagcgguucgacaacccagugcugcccuucaacgacggcguguacuucgccagcaccgagaagucaaacaucauccggggcuggaucuucggcaccacccuggacagcaagacacagagccugcugaucgugaacaacgccaccaacguggugaucaaggugugcgaguuucaguucugcaacgaccccuuccugggcguguacuaccacaagaacaacaagagcuggauggagagcgaguuccgggucuacagcagcgcuaacaauugcaccuucgaguacgugagccagcccuuccugauggaccucgagggcaagcagggcaacuucaagaaccugcgggaguucguguucaagaacaucgauggcuacuucaagaucuacagcaagcacacccccaucaaccuggugcgggaccugccccagggauucagcgcccuggagccucugguggaccugcccaucggcaucaacaucaccagguuccagacccugcuggcccugcaccggagcuaccugacccccggcgacagcagcagcggcuggaccgccggcgccgccgcauacuacgugggcuaccugcagccacggaccuuccugcugaaguacaacgagaacggcaccaucaccgacgccguggacugcgcccuggacccccugagcgagaccaagugcacccuaaagagcuucaccguggagaagggcaucuaccagaccagcaacuuccgggugcagcccacugagagcaucgugcgguuccccaacauuaccaaccugugucccuucggcgagguguucaacgccacccgguucgccagcguguacgccuggaaccggaagcggaucagcaacugcguggccgacuacagcgugcuguacaacagcgccagcuucagcaccuucaagugcuacggcgugagcccuaccaagcugaacgaccugugcuucaccaacguguacgcugacagcuucgugauccggggcgacgaggugcggcagaucgcccccggccagaccggcaagaucgccgacuacaacuacaagcugcccgacgacuucaccggcugcgugaucgccuggaacagcaacaaccuggacagcaaggugggcggcaacuacaacuaccuguaccggcuguuccguaagagcaaccugaagccauucgagcgggacaucagcaccgagaucuaccaggccggcagcacccccugcaacgguguggagggcuuuaacugcuacuucccccugcagagcuacggcuuccagcccaccaacggcgugggcuaccagcccuaccgggugguggugcugagcuucgagcugcugcacgcccccgccaccgugugcggcccuaaaaagagcaccaaccuggugaagaacaagugcgugaacuucaauuucaacggccugaccggcaccggcgugcugaccgagagcaacaagaaguuccugcccuuccagcaguucggccgggauaucgccgacaccaccgacgcagugcgggacccccagacccuggagauccuggacaucaccccaugcagcuucggcggcgugagcgucaucacccccggcacaaacaccagcaaccagguggccgugcuguaccagggagugaacugcaccgaggugcccguggccauccacgccgaccagcugacccccaccuggcggguguacagcaccggcagcaacguguuccagacccgggccggcugccugaucggcgccgagcacgugaacaacuccuacgagugcgacauccccaucggcgcuggcaucugcgccagcuaccagacccagaccaacagcccccggcgggcccggagcguggccagccagagcaucaucgccuacaccaugagcuuaggcgccgagaacagcguggccuacagcaacaacagcaucgcgaucccuaccaacuucaccaucagcgugaccaccgagauacugcccgugagcaugaccaagaccagcguggacuguaccauguacaucugcggcgacagcaccgagugcagcaaccugcugcugcaguacggcagcuucugcacccagcugaaccgggcccugaccggcaucgccguggagcaggacaagaacacccaagagguguucgcccaggugaagcagaucuacaagacucccccaaucaaggacuucggcggcuucaacuucagccagauccugcccgaccccagcaagcccagcaagcggagcuucaucgaggaccugcuguucaacaaggugacccuggccgacgccggcuucaucaagcaguacggcgacugccugggggauaucgccgcucgggaccugaucugcgcccagaaguucaacggccugaccgugcugcccccucugcugaccgacgagaugaucgcccaguacaccagcgcccugcuugccggcaccaucaccagcggcuggaccuucggcgccggcgcagcccugcagauccccuucgccaugcagauggccuaccgguucaacggcaucggcgugacccagaacgugcuguacgagaaccagaagcugaucgccaaccaguucaacagcgccaucggcaagauccaggacagccugagcagcaccgccagcgcccugggcaagcugcaggacguggugaaccagaacgcucaggcccugaacacccuggugaagcagcugagcagcaacuucggcgccaucagcucagugcugaaugacauccugagcaggcuggaucccccagaggccgaggugcagaucgaccggcugaucaccggccggcugcagagccugcagaccuacgugacccagcagcugauccgggccgccgagauccgggccagcgccaaccuggcagccaccaagaugagcgagugcgugcugggccagagcaagcggguggacuuuugcggcaagggcuaccaccugaugagcuucccccagagcgcuccccacggcgugguguuccuccacgugacauacguccccgcccaggagaagaacuucaccaccgcccccgccauuugccacgacggcaaggcccacuucccccgggagggaguguucgugagcaacggcacccacugguucgugacccagcggaacuucuacgagccucagaucaucaccaccgacaacaccuucgugagcggcaacugcgacguggugaucggcaucgugaacaacaccguguacgacccccugcagcccgagcuggacagcuucaaggaggagcuggacaaguacuucaagaaccacaccagcccagacguggaccugggcgacaucagcggcaucaacgccagcguggugaacauccagaaggagaucgaccggcugaacgagguggccaagaaccugaacgagagccugaucgaccugcaggagcugggcaaguacgagcaguacaucaaguggcccugguacaucuggcugggcuucaucgccggccugaucgccaucgugauggugaccaucaugcugugcugcaugaccagcugcuguagcugccugaagggcugcugcagcugcggcagcugcugcaaguucgacgaggacgacagcgagcccgugcugaagggcgugaagcugcacuacaccugaggacuaguuauaagacugacuagcccgaugggccucccaacgggcccuccuccccuccuugcaccgagauuaauagaucuaaaaaaaaaaaaaaaaaaaaaaaaaaaaaaaaaaaaaaaaaaaaaaaaaaaaaaaaaaaaaaaaaaaaaaaaaaaaaaaaaaaaaaaaaaaaaaaaaaaa

SEQ ID NO: 25773 - RNA, 4017 nt, Artificial Sequence
  SARS-CoV-2/Wuhan/WIV05/2019__EPI_ISL_402128 spike protein mRNA gc (1-1273)(K986P_V987P_A222V_D614G)
aggagaaagcuuaccauguucguguuccuggugcugcugccccuggugagcagccagugcgugaaccugaccacccggacccagcugcccccugccuacaccaacagcuucacccggggcguguacuaccccgacaagguguuccggagcagcgugcugcacagcacccaggaccuguuccugcccuucuucagcaacgugaccugguuccacgccauccacgugagcggcaccaacggcaccaagcgguucgacaacccagugcugcccuucaacgacggcguguacuucgccagcaccgagaagucaaacaucauccggggcuggaucuucggcaccacccuggacagcaagacacagagccugcugaucgugaacaacgccaccaacguggugaucaaggugugcgaguuucaguucugcaacgaccccuuccugggcguguacuaccacaagaacaacaagagcuggauggagagcgaguuccgggucuacagcagcgcuaacaauugcaccuucgaguacgugagccagcccuuccugauggaccucgagggcaagcagggcaacuucaagaaccugcgggaguucguguucaagaacaucgauggcuacuucaagaucuacagcaagcacacccccaucaaccuggugcgggaccugccccagggauucagcgugcuggagccucugguggaccugcccaucggcaucaacaucaccagguuccagacccugcuggcccugcaccggagcuaccugacccccggcgacagcagcagcggcuggaccgccggcgccgccgccuacuacgugggcuaccugcagccacggaccuuccugcugaaguacaacgagaacggcaccaucaccgacgcaguggacugcgcccuggacccccugagcgagaccaagugcacccuaaagagcuucaccguggagaagggcaucuaccagaccagcaacuuccgggugcagcccacugagagcaucgugcgguuccccaacauuaccaaccugugucccuucggcgagguguucaacgccacccgguucgccagcguguacgccuggaaccggaagcggaucagcaacugcguggccgacuacagcgugcuguacaacagcgccagcuucagcaccuucaagugcuacggcgugagcccuaccaagcugaacgaccugugcuucaccaacguguacgccgacagcuucgugauccggggcgacgaggugcggcagaucgcucccggccagaccggcaagaucgccgacuacaacuacaagcugcccgacgacuucaccggcugcgugaucgccuggaacagcaacaaccuggacagcaaggugggcggcaacuacaacuaccuguaccggcuguuccguaagagcaaccugaagccauucgagcgggacaucagcaccgagaucuaccaggccggcagcacccccugcaacgguguggagggcuuuaacugcuacuucccccugcagagcuacggcuuccagcccaccaacggcgugggcuaccagcccuaccgggugguggugcugagcuucgagcugcugcacgcccccgccaccgugugcggcccuaaaaagagcaccaaccuggugaagaacaagugcgugaacuucaauuucaacggccugaccggcaccggcgugcugaccgagagcaacaagaaguuccugcccuuccagcaguucggccgggauaucgccgacaccaccgacgccgugcgggacccccagacccuggagauccuggacaucaccccaugcagcuucggcggcgucagcgugaucacccccggcacaaacaccagcaaccagguggcagugcuguaccagggagugaacugcaccgaggugcccguggccauccacgccgaccagcugacccccaccuggcggguguacagcaccggcagcaacguguuccagacccgggccggcugccugaucggcgccgagcacgugaacaacuccuacgagugcgacauccccaucggcgccggcaucugcgcuagcuaccagacccagaccaacagcccccggcgggcccggagcguggccagccagagcaucaucgccuacaccaugagcuuaggcgccgagaacagcguggccuacagcaacaacagcaucgccaucccuaccaacuucaccaucagcgugaccaccgagauacugcccgugagcaugaccaagaccagcguggacuguaccauguacaucugcggcgacagcaccgagugcagcaaccugcugcugcaguacggcagcuucugcacccagcugaaccgggcgcugaccggcaucgccguggagcaggacaagaacacccaagagguguucgcccaggugaagcagaucuacaagacucccccaaucaaggacuucggcggcuucaacuucagccagauccugcccgaccccagcaagcccagcaagcggagcuucaucgaggaccugcuguucaacaaggugacccuggccgacgccggcuucaucaagcaguacggcgacugccugggggauaucgccgcccgggaccugaucugcgcucagaaguucaacggccugaccgugcugcccccucugcugaccgacgagaugaucgcccaguacaccagcgcccugcuugccggcaccaucaccagcggcuggaccuucggcgccggcgccgcacugcagauccccuucgccaugcagauggccuaccgguucaacggcaucggcgugacccagaacgugcuguacgagaaccagaagcugaucgccaaccaguucaacagcgccaucggcaagauccaggacagccugagcagcaccgccagcgcccugggcaagcugcaggacguggugaaccagaacgcccaggcucugaacacccuggugaagcagcugagcagcaacuucggcgccaucagcucagugcugaaugacauccugagcaggcuggaucccccagaggccgaggugcagaucgaccggcugaucaccggccggcugcagagccugcagaccuacgugacccagcagcugauccgggccgccgagauccgggccagcgccaaccuggccgcaaccaagaugagcgagugcgugcugggccagagcaagcggguggacuuuugcggcaagggcuaccaccugaugagcuucccccagagcgcuccccacggcgugguguuccuccacgucacauacgugcccgcccaggagaagaacuucaccaccgcccccgccauuugccacgacggcaaggcccacuucccccgggagggaguguucgugagcaacggcacccacugguucgugacccagcggaacuucuacgagccucagaucaucaccaccgacaacaccuucgugagcggcaacugcgacguggugaucggcaucgugaacaacaccguguacgacccccugcagcccgagcuggacagcuucaaggaggagcuggacaaguacuucaagaaccacaccagcccagacguggaccugggcgacaucagcggcaucaacgccagcguggugaacauccagaaggagaucgaccggcugaacgagguggccaagaaccugaacgagagccugaucgaccugcaggagcugggcaaguacgagcaguacaucaaguggcccugguacaucuggcugggcuucaucgccggccugaucgccaucgugauggugaccaucaugcugugcugcaugaccagcugcuguagcugccugaagggcugcugcagcugcggcagcugcugcaaguucgacgaggacgacagcgagcccgugcugaagggcgugaagcugcacuacaccugaggacuaguuauaagacugacuagcccgaugggccucccaacgggcccuccuccccuccuugcaccgagauuaauagaucuaaaaaaaaaaaaaaaaaaaaaaaaaaaaaaaaaaaaaaaaaaaaaaaaaaaaaaaaaaaaaaaaaaaaaaaaaaaaaaaaaaaaaaaaaaaaaaaaaaaa

SEQ ID NO: 25774 - RNA, 4017 nt, Artificial Sequence
  SARS-CoV-2/Wuhan/WIV05/2019__EPI_ISL_402128 spike protein mRNA gc (1-1273)(K986P_V987P_N439K_D614G)
aggagaaagcuuaccauguucguguuccuggugcugcugccccuggugagcagccagugcgugaaccugaccacccggacccagcugcccccugccuacaccaacagcuucacccggggcguguacuaccccgacaagguguuccggagcagcgugcugcacagcacccaggaccuguuccugcccuucuucagcaacgugaccugguuccacgccauccacgugagcggcaccaacggcaccaagcgguucgacaacccagugcugcccuucaacgacggcguguacuucgccagcaccgagaagucaaacaucauccggggcuggaucuucggcaccacccuggacagcaagacacagagccugcugaucgugaacaacgccaccaacguggugaucaaggugugcgaguuucaguucugcaacgaccccuuccugggcguguacuaccacaagaacaacaagagcuggauggagagcgaguuccgggucuacagcagcgcuaacaauugcaccuucgaguacgugagccagcccuuccugauggaccucgagggcaagcagggcaacuucaagaaccugcgggaguucguguucaagaacaucgauggcuacuucaagaucuacagcaagcacacccccaucaaccuggugcgggaccugccccagggauucagcgcccuggagccucugguggaccugcccaucggcaucaacaucaccagguuccagacccugcuggcccugcaccggagcuaccugacccccggcgacagcagcagcggcuggaccgccggcgccgccgcauacuacgugggcuaccugcagccacggaccuuccugcugaaguacaacgagaacggcaccaucaccgacgccguggacugcgcccuggacccccugagcgagaccaagugcacccuaaagagcuucaccguggagaagggcaucuaccagaccagcaacuuccgggugcagcccacugagagcaucgugcgguuccccaacauuaccaaccugugucccuucggcgagguguucaacgccacccgguucgccagcguguacgccuggaaccggaagcggaucagcaacugcguggccgacuacagcgugcuguacaacagcgccagcuucagcaccuucaagugcuacggcgugagcccuaccaagcugaacgaccugugcuucaccaacguguacgcugacagcuucgugauccggggcgacgaggugcggcagaucgcccccggccagaccggcaagaucgccgacuacaacuacaagcugcccgacgacuucaccggcugcgugaucgccuggaacagcaagaaccuggacagcaaggugggcggcaacuacaacuaccuguaccggcuguuccguaagagcaaccugaagccauucgagcgggacaucagcaccgagaucuaccaggccggcagcacccccugcaacgguguggagggcuuuaacugcuacuucccccugcagagcuacggcuuccagcccaccaacggcgugggcuaccagcccuaccgggugguggugcugagcuucgagcugcugcacgcccccgccaccgugugcggcccuaaaaagagcaccaaccuggugaagaacaagugcgugaacuucaacuucaauggccugaccggcaccggcgugcugaccgagagcaacaagaaguuccugcccuuccagcaguucggccgggauaucgccgacaccaccgacgcagugcgggacccccagacccuggagauccuggacaucaccccaugcagcuucggcggcgugagcgucaucacccccggcacaaacaccagcaaccagguggccgugcuguaccagggagugaacugcaccgaggugcccguggccauccacgccgaccagcugacccccaccuggcggguguacagcaccggcagcaacguguuccagacccgggccggcugccugaucggcgccgagcacgugaacaacuccuacgagugcgacauccccaucggcgcuggcaucugcgccagcuaccagacccagaccaacagcccccggcgggcccggagcguggccagccagagcaucaucgccuacaccaugagcuuaggcgccgagaacagcguggccuacagcaacaacagcaucgcgaucccuaccaacuucaccaucagcgugaccaccgagauacugcccgugagcaugaccaagaccagcguggacuguaccauguacaucugcggcgacagcaccgagugcagcaaccugcugcugcaguacggcagcuucugcacccagcugaaccgggcccugaccggcaucgccguggagcaggacaagaacacccaagagguguucgcccaggugaagcagaucuacaagacucccccaaucaaggacuucggcggcuucaacuucagccagauccugcccgaccccagcaagcccagcaagcggagcuucaucgaggaccugcuguucaacaaggugacccuggccgacgccggcuucaucaagcaguacggcgacugccugggggauaucgccgcucgggaccugaucugcgcccagaaguucaacggccugaccgugcugcccccucugcugaccgacgagaugaucgcccaguacaccagcgcccugcuugccggcaccaucaccagcggcuggaccuucggcgccggcgcagcccugcagauccccuucgccaugcagauggccuaccgguucaacggcaucggcgugacccagaacgugcuguacgagaaccagaagcugaucgccaaccaguucaacagcgccaucggcaagauccaggacagccugagcagcaccgccagcgcccugggcaagcugcaggacguggugaaccagaacgcucaggcccugaacacccuggugaagcagcugagcagcaacuucggcgccaucagcucagugcugaacgacauccugagcaggcuggaucccccagaggccgaggugcagaucgaccggcugaucaccggccggcugcagagccugcagaccuacgugacccagcagcugauccgggccgccgagauccgggccagcgccaaucuggcagccaccaagaugagcgagugcgugcugggccagagcaagcggguggacuuuugcggcaagggcuaccaccugaugagcuucccccagagcgcuccccacggcgugguguuccuccacgugacauacguccccgcccaggagaagaacuucaccaccgcccccgccauuugccacgacggcaaggcccacuucccccgggagggaguguucgugagcaacggcacccacugguucgugacccagcggaacuucuacgagccucagaucaucaccaccgacaacaccuucgugagcggcaacugcgacguggugaucggcaucgugaacaacaccguguacgacccccugcagcccgagcuggacagcuucaaggaggagcuggacaaguacuucaagaaccacaccagcccagacguggaccugggcgacaucagcggcaucaacgccagcguggugaacauccagaaggagaucgaccggcugaacgagguggccaagaaccugaacgagagccugaucgaccugcaggagcugggcaaguacgagcaguacaucaaguggcccugguacaucuggcugggcuucaucgccggccugaucgccaucgugauggugaccaucaugcugugcugcaugaccagcugcuguagcugccugaagggcugcugcagcugcggcagcugcugcaaguucgacgaggacgacagcgagcccgugcugaagggcgugaagcugcacuacaccugaggacuaguuauaagacugacuagcccgaugggccucccaacgggcccuccuccccuccuugcaccgagauuaauagaucuaaaaaaaaaaaaaaaaaaaaaaaaaaaaaaaaaaaaaaaaaaaaaaaaaaaaaaaaaaaaaaaaaaaaaaaaaaaaaaaaaaaaaaaaaaaaaaaaaaaa

SEQ ID NO: 25775 - RNA, 4017 nt, Artificial Sequence
  SARS-CoV-2/Wuhan/WIV05/2019__EPI_ISL_402128 spike protein mRNA gc (1-1273)(K986P_V987P_S477N_D614G)
aggagaaagcuuaccauguucguguuccuggugcugcugccccuggugagcagccagugcgugaaccugaccacccggacccagcugcccccugccuacaccaacagcuucacccggggcguguacuaccccgacaagguguuccggagcagcgugcugcacagcacccaggaccuguuccugcccuucuucagcaacgugaccugguuccacgccauccacgugagcggcaccaacggcaccaagcgguucgacaacccagugcugcccuucaacgacggcguguacuucgccagcaccgagaagucaaacaucauccggggcuggaucuucggcaccacccuggacagcaagacacagagccugcugaucgugaacaacgccaccaacguggugaucaaggugugcgaguuucaguucugcaacgaccccuuccugggcguguacuaccacaagaacaacaagagcuggauggagagcgaguuccgggucuacagcagcgcuaacaauugcaccuucgaguacgugagccagcccuuccugauggaccucgagggcaagcagggcaacuucaagaaccugcgggaguucguguucaagaacaucgauggcuacuucaagaucuacagcaagcacacccccaucaaccuggugcgggaccugccccagggauucagcgcccuggagccucugguggaccugcccaucggcaucaacaucaccagguuccagacccugcuggcccugcaccggagcuaccugacccccggcgacagcagcagcggcuggaccgccggcgccgccgcauacuacgugggcuaccugcagccacggaccuuccugcugaaguacaacgagaacggcaccaucaccgacgccguggacugcgcccuggacccccugagcgagaccaagugcacccuaaagagcuucaccguggagaagggcaucuaccagaccagcaacuuccgggugcagcccacugagagcaucgugcgguuccccaacauuaccaaccugugucccuucggcgagguguucaacgccacccgguucgccagcguguacgccuggaaccggaagcggaucagcaacugcguggccgacuacagcgugcuguacaacagcgccagcuucagcaccuucaagugcuacggcgugagcccuaccaagcugaacgaccugugcuucaccaacguguacgcugacagcuucgugauccggggcgacgaggugcggcagaucgcccccggccagaccggcaagaucgccgacuacaacuacaagcugcccgacgacuucaccggcugcgugaucgccuggaacagcaacaaccuggacagcaaggugggcggcaacuacaacuaccuguaccggcuguuccguaagagcaaccugaagccauucgagcgggacaucagcaccgagaucuaccaggccggcaacacccccugcaacgguguggagggcuuuaacugcuacuucccccugcagagcuacggcuuccagcccaccaacggcgugggcuaccagcccuaccgggugguggugcugagcuucgagcugcugcacgcccccgccaccgugugcggcccuaaaaagagcaccaaccuggugaagaacaagugcgugaauuucaacuucaacggccugaccggcaccggcgugcugaccgagagcaacaagaaguuccugcccuuccagcaguucggccgggauaucgccgacaccaccgacgcagugcgggacccccagacccuggagauccuggacaucaccccaugcagcuucggcggcgugagcgucaucacccccggcacaaacaccagcaaccagguggccgugcuguaccagggagugaacugcaccgaggugcccguggccauccacgccgaccagcugacccccaccuggcggguguacagcaccggcagcaacguguuccagacccgggccggcugccugaucggcgccgagcacgugaacaacagcuacgagugcgacauccccaucggcgcuggcaucugcgccuccuaccagacccagaccaacagcccccggcgggcccggagcguggccagccagagcaucaucgccuacaccaugagcuuaggcgccgagaacagcguggccuacagcaacaacagcaucgcgaucccuaccaacuucaccaucagcgugaccaccgagauacugcccgugagcaugaccaagaccagcguggacuguaccauguacaucugcggcgacagcaccgagugcagcaaccugcugcugcaguacggcagcuucugcacccagcugaaccgggcccugaccggcaucgccguggagcaggacaagaacacccaagagguguucgcccaggugaagcagaucuacaagacucccccaaucaaggacuucggcggcuucaacuucagccagauccugcccgaccccagcaagcccagcaagcggagcuucaucgaggaccugcuguucaacaaggugacccuggccgacgccggcuucaucaagcaguacggcgacugccugggggauaucgccgcucgggaccugaucugcgcccagaaguucaacggccugaccgugcugcccccucugcugaccgacgagaugaucgcccaguacaccagcgcccugcuugccggcaccaucaccagcggcuggaccuucggcgccggcgcagcccugcagauccccuucgccaugcagauggccuaccgguucaacggcaucggcgugacccagaacgugcuguacgagaaccagaagcugaucgccaaccaguucaacagcgccaucggcaagauccaggacagccugagcagcaccgccagcgcccugggcaagcugcaggacguggugaaccagaacgcucaggcccugaacacccuggugaagcagcugagcagcaauuucggcgccaucagcagcgugcugaacgacauccugucaaggcuggaucccccagaggccgaggugcagaucgaccggcugaucaccggccggcugcagagccugcagaccuacgugacccagcagcugauccgggccgccgagauccgggccagcgccaaccuggcagccaccaagaugagcgagugcgugcugggccagagcaagcggguggacuuuugcggcaagggcuaccaccugaugagcuucccccagagcgcuccccacggcgugguguuccuccacgugacauacguccccgcccaggagaagaacuucaccaccgcccccgccauuugccacgacggcaaggcccacuucccccgggagggaguguucgugagcaacggcacccacugguucgugacccagcggaacuucuacgagccucagaucaucaccaccgacaacaccuucgugagcggcaacugcgacguggugaucggcaucgugaacaacaccguguacgacccccugcagcccgagcuggacagcuucaaggaggagcuggacaaguacuucaagaaccacaccagcccagacguggaccugggcgacaucagcggcaucaacgccagcguggugaacauccagaaggagaucgaccggcugaacgagguggccaagaaccugaacgagagccugaucgaccugcaggagcugggcaaguacgagcaguacaucaaguggcccugguacaucuggcugggcuucaucgccggccugaucgccaucgugauggugaccaucaugcugugcugcaugaccagcugcuguagcugccugaagggcugcugcagcugcggcagcugcugcaaguucgacgaggacgacagcgagcccgugcugaagggcgugaagcugcacuacaccugaggacuaguuauaagacugacuagcccgaugggccucccaacgggcccuccuccccuccuugcaccgagauuaauagaucuaaaaaaaaaaaaaaaaaaaaaaaaaaaaaaaaaaaaaaaaaaaaaaaaaaaaaaaaaaaaaaaaaaaaaaaaaaaaaaaaaaaaaaaaaaaaaaaaaaaa

SEQ ID NO: 25776 - RNA, 4017 nt, Artificial Sequence
  SARS-CoV-2/Wuhan/WIV05/2019__EPI_ISL_402128 spike protein mRNA gc (1-1273)(K986P_V987P_N501Y_D614G)
aggagaaagcuuaccauguucguguuccuggugcugcugccccuggugagcagccagugcgugaaccugaccacccggacccagcugcccccugccuacaccaacagcuucacccggggcguguacuaccccgacaagguguuccggagcagcgugcugcacagcacccaggaccuguuccugcccuucuucagcaacgugaccugguuccacgccauccacgugagcggcaccaacggcaccaagcgguucgacaacccagugcugcccuucaacgacggcguguacuucgccagcaccgagaagucaaacaucauccggggcuggaucuucggcaccacccuggacagcaagacacagagccugcugaucgugaacaacgccaccaacguggugaucaaggugugcgaguuucaguucugcaacgaccccuuccugggcguguacuaccacaagaacaacaagagcuggauggagagcgaguuccgggucuacagcagcgcuaacaauugcaccuucgaguacgugagccagcccuuccugauggaccucgagggcaagcagggcaacuucaagaaccugcgggaguucguguucaagaacaucgauggcuacuucaagaucuacagcaagcacacccccaucaaccuggugcgggaccugccccagggauucagcgcccuggagccucugguggaccugcccaucggcaucaacaucaccagguuccagacccugcuggcccugcaccggagcuaccugacccccggcgacagcagcagcggcuggaccgccggcgccgccgcauacuacgugggcuaccugcagccacggaccuuccugcugaaguacaacgagaacggcaccaucaccgacgccguggacugcgcccuggacccccugagcgagaccaagugcacccuaaagagcuucaccguggagaagggcaucuaccagaccagcaacuuccgggugcagcccacugagagcaucgugcgguuccccaacauuaccaaccugugucccuucggcgagguguucaacgccacccgguucgccagcguguacgccuggaaccggaagcggaucagcaacugcguggccgacuacagcgugcuguacaacagcgccagcuucagcaccuucaagugcuacggcgugagcccuaccaagcugaacgaccugugcuucaccaacguguacgcugacagcuucgugauccggggcgacgaggugcggcagaucgcccccggccagaccggcaagaucgccgacuacaacuacaagcugcccgacgacuucaccggcugcgugaucgccuggaacagcaacaaccuggacagcaaggugggcggcaacuacaacuaccuguaccggcuguuccguaagagcaaccugaagccauucgagcgggacaucagcaccgagaucuaccaggccggcagcacccccugcaacgguguggagggcuuuaacugcuacuucccccugcagagcuacggcuuccagcccaccuacggcgugggcuaccagcccuaccgggugguggugcugagcuucgagcugcugcacgcccccgccaccgugugcggcccuaaaaagagcaccaaccuggugaagaacaagugcgugaacuucaacuucaauggccugaccggcaccggcgugcugaccgagagcaacaagaaguuccugcccuuccagcaguucggccgggauaucgccgacaccaccgacgcagugcgggacccccagacccuggagauccuggacaucaccccaugcagcuucggcggcgugagcgucaucacccccggcacaaacaccagcaaccagguggccgugcuguaccagggagugaacugcaccgaggugcccguggccauccacgccgaccagcugacccccaccuggcggguguacagcaccggcagcaacguguuccagacccgggccggcugccugaucggcgccgagcacgugaacaacuccuacgagugcgacauccccaucggcgcuggcaucugcgccagcuaccagacccagaccaacagcccccggcgggcccggagcguggccagccagagcaucaucgccuacaccaugagcuuaggcgccgagaacagcguggccuacagcaacaacagcaucgcgaucccuaccaacuucaccaucagcgugaccaccgagauacugcccgugagcaugaccaagaccagcguggacuguaccauguacaucugcggcgacagcaccgagugcagcaaccugcugcugcaguacggcagcuucugcacccagcugaaccgggcccugaccggcaucgccguggagcaggacaagaacacccaagagguguucgcccaggugaagcagaucuacaagacucccccaaucaaggacuucggcggcuucaacuucagccagauccugcccgaccccagcaagcccagcaagcggagcuucaucgaggaccugcuguucaacaaggugacccuggccgacgccggcuucaucaagcaguacggcgacugccugggggauaucgccgcucgggaccugaucugcgcccagaaguucaacggccugaccgugcugcccccucugcugaccgacgagaugaucgcccaguacaccagcgcccugcuugccggcaccaucaccagcggcuggaccuucggcgccggcgcagcccugcagauccccuucgccaugcagauggccuaccgguucaacggcaucggcgugacccagaacgugcuguacgagaaccagaagcugaucgccaaccaguucaacagcgccaucggcaagauccaggacagccugagcagcaccgccagcgcccugggcaagcugcaggacguggugaaccagaacgcucaggcccugaacacccuggugaagcagcugagcagcaacuucggcgccaucagcucagugcugaacgacauccugagcaggcuggaucccccagaggccgaggugcagaucgaccggcugaucaccggccggcugcagagccugcagaccuacgugacccagcagcugauccgggccgccgagauccgggccagcgccaaucuggcagccaccaagaugagcgagugcgugcugggccagagcaagcggguggacuuuugcggcaagggcuaccaccugaugagcuucccccagagcgcuccccacggcgugguguuccuccacgugacauacguccccgcccaggagaagaacuucaccaccgcccccgccauuugccacgacggcaaggcccacuucccccgggagggaguguucgugagcaacggcacccacugguucgugacccagcggaacuucuacgagccucagaucaucaccaccgacaacaccuucgugagcggcaacugcgacguggugaucggcaucgugaacaacaccguguacgacccccugcagcccgagcuggacagcuucaaggaggagcuggacaaguacuucaagaaccacaccagcccagacguggaccugggcgacaucagcggcaucaacgccagcguggugaacauccagaaggagaucgaccggcugaacgagguggccaagaaccugaacgagagccugaucgaccugcaggagcugggcaaguacgagcaguacaucaaguggcccugguacaucuggcugggcuucaucgccggccugaucgccaucgugauggugaccaucaugcugugcugcaugaccagcugcuguagcugccugaagggcugcugcagcugcggcagcugcugcaaguucgacgaggacgacagcgagcccgugcugaagggcgugaagcugcacuacaccugaggacuaguuauaagacugacuagcccgaugggccucccaacgggcccuccuccccuccuugcaccgagauuaauagaucuaaaaaaaaaaaaaaaaaaaaaaaaaaaaaaaaaaaaaaaaaaaaaaaaaaaaaaaaaaaaaaaaaaaaaaaaaaaaaaaaaaaaaaaaaaaaaaaaaaaa

SEQ ID NO: 25777 - RNA, 4011 nt, Artificial Sequence
  SARS-CoV-2/Wuhan/WIV05/2019__EPI_ISL_402128 spike protein mRNA gc (1-1273)(K986P_V987P_H69del_V70del_D614G)
aggagaaagcuuaccauguucguguuccuggugcugcugccccuggugagcagccagugcgugaaccugaccacccggacccagcugcccccugccuacaccaacagcuucacccggggcguguacuaccccgacaagguguuccggagcagcgugcugcacagcacccaggaccuguuccugcccuucuucagcaacgugaccugguuccacgccaucagcggcaccaacggcaccaagcgguucgacaacccagugcugcccuucaacgacggcguguacuucgccagcaccgagaagucaaacaucauccggggcuggaucuucggcaccacccuggacagcaagacacagagccugcugaucgugaacaacgccaccaacguggugaucaaggugugcgaguuucaguucugcaacgaccccuuccugggcguguacuaccacaagaacaacaagagcuggauggagagcgaguuccggguguacagcagcgcuaacaauugcaccuucgaguacgucagccagcccuuccugauggaccucgagggcaagcagggcaacuucaagaaccugcgggaguucguguucaagaacaucgauggcuacuucaagaucuacagcaagcacacccccaucaaccuggugcgggaccugccccagggauucagcgcccuggagccucugguggaccugcccaucggcaucaacaucaccagguuccagacccugcuggcccugcaccggagcuaccugacccccggcgacagcagcagcggcuggaccgccggcgccgccgcauacuacgugggcuaccugcagccacggaccuuccugcugaaguacaacgagaacggcaccaucaccgacgccguggacugcgcccuggacccccugagcgagaccaagugcacccuaaagagcuucaccguggagaagggcaucuaccagaccagcaacuuccgggugcagcccacugagagcaucgugcgguuccccaacauuaccaaccugugucccuucggcgagguguucaacgccacccgguucgccagcguguacgccuggaaccggaagcggaucagcaacugcguggccgacuacagcgugcuguacaacagcgccagcuucagcaccuucaagugcuacggcgugagcccuaccaagcugaacgaccugugcuucaccaacguguacgcugacagcuucgugauccggggcgacgaggugcggcagaucgcccccggccagaccggcaagaucgccgacuacaacuacaagcugcccgacgacuucaccggcugcgugaucgccuggaacagcaacaaccuggacagcaaggugggcggcaacuacaacuaccuguaccggcuguuccguaagagcaaccugaagccauucgagcgggacaucagcaccgagaucuaccaggccggcagcacccccugcaacgguguggagggcuuuaacugcuacuucccccugcagagcuacggcuuccagcccaccaacggcgugggcuaccagcccuaccgggugguggugcugagcuucgagcugcugcacgcccccgccaccgugugcggcccuaaaaagagcaccaaccuggugaagaacaagugcgugaacuucaauuucaacggccugaccggcaccggcgugcugaccgagagcaacaagaaguuccugcccuuccagcaguucggccgggauaucgccgacaccaccgacgcagugcgggacccccagacccuggagauccuggacaucaccccaugcagcuucggcggcgugagcgugaucacccccggcacaaacaccagcaaccaggucgccgugcuguaccagggagugaacugcaccgaggugcccguggccauccacgccgaccagcugacccccaccuggcggguguacagcaccggcagcaacguguuccagacccgggccggcugccugaucggcgccgagcacgugaacaacuccuacgagugcgacauccccaucggcgcuggcaucugcgccagcuaccagacccagaccaacagcccccggcgggcccggagcguggccagccagagcaucaucgccuacaccaugagcuuaggcgccgagaacagcguggccuacagcaacaacagcaucgcgaucccuaccaacuucaccaucagcgugaccaccgagauacugcccgugagcaugaccaagaccagcguggacuguaccauguacaucugcggcgacagcaccgagugcagcaaccugcugcugcaguacggcagcuucugcacccagcugaaccgggcccugaccggcaucgccguggagcaggacaagaacacccaagagguguucgcccaggugaagcagaucuacaagacucccccaaucaaggacuucggcggcuucaacuucagccagauccugcccgaccccagcaagcccagcaagcggagcuucaucgaggaccugcuguucaacaaggugacccuggccgacgccggcuucaucaagcaguacggcgacugccugggggauaucgccgcucgggaccugaucugcgcccagaaguucaacggccugaccgugcugcccccucugcugaccgacgagaugaucgcccaguacaccagcgcccugcuugccggcaccaucaccagcggcuggaccuucggcgccggcgcagcccugcagauccccuucgccaugcagauggccuaccgguucaacggcaucggcgugacccagaacgugcuguacgagaaccagaagcugaucgccaaccaguucaacagcgccaucggcaagauccaggacagccugagcagcaccgccagcgcccugggcaagcugcaggacguggugaaccagaacgcucaggcccugaacacccuggugaagcagcugagcagcaacuucggcgccaucagcucagugcugaaugacauccugagcaggcuggaucccccagaggccgaggugcagaucgaccggcugaucaccggccggcugcagagccugcagaccuacgugacccagcagcugauccgggccgccgagauccgggccagcgccaaccuggcagccaccaagaugagcgagugcgugcugggccagagcaagcggguggacuuuugcggcaagggcuaccaccugaugagcuucccccagagcgcuccccacggcgugguguuccuccacgugacauacgugcccgcccaggagaagaacuucaccaccgcccccgccauuugccacgacggcaaggcccacuucccccgggagggagucuucgugagcaacggcacccacugguucgugacccagcggaacuucuacgagccucagaucaucaccaccgacaacaccuucgugagcggcaacugcgacguggugaucggcaucgugaacaacaccguguacgacccccugcagcccgagcuggacagcuucaaggaggagcuggacaaguacuucaagaaccacaccagcccagacguggaccugggcgacaucagcggcaucaacgccagcguggugaacauccagaaggagaucgaccggcugaacgagguggccaagaaccugaacgagagccugaucgaccugcaggagcugggcaaguacgagcaguacaucaaguggcccugguacaucuggcugggcuucaucgccggccugaucgccaucgugauggugaccaucaugcugugcugcaugaccagcugcuguagcugccugaagggcugcugcagcugcggcagcugcugcaaguucgacgaggacgacagcgagcccgugcugaagggcgugaagcugcacuacaccugaggacuaguuauaagacugacuagcccgaugggccucccaacgggcccuccuccccuccuugcaccgagauuaauagaucuaaaaaaaaaaaaaaaaaaaaaaaaaaaaaaaaaaaaaaaaaaaaaaaaaaaaaaaaaaaaaaaaaaaaaaaaaaaaaaaaaaaaaaaaaaaaaaaaaaaa

SEQ ID NO: 25778 - RNA, 4017 nt, Artificial Sequence
  SARS-CoV-2/Wuhan/WIV05/2019__EPI_ISL_402128 spike protein mRNA gc (1-1273)(K986P_V987P_Y453F_D614G)
aggagaaagcuuaccauguucguguuccuggugcugcugccccuggugagcagccagugcgugaaccugaccacccggacccagcugcccccugccuacaccaacagcuucacccggggcguguacuaccccgacaagguguuccggagcagcgugcugcacagcacccaggaccuguuccugcccuucuucagcaacgugaccugguuccacgccauccacgugagcggcaccaacggcaccaagcgguucgacaacccagugcugcccuucaacgacggcguguacuucgccagcaccgagaagucaaacaucauccggggcuggaucuucggcaccacccuggacagcaagacacagagccugcugaucgugaacaacgccaccaacguggugaucaaggugugcgaguuucaguucugcaacgaccccuuccugggcguguacuaccacaagaacaacaagagcuggauggagagcgaguuccgggucuacagcagcgcuaacaauugcaccuucgaguacgugagccagcccuuccugauggaccucgagggcaagcagggcaacuucaagaaccugcgggaguucguguucaagaacaucgauggcuacuucaagaucuacagcaagcacacccccaucaaccuggugcgggaccugccccagggauucagcgcccuggagccucugguggaccugcccaucggcaucaacaucaccagguuccagacccugcuggcccugcaccggagcuaccugacccccggcgacagcagcagcggcuggaccgccggcgccgccgcauacuacgugggcuaccugcagccacggaccuuccugcugaaguacaacgagaacggcaccaucaccgacgccguggacugcgcccuggacccccugagcgagaccaagugcacccuaaagagcuucaccguggagaagggcaucuaccagaccagcaacuuccgggugcagcccacugagagcaucgugcgguuccccaacauuaccaaccugugucccuucggcgagguguucaacgccacccgguucgccagcguguacgccuggaaccggaagcggaucagcaacugcguggccgacuacagcgugcuguacaacagcgccagcuucagcaccuucaagugcuacggcgugagcccuaccaagcugaacgaccugugcuucaccaacguguacgcugacagcuucgugauccggggcgacgaggugcggcagaucgcccccggccagaccggcaagaucgccgacuacaacuacaagcugcccgacgacuucaccggcugcgugaucgccuggaacagcaacaaccuggacagcaaggugggcggcaacuacaacuaccuguuccggcuguuccguaagagcaaccugaagccauuugagcgggacaucagcaccgagaucuaccaggccggcagcacccccugcaacgguguggagggcuucaacugcuacuucccccugcagagcuacggcuuccagcccaccaacggcgugggcuaccagcccuaccgggugguggugcugagcuucgagcugcugcacgcccccgccaccgugugcggcccuaaaaagagcaccaaccuggugaagaacaagugcgugaacuucaauuucaacggccugaccggcaccggcgugcugaccgagagcaacaagaaguuccugcccuuccagcaguucggccgggauaucgccgacaccaccgacgcagugcgggacccccagacccuggagauccuggacaucaccccaugcagcuucggcggcgugagcgucaucacccccggcacaaacaccagcaaccagguggccgugcuguaccagggagugaacugcaccgaggugcccguggccauccacgccgaccagcugacccccaccuggcggguguacagcaccggcagcaacguguuccagacccgggccggcugccugaucggcgccgagcacgugaacaacuccuacgagugcgacauccccaucggcgcuggcaucugcgccagcuaccagacccagaccaacagcccccggcgggcccggagcguggccagccagagcaucaucgccuacaccaugagcuuaggcgccgagaacagcguggccuacagcaacaacagcaucgcgaucccuaccaacuucaccaucagcgugaccaccgagauacugcccgugagcaugaccaagaccagcguggacuguaccauguacaucugcggcgacagcaccgagugcagcaaccugcugcugcaguacggcagcuucugcacccagcugaaccgggcccugaccggcaucgccguggagcaggacaagaacacccaagagguguucgcccaggugaagcagaucuacaagacucccccaaucaaggacuucggcggcuucaacuucagccagauccugcccgaccccagcaagcccagcaagcggagcuucaucgaggaccugcuguucaacaaggugacccuggccgacgccggcuucaucaagcaguacggcgacugccugggggauaucgccgcucgggaccugaucugcgcccagaaguucaacggccugaccgugcugcccccucugcugaccgacgagaugaucgcccaguacaccagcgcccugcuugccggcaccaucaccagcggcuggaccuucggcgccggcgcagcccugcagauccccuucgccaugcagauggccuaccgguucaacggcaucggcgugacccagaacgugcuguacgagaaccagaagcugaucgccaaccaguucaacagcgccaucggcaagauccaggacagccugagcagcaccgccagcgcccugggcaagcugcaggacguggugaaccagaacgcucaggcccugaacacccuggugaagcagcugagcagcaacuuuggcgccaucagcucagugcugaaugacauccugagcaggcuggaucccccagaggccgaggugcagaucgaccggcugaucaccggccggcugcagagccugcagaccuacgugacccagcagcugauccgggccgccgagauccgggccagcgccaaccuggcagccaccaagaugagcgagugcgugcugggccagagcaagcggguggacuucugcggcaagggcuaccaccugaugagcuucccccagagcgcuccccacggcgugguguuccuccacgugacauacguccccgcccaggagaagaacuucaccaccgcccccgccauuugccacgacggcaaggcccacuucccccgggagggaguguucgugagcaacggcacccacugguucgugacccagcggaacuucuacgagccucagaucaucaccaccgacaacaccuucgugagcggcaacugcgacguggugaucggcaucgugaacaacaccguguacgacccccugcagcccgagcuggacagcuucaaggaggagcuggacaaguacuucaagaaccacaccagcccagacguggaccugggcgacaucagcggcaucaacgccagcguggugaacauccagaaggagaucgaccggcugaacgagguggccaagaaccugaacgagagccugaucgaccugcaggagcugggcaaguacgagcaguacaucaaguggcccugguacaucuggcugggcuucaucgccggccugaucgccaucgugauggugaccaucaugcugugcugcaugaccagcugcuguagcugccugaagggcugcugcagcugcggcagcugcugcaaguucgacgaggacgacagcgagcccgugcugaagggcgugaagcugcacuacaccugaggacuaguuauaagacugacuagcccgaugggccucccaacgggcccuccuccccuccuugcaccgagauuaauagaucuaaaaaaaaaaaaaaaaaaaaaaaaaaaaaaaaaaaaaaaaaaaaaaaaaaaaaaaaaaaaaaaaaaaaaaaaaaaaaaaaaaaaaaaaaaaaaaaaaaaa

SEQ ID NO: 25779 - RNA, 4017 nt, Artificial Sequence
  SARS-CoV-2/Wuhan/WIV05/2019__EPI_ISL_402128 spike protein mRNA gc (1-1273)(K986P_V987P_D614G_I692V)
aggagaaagcuuaccauguucguguuccuggugcugcugccccuggugagcagccagugcgugaaccugaccacccggacccagcugcccccugccuacaccaacagcuucacccggggcguguacuaccccgacaagguguuccggagcagcgugcugcacagcacccaggaccuguuccugcccuucuucagcaacgugaccugguuccacgccauccacgugagcggcaccaacggcaccaagcgguucgacaacccagugcugcccuucaacgacggcguguacuucgccagcaccgagaagucaaacaucauccggggcuggaucuucggcaccacccuggacagcaagacacagagccugcugaucgugaacaacgccaccaacguggugaucaaggugugcgaguuucaguucugcaacgaccccuuccugggcguguacuaccacaagaacaacaagagcuggauggagagcgaguuccgggucuacagcagcgcuaacaauugcaccuucgaguacgugagccagcccuuccugauggaccucgagggcaagcagggcaacuucaagaaccugcgggaguucguguucaagaacaucgauggcuacuucaagaucuacagcaagcacacccccaucaaccuggugcgggaccugccccagggauucagcgcccuggagccucugguggaccugcccaucggcaucaacaucaccagguuccagacccugcuggcccugcaccggagcuaccugacccccggcgacagcagcagcggcuggaccgccggcgccgccgcauacuacgugggcuaccugcagccacggaccuuccugcugaaguacaacgagaacggcaccaucaccgacgccguggacugcgcccuggacccccugagcgagaccaagugcacccuaaagagcuucaccguggagaagggcaucuaccagaccagcaacuuccgggugcagcccacugagagcaucgugcgguuccccaacauuaccaaccugugucccuucggcgagguguucaacgccacccgguucgccagcguguacgccuggaaccggaagcggaucagcaacugcguggccgacuacagcgugcuguacaacagcgccagcuucagcaccuucaagugcuacggcgugagcccuaccaagcugaacgaccugugcuucaccaacguguacgcugacagcuucgugauccggggcgacgaggugcggcagaucgcccccggccagaccggcaagaucgccgacuacaacuacaagcugcccgacgacuucaccggcugcgugaucgccuggaacagcaacaaccuggacagcaaggugggcggcaacuacaacuaccuguaccggcuguuccguaagagcaaccugaagccauucgagcgggacaucagcaccgagaucuaccaggccggcagcacccccugcaacgguguggagggcuuuaacugcuacuucccccugcagagcuacggcuuccagcccaccaacggcgugggcuaccagcccuaccgggugguggugcugagcuucgagcugcugcacgcccccgccaccgugugcggcccuaaaaagagcaccaaccuggugaagaacaagugcgugaacuucaauuucaacggccugaccggcaccggcgugcugaccgagagcaacaagaaguuccugcccuuccagcaguucggccgggauaucgccgacaccaccgacgcagugcgggacccccagacccuggagauccuggacaucaccccaugcagcuucggcggcgugagcgucaucacccccggcacaaacaccagcaaccagguggccgugcuguaccagggagugaacugcaccgaggugcccguggccauccacgccgaccagcugacccccaccuggcggguguacagcaccggcagcaacguguuccagacccgggccggcugccugaucggcgccgagcacgugaacaacuccuacgagugcgacauccccaucggcgcuggcaucugcgccagcuaccagacccagaccaacagcccccggcgggcccggagcguggccagccagagcgugaucgccuacaccaugagcuuaggcgccgagaacagcguggccuacagcaacaacagcaucgcgaucccuaccaacuucaccaucagcgugaccaccgagauccugcccgugagcaugaccaagaccagcguggacuguaccauguacauaugcggcgacagcaccgagugcagcaaccugcugcugcaguacggcagcuucugcacccagcugaaccgggcccugaccggcaucgccguggagcaggacaagaacacccaagagguguucgcccaggugaagcagaucuacaagacucccccaaucaaggacuucggcggcuucaacuucagccagauccugcccgaccccagcaagcccagcaagcggagcuucaucgaggaccugcuguucaacaaggugacccuggccgacgccggcuucaucaagcaguacggcgacugccugggggauaucgccgcucgggaccugaucugcgcccagaaguucaacggccugaccgugcugcccccucugcugaccgacgagaugaucgcccaguacaccagcgcccugcuugccggcaccaucaccagcggcuggaccuucggcgccggcgcagcccugcagauccccuucgccaugcagauggccuaccgguucaacggcaucggcgugacccagaacgugcuguacgagaaccagaagcugaucgccaaccaguucaacagcgccaucggcaagauccaggacagccugagcagcaccgccagcgcccugggcaagcugcaggacguggugaaccagaacgcucaggcccugaacacccuggugaagcagcugagcagcaacuucggcgccaucagcucagugcugaaugacauccugagcaggcuggaucccccagaggccgaggugcagaucgaccggcugaucaccggccggcugcagagccugcagaccuacgugacccagcagcugauccgggccgccgagauccgggccagcgccaaccuggcagccaccaagaugagcgagugcgugcugggccagagcaagcggguggacuuuugcggcaagggcuaccaccugaugagcuucccccagagcgcuccccacggcgugguguuccuccacgucacauacgugcccgcccaggagaagaacuucaccaccgcccccgccaucugccacgacggcaaggcccacuucccccgggagggaguguucgugagcaacggcacccacugguucgugacccagcggaacuucuacgagccucagauuaucaccaccgacaacaccuucgugagcggcaacugcgacguggugaucggcaucgugaacaacaccguguacgacccccugcagcccgagcuggacagcuucaaggaggagcuggacaaguacuucaagaaccacaccagcccagacguggaccugggcgacaucagcggcaucaacgccagcguggugaacauccagaaggagaucgaccggcugaacgagguggccaagaaccugaacgagagccugaucgaccugcaggagcugggcaaguacgagcaguacaucaaguggcccugguacaucuggcugggcuucaucgccggccugaucgccaucgugauggugaccaucaugcugugcugcaugaccagcugcuguagcugccugaagggcugcugcagcugcggcagcugcugcaaguucgacgaggacgacagcgagcccgugcugaagggcgugaagcugcacuacaccugaggacuaguuauaagacugacuagcccgaugggccucccaacgggcccuccuccccuccuugcaccgagauuaauagaucuaaaaaaaaaaaaaaaaaaaaaaaaaaaaaaaaaaaaaaaaaaaaaaaaaaaaaaaaaaaaaaaaaaaaaaaaaaaaaaaaaaaaaaaaaaaaaaaaaaaa

SEQ ID NO: 25780 - RNA, 4017 nt, Artificial Sequence
  SARS-CoV-2/Wuhan/WIV05/2019__EPI_ISL_402128 spike protein mRNA gc (1-1273)(K986P_V987P_D614G_M1229I)
aggagaaagcuuaccauguucguguuccuggugcugcugccccuggugagcagccagugcgugaaccugaccacccggacccagcugcccccugccuacaccaacagcuucacccggggcguguacuaccccgacaagguguuccggagcagcgugcugcacagcacccaggaccuguuccugcccuucuucagcaacgugaccugguuccacgccauccacgugagcggcaccaacggcaccaagcgguucgacaacccagugcugcccuucaacgacggcguguacuucgccagcaccgagaagucaaacaucauccggggcuggaucuucggcaccacccuggacagcaagacacagagccugcugaucgugaacaacgccaccaacguggugaucaaggugugcgaguuucaguucugcaacgaccccuuccugggcguguacuaccacaagaacaacaagagcuggauggagagcgaguuccgggucuacagcagcgcuaacaauugcaccuucgaguacgugagccagcccuuccugauggaccucgagggcaagcagggcaacuucaagaaccugcgggaguucguguucaagaacaucgauggcuacuucaagaucuacagcaagcacacccccaucaaccuggugcgggaccugccccagggauucagcgcccuggagccucugguggaccugcccaucggcaucaacaucaccagguuccagacccugcuggcccugcaccggagcuaccugacccccggcgacagcagcagcggcuggaccgccggcgccgccgcauacuacgugggcuaccugcagccacggaccuuccugcugaaguacaacgagaacggcaccaucaccgacgccguggacugcgcccuggacccccugagcgagaccaagugcacccuaaagagcuucaccguggagaagggcaucuaccagaccagcaacuuccgggugcagcccacugagagcaucgugcgguuccccaacauuaccaaccugugucccuucggcgagguguucaacgccacccgguucgccagcguguacgccuggaaccggaagcggaucagcaacugcguggccgacuacagcgugcuguacaacagcgccagcuucagcaccuucaagugcuacggcgugagcccuaccaagcugaacgaccugugcuucaccaacguguacgcugacagcuucgugauccggggcgacgaggugcggcagaucgcccccggccagaccggcaagaucgccgacuacaacuacaagcugcccgacgacuucaccggcugcgugaucgccuggaacagcaacaaccuggacagcaaggugggcggcaacuacaacuaccuguaccggcuguuccguaagagcaaccugaagccauucgagcgggacaucagcaccgagaucuaccaggccggcagcacccccugcaacgguguggagggcuuuaacugcuacuucccccugcagagcuacggcuuccagcccaccaacggcgugggcuaccagcccuaccgggugguggugcugagcuucgagcugcugcacgcccccgccaccgugugcggcccuaaaaagagcaccaaccuggugaagaacaagugcgugaacuucaauuucaacggccugaccggcaccggcgugcugaccgagagcaacaagaaguuccugcccuuccagcaguucggccgggauaucgccgacaccaccgacgcagugcgggacccccagacccuggagauccuggacaucaccccaugcagcuucggcggcgugagcgucaucacccccggcacaaacaccagcaaccagguggccgugcuguaccagggagugaacugcaccgaggugcccguggccauccacgccgaccagcugacccccaccuggcggguguacagcaccggcagcaacguguuccagacccgggccggcugccugaucggcgccgagcacgugaacaacuccuacgagugcgacauccccaucggcgcuggcaucugcgccagcuaccagacccagaccaacagcccccggcgggcccggagcguggccagccagagcaucaucgccuacaccaugagcuuaggcgccgagaacagcguggccuacagcaacaacagcaucgcgaucccuaccaacuucaccaucagcgugaccaccgagauacugcccgugagcaugaccaagaccagcguggacuguaccauguacaucugcggcgacagcaccgagugcagcaaccugcugcugcaguacggcagcuucugcacccagcugaaccgggcccugaccggcaucgccguggagcaggacaagaacacccaagagguguucgcccaggugaagcagaucuacaagacucccccaaucaaggacuucggcggcuucaacuucagccagauccugcccgaccccagcaagcccagcaagcggagcuucaucgaggaccugcuguucaacaaggugacccuggccgacgccggcuucaucaagcaguacggcgacugccugggggauaucgccgcucgggaccugaucugcgcccagaaguucaacggccugaccgugcugcccccucugcugaccgacgagaugaucgcccaguacaccagcgcccugcuugccggcaccaucaccagcggcuggaccuucggcgccggcgcagcccugcagauccccuucgccaugcagauggccuaccgguucaacggcaucggcgugacccagaacgugcuguacgagaaccagaagcugaucgccaaccaguucaacagcgccaucggcaagauccaggacagccugagcagcaccgccagcgcccugggcaagcugcaggacguggugaaccagaacgcucaggcccugaacacccuggugaagcagcugagcagcaacuucggcgccaucagcucagugcugaaugacauccugagcaggcuggaucccccagaggccgaggugcagaucgaccggcugaucaccggccggcugcagagccugcagaccuacgugacccagcagcugauccgggccgccgagauccgggccagcgccaaccuggcagccaccaagaugagcgagugcgugcugggccagagcaagcggguggacuuuugcggcaagggcuaccaccugaugagcuucccccagagcgcuccccacggcgugguguuccuccacgugacauacguccccgcccaggagaagaacuucaccaccgcccccgccauuugccacgacggcaaggcccacuucccccgggagggaguguucgugagcaacggcacccacugguucgugacccagcggaacuucuacgagccucagaucaucaccaccgacaacaccuucgugagcggcaacugcgacguggugaucggcaucgugaacaacaccguguacgacccccugcagcccgagcuggacagcuucaaggaggagcuggacaaguacuucaagaaccacaccagcccagacguggaccugggcgacaucagcggcaucaacgccagcguggugaacauccagaaggagaucgaccggcugaacgagguggccaagaaccugaacgagagccugaucgaccugcaggagcugggcaaguacgagcaguacaucaaguggcccugguacaucuggcugggcuucaucgccggccugaucgccaucgugaucgugaccaucaugcugugcugcaugaccagcugcuguagcugccugaagggcugcugcagcugcggcagcugcugcaaguucgacgaggacgacagcgagcccgugcugaagggcgugaagcugcacuacaccugaggacuaguuauaagacugacuagcccgaugggccucccaacgggcccuccuccccuccuugcaccgagauuaauagaucuaaaaaaaaaaaaaaaaaaaaaaaaaaaaaaaaaaaaaaaaaaaaaaaaaaaaaaaaaaaaaaaaaaaaaaaaaaaaaaaaaaaaaaaaaaaaaaaaaaaa

SEQ ID NO: 25781 - RNA, 4011 nt, Artificial Sequence
  SARS-CoV-2/Wuhan/WIV05/2019__EPI_ISL_402128 spike protein mRNA gc (1-1273)(K986P_V987P_H69del_V70del_A222V_Y453F_S477N_D614G_I692V)
aggagaaagcuuaccauguucguguuccuggugcugcugccccuggugagcagccagugcgugaaccugaccacccggacccagcugcccccugccuacaccaacagcuucacccggggcguguacuaccccgacaagguguuccggagcagcgugcugcacagcacccaggaccuguuccugcccuucuucagcaacgugaccugguuccacgccaucagcggcaccaacggcaccaagcgguucgacaacccagugcugcccuucaacgacggcguguacuucgccagcaccgagaagucaaacaucauccggggcuggaucuucggcaccacccuggacagcaagacacagagccugcugaucgugaacaacgccaccaacguggugaucaaggugugcgaguuucaguucugcaacgaccccuuccugggcguguacuaccacaagaacaacaagagcuggauggagagcgaguuccggguguacagcagcgcuaacaauugcaccuucgaguacgucagccagcccuuccugauggaccucgagggcaagcagggcaacuucaagaaccugcgggaguucguguucaagaacaucgauggcuacuucaagaucuacagcaagcacacccccaucaaccuggugcgggaccugccccagggauucagcgugcuggagccucugguggaccugcccaucggcaucaacaucaccagguuccagacccugcuggcccugcaccggagcuaccugacccccggcgacagcagcagcggcuggaccgccggcgccgccgccuacuacgugggcuaccugcagccacggaccuuccugcugaaguacaacgagaacggcaccaucaccgacgcaguggacugcgcccuggacccccugagcgagaccaagugcacccuaaagagcuucaccguggagaagggcaucuaccagaccagcaacuuccgggugcagcccacugagagcaucgugcgguuccccaacauuaccaaccugugucccuucggcgagguguucaacgccacccgguucgccagcguguacgccuggaaccggaagcggaucagcaacugcguggccgacuacagcgugcuguacaacagcgccagcuucagcaccuucaagugcuacggcgugagcccuaccaagcugaacgaccugugcuucaccaacguguacgccgacagcuucgugauccggggcgacgaggugcggcagaucgcucccggccagaccggcaagaucgccgacuacaacuacaagcugcccgacgacuucaccggcugcgugaucgccuggaacagcaacaaccuggacagcaaggugggcggcaacuacaacuaccuguuccggcuguuccguaagagcaaccugaagccauuugagcgggacaucagcaccgagaucuaccaggccggcaacacccccugcaacgguguggagggcuucaacugcuacuucccccugcagagcuacggcuuccagcccaccaacggcgugggcuaccagcccuaccgggugguggugcugagcuucgagcugcugcacgcccccgccaccgugugcggcccuaaaaagagcaccaaccuggugaagaacaagugcgugaauuucaacuucaacggccugaccggcaccggcgugcugaccgagagcaacaagaaguuccugcccuuccagcaguucggccgggauaucgccgacaccaccgacgccgugcgggacccccagacccuggagauccuggacaucaccccaugcagcuucggcggcgugagcgucaucacccccggcacaaacaccagcaaccagguggcagugcuguaccagggagugaacugcaccgaggugcccguggccauccacgccgaccagcugacccccaccuggcggguguacagcaccggcagcaacguguuccagacccgggccggcugccugaucggcgccgagcacgugaacaacagcuacgagugcgacauccccaucggcgccggcaucugcgcuuccuaccagacccagaccaacagcccccggcgggcccggagcguggccagccagagcgugaucgccuacaccaugagcuuaggcgccgagaacagcguggccuacagcaacaacagcaucgccaucccuaccaacuucaccaucagcgugaccaccgagauccugcccgugagcaugaccaagaccagcguggacuguaccauguacauaugcggcgacagcaccgagugcagcaaccugcugcugcaguacggcagcuucugcacccagcugaaccgggcgcugaccggcaucgccguggagcaggacaagaacacccaagagguguucgcccaggugaagcagaucuacaagacucccccaaucaaggacuucggcggcuucaacuucagccagauccugcccgaccccagcaagcccagcaagcggagcuucaucgaggaccugcuguucaacaaggugacccuggccgacgccggcuucaucaagcaguacggcgacugccugggggauaucgccgcccgggaccugaucugcgcucagaaguucaacggccugaccgugcugcccccucugcugaccgacgagaugaucgcccaguacaccagcgcccugcuugccggcaccaucaccagcggcuggaccuucggcgccggcgccgcacugcagauccccuucgccaugcagauggccuaccgguucaacggcaucggcgugacccagaacgugcuguacgagaaccagaagcugaucgccaaccaguucaacagcgccaucggcaagauccaggacagccugagcagcaccgccagcgcccugggcaagcugcaggacguggugaaccagaacgcccaggcucugaacacccuggugaagcagcugagcagcaauuuuggcgccaucagcagcgugcugaacgacauccugucaaggcuggaucccccagaggccgaggugcagaucgaccggcugaucaccggccggcugcagagccugcagaccuacgugacccagcagcugauccgggccgccgagauccgggccagcgccaaccuggccgcaaccaagaugagcgagugcgugcugggccagagcaagcggguggacuucugcggcaagggcuaccaccugaugagcuucccccagagcgcuccccacggcgugguguuccuccacgucacauacgugcccgcccaggagaagaacuucaccaccgcccccgccaucugccacgacggcaaggcccacuucccccgggagggaguguucgugagcaacggcacccacugguucgugacccagcggaacuucuacgagccucagauuaucaccaccgacaacaccuucgugagcggcaacugcgacguggugaucggcaucgugaacaacaccguguacgacccccugcagcccgagcuggacagcuucaaggaggagcuggacaaguacuucaagaaccacaccagcccagacguggaccugggcgacaucagcggcaucaacgccagcguggugaacauccagaaggagaucgaccggcugaacgagguggccaagaaccugaacgagagccugaucgaccugcaggagcugggcaaguacgagcaguacaucaaguggcccugguacaucuggcugggcuucaucgccggccugaucgccaucgugauggugaccaucaugcugugcugcaugaccagcugcuguagcugccugaagggcugcugcagcugcggcagcugcugcaaguucgacgaggacgacagcgagcccgugcugaagggcgugaagcugcacuacaccugaggacuaguuauaagacugacuagcccgaugggccucccaacgggcccuccuccccuccuugcaccgagauuaauagaucuaaaaaaaaaaaaaaaaaaaaaaaaaaaaaaaaaaaaaaaaaaaaaaaaaaaaaaaaaaaaaaaaaaaaaaaaaaaaaaaaaaaaaaaaaaaaaaaaaaaa

SEQ ID NO: 25782 - RNA, 4011 nt, Artificial Sequence
  SARS-CoV-2/Wuhan/WIV05/2019__EPI_ISL_402128 spike protein mRNA gc (1-1273)(K986P_V987P_H69del_V70del_Y453F_D614G_I692V_M1229I)
aggagaaagcuuaccauguucguguuccuggugcugcugccccuggugagcagccagugcgugaaccugaccacccggacccagcugcccccugccuacaccaacagcuucacccggggcguguacuaccccgacaagguguuccggagcagcgugcugcacagcacccaggaccuguuccugcccuucuucagcaacgugaccugguuccacgccaucagcggcaccaacggcaccaagcgguucgacaacccagugcugcccuucaacgacggcguguacuucgccagcaccgagaagucaaacaucauccggggcuggaucuucggcaccacccuggacagcaagacacagagccugcugaucgugaacaacgccaccaacguggugaucaaggugugcgaguuucaguucugcaacgaccccuuccugggcguguacuaccacaagaacaacaagagcuggauggagagcgaguuccggguguacagcagcgcuaacaauugcaccuucgaguacgucagccagcccuuccugauggaccucgagggcaagcagggcaacuucaagaaccugcgggaguucguguucaagaacaucgauggcuacuucaagaucuacagcaagcacacccccaucaaccuggugcgggaccugccccagggauucagcgcccuggagccucugguggaccugcccaucggcaucaacaucaccagguuccagacccugcuggcccugcaccggagcuaccugacccccggcgacagcagcagcggcuggaccgccggcgccgccgcauacuacgugggcuaccugcagccacggaccuuccugcugaaguacaacgagaacggcaccaucaccgacgccguggacugcgcccuggacccccugagcgagaccaagugcacccuaaagagcuucaccguggagaagggcaucuaccagaccagcaacuuccgggugcagcccacugagagcaucgugcgguuccccaacauuaccaaccugugucccuucggcgagguguucaacgccacccgguucgccagcguguacgccuggaaccggaagcggaucagcaacugcguggccgacuacagcgugcuguacaacagcgccagcuucagcaccuucaagugcuacggcgugagcccuaccaagcugaacgaccugugcuucaccaacguguacgcugacagcuucgugauccggggcgacgaggugcggcagaucgcccccggccagaccggcaagaucgccgacuacaacuacaagcugcccgacgacuucaccggcugcgugaucgccuggaacagcaacaaccuggacagcaaggugggcggcaacuacaacuaccuguuccggcuguuccguaagagcaaccugaagccauuugagcgggacaucagcaccgagaucuaccaggccggcagcacccccugcaacgguguggagggcuucaacugcuacuucccccugcagagcuacggcuuccagcccaccaacggcgugggcuaccagcccuaccgggugguggugcugagcuucgagcugcugcacgcccccgccaccgugugcggcccuaaaaagagcaccaaccuggugaagaacaagugcgugaacuucaauuucaacggccugaccggcaccggcgugcugaccgagagcaacaagaaguuccugcccuuccagcaguucggccgggauaucgccgacaccaccgacgcagugcgggacccccagacccuggagauccuggacaucaccccaugcagcuucggcggcgugagcgugaucacccccggcacaaacaccagcaaccaggucgccgugcuguaccagggagugaacugcaccgaggugcccguggccauccacgccgaccagcugacccccaccuggcggguguacagcaccggcagcaacguguuccagacccgggccggcugccugaucggcgccgagcacgugaacaacuccuacgagugcgacauccccaucggcgcuggcaucugcgccagcuaccagacccagaccaacagcccccggcgggcccggagcguggccagccagagcgugaucgccuacaccaugagcuuaggcgccgagaacagcguggccuacagcaacaacagcaucgcgaucccuaccaacuucaccaucagcgugaccaccgagauccugcccgugagcaugaccaagaccagcguggacuguaccauguacauaugcggcgacagcaccgagugcagcaaccugcugcugcaguacggcagcuucugcacccagcugaaccgggcccugaccggcaucgccguggagcaggacaagaacacccaagagguguucgcccaggugaagcagaucuacaagacucccccaaucaaggacuucggcggcuucaacuucagccagauccugcccgaccccagcaagcccagcaagcggagcuucaucgaggaccugcuguucaacaaggugacccuggccgacgccggcuucaucaagcaguacggcgacugccugggggauaucgccgcucgggaccugaucugcgcccagaaguucaacggccugaccgugcugcccccucugcugaccgacgagaugaucgcccaguacaccagcgcccugcuugccggcaccaucaccagcggcuggaccuucggcgccggcgcagcccugcagauccccuucgccaugcagauggccuaccgguucaacggcaucggcgugacccagaacgugcuguacgagaaccagaagcugaucgccaaccaguucaacagcgccaucggcaagauccaggacagccugagcagcaccgccagcgcccugggcaagcugcaggacguggugaaccagaacgcucaggcccugaacacccuggugaagcagcugagcagcaacuuuggcgccaucagcucagugcugaaugacauccugagcaggcuggaucccccagaggccgaggugcagaucgaccggcugaucaccggccggcugcagagccugcagaccuacgugacccagcagcugauccgggccgccgagauccgggccagcgccaaccuggcagccaccaagaugagcgagugcgugcugggccagagcaagcggguggacuucugcggcaagggcuaccaccugaugagcuucccccagagcgcuccccacggcgugguguuccuccacgugacauacguccccgcccaggagaagaacuucaccaccgcccccgccaucugccacgacggcaaggcccacuucccccgggagggaguguucgugagcaacggcacccacugguucgugacccagcggaacuucuacgagccucagauuaucaccaccgacaacaccuucgugagcggcaacugcgacguggugaucggcaucgugaacaacaccguguacgacccccugcagcccgagcuggacagcuucaaggaggagcuggacaaguacuucaagaaccacaccagcccagacguggaccugggcgacaucagcggcaucaacgccagcguggugaacauccagaaggagaucgaccggcugaacgagguggccaagaaccugaacgagagccugaucgaccugcaggagcugggcaaguacgagcaguacaucaaguggcccugguacaucuggcugggcuucaucgccggccugaucgccaucgugaucgugaccaucaugcugugcugcaugaccagcugcuguagcugccugaagggcugcugcagcugcggcagcugcugcaaguucgacgaggacgacagcgagcccgugcugaagggcgugaagcugcacuacaccugaggacuaguuauaagacugacuagcccgaugggccucccaacgggcccuccuccccuccuugcaccgagauuaauagaucuaaaaaaaaaaaaaaaaaaaaaaaaaaaaaaaaaaaaaaaaaaaaaaaaaaaaaaaaaaaaaaaaaaaaaaaaaaaaaaaaaaaaaaaaaaaaaaaaaaaa

SEQ ID NO: 25783 - RNA, 4008 nt, Artificial Sequence
  SARS-CoV-2/Wuhan/WIV05/2019__EPI_ISL_402128 spike protein mRNA gc (1-1273)(K986P_V987P_K986P_V987P_H69del_V70del_Y144del_N501Y_A570 D_D614G_P681H_T716I_S982A_D1118H)
aggagaaagcuuaccauguucguguuccuggugcugcugccccuggugagcagccagugcgugaaccugaccacccggacccagcugcccccugccuacaccaacagcuucacccggggcguguacuaccccgacaagguguuccggagcagcgugcugcacagcacccaggaccuguuccugcccuucuucagcaacgugaccugguuccacgccaucagcggcaccaacggcaccaagcgguucgacaacccagugcugcccuucaacgacggcguguacuucgccagcaccgagaagucaaacaucauccggggcuggaucuucggcaccacccuggacagcaagacacagagccugcugaucgugaacaacgccaccaacguggugaucaaggugugcgaguuucaguucugcaacgaccccuuccugggcguguaccacaagaacaacaagagcuggauggagagcgaguuccggguguacagcagcgcuaacaauugcaccuucgaguacgucagccagcccuuccugauggaccucgagggcaagcagggcaacuucaagaaccugcgggaguucguguucaagaacaucgauggcuacuucaagaucuacagcaagcacacccccaucaaccuggugcgggaccugccccagggauucagcgcccuggagccucugguggaccugcccaucggcaucaacaucaccagguuccagacccugcuggcccugcaccggagcuaccugacccccggcgacagcagcagcggcuggaccgccggcgccgccgcauacuacgugggcuaccugcagccacggaccuuccugcugaaguacaacgagaacggcaccaucaccgacgccguggacugcgcccuggacccccugagcgagaccaagugcacccuaaagagcuucaccguggagaagggcaucuaccagaccagcaacuuccgggugcagcccacugagagcaucgugcgguuccccaacauuaccaaccugugucccuucggcgagguguucaacgccacccgguucgccagcguguacgccuggaaccggaagcggaucagcaacugcguggccgacuacagcgugcuguacaacagcgccagcuucagcaccuucaagugcuacggcgugagcccuaccaagcugaacgaccugugcuucaccaacguguacgcugacagcuucgugauccggggcgacgaggugcggcagaucgcccccggccagaccggcaagaucgccgacuacaacuacaagcugcccgacgacuucaccggcugcgugaucgccuggaacagcaacaaccuggacagcaaggugggcggcaacuacaacuaccuguaccggcuguuccguaagagcaaccugaagccauucgagcgggacaucagcaccgagaucuaccaggccggcagcacccccugcaacgguguggagggcuuuaacugcuacuucccccugcagagcuacggcuuccagcccaccuacggcgugggcuaccagcccuaccgggugguggugcugagcuucgagcugcugcacgcccccgccaccgugugcggcccuaaaaagagcaccaaccuggugaagaacaagugcgugaacuucaacuucaauggccugaccggcaccggcgugcugaccgagagcaacaagaaguuccugcccuuccagcaguucggccgggauaucgacgacaccaccgacgccgugcgggacccccagacccuggagauccuggacaucaccccaugcagcuucggcggcgugagcgugaucacccccggcacaaacaccagcaaccaggucgcagugcuguaccagggagugaacugcaccgaggugcccguggccauccacgccgaccagcugacccccaccuggcggguguacagcaccggcagcaacguguuccagacccgggccggcugccugaucggcgccgagcacgugaacaacuccuacgagugcgacauccccaucggcgccggcaucugcgcuagcuaccagacccagaccaacagccaccggcgggcccggagcguggccagccagagcaucaucgccuacaccaugagcuuaggcgccgagaacagcguggccuacagcaacaacagcaucgccauccccaucaacuucaccauaagcgugaccaccgagauccugccugugagcaugaccaagaccagcguggacuguaccauguacaucugcggcgacagcaccgagugcagcaaccugcugcugcaguacggcagcuucugcacccagcugaaccgggcgcugaccggcaucgccguggagcaggacaagaacacccaagagguguucgcccaggugaagcagaucuacaagaccccacccaucaaggacuucggcggcuucaacuucagccagauccugcccgaccccagcaagcccagcaagcggagcuucaucgaggaccugcuguucaacaaggugacucuggccgacgccggcuucaucaagcaguacggcgauugccugggggacaucgccgcccgggaccugaucugcgcucagaaguucaacggccugaccgugcugccuccccugcugaccgacgagaugaucgcccaguacaccagcgcccugcuugccggcaccaucaccagcggcuggaccuucggcgccggcgccgcacugcagauccccuucgccaugcagauggccuaccgguucaacggcaucggcgugacccagaacgugcuguacgagaaccagaagcugaucgccaaccaguucaacagcgccaucggcaagauccaggacagccugagcagcaccgccagcgcccugggcaagcugcaggacguggugaaccagaacgcccaggcucugaacacccuggugaagcagcugagcagcaacuucggcgccaucagcucagugcugaacgacauccuggccaggcuggacccacccgaggccgaggugcagaucgaccggcugaucaccggccggcugcagagccugcagaccuacgugacccagcagcugauccgggccgccgagauucgggccagcgccaaucuggcagccaccaagaugagcgagugcgugcugggccagagcaagcggguggacuuuugcggcaagggcuaccaccugaugagcuucccccagagcgcuccccacggcgugguguuccuccacgugaccuacgugcccgcccaggagaagaacuucacaaccgcccccgccaucugccacgacggcaaggcccacuucccccgggagggagucuucgugagcaacggcacccacugguucgugacccagcggaacuucuacgagccccagaucaucaccacccacaacaccuucgugagcggcaacugcgacguggugaucggcaucgugaacaacaccguguacgacccucugcagcccgagcuggacagcuucaaggaggagcuggacaaguacuucaagaaccacaccagccccgacguggaucugggcgacaucagcggcaucaacgccagcguggugaacauccagaaggagaucgaccggcugaacgagguggccaagaaccugaacgagagccugaucgaccugcaggagcugggcaaguacgagcaguacaucaaguggccaugguacaucuggcugggcuucaucgccggccugaucgccaucgugauggugaccaucaugcugugcugcaugaccagcugcuguagcugccugaagggcugcugcagcugcggcagcugcugcaaguucgacgaggacgacagcgagcccgugcugaagggcgugaagcugcacuacaccugaggacuaguuauaagacugacuagcccgaugggccucccaacgggcccuccuccccuccuugcaccgagauuaauagaucuaaaaaaaaaaaaaaaaaaaaaaaaaaaaaaaaaaaaaaaaaaaaaaaaaaaaaaaaaaaaaaaaaaaaaaaaaaaaaaaaaaaaaaaaaaaaaaaaaaaa

SEQ ID NO: 25784 - RNA, 4017 nt, Artificial Sequence
  SARS-CoV-2/Wuhan/WIV05/2019__EPI_ISL_402128 spike protein mRNA gc (1-1273)(K986P_V987P_K986P_V987P_K417N_E484K_N501Y_D614G)
aggagaaagcuuaccauguucguguuccuggugcugcugccccuggugagcagccagugcgugaaccugaccacccggacccagcugcccccugccuacaccaacagcuucacccggggcguguacuaccccgacaagguguuccggagcagcgugcugcacagcacccaggaccuguuccugcccuucuucagcaacgugaccugguuccacgccauccacgugagcggcaccaacggcaccaagcgguucgacaacccagugcugcccuucaacgacggcguguacuucgccagcaccgagaagucaaacaucauccggggcuggaucuucggcaccacccuggacagcaagacacagagccugcugaucgugaacaacgccaccaacguggugaucaaggugugcgaguuucaguucugcaacgaccccuuccugggcguguacuaccacaagaacaacaagagcuggauggagagcgaguuccgggucuacagcagcgcuaacaauugcaccuucgaguacgugagccagcccuuccugauggaccucgagggcaagcagggcaacuucaagaaccugcgggaguucguguucaagaacaucgauggcuacuucaagaucuacagcaagcacacccccaucaaccuggugcgggaccugccccagggauucagcgcccuggagccucugguggaccugcccaucggcaucaacaucaccagguuccagacccugcuggcccugcaccggagcuaccugacccccggcgacagcagcagcggcuggaccgccggcgccgccgcauacuacgugggcuaccugcagccacggaccuuccugcugaaguacaacgagaacggcaccaucaccgacgccguggacugcgcccuggacccccugagcgagaccaagugcacccuaaagagcuucaccguggagaagggcaucuaccagaccagcaacuuccgggugcagcccacugagagcaucgugcgguuccccaacauuaccaaccugugucccuucggcgagguguucaacgccacccgguucgccagcguguacgccuggaaccggaagcggaucagcaacugcguggccgacuacagcgugcuguacaacagcgccagcuucagcaccuucaagugcuacggcgugagcccuaccaagcugaacgaccugugcuucaccaacguguacgcugacagcuucgugauccggggcgacgaggugcggcagaucgcccccggccagaccggcaacaucgccgacuacaacuacaagcugcccgacgacuucaccggcugcgugaucgccuggaacagcaacaaccuggacagcaaggugggcggcaacuacaacuaccuguaccggcuguuccguaagagcaaccugaagccauucgagcgggacaucagcaccgagaucuaccaggccggcagcacccccugcaacggugugaagggcuuuaacugcuacuucccccugcagagcuacggcuuccagcccaccuacggcgugggcuaccagcccuaccgggugguggugcugagcuucgagcugcugcacgcccccgccaccgugugcggcccuaaaaagagcaccaaccuggugaagaacaagugcgugaacuucaauuucaacggccugaccggcaccggcgugcugaccgagagcaacaagaaguuccugcccuuccagcaguucggccgggauaucgccgacaccaccgacgcagugcgggacccccagacccuggagauccuggacaucaccccaugcagcuucggcggcgugagcgucaucacccccggcacaaacaccagcaaccagguggccgugcuguaccagggagugaacugcaccgaggugcccguggccauccacgccgaccagcugacccccaccuggcggguguacagcaccggcagcaacguguuccagacccgggccggcugccugaucggcgccgagcacgugaacaacuccuacgagugcgacauccccaucggcgcuggcaucugcgccagcuaccagacccagaccaacagcccccggcgggcccggagcguggccagccagagcaucaucgccuacaccaugagcuuaggcgccgagaacagcguggccuacagcaacaacagcaucgcgaucccuaccaacuucaccaucagcgugaccaccgagauacugcccgugagcaugaccaagaccagcguggacuguaccauguacaucugcggcgacagcaccgagugcagcaaccugcugcugcaguacggcagcuucugcacccagcugaaccgggcccugaccggcaucgccguggagcaggacaagaacacccaagagguguucgcccaggugaagcagaucuacaagacucccccaaucaaggacuucggcggcuucaacuucagccagauccugcccgaccccagcaagcccagcaagcggagcuucaucgaggaccugcuguucaacaaggugacccuggccgacgccggcuucaucaagcaguacggcgacugccugggggauaucgccgcucgggaccugaucugcgcccagaaguucaacggccugaccgugcugcccccucugcugaccgacgagaugaucgcccaguacaccagcgcccugcuugccggcaccaucaccagcggcuggaccuucggcgccggcgcagcccugcagauccccuucgccaugcagauggccuaccgguucaacggcaucggcgugacccagaacgugcuguacgagaaccagaagcugaucgccaaccaguucaacagcgccaucggcaagauccaggacagccugagcagcaccgccagcgcccugggcaagcugcaggacguggugaaccagaacgcucaggcccugaacacccuggugaagcagcugagcagcaacuucggcgccaucagcucagugcugaaugacauccugagcaggcuggaucccccagaggccgaggugcagaucgaccggcugaucaccggccggcugcagagccugcagaccuacgugacccagcagcugauccgggccgccgagauccgggccagcgccaaccuggcagccaccaagaugagcgagugcgugcugggccagagcaagcggguggacuuuugcggcaagggcuaccaccugaugagcuucccccagagcgcuccccacggcgugguguuccuccacgugacauacguccccgcccaggagaagaacuucaccaccgcccccgccauuugccacgacggcaaggcccacuucccccgggagggaguguucgugagcaacggcacccacugguucgugacccagcggaacuucuacgagccucagaucaucaccaccgacaacaccuucgugagcggcaacugcgacguggugaucggcaucgugaacaacaccguguacgacccccugcagcccgagcuggacagcuucaaggaggagcuggacaaguacuucaagaaccacaccagcccagacguggaccugggcgacaucagcggcaucaacgccagcguggugaacauccagaaggagaucgaccggcugaacgagguggccaagaaccugaacgagagccugaucgaccugcaggagcugggcaaguacgagcaguacaucaaguggcccugguacaucuggcugggcuucaucgccggccugaucgccaucgugauggugaccaucaugcugugcugcaugaccagcugcuguagcugccugaagggcugcugcagcugcggcagcugcugcaaguucgacgaggacgacagcgagcccgugcugaagggcgugaagcugcacuacaccugaggacuaguuauaagacugacuagcccgaugggccucccaacgggcccuccuccccuccuugcaccgagauuaauagaucuaaaaaaaaaaaaaaaaaaaaaaaaaaaaaaaaaaaaaaaaaaaaaaaaaaaaaaaaaaaaaaaaaaaaaaaaaaaaaaaaaaaaaaaaaaaaaaaaaaaa

SEQ ID NO: 25785 - RNA, 4008 nt, Artificial Sequence
  SARS-CoV-2/Wuhan/WIV05/2019__EPI_ISL_402128 spike protein mRNA gc (1-1273)(K986P_V987P_K986P_V987P_L18F_D80A_D215G_L242del_A243del_ L244del_R246I_K417N_E484K_N501Y_D614G_A701V)
aggagaaagcuuaccauguucguguuccuggugcugcugccccuggugagcagccagugcgugaacuucaccacccggacccagcugcccccugccuacaccaacagcuucacccggggcguguacuaccccgacaagguguuccggagcagcgugcugcacagcacccaggaccuguuccugcccuucuucagcaacgugaccugguuccacgccauccacgugagcggcaccaacggcaccaagcgguucgccaacccagugcugcccuucaacgacggcguguacuucgccagcaccgagaagucaaacaucauccggggcuggaucuuuggcaccacccuggacagcaagacacagagccugcugaucgugaacaacgcuaccaacguggugaucaaggugugcgaguuccaguucugcaacgaccccuuccugggcguguacuaccacaagaacaacaagagcuggauggagagcgaguuccgggucuacagcagcgccaacaauugcaccuucgaguacgugagccagcccuuccugauggaccuggagggcaagcagggcaacuucaagaaccuccgggaguucguguucaagaacaucgacggcuacuucaagaucuacagcaagcacacccccaucaaccuggugcggggacugccccagggcuucagcgcccuggagccucugguggaucugcccaucggcaucaacaucaccagguuccagacccugcacaucagcuaccugacccccggcgacagcagcagcggcuggaccgccggcgccgccgcauacuacgugggcuaccugcagccacggaccuuccugcugaaguacaacgagaacggcaccaucaccgacgccguggacugcgcccuggacccccugagcgagaccaagugcacccuuaagagcuucaccguggagaagggcaucuaccagaccagcaacuuccgggugcagcccacugagagcauugugcgguuccccaacaucaccaaccugugucccuucggcgagguguucaacgccacccgguucgccagcguguacgccuggaaccggaagcggaucagcaacugcguggccgacuacagcgugcuguacaacagcgccagcuucagcaccuucaagugcuacggcgugagcccuaccaagcugaacgaccugugcuucaccaacguguacgcugacagcuucgugauccggggcgacgaggugcggcagaucgcccccggccagaccggcaacaucgccgacuacaacuacaagcugcccgacgacuucaccggcugcgugaucgccuggaacagcaacaaccuggacagcaaggugggcggcaacuacaacuaccuguaccggcuauuccguaagagcaaccugaagccauuugagcgggacaucagcaccgagaucuaccaggccgguagcacccccugcaacggcgugaagggcuucaacugcuacuucccccugcagagcuacggcuuccagcccaccuacggcgugggcuaccagcccuaccgggugguggugcugagcuucgagcugcugcacgcccccgccaccgugugcggcccuaaaaagagcaccaaccuggugaagaacaagugcgugaacuucaauuucaacggccugaccggcaccggcgugcugaccgagagcaacaagaaguuccugcccuuccagcaguucggccgggacaucgccgacaccaccgaugcagugcgggacccccagacccuggagauccuggacaucaccccaugcagcuucggcggcgugagcgucaucacccccggaacaaacaccagcaaccagguggccgugcuguaccagggcgugaacugcaccgaggugcccguggccauccacgccgaccagcugacccccaccuggcggguguacagcaccggcagcaacguguuccagacccgggccggcugccugaucggcgccgagcacgugaacaacuccuacgagugcgacauccccaucggcgcuggcaucugcgccagcuaccagacccagaccaacagcccccggcgggcccggagcguggccagccagagcaucaucgccuacaccaugagccugggcguggagaacagcguggccuacagcaacaacagcaucgccaucccuaccaacuucaccauaagcgugaccaccgagauccugcccgugagcaugaccaagaccagcguggacuguaccauguacaucugcggcgacagcaccgagugcagcaaccuguuacugcaguacggcagcuucugcacccagcugaaccgggcgcugaccggcaucgccguggagcaggacaagaacacccaagagguguucgcccaggugaagcagaucuacaagacucccccaaucaaggacuucggcggcuucaacuucagccagauccugcccgaccccagcaagcccagcaagcggagcuucaucgaggaccugcuguucaacaaggugacccuggccgacgccggcuucaucaagcaguacggggacugccugggcgacaucgccgcccgggaccugaucugcgcucagaaguucaacggccugaccgugcugcccccucugcugaccgaugagaugaucgcccaguacaccagcgcccugcuggccggcaccaucaccagcggcuggaccuucggcgccggcgccgcacugcagauccccuucgccaugcagauggccuaccgguucaacggcaucggcgugacccagaacgugcuguacgagaaccagaagcugaucgccaaccaguucaacagcgccaucggcaagauccaggacagccugagcagcaccgccagcgcccugggcaagcugcaggacguggugaaccagaacgcccaggcucugaacacccuggugaagcagcugagcagcaacuuuggcgccaucagcucagugcugaaugacauccugagccggcuggaucccccagaggccgaggugcagaucgacaggcugaucaccggccggcugcagagccugcagaccuacgugacccagcagcugauccgggccgccgagauucgggccagcgccaaccuggccgcaaccaagaugagcgagugcgugcugggccagagcaagcggguggacuucugcggcaagggcuaccaccugaugagcuucccccagagcgcuccccacggcgugguguuccugcacgucacauacgugcccgcccaggagaagaacuucaccaccgcccccgccaucugccacgacggaaaggcccacuucccccgggagggcguguucgugagcaacggcacccacugguucgugacccagcggaacuucuacgagccucagaucaucaccaccgacaacaccuucgugagcggcaacugcgacguggugaucggcaucgugaacaacaccguguacgacccccugcagcccgagcuggacagcuucaaggaggagcucgacaaguacuucaagaaccacaccagcccagacguggaccugggcgacaucagcggcaucaacgccagcguggugaacauccagaaggagaucgaccggcugaacgagguggccaagaaccugaacgagagccugaucgaccugcaggagcugggcaaguacgagcaguacaucaaguggcccugguacaucuggcugggcuucaucgccggccugaucgccaucgugauggugaccaucaugcugugcugcaugaccagcugcuguagcugccugaagggcugcugcagcugcggcagcugcugcaaguucgacgaggacgacagcgagcccgugcugaagggcgugaagcugcacuacaccugaggacuaguuauaagacugacuagcccgaugggccucccaacgggcccuccuccccuccuugcaccgagauuaauagaucuaaaaaaaaaaaaaaaaaaaaaaaaaaaaaaaaaaaaaaaaaaaaaaaaaaaaaaaaaaaaaaaaaaaaaaaaaaaaaaaaaaaaaaaaaaaaaaaaaaaa

SEQ ID NO: 25786 - RNA, 4017 nt, Artificial Sequence
  SARS-CoV-2/Wuhan/WIV05/2019__EPI_ISL_402128 spike protein mRNA gc (1-1273)(K986P_V987P_K986P_V987P_E484K_D614G)
aggagaaagcuuaccauguucguguuccuggugcugcugccccuggugagcagccagugcgugaaccugaccacccggacccagcugcccccugccuacaccaacagcuucacccggggcguguacuaccccgacaagguguuccggagcagcgugcugcacagcacccaggaccuguuccugcccuucuucagcaacgugaccugguuccacgccauccacgugagcggcaccaacggcaccaagcgguucgacaacccagugcugcccuucaacgacggcguguacuucgccagcaccgagaagucaaacaucauccggggcuggaucuucggcaccacccuggacagcaagacacagagccugcugaucgugaacaacgccaccaacguggugaucaaggugugcgaguuucaguucugcaacgaccccuuccugggcguguacuaccacaagaacaacaagagcuggauggagagcgaguuccgggucuacagcagcgcuaacaauugcaccuucgaguacgugagccagcccuuccugauggaccucgagggcaagcagggcaacuucaagaaccugcgggaguucguguucaagaacaucgauggcuacuucaagaucuacagcaagcacacccccaucaaccuggugcgggaccugccccagggauucagcgcccuggagccucugguggaccugcccaucggcaucaacaucaccagguuccagacccugcuggcccugcaccggagcuaccugacccccggcgacagcagcagcggcuggaccgccggcgccgccgcauacuacgugggcuaccugcagccacggaccuuccugcugaaguacaacgagaacggcaccaucaccgacgccguggacugcgcccuggacccccugagcgagaccaagugcacccuaaagagcuucaccguggagaagggcaucuaccagaccagcaacuuccgggugcagcccacugagagcaucgugcgguuccccaacauuaccaaccugugucccuucggcgagguguucaacgccacccgguucgccagcguguacgccuggaaccggaagcggaucagcaacugcguggccgacuacagcgugcuguacaacagcgccagcuucagcaccuucaagugcuacggcgugagcccuaccaagcugaacgaccugugcuucaccaacguguacgcugacagcuucgugauccggggcgacgaggugcggcagaucgcccccggccagaccggcaagaucgccgacuacaacuacaagcugcccgacgacuucaccggcugcgugaucgccuggaacagcaacaaccuggacagcaaggugggcggcaacuacaacuaccuguaccggcuguuccguaagagcaaccugaagccauucgagcgggacaucagcaccgagaucuaccaggccggcagcacccccugcaacggugugaagggcuuuaacugcuacuucccccugcagagcuacggcuuccagcccaccaacggcgugggcuaccagcccuaccgggugguggugcugagcuucgagcugcugcacgcccccgccaccgugugcggcccuaaaaagagcaccaaccuggugaagaacaagugcgugaacuucaauuucaacggccugaccggcaccggcgugcugaccgagagcaacaagaaguuccugcccuuccagcaguucggccgggauaucgccgacaccaccgacgcagugcgggacccccagacccuggagauccuggacaucaccccaugcagcuucggcggcgugagcgucaucacccccggcacaaacaccagcaaccagguggccgugcuguaccagggagugaacugcaccgaggugcccguggccauccacgccgaccagcugacccccaccuggcggguguacagcaccggcagcaacguguuccagacccgggccggcugccugaucggcgccgagcacgugaacaacuccuacgagugcgacauccccaucggcgcuggcaucugcgccagcuaccagacccagaccaacagcccccggcgggcccggagcguggccagccagagcaucaucgccuacaccaugagcuuaggcgccgagaacagcguggccuacagcaacaacagcaucgcgaucccuaccaacuucaccaucagcgugaccaccgagauacugcccgugagcaugaccaagaccagcguggacuguaccauguacaucugcggcgacagcaccgagugcagcaaccugcugcugcaguacggcagcuucugcacccagcugaaccgggcccugaccggcaucgccguggagcaggacaagaacacccaagagguguucgcccaggugaagcagaucuacaagacucccccaaucaaggacuucggcggcuucaacuucagccagauccugcccgaccccagcaagcccagcaagcggagcuucaucgaggaccugcuguucaacaaggugacccuggccgacgccggcuucaucaagcaguacggcgacugccugggggauaucgccgcucgggaccugaucugcgcccagaaguucaacggccugaccgugcugcccccucugcugaccgacgagaugaucgcccaguacaccagcgcccugcuugccggcaccaucaccagcggcuggaccuucggcgccggcgcagcccugcagauccccuucgccaugcagauggccuaccgguucaacggcaucggcgugacccagaacgugcuguacgagaaccagaagcugaucgccaaccaguucaacagcgccaucggcaagauccaggacagccugagcagcaccgccagcgcccugggcaagcugcaggacguggugaaccagaacgcucaggcccugaacacccuggugaagcagcugagcagcaacuucggcgccaucagcucagugcugaaugacauccugagcaggcuggaucccccagaggccgaggugcagaucgaccggcugaucaccggccggcugcagagccugcagaccuacgugacccagcagcugauccgggccgccgagauccgggccagcgccaaccuggcagccaccaagaugagcgagugcgugcugggccagagcaagcggguggacuuuugcggcaagggcuaccaccugaugagcuucccccagagcgcuccccacggcgugguguuccuccacgugacauacguccccgcccaggagaagaacuucaccaccgcccccgccauuugccacgacggcaaggcccacuucccccgggagggaguguucgugagcaacggcacccacugguucgugacccagcggaacuucuacgagccucagaucaucaccaccgacaacaccuucgugagcggcaacugcgacguggugaucggcaucgugaacaacaccguguacgacccccugcagcccgagcuggacagcuucaaggaggagcuggacaaguacuucaagaaccacaccagcccagacguggaccugggcgacaucagcggcaucaacgccagcguggugaacauccagaaggagaucgaccggcugaacgagguggccaagaaccugaacgagagccugaucgaccugcaggagcugggcaaguacgagcaguacaucaaguggcccugguacaucuggcugggcuucaucgccggccugaucgccaucgugauggugaccaucaugcugugcugcaugaccagcugcuguagcugccugaagggcugcugcagcugcggcagcugcugcaaguucgacgaggacgacagcgagcccgugcugaagggcgugaagcugcacuacaccugaggacuaguuauaagacugacuagcccgaugggccucccaacgggcccuccuccccuccuugcaccgagauuaauagaucuaaaaaaaaaaaaaaaaaaaaaaaaaaaaaaaaaaaaaaaaaaaaaaaaaaaaaaaaaaaaaaaaaaaaaaaaaaaaaaaaaaaaaaaaaaaaaaaaaaaa

SEQ ID NO: 25787 - RNA, 4017 nt, Artificial Sequence
  SARS-CoV-2/Wuhan/WIV05/2019__EPI_ISL_402128 spike protein mRNA gc (1-1273)(K986P_V987P_K986P_V987P_L18F_T20N_P26S_D138Y_R190S_K417T _E484K_N501Y_D614G_H655Y_T1027I)
aggagaaagcuuaccauguucguguuccuggugcugcugccccuggugagcagccagugcgugaacuucaccaaccggacccagcugcccagcgccuacaccaacagcuucacccggggcguguacuacccugacaagguguuccggagcagcgugcugcacagcacccaggaccuguuccugcccuucuucagcaacgugaccugguuccacgccauccacgugagcggcaccaacggcaccaagcgguucgacaaccccgugcugccauucaacgacggcguguacuucgccagcaccgagaagucaaacaucauccggggcuggaucuuuggcaccacccuggacagcaagacccagagccugcugaucgugaacaacgccacaaacguggugaucaaggugugcgaguuccaguucugcaacuaccccuuccugggcguguacuaccacaagaacaacaagagcuggauggagagcgaguuccgggucuacagcagcgcuaauaacugcaccuucgaguacgugagccagcccuuccugauggaccuggagggcaagcagggcaacuucaagaaccucagcgaguucguguucaagaacaucgacggcuacuucaagaucuacagcaagcacacccccaucaaccuggugcgggaucugccccagggauucagcgcccuggagccccugguggaccugccuaucggcaucaacaucacccgguuccagacccugcuggcccugcacaggagcuaccugacccccggcgacagcagcagcggcuggaccgccggcgccgccgcauacuacgugggcuaccugcagccccggaccuuccugcugaaguacaacgagaacggcaccaucaccgacgccguggacugcgcccuggacccacugagcgagaccaagugcacccuaaagagcuucaccguggagaagggcaucuaccagaccagcaacuuccgggugcagcccaccgagagcaucgugcgguuccccaacauuacuaaccugugucccuucggcgagguguucaacgccacccgguucgccagcguguacgccuggaaccggaagcggaucagcaacugcguggccgacuacagcgugcuguacaacagcgccagcuucagcaccuucaagugcuacggcgugagccccaccaagcugaacgaccugugcuucaccaacguguacgcugacagcuucgugauccggggcgacgaggugcggcagaucgccccuggccagaccggcaccaucgccgacuacaacuacaagcugcccgacgacuucaccggcugcgugaucgccuggaacagcaacaaccuggacagcaaggugggcggcaacuacaacuaccuguaccggcuguuccguaagagcaaccugaagcccuuugagcgggacaucagcaccgagaucuaccaggccggcagcaccccaugcaacggugugaagggcuucaacugcuacuucccccugcagagcuacggcuuccagcccaccuacggcgugggcuaccagcccuaccgggugguggugcugagcuucgagcugcugcacgcccccgccaccgugugcggccccaaaaagagcaccaaccuggugaagaacaagugcgugaacuucaauuucaacggccugaccggcaccggcgugcugaccgagagcaacaagaaguuccugccuuuccagcaguucggccgggacaucgccgauaccaccgacgcagugcgggacccccagacccuggagauccuggacaucacccccugcagcuucggcggcgugagcgucaucaccccaggcacaaacaccagcaaccagguggccgugcuguaccagggagugaacugcaccgaggugcccguggccauccacgccgaccagcugacccccaccuggcggguguacuccaccggcagcaacguguuccagacccgggccggcugccugaucggcgccgaguacgugaacaacagcuacgagugcgacauccccaucggcgcuggcaucugcgccagcuaccagacccagaccaacagcccccggcgggcccggagcguggccagccagagcaucaucgccuacaccaugagccugggcgccgagaacagcguggccuacagcaacaacagcaucgcgauccccaccaacuucaccaucagcgugaccaccgagauauuaccugugagcaugaccaagaccagcguggacuguaccauguacaucugcggcgacagcaccgagugcagcaaccugcugcugcaguacggcagcuucugcacccagcugaaccgggcccugaccggcaucgccguggagcaggacaagaacacccaagagguguucgcccaggugaagcagaucuacaagacuccacccaucaaggacuucggcggcuucaacuucagccagauccugcccgaccccagcaagcccagcaagcggagcuucaucgaggaccugcuguucaacaaggugacccuggccgacgccggcuucaucaagcaguacggcgacugccugggggacaucgccgcucgggaucugaucugcgcccagaaguucaacggccugaccgugcugccuccccugcugaccgacgagaugaucgcccaguacaccagcgcccugcuggccggcaccaucaccagcggcuggaccuucggcgccggcgcagcccuucagauccccuucgccaugcagauggccuaccgguucaacggcaucggcgugacccagaacgugcuguacgagaaccagaagcugaucgccaaccaguucaacagcgccaucggcaagauccaggacagccugagcagcaccgccagcgcccugggcaagcugcaggacguggugaaccagaacgcucaggcccugaacacccuggugaagcagcugagcucaaacuuuggcgccaucagcagcgugcugaaugacauccugagccggcuggacccacccgaggccgaggugcagaucgacaggcugaucaccggccggcugcagagccugcagaccuacgugacccagcagcugauccgggccgccgagauccgggccagcgccaaccuggcagccauuaagaugagcgagugcgugcugggccagagcaagcggguggacuucugcggcaagggcuaccaccugaugagcuucccccagagcgcuccccacggcgugguguuccugcacgugaccuacguccccgcccaggagaagaacuucacaaccgcccccgccaucugccacgacggcaaggcccacuucccccgggagggaguguucgugagcaacggcacccacugguucgugacccagcggaacuucuacgagccccagaucaucaccaccgacaacaccuucgugagcggcaacugcgacguggugaucggcaucgugaacaacaccguguacgacccucuccagcccgagcuggacagcuucaaggaggagcuggacaaguacuucaagaaccacaccagccccgacguggaccugggcgauaucagcggcaucaacgccagcguggugaacauccagaaggagaucgaccggcugaacgagguggccaagaaccugaacgagagccugaucgaccugcaggagcugggcaaguacgagcaguacaucaaguggccaugguacaucuggcugggcuucaucgccggccugaucgccaucgugauggugaccaucaugcugugcugcaugaccagcugcuguagcugccugaagggcugcugcagcugcggcagcugcugcaaguucgacgaggacgacagcgagcccgugcugaagggcgugaagcugcacuacaccugaggacuaguuauaagacugacuagcccgaugggccucccaacgggcccuccuccccuccuugcaccgagauuaauagaucuaaaaaaaaaaaaaaaaaaaaaaaaaaaaaaaaaaaaaaaaaaaaaaaaaaaaaaaaaaaaaaaaaaaaaaaaaaaaaaaaaaaaaaaaaaaaaaaaaaaa

SEQ ID NO: 25788 - RNA, 4017 nt, Artificial Sequence
  SARS-CoV-2/Wuhan/WIV05/2019__EPI_ISL_402128 spike protein mRNA gc (1-1273)(K986P_V987P_K986P_V987P_S13I_W152C_L452R_D614G)
aggagaaagcuuaccauguucguguuccuggugcugcugccccuggugagcauccagugcgugaaccugaccacccggacccagcugcccccugccuacaccaacagcuucacccggggcguguacuaccccgacaagguguuccggagcagcgugcugcacagcacccaggaccuguuccugcccuucuucagcaacgugaccugguuccacgccauccacgugagcggcaccaacggcaccaagcgguucgacaacccagugcugcccuucaacgacggcguguacuucgccagcaccgagaagucaaacaucauccggggcuggaucuucggcaccacccuggacagcaagacacagagccugcugaucgugaacaacgccaccaacguggugaucaaggugugcgaguuucaguucugcaacgaccccuuccugggcguguacuaccacaagaacaacaagagcugcauggagagcgaguuccgggucuacagcagcgcuaacaauugcaccuucgaguacgugagccagcccuuccugauggaccucgagggcaagcagggcaacuucaagaaccugcgggaguucguguucaagaacaucgauggcuacuucaagaucuacagcaagcacacccccaucaaccuggugcgggaccugccccagggauucagcgcccuggagccucugguggaccugcccaucggcaucaacaucaccagguuccagacccugcuggcccugcaccggagcuaccugacccccggcgacagcagcagcggcuggaccgccggcgccgccgcauacuacgugggcuaccugcagccacggaccuuccugcugaaguacaacgagaacggcaccaucaccgacgccguggacugcgcccuggacccccugagcgagaccaaguguacccuaaagagcuucaccguggagaagggcaucuaccagaccagcaacuuccgggugcagcccacugagagcauugugcgguuccccaacaucaccaaccugugccccuucggcgagguguucaacgccacccgguucgccagcguguacgccuggaaccggaagcggaucagcaacugcguggccgacuacagcgugcuguacaacagcgccagcuucagcaccuucaagugcuacggcgugagcccuaccaagcugaacgaccugugcuucaccaacguguacgcugacagcuucgugauccggggcgacgaggugcggcagaucgcccccggccagaccggcaagaucgccgacuacaacuacaagcugcccgacgacuucaccggcugcgugaucgccuggaacagcaacaaccuggacagcaaggugggcggcaacuacaacuaccgguaccggcuguuccguaagagcaaccugaagccauucgagcgggacaucagcaccgagaucuaccaggccggcagcacccccugcaacgguguggagggcuuuaacugcuacuucccccugcagagcuacggcuuccagcccaccaacggcgugggcuaccagcccuaccgggugguggugcugagcuucgagcugcugcacgcccccgccaccgugugcggcccuaaaaagagcaccaaccuggugaagaacaagugcgugaacuucaauuucaacggccugaccggcaccggcgugcugaccgagagcaacaagaaguuccugcccuuccagcaguucggccgggauaucgccgacaccaccgacgcagugcgggacccccagacccuggagauccuggacaucaccccaugcagcuucggcggcgugagcgucaucacccccggcacaaacaccagcaaccagguggccgugcuguaccagggagugaacugcaccgaggugcccguggccauccacgccgaccagcugacccccaccuggcggguguacagcaccggcagcaacguguuccagacccgggccggcugccugaucggcgccgagcacgugaacaacagcuacgagugcgacauccccaucggcgcuggcaucugugccuccuaccagacccagaccaacagcccccggcgggcccggagcguggccagccagagcaucaucgccuacaccaugagccugggcgccgagaacagcguggccuacagcaacaacagcaucgcgaucccuaccaacuucaccauaagcgugaccaccgagaucuuacccgugagcaugaccaagaccagcguggacugcaccauguacaucugcggcgacagcaccgagugcagcaaccugcugcugcaguacggcagcuucugcacccagcugaaccgggcccugaccggcaucgccguggagcaggacaagaacacccaagagguguucgcccaggugaagcagaucuacaagacucccccaaucaaggacuucggcggcuucaacuucagccagauccugcccgaccccagcaagcccagcaagcggagcuucaucgaggaccugcuguucaacaaggugacccuggccgacgccggcuucaucaagcaguacggcgacugccugggggauaucgccgcucgggaccugaucugcgcccagaaguucaacggccugaccgugcugcccccucugcugaccgacgagaugaucgcccaguacaccagcgcccugcuggccggcaccaucaccagcggcuggaccuucggcgccggcgcagcccuucagauccccuucgccaugcagauggccuacagguucaacggcaucggcgugacccagaacgugcuguacgagaaccagaagcugaucgccaaccaguucaacagcgccaucggcaagauccaggacagccugagcagcaccgccagcgcccugggcaagcugcaggacguggugaaccagaacgcucaggcccugaacacccuggugaagcagcugagcagcaacuucggcgccaucagcagcgugcugaaugacauccugucacggcuggaucccccagaggccgaggugcagaucgaccggcugaucaccggccggcugcagagccugcagaccuacgugacccagcagcugauccgggccgccgagauucgggccagcgccaaccuggcagccaccaagaugagcgagugcgugcugggccagagcaagcggguggacuuuugcggcaagggcuaccaccugaugagcuucccccagagcgcuccccacggcgugguguuccugcacgugacauacguccccgcccaggagaagaacuucaccaccgcccccgccaucugccacgacggcaaggcccacuucccccgggagggaguguucgugagcaacggcacccacugguucgugacccagcggaacuucuacgagccucagaucaucaccaccgacaacaccuucgugagcggcaacugcgacguggugaucggcaucgugaacaacaccguguacgacccccuccagcccgagcuggacagcuucaaggaggagcuggacaaguacuucaagaaccacaccagcccagacguggaccugggcgacaucagcggcaucaacgccagcguggugaacauccagaaggagaucgaccggcugaacgagguggccaagaaccugaacgagagccugaucgaccugcaggagcugggcaaguacgagcaguacaucaaguggcccugguacaucuggcugggcuucaucgccggccugaucgccaucgugauggugaccaucaugcugugcugcaugaccagcuguugcagcugccugaagggcugcugcagcugcggcagcugcugcaaguucgacgaggacgacagcgagcccgugcugaagggcgugaagcugcacuacaccugaggacuaguuauaagacugacuagcccgaugggccucccaacgggcccuccuccccuccuugcaccgagauuaauagaucuaaaaaaaaaaaaaaaaaaaaaaaaaaaaaaaaaaaaaaaaaaaaaaaaaaaaaaaaaaaaaaaaaaaaaaaaaaaaaaaaaaaaaaaaaaaaaaaaaaaa

SEQ ID NO: 25789 - RNA, 4017 nt, Artificial Sequence
  SARS-CoV-2/Wuhan/WIV05/2019__EPI_ISL_402128 spike protein mRNA gc mod (1-1273)(K986P_V987P)
aggagaaagcuuaccauguucguguuucuggugcugcugccccugguguccagccagugugugaaccugaccaccagaacacagcugccuccagccuacaccaacagcuucaccagaggcguguacuaccccgacaagguguucagauccagcgugcugcacucuacccaggaccuguuccugccuuucuucagcaacgugaccugguuccacgccauccacguguccggcaccaauggcaccaagagauucgacaaccccgugcugcccuucaacgacgggguguacuuugccagcaccgagaaguccaacaucaucagaggcuggaucuucggcaccacacuggacagcaagacccagagccugcugaucgugaacaacgccaccaacguggucaucaaagugugcgaguuccaguucugcaacgaccccuuccugggcgucuacuaccacaagaacaacaagagcuggauggaaagcgaguuccggguguacagcagcgccaacaacugcaccuucgaguacgugucccagccuuuccugauggaccuggaaggcaagcagggcaacuucaagaaccugcgcgaguucguguucaagaacaucgacggcuacuucaaaaucuacagcaagcacaccccuaucaaccucgugcgggaucugccucagggcuucucugcucuggaaccccugguggaucugcccaucggcaucaacaucacccgguuucagacacugcuggcccugcacagaagcuaccugacaccuggcgauagcagcagcggauggacagcuggugccgccgcuuacuaugugggcuaccugcagccuagaaccuuccugcugaaguacaacgagaacggcaccaucaccgacgccguggauugugcucuggauccucugagcgagacaaagugcacccugaaguccuucaccguggaaaagggcaucuaccagaccagcaacuuccgggugcagcccaccgaauccaucgugcgguuccccaauaucaccaaucugugccccuucggcgagguguucaaugccaccagauucgccucuguguacgccuggaaccggaagcggaucagcaauugcguggccgacuacuccgugcuguacaacuccgccagcuucagcaccuucaagugcuacggcguguccccuaccaagcugaacgaccugugcuucacaaacguguacgccgacagcuucgugauccggggagaugaagugcggcagauugccccuggacagacaggcaagaucgccgacuacaacuacaagcugcccgacgacuucaccggcugugugauugccuggaacagcaacaaccuggacuccaaagucggcggcaacuacaauuaccuguaccggcuguuccggaaguccaaucugaagcccuucgagcgggacaucagcaccgaaaucuaucaggccggcagcaccccuugcaacggcguggaaggcuucaacugcuacuucccacugcaguccuacggcuuucagcccacaaauggcgugggcuaucagcccuacagagugguggugcugagcuucgaacugcugcaugcuccugccacagugugcggcccuaagaaaagcaccaaucucgugaagaacaaaugcgugaacuucaacuucaacggccugaccggcaccggcgugcugacagagagcaacaagaaguuccugccauuccagcaguuuggccgggauaucgccgauaccacagacgccguuagagauccccagacacuggaaauccuggacaucaccccaugcagcuucggcggagugucugugaucaccccuggcaccaacaccagcaaucagguggcagugcuguaccaggacgugaacuguaccgaagugcccguggccauucacgccgaucagcugacaccuacauggcggguguacuccaccggcagcaauguguuucagaccagagccggcugucugaucggagccgagcacgugaacaauagcuacgagugcgacauccccaucggcgcuggcaucugugccagcuaccagacacagacaaacagccccagacgggcuagaagcguggccagccagagcaucauugccuacacaaugucucugggcgccgagaacagcguggccuacuccaacaacucuaucgcuauccccaccaacuucaccaucagcgugaccaccgagauccugccuguguccaugaccaagaccagcguggacugcaccauguacaucugcggcgauuccaccgagugcuccaaccugcugcugcaguacggcagcuucugcacccagcugaauagagcccugacagggaucgccguggaacaggacaagaacacccaagagguguucgcccaagugaagcaaaucuacaagaccccuccuaucaaggacuucggcggcuucaauuucagccagauucugcccgauccuagcaagcccagcaagcggagcuucaucgaggaccugcuguucaacaaagugacacuggccgacgccggcuucaucaagcaguauggcgauugucugggcgacauugccgccagggaucugauuugcgcccagaaguuuaacggacugacagugcugccuccucugcugaccgaugagaugaucgcccaguacacaucugcccugcuggccggcacaaucacaagcggcuggacauuuggagcuggcgccgcucugcagauccccuuugcuaugcagauggccuaccgguucaacggcaucggagugacccagaaugugcuguacgagaaccagaagcugaucgccaaccaguucaacagcgccaucggcaagauccaggacagccugagcagcacagcaagcgcccugggaaagcugcaggacguggucaaccagaaugcccaggcacugaacacccuggucaagcagcuguccuccaacuucggcgccaucagcucugugcugaacgauauccugagcagacuggacccuccugaggccgaggugcagaucgacagacugaucacaggcagacugcagagccuccagacauacgugacccagcagcugaucagagccgccgagauuagagccucugccaaucuggccgccaccaagaugucugagugugugcugggccagagcaagagaguggacuuuugcggcaagggcuaccaccugaugagcuucccucagucugccccucacggcgugguguuucugcacgugacauaugugcccgcucaagagaagaauuucaccaccgcuccagccaucugccacgacggcaaagcccacuuuccuagagaaggcguguucguguccaacggcacccauugguucgugacacagcggaacuucuacgagccccagaucaucaccaccgacaacaccuucgugucuggcaacugcgacguugugaucggcauugugaacaauaccguguacgacccucugcagcccgagcuggacagcuucaaagaggaacuggacaaguacuuuaagaaccacacaagccccgacguggaccugggcgauaucagcggaaucaaugccagcgucgugaacauccagaaagagaucgaccggcugaacgagguggccaagaaucugaacgagagccugaucgaccugcaagaacuggggaaguacgagcaguacaucaaguggcccugguacaucuggcugggcuuuaucgccggacugauugccaucgugauggucacaaucaugcuguguugcaugaccagcugcuguagcugccugaagggcuguuguagcuguggcagcugcugcaaguucgacgaggacgauucugagcccgugcugaagggcgugaaacugcacuacaccugaggacuaguuauaagacugacuagcccgaugggccucccaacgggcccuccuccccuccuugcaccgagauuaauagaucuaaaaaaaaaaaaaaaaaaaaaaaaaaaaaaaaaaaaaaaaaaaaaaaaaaaaaaaaaaaaaaaaaaaaaaaaaaaaaaaaaaaaaaaaaaaaaaaaaaaa

SEQ ID NO: 25790 - RNA, 4017 nt, Artificial Sequence
  SARS-CoV-2/Wuhan/WIV05/2019__EPI_ISL_402128 spike protein mRNA gc mod (1-1273)(K986P_V987P_ D614G)
aggagaaagcuuaccauguucguguuucuggugcugcugccccugguguccagccagugugugaaccugaccaccagaacacagcugccuccagccuacaccaacagcuucaccagaggcguguacuaccccgacaagguguucagauccagcgugcugcacucuacccaggaccuguuccugccuuucuucagcaacgugaccugguuccacgccauccacguguccggcaccaauggcaccaagagauucgacaaccccgugcugcccuucaacgacgggguguacuuugccagcaccgagaaguccaacaucaucagaggcuggaucuucggcaccacacuggacagcaagacccagagccugcugaucgugaacaacgccaccaacguggucaucaaagugugcgaguuccaguucugcaacgaccccuuccugggcgucuacuaccacaagaacaacaagagcuggauggaaagcgaguuccggguguacagcagcgccaacaacugcaccuucgaguacgugucccagccuuuccugauggaccuggaaggcaagcagggcaacuucaagaaccugcgcgaguucguguucaagaacaucgacggcuacuucaaaaucuacagcaagcacaccccuaucaaccucgugcgggaucugccucagggcuucucugcucuggaaccccugguggaucugcccaucggcaucaacaucacccgguuucagacacugcuggcccugcacagaagcuaccugacaccuggcgauagcagcagcggauggacagcuggugccgccgcuuacuaugugggcuaccugcagccuagaaccuuccugcugaaguacaacgagaacggcaccaucaccgacgccguggauugugcucuggauccucugagcgagacaaagugcacccugaaguccuucaccguggaaaagggcaucuaccagaccagcaacuuccgggugcagcccaccgaauccaucgugcgguuccccaauaucaccaaucugugccccuucggcgagguguucaaugccaccagauucgccucuguguacgccuggaaccggaagcggaucagcaauugcguggccgacuacuccgugcuguacaacuccgccagcuucagcaccuucaagugcuacggcguguccccuaccaagcugaacgaccugugcuucacaaacguguacgccgacagcuucgugauccggggagaugaagugcggcagauugccccuggacagacaggcaagaucgccgacuacaacuacaagcugcccgacgacuucaccggcugugugauugccuggaacagcaacaaccuggacuccaaagucggcggcaacuacaauuaccuguaccggcuguuccggaaguccaaucugaagcccuucgagcgggacaucagcaccgaaaucuaucaggccggcagcaccccuugcaacggcguggaaggcuucaacugcuacuucccacugcaguccuacggcuuucagcccacaaauggcgugggcuaucagcccuacagagugguggugcugagcuucgaacugcugcaugcuccugccacagugugcggcccuaagaaaagcaccaaucucgugaagaacaaaugcgugaacuucaacuucaacggccugaccggcaccggcgugcugacagagagcaacaagaaguuccugccauuccagcaguuuggccgggauaucgccgauaccacagacgccguuagagauccccagacacuggaaauccuggacaucaccccaugcagcuucggcggagugucugugaucaccccuggcaccaacaccagcaaucagguggcagugcuguaccagggcgugaacuguaccgaagugcccguggccauucacgccgaucagcugacaccuacauggcggguguacuccaccggcagcaauguguuucagaccagagccggcugucugaucggagccgagcacgugaacaauagcuacgagugcgacauccccaucggcgcuggcaucugugccagcuaccagacacagacaaacagccccagacgggcuagaagcguggccagccagagcaucauugccuacacaaugucucugggcgccgagaacagcguggccuacuccaacaacucuaucgcuauccccaccaacuucaccaucagcgugaccaccgagauccugccuguguccaugaccaagaccagcguggacugcaccauguacaucugcggcgauuccaccgagugcuccaaccugcugcugcaguacggcagcuucugcacccagcugaauagagcccugacagggaucgccguggaacaggacaagaacacccaagagguguucgcccaagugaagcaaaucuacaagaccccuccuaucaaggacuucggcggcuucaauuucagccagauucugcccgauccuagcaagcccagcaagcggagcuucaucgaggaccugcuguucaacaaagugacacuggccgacgccggcuucaucaagcaguauggcgauugucugggcgacauugccgccagggaucugauuugcgcccagaaguuuaacggacugacagugcugccuccucugcugaccgaugagaugaucgcccaguacacaucugcccugcuggccggcacaaucacaagcggcuggacauuuggagcuggcgccgcucugcagauccccuuugcuaugcagauggccuaccgguucaacggcaucggagugacccagaaugugcuguacgagaaccagaagcugaucgccaaccaguucaacagcgccaucggcaagauccaggacagccugagcagcacagcaagcgcccugggaaagcugcaggacguggucaaccagaaugcccaggcacugaacacccuggucaagcagcuguccuccaacuucggcgccaucagcucugugcugaacgauauccugagcagacuggacccuccugaggccgaggugcagaucgacagacugaucacaggcagacugcagagccuccagacauacgugacccagcagcugaucagagccgccgagauuagagccucugccaaucuggccgccaccaagaugucugagugugugcugggccagagcaagagaguggacuuuugcggcaagggcuaccaccugaugagcuucccucagucugccccucacggcgugguguuucugcacgugacauaugugcccgcucaagagaagaauuucaccaccgcuccagccaucugccacgacggcaaagcccacuuuccuagagaaggcguguucguguccaacggcacccauugguucgugacacagcggaacuucuacgagccccagaucaucaccaccgacaacaccuucgugucuggcaacugcgacguugugaucggcauugugaacaauaccguguacgacccucugcagcccgagcuggacagcuucaaagaggaacuggacaaguacuuuaagaaccacacaagccccgacguggaccugggcgauaucagcggaaucaaugccagcgucgugaacauccagaaagagaucgaccggcugaacgagguggccaagaaucugaacgagagccugaucgaccugcaagaacuggggaaguacgagcaguacaucaaguggcccugguacaucuggcugggcuuuaucgccggacugauugccaucgugauggucacaaucaugcuguguugcaugaccagcugcuguagcugccugaagggcuguuguagcuguggcagcugcugcaaguucgacgaggacgauucugagcccgugcugaagggcgugaaacugcacuacaccugaggacuaguuauaagacugacuagcccgaugggccucccaacgggcccuccuccccuccuugcaccgagauuaauagaucuaaaaaaaaaaaaaaaaaaaaaaaaaaaaaaaaaaaaaaaaaaaaaaaaaaaaaaaaaaaaaaaaaaaaaaaaaaaaaaaaaaaaaaaaaaaaaaaaaaaa

SEQ ID NO: 25791 - RNA, 4017 nt, Artificial Sequence
  SARS-CoV-2/Wuhan/WIV05/2019__EPI_ISL_402128 spike protein mRNA gc mod (1-1273)(K986P_V987P_A222V_D614G)
aggagaaagcuuaccauguucguguuucuggugcugcugccccugguguccagccagugugugaaccugaccaccagaacacagcugccuccagccuacaccaacagcuucaccagaggcguguacuaccccgacaagguguucagauccagcgugcugcacucuacccaggaccuguuccugccuuucuucagcaacgugaccugguuccacgccauccacguguccggcaccaauggcaccaagagauucgacaaccccgugcugcccuucaacgacgggguguacuuugccagcaccgagaaguccaacaucaucagaggcuggaucuucggcaccacacuggacagcaagacccagagccugcugaucgugaacaacgccaccaacguggucaucaaagugugcgaguuccaguucugcaacgaccccuuccugggcgucuacuaccacaagaacaacaagagcuggauggaaagcgaguuccggguguacagcagcgccaacaacugcaccuucgaguacgugucccagccuuuccugauggaccuggaaggcaagcagggcaacuucaagaaccugcgcgaguucguguucaagaacaucgacggcuacuucaaaaucuacagcaagcacaccccuaucaaccucgugcgggaucugccucagggcuucucugugcuggaaccccugguggaucugcccaucggcaucaacaucacccgguuucagacacugcuggcccugcacagaagcuaccugacaccuggcgauagcagcagcggauggacagcuggugccgccgcuuacuaugugggcuaccugcagccuagaaccuuccugcugaaguacaacgagaacggcaccaucaccgacgccguggauugugcucuggauccucugagcgagacaaagugcacccugaaguccuucaccguggaaaagggcaucuaccagaccagcaacuuccgggugcagcccaccgaauccaucgugcgguuccccaauaucaccaaucugugccccuucggcgagguguucaaugccaccagauucgccucuguguacgccuggaaccggaagcggaucagcaauugcguggccgacuacuccgugcuguacaacuccgccagcuucagcaccuucaagugcuacggcguguccccuaccaagcugaacgaccugugcuucacaaacguguacgccgacagcuucgugauccggggagaugaagugcggcagauugccccuggacagacaggcaagaucgccgacuacaacuacaagcugcccgacgacuucaccggcugugugauugccuggaacagcaacaaccuggacuccaaagucggcggcaacuacaauuaccuguaccggcuguuccggaaguccaaucugaagcccuucgagcgggacaucagcaccgaaaucuaucaggccggcagcaccccuugcaacggcguggaaggcuucaacugcuacuucccacugcaguccuacggcuuucagcccacaaauggcgugggcuaucagcccuacagagugguggugcugagcuucgaacugcugcaugcuccugccacagugugcggcccuaagaaaagcaccaaucucgugaagaacaaaugcgugaacuucaacuucaacggccugaccggcaccggcgugcugacagagagcaacaagaaguuccugccauuccagcaguuuggccgggauaucgccgauaccacagacgccguuagagauccccagacacuggaaauccuggacaucaccccaugcagcuucggcggagugucugugaucaccccuggcaccaacaccagcaaucagguggcagugcuguaccagggcgugaacuguaccgaagugcccguggccauucacgccgaucagcugacaccuacauggcggguguacuccaccggcagcaauguguuucagaccagagccggcugucugaucggagccgagcacgugaacaauagcuacgagugcgacauccccaucggcgcuggcaucugugccagcuaccagacacagacaaacagccccagacgggcuagaagcguggccagccagagcaucauugccuacacaaugucucugggcgccgagaacagcguggccuacuccaacaacucuaucgcuauccccaccaacuucaccaucagcgugaccaccgagauccugccuguguccaugaccaagaccagcguggacugcaccauguacaucugcggcgauuccaccgagugcuccaaccugcugcugcaguacggcagcuucugcacccagcugaauagagcccugacagggaucgccguggaacaggacaagaacacccaagagguguucgcccaagugaagcaaaucuacaagaccccuccuaucaaggacuucggcggcuucaauuucagccagauucugcccgauccuagcaagcccagcaagcggagcuucaucgaggaccugcuguucaacaaagugacacuggccgacgccggcuucaucaagcaguauggcgauugucugggcgacauugccgccagggaucugauuugcgcccagaaguuuaacggacugacagugcugccuccucugcugaccgaugagaugaucgcccaguacacaucugcccugcuggccggcacaaucacaagcggcuggacauuuggagcuggcgccgcucugcagauccccuuugcuaugcagauggccuaccgguucaacggcaucggagugacccagaaugugcuguacgagaaccagaagcugaucgccaaccaguucaacagcgccaucggcaagauccaggacagccugagcagcacagcaagcgcccugggaaagcugcaggacguggucaaccagaaugcccaggcacugaacacccuggucaagcagcuguccuccaacuucggcgccaucagcucugugcugaacgauauccugagcagacuggacccuccugaggccgaggugcagaucgacagacugaucacaggcagacugcagagccuccagacauacgugacccagcagcugaucagagccgccgagauuagagccucugccaaucuggccgccaccaagaugucugagugugugcugggccagagcaagagaguggacuuuugcggcaagggcuaccaccugaugagcuucccucagucugccccucacggcgugguguuucugcacgugacauaugugcccgcucaagagaagaauuucaccaccgcuccagccaucugccacgacggcaaagcccacuuuccuagagaaggcguguucguguccaacggcacccauugguucgugacacagcggaacuucuacgagccccagaucaucaccaccgacaacaccuucgugucuggcaacugcgacguugugaucggcauugugaacaauaccguguacgacccucugcagcccgagcuggacagcuucaaagaggaacuggacaaguacuuuaagaaccacacaagccccgacguggaccugggcgauaucagcggaaucaaugccagcgucgugaacauccagaaagagaucgaccggcugaacgagguggccaagaaucugaacgagagccugaucgaccugcaagaacuggggaaguacgagcaguacaucaaguggcccugguacaucuggcugggcuuuaucgccggacugauugccaucgugauggucacaaucaugcuguguugcaugaccagcugcuguagcugccugaagggcuguuguagcuguggcagcugcugcaaguucgacgaggacgauucugagcccgugcugaagggcgugaaacugcacuacaccugaggacuaguuauaagacugacuagcccgaugggccucccaacgggcccuccuccccuccuugcaccgagauuaauagaucuaaaaaaaaaaaaaaaaaaaaaaaaaaaaaaaaaaaaaaaaaaaaaaaaaaaaaaaaaaaaaaaaaaaaaaaaaaaaaaaaaaaaaaaaaaaaaaaaaaaa

SEQ ID NO: 25792 - RNA, 4017 nt, Artificial Sequence
  SARS-CoV-2/Wuhan/WIV05/2019__EPI_ISL_402128 spike protein mRNA gc mod (1-1273)(K986P_V987P_N439K_D614G)
aggagaaagcuuaccauguucguguuucuggugcugcugccccugguguccagccagugugugaaccugaccaccagaacacagcugccuccagccuacaccaacagcuucaccagaggcguguacuaccccgacaagguguucagauccagcgugcugcacucuacccaggaccuguuccugccuuucuucagcaacgugaccugguuccacgccauccacguguccggcaccaauggcaccaagagauucgacaaccccgugcugcccuucaacgacgggguguacuuugccagcaccgagaaguccaacaucaucagaggcuggaucuucggcaccacacuggacagcaagacccagagccugcugaucgugaacaacgccaccaacguggucaucaaagugugcgaguuccaguucugcaacgaccccuuccugggcgucuacuaccacaagaacaacaagagcuggauggaaagcgaguuccggguguacagcagcgccaacaacugcaccuucgaguacgugucccagccuuuccugauggaccuggaaggcaagcagggcaacuucaagaaccugcgcgaguucguguucaagaacaucgacggcuacuucaaaaucuacagcaagcacaccccuaucaaccucgugcgggaucugccucagggcuucucugcucuggaaccccugguggaucugcccaucggcaucaacaucacccgguuucagacacugcuggcccugcacagaagcuaccugacaccuggcgauagcagcagcggauggacagcuggugccgccgcuuacuaugugggcuaccugcagccuagaaccuuccugcugaaguacaacgagaacggcaccaucaccgacgccguggauugugcucuggauccucugagcgagacaaagugcacccugaaguccuucaccguggaaaagggcaucuaccagaccagcaacuuccgggugcagcccaccgaauccaucgugcgguuccccaauaucaccaaucugugccccuucggcgagguguucaaugccaccagauucgccucuguguacgccuggaaccggaagcggaucagcaauugcguggccgacuacuccgugcuguacaacuccgccagcuucagcaccuucaagugcuacggcguguccccuaccaagcugaacgaccugugcuucacaaacguguacgccgacagcuucgugauccggggagaugaagugcggcagauugccccuggacagacaggcaagaucgccgacuacaacuacaagcugcccgacgacuucaccggcugugugauugccuggaacagcaagaaccuggacuccaaagucggcggcaacuacaauuaccuguaccggcuguuccggaaguccaaucugaagcccuucgagcgggacaucagcaccgaaaucuaucaggccggcagcaccccuugcaacggcguggaaggcuucaacugcuacuucccacugcaguccuacggcuuucagcccacaaauggcgugggcuaucagcccuacagagugguggugcugagcuucgaacugcugcaugcuccugccacagugugcggcccuaagaaaagcaccaaucucgugaagaacaaaugcgugaacuucaacuucaacggccugaccggcaccggcgugcugacagagagcaacaagaaguuccugccauuccagcaguuuggccgggauaucgccgauaccacagacgccguuagagauccccagacacuggaaauccuggacaucaccccaugcagcuucggcggagugucugugaucaccccuggcaccaacaccagcaaucagguggcagugcuguaccagggcgugaacuguaccgaagugcccguggccauucacgccgaucagcugacaccuacauggcggguguacuccaccggcagcaauguguuucagaccagagccggcugucugaucggagccgagcacgugaacaauagcuacgagugcgacauccccaucggcgcuggcaucugugccagcuaccagacacagacaaacagccccagacgggcuagaagcguggccagccagagcaucauugccuacacaaugucucugggcgccgagaacagcguggccuacuccaacaacucuaucgcuauccccaccaacuucaccaucagcgugaccaccgagauccugccuguguccaugaccaagaccagcguggacugcaccauguacaucugcggcgauuccaccgagugcuccaaccugcugcugcaguacggcagcuucugcacccagcugaauagagcccugacagggaucgccguggaacaggacaagaacacccaagagguguucgcccaagugaagcaaaucuacaagaccccuccuaucaaggacuucggcggcuucaauuucagccagauucugcccgauccuagcaagcccagcaagcggagcuucaucgaggaccugcuguucaacaaagugacacuggccgacgccggcuucaucaagcaguauggcgauugucugggcgacauugccgccagggaucugauuugcgcccagaaguuuaacggacugacagugcugccuccucugcugaccgaugagaugaucgcccaguacacaucugcccugcuggccggcacaaucacaagcggcuggacauuuggagcuggcgccgcucugcagauccccuuugcuaugcagauggccuaccgguucaacggcaucggagugacccagaaugugcuguacgagaaccagaagcugaucgccaaccaguucaacagcgccaucggcaagauccaggacagccugagcagcacagcaagcgcccugggaaagcugcaggacguggucaaccagaaugcccaggcacugaacacccuggucaagcagcuguccuccaacuucggcgccaucagcucugugcugaacgauauccugagcagacuggacccuccugaggccgaggugcagaucgacagacugaucacaggcagacugcagagccuccagacauacgugacccagcagcugaucagagccgccgagauuagagccucugccaaucuggccgccaccaagaugucugagugugugcugggccagagcaagagaguggacuuuugcggcaagggcuaccaccugaugagcuucccucagucugccccucacggcgugguguuucugcacgugacauaugugcccgcucaagagaagaauuucaccaccgcuccagccaucugccacgacggcaaagcccacuuuccuagagaaggcguguucguguccaacggcacccauugguucgugacacagcggaacuucuacgagccccagaucaucaccaccgacaacaccuucgugucuggcaacugcgacguugugaucggcauugugaacaauaccguguacgacccucugcagcccgagcuggacagcuucaaagaggaacuggacaaguacuuuaagaaccacacaagccccgacguggaccugggcgauaucagcggaaucaaugccagcgucgugaacauccagaaagagaucgaccggcugaacgagguggccaagaaucugaacgagagccugaucgaccugcaagaacuggggaaguacgagcaguacaucaaguggcccugguacaucuggcugggcuuuaucgccggacugauugccaucgugauggucacaaucaugcuguguugcaugaccagcugcuguagcugccugaagggcuguuguagcuguggcagcugcugcaaguucgacgaggacgauucugagcccgugcugaagggcgugaaacugcacuacaccugaggacuaguuauaagacugacuagcccgaugggccucccaacgggcccuccuccccuccuugcaccgagauuaauagaucuaaaaaaaaaaaaaaaaaaaaaaaaaaaaaaaaaaaaaaaaaaaaaaaaaaaaaaaaaaaaaaaaaaaaaaaaaaaaaaaaaaaaaaaaaaaaaaaaaaaa

SEQ ID NO: 25793 - RNA, 4017 nt, Artificial Sequence
  SARS-CoV-2/Wuhan/WIV05/2019__EPI_ISL_402128 spike protein mRNA gc mod (1-1273)(K986P_V987P_S477N_D614G)
aggagaaagcuuaccauguucguguuucuggugcugcugccccugguguccagccagugugugaaccugaccaccagaacacagcugccuccagccuacaccaacagcuucaccagaggcguguacuaccccgacaagguguucagauccagcgugcugcacucuacccaggaccuguuccugccuuucuucagcaacgugaccugguuccacgccauccacguguccggcaccaauggcaccaagagauucgacaaccccgugcugcccuucaacgacgggguguacuuugccagcaccgagaaguccaacaucaucagaggcuggaucuucggcaccacacuggacagcaagacccagagccugcugaucgugaacaacgccaccaacguggucaucaaagugugcgaguuccaguucugcaacgaccccuuccugggcgucuacuaccacaagaacaacaagagcuggauggaaagcgaguuccggguguacagcagcgccaacaacugcaccuucgaguacgugucccagccuuuccugauggaccuggaaggcaagcagggcaacuucaagaaccugcgcgaguucguguucaagaacaucgacggcuacuucaaaaucuacagcaagcacaccccuaucaaccucgugcgggaucugccucagggcuucucugcucuggaaccccugguggaucugcccaucggcaucaacaucacccgguuucagacacugcuggcccugcacagaagcuaccugacaccuggcgauagcagcagcggauggacagcuggugccgccgcuuacuaugugggcuaccugcagccuagaaccuuccugcugaaguacaacgagaacggcaccaucaccgacgccguggauugugcucuggauccucugagcgagacaaagugcacccugaaguccuucaccguggaaaagggcaucuaccagaccagcaacuuccgggugcagcccaccgaauccaucgugcgguuccccaauaucaccaaucugugccccuucggcgagguguucaaugccaccagauucgccucuguguacgccuggaaccggaagcggaucagcaauugcguggccgacuacuccgugcuguacaacuccgccagcuucagcaccuucaagugcuacggcguguccccuaccaagcugaacgaccugugcuucacaaacguguacgccgacagcuucgugauccggggagaugaagugcggcagauugccccuggacagacaggcaagaucgccgacuacaacuacaagcugcccgacgacuucaccggcugugugauugccuggaacagcaacaaccuggacuccaaagucggcggcaacuacaauuaccuguaccggcuguuccggaaguccaaucugaagcccuucgagcgggacaucagcaccgaaaucuaucaggccggcaacaccccuugcaacggcguggaaggcuucaacugcuacuucccacugcaguccuacggcuuucagcccacaaauggcgugggcuaucagcccuacagagugguggugcugagcuucgaacugcugcaugcuccugccacagugugcggcccuaagaaaagcaccaaucucgugaagaacaaaugcgugaacuucaacuucaacggccugaccggcaccggcgugcugacagagagcaacaagaaguuccugccauuccagcaguuuggccgggauaucgccgauaccacagacgccguuagagauccccagacacuggaaauccuggacaucaccccaugcagcuucggcggagugucugugaucaccccuggcaccaacaccagcaaucagguggcagugcuguaccagggcgugaacuguaccgaagugcccguggccauucacgccgaucagcugacaccuacauggcggguguacuccaccggcagcaauguguuucagaccagagccggcugucugaucggagccgagcacgugaacaauagcuacgagugcgacauccccaucggcgcuggcaucugugccagcuaccagacacagacaaacagccccagacgggcuagaagcguggccagccagagcaucauugccuacacaaugucucugggcgccgagaacagcguggccuacuccaacaacucuaucgcuauccccaccaacuucaccaucagcgugaccaccgagauccugccuguguccaugaccaagaccagcguggacugcaccauguacaucugcggcgauuccaccgagugcuccaaccugcugcugcaguacggcagcuucugcacccagcugaauagagcccugacagggaucgccguggaacaggacaagaacacccaagagguguucgcccaagugaagcaaaucuacaagaccccuccuaucaaggacuucggcggcuucaauuucagccagauucugcccgauccuagcaagcccagcaagcggagcuucaucgaggaccugcuguucaacaaagugacacuggccgacgccggcuucaucaagcaguauggcgauugucugggcgacauugccgccagggaucugauuugcgcccagaaguuuaacggacugacagugcugccuccucugcugaccgaugagaugaucgcccaguacacaucugcccugcuggccggcacaaucacaagcggcuggacauuuggagcuggcgccgcucugcagauccccuuugcuaugcagauggccuaccgguucaacggcaucggagugacccagaaugugcuguacgagaaccagaagcugaucgccaaccaguucaacagcgccaucggcaagauccaggacagccugagcagcacagcaagcgcccugggaaagcugcaggacguggucaaccagaaugcccaggcacugaacacccuggucaagcagcuguccuccaacuucggcgccaucagcucugugcugaacgauauccugagcagacuggacccuccugaggccgaggugcagaucgacagacugaucacaggcagacugcagagccuccagacauacgugacccagcagcugaucagagccgccgagauuagagccucugccaaucuggccgccaccaagaugucugagugugugcugggccagagcaagagaguggacuuuugcggcaagggcuaccaccugaugagcuucccucagucugccccucacggcgugguguuucugcacgugacauaugugcccgcucaagagaagaauuucaccaccgcuccagccaucugccacgacggcaaagcccacuuuccuagagaaggcguguucguguccaacggcacccauugguucgugacacagcggaacuucuacgagccccagaucaucaccaccgacaacaccuucgugucuggcaacugcgacguugugaucggcauugugaacaauaccguguacgacccucugcagcccgagcuggacagcuucaaagaggaacuggacaaguacuuuaagaaccacacaagccccgacguggaccugggcgauaucagcggaaucaaugccagcgucgugaacauccagaaagagaucgaccggcugaacgagguggccaagaaucugaacgagagccugaucgaccugcaagaacuggggaaguacgagcaguacaucaaguggcccugguacaucuggcugggcuuuaucgccggacugauugccaucgugauggucacaaucaugcuguguugcaugaccagcugcuguagcugccugaagggcuguuguagcuguggcagcugcugcaaguucgacgaggacgauucugagcccgugcugaagggcgugaaacugcacuacaccugaggacuaguuauaagacugacuagcccgaugggccucccaacgggcccuccuccccuccuugcaccgagauuaauagaucuaaaaaaaaaaaaaaaaaaaaaaaaaaaaaaaaaaaaaaaaaaaaaaaaaaaaaaaaaaaaaaaaaaaaaaaaaaaaaaaaaaaaaaaaaaaaaaaaaaaa

SEQ ID NO: 25794 - RNA, 4017 nt, Artificial Sequence
  SARS-CoV-2/Wuhan/WIV05/2019__EPI_ISL_402128 spike protein mRNA gc mod (1-1273)(K986P_V987P_N501Y_D614G)
aggagaaagcuuaccauguucguguuucuggugcugcugccccugguguccagccagugugugaaccugaccaccagaacacagcugccuccagccuacaccaacagcuucaccagaggcguguacuaccccgacaagguguucagauccagcgugcugcacucuacccaggaccuguuccugccuuucuucagcaacgugaccugguuccacgccauccacguguccggcaccaauggcaccaagagauucgacaaccccgugcugcccuucaacgacgggguguacuuugccagcaccgagaaguccaacaucaucagaggcuggaucuucggcaccacacuggacagcaagacccagagccugcugaucgugaacaacgccaccaacguggucaucaaagugugcgaguuccaguucugcaacgaccccuuccugggcgucuacuaccacaagaacaacaagagcuggauggaaagcgaguuccggguguacagcagcgccaacaacugcaccuucgaguacgugucccagccuuuccugauggaccuggaaggcaagcagggcaacuucaagaaccugcgcgaguucguguucaagaacaucgacggcuacuucaaaaucuacagcaagcacaccccuaucaaccucgugcgggaucugccucagggcuucucugcucuggaaccccugguggaucugcccaucggcaucaacaucacccgguuucagacacugcuggcccugcacagaagcuaccugacaccuggcgauagcagcagcggauggacagcuggugccgccgcuuacuaugugggcuaccugcagccuagaaccuuccugcugaaguacaacgagaacggcaccaucaccgacgccguggauugugcucuggauccucugagcgagacaaagugcacccugaaguccuucaccguggaaaagggcaucuaccagaccagcaacuuccgggugcagcccaccgaauccaucgugcgguuccccaauaucaccaaucugugccccuucggcgagguguucaaugccaccagauucgccucuguguacgccuggaaccggaagcggaucagcaauugcguggccgacuacuccgugcuguacaacuccgccagcuucagcaccuucaagugcuacggcguguccccuaccaagcugaacgaccugugcuucacaaacguguacgccgacagcuucgugauccggggagaugaagugcggcagauugccccuggacagacaggcaagaucgccgacuacaacuacaagcugcccgacgacuucaccggcugugugauugccuggaacagcaacaaccuggacuccaaagucggcggcaacuacaauuaccuguaccggcuguuccggaaguccaaucugaagcccuucgagcgggacaucagcaccgaaaucuaucaggccggcagcaccccuugcaacggcguggaaggcuucaacugcuacuucccacugcaguccuacggcuuucagcccacauacggcgugggcuaucagcccuacagagugguggugcugagcuucgaacugcugcaugcuccugccacagugugcggcccuaagaaaagcaccaaucucgugaagaacaaaugcgugaacuucaacuucaacggccugaccggcaccggcgugcugacagagagcaacaagaaguuccugccauuccagcaguuuggccgggauaucgccgauaccacagacgccguuagagauccccagacacuggaaauccuggacaucaccccaugcagcuucggcggagugucugugaucaccccuggcaccaacaccagcaaucagguggcagugcuguaccagggcgugaacuguaccgaagugcccguggccauucacgccgaucagcugacaccuacauggcggguguacuccaccggcagcaauguguuucagaccagagccggcugucugaucggagccgagcacgugaacaauagcuacgagugcgacauccccaucggcgcuggcaucugugccagcuaccagacacagacaaacagccccagacgggcuagaagcguggccagccagagcaucauugccuacacaaugucucugggcgccgagaacagcguggccuacuccaacaacucuaucgcuauccccaccaacuucaccaucagcgugaccaccgagauccugccuguguccaugaccaagaccagcguggacugcaccauguacaucugcggcgauuccaccgagugcuccaaccugcugcugcaguacggcagcuucugcacccagcugaauagagcccugacagggaucgccguggaacaggacaagaacacccaagagguguucgcccaagugaagcaaaucuacaagaccccuccuaucaaggacuucggcggcuucaauuucagccagauucugcccgauccuagcaagcccagcaagcggagcuucaucgaggaccugcuguucaacaaagugacacuggccgacgccggcuucaucaagcaguauggcgauugucugggcgacauugccgccagggaucugauuugcgcccagaaguuuaacggacugacagugcugccuccucugcugaccgaugagaugaucgcccaguacacaucugcccugcuggccggcacaaucacaagcggcuggacauuuggagcuggcgccgcucugcagauccccuuugcuaugcagauggccuaccgguucaacggcaucggagugacccagaaugugcuguacgagaaccagaagcugaucgccaaccaguucaacagcgccaucggcaagauccaggacagccugagcagcacagcaagcgcccugggaaagcugcaggacguggucaaccagaaugcccaggcacugaacacccuggucaagcagcuguccuccaacuucggcgccaucagcucugugcugaacgauauccugagcagacuggacccuccugaggccgaggugcagaucgacagacugaucacaggcagacugcagagccuccagacauacgugacccagcagcugaucagagccgccgagauuagagccucugccaaucuggccgccaccaagaugucugagugugugcugggccagagcaagagaguggacuuuugcggcaagggcuaccaccugaugagcuucccucagucugccccucacggcgugguguuucugcacgugacauaugugcccgcucaagagaagaauuucaccaccgcuccagccaucugccacgacggcaaagcccacuuuccuagagaaggcguguucguguccaacggcacccauugguucgugacacagcggaacuucuacgagccccagaucaucaccaccgacaacaccuucgugucuggcaacugcgacguugugaucggcauugugaacaauaccguguacgacccucugcagcccgagcuggacagcuucaaagaggaacuggacaaguacuuuaagaaccacacaagccccgacguggaccugggcgauaucagcggaaucaaugccagcgucgugaacauccagaaagagaucgaccggcugaacgagguggccaagaaucugaacgagagccugaucgaccugcaagaacuggggaaguacgagcaguacaucaaguggcccugguacaucuggcugggcuuuaucgccggacugauugccaucgugauggucacaaucaugcuguguugcaugaccagcugcuguagcugccugaagggcuguuguagcuguggcagcugcugcaaguucgacgaggacgauucugagcccgugcugaagggcgugaaacugcacuacaccugaggacuaguuauaagacugacuagcccgaugggccucccaacgggcccuccuccccuccuugcaccgagauuaauagaucuaaaaaaaaaaaaaaaaaaaaaaaaaaaaaaaaaaaaaaaaaaaaaaaaaaaaaaaaaaaaaaaaaaaaaaaaaaaaaaaaaaaaaaaaaaaaaaaaaaaa

SEQ ID NO: 25795 - RNA, 4011 nt, Artificial Sequence
  SARS-CoV-2/Wuhan/WIV05/2019__EPI_ISL_402128 spike protein mRNA gc mod (1-1273)(K986P_V987P_H69del_V70del_D614G)
aggagaaagcuuaccauguucguguuucuggugcugcugccccugguguccagccagugugugaaccugaccaccagaacacagcugccuccagccuacaccaacagcuucaccagaggcguguacuaccccgacaagguguucagauccagcgugcugcacucuacccaggaccuguuccugccuuucuucagcaacgugaccugguuccacgccaucuccggcaccaauggcaccaagagauucgacaaccccgugcugcccuucaacgacgggguguacuuugccagcaccgagaaguccaacaucaucagaggcuggaucuucggcaccacacuggacagcaagacccagagccugcugaucgugaacaacgccaccaacguggucaucaaagugugcgaguuccaguucugcaacgaccccuuccugggcgucuacuaccacaagaacaacaagagcuggauggaaagcgaguuccggguguacagcagcgccaacaacugcaccuucgaguacgugucccagccuuuccugauggaccuggaaggcaagcagggcaacuucaagaaccugcgcgaguucguguucaagaacaucgacggcuacuucaaaaucuacagcaagcacaccccuaucaaccucgugcgggaucugccucagggcuucucugcucuggaaccccugguggaucugcccaucggcaucaacaucacccgguuucagacacugcuggcccugcacagaagcuaccugacaccuggcgauagcagcagcggauggacagcuggugccgccgcuuacuaugugggcuaccugcagccuagaaccuuccugcugaaguacaacgagaacggcaccaucaccgacgccguggauugugcucuggauccucugagcgagacaaagugcacccugaaguccuucaccguggaaaagggcaucuaccagaccagcaacuuccgggugcagcccaccgaauccaucgugcgguuccccaauaucaccaaucugugccccuucggcgagguguucaaugccaccagauucgccucuguguacgccuggaaccggaagcggaucagcaauugcguggccgacuacuccgugcuguacaacuccgccagcuucagcaccuucaagugcuacggcguguccccuaccaagcugaacgaccugugcuucacaaacguguacgccgacagcuucgugauccggggagaugaagugcggcagauugccccuggacagacaggcaagaucgccgacuacaacuacaagcugcccgacgacuucaccggcugugugauugccuggaacagcaacaaccuggacuccaaagucggcggcaacuacaauuaccuguaccggcuguuccggaaguccaaucugaagcccuucgagcgggacaucagcaccgaaaucuaucaggccggcagcaccccuugcaacggcguggaaggcuucaacugcuacuucccacugcaguccuacggcuuucagcccacaaauggcgugggcuaucagcccuacagagugguggugcugagcuucgaacugcugcaugcuccugccacagugugcggcccuaagaaaagcaccaaucucgugaagaacaaaugcgugaacuucaacuucaacggccugaccggcaccggcgugcugacagagagcaacaagaaguuccugccauuccagcaguuuggccgggauaucgccgauaccacagacgccguuagagauccccagacacuggaaauccuggacaucaccccaugcagcuucggcggagugucugugaucaccccuggcaccaacaccagcaaucagguggcagugcuguaccagggcgugaacuguaccgaagugcccguggccauucacgccgaucagcugacaccuacauggcggguguacuccaccggcagcaauguguuucagaccagagccggcugucugaucggagccgagcacgugaacaauagcuacgagugcgacauccccaucggcgcuggcaucugugccagcuaccagacacagacaaacagccccagacgggcuagaagcguggccagccagagcaucauugccuacacaaugucucugggcgccgagaacagcguggccuacuccaacaacucuaucgcuauccccaccaacuucaccaucagcgugaccaccgagauccugccuguguccaugaccaagaccagcguggacugcaccauguacaucugcggcgauuccaccgagugcuccaaccugcugcugcaguacggcagcuucugcacccagcugaauagagcccugacagggaucgccguggaacaggacaagaacacccaagagguguucgcccaagugaagcaaaucuacaagaccccuccuaucaaggacuucggcggcuucaauuucagccagauucugcccgauccuagcaagcccagcaagcggagcuucaucgaggaccugcuguucaacaaagugacacuggccgacgccggcuucaucaagcaguauggcgauugucugggcgacauugccgccagggaucugauuugcgcccagaaguuuaacggacugacagugcugccuccucugcugaccgaugagaugaucgcccaguacacaucugcccugcuggccggcacaaucacaagcggcuggacauuuggagcuggcgccgcucugcagauccccuuugcuaugcagauggccuaccgguucaacggcaucggagugacccagaaugugcuguacgagaaccagaagcugaucgccaaccaguucaacagcgccaucggcaagauccaggacagccugagcagcacagcaagcgcccugggaaagcugcaggacguggucaaccagaaugcccaggcacugaacacccuggucaagcagcuguccuccaacuucggcgccaucagcucugugcugaacgauauccugagcagacuggacccuccugaggccgaggugcagaucgacagacugaucacaggcagacugcagagccuccagacauacgugacccagcagcugaucagagccgccgagauuagagccucugccaaucuggccgccaccaagaugucugagugugugcugggccagagcaagagaguggacuuuugcggcaagggcuaccaccugaugagcuucccucagucugccccucacggcgugguguuucugcacgugacauaugugcccgcucaagagaagaauuucaccaccgcuccagccaucugccacgacggcaaagcccacuuuccuagagaaggcguguucguguccaacggcacccauugguucgugacacagcggaacuucuacgagccccagaucaucaccaccgacaacaccuucgugucuggcaacugcgacguugugaucggcauugugaacaauaccguguacgacccucugcagcccgagcuggacagcuucaaagaggaacuggacaaguacuuuaagaaccacacaagccccgacguggaccugggcgauaucagcggaaucaaugccagcgucgugaacauccagaaagagaucgaccggcugaacgagguggccaagaaucugaacgagagccugaucgaccugcaagaacuggggaaguacgagcaguacaucaaguggcccugguacaucuggcugggcuuuaucgccggacugauugccaucgugauggucacaaucaugcuguguugcaugaccagcugcuguagcugccugaagggcuguuguagcuguggcagcugcugcaaguucgacgaggacgauucugagcccgugcugaagggcgugaaacugcacuacaccugaggacuaguuauaagacugacuagcccgaugggccucccaacgggcccuccuccccuccuugcaccgagauuaauagaucuaaaaaaaaaaaaaaaaaaaaaaaaaaaaaaaaaaaaaaaaaaaaaaaaaaaaaaaaaaaaaaaaaaaaaaaaaaaaaaaaaaaaaaaaaaaaaaaaaaaa

SEQ ID NO: 25796 - RNA, 4017 nt, Artificial Sequence
  SARS-CoV-2/Wuhan/WIV05/2019__EPI_ISL_402128 spike protein mRNA gc mod (1-1273)(K986P_V987P_Y453F_D614G)
aggagaaagcuuaccauguucguguuucuggugcugcugccccugguguccagccagugugugaaccugaccaccagaacacagcugccuccagccuacaccaacagcuucaccagaggcguguacuaccccgacaagguguucagauccagcgugcugcacucuacccaggaccuguuccugccuuucuucagcaacgugaccugguuccacgccauccacguguccggcaccaauggcaccaagagauucgacaaccccgugcugcccuucaacgacgggguguacuuugccagcaccgagaaguccaacaucaucagaggcuggaucuucggcaccacacuggacagcaagacccagagccugcugaucgugaacaacgccaccaacguggucaucaaagugugcgaguuccaguucugcaacgaccccuuccugggcgucuacuaccacaagaacaacaagagcuggauggaaagcgaguuccggguguacagcagcgccaacaacugcaccuucgaguacgugucccagccuuuccugauggaccuggaaggcaagcagggcaacuucaagaaccugcgcgaguucguguucaagaacaucgacggcuacuucaaaaucuacagcaagcacaccccuaucaaccucgugcgggaucugccucagggcuucucugcucuggaaccccugguggaucugcccaucggcaucaacaucacccgguuucagacacugcuggcccugcacagaagcuaccugacaccuggcgauagcagcagcggauggacagcuggugccgccgcuuacuaugugggcuaccugcagccuagaaccuuccugcugaaguacaacgagaacggcaccaucaccgacgccguggauugugcucuggauccucugagcgagacaaagugcacccugaaguccuucaccguggaaaagggcaucuaccagaccagcaacuuccgggugcagcccaccgaauccaucgugcgguuccccaauaucaccaaucugugccccuucggcgagguguucaaugccaccagauucgccucuguguacgccuggaaccggaagcggaucagcaauugcguggccgacuacuccgugcuguacaacuccgccagcuucagcaccuucaagugcuacggcguguccccuaccaagcugaacgaccugugcuucacaaacguguacgccgacagcuucgugauccggggagaugaagugcggcagauugccccuggacagacaggcaagaucgccgacuacaacuacaagcugcccgacgacuucaccggcugugugauugccuggaacagcaacaaccuggacuccaaagucggcggcaacuacaauuaccuguuccggcuguuccggaaguccaaucugaagcccuucgagcgggacaucagcaccgaaaucuaucaggccggcagcaccccuugcaacggcguggaaggcuucaacugcuacuucccacugcaguccuacggcuuucagcccacaaauggcgugggcuaucagcccuacagagugguggugcugagcuucgaacugcugcaugcuccugccacagugugcggcccuaagaaaagcaccaaucucgugaagaacaaaugcgugaacuucaacuucaacggccugaccggcaccggcgugcugacagagagcaacaagaaguuccugccauuccagcaguuuggccgggauaucgccgauaccacagacgccguuagagauccccagacacuggaaauccuggacaucaccccaugcagcuucggcggagugucugugaucaccccuggcaccaacaccagcaaucagguggcagugcuguaccagggcgugaacuguaccgaagugcccguggccauucacgccgaucagcugacaccuacauggcggguguacuccaccggcagcaauguguuucagaccagagccggcugucugaucggagccgagcacgugaacaauagcuacgagugcgacauccccaucggcgcuggcaucugugccagcuaccagacacagacaaacagccccagacgggcuagaagcguggccagccagagcaucauugccuacacaaugucucugggcgccgagaacagcguggccuacuccaacaacucuaucgcuauccccaccaacuucaccaucagcgugaccaccgagauccugccuguguccaugaccaagaccagcguggacugcaccauguacaucugcggcgauuccaccgagugcuccaaccugcugcugcaguacggcagcuucugcacccagcugaauagagcccugacagggaucgccguggaacaggacaagaacacccaagagguguucgcccaagugaagcaaaucuacaagaccccuccuaucaaggacuucggcggcuucaauuucagccagauucugcccgauccuagcaagcccagcaagcggagcuucaucgaggaccugcuguucaacaaagugacacuggccgacgccggcuucaucaagcaguauggcgauugucugggcgacauugccgccagggaucugauuugcgcccagaaguuuaacggacugacagugcugccuccucugcugaccgaugagaugaucgcccaguacacaucugcccugcuggccggcacaaucacaagcggcuggacauuuggagcuggcgccgcucugcagauccccuuugcuaugcagauggccuaccgguucaacggcaucggagugacccagaaugugcuguacgagaaccagaagcugaucgccaaccaguucaacagcgccaucggcaagauccaggacagccugagcagcacagcaagcgcccugggaaagcugcaggacguggucaaccagaaugcccaggcacugaacacccuggucaagcagcuguccuccaacuucggcgccaucagcucugugcugaacgauauccugagcagacuggacccuccugaggccgaggugcagaucgacagacugaucacaggcagacugcagagccuccagacauacgugacccagcagcugaucagagccgccgagauuagagccucugccaaucuggccgccaccaagaugucugagugugugcugggccagagcaagagaguggacuuuugcggcaagggcuaccaccugaugagcuucccucagucugccccucacggcgugguguuucugcacgugacauaugugcccgcucaagagaagaauuucaccaccgcuccagccaucugccacgacggcaaagcccacuuuccuagagaaggcguguucguguccaacggcacccauugguucgugacacagcggaacuucuacgagccccagaucaucaccaccgacaacaccuucgugucuggcaacugcgacguugugaucggcauugugaacaauaccguguacgacccucugcagcccgagcuggacagcuucaaagaggaacuggacaaguacuuuaagaaccacacaagccccgacguggaccugggcgauaucagcggaaucaaugccagcgucgugaacauccagaaagagaucgaccggcugaacgagguggccaagaaucugaacgagagccugaucgaccugcaagaacuggggaaguacgagcaguacaucaaguggcccugguacaucuggcugggcuuuaucgccggacugauugccaucgugauggucacaaucaugcuguguugcaugaccagcugcuguagcugccugaagggcuguuguagcuguggcagcugcugcaaguucgacgaggacgauucugagcccgugcugaagggcgugaaacugcacuacaccugaggacuaguuauaagacugacuagcccgaugggccucccaacgggcccuccuccccuccuugcaccgagauuaauagaucuaaaaaaaaaaaaaaaaaaaaaaaaaaaaaaaaaaaaaaaaaaaaaaaaaaaaaaaaaaaaaaaaaaaaaaaaaaaaaaaaaaaaaaaaaaaaaaaaaaaa

SEQ ID NO: 25797 - RNA, 4017 nt, Artificial Sequence
  SARS-CoV-2/Wuhan/WIV05/2019__EPI_ISL_402128 spike protein mRNA gc mod (1-1273)(K986P_V987P_D614G_I692V)
aggagaaagcuuaccauguucguguuucuggugcugcugccccugguguccagccagugugugaaccugaccaccagaacacagcugccuccagccuacaccaacagcuucaccagaggcguguacuaccccgacaagguguucagauccagcgugcugcacucuacccaggaccuguuccugccuuucuucagcaacgugaccugguuccacgccauccacguguccggcaccaauggcaccaagagauucgacaaccccgugcugcccuucaacgacgggguguacuuugccagcaccgagaaguccaacaucaucagaggcuggaucuucggcaccacacuggacagcaagacccagagccugcugaucgugaacaacgccaccaacguggucaucaaagugugcgaguuccaguucugcaacgaccccuuccugggcgucuacuaccacaagaacaacaagagcuggauggaaagcgaguuccggguguacagcagcgccaacaacugcaccuucgaguacgugucccagccuuuccugauggaccuggaaggcaagcagggcaacuucaagaaccugcgcgaguucguguucaagaacaucgacggcuacuucaaaaucuacagcaagcacaccccuaucaaccucgugcgggaucugccucagggcuucucugcucuggaaccccugguggaucugcccaucggcaucaacaucacccgguuucagacacugcuggcccugcacagaagcuaccugacaccuggcgauagcagcagcggauggacagcuggugccgccgcuuacuaugugggcuaccugcagccuagaaccuuccugcugaaguacaacgagaacggcaccaucaccgacgccguggauugugcucuggauccucugagcgagacaaagugcacccugaaguccuucaccguggaaaagggcaucuaccagaccagcaacuuccgggugcagcccaccgaauccaucgugcgguuccccaauaucaccaaucugugccccuucggcgagguguucaaugccaccagauucgccucuguguacgccuggaaccggaagcggaucagcaauugcguggccgacuacuccgugcuguacaacuccgccagcuucagcaccuucaagugcuacggcguguccccuaccaagcugaacgaccugugcuucacaaacguguacgccgacagcuucgugauccggggagaugaagugcggcagauugccccuggacagacaggcaagaucgccgacuacaacuacaagcugcccgacgacuucaccggcugugugauugccuggaacagcaacaaccuggacuccaaagucggcggcaacuacaauuaccuguaccggcuguuccggaaguccaaucugaagcccuucgagcgggacaucagcaccgaaaucuaucaggccggcagcaccccuugcaacggcguggaaggcuucaacugcuacuucccacugcaguccuacggcuuucagcccacaaauggcgugggcuaucagcccuacagagugguggugcugagcuucgaacugcugcaugcuccugccacagugugcggcccuaagaaaagcaccaaucucgugaagaacaaaugcgugaacuucaacuucaacggccugaccggcaccggcgugcugacagagagcaacaagaaguuccugccauuccagcaguuuggccgggauaucgccgauaccacagacgccguuagagauccccagacacuggaaauccuggacaucaccccaugcagcuucggcggagugucugugaucaccccuggcaccaacaccagcaaucagguggcagugcuguaccagggcgugaacuguaccgaagugcccguggccauucacgccgaucagcugacaccuacauggcggguguacuccaccggcagcaauguguuucagaccagagccggcugucugaucggagccgagcacgugaacaauagcuacgagugcgacauccccaucggcgcuggcaucugugccagcuaccagacacagacaaacagccccagacgggcuagaagcguggccagccagagcgugauugccuacacaaugucucugggcgccgagaacagcguggccuacuccaacaacucuaucgcuauccccaccaacuucaccaucagcgugaccaccgagauccugccuguguccaugaccaagaccagcguggacugcaccauguacaucugcggcgauuccaccgagugcuccaaccugcugcugcaguacggcagcuucugcacccagcugaauagagcccugacagggaucgccguggaacaggacaagaacacccaagagguguucgcccaagugaagcaaaucuacaagaccccuccuaucaaggacuucggcggcuucaauuucagccagauucugcccgauccuagcaagcccagcaagcggagcuucaucgaggaccugcuguucaacaaagugacacuggccgacgccggcuucaucaagcaguauggcgauugucugggcgacauugccgccagggaucugauuugcgcccagaaguuuaacggacugacagugcugccuccucugcugaccgaugagaugaucgcccaguacacaucugcccugcuggccggcacaaucacaagcggcuggacauuuggagcuggcgccgcucugcagauccccuuugcuaugcagauggccuaccgguucaacggcaucggagugacccagaaugugcuguacgagaaccagaagcugaucgccaaccaguucaacagcgccaucggcaagauccaggacagccugagcagcacagcaagcgcccugggaaagcugcaggacguggucaaccagaaugcccaggcacugaacacccuggucaagcagcuguccuccaacuucggcgccaucagcucugugcugaacgauauccugagcagacuggacccuccugaggccgaggugcagaucgacagacugaucacaggcagacugcagagccuccagacauacgugacccagcagcugaucagagccgccgagauuagagccucugccaaucuggccgccaccaagaugucugagugugugcugggccagagcaagagaguggacuuuugcggcaagggcuaccaccugaugagcuucccucagucugccccucacggcgugguguuucugcacgugacauaugugcccgcucaagagaagaauuucaccaccgcuccagccaucugccacgacggcaaagcccacuuuccuagagaaggcguguucguguccaacggcacccauugguucgugacacagcggaacuucuacgagccccagaucaucaccaccgacaacaccuucgugucuggcaacugcgacguugugaucggcauugugaacaauaccguguacgacccucugcagcccgagcuggacagcuucaaagaggaacuggacaaguacuuuaagaaccacacaagccccgacguggaccugggcgauaucagcggaaucaaugccagcgucgugaacauccagaaagagaucgaccggcugaacgagguggccaagaaucugaacgagagccugaucgaccugcaagaacuggggaaguacgagcaguacaucaaguggcccugguacaucuggcugggcuuuaucgccggacugauugccaucgugauggucacaaucaugcuguguugcaugaccagcugcuguagcugccugaagggcuguuguagcuguggcagcugcugcaaguucgacgaggacgauucugagcccgugcugaagggcgugaaacugcacuacaccugaggacuaguuauaagacugacuagcccgaugggccucccaacgggcccuccuccccuccuugcaccgagauuaauagaucuaaaaaaaaaaaaaaaaaaaaaaaaaaaaaaaaaaaaaaaaaaaaaaaaaaaaaaaaaaaaaaaaaaaaaaaaaaaaaaaaaaaaaaaaaaaaaaaaaaaa

SEQ ID NO: 25798 - RNA, 4017 nt, Artificial Sequence
  SARS-CoV-2/Wuhan/WIV05/2019__EPI_ISL_402128 spike protein mRNA gc mod (1-1273)(K986P_V987P_D614G_M1229I)
aggagaaagcuuaccauguucguguuucuggugcugcugccccugguguccagccagugugugaaccugaccaccagaacacagcugccuccagccuacaccaacagcuucaccagaggcguguacuaccccgacaagguguucagauccagcgugcugcacucuacccaggaccuguuccugccuuucuucagcaacgugaccugguuccacgccauccacguguccggcaccaauggcaccaagagauucgacaaccccgugcugcccuucaacgacgggguguacuuugccagcaccgagaaguccaacaucaucagaggcuggaucuucggcaccacacuggacagcaagacccagagccugcugaucgugaacaacgccaccaacguggucaucaaagugugcgaguuccaguucugcaacgaccccuuccugggcgucuacuaccacaagaacaacaagagcuggauggaaagcgaguuccggguguacagcagcgccaacaacugcaccuucgaguacgugucccagccuuuccugauggaccuggaaggcaagcagggcaacuucaagaaccugcgcgaguucguguucaagaacaucgacggcuacuucaaaaucuacagcaagcacaccccuaucaaccucgugcgggaucugccucagggcuucucugcucuggaaccccugguggaucugcccaucggcaucaacaucacccgguuucagacacugcuggcccugcacagaagcuaccugacaccuggcgauagcagcagcggauggacagcuggugccgccgcuuacuaugugggcuaccugcagccuagaaccuuccugcugaaguacaacgagaacggcaccaucaccgacgccguggauugugcucuggauccucugagcgagacaaagugcacccugaaguccuucaccguggaaaagggcaucuaccagaccagcaacuuccgggugcagcccaccgaauccaucgugcgguuccccaauaucaccaaucugugccccuucggcgagguguucaaugccaccagauucgccucuguguacgccuggaaccggaagcggaucagcaauugcguggccgacuacuccgugcuguacaacuccgccagcuucagcaccuucaagugcuacggcguguccccuaccaagcugaacgaccugugcuucacaaacguguacgccgacagcuucgugauccggggagaugaagugcggcagauugccccuggacagacaggcaagaucgccgacuacaacuacaagcugcccgacgacuucaccggcugugugauugccuggaacagcaacaaccuggacuccaaagucggcggcaacuacaauuaccuguaccggcuguuccggaaguccaaucugaagcccuucgagcgggacaucagcaccgaaaucuaucaggccggcagcaccccuugcaacggcguggaaggcuucaacugcuacuucccacugcaguccuacggcuuucagcccacaaauggcgugggcuaucagcccuacagagugguggugcugagcuucgaacugcugcaugcuccugccacagugugcggcccuaagaaaagcaccaaucucgugaagaacaaaugcgugaacuucaacuucaacggccugaccggcaccggcgugcugacagagagcaacaagaaguuccugccauuccagcaguuuggccgggauaucgccgauaccacagacgccguuagagauccccagacacuggaaauccuggacaucaccccaugcagcuucggcggagugucugugaucaccccuggcaccaacaccagcaaucagguggcagugcuguaccagggcgugaacuguaccgaagugcccguggccauucacgccgaucagcugacaccuacauggcggguguacuccaccggcagcaauguguuucagaccagagccggcugucugaucggagccgagcacgugaacaauagcuacgagugcgacauccccaucggcgcuggcaucugugccagcuaccagacacagacaaacagccccagacgggcuagaagcguggccagccagagcaucauugccuacacaaugucucugggcgccgagaacagcguggccuacuccaacaacucuaucgcuauccccaccaacuucaccaucagcgugaccaccgagauccugccuguguccaugaccaagaccagcguggacugcaccauguacaucugcggcgauuccaccgagugcuccaaccugcugcugcaguacggcagcuucugcacccagcugaauagagcccugacagggaucgccguggaacaggacaagaacacccaagagguguucgcccaagugaagcaaaucuacaagaccccuccuaucaaggacuucggcggcuucaauuucagccagauucugcccgauccuagcaagcccagcaagcggagcuucaucgaggaccugcuguucaacaaagugacacuggccgacgccggcuucaucaagcaguauggcgauugucugggcgacauugccgccagggaucugauuugcgcccagaaguuuaacggacugacagugcugccuccucugcugaccgaugagaugaucgcccaguacacaucugcccugcuggccggcacaaucacaagcggcuggacauuuggagcuggcgccgcucugcagauccccuuugcuaugcagauggccuaccgguucaacggcaucggagugacccagaaugugcuguacgagaaccagaagcugaucgccaaccaguucaacagcgccaucggcaagauccaggacagccugagcagcacagcaagcgcccugggaaagcugcaggacguggucaaccagaaugcccaggcacugaacacccuggucaagcagcuguccuccaacuucggcgccaucagcucugugcugaacgauauccugagcagacuggacccuccugaggccgaggugcagaucgacagacugaucacaggcagacugcagagccuccagacauacgugacccagcagcugaucagagccgccgagauuagagccucugccaaucuggccgccaccaagaugucugagugugugcugggccagagcaagagaguggacuuuugcggcaagggcuaccaccugaugagcuucccucagucugccccucacggcgugguguuucugcacgugacauaugugcccgcucaagagaagaauuucaccaccgcuccagccaucugccacgacggcaaagcccacuuuccuagagaaggcguguucguguccaacggcacccauugguucgugacacagcggaacuucuacgagccccagaucaucaccaccgacaacaccuucgugucuggcaacugcgacguugugaucggcauugugaacaauaccguguacgacccucugcagcccgagcuggacagcuucaaagaggaacuggacaaguacuuuaagaaccacacaagccccgacguggaccugggcgauaucagcggaaucaaugccagcgucgugaacauccagaaagagaucgaccggcugaacgagguggccaagaaucugaacgagagccugaucgaccugcaagaacuggggaaguacgagcaguacaucaaguggcccugguacaucuggcugggcuuuaucgccggacugauugccaucgugaucgucacaaucaugcuguguugcaugaccagcugcuguagcugccugaagggcuguuguagcuguggcagcugcugcaaguucgacgaggacgauucugagcccgugcugaagggcgugaaacugcacuacaccugaggacuaguuauaagacugacuagcccgaugggccucccaacgggcccuccuccccuccuugcaccgagauuaauagaucuaaaaaaaaaaaaaaaaaaaaaaaaaaaaaaaaaaaaaaaaaaaaaaaaaaaaaaaaaaaaaaaaaaaaaaaaaaaaaaaaaaaaaaaaaaaaaaaaaaaa

SEQ ID NO: 25799 - RNA, 4011 nt, Artificial Sequence
  SARS-CoV-2/Wuhan/WIV05/2019__EPI_ISL_402128 spike protein mRNA gc mod (1-1273)(K986P_V987P_H69del_V70del_A222V_Y453F_S477N_D614G_I692V)
aggagaaagcuuaccauguucguguuucuggugcugcugccccugguguccagccagugugugaaccugaccaccagaacacagcugccuccagccuacaccaacagcuucaccagaggcguguacuaccccgacaagguguucagauccagcgugcugcacucuacccaggaccuguuccugccuuucuucagcaacgugaccugguuccacgccaucuccggcaccaauggcaccaagagauucgacaaccccgugcugcccuucaacgacgggguguacuuugccagcaccgagaaguccaacaucaucagaggcuggaucuucggcaccacacuggacagcaagacccagagccugcugaucgugaacaacgccaccaacguggucaucaaagugugcgaguuccaguucugcaacgaccccuuccugggcgucuacuaccacaagaacaacaagagcuggauggaaagcgaguuccggguguacagcagcgccaacaacugcaccuucgaguacgugucccagccuuuccugauggaccuggaaggcaagcagggcaacuucaagaaccugcgcgaguucguguucaagaacaucgacggcuacuucaaaaucuacagcaagcacaccccuaucaaccucgugcgggaucugccucagggcuucucugugcuggaaccccugguggaucugcccaucggcaucaacaucacccgguuucagacacugcuggcccugcacagaagcuaccugacaccuggcgauagcagcagcggauggacagcuggugccgccgcuuacuaugugggcuaccugcagccuagaaccuuccugcugaaguacaacgagaacggcaccaucaccgacgccguggauugugcucuggauccucugagcgagacaaagugcacccugaaguccuucaccguggaaaagggcaucuaccagaccagcaacuuccgggugcagcccaccgaauccaucgugcgguuccccaauaucaccaaucugugccccuucggcgagguguucaaugccaccagauucgccucuguguacgccuggaaccggaagcggaucagcaauugcguggccgacuacuccgugcuguacaacuccgccagcuucagcaccuucaagugcuacggcguguccccuaccaagcugaacgaccugugcuucacaaacguguacgccgacagcuucgugauccggggagaugaagugcggcagauugccccuggacagacaggcaagaucgccgacuacaacuacaagcugcccgacgacuucaccggcugugugauugccuggaacagcaacaaccuggacuccaaagucggcggcaacuacaauuaccuguuccggcuguuccggaaguccaaucugaagcccuucgagcgggacaucagcaccgaaaucuaucaggccggcaacaccccuugcaacggcguggaaggcuucaacugcuacuucccacugcaguccuacggcuuucagcccacaaauggcgugggcuaucagcccuacagagugguggugcugagcuucgaacugcugcaugcuccugccacagugugcggcccuaagaaaagcaccaaucucgugaagaacaaaugcgugaacuucaacuucaacggccugaccggcaccggcgugcugacagagagcaacaagaaguuccugccauuccagcaguuuggccgggauaucgccgauaccacagacgccguuagagauccccagacacuggaaauccuggacaucaccccaugcagcuucggcggagugucugugaucaccccuggcaccaacaccagcaaucagguggcagugcuguaccagggcgugaacuguaccgaagugcccguggccauucacgccgaucagcugacaccuacauggcggguguacuccaccggcagcaauguguuucagaccagagccggcugucugaucggagccgagcacgugaacaauagcuacgagugcgacauccccaucggcgcuggcaucugugccagcuaccagacacagacaaacagccccagacgggcuagaagcguggccagccagagcgugauugccuacacaaugucucugggcgccgagaacagcguggccuacuccaacaacucuaucgcuauccccaccaacuucaccaucagcgugaccaccgagauccugccuguguccaugaccaagaccagcguggacugcaccauguacaucugcggcgauuccaccgagugcuccaaccugcugcugcaguacggcagcuucugcacccagcugaauagagcccugacagggaucgccguggaacaggacaagaacacccaagagguguucgcccaagugaagcaaaucuacaagaccccuccuaucaaggacuucggcggcuucaauuucagccagauucugcccgauccuagcaagcccagcaagcggagcuucaucgaggaccugcuguucaacaaagugacacuggccgacgccggcuucaucaagcaguauggcgauugucugggcgacauugccgccagggaucugauuugcgcccagaaguuuaacggacugacagugcugccuccucugcugaccgaugagaugaucgcccaguacacaucugcccugcuggccggcacaaucacaagcggcuggacauuuggagcuggcgccgcucugcagauccccuuugcuaugcagauggccuaccgguucaacggcaucggagugacccagaaugugcuguacgagaaccagaagcugaucgccaaccaguucaacagcgccaucggcaagauccaggacagccugagcagcacagcaagcgcccugggaaagcugcaggacguggucaaccagaaugcccaggcacugaacacccuggucaagcagcuguccuccaacuucggcgccaucagcucugugcugaacgauauccugagcagacuggacccuccugaggccgaggugcagaucgacagacugaucacaggcagacugcagagccuccagacauacgugacccagcagcugaucagagccgccgagauuagagccucugccaaucuggccgccaccaagaugucugagugugugcugggccagagcaagagaguggacuuuugcggcaagggcuaccaccugaugagcuucccucagucugccccucacggcgugguguuucugcacgugacauaugugcccgcucaagagaagaauuucaccaccgcuccagccaucugccacgacggcaaagcccacuuuccuagagaaggcguguucguguccaacggcacccauugguucgugacacagcggaacuucuacgagccccagaucaucaccaccgacaacaccuucgugucuggcaacugcgacguugugaucggcauugugaacaauaccguguacgacccucugcagcccgagcuggacagcuucaaagaggaacuggacaaguacuuuaagaaccacacaagccccgacguggaccugggcgauaucagcggaaucaaugccagcgucgugaacauccagaaagagaucgaccggcugaacgagguggccaagaaucugaacgagagccugaucgaccugcaagaacuggggaaguacgagcaguacaucaaguggcccugguacaucuggcugggcuuuaucgccggacugauugccaucgugauggucacaaucaugcuguguugcaugaccagcugcuguagcugccugaagggcuguuguagcuguggcagcugcugcaaguucgacgaggacgauucugagcccgugcugaagggcgugaaacugcacuacaccugaggacuaguuauaagacugacuagcccgaugggccucccaacgggcccuccuccccuccuugcaccgagauuaauagaucuaaaaaaaaaaaaaaaaaaaaaaaaaaaaaaaaaaaaaaaaaaaaaaaaaaaaaaaaaaaaaaaaaaaaaaaaaaaaaaaaaaaaaaaaaaaaaaaaaaaa

SEQ ID NO: 25800 - RNA, 4011 nt, Artificial Sequence
  SARS-CoV-2/Wuhan/WIV05/2019__EPI_ISL_402128 spike protein mRNA gc mod (1-1273)(K986P_V987P_H69del_V70del_Y453F_D614G_I692V_M1229I)
aggagaaagcuuaccauguucguguuucuggugcugcugccccugguguccagccagugugugaaccugaccaccagaacacagcugccuccagccuacaccaacagcuucaccagaggcguguacuaccccgacaagguguucagauccagcgugcugcacucuacccaggaccuguuccugccuuucuucagcaacgugaccugguuccacgccaucuccggcaccaauggcaccaagagauucgacaaccccgugcugcccuucaacgacgggguguacuuugccagcaccgagaaguccaacaucaucagaggcuggaucuucggcaccacacuggacagcaagacccagagccugcugaucgugaacaacgccaccaacguggucaucaaagugugcgaguuccaguucugcaacgaccccuuccugggcgucuacuaccacaagaacaacaagagcuggauggaaagcgaguuccggguguacagcagcgccaacaacugcaccuucgaguacgugucccagccuuuccugauggaccuggaaggcaagcagggcaacuucaagaaccugcgcgaguucguguucaagaacaucgacggcuacuucaaaaucuacagcaagcacaccccuaucaaccucgugcgggaucugccucagggcuucucugcucuggaaccccugguggaucugcccaucggcaucaacaucacccgguuucagacacugcuggcccugcacagaagcuaccugacaccuggcgauagcagcagcggauggacagcuggugccgccgcuuacuaugugggcuaccugcagccuagaaccuuccugcugaaguacaacgagaacggcaccaucaccgacgccguggauugugcucuggauccucugagcgagacaaagugcacccugaaguccuucaccguggaaaagggcaucuaccagaccagcaacuuccgggugcagcccaccgaauccaucgugcgguuccccaauaucaccaaucugugccccuucggcgagguguucaaugccaccagauucgccucuguguacgccuggaaccggaagcggaucagcaauugcguggccgacuacuccgugcuguacaacuccgccagcuucagcaccuucaagugcuacggcguguccccuaccaagcugaacgaccugugcuucacaaacguguacgccgacagcuucgugauccggggagaugaagugcggcagauugccccuggacagacaggcaagaucgccgacuacaacuacaagcugcccgacgacuucaccggcugugugauugccuggaacagcaacaaccuggacuccaaagucggcggcaacuacaauuaccuguuccggcuguuccggaaguccaaucugaagcccuucgagcgggacaucagcaccgaaaucuaucaggccggcagcaccccuugcaacggcguggaaggcuucaacugcuacuucccacugcaguccuacggcuuucagcccacaaauggcgugggcuaucagcccuacagagugguggugcugagcuucgaacugcugcaugcuccugccacagugugcggcccuaagaaaagcaccaaucucgugaagaacaaaugcgugaacuucaacuucaacggccugaccggcaccggcgugcugacagagagcaacaagaaguuccugccauuccagcaguuuggccgggauaucgccgauaccacagacgccguuagagauccccagacacuggaaauccuggacaucaccccaugcagcuucggcggagugucugugaucaccccuggcaccaacaccagcaaucagguggcagugcuguaccagggcgugaacuguaccgaagugcccguggccauucacgccgaucagcugacaccuacauggcggguguacuccaccggcagcaauguguuucagaccagagccggcugucugaucggagccgagcacgugaacaauagcuacgagugcgacauccccaucggcgcuggcaucugugccagcuaccagacacagacaaacagccccagacgggcuagaagcguggccagccagagcgugauugccuacacaaugucucugggcgccgagaacagcguggccuacuccaacaacucuaucgcuauccccaccaacuucaccaucagcgugaccaccgagauccugccuguguccaugaccaagaccagcguggacugcaccauguacaucugcggcgauuccaccgagugcuccaaccugcugcugcaguacggcagcuucugcacccagcugaauagagcccugacagggaucgccguggaacaggacaagaacacccaagagguguucgcccaagugaagcaaaucuacaagaccccuccuaucaaggacuucggcggcuucaauuucagccagauucugcccgauccuagcaagcccagcaagcggagcuucaucgaggaccugcuguucaacaaagugacacuggccgacgccggcuucaucaagcaguauggcgauugucugggcgacauugccgccagggaucugauuugcgcccagaaguuuaacggacugacagugcugccuccucugcugaccgaugagaugaucgcccaguacacaucugcccugcuggccggcacaaucacaagcggcuggacauuuggagcuggcgccgcucugcagauccccuuugcuaugcagauggccuaccgguucaacggcaucggagugacccagaaugugcuguacgagaaccagaagcugaucgccaaccaguucaacagcgccaucggcaagauccaggacagccugagcagcacagcaagcgcccugggaaagcugcaggacguggucaaccagaaugcccaggcacugaacacccuggucaagcagcuguccuccaacuucggcgccaucagcucugugcugaacgauauccugagcagacuggacccuccugaggccgaggugcagaucgacagacugaucacaggcagacugcagagccuccagacauacgugacccagcagcugaucagagccgccgagauuagagccucugccaaucuggccgccaccaagaugucugagugugugcugggccagagcaagagaguggacuuuugcggcaagggcuaccaccugaugagcuucccucagucugccccucacggcgugguguuucugcacgugacauaugugcccgcucaagagaagaauuucaccaccgcuccagccaucugccacgacggcaaagcccacuuuccuagagaaggcguguucguguccaacggcacccauugguucgugacacagcggaacuucuacgagccccagaucaucaccaccgacaacaccuucgugucuggcaacugcgacguugugaucggcauugugaacaauaccguguacgacccucugcagcccgagcuggacagcuucaaagaggaacuggacaaguacuuuaagaaccacacaagccccgacguggaccugggcgauaucagcggaaucaaugccagcgucgugaacauccagaaagagaucgaccggcugaacgagguggccaagaaucugaacgagagccugaucgaccugcaagaacuggggaaguacgagcaguacaucaaguggcccugguacaucuggcugggcuuuaucgccggacugauugccaucgugaucgucacaaucaugcuguguugcaugaccagcugcuguagcugccugaagggcuguuguagcuguggcagcugcugcaaguucgacgaggacgauucugagcccgugcugaagggcgugaaacugcacuacaccugaggacuaguuauaagacugacuagcccgaugggccucccaacgggcccuccuccccuccuugcaccgagauuaauagaucuaaaaaaaaaaaaaaaaaaaaaaaaaaaaaaaaaaaaaaaaaaaaaaaaaaaaaaaaaaaaaaaaaaaaaaaaaaaaaaaaaaaaaaaaaaaaaaaaaaaa

SEQ ID NO: 25801 - RNA, 4008 nt, Artificial Sequence
  SARS-CoV-2/Wuhan/WIV05/2019__EPI_ISL_402128 spike protein mRNA gc mod (1-1273)(K986P_V987P_K986P_V987P_H69del_V70del_Y144del_N501Y_A570 D_D614G_P681H_T716I_S982A_D1118H)
aggagaaagcuuaccauguucguguuucuggugcugcugccccugguguccagccagugugugaaccugaccaccagaacacagcugccuccagccuacaccaacagcuucaccagaggcguguacuaccccgacaagguguucagauccagcgugcugcacucuacccaggaccuguuccugccuuucuucagcaacgugaccugguuccacgccaucuccggcaccaauggcaccaagagauucgacaaccccgugcugcccuucaacgacgggguguacuuugccagcaccgagaaguccaacaucaucagaggcuggaucuucggcaccacacuggacagcaagacccagagccugcugaucgugaacaacgccaccaacguggucaucaaagugugcgaguuccaguucugcaacgaccccuuccugggcgucuaccacaagaacaacaagagcuggauggaaagcgaguuccggguguacagcagcgccaacaacugcaccuucgaguacgugucccagccuuuccugauggaccuggaaggcaagcagggcaacuucaagaaccugcgcgaguucguguucaagaacaucgacggcuacuucaaaaucuacagcaagcacaccccuaucaaccucgugcgggaucugccucagggcuucucugcucuggaaccccugguggaucugcccaucggcaucaacaucacccgguuucagacacugcuggcccugcacagaagcuaccugacaccuggcgauagcagcagcggauggacagcuggugccgccgcuuacuaugugggcuaccugcagccuagaaccuuccugcugaaguacaacgagaacggcaccaucaccgacgccguggauugugcucuggauccucugagcgagacaaagugcacccugaaguccuucaccguggaaaagggcaucuaccagaccagcaacuuccgggugcagcccaccgaauccaucgugcgguuccccaauaucaccaaucugugccccuucggcgagguguucaaugccaccagauucgccucuguguacgccuggaaccggaagcggaucagcaauugcguggccgacuacuccgugcuguacaacuccgccagcuucagcaccuucaagugcuacggcguguccccuaccaagcugaacgaccugugcuucacaaacguguacgccgacagcuucgugauccggggagaugaagugcggcagauugccccuggacagacaggcaagaucgccgacuacaacuacaagcugcccgacgacuucaccggcugugugauugccuggaacagcaacaaccuggacuccaaagucggcggcaacuacaauuaccuguaccggcuguuccggaaguccaaucugaagcccuucgagcgggacaucagcaccgaaaucuaucaggccggcagcaccccuugcaacggcguggaaggcuucaacugcuacuucccacugcaguccuacggcuuucagcccacauacggcgugggcuaucagcccuacagagugguggugcugagcuucgaacugcugcaugcuccugccacagugugcggcccuaagaaaagcaccaaucucgugaagaacaaaugcgugaacuucaacuucaacggccugaccggcaccggcgugcugacagagagcaacaagaaguuccugccauuccagcaguuuggccgggauaucgacgauaccacagacgccguuagagauccccagacacuggaaauccuggacaucaccccaugcagcuucggcggagugucugugaucaccccuggcaccaacaccagcaaucagguggcagugcuguaccagggcgugaacuguaccgaagugcccguggccauucacgccgaucagcugacaccuacauggcggguguacuccaccggcagcaauguguuucagaccagagccggcugucugaucggagccgagcacgugaacaauagcuacgagugcgacauccccaucggcgcuggcaucugugccagcuaccagacacagacaaacagccacagacgggcuagaagcguggccagccagagcaucauugccuacacaaugucucugggcgccgagaacagcguggccuacuccaacaacucuaucgcuauccccaucaacuucaccaucagcgugaccaccgagauccugccuguguccaugaccaagaccagcguggacugcaccauguacaucugcggcgauuccaccgagugcuccaaccugcugcugcaguacggcagcuucugcacccagcugaauagagcccugacagggaucgccguggaacaggacaagaacacccaagagguguucgcccaagugaagcaaaucuacaagaccccuccuaucaaggacuucggcggcuucaauuucagccagauucugcccgauccuagcaagcccagcaagcggagcuucaucgaggaccugcuguucaacaaagugacacuggccgacgccggcuucaucaagcaguauggcgauugucugggcgacauugccgccagggaucugauuugcgcccagaaguuuaacggacugacagugcugccuccucugcugaccgaugagaugaucgcccaguacacaucugcccugcuggccggcacaaucacaagcggcuggacauuuggagcuggcgccgcucugcagauccccuuugcuaugcagauggccuaccgguucaacggcaucggagugacccagaaugugcuguacgagaaccagaagcugaucgccaaccaguucaacagcgccaucggcaagauccaggacagccugagcagcacagcaagcgcccugggaaagcugcaggacguggucaaccagaaugcccaggcacugaacacccuggucaagcagcuguccuccaacuucggcgccaucagcucugugcugaacgauauccuggccagacuggacccuccugaggccgaggugcagaucgacagacugaucacaggcagacugcagagccuccagacauacgugacccagcagcugaucagagccgccgagauuagagccucugccaaucuggccgccaccaagaugucugagugugugcugggccagagcaagagaguggacuuuugcggcaagggcuaccaccugaugagcuucccucagucugccccucacggcgugguguuucugcacgugacauaugugcccgcucaagagaagaauuucaccaccgcuccagccaucugccacgacggcaaagcccacuuuccuagagaaggcguguucguguccaacggcacccauugguucgugacacagcggaacuucuacgagccccagaucaucaccacccacaacaccuucgugucuggcaacugcgacguugugaucggcauugugaacaauaccguguacgacccucugcagcccgagcuggacagcuucaaagaggaacuggacaaguacuuuaagaaccacacaagccccgacguggaccugggcgauaucagcggaaucaaugccagcgucgugaacauccagaaagagaucgaccggcugaacgagguggccaagaaucugaacgagagccugaucgaccugcaagaacuggggaaguacgagcaguacaucaaguggcccugguacaucuggcugggcuuuaucgccggacugauugccaucgugauggucacaaucaugcuguguugcaugaccagcugcuguagcugccugaagggcuguuguagcuguggcagcugcugcaaguucgacgaggacgauucugagcccgugcugaagggcgugaaacugcacuacaccugaggacuaguuauaagacugacuagcccgaugggccucccaacgggcccuccuccccuccuugcaccgagauuaauagaucuaaaaaaaaaaaaaaaaaaaaaaaaaaaaaaaaaaaaaaaaaaaaaaaaaaaaaaaaaaaaaaaaaaaaaaaaaaaaaaaaaaaaaaaaaaaaaaaaaaaa

SEQ ID NO: 25802 - RNA, 4017 nt, Artificial Sequence
  SARS-CoV-2/Wuhan/WIV05/2019__EPI_ISL_402128 spike protein mRNA gc mod (1-1273)(K986P_V987P_K986P_V987P_K417N_E484K_N501Y_D614G)
aggagaaagcuuaccauguucguguuucuggugcugcugccccugguguccagccagugugugaaccugaccaccagaacacagcugccuccagccuacaccaacagcuucaccagaggcguguacuaccccgacaagguguucagauccagcgugcugcacucuacccaggaccuguuccugccuuucuucagcaacgugaccugguuccacgccauccacguguccggcaccaauggcaccaagagauucgacaaccccgugcugcccuucaacgacgggguguacuuugccagcaccgagaaguccaacaucaucagaggcuggaucuucggcaccacacuggacagcaagacccagagccugcugaucgugaacaacgccaccaacguggucaucaaagugugcgaguuccaguucugcaacgaccccuuccugggcgucuacuaccacaagaacaacaagagcuggauggaaagcgaguuccggguguacagcagcgccaacaacugcaccuucgaguacgugucccagccuuuccugauggaccuggaaggcaagcagggcaacuucaagaaccugcgcgaguucguguucaagaacaucgacggcuacuucaaaaucuacagcaagcacaccccuaucaaccucgugcgggaucugccucagggcuucucugcucuggaaccccugguggaucugcccaucggcaucaacaucacccgguuucagacacugcuggcccugcacagaagcuaccugacaccuggcgauagcagcagcggauggacagcuggugccgccgcuuacuaugugggcuaccugcagccuagaaccuuccugcugaaguacaacgagaacggcaccaucaccgacgccguggauugugcucuggauccucugagcgagacaaagugcacccugaaguccuucaccguggaaaagggcaucuaccagaccagcaacuuccgggugcagcccaccgaauccaucgugcgguuccccaauaucaccaaucugugccccuucggcgagguguucaaugccaccagauucgccucuguguacgccuggaaccggaagcggaucagcaauugcguggccgacuacuccgugcuguacaacuccgccagcuucagcaccuucaagugcuacggcguguccccuaccaagcugaacgaccugugcuucacaaacguguacgccgacagcuucgugauccggggagaugaagugcggcagauugccccuggacagacaggcaacaucgccgacuacaacuacaagcugcccgacgacuucaccggcugugugauugccuggaacagcaacaaccuggacuccaaagucggcggcaacuacaauuaccuguaccggcuguuccggaaguccaaucugaagcccuucgagcgggacaucagcaccgaaaucuaucaggccggcagcaccccuugcaacggcgugaagggcuucaacugcuacuucccacugcaguccuacggcuuucagcccacauacggcgugggcuaucagcccuacagagugguggugcugagcuucgaacugcugcaugcuccugccacagugugcggcccuaagaaaagcaccaaucucgugaagaacaaaugcgugaacuucaacuucaacggccugaccggcaccggcgugcugacagagagcaacaagaaguuccugccauuccagcaguuuggccgggauaucgccgauaccacagacgccguuagagauccccagacacuggaaauccuggacaucaccccaugcagcuucggcggagugucugugaucaccccuggcaccaacaccagcaaucagguggcagugcuguaccagggcgugaacuguaccgaagugcccguggccauucacgccgaucagcugacaccuacauggcggguguacuccaccggcagcaauguguuucagaccagagccggcugucugaucggagccgagcacgugaacaauagcuacgagugcgacauccccaucggcgcuggcaucugugccagcuaccagacacagacaaacagccccagacgggcuagaagcguggccagccagagcaucauugccuacacaaugucucugggcgccgagaacagcguggccuacuccaacaacucuaucgcuauccccaccaacuucaccaucagcgugaccaccgagauccugccuguguccaugaccaagaccagcguggacugcaccauguacaucugcggcgauuccaccgagugcuccaaccugcugcugcaguacggcagcuucugcacccagcugaauagagcccugacagggaucgccguggaacaggacaagaacacccaagagguguucgcccaagugaagcaaaucuacaagaccccuccuaucaaggacuucggcggcuucaauuucagccagauucugcccgauccuagcaagcccagcaagcggagcuucaucgaggaccugcuguucaacaaagugacacuggccgacgccggcuucaucaagcaguauggcgauugucugggcgacauugccgccagggaucugauuugcgcccagaaguuuaacggacugacagugcugccuccucugcugaccgaugagaugaucgcccaguacacaucugcccugcuggccggcacaaucacaagcggcuggacauuuggagcuggcgccgcucugcagauccccuuugcuaugcagauggccuaccgguucaacggcaucggagugacccagaaugugcuguacgagaaccagaagcugaucgccaaccaguucaacagcgccaucggcaagauccaggacagccugagcagcacagcaagcgcccugggaaagcugcaggacguggucaaccagaaugcccaggcacugaacacccuggucaagcagcuguccuccaacuucggcgccaucagcucugugcugaacgauauccugagcagacuggacccuccugaggccgaggugcagaucgacagacugaucacaggcagacugcagagccuccagacauacgugacccagcagcugaucagagccgccgagauuagagccucugccaaucuggccgccaccaagaugucugagugugugcugggccagagcaagagaguggacuuuugcggcaagggcuaccaccugaugagcuucccucagucugccccucacggcgugguguuucugcacgugacauaugugcccgcucaagagaagaauuucaccaccgcuccagccaucugccacgacggcaaagcccacuuuccuagagaaggcguguucguguccaacggcacccauugguucgugacacagcggaacuucuacgagccccagaucaucaccaccgacaacaccuucgugucuggcaacugcgacguugugaucggcauugugaacaauaccguguacgacccucugcagcccgagcuggacagcuucaaagaggaacuggacaaguacuuuaagaaccacacaagccccgacguggaccugggcgauaucagcggaaucaaugccagcgucgugaacauccagaaagagaucgaccggcugaacgagguggccaagaaucugaacgagagccugaucgaccugcaagaacuggggaaguacgagcaguacaucaaguggcccugguacaucuggcugggcuuuaucgccggacugauugccaucgugauggucacaaucaugcuguguugcaugaccagcugcuguagcugccugaagggcuguuguagcuguggcagcugcugcaaguucgacgaggacgauucugagcccgugcugaagggcgugaaacugcacuacaccugaggacuaguuauaagacugacuagcccgaugggccucccaacgggcccuccuccccuccuugcaccgagauuaauagaucuaaaaaaaaaaaaaaaaaaaaaaaaaaaaaaaaaaaaaaaaaaaaaaaaaaaaaaaaaaaaaaaaaaaaaaaaaaaaaaaaaaaaaaaaaaaaaaaaaaaa

SEQ ID NO: 25803 - RNA, 4008 nt, Artificial Sequence
  SARS-CoV-2/Wuhan/WIV05/2019__EPI_ISL_402128 spike protein mRNA gc mod (1-1273)(K986P_V987P_K986P_V987P_L18F_D80A_D215G_L242del_A243del_ L244del_R246I_K417N_E484K_N501Y_D614G_A701V)
aggagaaagcuuaccauguucguguuucuggugcugcugccccugguguccagccagugugugaacuucaccaccagaacacagcugccuccagccuacaccaacagcuucaccagaggcguguacuaccccgacaagguguucagauccagcgugcugcacucuacccaggaccuguuccugccuuucuucagcaacgugaccugguuccacgccauccacguguccggcaccaauggcaccaagagauucgccaaccccgugcugcccuucaacgacgggguguacuuugccagcaccgagaaguccaacaucaucagaggcuggaucuucggcaccacacuggacagcaagacccagagccugcugaucgugaacaacgccaccaacguggucaucaaagugugcgaguuccaguucugcaacgaccccuuccugggcgucuacuaccacaagaacaacaagagcuggauggaaagcgaguuccggguguacagcagcgccaacaacugcaccuucgaguacgugucccagccuuuccugauggaccuggaaggcaagcagggcaacuucaagaaccugcgcgaguucguguucaagaacaucgacggcuacuucaaaaucuacagcaagcacaccccuaucaaccucgugcggggccugccucagggcuucucugcucuggaaccccugguggaucugcccaucggcaucaacaucacccgguuucagacacugcacaucagcuaccugacaccuggcgauagcagcagcggauggacagcuggugccgccgcuuacuaugugggcuaccugcagccuagaaccuuccugcugaaguacaacgagaacggcaccaucaccgacgccguggauugugcucuggauccucugagcgagacaaagugcacccugaaguccuucaccguggaaaagggcaucuaccagaccagcaacuuccgggugcagcccaccgaauccaucgugcgguuccccaauaucaccaaucugugccccuucggcgagguguucaaugccaccagauucgccucuguguacgccuggaaccggaagcggaucagcaauugcguggccgacuacuccgugcuguacaacuccgccagcuucagcaccuucaagugcuacggcguguccccuaccaagcugaacgaccugugcuucacaaacguguacgccgacagcuucgugauccggggagaugaagugcggcagauugccccuggacagacaggcaacaucgccgacuacaacuacaagcugcccgacgacuucaccggcugugugauugccuggaacagcaacaaccuggacuccaaagucggcggcaacuacaauuaccuguaccggcuguuccggaaguccaaucugaagcccuucgagcgggacaucagcaccgaaaucuaucaggccggcagcaccccuugcaacggcgugaagggcuucaacugcuacuucccacugcaguccuacggcuuucagcccacauacggcgugggcuaucagcccuacagagugguggugcugagcuucgaacugcugcaugcuccugccacagugugcggcccuaagaaaagcaccaaucucgugaagaacaaaugcgugaacuucaacuucaacggccugaccggcaccggcgugcugacagagagcaacaagaaguuccugccauuccagcaguuuggccgggauaucgccgauaccacagacgccguuagagauccccagacacuggaaauccuggacaucaccccaugcagcuucggcggagugucugugaucaccccuggcaccaacaccagcaaucagguggcagugcuguaccagggcgugaacuguaccgaagugcccguggccauucacgccgaucagcugacaccuacauggcggguguacuccaccggcagcaauguguuucagaccagagccggcugucugaucggagccgagcacgugaacaauagcuacgagugcgacauccccaucggcgcuggcaucugugccagcuaccagacacagacaaacagccccagacgggcuagaagcguggccagccagagcaucauugccuacacaaugucucugggcguggagaacagcguggccuacuccaacaacucuaucgcuauccccaccaacuucaccaucagcgugaccaccgagauccugccuguguccaugaccaagaccagcguggacugcaccauguacaucugcggcgauuccaccgagugcuccaaccugcugcugcaguacggcagcuucugcacccagcugaauagagcccugacagggaucgccguggaacaggacaagaacacccaagagguguucgcccaagugaagcaaaucuacaagaccccuccuaucaaggacuucggcggcuucaauuucagccagauucugcccgauccuagcaagcccagcaagcggagcuucaucgaggaccugcuguucaacaaagugacacuggccgacgccggcuucaucaagcaguauggcgauugucugggcgacauugccgccagggaucugauuugcgcccagaaguuuaacggacugacagugcugccuccucugcugaccgaugagaugaucgcccaguacacaucugcccugcuggccggcacaaucacaagcggcuggacauuuggagcuggcgccgcucugcagauccccuuugcuaugcagauggccuaccgguucaacggcaucggagugacccagaaugugcuguacgagaaccagaagcugaucgccaaccaguucaacagcgccaucggcaagauccaggacagccugagcagcacagcaagcgcccugggaaagcugcaggacguggucaaccagaaugcccaggcacugaacacccuggucaagcagcuguccuccaacuucggcgccaucagcucugugcugaacgauauccugagcagacuggacccuccugaggccgaggugcagaucgacagacugaucacaggcagacugcagagccuccagacauacgugacccagcagcugaucagagccgccgagauuagagccucugccaaucuggccgccaccaagaugucugagugugugcugggccagagcaagagaguggacuuuugcggcaagggcuaccaccugaugagcuucccucagucugccccucacggcgugguguuucugcacgugacauaugugcccgcucaagagaagaauuucaccaccgcuccagccaucugccacgacggcaaagcccacuuuccuagagaaggcguguucguguccaacggcacccauugguucgugacacagcggaacuucuacgagccccagaucaucaccaccgacaacaccuucgugucuggcaacugcgacguugugaucggcauugugaacaauaccguguacgacccucugcagcccgagcuggacagcuucaaagaggaacuggacaaguacuuuaagaaccacacaagccccgacguggaccugggcgauaucagcggaaucaaugccagcgucgugaacauccagaaagagaucgaccggcugaacgagguggccaagaaucugaacgagagccugaucgaccugcaagaacuggggaaguacgagcaguacaucaaguggcccugguacaucuggcugggcuuuaucgccggacugauugccaucgugauggucacaaucaugcuguguugcaugaccagcugcuguagcugccugaagggcuguuguagcuguggcagcugcugcaaguucgacgaggacgauucugagcccgugcugaagggcgugaaacugcacuacaccugaggacuaguuauaagacugacuagcccgaugggccucccaacgggcccuccuccccuccuugcaccgagauuaauagaucuaaaaaaaaaaaaaaaaaaaaaaaaaaaaaaaaaaaaaaaaaaaaaaaaaaaaaaaaaaaaaaaaaaaaaaaaaaaaaaaaaaaaaaaaaaaaaaaaaaaa

SEQ ID NO: 25804 - RNA, 4017 nt, Artificial Sequence
  SARS-CoV-2/Wuhan/WIV05/2019__EPI_ISL_402128 spike protein mRNA gc mod (1-1273)(K986P_V987P_K986P_V987P_E484K_D614G)
aggagaaagcuuaccauguucguguuucuggugcugcugccccugguguccagccagugugugaaccugaccaccagaacacagcugccuccagccuacaccaacagcuucaccagaggcguguacuaccccgacaagguguucagauccagcgugcugcacucuacccaggaccuguuccugccuuucuucagcaacgugaccugguuccacgccauccacguguccggcaccaauggcaccaagagauucgacaaccccgugcugcccuucaacgacgggguguacuuugccagcaccgagaaguccaacaucaucagaggcuggaucuucggcaccacacuggacagcaagacccagagccugcugaucgugaacaacgccaccaacguggucaucaaagugugcgaguuccaguucugcaacgaccccuuccugggcgucuacuaccacaagaacaacaagagcuggauggaaagcgaguuccggguguacagcagcgccaacaacugcaccuucgaguacgugucccagccuuuccugauggaccuggaaggcaagcagggcaacuucaagaaccugcgcgaguucguguucaagaacaucgacggcuacuucaaaaucuacagcaagcacaccccuaucaaccucgugcgggaucugccucagggcuucucugcucuggaaccccugguggaucugcccaucggcaucaacaucacccgguuucagacacugcuggcccugcacagaagcuaccugacaccuggcgauagcagcagcggauggacagcuggugccgccgcuuacuaugugggcuaccugcagccuagaaccuuccugcugaaguacaacgagaacggcaccaucaccgacgccguggauugugcucuggauccucugagcgagacaaagugcacccugaaguccuucaccguggaaaagggcaucuaccagaccagcaacuuccgggugcagcccaccgaauccaucgugcgguuccccaauaucaccaaucugugccccuucggcgagguguucaaugccaccagauucgccucuguguacgccuggaaccggaagcggaucagcaauugcguggccgacuacuccgugcuguacaacuccgccagcuucagcaccuucaagugcuacggcguguccccuaccaagcugaacgaccugugcuucacaaacguguacgccgacagcuucgugauccggggagaugaagugcggcagauugccccuggacagacaggcaagaucgccgacuacaacuacaagcugcccgacgacuucaccggcugugugauugccuggaacagcaacaaccuggacuccaaagucggcggcaacuacaauuaccuguaccggcuguuccggaaguccaaucugaagcccuucgagcgggacaucagcaccgaaaucuaucaggccggcagcaccccuugcaacggcgugaagggcuucaacugcuacuucccacugcaguccuacggcuuucagcccacaaauggcgugggcuaucagcccuacagagugguggugcugagcuucgaacugcugcaugcuccugccacagugugcggcccuaagaaaagcaccaaucucgugaagaacaaaugcgugaacuucaacuucaacggccugaccggcaccggcgugcugacagagagcaacaagaaguuccugccauuccagcaguuuggccgggauaucgccgauaccacagacgccguuagagauccccagacacuggaaauccuggacaucaccccaugcagcuucggcggagugucugugaucaccccuggcaccaacaccagcaaucagguggcagugcuguaccagggcgugaacuguaccgaagugcccguggccauucacgccgaucagcugacaccuacauggcggguguacuccaccggcagcaauguguuucagaccagagccggcugucugaucggagccgagcacgugaacaauagcuacgagugcgacauccccaucggcgcuggcaucugugccagcuaccagacacagacaaacagccccagacgggcuagaagcguggccagccagagcaucauugccuacacaaugucucugggcgccgagaacagcguggccuacuccaacaacucuaucgcuauccccaccaacuucaccaucagcgugaccaccgagauccugccuguguccaugaccaagaccagcguggacugcaccauguacaucugcggcgauuccaccgagugcuccaaccugcugcugcaguacggcagcuucugcacccagcugaauagagcccugacagggaucgccguggaacaggacaagaacacccaagagguguucgcccaagugaagcaaaucuacaagaccccuccuaucaaggacuucggcggcuucaauuucagccagauucugcccgauccuagcaagcccagcaagcggagcuucaucgaggaccugcuguucaacaaagugacacuggccgacgccggcuucaucaagcaguauggcgauugucugggcgacauugccgccagggaucugauuugcgcccagaaguuuaacggacugacagugcugccuccucugcugaccgaugagaugaucgcccaguacacaucugcccugcuggccggcacaaucacaagcggcuggacauuuggagcuggcgccgcucugcagauccccuuugcuaugcagauggccuaccgguucaacggcaucggagugacccagaaugugcuguacgagaaccagaagcugaucgccaaccaguucaacagcgccaucggcaagauccaggacagccugagcagcacagcaagcgcccugggaaagcugcaggacguggucaaccagaaugcccaggcacugaacacccuggucaagcagcuguccuccaacuucggcgccaucagcucugugcugaacgauauccugagcagacuggacccuccugaggccgaggugcagaucgacagacugaucacaggcagacugcagagccuccagacauacgugacccagcagcugaucagagccgccgagauuagagccucugccaaucuggccgccaccaagaugucugagugugugcugggccagagcaagagaguggacuuuugcggcaagggcuaccaccugaugagcuucccucagucugccccucacggcgugguguuucugcacgugacauaugugcccgcucaagagaagaauuucaccaccgcuccagccaucugccacgacggcaaagcccacuuuccuagagaaggcguguucguguccaacggcacccauugguucgugacacagcggaacuucuacgagccccagaucaucaccaccgacaacaccuucgugucuggcaacugcgacguugugaucggcauugugaacaauaccguguacgacccucugcagcccgagcuggacagcuucaaagaggaacuggacaaguacuuuaagaaccacacaagccccgacguggaccugggcgauaucagcggaaucaaugccagcgucgugaacauccagaaagagaucgaccggcugaacgagguggccaagaaucugaacgagagccugaucgaccugcaagaacuggggaaguacgagcaguacaucaaguggcccugguacaucuggcugggcuuuaucgccggacugauugccaucgugauggucacaaucaugcuguguugcaugaccagcugcuguagcugccugaagggcuguuguagcuguggcagcugcugcaaguucgacgaggacgauucugagcccgugcugaagggcgugaaacugcacuacaccugaggacuaguuauaagacugacuagcccgaugggccucccaacgggcccuccuccccuccuugcaccgagauuaauagaucuaaaaaaaaaaaaaaaaaaaaaaaaaaaaaaaaaaaaaaaaaaaaaaaaaaaaaaaaaaaaaaaaaaaaaaaaaaaaaaaaaaaaaaaaaaaaaaaaaaaa

SEQ ID NO: 25805 - RNA, 4017 nt, Artificial Sequence
  SARS-CoV-2/Wuhan/WIV05/2019__EPI_ISL_402128 spike protein mRNA gc mod (1-1273)(K986P_V987P_K986P_V987P_L18F_T20N_P26S_D138Y_R190S_K417T _E484K_N501Y_D614G_H655Y_T1027I)
aggagaaagcuuaccauguucguguuucuggugcugcugccccugguguccagccagugugugaacuucaccaacagaacacagcugccuagcgccuacaccaacagcuucaccagaggcguguacuaccccgacaagguguucagauccagcgugcugcacucuacccaggaccuguuccugccuuucuucagcaacgugaccugguuccacgccauccacguguccggcaccaauggcaccaagagauucgacaaccccgugcugcccuucaacgacgggguguacuuugccagcaccgagaaguccaacaucaucagaggcuggaucuucggcaccacacuggacagcaagacccagagccugcugaucgugaacaacgccaccaacguggucaucaaagugugcgaguuccaguucugcaacuaccccuuccugggcgucuacuaccacaagaacaacaagagcuggauggaaagcgaguuccggguguacagcagcgccaacaacugcaccuucgaguacgugucccagccuuuccugauggaccuggaaggcaagcagggcaacuucaagaaccugagcgaguucguguucaagaacaucgacggcuacuucaaaaucuacagcaagcacaccccuaucaaccucgugcgggaucugccucagggcuucucugcucuggaaccccugguggaucugcccaucggcaucaacaucacccgguuucagacacugcuggcccugcacagaagcuaccugacaccuggcgauagcagcagcggauggacagcuggugccgccgcuuacuaugugggcuaccugcagccuagaaccuuccugcugaaguacaacgagaacggcaccaucaccgacgccguggauugugcucuggauccucugagcgagacaaagugcacccugaaguccuucaccguggaaaagggcaucuaccagaccagcaacuuccgggugcagcccaccgaauccaucgugcgguuccccaauaucaccaaucugugccccuucggcgagguguucaaugccaccagauucgccucuguguacgccuggaaccggaagcggaucagcaauugcguggccgacuacuccgugcuguacaacuccgccagcuucagcaccuucaagugcuacggcguguccccuaccaagcugaacgaccugugcuucacaaacguguacgccgacagcuucgugauccggggagaugaagugcggcagauugccccuggacagacaggcaccaucgccgacuacaacuacaagcugcccgacgacuucaccggcugugugauugccuggaacagcaacaaccuggacuccaaagucggcggcaacuacaauuaccuguaccggcuguuccggaaguccaaucugaagcccuucgagcgggacaucagcaccgaaaucuaucaggccggcagcaccccuugcaacggcgugaagggcuucaacugcuacuucccacugcaguccuacggcuuucagcccacauacggcgugggcuaucagcccuacagagugguggugcugagcuucgaacugcugcaugcuccugccacagugugcggcccuaagaaaagcaccaaucucgugaagaacaaaugcgugaacuucaacuucaacggccugaccggcaccggcgugcugacagagagcaacaagaaguuccugccauuccagcaguuuggccgggauaucgccgauaccacagacgccguuagagauccccagacacuggaaauccuggacaucaccccaugcagcuucggcggagugucugugaucaccccuggcaccaacaccagcaaucagguggcagugcuguaccagggcgugaacuguaccgaagugcccguggccauucacgccgaucagcugacaccuacauggcggguguacuccaccggcagcaauguguuucagaccagagccggcugucugaucggagccgaguacgugaacaauagcuacgagugcgacauccccaucggcgcuggcaucugugccagcuaccagacacagacaaacagccccagacgggcuagaagcguggccagccagagcaucauugccuacacaaugucucugggcgccgagaacagcguggccuacuccaacaacucuaucgcuauccccaccaacuucaccaucagcgugaccaccgagauccugccuguguccaugaccaagaccagcguggacugcaccauguacaucugcggcgauuccaccgagugcuccaaccugcugcugcaguacggcagcuucugcacccagcugaauagagcccugacagggaucgccguggaacaggacaagaacacccaagagguguucgcccaagugaagcaaaucuacaagaccccuccuaucaaggacuucggcggcuucaauuucagccagauucugcccgauccuagcaagcccagcaagcggagcuucaucgaggaccugcuguucaacaaagugacacuggccgacgccggcuucaucaagcaguauggcgauugucugggcgacauugccgccagggaucugauuugcgcccagaaguuuaacggacugacagugcugccuccucugcugaccgaugagaugaucgcccaguacacaucugcccugcuggccggcacaaucacaagcggcuggacauuuggagcuggcgccgcucugcagauccccuuugcuaugcagauggccuaccgguucaacggcaucggagugacccagaaugugcuguacgagaaccagaagcugaucgccaaccaguucaacagcgccaucggcaagauccaggacagccugagcagcacagcaagcgcccugggaaagcugcaggacguggucaaccagaaugcccaggcacugaacacccuggucaagcagcuguccuccaacuucggcgccaucagcucugugcugaacgauauccugagcagacuggacccuccugaggccgaggugcagaucgacagacugaucacaggcagacugcagagccuccagacauacgugacccagcagcugaucagagccgccgagauuagagccucugccaaucuggccgccaucaagaugucugagugugugcugggccagagcaagagaguggacuuuugcggcaagggcuaccaccugaugagcuucccucagucugccccucacggcgugguguuucugcacgugacauaugugcccgcucaagagaagaauuucaccaccgcuccagccaucugccacgacggcaaagcccacuuuccuagagaaggcguguucguguccaacggcacccauugguucgugacacagcggaacuucuacgagccccagaucaucaccaccgacaacaccuucgugucuggcaacugcgacguugugaucggcauugugaacaauaccguguacgacccucugcagcccgagcuggacagcuucaaagaggaacuggacaaguacuuuaagaaccacacaagccccgacguggaccugggcgauaucagcggaaucaaugccagcgucgugaacauccagaaagagaucgaccggcugaacgagguggccaagaaucugaacgagagccugaucgaccugcaagaacuggggaaguacgagcaguacaucaaguggcccugguacaucuggcugggcuuuaucgccggacugauugccaucgugauggucacaaucaugcuguguugcaugaccagcugcuguagcugccugaagggcuguuguagcuguggcagcugcugcaaguucgacgaggacgauucugagcccgugcugaagggcgugaaacugcacuacaccugaggacuaguuauaagacugacuagcccgaugggccucccaacgggcccuccuccccuccuugcaccgagauuaauagaucuaaaaaaaaaaaaaaaaaaaaaaaaaaaaaaaaaaaaaaaaaaaaaaaaaaaaaaaaaaaaaaaaaaaaaaaaaaaaaaaaaaaaaaaaaaaaaaaaaaaa

SEQ ID NO: 25806 - RNA, 4017 nt, Artificial Sequence
  SARS-CoV-2/Wuhan/WIV05/2019__EPI_ISL_402128 spike protein mRNA gc mod (1-1273)(K986P_V987P_K986P_V987P_S13I_W152C_L452R_D614G)
aggagaaagcuuaccauguucguguuucuggugcugcugccccugguguccauccagugugugaaccugaccaccagaacacagcugccuccagccuacaccaacagcuucaccagaggcguguacuaccccgacaagguguucagauccagcgugcugcacucuacccaggaccuguuccugccuuucuucagcaacgugaccugguuccacgccauccacguguccggcaccaauggcaccaagagauucgacaaccccgugcugcccuucaacgacgggguguacuuugccagcaccgagaaguccaacaucaucagaggcuggaucuucggcaccacacuggacagcaagacccagagccugcugaucgugaacaacgccaccaacguggucaucaaagugugcgaguuccaguucugcaacgaccccuuccugggcgucuacuaccacaagaacaacaagagcugcauggaaagcgaguuccggguguacagcagcgccaacaacugcaccuucgaguacgugucccagccuuuccugauggaccuggaaggcaagcagggcaacuucaagaaccugcgcgaguucguguucaagaacaucgacggcuacuucaaaaucuacagcaagcacaccccuaucaaccucgugcgggaucugccucagggcuucucugcucuggaaccccugguggaucugcccaucggcaucaacaucacccgguuucagacacugcuggcccugcacagaagcuaccugacaccuggcgauagcagcagcggauggacagcuggugccgccgcuuacuaugugggcuaccugcagccuagaaccuuccugcugaaguacaacgagaacggcaccaucaccgacgccguggauugugcucuggauccucugagcgagacaaagugcacccugaaguccuucaccguggaaaagggcaucuaccagaccagcaacuuccgggugcagcccaccgaauccaucgugcgguuccccaauaucaccaaucugugccccuucggcgagguguucaaugccaccagauucgccucuguguacgccuggaaccggaagcggaucagcaauugcguggccgacuacuccgugcuguacaacuccgccagcuucagcaccuucaagugcuacggcguguccccuaccaagcugaacgaccugugcuucacaaacguguacgccgacagcuucgugauccggggagaugaagugcggcagauugccccuggacagacaggcaagaucgccgacuacaacuacaagcugcccgacgacuucaccggcugugugauugccuggaacagcaacaaccuggacuccaaagucggcggcaacuacaauuaccgcuaccggcuguuccggaaguccaaucugaagcccuucgagcgggacaucagcaccgaaaucuaucaggccggcagcaccccuugcaacggcguggaaggcuucaacugcuacuucccacugcaguccuacggcuuucagcccacaaauggcgugggcuaucagcccuacagagugguggugcugagcuucgaacugcugcaugcuccugccacagugugcggcccuaagaaaagcaccaaucucgugaagaacaaaugcgugaacuucaacuucaacggccugaccggcaccggcgugcugacagagagcaacaagaaguuccugccauuccagcaguuuggccgggauaucgccgauaccacagacgccguuagagauccccagacacuggaaauccuggacaucaccccaugcagcuucggcggagugucugugaucaccccuggcaccaacaccagcaaucagguggcagugcuguaccagggcgugaacuguaccgaagugcccguggccauucacgccgaucagcugacaccuacauggcggguguacuccaccggcagcaauguguuucagaccagagccggcugucugaucggagccgagcacgugaacaauagcuacgagugcgacauccccaucggcgcuggcaucugugccagcuaccagacacagacaaacagccccagacgggcuagaagcguggccagccagagcaucauugccuacacaaugucucugggcgccgagaacagcguggccuacuccaacaacucuaucgcuauccccaccaacuucaccaucagcgugaccaccgagauccugccuguguccaugaccaagaccagcguggacugcaccauguacaucugcggcgauuccaccgagugcuccaaccugcugcugcaguacggcagcuucugcacccagcugaauagagcccugacagggaucgccguggaacaggacaagaacacccaagagguguucgcccaagugaagcaaaucuacaagaccccuccuaucaaggacuucggcggcuucaauuucagccagauucugcccgauccuagcaagcccagcaagcggagcuucaucgaggaccugcuguucaacaaagugacacuggccgacgccggcuucaucaagcaguauggcgauugucugggcgacauugccgccagggaucugauuugcgcccagaaguuuaacggacugacagugcugccuccucugcugaccgaugagaugaucgcccaguacacaucugcccugcuggccggcacaaucacaagcggcuggacauuuggagcuggcgccgcucugcagauccccuuugcuaugcagauggccuaccgguucaacggcaucggagugacccagaaugugcuguacgagaaccagaagcugaucgccaaccaguucaacagcgccaucggcaagauccaggacagccugagcagcacagcaagcgcccugggaaagcugcaggacguggucaaccagaaugcccaggcacugaacacccuggucaagcagcuguccuccaacuucggcgccaucagcucugugcugaacgauauccugagcagacuggacccuccugaggccgaggugcagaucgacagacugaucacaggcagacugcagagccuccagacauacgugacccagcagcugaucagagccgccgagauuagagccucugccaaucuggccgccaccaagaugucugagugugugcugggccagagcaagagaguggacuuuugcggcaagggcuaccaccugaugagcuucccucagucugccccucacggcgugguguuucugcacgugacauaugugcccgcucaagagaagaauuucaccaccgcuccagccaucugccacgacggcaaagcccacuuuccuagagaaggcguguucguguccaacggcacccauugguucgugacacagcggaacuucuacgagccccagaucaucaccaccgacaacaccuucgugucuggcaacugcgacguugugaucggcauugugaacaauaccguguacgacccucugcagcccgagcuggacagcuucaaagaggaacuggacaaguacuuuaagaaccacacaagccccgacguggaccugggcgauaucagcggaaucaaugccagcgucgugaacauccagaaagagaucgaccggcugaacgagguggccaagaaucugaacgagagccugaucgaccugcaagaacuggggaaguacgagcaguacaucaaguggcccugguacaucuggcugggcuuuaucgccggacugauugccaucgugauggucacaaucaugcuguguugcaugaccagcugcuguagcugccugaagggcuguuguagcuguggcagcugcugcaaguucgacgaggacgauucugagcccgugcugaagggcgugaaacugcacuacaccugaggacuaguuauaagacugacuagcccgaugggccucccaacgggcccuccuccccuccuugcaccgagauuaauagaucuaaaaaaaaaaaaaaaaaaaaaaaaaaaaaaaaaaaaaaaaaaaaaaaaaaaaaaaaaaaaaaaaaaaaaaaaaaaaaaaaaaaaaaaaaaaaaaaaaaaa

SEQ ID NO: 25807 - RNA, 4017 nt, Artificial Sequence
  SARS-CoV-2/Wuhan/WIV05/2019__EPI_ISL_402128 spike protein mRNA gc mod (1-1273)(K986P_V987P)
aggagaaagcuuaccauguucguguuccuggugcugcugccucugguguccagccagugugugaaccugaccaccagaacacagcugccuccagccuacaccaacagcuuuaccagaggcguguacuaccccgacaagguguucagauccagcgugcugcacucuacccaggaccuguuccugccuuucuucagcaacgugaccugguuccacgccauccacguguccggcaccaauggcaccaagagauucgacaaccccgugcugcccuucaacgacgggguguacuuugccagcaccgagaaguccaacaucaucagaggcuggaucuucggcaccacacuggacagcaagacccagagccugcugaucgugaacaacgccaccaacguggucaucaaagugugcgaguuccaguucugcaacgaccccuuccugggcgucuacuaccacaagaacaacaagagcuggauggaaagcgaguuccggguguacagcagcgccaacaacugcaccuucgaguacgugucccagccuuuccugauggaccuggaaggcaagcagggcaacuucaagaaccugcgcgaguucguguuuaagaacaucgacggcuacuucaagaucuacagcaagcacaccccuaucaaccucgugcgggaucugccucagggcuucucugcucuggaaccccugguggaucugcccaucggcaucaacaucacccgguuucagacacugcuggcccugcacagaagcuaccugacaccuggcgauagcagcagcggauggacagcuggugccgccgcuuacuaugugggcuaccugcagccuagaaccuuccugcugaaguacaacgagaacggcaccaucaccgacgccguggauugugcucuggauccucugagcgagacaaagugcacccugaaguccuucaccguggaaaagggcaucuaccagaccagcaacuuccgggugcagcccaccgaauccaucgugcgguuccccaauaucaccaaucugugccccuucggcgagguguucaaugccaccagauucgccucuguguacgccuggaaccggaagcggaucagcaauugcguggccgacuacuccgugcuguacaacuccgccagcuucagcaccuucaagugcuacggcguguccccuaccaagcugaacgaccugugcuucacaaacguguacgccgacagcuucgugauccggggagaugaagugcggcagauugccccuggacagacaggcaagaucgccgacuacaacuacaagcugcccgacgacuucaccggcugugugauugccuggaacagcaacaaccuggacuccaaagucggcggcaacuacaauuaccuguaccggcuguuccggaaguccaaucugaagcccuucgagcgggacaucuccaccgagaucuaucaggccggcagcaccccuuguaacggcguggaaggcuucaacugcuacuucccacugcaguccuacggcuuucagcccacaaauggcgugggcuaucagcccuacagagugguggugcugagcuucgaacugcugcaugccccugccacagugugcggcccuaagaaaagcaccaaucucgugaagaacaaaugcgugaacuucaacuucaacggccugaccggcaccggcgugcugacagagagcaacaagaaguuccugccauuccagcaguuuggccgggauaucgccgauaccacagacgccguuagagauccccagacacuggaaauccuggacaucaccccuugcagcuucggcggagugucugugaucaccccuggcaccaacaccagcaaucagguggcagugcuguaccaggacgugaacuguaccgaagugcccguggccauucacgccgaucagcugacaccuacauggcggguguacuccaccggcagcaauguguuucagaccagagccggcugucugaucggagccgagcacgugaacaauagcuacgagugcgacauccccaucggcgcuggaaucugcgccagcuaccagacacagacaaacagcccucggagagccagaagcguggccagccagagcaucauugccuacacaaugucucugggcgccgagaacagcguggccuacuccaacaacucuaucgcuauccccaccaacuucaccaucagcgugaccacagagauccugccuguguccaugaccaagaccagcguggacugcaccauguacaucugcggcgauuccaccgagugcuccaaccugcugcugcaguacggcagcuucugcacccagcugaauagagcccugacagggaucgccguggaacaggacaagaacacccaagagguguucgcccaagugaagcagaucuacaagaccccuccuaucaaggacuucggcggcuucaauuucagccagauucugcccgauccuagcaagcccagcaagcggagcuucaucgaggaccugcuguucaacaaagugacacuggccgacgccggcuucaucaagcaguauggcgauugucugggcgacauugccgccagggaucugauuugcgcccagaaguuuaacggacugacagugcugccuccucugcugaccgaugagaugaucgcccaguacacaucugcccugcuggccggcacaaucacaagcggcuggacauuuggagcaggcgccgcucugcagauccccuuugcuaugcagauggccuaccgguucaacggcaucggagugacccagaaugugcuguacgagaaccagaagcugaucgccaaccaguucaacagcgccaucggcaagauccaggacagccugagcagcacagcaagcgcccugggaaagcugcaggacguggucaaccagaaugcccaggcacugaacacccuggucaagcagcuguccuccaacuucggcgccaucagcucugugcugaacgauauccugagcagacuggacccuccugaggccgaggugcagaucgacagacugaucacaggcagacugcagagccuccagacauacgugacccagcagcugaucagagccgccgagauuagagccucugccaaucuggccgccaccaagaugucugagugugugcugggccagagcaagagaguggacuuuugcggcaagggcuaccaccugaugagcuucccucagucugccccucacggcgugguguuucugcacgugacauaugugcccgcucaagagaagaauuucaccaccgcuccagccaucugccacgacggcaaagcccacuuuccuagagaaggcguguucguguccaacggcacccauugguucgugacacagcggaacuucuacgagccccagaucaucaccaccgacaacaccuucgugucuggcaacugcgacgucgugaucggcauugugaacaauaccguguacgacccucugcagcccgagcuggacagcuucaaagaggaacuggacaaguacuuuaagaaccacacaagccccgacguggaccugggcgauaucagcggaaucaaugccagcgucgugaacauccagaaagagaucgaccggcugaacgagguggccaagaaucugaacgagagccugaucgaccugcaagaacuggggaaguacgagcaguacaucaaguggcccugguacaucuggcugggcuuuaucgccggacugauugccaucgugauggucacaaucaugcuguguugcaugaccagcugcuguagcugccugaagggcuguuguagcuguggcagcugcugcaaguucgacgaggacgauucugagcccgugcugaagggcgugaaacugcacuacacaugaggacuaguuauaagacugacuagcccgaugggccucccaacgggcccuccuccccuccuugcaccgagauuaauagaucuaaaaaaaaaaaaaaaaaaaaaaaaaaaaaaaaaaaaaaaaaaaaaaaaaaaaaaaaaaaaaaaaaaaaaaaaaaaaaaaaaaaaaaaaaaaaaaaaaaaa

SEQ ID NO: 25808 - RNA, 4017 nt, Artificial Sequence
  SARS-CoV-2/Wuhan/WIV05/2019__EPI_ISL_402128 spike protein mRNA gc mod (1-1273)(K986P_V987P_ D614G)
aggagaaagcuuaccauguucguguuccuggugcugcugccucugguguccagccagugugugaaccugaccaccagaacacagcugccuccagccuacaccaacagcuuuaccagaggcguguacuaccccgacaagguguucagauccagcgugcugcacucuacccaggaccuguuccugccuuucuucagcaacgugaccugguuccacgccauccacguguccggcaccaauggcaccaagagauucgacaaccccgugcugcccuucaacgacgggguguacuuugccagcaccgagaaguccaacaucaucagaggcuggaucuucggcaccacacuggacagcaagacccagagccugcugaucgugaacaacgccaccaacguggucaucaaagugugcgaguuccaguucugcaacgaccccuuccugggcgucuacuaccacaagaacaacaagagcuggauggaaagcgaguuccggguguacagcagcgccaacaacugcaccuucgaguacgugucccagccuuuccugauggaccuggaaggcaagcagggcaacuucaagaaccugcgcgaguucguguuuaagaacaucgacggcuacuucaagaucuacagcaagcacaccccuaucaaccucgugcgggaucugccucagggcuucucugcucuggaaccccugguggaucugcccaucggcaucaacaucacccgguuucagacacugcuggcccugcacagaagcuaccugacaccuggcgauagcagcagcggauggacagcuggugccgccgcuuacuaugugggcuaccugcagccuagaaccuuccugcugaaguacaacgagaacggcaccaucaccgacgccguggauugugcucuggauccucugagcgagacaaagugcacccugaaguccuucaccguggaaaagggcaucuaccagaccagcaacuuccgggugcagcccaccgaauccaucgugcgguuccccaauaucaccaaucugugccccuucggcgagguguucaaugccaccagauucgccucuguguacgccuggaaccggaagcggaucagcaauugcguggccgacuacuccgugcuguacaacuccgccagcuucagcaccuucaagugcuacggcguguccccuaccaagcugaacgaccugugcuucacaaacguguacgccgacagcuucgugauccggggagaugaagugcggcagauugccccuggacagacaggcaagaucgccgacuacaacuacaagcugcccgacgacuucaccggcugugugauugccuggaacagcaacaaccuggacuccaaagucggcggcaacuacaauuaccuguaccggcuguuccggaaguccaaucugaagcccuucgagcgggacaucuccaccgagaucuaucaggccggcagcaccccuuguaacggcguggaaggcuucaacugcuacuucccacugcaguccuacggcuuucagcccacaaauggcgugggcuaucagcccuacagagugguggugcugagcuucgaacugcugcaugccccugccacagugugcggcccuaagaaaagcaccaaucucgugaagaacaaaugcgugaacuucaacuucaacggccugaccggcaccggcgugcugacagagagcaacaagaaguuccugccauuccagcaguuuggccgggauaucgccgauaccacagacgccguuagagauccccagacacuggaaauccuggacaucaccccuugcagcuucggcggagugucugugaucaccccuggcaccaacaccagcaaucagguggcagugcuguaccagggcgugaacuguaccgaagugcccguggccauucacgccgaucagcugacaccuacauggcggguguacuccaccggcagcaauguguuucagaccagagccggcugucugaucggagccgagcacgugaacaauagcuacgagugcgacauccccaucggcgcuggaaucugcgccagcuaccagacacagacaaacagcccucggagagccagaagcguggccagccagagcaucauugccuacacaaugucucugggcgccgagaacagcguggccuacuccaacaacucuaucgcuauccccaccaacuucaccaucagcgugaccacagagauccugccuguguccaugaccaagaccagcguggacugcaccauguacaucugcggcgauuccaccgagugcuccaaccugcugcugcaguacggcagcuucugcacccagcugaauagagcccugacagggaucgccguggaacaggacaagaacacccaagagguguucgcccaagugaagcagaucuacaagaccccuccuaucaaggacuucggcggcuucaauuucagccagauucugcccgauccuagcaagcccagcaagcggagcuucaucgaggaccugcuguucaacaaagugacacuggccgacgccggcuucaucaagcaguauggcgauugucugggcgacauugccgccagggaucugauuugcgcccagaaguuuaacggacugacagugcugccuccucugcugaccgaugagaugaucgcccaguacacaucugcccugcuggccggcacaaucacaagcggcuggacauuuggagcaggcgccgcucugcagauccccuuugcuaugcagauggccuaccgguucaacggcaucggagugacccagaaugugcuguacgagaaccagaagcugaucgccaaccaguucaacagcgccaucggcaagauccaggacagccugagcagcacagcaagcgcccugggaaagcugcaggacguggucaaccagaaugcccaggcacugaacacccuggucaagcagcuguccuccaacuucggcgccaucagcucugugcugaacgauauccugagcagacuggacccuccugaggccgaggugcagaucgacagacugaucacaggcagacugcagagccuccagacauacgugacccagcagcugaucagagccgccgagauuagagccucugccaaucuggccgccaccaagaugucugagugugugcugggccagagcaagagaguggacuuuugcggcaagggcuaccaccugaugagcuucccucagucugccccucacggcgugguguuucugcacgugacauaugugcccgcucaagagaagaauuucaccaccgcuccagccaucugccacgacggcaaagcccacuuuccuagagaaggcguguucguguccaacggcacccauugguucgugacacagcggaacuucuacgagccccagaucaucaccaccgacaacaccuucgugucuggcaacugcgacgucgugaucggcauugugaacaauaccguguacgacccucugcagcccgagcuggacagcuucaaagaggaacuggacaaguacuuuaagaaccacacaagccccgacguggaccugggcgauaucagcggaaucaaugccagcgucgugaacauccagaaagagaucgaccggcugaacgagguggccaagaaucugaacgagagccugaucgaccugcaagaacuggggaaguacgagcaguacaucaaguggcccugguacaucuggcugggcuuuaucgccggacugauugccaucgugauggucacaaucaugcuguguugcaugaccagcugcuguagcugccugaagggcuguuguagcuguggcagcugcugcaaguucgacgaggacgauucugagcccgugcugaagggcgugaaacugcacuacacaugaggacuaguuauaagacugacuagcccgaugggccucccaacgggcccuccuccccuccuugcaccgagauuaauagaucuaaaaaaaaaaaaaaaaaaaaaaaaaaaaaaaaaaaaaaaaaaaaaaaaaaaaaaaaaaaaaaaaaaaaaaaaaaaaaaaaaaaaaaaaaaaaaaaaaaaa

SEQ ID NO: 25809 - RNA, 4017 nt, Artificial Sequence
  SARS-CoV-2/Wuhan/WIV05/2019__EPI_ISL_402128 spike protein mRNA gc mod (1-1273)(K986P_V987P_A222V_D614G)
aggagaaagcuuaccauguucguguuccuggugcugcugccucugguguccagccagugugugaaccugaccaccagaacacagcugccuccagccuacaccaacagcuuuaccagaggcguguacuaccccgacaagguguucagauccagcgugcugcacucuacccaggaccuguuccugccuuucuucagcaacgugaccugguuccacgccauccacguguccggcaccaauggcaccaagagauucgacaaccccgugcugcccuucaacgacgggguguacuuugccagcaccgagaaguccaacaucaucagaggcuggaucuucggcaccacacuggacagcaagacccagagccugcugaucgugaacaacgccaccaacguggucaucaaagugugcgaguuccaguucugcaacgaccccuuccugggcgucuacuaccacaagaacaacaagagcuggauggaaagcgaguuccggguguacagcagcgccaacaacugcaccuucgaguacgugucccagccuuuccugauggaccuggaaggcaagcagggcaacuucaagaaccugcgcgaguucguguuuaagaacaucgacggcuacuucaagaucuacagcaagcacaccccuaucaaccucgugcgggaucugccucagggcuucucugugcuggaaccccugguggaucugcccaucggcaucaacaucacccgguuucagacacugcuggcccugcacagaagcuaccugacaccuggcgauagcagcagcggauggacagcuggugccgccgcuuacuaugugggcuaccugcagccuagaaccuuccugcugaaguacaacgagaacggcaccaucaccgacgccguggauugugcucuggauccucugagcgagacaaagugcacccugaaguccuucaccguggaaaagggcaucuaccagaccagcaacuuccgggugcagcccaccgaauccaucgugcgguuccccaauaucaccaaucugugccccuucggcgagguguucaaugccaccagauucgccucuguguacgccuggaaccggaagcggaucagcaauugcguggccgacuacuccgugcuguacaacuccgccagcuucagcaccuucaagugcuacggcguguccccuaccaagcugaacgaccugugcuucacaaacguguacgccgacagcuucgugauccggggagaugaagugcggcagauugccccuggacagacaggcaagaucgccgacuacaacuacaagcugcccgacgacuucaccggcugugugauugccuggaacagcaacaaccuggacuccaaagucggcggcaacuacaauuaccuguaccggcuguuccggaaguccaaucugaagcccuucgagcgggacaucuccaccgagaucuaucaggccggcagcaccccuuguaacggcguggaaggcuucaacugcuacuucccacugcaguccuacggcuuucagcccacaaauggcgugggcuaucagcccuacagagugguggugcugagcuucgaacugcugcaugccccugccacagugugcggcccuaagaaaagcaccaaucucgugaagaacaaaugcgugaacuucaacuucaacggccugaccggcaccggcgugcugacagagagcaacaagaaguuccugccauuccagcaguuuggccgggauaucgccgauaccacagacgccguuagagauccccagacacuggaaauccuggacaucaccccuugcagcuucggcggagugucugugaucaccccuggcaccaacaccagcaaucagguggcagugcuguaccagggcgugaacuguaccgaagugcccguggccauucacgccgaucagcugacaccuacauggcggguguacuccaccggcagcaauguguuucagaccagagccggcugucugaucggagccgagcacgugaacaauagcuacgagugcgacauccccaucggcgcuggaaucugcgccagcuaccagacacagacaaacagcccucggagagccagaagcguggccagccagagcaucauugccuacacaaugucucugggcgccgagaacagcguggccuacuccaacaacucuaucgcuauccccaccaacuucaccaucagcgugaccacagagauccugccuguguccaugaccaagaccagcguggacugcaccauguacaucugcggcgauuccaccgagugcuccaaccugcugcugcaguacggcagcuucugcacccagcugaauagagcccugacagggaucgccguggaacaggacaagaacacccaagagguguucgcccaagugaagcagaucuacaagaccccuccuaucaaggacuucggcggcuucaauuucagccagauucugcccgauccuagcaagcccagcaagcggagcuucaucgaggaccugcuguucaacaaagugacacuggccgacgccggcuucaucaagcaguauggcgauugucugggcgacauugccgccagggaucugauuugcgcccagaaguuuaacggacugacagugcugccuccucugcugaccgaugagaugaucgcccaguacacaucugcccugcuggccggcacaaucacaagcggcuggacauuuggagcaggcgccgcucugcagauccccuuugcuaugcagauggccuaccgguucaacggcaucggagugacccagaaugugcuguacgagaaccagaagcugaucgccaaccaguucaacagcgccaucggcaagauccaggacagccugagcagcacagcaagcgcccugggaaagcugcaggacguggucaaccagaaugcccaggcacugaacacccuggucaagcagcuguccuccaacuucggcgccaucagcucugugcugaacgauauccugagcagacuggacccuccugaggccgaggugcagaucgacagacugaucacaggcagacugcagagccuccagacauacgugacccagcagcugaucagagccgccgagauuagagccucugccaaucuggccgccaccaagaugucugagugugugcugggccagagcaagagaguggacuuuugcggcaagggcuaccaccugaugagcuucccucagucugccccucacggcgugguguuucugcacgugacauaugugcccgcucaagagaagaauuucaccaccgcuccagccaucugccacgacggcaaagcccacuuuccuagagaaggcguguucguguccaacggcacccauugguucgugacacagcggaacuucuacgagccccagaucaucaccaccgacaacaccuucgugucuggcaacugcgacgucgugaucggcauugugaacaauaccguguacgacccucugcagcccgagcuggacagcuucaaagaggaacuggacaaguacuuuaagaaccacacaagccccgacguggaccugggcgauaucagcggaaucaaugccagcgucgugaacauccagaaagagaucgaccggcugaacgagguggccaagaaucugaacgagagccugaucgaccugcaagaacuggggaaguacgagcaguacaucaaguggcccugguacaucuggcugggcuuuaucgccggacugauugccaucgugauggucacaaucaugcuguguugcaugaccagcugcuguagcugccugaagggcuguuguagcuguggcagcugcugcaaguucgacgaggacgauucugagcccgugcugaagggcgugaaacugcacuacacaugaggacuaguuauaagacugacuagcccgaugggccucccaacgggcccuccuccccuccuugcaccgagauuaauagaucuaaaaaaaaaaaaaaaaaaaaaaaaaaaaaaaaaaaaaaaaaaaaaaaaaaaaaaaaaaaaaaaaaaaaaaaaaaaaaaaaaaaaaaaaaaaaaaaaaaaa

SEQ ID NO: 25810 - RNA, 4017 nt, Artificial Sequence
  SARS-CoV-2/Wuhan/WIV05/2019__EPI_ISL_402128 spike protein mRNA gc mod (1-1273)(K986P_V987P_N439K_D614G)
aggagaaagcuuaccauguucguguuccuggugcugcugccucugguguccagccagugugugaaccugaccaccagaacacagcugccuccagccuacaccaacagcuuuaccagaggcguguacuaccccgacaagguguucagauccagcgugcugcacucuacccaggaccuguuccugccuuucuucagcaacgugaccugguuccacgccauccacguguccggcaccaauggcaccaagagauucgacaaccccgugcugcccuucaacgacgggguguacuuugccagcaccgagaaguccaacaucaucagaggcuggaucuucggcaccacacuggacagcaagacccagagccugcugaucgugaacaacgccaccaacguggucaucaaagugugcgaguuccaguucugcaacgaccccuuccugggcgucuacuaccacaagaacaacaagagcuggauggaaagcgaguuccggguguacagcagcgccaacaacugcaccuucgaguacgugucccagccuuuccugauggaccuggaaggcaagcagggcaacuucaagaaccugcgcgaguucguguuuaagaacaucgacggcuacuucaagaucuacagcaagcacaccccuaucaaccucgugcgggaucugccucagggcuucucugcucuggaaccccugguggaucugcccaucggcaucaacaucacccgguuucagacacugcuggcccugcacagaagcuaccugacaccuggcgauagcagcagcggauggacagcuggugccgccgcuuacuaugugggcuaccugcagccuagaaccuuccugcugaaguacaacgagaacggcaccaucaccgacgccguggauugugcucuggauccucugagcgagacaaagugcacccugaaguccuucaccguggaaaagggcaucuaccagaccagcaacuuccgggugcagcccaccgaauccaucgugcgguuccccaauaucaccaaucugugccccuucggcgagguguucaaugccaccagauucgccucuguguacgccuggaaccggaagcggaucagcaauugcguggccgacuacuccgugcuguacaacuccgccagcuucagcaccuucaagugcuacggcguguccccuaccaagcugaacgaccugugcuucacaaacguguacgccgacagcuucgugauccggggagaugaagugcggcagauugccccuggacagacaggcaagaucgccgacuacaacuacaagcugcccgacgacuucaccggcugugugauugccuggaacagcaagaaccuggacuccaaagucggcggcaacuacaauuaccuguaccggcuguuccggaaguccaaucugaagcccuucgagcgggacaucuccaccgagaucuaucaggccggcagcaccccuuguaacggcguggaaggcuucaacugcuacuucccacugcaguccuacggcuuucagcccacaaauggcgugggcuaucagcccuacagagugguggugcugagcuucgaacugcugcaugccccugccacagugugcggcccuaagaaaagcaccaaucucgugaagaacaaaugcgugaacuucaacuucaacggccugaccggcaccggcgugcugacagagagcaacaagaaguuccugccauuccagcaguuuggccgggauaucgccgauaccacagacgccguuagagauccccagacacuggaaauccuggacaucaccccuugcagcuucggcggagugucugugaucaccccuggcaccaacaccagcaaucagguggcagugcuguaccagggcgugaacuguaccgaagugcccguggccauucacgccgaucagcugacaccuacauggcggguguacuccaccggcagcaauguguuucagaccagagccggcugucugaucggagccgagcacgugaacaauagcuacgagugcgacauccccaucggcgcuggaaucugcgccagcuaccagacacagacaaacagcccucggagagccagaagcguggccagccagagcaucauugccuacacaaugucucugggcgccgagaacagcguggccuacuccaacaacucuaucgcuauccccaccaacuucaccaucagcgugaccacagagauccugccuguguccaugaccaagaccagcguggacugcaccauguacaucugcggcgauuccaccgagugcuccaaccugcugcugcaguacggcagcuucugcacccagcugaauagagcccugacagggaucgccguggaacaggacaagaacacccaagagguguucgcccaagugaagcagaucuacaagaccccuccuaucaaggacuucggcggcuucaauuucagccagauucugcccgauccuagcaagcccagcaagcggagcuucaucgaggaccugcuguucaacaaagugacacuggccgacgccggcuucaucaagcaguauggcgauugucugggcgacauugccgccagggaucugauuugcgcccagaaguuuaacggacugacagugcugccuccucugcugaccgaugagaugaucgcccaguacacaucugcccugcuggccggcacaaucacaagcggcuggacauuuggagcaggcgccgcucugcagauccccuuugcuaugcagauggccuaccgguucaacggcaucggagugacccagaaugugcuguacgagaaccagaagcugaucgccaaccaguucaacagcgccaucggcaagauccaggacagccugagcagcacagcaagcgcccugggaaagcugcaggacguggucaaccagaaugcccaggcacugaacacccuggucaagcagcuguccuccaacuucggcgccaucagcucugugcugaacgauauccugagcagacuggacccuccugaggccgaggugcagaucgacagacugaucacaggcagacugcagagccuccagacauacgugacccagcagcugaucagagccgccgagauuagagccucugccaaucuggccgccaccaagaugucugagugugugcugggccagagcaagagaguggacuuuugcggcaagggcuaccaccugaugagcuucccucagucugccccucacggcgugguguuucugcacgugacauaugugcccgcucaagagaagaauuucaccaccgcuccagccaucugccacgacggcaaagcccacuuuccuagagaaggcguguucguguccaacggcacccauugguucgugacacagcggaacuucuacgagccccagaucaucaccaccgacaacaccuucgugucuggcaacugcgacgucgugaucggcauugugaacaauaccguguacgacccucugcagcccgagcuggacagcuucaaagaggaacuggacaaguacuuuaagaaccacacaagccccgacguggaccugggcgauaucagcggaaucaaugccagcgucgugaacauccagaaagagaucgaccggcugaacgagguggccaagaaucugaacgagagccugaucgaccugcaagaacuggggaaguacgagcaguacaucaaguggcccugguacaucuggcugggcuuuaucgccggacugauugccaucgugauggucacaaucaugcuguguugcaugaccagcugcuguagcugccugaagggcuguuguagcuguggcagcugcugcaaguucgacgaggacgauucugagcccgugcugaagggcgugaaacugcacuacacaugaggacuaguuauaagacugacuagcccgaugggccucccaacgggcccuccuccccuccuugcaccgagauuaauagaucuaaaaaaaaaaaaaaaaaaaaaaaaaaaaaaaaaaaaaaaaaaaaaaaaaaaaaaaaaaaaaaaaaaaaaaaaaaaaaaaaaaaaaaaaaaaaaaaaaaaa

SEQ ID NO: 25811 - RNA, 4017 nt, Artificial Sequence
  SARS-CoV-2/Wuhan/WIV05/2019__EPI_ISL_402128 spike protein mRNA gc mod (1-1273)(K986P_V987P_S477N_D614G)
aggagaaagcuuaccauguucguguuccuggugcugcugccucugguguccagccagugugugaaccugaccaccagaacacagcugccuccagccuacaccaacagcuuuaccagaggcguguacuaccccgacaagguguucagauccagcgugcugcacucuacccaggaccuguuccugccuuucuucagcaacgugaccugguuccacgccauccacguguccggcaccaauggcaccaagagauucgacaaccccgugcugcccuucaacgacgggguguacuuugccagcaccgagaaguccaacaucaucagaggcuggaucuucggcaccacacuggacagcaagacccagagccugcugaucgugaacaacgccaccaacguggucaucaaagugugcgaguuccaguucugcaacgaccccuuccugggcgucuacuaccacaagaacaacaagagcuggauggaaagcgaguuccggguguacagcagcgccaacaacugcaccuucgaguacgugucccagccuuuccugauggaccuggaaggcaagcagggcaacuucaagaaccugcgcgaguucguguuuaagaacaucgacggcuacuucaagaucuacagcaagcacaccccuaucaaccucgugcgggaucugccucagggcuucucugcucuggaaccccugguggaucugcccaucggcaucaacaucacccgguuucagacacugcuggcccugcacagaagcuaccugacaccuggcgauagcagcagcggauggacagcuggugccgccgcuuacuaugugggcuaccugcagccuagaaccuuccugcugaaguacaacgagaacggcaccaucaccgacgccguggauugugcucuggauccucugagcgagacaaagugcacccugaaguccuucaccguggaaaagggcaucuaccagaccagcaacuuccgggugcagcccaccgaauccaucgugcgguuccccaauaucaccaaucugugccccuucggcgagguguucaaugccaccagauucgccucuguguacgccuggaaccggaagcggaucagcaauugcguggccgacuacuccgugcuguacaacuccgccagcuucagcaccuucaagugcuacggcguguccccuaccaagcugaacgaccugugcuucacaaacguguacgccgacagcuucgugauccggggagaugaagugcggcagauugccccuggacagacaggcaagaucgccgacuacaacuacaagcugcccgacgacuucaccggcugugugauugccuggaacagcaacaaccuggacuccaaagucggcggcaacuacaauuaccuguaccggcuguuccggaaguccaaucugaagcccuucgagcgggacaucuccaccgagaucuaucaggccggcaacaccccuuguaacggcguggaaggcuucaacugcuacuucccacugcaguccuacggcuuucagcccacaaauggcgugggcuaucagcccuacagagugguggugcugagcuucgaacugcugcaugccccugccacagugugcggcccuaagaaaagcaccaaucucgugaagaacaaaugcgugaacuucaacuucaacggccugaccggcaccggcgugcugacagagagcaacaagaaguuccugccauuccagcaguuuggccgggauaucgccgauaccacagacgccguuagagauccccagacacuggaaauccuggacaucaccccuugcagcuucggcggagugucugugaucaccccuggcaccaacaccagcaaucagguggcagugcuguaccagggcgugaacuguaccgaagugcccguggccauucacgccgaucagcugacaccuacauggcggguguacuccaccggcagcaauguguuucagaccagagccggcugucugaucggagccgagcacgugaacaauagcuacgagugcgacauccccaucggcgcuggaaucugcgccagcuaccagacacagacaaacagcccucggagagccagaagcguggccagccagagcaucauugccuacacaaugucucugggcgccgagaacagcguggccuacuccaacaacucuaucgcuauccccaccaacuucaccaucagcgugaccacagagauccugccuguguccaugaccaagaccagcguggacugcaccauguacaucugcggcgauuccaccgagugcuccaaccugcugcugcaguacggcagcuucugcacccagcugaauagagcccugacagggaucgccguggaacaggacaagaacacccaagagguguucgcccaagugaagcagaucuacaagaccccuccuaucaaggacuucggcggcuucaauuucagccagauucugcccgauccuagcaagcccagcaagcggagcuucaucgaggaccugcuguucaacaaagugacacuggccgacgccggcuucaucaagcaguauggcgauugucugggcgacauugccgccagggaucugauuugcgcccagaaguuuaacggacugacagugcugccuccucugcugaccgaugagaugaucgcccaguacacaucugcccugcuggccggcacaaucacaagcggcuggacauuuggagcaggcgccgcucugcagauccccuuugcuaugcagauggccuaccgguucaacggcaucggagugacccagaaugugcuguacgagaaccagaagcugaucgccaaccaguucaacagcgccaucggcaagauccaggacagccugagcagcacagcaagcgcccugggaaagcugcaggacguggucaaccagaaugcccaggcacugaacacccuggucaagcagcuguccuccaacuucggcgccaucagcucugugcugaacgauauccugagcagacuggacccuccugaggccgaggugcagaucgacagacugaucacaggcagacugcagagccuccagacauacgugacccagcagcugaucagagccgccgagauuagagccucugccaaucuggccgccaccaagaugucugagugugugcugggccagagcaagagaguggacuuuugcggcaagggcuaccaccugaugagcuucccucagucugccccucacggcgugguguuucugcacgugacauaugugcccgcucaagagaagaauuucaccaccgcuccagccaucugccacgacggcaaagcccacuuuccuagagaaggcguguucguguccaacggcacccauugguucgugacacagcggaacuucuacgagccccagaucaucaccaccgacaacaccuucgugucuggcaacugcgacgucgugaucggcauugugaacaauaccguguacgacccucugcagcccgagcuggacagcuucaaagaggaacuggacaaguacuuuaagaaccacacaagccccgacguggaccugggcgauaucagcggaaucaaugccagcgucgugaacauccagaaagagaucgaccggcugaacgagguggccaagaaucugaacgagagccugaucgaccugcaagaacuggggaaguacgagcaguacaucaaguggcccugguacaucuggcugggcuuuaucgccggacugauugccaucgugauggucacaaucaugcuguguugcaugaccagcugcuguagcugccugaagggcuguuguagcuguggcagcugcugcaaguucgacgaggacgauucugagcccgugcugaagggcgugaaacugcacuacacaugaggacuaguuauaagacugacuagcccgaugggccucccaacgggcccuccuccccuccuugcaccgagauuaauagaucuaaaaaaaaaaaaaaaaaaaaaaaaaaaaaaaaaaaaaaaaaaaaaaaaaaaaaaaaaaaaaaaaaaaaaaaaaaaaaaaaaaaaaaaaaaaaaaaaaaaa

SEQ ID NO: 25812 - RNA, 4017 nt, Artificial Sequence
  SARS-CoV-2/Wuhan/WIV05/2019__EPI_ISL_402128 spike protein mRNA gc mod (1-1273)(K986P_V987P_N501Y_D614G)
aggagaaagcuuaccauguucguguuccuggugcugcugccucugguguccagccagugugugaaccugaccaccagaacacagcugccuccagccuacaccaacagcuuuaccagaggcguguacuaccccgacaagguguucagauccagcgugcugcacucuacccaggaccuguuccugccuuucuucagcaacgugaccugguuccacgccauccacguguccggcaccaauggcaccaagagauucgacaaccccgugcugcccuucaacgacgggguguacuuugccagcaccgagaaguccaacaucaucagaggcuggaucuucggcaccacacuggacagcaagacccagagccugcugaucgugaacaacgccaccaacguggucaucaaagugugcgaguuccaguucugcaacgaccccuuccugggcgucuacuaccacaagaacaacaagagcuggauggaaagcgaguuccggguguacagcagcgccaacaacugcaccuucgaguacgugucccagccuuuccugauggaccuggaaggcaagcagggcaacuucaagaaccugcgcgaguucguguuuaagaacaucgacggcuacuucaagaucuacagcaagcacaccccuaucaaccucgugcgggaucugccucagggcuucucugcucuggaaccccugguggaucugcccaucggcaucaacaucacccgguuucagacacugcuggcccugcacagaagcuaccugacaccuggcgauagcagcagcggauggacagcuggugccgccgcuuacuaugugggcuaccugcagccuagaaccuuccugcugaaguacaacgagaacggcaccaucaccgacgccguggauugugcucuggauccucugagcgagacaaagugcacccugaaguccuucaccguggaaaagggcaucuaccagaccagcaacuuccgggugcagcccaccgaauccaucgugcgguuccccaauaucaccaaucugugccccuucggcgagguguucaaugccaccagauucgccucuguguacgccuggaaccggaagcggaucagcaauugcguggccgacuacuccgugcuguacaacuccgccagcuucagcaccuucaagugcuacggcguguccccuaccaagcugaacgaccugugcuucacaaacguguacgccgacagcuucgugauccggggagaugaagugcggcagauugccccuggacagacaggcaagaucgccgacuacaacuacaagcugcccgacgacuucaccggcugugugauugccuggaacagcaacaaccuggacuccaaagucggcggcaacuacaauuaccuguaccggcuguuccggaaguccaaucugaagcccuucgagcgggacaucuccaccgagaucuaucaggccggcagcaccccuuguaacggcguggaaggcuucaacugcuacuucccacugcaguccuacggcuuucagcccacauacggcgugggcuaucagcccuacagagugguggugcugagcuucgaacugcugcaugccccugccacagugugcggcccuaagaaaagcaccaaucucgugaagaacaaaugcgugaacuucaacuucaacggccugaccggcaccggcgugcugacagagagcaacaagaaguuccugccauuccagcaguuuggccgggauaucgccgauaccacagacgccguuagagauccccagacacuggaaauccuggacaucaccccuugcagcuucggcggagugucugugaucaccccuggcaccaacaccagcaaucagguggcagugcuguaccagggcgugaacuguaccgaagugcccguggccauucacgccgaucagcugacaccuacauggcggguguacuccaccggcagcaauguguuucagaccagagccggcugucugaucggagccgagcacgugaacaauagcuacgagugcgacauccccaucggcgcuggaaucugcgccagcuaccagacacagacaaacagcccucggagagccagaagcguggccagccagagcaucauugccuacacaaugucucugggcgccgagaacagcguggccuacuccaacaacucuaucgcuauccccaccaacuucaccaucagcgugaccacagagauccugccuguguccaugaccaagaccagcguggacugcaccauguacaucugcggcgauuccaccgagugcuccaaccugcugcugcaguacggcagcuucugcacccagcugaauagagcccugacagggaucgccguggaacaggacaagaacacccaagagguguucgcccaagugaagcagaucuacaagaccccuccuaucaaggacuucggcggcuucaauuucagccagauucugcccgauccuagcaagcccagcaagcggagcuucaucgaggaccugcuguucaacaaagugacacuggccgacgccggcuucaucaagcaguauggcgauugucugggcgacauugccgccagggaucugauuugcgcccagaaguuuaacggacugacagugcugccuccucugcugaccgaugagaugaucgcccaguacacaucugcccugcuggccggcacaaucacaagcggcuggacauuuggagcaggcgccgcucugcagauccccuuugcuaugcagauggccuaccgguucaacggcaucggagugacccagaaugugcuguacgagaaccagaagcugaucgccaaccaguucaacagcgccaucggcaagauccaggacagccugagcagcacagcaagcgcccugggaaagcugcaggacguggucaaccagaaugcccaggcacugaacacccuggucaagcagcuguccuccaacuucggcgccaucagcucugugcugaacgauauccugagcagacuggacccuccugaggccgaggugcagaucgacagacugaucacaggcagacugcagagccuccagacauacgugacccagcagcugaucagagccgccgagauuagagccucugccaaucuggccgccaccaagaugucugagugugugcugggccagagcaagagaguggacuuuugcggcaagggcuaccaccugaugagcuucccucagucugccccucacggcgugguguuucugcacgugacauaugugcccgcucaagagaagaauuucaccaccgcuccagccaucugccacgacggcaaagcccacuuuccuagagaaggcguguucguguccaacggcacccauugguucgugacacagcggaacuucuacgagccccagaucaucaccaccgacaacaccuucgugucuggcaacugcgacgucgugaucggcauugugaacaauaccguguacgacccucugcagcccgagcuggacagcuucaaagaggaacuggacaaguacuuuaagaaccacacaagccccgacguggaccugggcgauaucagcggaaucaaugccagcgucgugaacauccagaaagagaucgaccggcugaacgagguggccaagaaucugaacgagagccugaucgaccugcaagaacuggggaaguacgagcaguacaucaaguggcccugguacaucuggcugggcuuuaucgccggacugauugccaucgugauggucacaaucaugcuguguugcaugaccagcugcuguagcugccugaagggcuguuguagcuguggcagcugcugcaaguucgacgaggacgauucugagcccgugcugaagggcgugaaacugcacuacacaugaggacuaguuauaagacugacuagcccgaugggccucccaacgggcccuccuccccuccuugcaccgagauuaauagaucuaaaaaaaaaaaaaaaaaaaaaaaaaaaaaaaaaaaaaaaaaaaaaaaaaaaaaaaaaaaaaaaaaaaaaaaaaaaaaaaaaaaaaaaaaaaaaaaaaaaa

SEQ ID NO: 25813 - RNA, 4011 nt, Artificial Sequence
  SARS-CoV-2/Wuhan/WIV05/2019__EPI_ISL_402128 spike protein mRNA gc mod (1-1273)(K986P_V987P_H69del_V70del_D614G)
aggagaaagcuuaccauguucguguuccuggugcugcugccucugguguccagccagugugugaaccugaccaccagaacacagcugccuccagccuacaccaacagcuuuaccagaggcguguacuaccccgacaagguguucagauccagcgugcugcacucuacccaggaccuguuccugccuuucuucagcaacgugaccugguuccacgccaucuccggcaccaauggcaccaagagauucgacaaccccgugcugcccuucaacgacgggguguacuuugccagcaccgagaaguccaacaucaucagaggcuggaucuucggcaccacacuggacagcaagacccagagccugcugaucgugaacaacgccaccaacguggucaucaaagugugcgaguuccaguucugcaacgaccccuuccugggcgucuacuaccacaagaacaacaagagcuggauggaaagcgaguuccggguguacagcagcgccaacaacugcaccuucgaguacgugucccagccuuuccugauggaccuggaaggcaagcagggcaacuucaagaaccugcgcgaguucguguuuaagaacaucgacggcuacuucaagaucuacagcaagcacaccccuaucaaccucgugcgggaucugccucagggcuucucugcucuggaaccccugguggaucugcccaucggcaucaacaucacccgguuucagacacugcuggcccugcacagaagcuaccugacaccuggcgauagcagcagcggauggacagcuggugccgccgcuuacuaugugggcuaccugcagccuagaaccuuccugcugaaguacaacgagaacggcaccaucaccgacgccguggauugugcucuggauccucugagcgagacaaagugcacccugaaguccuucaccguggaaaagggcaucuaccagaccagcaacuuccgggugcagcccaccgaauccaucgugcgguuccccaauaucaccaaucugugccccuucggcgagguguucaaugccaccagauucgccucuguguacgccuggaaccggaagcggaucagcaauugcguggccgacuacuccgugcuguacaacuccgccagcuucagcaccuucaagugcuacggcguguccccuaccaagcugaacgaccugugcuucacaaacguguacgccgacagcuucgugauccggggagaugaagugcggcagauugccccuggacagacaggcaagaucgccgacuacaacuacaagcugcccgacgacuucaccggcugugugauugccuggaacagcaacaaccuggacuccaaagucggcggcaacuacaauuaccuguaccggcuguuccggaaguccaaucugaagcccuucgagcgggacaucuccaccgagaucuaucaggccggcagcaccccuuguaacggcguggaaggcuucaacugcuacuucccacugcaguccuacggcuuucagcccacaaauggcgugggcuaucagcccuacagagugguggugcugagcuucgaacugcugcaugccccugccacagugugcggcccuaagaaaagcaccaaucucgugaagaacaaaugcgugaacuucaacuucaacggccugaccggcaccggcgugcugacagagagcaacaagaaguuccugccauuccagcaguuuggccgggauaucgccgauaccacagacgccguuagagauccccagacacuggaaauccuggacaucaccccuugcagcuucggcggagugucugugaucaccccuggcaccaacaccagcaaucagguggcagugcuguaccagggcgugaacuguaccgaagugcccguggccauucacgccgaucagcugacaccuacauggcggguguacuccaccggcagcaauguguuucagaccagagccggcugucugaucggagccgagcacgugaacaauagcuacgagugcgacauccccaucggcgcuggaaucugcgccagcuaccagacacagacaaacagcccucggagagccagaagcguggccagccagagcaucauugccuacacaaugucucugggcgccgagaacagcguggccuacuccaacaacucuaucgcuauccccaccaacuucaccaucagcgugaccacagagauccugccuguguccaugaccaagaccagcguggacugcaccauguacaucugcggcgauuccaccgagugcuccaaccugcugcugcaguacggcagcuucugcacccagcugaauagagcccugacagggaucgccguggaacaggacaagaacacccaagagguguucgcccaagugaagcagaucuacaagaccccuccuaucaaggacuucggcggcuucaauuucagccagauucugcccgauccuagcaagcccagcaagcggagcuucaucgaggaccugcuguucaacaaagugacacuggccgacgccggcuucaucaagcaguauggcgauugucugggcgacauugccgccagggaucugauuugcgcccagaaguuuaacggacugacagugcugccuccucugcugaccgaugagaugaucgcccaguacacaucugcccugcuggccggcacaaucacaagcggcuggacauuuggagcaggcgccgcucugcagauccccuuugcuaugcagauggccuaccgguucaacggcaucggagugacccagaaugugcuguacgagaaccagaagcugaucgccaaccaguucaacagcgccaucggcaagauccaggacagccugagcagcacagcaagcgcccugggaaagcugcaggacguggucaaccagaaugcccaggcacugaacacccuggucaagcagcuguccuccaacuucggcgccaucagcucugugcugaacgauauccugagcagacuggacccuccugaggccgaggugcagaucgacagacugaucacaggcagacugcagagccuccagacauacgugacccagcagcugaucagagccgccgagauuagagccucugccaaucuggccgccaccaagaugucugagugugugcugggccagagcaagagaguggacuuuugcggcaagggcuaccaccugaugagcuucccucagucugccccucacggcgugguguuucugcacgugacauaugugcccgcucaagagaagaauuucaccaccgcuccagccaucugccacgacggcaaagcccacuuuccuagagaaggcguguucguguccaacggcacccauugguucgugacacagcggaacuucuacgagccccagaucaucaccaccgacaacaccuucgugucuggcaacugcgacgucgugaucggcauugugaacaauaccguguacgacccucugcagcccgagcuggacagcuucaaagaggaacuggacaaguacuuuaagaaccacacaagccccgacguggaccugggcgauaucagcggaaucaaugccagcgucgugaacauccagaaagagaucgaccggcugaacgagguggccaagaaucugaacgagagccugaucgaccugcaagaacuggggaaguacgagcaguacaucaaguggcccugguacaucuggcugggcuuuaucgccggacugauugccaucgugauggucacaaucaugcuguguugcaugaccagcugcuguagcugccugaagggcuguuguagcuguggcagcugcugcaaguucgacgaggacgauucugagcccgugcugaagggcgugaaacugcacuacacaugaggacuaguuauaagacugacuagcccgaugggccucccaacgggcccuccuccccuccuugcaccgagauuaauagaucuaaaaaaaaaaaaaaaaaaaaaaaaaaaaaaaaaaaaaaaaaaaaaaaaaaaaaaaaaaaaaaaaaaaaaaaaaaaaaaaaaaaaaaaaaaaaaaaaaaaa

SEQ ID NO: 25814 - RNA, 4017 nt, Artificial Sequence
  SARS-CoV-2/Wuhan/WIV05/2019__EPI_ISL_402128 spike protein mRNA gc mod (1-1273)(K986P_V987P_Y453F_D614G)
aggagaaagcuuaccauguucguguuccuggugcugcugccucugguguccagccagugugugaaccugaccaccagaacacagcugccuccagccuacaccaacagcuuuaccagaggcguguacuaccccgacaagguguucagauccagcgugcugcacucuacccaggaccuguuccugccuuucuucagcaacgugaccugguuccacgccauccacguguccggcaccaauggcaccaagagauucgacaaccccgugcugcccuucaacgacgggguguacuuugccagcaccgagaaguccaacaucaucagaggcuggaucuucggcaccacacuggacagcaagacccagagccugcugaucgugaacaacgccaccaacguggucaucaaagugugcgaguuccaguucugcaacgaccccuuccugggcgucuacuaccacaagaacaacaagagcuggauggaaagcgaguuccggguguacagcagcgccaacaacugcaccuucgaguacgugucccagccuuuccugauggaccuggaaggcaagcagggcaacuucaagaaccugcgcgaguucguguuuaagaacaucgacggcuacuucaagaucuacagcaagcacaccccuaucaaccucgugcgggaucugccucagggcuucucugcucuggaaccccugguggaucugcccaucggcaucaacaucacccgguuucagacacugcuggcccugcacagaagcuaccugacaccuggcgauagcagcagcggauggacagcuggugccgccgcuuacuaugugggcuaccugcagccuagaaccuuccugcugaaguacaacgagaacggcaccaucaccgacgccguggauugugcucuggauccucugagcgagacaaagugcacccugaaguccuucaccguggaaaagggcaucuaccagaccagcaacuuccgggugcagcccaccgaauccaucgugcgguuccccaauaucaccaaucugugccccuucggcgagguguucaaugccaccagauucgccucuguguacgccuggaaccggaagcggaucagcaauugcguggccgacuacuccgugcuguacaacuccgccagcuucagcaccuucaagugcuacggcguguccccuaccaagcugaacgaccugugcuucacaaacguguacgccgacagcuucgugauccggggagaugaagugcggcagauugccccuggacagacaggcaagaucgccgacuacaacuacaagcugcccgacgacuucaccggcugugugauugccuggaacagcaacaaccuggacuccaaagucggcggcaacuacaauuaccuguuccggcuguuccggaaguccaaucugaagcccuucgagcgggacaucuccaccgagaucuaucaggccggcagcaccccuuguaacggcguggaaggcuucaacugcuacuucccacugcaguccuacggcuuucagcccacaaauggcgugggcuaucagcccuacagagugguggugcugagcuucgaacugcugcaugccccugccacagugugcggcccuaagaaaagcaccaaucucgugaagaacaaaugcgugaacuucaacuucaacggccugaccggcaccggcgugcugacagagagcaacaagaaguuccugccauuccagcaguuuggccgggauaucgccgauaccacagacgccguuagagauccccagacacuggaaauccuggacaucaccccuugcagcuucggcggagugucugugaucaccccuggcaccaacaccagcaaucagguggcagugcuguaccagggcgugaacuguaccgaagugcccguggccauucacgccgaucagcugacaccuacauggcggguguacuccaccggcagcaauguguuucagaccagagccggcugucugaucggagccgagcacgugaacaauagcuacgagugcgacauccccaucggcgcuggaaucugcgccagcuaccagacacagacaaacagcccucggagagccagaagcguggccagccagagcaucauugccuacacaaugucucugggcgccgagaacagcguggccuacuccaacaacucuaucgcuauccccaccaacuucaccaucagcgugaccacagagauccugccuguguccaugaccaagaccagcguggacugcaccauguacaucugcggcgauuccaccgagugcuccaaccugcugcugcaguacggcagcuucugcacccagcugaauagagcccugacagggaucgccguggaacaggacaagaacacccaagagguguucgcccaagugaagcagaucuacaagaccccuccuaucaaggacuucggcggcuucaauuucagccagauucugcccgauccuagcaagcccagcaagcggagcuucaucgaggaccugcuguucaacaaagugacacuggccgacgccggcuucaucaagcaguauggcgauugucugggcgacauugccgccagggaucugauuugcgcccagaaguuuaacggacugacagugcugccuccucugcugaccgaugagaugaucgcccaguacacaucugcccugcuggccggcacaaucacaagcggcuggacauuuggagcaggcgccgcucugcagauccccuuugcuaugcagauggccuaccgguucaacggcaucggagugacccagaaugugcuguacgagaaccagaagcugaucgccaaccaguucaacagcgccaucggcaagauccaggacagccugagcagcacagcaagcgcccugggaaagcugcaggacguggucaaccagaaugcccaggcacugaacacccuggucaagcagcuguccuccaacuucggcgccaucagcucugugcugaacgauauccugagcagacuggacccuccugaggccgaggugcagaucgacagacugaucacaggcagacugcagagccuccagacauacgugacccagcagcugaucagagccgccgagauuagagccucugccaaucuggccgccaccaagaugucugagugugugcugggccagagcaagagaguggacuuuugcggcaagggcuaccaccugaugagcuucccucagucugccccucacggcgugguguuucugcacgugacauaugugcccgcucaagagaagaauuucaccaccgcuccagccaucugccacgacggcaaagcccacuuuccuagagaaggcguguucguguccaacggcacccauugguucgugacacagcggaacuucuacgagccccagaucaucaccaccgacaacaccuucgugucuggcaacugcgacgucgugaucggcauugugaacaauaccguguacgacccucugcagcccgagcuggacagcuucaaagaggaacuggacaaguacuuuaagaaccacacaagccccgacguggaccugggcgauaucagcggaaucaaugccagcgucgugaacauccagaaagagaucgaccggcugaacgagguggccaagaaucugaacgagagccugaucgaccugcaagaacuggggaaguacgagcaguacaucaaguggcccugguacaucuggcugggcuuuaucgccggacugauugccaucgugauggucacaaucaugcuguguugcaugaccagcugcuguagcugccugaagggcuguuguagcuguggcagcugcugcaaguucgacgaggacgauucugagcccgugcugaagggcgugaaacugcacuacacaugaggacuaguuauaagacugacuagcccgaugggccucccaacgggcccuccuccccuccuugcaccgagauuaauagaucuaaaaaaaaaaaaaaaaaaaaaaaaaaaaaaaaaaaaaaaaaaaaaaaaaaaaaaaaaaaaaaaaaaaaaaaaaaaaaaaaaaaaaaaaaaaaaaaaaaaa

SEQ ID NO: 25815 - RNA, 4017 nt, Artificial Sequence
  SARS-CoV-2/Wuhan/WIV05/2019__EPI_ISL_402128 spike protein mRNA gc mod (1-1273)(K986P_V987P_D614G_I692V)
aggagaaagcuuaccauguucguguuccuggugcugcugccucugguguccagccagugugugaaccugaccaccagaacacagcugccuccagccuacaccaacagcuuuaccagaggcguguacuaccccgacaagguguucagauccagcgugcugcacucuacccaggaccuguuccugccuuucuucagcaacgugaccugguuccacgccauccacguguccggcaccaauggcaccaagagauucgacaaccccgugcugcccuucaacgacgggguguacuuugccagcaccgagaaguccaacaucaucagaggcuggaucuucggcaccacacuggacagcaagacccagagccugcugaucgugaacaacgccaccaacguggucaucaaagugugcgaguuccaguucugcaacgaccccuuccugggcgucuacuaccacaagaacaacaagagcuggauggaaagcgaguuccggguguacagcagcgccaacaacugcaccuucgaguacgugucccagccuuuccugauggaccuggaaggcaagcagggcaacuucaagaaccugcgcgaguucguguuuaagaacaucgacggcuacuucaagaucuacagcaagcacaccccuaucaaccucgugcgggaucugccucagggcuucucugcucuggaaccccugguggaucugcccaucggcaucaacaucacccgguuucagacacugcuggcccugcacagaagcuaccugacaccuggcgauagcagcagcggauggacagcuggugccgccgcuuacuaugugggcuaccugcagccuagaaccuuccugcugaaguacaacgagaacggcaccaucaccgacgccguggauugugcucuggauccucugagcgagacaaagugcacccugaaguccuucaccguggaaaagggcaucuaccagaccagcaacuuccgggugcagcccaccgaauccaucgugcgguuccccaauaucaccaaucugugccccuucggcgagguguucaaugccaccagauucgccucuguguacgccuggaaccggaagcggaucagcaauugcguggccgacuacuccgugcuguacaacuccgccagcuucagcaccuucaagugcuacggcguguccccuaccaagcugaacgaccugugcuucacaaacguguacgccgacagcuucgugauccggggagaugaagugcggcagauugccccuggacagacaggcaagaucgccgacuacaacuacaagcugcccgacgacuucaccggcugugugauugccuggaacagcaacaaccuggacuccaaagucggcggcaacuacaauuaccuguaccggcuguuccggaaguccaaucugaagcccuucgagcgggacaucuccaccgagaucuaucaggccggcagcaccccuuguaacggcguggaaggcuucaacugcuacuucccacugcaguccuacggcuuucagcccacaaauggcgugggcuaucagcccuacagagugguggugcugagcuucgaacugcugcaugccccugccacagugugcggcccuaagaaaagcaccaaucucgugaagaacaaaugcgugaacuucaacuucaacggccugaccggcaccggcgugcugacagagagcaacaagaaguuccugccauuccagcaguuuggccgggauaucgccgauaccacagacgccguuagagauccccagacacuggaaauccuggacaucaccccuugcagcuucggcggagugucugugaucaccccuggcaccaacaccagcaaucagguggcagugcuguaccagggcgugaacuguaccgaagugcccguggccauucacgccgaucagcugacaccuacauggcggguguacuccaccggcagcaauguguuucagaccagagccggcugucugaucggagccgagcacgugaacaauagcuacgagugcgacauccccaucggcgcuggaaucugcgccagcuaccagacacagacaaacagcccucggagagccagaagcguggccagccagagcgugauugccuacacaaugucucugggcgccgagaacagcguggccuacuccaacaacucuaucgcuauccccaccaacuucaccaucagcgugaccacagagauccugccuguguccaugaccaagaccagcguggacugcaccauguacaucugcggcgauuccaccgagugcuccaaccugcugcugcaguacggcagcuucugcacccagcugaauagagcccugacagggaucgccguggaacaggacaagaacacccaagagguguucgcccaagugaagcagaucuacaagaccccuccuaucaaggacuucggcggcuucaauuucagccagauucugcccgauccuagcaagcccagcaagcggagcuucaucgaggaccugcuguucaacaaagugacacuggccgacgccggcuucaucaagcaguauggcgauugucugggcgacauugccgccagggaucugauuugcgcccagaaguuuaacggacugacagugcugccuccucugcugaccgaugagaugaucgcccaguacacaucugcccugcuggccggcacaaucacaagcggcuggacauuuggagcaggcgccgcucugcagauccccuuugcuaugcagauggccuaccgguucaacggcaucggagugacccagaaugugcuguacgagaaccagaagcugaucgccaaccaguucaacagcgccaucggcaagauccaggacagccugagcagcacagcaagcgcccugggaaagcugcaggacguggucaaccagaaugcccaggcacugaacacccuggucaagcagcuguccuccaacuucggcgccaucagcucugugcugaacgauauccugagcagacuggacccuccugaggccgaggugcagaucgacagacugaucacaggcagacugcagagccuccagacauacgugacccagcagcugaucagagccgccgagauuagagccucugccaaucuggccgccaccaagaugucugagugugugcugggccagagcaagagaguggacuuuugcggcaagggcuaccaccugaugagcuucccucagucugccccucacggcgugguguuucugcacgugacauaugugcccgcucaagagaagaauuucaccaccgcuccagccaucugccacgacggcaaagcccacuuuccuagagaaggcguguucguguccaacggcacccauugguucgugacacagcggaacuucuacgagccccagaucaucaccaccgacaacaccuucgugucuggcaacugcgacgucgugaucggcauugugaacaauaccguguacgacccucugcagcccgagcuggacagcuucaaagaggaacuggacaaguacuuuaagaaccacacaagccccgacguggaccugggcgauaucagcggaaucaaugccagcgucgugaacauccagaaagagaucgaccggcugaacgagguggccaagaaucugaacgagagccugaucgaccugcaagaacuggggaaguacgagcaguacaucaaguggcccugguacaucuggcugggcuuuaucgccggacugauugccaucgugauggucacaaucaugcuguguugcaugaccagcugcuguagcugccugaagggcuguuguagcuguggcagcugcugcaaguucgacgaggacgauucugagcccgugcugaagggcgugaaacugcacuacacaugaggacuaguuauaagacugacuagcccgaugggccucccaacgggcccuccuccccuccuugcaccgagauuaauagaucuaaaaaaaaaaaaaaaaaaaaaaaaaaaaaaaaaaaaaaaaaaaaaaaaaaaaaaaaaaaaaaaaaaaaaaaaaaaaaaaaaaaaaaaaaaaaaaaaaaaa

SEQ ID NO: 25816 - RNA, 4017 nt, Artificial Sequence
  SARS-CoV-2/Wuhan/WIV05/2019__EPI_ISL_402128 spike protein mRNA gc mod (1-1273)(K986P_V987P_D614G_M1229I)
aggagaaagcuuaccauguucguguuccuggugcugcugccucugguguccagccagugugugaaccugaccaccagaacacagcugccuccagccuacaccaacagcuuuaccagaggcguguacuaccccgacaagguguucagauccagcgugcugcacucuacccaggaccuguuccugccuuucuucagcaacgugaccugguuccacgccauccacguguccggcaccaauggcaccaagagauucgacaaccccgugcugcccuucaacgacgggguguacuuugccagcaccgagaaguccaacaucaucagaggcuggaucuucggcaccacacuggacagcaagacccagagccugcugaucgugaacaacgccaccaacguggucaucaaagugugcgaguuccaguucugcaacgaccccuuccugggcgucuacuaccacaagaacaacaagagcuggauggaaagcgaguuccggguguacagcagcgccaacaacugcaccuucgaguacgugucccagccuuuccugauggaccuggaaggcaagcagggcaacuucaagaaccugcgcgaguucguguuuaagaacaucgacggcuacuucaagaucuacagcaagcacaccccuaucaaccucgugcgggaucugccucagggcuucucugcucuggaaccccugguggaucugcccaucggcaucaacaucacccgguuucagacacugcuggcccugcacagaagcuaccugacaccuggcgauagcagcagcggauggacagcuggugccgccgcuuacuaugugggcuaccugcagccuagaaccuuccugcugaaguacaacgagaacggcaccaucaccgacgccguggauugugcucuggauccucugagcgagacaaagugcacccugaaguccuucaccguggaaaagggcaucuaccagaccagcaacuuccgggugcagcccaccgaauccaucgugcgguuccccaauaucaccaaucugugccccuucggcgagguguucaaugccaccagauucgccucuguguacgccuggaaccggaagcggaucagcaauugcguggccgacuacuccgugcuguacaacuccgccagcuucagcaccuucaagugcuacggcguguccccuaccaagcugaacgaccugugcuucacaaacguguacgccgacagcuucgugauccggggagaugaagugcggcagauugccccuggacagacaggcaagaucgccgacuacaacuacaagcugcccgacgacuucaccggcugugugauugccuggaacagcaacaaccuggacuccaaagucggcggcaacuacaauuaccuguaccggcuguuccggaaguccaaucugaagcccuucgagcgggacaucuccaccgagaucuaucaggccggcagcaccccuuguaacggcguggaaggcuucaacugcuacuucccacugcaguccuacggcuuucagcccacaaauggcgugggcuaucagcccuacagagugguggugcugagcuucgaacugcugcaugccccugccacagugugcggcccuaagaaaagcaccaaucucgugaagaacaaaugcgugaacuucaacuucaacggccugaccggcaccggcgugcugacagagagcaacaagaaguuccugccauuccagcaguuuggccgggauaucgccgauaccacagacgccguuagagauccccagacacuggaaauccuggacaucaccccuugcagcuucggcggagugucugugaucaccccuggcaccaacaccagcaaucagguggcagugcuguaccagggcgugaacuguaccgaagugcccguggccauucacgccgaucagcugacaccuacauggcggguguacuccaccggcagcaauguguuucagaccagagccggcugucugaucggagccgagcacgugaacaauagcuacgagugcgacauccccaucggcgcuggaaucugcgccagcuaccagacacagacaaacagcccucggagagccagaagcguggccagccagagcaucauugccuacacaaugucucugggcgccgagaacagcguggccuacuccaacaacucuaucgcuauccccaccaacuucaccaucagcgugaccacagagauccugccuguguccaugaccaagaccagcguggacugcaccauguacaucugcggcgauuccaccgagugcuccaaccugcugcugcaguacggcagcuucugcacccagcugaauagagcccugacagggaucgccguggaacaggacaagaacacccaagagguguucgcccaagugaagcagaucuacaagaccccuccuaucaaggacuucggcggcuucaauuucagccagauucugcccgauccuagcaagcccagcaagcggagcuucaucgaggaccugcuguucaacaaagugacacuggccgacgccggcuucaucaagcaguauggcgauugucugggcgacauugccgccagggaucugauuugcgcccagaaguuuaacggacugacagugcugccuccucugcugaccgaugagaugaucgcccaguacacaucugcccugcuggccggcacaaucacaagcggcuggacauuuggagcaggcgccgcucugcagauccccuuugcuaugcagauggccuaccgguucaacggcaucggagugacccagaaugugcuguacgagaaccagaagcugaucgccaaccaguucaacagcgccaucggcaagauccaggacagccugagcagcacagcaagcgcccugggaaagcugcaggacguggucaaccagaaugcccaggcacugaacacccuggucaagcagcuguccuccaacuucggcgccaucagcucugugcugaacgauauccugagcagacuggacccuccugaggccgaggugcagaucgacagacugaucacaggcagacugcagagccuccagacauacgugacccagcagcugaucagagccgccgagauuagagccucugccaaucuggccgccaccaagaugucugagugugugcugggccagagcaagagaguggacuuuugcggcaagggcuaccaccugaugagcuucccucagucugccccucacggcgugguguuucugcacgugacauaugugcccgcucaagagaagaauuucaccaccgcuccagccaucugccacgacggcaaagcccacuuuccuagagaaggcguguucguguccaacggcacccauugguucgugacacagcggaacuucuacgagccccagaucaucaccaccgacaacaccuucgugucuggcaacugcgacgucgugaucggcauugugaacaauaccguguacgacccucugcagcccgagcuggacagcuucaaagaggaacuggacaaguacuuuaagaaccacacaagccccgacguggaccugggcgauaucagcggaaucaaugccagcgucgugaacauccagaaagagaucgaccggcugaacgagguggccaagaaucugaacgagagccugaucgaccugcaagaacuggggaaguacgagcaguacaucaaguggcccugguacaucuggcugggcuuuaucgccggacugauugccaucgugaucgucacaaucaugcuguguugcaugaccagcugcuguagcugccugaagggcuguuguagcuguggcagcugcugcaaguucgacgaggacgauucugagcccgugcugaagggcgugaaacugcacuacacaugaggacuaguuauaagacugacuagcccgaugggccucccaacgggcccuccuccccuccuugcaccgagauuaauagaucuaaaaaaaaaaaaaaaaaaaaaaaaaaaaaaaaaaaaaaaaaaaaaaaaaaaaaaaaaaaaaaaaaaaaaaaaaaaaaaaaaaaaaaaaaaaaaaaaaaaa

SEQ ID NO: 25817 - RNA, 4011 nt, Artificial Sequence
  SARS-CoV-2/Wuhan/WIV05/2019__EPI_ISL_402128 spike protein mRNA gc mod (1-1273)(K986P_V987P_H69del_V70del_A222V_Y453F_S477N_D614G_I692V)
aggagaaagcuuaccauguucguguuccuggugcugcugccucugguguccagccagugugugaaccugaccaccagaacacagcugccuccagccuacaccaacagcuuuaccagaggcguguacuaccccgacaagguguucagauccagcgugcugcacucuacccaggaccuguuccugccuuucuucagcaacgugaccugguuccacgccaucuccggcaccaauggcaccaagagauucgacaaccccgugcugcccuucaacgacgggguguacuuugccagcaccgagaaguccaacaucaucagaggcuggaucuucggcaccacacuggacagcaagacccagagccugcugaucgugaacaacgccaccaacguggucaucaaagugugcgaguuccaguucugcaacgaccccuuccugggcgucuacuaccacaagaacaacaagagcuggauggaaagcgaguuccggguguacagcagcgccaacaacugcaccuucgaguacgugucccagccuuuccugauggaccuggaaggcaagcagggcaacuucaagaaccugcgcgaguucguguuuaagaacaucgacggcuacuucaagaucuacagcaagcacaccccuaucaaccucgugcgggaucugccucagggcuucucugugcuggaaccccugguggaucugcccaucggcaucaacaucacccgguuucagacacugcuggcccugcacagaagcuaccugacaccuggcgauagcagcagcggauggacagcuggugccgccgcuuacuaugugggcuaccugcagccuagaaccuuccugcugaaguacaacgagaacggcaccaucaccgacgccguggauugugcucuggauccucugagcgagacaaagugcacccugaaguccuucaccguggaaaagggcaucuaccagaccagcaacuuccgggugcagcccaccgaauccaucgugcgguuccccaauaucaccaaucugugccccuucggcgagguguucaaugccaccagauucgccucuguguacgccuggaaccggaagcggaucagcaauugcguggccgacuacuccgugcuguacaacuccgccagcuucagcaccuucaagugcuacggcguguccccuaccaagcugaacgaccugugcuucacaaacguguacgccgacagcuucgugauccggggagaugaagugcggcagauugccccuggacagacaggcaagaucgccgacuacaacuacaagcugcccgacgacuucaccggcugugugauugccuggaacagcaacaaccuggacuccaaagucggcggcaacuacaauuaccuguuccggcuguuccggaaguccaaucugaagcccuucgagcgggacaucuccaccgagaucuaucaggccggcaacaccccuuguaacggcguggaaggcuucaacugcuacuucccacugcaguccuacggcuuucagcccacaaauggcgugggcuaucagcccuacagagugguggugcugagcuucgaacugcugcaugccccugccacagugugcggcccuaagaaaagcaccaaucucgugaagaacaaaugcgugaacuucaacuucaacggccugaccggcaccggcgugcugacagagagcaacaagaaguuccugccauuccagcaguuuggccgggauaucgccgauaccacagacgccguuagagauccccagacacuggaaauccuggacaucaccccuugcagcuucggcggagugucugugaucaccccuggcaccaacaccagcaaucagguggcagugcuguaccagggcgugaacuguaccgaagugcccguggccauucacgccgaucagcugacaccuacauggcggguguacuccaccggcagcaauguguuucagaccagagccggcugucugaucggagccgagcacgugaacaauagcuacgagugcgacauccccaucggcgcuggaaucugcgccagcuaccagacacagacaaacagcccucggagagccagaagcguggccagccagagcgugauugccuacacaaugucucugggcgccgagaacagcguggccuacuccaacaacucuaucgcuauccccaccaacuucaccaucagcgugaccacagagauccugccuguguccaugaccaagaccagcguggacugcaccauguacaucugcggcgauuccaccgagugcuccaaccugcugcugcaguacggcagcuucugcacccagcugaauagagcccugacagggaucgccguggaacaggacaagaacacccaagagguguucgcccaagugaagcagaucuacaagaccccuccuaucaaggacuucggcggcuucaauuucagccagauucugcccgauccuagcaagcccagcaagcggagcuucaucgaggaccugcuguucaacaaagugacacuggccgacgccggcuucaucaagcaguauggcgauugucugggcgacauugccgccagggaucugauuugcgcccagaaguuuaacggacugacagugcugccuccucugcugaccgaugagaugaucgcccaguacacaucugcccugcuggccggcacaaucacaagcggcuggacauuuggagcaggcgccgcucugcagauccccuuugcuaugcagauggccuaccgguucaacggcaucggagugacccagaaugugcuguacgagaaccagaagcugaucgccaaccaguucaacagcgccaucggcaagauccaggacagccugagcagcacagcaagcgcccugggaaagcugcaggacguggucaaccagaaugcccaggcacugaacacccuggucaagcagcuguccuccaacuucggcgccaucagcucugugcugaacgauauccugagcagacuggacccuccugaggccgaggugcagaucgacagacugaucacaggcagacugcagagccuccagacauacgugacccagcagcugaucagagccgccgagauuagagccucugccaaucuggccgccaccaagaugucugagugugugcugggccagagcaagagaguggacuuuugcggcaagggcuaccaccugaugagcuucccucagucugccccucacggcgugguguuucugcacgugacauaugugcccgcucaagagaagaauuucaccaccgcuccagccaucugccacgacggcaaagcccacuuuccuagagaaggcguguucguguccaacggcacccauugguucgugacacagcggaacuucuacgagccccagaucaucaccaccgacaacaccuucgugucuggcaacugcgacgucgugaucggcauugugaacaauaccguguacgacccucugcagcccgagcuggacagcuucaaagaggaacuggacaaguacuuuaagaaccacacaagccccgacguggaccugggcgauaucagcggaaucaaugccagcgucgugaacauccagaaagagaucgaccggcugaacgagguggccaagaaucugaacgagagccugaucgaccugcaagaacuggggaaguacgagcaguacaucaaguggcccugguacaucuggcugggcuuuaucgccggacugauugccaucgugauggucacaaucaugcuguguugcaugaccagcugcuguagcugccugaagggcuguuguagcuguggcagcugcugcaaguucgacgaggacgauucugagcccgugcugaagggcgugaaacugcacuacacaugaggacuaguuauaagacugacuagcccgaugggccucccaacgggcccuccuccccuccuugcaccgagauuaauagaucuaaaaaaaaaaaaaaaaaaaaaaaaaaaaaaaaaaaaaaaaaaaaaaaaaaaaaaaaaaaaaaaaaaaaaaaaaaaaaaaaaaaaaaaaaaaaaaaaaaaa

SEQ ID NO: 25818 - RNA, 4011 nt, Artificial Sequence
  SARS-CoV-2/Wuhan/WIV05/2019__EPI_ISL_402128 spike protein mRNA gc mod (1-1273)(K986P_V987P_H69del_V70del_Y453F_D614G_I692V_M1229I)
aggagaaagcuuaccauguucguguuccuggugcugcugccucugguguccagccagugugugaaccugaccaccagaacacagcugccuccagccuacaccaacagcuuuaccagaggcguguacuaccccgacaagguguucagauccagcgugcugcacucuacccaggaccuguuccugccuuucuucagcaacgugaccugguuccacgccaucuccggcaccaauggcaccaagagauucgacaaccccgugcugcccuucaacgacgggguguacuuugccagcaccgagaaguccaacaucaucagaggcuggaucuucggcaccacacuggacagcaagacccagagccugcugaucgugaacaacgccaccaacguggucaucaaagugugcgaguuccaguucugcaacgaccccuuccugggcgucuacuaccacaagaacaacaagagcuggauggaaagcgaguuccggguguacagcagcgccaacaacugcaccuucgaguacgugucccagccuuuccugauggaccuggaaggcaagcagggcaacuucaagaaccugcgcgaguucguguuuaagaacaucgacggcuacuucaagaucuacagcaagcacaccccuaucaaccucgugcgggaucugccucagggcuucucugcucuggaaccccugguggaucugcccaucggcaucaacaucacccgguuucagacacugcuggcccugcacagaagcuaccugacaccuggcgauagcagcagcggauggacagcuggugccgccgcuuacuaugugggcuaccugcagccuagaaccuuccugcugaaguacaacgagaacggcaccaucaccgacgccguggauugugcucuggauccucugagcgagacaaagugcacccugaaguccuucaccguggaaaagggcaucuaccagaccagcaacuuccgggugcagcccaccgaauccaucgugcgguuccccaauaucaccaaucugugccccuucggcgagguguucaaugccaccagauucgccucuguguacgccuggaaccggaagcggaucagcaauugcguggccgacuacuccgugcuguacaacuccgccagcuucagcaccuucaagugcuacggcguguccccuaccaagcugaacgaccugugcuucacaaacguguacgccgacagcuucgugauccggggagaugaagugcggcagauugccccuggacagacaggcaagaucgccgacuacaacuacaagcugcccgacgacuucaccggcugugugauugccuggaacagcaacaaccuggacuccaaagucggcggcaacuacaauuaccuguuccggcuguuccggaaguccaaucugaagcccuucgagcgggacaucuccaccgagaucuaucaggccggcagcaccccuuguaacggcguggaaggcuucaacugcuacuucccacugcaguccuacggcuuucagcccacaaauggcgugggcuaucagcccuacagagugguggugcugagcuucgaacugcugcaugccccugccacagugugcggcccuaagaaaagcaccaaucucgugaagaacaaaugcgugaacuucaacuucaacggccugaccggcaccggcgugcugacagagagcaacaagaaguuccugccauuccagcaguuuggccgggauaucgccgauaccacagacgccguuagagauccccagacacuggaaauccuggacaucaccccuugcagcuucggcggagugucugugaucaccccuggcaccaacaccagcaaucagguggcagugcuguaccagggcgugaacuguaccgaagugcccguggccauucacgccgaucagcugacaccuacauggcggguguacuccaccggcagcaauguguuucagaccagagccggcugucugaucggagccgagcacgugaacaauagcuacgagugcgacauccccaucggcgcuggaaucugcgccagcuaccagacacagacaaacagcccucggagagccagaagcguggccagccagagcgugauugccuacacaaugucucugggcgccgagaacagcguggccuacuccaacaacucuaucgcuauccccaccaacuucaccaucagcgugaccacagagauccugccuguguccaugaccaagaccagcguggacugcaccauguacaucugcggcgauuccaccgagugcuccaaccugcugcugcaguacggcagcuucugcacccagcugaauagagcccugacagggaucgccguggaacaggacaagaacacccaagagguguucgcccaagugaagcagaucuacaagaccccuccuaucaaggacuucggcggcuucaauuucagccagauucugcccgauccuagcaagcccagcaagcggagcuucaucgaggaccugcuguucaacaaagugacacuggccgacgccggcuucaucaagcaguauggcgauugucugggcgacauugccgccagggaucugauuugcgcccagaaguuuaacggacugacagugcugccuccucugcugaccgaugagaugaucgcccaguacacaucugcccugcuggccggcacaaucacaagcggcuggacauuuggagcaggcgccgcucugcagauccccuuugcuaugcagauggccuaccgguucaacggcaucggagugacccagaaugugcuguacgagaaccagaagcugaucgccaaccaguucaacagcgccaucggcaagauccaggacagccugagcagcacagcaagcgcccugggaaagcugcaggacguggucaaccagaaugcccaggcacugaacacccuggucaagcagcuguccuccaacuucggcgccaucagcucugugcugaacgauauccugagcagacuggacccuccugaggccgaggugcagaucgacagacugaucacaggcagacugcagagccuccagacauacgugacccagcagcugaucagagccgccgagauuagagccucugccaaucuggccgccaccaagaugucugagugugugcugggccagagcaagagaguggacuuuugcggcaagggcuaccaccugaugagcuucccucagucugccccucacggcgugguguuucugcacgugacauaugugcccgcucaagagaagaauuucaccaccgcuccagccaucugccacgacggcaaagcccacuuuccuagagaaggcguguucguguccaacggcacccauugguucgugacacagcggaacuucuacgagccccagaucaucaccaccgacaacaccuucgugucuggcaacugcgacgucgugaucggcauugugaacaauaccguguacgacccucugcagcccgagcuggacagcuucaaagaggaacuggacaaguacuuuaagaaccacacaagccccgacguggaccugggcgauaucagcggaaucaaugccagcgucgugaacauccagaaagagaucgaccggcugaacgagguggccaagaaucugaacgagagccugaucgaccugcaagaacuggggaaguacgagcaguacaucaaguggcccugguacaucuggcugggcuuuaucgccggacugauugccaucgugaucgucacaaucaugcuguguugcaugaccagcugcuguagcugccugaagggcuguuguagcuguggcagcugcugcaaguucgacgaggacgauucugagcccgugcugaagggcgugaaacugcacuacacaugaggacuaguuauaagacugacuagcccgaugggccucccaacgggcccuccuccccuccuugcaccgagauuaauagaucuaaaaaaaaaaaaaaaaaaaaaaaaaaaaaaaaaaaaaaaaaaaaaaaaaaaaaaaaaaaaaaaaaaaaaaaaaaaaaaaaaaaaaaaaaaaaaaaaaaaa

SEQ ID NO: 25819 - RNA, 4008 nt, Artificial Sequence
  SARS-CoV-2/Wuhan/WIV05/2019__EPI_ISL_402128 spike protein mRNA gc mod (1-1273)(K986P_V987P_K986P_V987P_H69del_V70del_Y144del_N501Y_A570 D_D614G_P681H_T716I_S982A_D1118H)
aggagaaagcuuaccauguucguguuccuggugcugcugccucugguguccagccagugugugaaccugaccaccagaacacagcugccuccagccuacaccaacagcuuuaccagaggcguguacuaccccgacaagguguucagauccagcgugcugcacucuacccaggaccuguuccugccuuucuucagcaacgugaccugguuccacgccaucuccggcaccaauggcaccaagagauucgacaaccccgugcugcccuucaacgacgggguguacuuugccagcaccgagaaguccaacaucaucagaggcuggaucuucggcaccacacuggacagcaagacccagagccugcugaucgugaacaacgccaccaacguggucaucaaagugugcgaguuccaguucugcaacgaccccuuccugggcgucuaccacaagaacaacaagagcuggauggaaagcgaguuccggguguacagcagcgccaacaacugcaccuucgaguacgugucccagccuuuccugauggaccuggaaggcaagcagggcaacuucaagaaccugcgcgaguucguguuuaagaacaucgacggcuacuucaagaucuacagcaagcacaccccuaucaaccucgugcgggaucugccucagggcuucucugcucuggaaccccugguggaucugcccaucggcaucaacaucacccgguuucagacacugcuggcccugcacagaagcuaccugacaccuggcgauagcagcagcggauggacagcuggugccgccgcuuacuaugugggcuaccugcagccuagaaccuuccugcugaaguacaacgagaacggcaccaucaccgacgccguggauugugcucuggauccucugagcgagacaaagugcacccugaaguccuucaccguggaaaagggcaucuaccagaccagcaacuuccgggugcagcccaccgaauccaucgugcgguuccccaauaucaccaaucugugccccuucggcgagguguucaaugccaccagauucgccucuguguacgccuggaaccggaagcggaucagcaauugcguggccgacuacuccgugcuguacaacuccgccagcuucagcaccuucaagugcuacggcguguccccuaccaagcugaacgaccugugcuucacaaacguguacgccgacagcuucgugauccggggagaugaagugcggcagauugccccuggacagacaggcaagaucgccgacuacaacuacaagcugcccgacgacuucaccggcugugugauugccuggaacagcaacaaccuggacuccaaagucggcggcaacuacaauuaccuguaccggcuguuccggaaguccaaucugaagcccuucgagcgggacaucuccaccgagaucuaucaggccggcagcaccccuuguaacggcguggaaggcuucaacugcuacuucccacugcaguccuacggcuuucagcccacauacggcgugggcuaucagcccuacagagugguggugcugagcuucgaacugcugcaugccccugccacagugugcggcccuaagaaaagcaccaaucucgugaagaacaaaugcgugaacuucaacuucaacggccugaccggcaccggcgugcugacagagagcaacaagaaguuccugccauuccagcaguuuggccgggauaucgacgauaccacagacgccguuagagauccccagacacuggaaauccuggacaucaccccuugcagcuucggcggagugucugugaucaccccuggcaccaacaccagcaaucagguggcagugcuguaccagggcgugaacuguaccgaagugcccguggccauucacgccgaucagcugacaccuacauggcggguguacuccaccggcagcaauguguuucagaccagagccggcugucugaucggagccgagcacgugaacaauagcuacgagugcgacauccccaucggcgcuggaaucugcgccagcuaccagacacagacaaacagccaccggagagccagaagcguggccagccagagcaucauugccuacacaaugucucugggcgccgagaacagcguggccuacuccaacaacucuaucgcuauccccaucaacuucaccaucagcgugaccacagagauccugccuguguccaugaccaagaccagcguggacugcaccauguacaucugcggcgauuccaccgagugcuccaaccugcugcugcaguacggcagcuucugcacccagcugaauagagcccugacagggaucgccguggaacaggacaagaacacccaagagguguucgcccaagugaagcagaucuacaagaccccuccuaucaaggacuucggcggcuucaauuucagccagauucugcccgauccuagcaagcccagcaagcggagcuucaucgaggaccugcuguucaacaaagugacacuggccgacgccggcuucaucaagcaguauggcgauugucugggcgacauugccgccagggaucugauuugcgcccagaaguuuaacggacugacagugcugccuccucugcugaccgaugagaugaucgcccaguacacaucugcccugcuggccggcacaaucacaagcggcuggacauuuggagcaggcgccgcucugcagauccccuuugcuaugcagauggccuaccgguucaacggcaucggagugacccagaaugugcuguacgagaaccagaagcugaucgccaaccaguucaacagcgccaucggcaagauccaggacagccugagcagcacagcaagcgcccugggaaagcugcaggacguggucaaccagaaugcccaggcacugaacacccuggucaagcagcuguccuccaacuucggcgccaucagcucugugcugaacgauauccuggccagacuggacccuccugaggccgaggugcagaucgacagacugaucacaggcagacugcagagccuccagacauacgugacccagcagcugaucagagccgccgagauuagagccucugccaaucuggccgccaccaagaugucugagugugugcugggccagagcaagagaguggacuuuugcggcaagggcuaccaccugaugagcuucccucagucugccccucacggcgugguguuucugcacgugacauaugugcccgcucaagagaagaauuucaccaccgcuccagccaucugccacgacggcaaagcccacuuuccuagagaaggcguguucguguccaacggcacccauugguucgugacacagcggaacuucuacgagccccagaucaucaccacccacaacaccuucgugucuggcaacugcgacgucgugaucggcauugugaacaauaccguguacgacccucugcagcccgagcuggacagcuucaaagaggaacuggacaaguacuuuaagaaccacacaagccccgacguggaccugggcgauaucagcggaaucaaugccagcgucgugaacauccagaaagagaucgaccggcugaacgagguggccaagaaucugaacgagagccugaucgaccugcaagaacuggggaaguacgagcaguacaucaaguggcccugguacaucuggcugggcuuuaucgccggacugauugccaucgugauggucacaaucaugcuguguugcaugaccagcugcuguagcugccugaagggcuguuguagcuguggcagcugcugcaaguucgacgaggacgauucugagcccgugcugaagggcgugaaacugcacuacacaugaggacuaguuauaagacugacuagcccgaugggccucccaacgggcccuccuccccuccuugcaccgagauuaauagaucuaaaaaaaaaaaaaaaaaaaaaaaaaaaaaaaaaaaaaaaaaaaaaaaaaaaaaaaaaaaaaaaaaaaaaaaaaaaaaaaaaaaaaaaaaaaaaaaaaaaa

SEQ ID NO: 25820 - RNA, 4017 nt, Artificial Sequence
  SARS-CoV-2/Wuhan/WIV05/2019__EPI_ISL_402128 spike protein mRNA gc mod (1-1273)(K986P_V987P_K986P_V987P_K417N_E484K_N501Y_D614G)
aggagaaagcuuaccauguucguguuccuggugcugcugccucugguguccagccagugugugaaccugaccaccagaacacagcugccuccagccuacaccaacagcuuuaccagaggcguguacuaccccgacaagguguucagauccagcgugcugcacucuacccaggaccuguuccugccuuucuucagcaacgugaccugguuccacgccauccacguguccggcaccaauggcaccaagagauucgacaaccccgugcugcccuucaacgacgggguguacuuugccagcaccgagaaguccaacaucaucagaggcuggaucuucggcaccacacuggacagcaagacccagagccugcugaucgugaacaacgccaccaacguggucaucaaagugugcgaguuccaguucugcaacgaccccuuccugggcgucuacuaccacaagaacaacaagagcuggauggaaagcgaguuccggguguacagcagcgccaacaacugcaccuucgaguacgugucccagccuuuccugauggaccuggaaggcaagcagggcaacuucaagaaccugcgcgaguucguguuuaagaacaucgacggcuacuucaagaucuacagcaagcacaccccuaucaaccucgugcgggaucugccucagggcuucucugcucuggaaccccugguggaucugcccaucggcaucaacaucacccgguuucagacacugcuggcccugcacagaagcuaccugacaccuggcgauagcagcagcggauggacagcuggugccgccgcuuacuaugugggcuaccugcagccuagaaccuuccugcugaaguacaacgagaacggcaccaucaccgacgccguggauugugcucuggauccucugagcgagacaaagugcacccugaaguccuucaccguggaaaagggcaucuaccagaccagcaacuuccgggugcagcccaccgaauccaucgugcgguuccccaauaucaccaaucugugccccuucggcgagguguucaaugccaccagauucgccucuguguacgccuggaaccggaagcggaucagcaauugcguggccgacuacuccgugcuguacaacuccgccagcuucagcaccuucaagugcuacggcguguccccuaccaagcugaacgaccugugcuucacaaacguguacgccgacagcuucgugauccggggagaugaagugcggcagauugccccuggacagacaggcaacaucgccgacuacaacuacaagcugcccgacgacuucaccggcugugugauugccuggaacagcaacaaccuggacuccaaagucggcggcaacuacaauuaccuguaccggcuguuccggaaguccaaucugaagcccuucgagcgggacaucuccaccgagaucuaucaggccggcagcaccccuuguaacggcgugaagggcuucaacugcuacuucccacugcaguccuacggcuuucagcccacauacggcgugggcuaucagcccuacagagugguggugcugagcuucgaacugcugcaugccccugccacagugugcggcccuaagaaaagcaccaaucucgugaagaacaaaugcgugaacuucaacuucaacggccugaccggcaccggcgugcugacagagagcaacaagaaguuccugccauuccagcaguuuggccgggauaucgccgauaccacagacgccguuagagauccccagacacuggaaauccuggacaucaccccuugcagcuucggcggagugucugugaucaccccuggcaccaacaccagcaaucagguggcagugcuguaccagggcgugaacuguaccgaagugcccguggccauucacgccgaucagcugacaccuacauggcggguguacuccaccggcagcaauguguuucagaccagagccggcugucugaucggagccgagcacgugaacaauagcuacgagugcgacauccccaucggcgcuggaaucugcgccagcuaccagacacagacaaacagcccucggagagccagaagcguggccagccagagcaucauugccuacacaaugucucugggcgccgagaacagcguggccuacuccaacaacucuaucgcuauccccaccaacuucaccaucagcgugaccacagagauccugccuguguccaugaccaagaccagcguggacugcaccauguacaucugcggcgauuccaccgagugcuccaaccugcugcugcaguacggcagcuucugcacccagcugaauagagcccugacagggaucgccguggaacaggacaagaacacccaagagguguucgcccaagugaagcagaucuacaagaccccuccuaucaaggacuucggcggcuucaauuucagccagauucugcccgauccuagcaagcccagcaagcggagcuucaucgaggaccugcuguucaacaaagugacacuggccgacgccggcuucaucaagcaguauggcgauugucugggcgacauugccgccagggaucugauuugcgcccagaaguuuaacggacugacagugcugccuccucugcugaccgaugagaugaucgcccaguacacaucugcccugcuggccggcacaaucacaagcggcuggacauuuggagcaggcgccgcucugcagauccccuuugcuaugcagauggccuaccgguucaacggcaucggagugacccagaaugugcuguacgagaaccagaagcugaucgccaaccaguucaacagcgccaucggcaagauccaggacagccugagcagcacagcaagcgcccugggaaagcugcaggacguggucaaccagaaugcccaggcacugaacacccuggucaagcagcuguccuccaacuucggcgccaucagcucugugcugaacgauauccugagcagacuggacccuccugaggccgaggugcagaucgacagacugaucacaggcagacugcagagccuccagacauacgugacccagcagcugaucagagccgccgagauuagagccucugccaaucuggccgccaccaagaugucugagugugugcugggccagagcaagagaguggacuuuugcggcaagggcuaccaccugaugagcuucccucagucugccccucacggcgugguguuucugcacgugacauaugugcccgcucaagagaagaauuucaccaccgcuccagccaucugccacgacggcaaagcccacuuuccuagagaaggcguguucguguccaacggcacccauugguucgugacacagcggaacuucuacgagccccagaucaucaccaccgacaacaccuucgugucuggcaacugcgacgucgugaucggcauugugaacaauaccguguacgacccucugcagcccgagcuggacagcuucaaagaggaacuggacaaguacuuuaagaaccacacaagccccgacguggaccugggcgauaucagcggaaucaaugccagcgucgugaacauccagaaagagaucgaccggcugaacgagguggccaagaaucugaacgagagccugaucgaccugcaagaacuggggaaguacgagcaguacaucaaguggcccugguacaucuggcugggcuuuaucgccggacugauugccaucgugauggucacaaucaugcuguguugcaugaccagcugcuguagcugccugaagggcuguuguagcuguggcagcugcugcaaguucgacgaggacgauucugagcccgugcugaagggcgugaaacugcacuacacaugaggacuaguuauaagacugacuagcccgaugggccucccaacgggcccuccuccccuccuugcaccgagauuaauagaucuaaaaaaaaaaaaaaaaaaaaaaaaaaaaaaaaaaaaaaaaaaaaaaaaaaaaaaaaaaaaaaaaaaaaaaaaaaaaaaaaaaaaaaaaaaaaaaaaaaaa

SEQ ID NO: 25821 - RNA, 4008 nt, Artificial Sequence
  SARS-CoV-2/Wuhan/WIV05/2019__EPI_ISL_402128 spike protein mRNA gc mod (1-1273)(K986P_V987P_K986P_V987P_L18F_D80A_D215G_L242del_A243del_ L244del_R246I_K417N_E484K_N501Y_D614G_A701V)
aggagaaagcuuaccauguucguguuccuggugcugcugccucugguguccagccagugugugaacuucaccaccagaacacagcugccuccagccuacaccaacagcuuuaccagaggcguguacuaccccgacaagguguucagauccagcgugcugcacucuacccaggaccuguuccugccuuucuucagcaacgugaccugguuccacgccauccacguguccggcaccaauggcaccaagagauucgccaaccccgugcugcccuucaacgacgggguguacuuugccagcaccgagaaguccaacaucaucagaggcuggaucuucggcaccacacuggacagcaagacccagagccugcugaucgugaacaacgccaccaacguggucaucaaagugugcgaguuccaguucugcaacgaccccuuccugggcgucuacuaccacaagaacaacaagagcuggauggaaagcgaguuccggguguacagcagcgccaacaacugcaccuucgaguacgugucccagccuuuccugauggaccuggaaggcaagcagggcaacuucaagaaccugcgcgaguucguguuuaagaacaucgacggcuacuucaagaucuacagcaagcacaccccuaucaaccucgugcggggccugccucagggcuucucugcucuggaaccccugguggaucugcccaucggcaucaacaucacccgguuucagacacugcacaucagcuaccugacaccuggcgauagcagcagcggauggacagcuggugccgccgcuuacuaugugggcuaccugcagccuagaaccuuccugcugaaguacaacgagaacggcaccaucaccgacgccguggauugugcucuggauccucugagcgagacaaagugcacccugaaguccuucaccguggaaaagggcaucuaccagaccagcaacuuccgggugcagcccaccgaauccaucgugcgguuccccaauaucaccaaucugugccccuucggcgagguguucaaugccaccagauucgccucuguguacgccuggaaccggaagcggaucagcaauugcguggccgacuacuccgugcuguacaacuccgccagcuucagcaccuucaagugcuacggcguguccccuaccaagcugaacgaccugugcuucacaaacguguacgccgacagcuucgugauccggggagaugaagugcggcagauugccccuggacagacaggcaacaucgccgacuacaacuacaagcugcccgacgacuucaccggcugugugauugccuggaacagcaacaaccuggacuccaaagucggcggcaacuacaauuaccuguaccggcuguuccggaaguccaaucugaagcccuucgagcgggacaucuccaccgagaucuaucaggccggcagcaccccuuguaacggcgugaagggcuucaacugcuacuucccacugcaguccuacggcuuucagcccacauacggcgugggcuaucagcccuacagagugguggugcugagcuucgaacugcugcaugccccugccacagugugcggcccuaagaaaagcaccaaucucgugaagaacaaaugcgugaacuucaacuucaacggccugaccggcaccggcgugcugacagagagcaacaagaaguuccugccauuccagcaguuuggccgggauaucgccgauaccacagacgccguuagagauccccagacacuggaaauccuggacaucaccccuugcagcuucggcggagugucugugaucaccccuggcaccaacaccagcaaucagguggcagugcuguaccagggcgugaacuguaccgaagugcccguggccauucacgccgaucagcugacaccuacauggcggguguacuccaccggcagcaauguguuucagaccagagccggcugucugaucggagccgagcacgugaacaauagcuacgagugcgacauccccaucggcgcuggaaucugcgccagcuaccagacacagacaaacagcccucggagagccagaagcguggccagccagagcaucauugccuacacaaugucucugggcguggagaacagcguggccuacuccaacaacucuaucgcuauccccaccaacuucaccaucagcgugaccacagagauccugccuguguccaugaccaagaccagcguggacugcaccauguacaucugcggcgauuccaccgagugcuccaaccugcugcugcaguacggcagcuucugcacccagcugaauagagcccugacagggaucgccguggaacaggacaagaacacccaagagguguucgcccaagugaagcagaucuacaagaccccuccuaucaaggacuucggcggcuucaauuucagccagauucugcccgauccuagcaagcccagcaagcggagcuucaucgaggaccugcuguucaacaaagugacacuggccgacgccggcuucaucaagcaguauggcgauugucugggcgacauugccgccagggaucugauuugcgcccagaaguuuaacggacugacagugcugccuccucugcugaccgaugagaugaucgcccaguacacaucugcccugcuggccggcacaaucacaagcggcuggacauuuggagcaggcgccgcucugcagauccccuuugcuaugcagauggccuaccgguucaacggcaucggagugacccagaaugugcuguacgagaaccagaagcugaucgccaaccaguucaacagcgccaucggcaagauccaggacagccugagcagcacagcaagcgcccugggaaagcugcaggacguggucaaccagaaugcccaggcacugaacacccuggucaagcagcuguccuccaacuucggcgccaucagcucugugcugaacgauauccugagcagacuggacccuccugaggccgaggugcagaucgacagacugaucacaggcagacugcagagccuccagacauacgugacccagcagcugaucagagccgccgagauuagagccucugccaaucuggccgccaccaagaugucugagugugugcugggccagagcaagagaguggacuuuugcggcaagggcuaccaccugaugagcuucccucagucugccccucacggcgugguguuucugcacgugacauaugugcccgcucaagagaagaauuucaccaccgcuccagccaucugccacgacggcaaagcccacuuuccuagagaaggcguguucguguccaacggcacccauugguucgugacacagcggaacuucuacgagccccagaucaucaccaccgacaacaccuucgugucuggcaacugcgacgucgugaucggcauugugaacaauaccguguacgacccucugcagcccgagcuggacagcuucaaagaggaacuggacaaguacuuuaagaaccacacaagccccgacguggaccugggcgauaucagcggaaucaaugccagcgucgugaacauccagaaagagaucgaccggcugaacgagguggccaagaaucugaacgagagccugaucgaccugcaagaacuggggaaguacgagcaguacaucaaguggcccugguacaucuggcugggcuuuaucgccggacugauugccaucgugauggucacaaucaugcuguguugcaugaccagcugcuguagcugccugaagggcuguuguagcuguggcagcugcugcaaguucgacgaggacgauucugagcccgugcugaagggcgugaaacugcacuacacaugaggacuaguuauaagacugacuagcccgaugggccucccaacgggcccuccuccccuccuugcaccgagauuaauagaucuaaaaaaaaaaaaaaaaaaaaaaaaaaaaaaaaaaaaaaaaaaaaaaaaaaaaaaaaaaaaaaaaaaaaaaaaaaaaaaaaaaaaaaaaaaaaaaaaaaaa

SEQ ID NO: 25822 - RNA, 4017 nt, Artificial Sequence
  SARS-CoV-2/Wuhan/WIV05/2019__EPI_ISL_402128 spike protein mRNA gc mod (1-1273)(K986P_V987P_K986P_V987P_E484K_D614G)
aggagaaagcuuaccauguucguguuccuggugcugcugccucugguguccagccagugugugaaccugaccaccagaacacagcugccuccagccuacaccaacagcuuuaccagaggcguguacuaccccgacaagguguucagauccagcgugcugcacucuacccaggaccuguuccugccuuucuucagcaacgugaccugguuccacgccauccacguguccggcaccaauggcaccaagagauucgacaaccccgugcugcccuucaacgacgggguguacuuugccagcaccgagaaguccaacaucaucagaggcuggaucuucggcaccacacuggacagcaagacccagagccugcugaucgugaacaacgccaccaacguggucaucaaagugugcgaguuccaguucugcaacgaccccuuccugggcgucuacuaccacaagaacaacaagagcuggauggaaagcgaguuccggguguacagcagcgccaacaacugcaccuucgaguacgugucccagccuuuccugauggaccuggaaggcaagcagggcaacuucaagaaccugcgcgaguucguguuuaagaacaucgacggcuacuucaagaucuacagcaagcacaccccuaucaaccucgugcgggaucugccucagggcuucucugcucuggaaccccugguggaucugcccaucggcaucaacaucacccgguuucagacacugcuggcccugcacagaagcuaccugacaccuggcgauagcagcagcggauggacagcuggugccgccgcuuacuaugugggcuaccugcagccuagaaccuuccugcugaaguacaacgagaacggcaccaucaccgacgccguggauugugcucuggauccucugagcgagacaaagugcacccugaaguccuucaccguggaaaagggcaucuaccagaccagcaacuuccgggugcagcccaccgaauccaucgugcgguuccccaauaucaccaaucugugccccuucggcgagguguucaaugccaccagauucgccucuguguacgccuggaaccggaagcggaucagcaauugcguggccgacuacuccgugcuguacaacuccgccagcuucagcaccuucaagugcuacggcguguccccuaccaagcugaacgaccugugcuucacaaacguguacgccgacagcuucgugauccggggagaugaagugcggcagauugccccuggacagacaggcaagaucgccgacuacaacuacaagcugcccgacgacuucaccggcugugugauugccuggaacagcaacaaccuggacuccaaagucggcggcaacuacaauuaccuguaccggcuguuccggaaguccaaucugaagcccuucgagcgggacaucuccaccgagaucuaucaggccggcagcaccccuuguaacggcgugaagggcuucaacugcuacuucccacugcaguccuacggcuuucagcccacaaauggcgugggcuaucagcccuacagagugguggugcugagcuucgaacugcugcaugccccugccacagugugcggcccuaagaaaagcaccaaucucgugaagaacaaaugcgugaacuucaacuucaacggccugaccggcaccggcgugcugacagagagcaacaagaaguuccugccauuccagcaguuuggccgggauaucgccgauaccacagacgccguuagagauccccagacacuggaaauccuggacaucaccccuugcagcuucggcggagugucugugaucaccccuggcaccaacaccagcaaucagguggcagugcuguaccagggcgugaacuguaccgaagugcccguggccauucacgccgaucagcugacaccuacauggcggguguacuccaccggcagcaauguguuucagaccagagccggcugucugaucggagccgagcacgugaacaauagcuacgagugcgacauccccaucggcgcuggaaucugcgccagcuaccagacacagacaaacagcccucggagagccagaagcguggccagccagagcaucauugccuacacaaugucucugggcgccgagaacagcguggccuacuccaacaacucuaucgcuauccccaccaacuucaccaucagcgugaccacagagauccugccuguguccaugaccaagaccagcguggacugcaccauguacaucugcggcgauuccaccgagugcuccaaccugcugcugcaguacggcagcuucugcacccagcugaauagagcccugacagggaucgccguggaacaggacaagaacacccaagagguguucgcccaagugaagcagaucuacaagaccccuccuaucaaggacuucggcggcuucaauuucagccagauucugcccgauccuagcaagcccagcaagcggagcuucaucgaggaccugcuguucaacaaagugacacuggccgacgccggcuucaucaagcaguauggcgauugucugggcgacauugccgccagggaucugauuugcgcccagaaguuuaacggacugacagugcugccuccucugcugaccgaugagaugaucgcccaguacacaucugcccugcuggccggcacaaucacaagcggcuggacauuuggagcaggcgccgcucugcagauccccuuugcuaugcagauggccuaccgguucaacggcaucggagugacccagaaugugcuguacgagaaccagaagcugaucgccaaccaguucaacagcgccaucggcaagauccaggacagccugagcagcacagcaagcgcccugggaaagcugcaggacguggucaaccagaaugcccaggcacugaacacccuggucaagcagcuguccuccaacuucggcgccaucagcucugugcugaacgauauccugagcagacuggacccuccugaggccgaggugcagaucgacagacugaucacaggcagacugcagagccuccagacauacgugacccagcagcugaucagagccgccgagauuagagccucugccaaucuggccgccaccaagaugucugagugugugcugggccagagcaagagaguggacuuuugcggcaagggcuaccaccugaugagcuucccucagucugccccucacggcgugguguuucugcacgugacauaugugcccgcucaagagaagaauuucaccaccgcuccagccaucugccacgacggcaaagcccacuuuccuagagaaggcguguucguguccaacggcacccauugguucgugacacagcggaacuucuacgagccccagaucaucaccaccgacaacaccuucgugucuggcaacugcgacgucgugaucggcauugugaacaauaccguguacgacccucugcagcccgagcuggacagcuucaaagaggaacuggacaaguacuuuaagaaccacacaagccccgacguggaccugggcgauaucagcggaaucaaugccagcgucgugaacauccagaaagagaucgaccggcugaacgagguggccaagaaucugaacgagagccugaucgaccugcaagaacuggggaaguacgagcaguacaucaaguggcccugguacaucuggcugggcuuuaucgccggacugauugccaucgugauggucacaaucaugcuguguugcaugaccagcugcuguagcugccugaagggcuguuguagcuguggcagcugcugcaaguucgacgaggacgauucugagcccgugcugaagggcgugaaacugcacuacacaugaggacuaguuauaagacugacuagcccgaugggccucccaacgggcccuccuccccuccuugcaccgagauuaauagaucuaaaaaaaaaaaaaaaaaaaaaaaaaaaaaaaaaaaaaaaaaaaaaaaaaaaaaaaaaaaaaaaaaaaaaaaaaaaaaaaaaaaaaaaaaaaaaaaaaaaa

SEQ ID NO: 25823 - RNA, 4017 nt, Artificial Sequence
  SARS-CoV-2/Wuhan/WIV05/2019__EPI_ISL_402128 spike protein mRNA gc mod (1-1273)(K986P_V987P_K986P_V987P_L18F_T20N_P26S_D138Y_R190S_K417T _E484K_N501Y_D614G_H655Y_T1027I)
aggagaaagcuuaccauguucguguuccuggugcugcugccucugguguccagccagugugugaacuucaccaacagaacacagcugccuagcgccuacaccaacagcuuuaccagaggcguguacuaccccgacaagguguucagauccagcgugcugcacucuacccaggaccuguuccugccuuucuucagcaacgugaccugguuccacgccauccacguguccggcaccaauggcaccaagagauucgacaaccccgugcugcccuucaacgacgggguguacuuugccagcaccgagaaguccaacaucaucagaggcuggaucuucggcaccacacuggacagcaagacccagagccugcugaucgugaacaacgccaccaacguggucaucaaagugugcgaguuccaguucugcaacuaccccuuccugggcgucuacuaccacaagaacaacaagagcuggauggaaagcgaguuccggguguacagcagcgccaacaacugcaccuucgaguacgugucccagccuuuccugauggaccuggaaggcaagcagggcaacuucaagaaccugagcgaguucguguuuaagaacaucgacggcuacuucaagaucuacagcaagcacaccccuaucaaccucgugcgggaucugccucagggcuucucugcucuggaaccccugguggaucugcccaucggcaucaacaucacccgguuucagacacugcuggcccugcacagaagcuaccugacaccuggcgauagcagcagcggauggacagcuggugccgccgcuuacuaugugggcuaccugcagccuagaaccuuccugcugaaguacaacgagaacggcaccaucaccgacgccguggauugugcucuggauccucugagcgagacaaagugcacccugaaguccuucaccguggaaaagggcaucuaccagaccagcaacuuccgggugcagcccaccgaauccaucgugcgguuccccaauaucaccaaucugugccccuucggcgagguguucaaugccaccagauucgccucuguguacgccuggaaccggaagcggaucagcaauugcguggccgacuacuccgugcuguacaacuccgccagcuucagcaccuucaagugcuacggcguguccccuaccaagcugaacgaccugugcuucacaaacguguacgccgacagcuucgugauccggggagaugaagugcggcagauugccccuggacagacaggcaccaucgccgacuacaacuacaagcugcccgacgacuucaccggcugugugauugccuggaacagcaacaaccuggacuccaaagucggcggcaacuacaauuaccuguaccggcuguuccggaaguccaaucugaagcccuucgagcgggacaucuccaccgagaucuaucaggccggcagcaccccuuguaacggcgugaagggcuucaacugcuacuucccacugcaguccuacggcuuucagcccacauacggcgugggcuaucagcccuacagagugguggugcugagcuucgaacugcugcaugccccugccacagugugcggcccuaagaaaagcaccaaucucgugaagaacaaaugcgugaacuucaacuucaacggccugaccggcaccggcgugcugacagagagcaacaagaaguuccugccauuccagcaguuuggccgggauaucgccgauaccacagacgccguuagagauccccagacacuggaaauccuggacaucaccccuugcagcuucggcggagugucugugaucaccccuggcaccaacaccagcaaucagguggcagugcuguaccagggcgugaacuguaccgaagugcccguggccauucacgccgaucagcugacaccuacauggcggguguacuccaccggcagcaauguguuucagaccagagccggcugucugaucggagccgaguacgugaacaauagcuacgagugcgacauccccaucggcgcuggaaucugcgccagcuaccagacacagacaaacagcccucggagagccagaagcguggccagccagagcaucauugccuacacaaugucucugggcgccgagaacagcguggccuacuccaacaacucuaucgcuauccccaccaacuucaccaucagcgugaccacagagauccugccuguguccaugaccaagaccagcguggacugcaccauguacaucugcggcgauuccaccgagugcuccaaccugcugcugcaguacggcagcuucugcacccagcugaauagagcccugacagggaucgccguggaacaggacaagaacacccaagagguguucgcccaagugaagcagaucuacaagaccccuccuaucaaggacuucggcggcuucaauuucagccagauucugcccgauccuagcaagcccagcaagcggagcuucaucgaggaccugcuguucaacaaagugacacuggccgacgccggcuucaucaagcaguauggcgauugucugggcgacauugccgccagggaucugauuugcgcccagaaguuuaacggacugacagugcugccuccucugcugaccgaugagaugaucgcccaguacacaucugcccugcuggccggcacaaucacaagcggcuggacauuuggagcaggcgccgcucugcagauccccuuugcuaugcagauggccuaccgguucaacggcaucggagugacccagaaugugcuguacgagaaccagaagcugaucgccaaccaguucaacagcgccaucggcaagauccaggacagccugagcagcacagcaagcgcccugggaaagcugcaggacguggucaaccagaaugcccaggcacugaacacccuggucaagcagcuguccuccaacuucggcgccaucagcucugugcugaacgauauccugagcagacuggacccuccugaggccgaggugcagaucgacagacugaucacaggcagacugcagagccuccagacauacgugacccagcagcugaucagagccgccgagauuagagccucugccaaucuggccgccaucaagaugucugagugugugcugggccagagcaagagaguggacuuuugcggcaagggcuaccaccugaugagcuucccucagucugccccucacggcgugguguuucugcacgugacauaugugcccgcucaagagaagaauuucaccaccgcuccagccaucugccacgacggcaaagcccacuuuccuagagaaggcguguucguguccaacggcacccauugguucgugacacagcggaacuucuacgagccccagaucaucaccaccgacaacaccuucgugucuggcaacugcgacgucgugaucggcauugugaacaauaccguguacgacccucugcagcccgagcuggacagcuucaaagaggaacuggacaaguacuuuaagaaccacacaagccccgacguggaccugggcgauaucagcggaaucaaugccagcgucgugaacauccagaaagagaucgaccggcugaacgagguggccaagaaucugaacgagagccugaucgaccugcaagaacuggggaaguacgagcaguacaucaaguggcccugguacaucuggcugggcuuuaucgccggacugauugccaucgugauggucacaaucaugcuguguugcaugaccagcugcuguagcugccugaagggcuguuguagcuguggcagcugcugcaaguucgacgaggacgauucugagcccgugcugaagggcgugaaacugcacuacacaugaggacuaguuauaagacugacuagcccgaugggccucccaacgggcccuccuccccuccuugcaccgagauuaauagaucuaaaaaaaaaaaaaaaaaaaaaaaaaaaaaaaaaaaaaaaaaaaaaaaaaaaaaaaaaaaaaaaaaaaaaaaaaaaaaaaaaaaaaaaaaaaaaaaaaaaa

SEQ ID NO: 25824 - RNA, 4017 nt, Artificial Sequence
  SARS-CoV-2/Wuhan/WIV05/2019__EPI_ISL_402128 spike protein mRNA gc mod (1-1273)(K986P_V987P_K986P_V987P_S13I_W152C_L452R_D614G)
aggagaaagcuuaccauguucguguuccuggugcugcugccucugguguccauccagugugugaaccugaccaccagaacacagcugccuccagccuacaccaacagcuuuaccagaggcguguacuaccccgacaagguguucagauccagcgugcugcacucuacccaggaccuguuccugccuuucuucagcaacgugaccugguuccacgccauccacguguccggcaccaauggcaccaagagauucgacaaccccgugcugcccuucaacgacgggguguacuuugccagcaccgagaaguccaacaucaucagaggcuggaucuucggcaccacacuggacagcaagacccagagccugcugaucgugaacaacgccaccaacguggucaucaaagugugcgaguuccaguucugcaacgaccccuuccugggcgucuacuaccacaagaacaacaagagcugcauggaaagcgaguuccggguguacagcagcgccaacaacugcaccuucgaguacgugucccagccuuuccugauggaccuggaaggcaagcagggcaacuucaagaaccugcgcgaguucguguuuaagaacaucgacggcuacuucaagaucuacagcaagcacaccccuaucaaccucgugcgggaucugccucagggcuucucugcucuggaaccccugguggaucugcccaucggcaucaacaucacccgguuucagacacugcuggcccugcacagaagcuaccugacaccuggcgauagcagcagcggauggacagcuggugccgccgcuuacuaugugggcuaccugcagccuagaaccuuccugcugaaguacaacgagaacggcaccaucaccgacgccguggauugugcucuggauccucugagcgagacaaagugcacccugaaguccuucaccguggaaaagggcaucuaccagaccagcaacuuccgggugcagcccaccgaauccaucgugcgguuccccaauaucaccaaucugugccccuucggcgagguguucaaugccaccagauucgccucuguguacgccuggaaccggaagcggaucagcaauugcguggccgacuacuccgugcuguacaacuccgccagcuucagcaccuucaagugcuacggcguguccccuaccaagcugaacgaccugugcuucacaaacguguacgccgacagcuucgugauccggggagaugaagugcggcagauugccccuggacagacaggcaagaucgccgacuacaacuacaagcugcccgacgacuucaccggcugugugauugccuggaacagcaacaaccuggacuccaaagucggcggcaacuacaauuaccgcuaccggcuguuccggaaguccaaucugaagcccuucgagcgggacaucuccaccgagaucuaucaggccggcagcaccccuuguaacggcguggaaggcuucaacugcuacuucccacugcaguccuacggcuuucagcccacaaauggcgugggcuaucagcccuacagagugguggugcugagcuucgaacugcugcaugccccugccacagugugcggcccuaagaaaagcaccaaucucgugaagaacaaaugcgugaacuucaacuucaacggccugaccggcaccggcgugcugacagagagcaacaagaaguuccugccauuccagcaguuuggccgggauaucgccgauaccacagacgccguuagagauccccagacacuggaaauccuggacaucaccccuugcagcuucggcggagugucugugaucaccccuggcaccaacaccagcaaucagguggcagugcuguaccagggcgugaacuguaccgaagugcccguggccauucacgccgaucagcugacaccuacauggcggguguacuccaccggcagcaauguguuucagaccagagccggcugucugaucggagccgagcacgugaacaauagcuacgagugcgacauccccaucggcgcuggaaucugcgccagcuaccagacacagacaaacagcccucggagagccagaagcguggccagccagagcaucauugccuacacaaugucucugggcgccgagaacagcguggccuacuccaacaacucuaucgcuauccccaccaacuucaccaucagcgugaccacagagauccugccuguguccaugaccaagaccagcguggacugcaccauguacaucugcggcgauuccaccgagugcuccaaccugcugcugcaguacggcagcuucugcacccagcugaauagagcccugacagggaucgccguggaacaggacaagaacacccaagagguguucgcccaagugaagcagaucuacaagaccccuccuaucaaggacuucggcggcuucaauuucagccagauucugcccgauccuagcaagcccagcaagcggagcuucaucgaggaccugcuguucaacaaagugacacuggccgacgccggcuucaucaagcaguauggcgauugucugggcgacauugccgccagggaucugauuugcgcccagaaguuuaacggacugacagugcugccuccucugcugaccgaugagaugaucgcccaguacacaucugcccugcuggccggcacaaucacaagcggcuggacauuuggagcaggcgccgcucugcagauccccuuugcuaugcagauggccuaccgguucaacggcaucggagugacccagaaugugcuguacgagaaccagaagcugaucgccaaccaguucaacagcgccaucggcaagauccaggacagccugagcagcacagcaagcgcccugggaaagcugcaggacguggucaaccagaaugcccaggcacugaacacccuggucaagcagcuguccuccaacuucggcgccaucagcucugugcugaacgauauccugagcagacuggacccuccugaggccgaggugcagaucgacagacugaucacaggcagacugcagagccuccagacauacgugacccagcagcugaucagagccgccgagauuagagccucugccaaucuggccgccaccaagaugucugagugugugcugggccagagcaagagaguggacuuuugcggcaagggcuaccaccugaugagcuucccucagucugccccucacggcgugguguuucugcacgugacauaugugcccgcucaagagaagaauuucaccaccgcuccagccaucugccacgacggcaaagcccacuuuccuagagaaggcguguucguguccaacggcacccauugguucgugacacagcggaacuucuacgagccccagaucaucaccaccgacaacaccuucgugucuggcaacugcgacgucgugaucggcauugugaacaauaccguguacgacccucugcagcccgagcuggacagcuucaaagaggaacuggacaaguacuuuaagaaccacacaagccccgacguggaccugggcgauaucagcggaaucaaugccagcgucgugaacauccagaaagagaucgaccggcugaacgagguggccaagaaucugaacgagagccugaucgaccugcaagaacuggggaaguacgagcaguacaucaaguggcccugguacaucuggcugggcuuuaucgccggacugauugccaucgugauggucacaaucaugcuguguugcaugaccagcugcuguagcugccugaagggcuguuguagcuguggcagcugcugcaaguucgacgaggacgauucugagcccgugcugaagggcgugaaacugcacuacacaugaggacuaguuauaagacugacuagcccgaugggccucccaacgggcccuccuccccuccuugcaccgagauuaauagaucuaaaaaaaaaaaaaaaaaaaaaaaaaaaaaaaaaaaaaaaaaaaaaaaaaaaaaaaaaaaaaaaaaaaaaaaaaaaaaaaaaaaaaaaaaaaaaaaaaaaa

SEQ ID NO: 25825 - RNA, 1341 nt, Artificial Sequence
  SARS-CoV-2/Wuhan/WIV05/2019__EPI_ISL_402128 spike protein mRNA gc (1-15,334-528) Ferritin construct
aggagaaagcuuaccauguucguguuccugguccuccugccccuggugagcucccagugcaaccugugccccuucggcgagguguucaacgccacccgguucgccagcgucuacgccuggaaccgcaagcggaucuccaacugcguggcggacuacagcgugcuguacaacuccgccagcuucuccacguucaagugcuacggcgucagccccaccaagcucaacgaccugugcuucaccaacguguacgccgacuccuucgugauccgcggggacgagguccggcagaucgcccccggccagaccgggaagaucgccgacuacaacuacaagcugccggacgacuucacgggcugcgugaucgcguggaacagcaacaaccucgacuccaaggucgggggcaacuacaacuaccuguaccgccuguuccgcaagagcaaccucaagcccuucgagcgggacaucuccaccgagaucuaccaggccggcagcacccccugcaacgggguggagggcuucaacugcuacuucccccugcaguccuacggguuccagccgaccaacggcgugggguaccagcccuaccggguggucgugcugagcuucgagcuccugcacgcccccgccacggugugcggccccaagggcggggguggaagcggcggggguggaagugacaucaucaagcuccugaacgagcaggucaacaaggagaugcaguccagcaaccuguacauguccaugagcuccuggugcuacacccacagccucgacggcgccgggcuguuccuguucgaccacgccgcggaggaguacgagcacgccaagaagcucaucaucuuccugaacgagaacaacgugcccgugcagcugaccuccaucagcgccccggagcacaaguucgagggccucacgcagaucuuccagaaggccuacgagcacgagcagcacaucuccgagagcaucaacaacaucguggaccacgccaucaaguccaaggaccacgcgaccuucaacuuccugcagugguacgucgccgagcagcacgaggaggaggugcuguucaaggacauccucgacaagaucgagcugaucgggaacgagaaccacggccuguaccucgccgaccaguacgugaaggggaucgccaagagccgcaaguccugaggacuaguuauaagacugacuagcccgaugggccucccaacgggcccuccuccccuccuugcaccgagagaucuaaaaaaaaaaaaaaaaaaaaaaaaaaaaaaaaaaaaaaaaaaaaaaaaaaaaaaaaaaaaaaaaaaaaaaaaaaaaaaaaaaaaaaaaaaaaaaaaaaaa

SEQ ID NO: 25826 - RNA, 939 nt, Artificial Sequence
  SARS-CoV-2/Wuhan/WIV05/2019__EPI_ISL_402128 spike protein mRNA gc (334-528) Foldon construct
aggagaaagcuuaccaugcccaugggcagccugcagccgcucgccacccuguaccugcucgggaugcugguggccuccguccuggcgaaccugugccccuucggcgagguguucaacgccacccgguucgccagcgucuacgccuggaaccgcaagcggaucuccaacugcguggcggacuacagcgugcuguacaacuccgccagcuucuccacguucaagugcuacggcgucagccccaccaagcucaacgaccugugcuucaccaacguguacgccgacuccuucgugauccgcggggacgagguccggcagaucgcccccggccagaccgggaagaucgccgacuacaacuacaagcugccggacgacuucacgggcugcgugaucgcguggaacagcaacaaccucgacuccaaggucgggggcaacuacaacuaccuguaccgccuguuccgcaagagcaaccucaagcccuucgagcgggacaucuccaccgagaucuaccaggccggcagcacccccugcaacgggguggagggcuucaacugcuacuucccccugcaguccuacggguuccagccgaccaacggcgugggguaccagcccuaccggguggucgugcugagcuucgagcuccugcacgcccccgccacggugugcggccccaagggcagcggcggguacauccccgaggccccgcgcgacggccaggccuacgugcggaaggacggcgaguggguccugcugagcaccuuccucugaggacuaguuauaagacugacuagcccgaugggccucccaacgggcccuccuccccuccuugcaccgagagaucuaaaaaaaaaaaaaaaaaaaaaaaaaaaaaaaaaaaaaaaaaaaaaaaaaaaaaaaaaaaaaaaaaaaaaaaaaaaaaaaaaaaaaaaaaaaaaaaaaaaa

SEQ ID NO: 25827 - RNA, 1317 nt, Artificial Sequence
  SARS-CoV-2/Wuhan/WIV05/2019__EPI_ISL_402128 spike protein mRNA gc (1-15,334-528) LumSynth construct
aggagaaagcuuaccauguucguguuccugguccuccugccccuggugagcucccagugcaaccugugccccuucggcgagguguucaacgccacccgguucgccagcgucuacgccuggaaccgcaagcggaucuccaacugcguggcggacuacagcgugcuguacaacuccgccagcuucuccacguucaagugcuacggcgucagccccaccaagcucaacgaccugugcuucaccaacguguacgccgacuccuucgugauccgcggggacgagguccggcagaucgcccccggccagaccgggaagaucgccgacuacaacuacaagcugccggacgacuucacgggcugcgugaucgcguggaacagcaacaaccucgacuccaaggucgggggcaacuacaacuaccuguaccgccuguuccgcaagagcaaccucaagcccuucgagcgggacaucuccaccgagaucuaccaggccggcagcacccccugcaacgggguggagggcuucaacugcuacuucccccugcaguccuacggguuccagccgaccaacggcgugggguaccagcccuaccggguggucgugcugagcuucgagcuccugcacgcccccgccacggugugcggccccaagggcggcggcggcuccggaggcggagguagcgggggacagaucuacgagggcaagcugaccgccgaggggcuccgcuucggcaucguggccagccgguucaaccacgcgcuggucgaccgccugguggagggggccaucgacgccaucgugcggcacggcgggcgcgaggaggacaucacccucguccgggugcccggcuccugggagaucccgguggccgccggcgagcuggcccgcaaggaggacaucgacgcggucaucgccaucggggugcugauccggggcgccacgccccacuucgacuacaucgccagcgagguguccaaggggcucgcggaccugagccuggagcuccgcaagcccaucaccuucggcgucaucaccgccgacacccuggagcaggccaucgagcgggccgggacgaagcacggcaacaagggcugggaggccgcgcuguccgccaucgagauggccaaccucuucaagagccugcgcugaggacuaguuauaagacugacuagcccgaugggccucccaacgggcccuccuccccuccuugcaccgagagaucuaaaaaaaaaaaaaaaaaaaaaaaaaaaaaaaaaaaaaaaaaaaaaaaaaaaaaaaaaaaaaaaaaaaaaaaaaaaaaaaaaaaaaaaaaaaaaaaaaaaa

SEQ ID NO: 25828 - RNA, 1278 nt, Artificial Sequence
  SARS-CoV-2/Wuhan/WIV05/2019__EPI_ISL_402128 spike protein mRNA gc (334-528) LumSynth construct
aggagaaagcuuaccaugcagaucuacgagggcaagcugaccgccgaggggcuccgcuucggcaucguggccagccgguucaaccacgcgcuggucgaccgccugguggagggggccaucgacgccaucgugcggcacggcgggcgcgaggaggacaucacccucguccgggugcccggcuccugggagaucccgguggccgccggcgagcuggcccgcaaggaggacaucgacgcggucaucgccaucggggugcugauccggggcgccacgccccacuucgacuacaucgccagcgagguguccaaggggcucgcggaccugagccuggagcuccgcaagcccaucaccuucggcgucaucaccgccgacacccuggagcaggccaucgagcgggccgggacgaagcacggcaacaagggcugggaggccgcgcuguccgccaucgagauggccaaccucuucaagagccugcgcggcgggggcgggagcggcgggggcggcuccgggggcgggaaccugugccccuucggcgagguguucaacgccacccgguucgccagcgucuacgccuggaaccgcaagcggaucuccaacugcguggcggacuacagcgugcuguacaacuccgccagcuucuccacguucaagugcuacggcgucagccccaccaagcucaacgaccugugcuucaccaacguguacgccgacuccuucgugauccgcggggacgagguccggcagaucgcccccggccagaccgggaagaucgccgacuacaacuacaagcugccggacgacuucacgggcugcgugaucgcguggaacagcaacaaccucgacuccaaggucgggggcaacuacaacuaccuguaccgccuguuccgcaagagcaaccucaagcccuucgagcgggacaucuccaccgagaucuaccaggccggcagcacccccugcaacgggguggagggcuucaacugcuacuucccccugcaguccuacggguuccagccgaccaacggcgugggguaccagcccuaccggguggucgugcugagcuucgagcuccugcacgcccccgccacggugugcggccccaagugaggacuaguuauaagacugacuagcccgaugggccucccaacgggcccuccuccccuccuugcaccgagagaucuaaaaaaaaaaaaaaaaaaaaaaaaaaaaaaaaaaaaaaaaaaaaaaaaaaaaaaaaaaaaaaaaaaaaaaaaaaaaaaaaaaaaaaaaaaaaaaaaaaaa

SEQ ID NO: 25829 - RNA, 4011 nt, Artificial Sequence
  SARS-CoV-2/Wuhan/WIV05/2019__EPI_ISL_402128 spike protein mRNA gc (1-1273)
aggagaaagcuuaccauguucguguuccugguccuccugccccuggugagcucccagugcgugaaccucaccacccgcacgcagcugccgcccgccuacaccaacagcuucacccggggcgucuacuaccccgacaagguguuccgcuccagcgugcugcacuccacccaggaccucuuccugcccuucuucagcaacgucacgugguuccacgccauccacguguccgggaccaacggcaccaagcgguucgacaacccggugcugcccuucaacgacggggucuacuucgcgagcaccgagaaguccaacaucauccgcggcuggaucuucgggacgacccucgacagcaagacccagucccugcugaucgugaacaacgccaccaacguggucaucaaggugugcgaguuccaguucugcaacgaccccuuccucggcguguacuaccacaagaacaacaagagcuggauggaguccgaguuccgggucuacagcuccgccaacaacugcacguucgaguacgugagccagcccuuccugauggaccuggagggcaagcaggggaacuucaagaaccuccgcgaguucguguucaagaacaucgacggcuacuucaagaucuacuccaagcacaccccgaucaaccugguccgggaccugccccagggguucagcgcccucgagccccugguggaccugcccaucggcaucaacaucacccgcuuccagacccuccuggcccugcaccgguccuaccucacgccgggggacagcagcuccggcuggaccgcgggcgccgccgccuacuacgugggguaccugcagccccgcaccuuccugcucaaguacaacgagaacggcaccaucacggacgcggucgacugcgcccuggacccccugagcgagaccaagugcacccucaaguccuucaccguggagaaggggaucuaccagacgagcaacuuccgggugcagcccaccgaguccaucguccgcuucccgaacaucaccaaccugugccccuucggcgagguguucaacgccacccgguucgccagcgucuacgccuggaaccgcaagcggaucuccaacugcguggcggacuacagcgugcuguacaacuccgccagcuucuccacguucaagugcuacggcgucagccccaccaagcucaacgaccugugcuucaccaacguguacgccgacuccuucgugauccgcggggacgagguccggcagaucgcccccggccagaccgggaagaucgccgacuacaacuacaagcugccggacgacuucacgggcugcgugaucgcguggaacagcaacaaccucgacuccaaggucgggggcaacuacaacuaccuguaccgccuguuccgcaagagcaaccucaagcccuucgagcgggacaucuccaccgagaucuaccaggccggcagcacccccugcaacgggguggagggcuucaacugcuacuucccccugcaguccuacggguuccagccgaccaacggcgugggguaccagcccuaccggguggucgugcugagcuucgagcuccugcacgcccccgccacggugugcggccccaagaaguccaccaaccuggucaagaacaagugcgugaacuucaacuucaacggccucaccgggaccggcgugcugaccgagagcaacaagaaguuccugccguuccagcaguucgggcgcgacaucgccgacacgaccgacgcgguccgcgacccccagacccuggagauccucgacaucacccccugcagcuucggcgggguguccgugaucacgccgggcaccaacaccagcaaccaggucgccgugcuguaccaggacgugaacugcaccgagguccccguggccauccacgccgaccagcugacgcccaccuggcggguguacuccaccggcagcaacgucuuccagacccgcgccgggugccucaucggcgcggagcacgugaacaacuccuacgagugcgacauccccaucggggccggcaucugcgccagcuaccagacgcagaccaacuccccgcggcgcgcccggagcguggcgucccagagcaucaucgccuacaccaugucccugggcgccgagaacagcgucgccuacuccaacaacagcaucgccauccccaccaacuucacgaucuccgugaccaccgagauccugcccgugagcaugaccaagacgagcgucgacugcaccauguacaucugcggggacuccaccgagugcagcaaccuccugcugcaguacggcuccuucugcacccagcucaaccgcgcgcugacggggaucgccguggagcaggacaagaacacccaggagguguucgcccaggucaagcagaucuacaagacgcccccgaucaaggacuucggcggguucaacuucagccagauccugcccgaccccuccaagcccagcaagcgguccuucaucgaggaccuccuguucaacaaggugacccuggccgacgccggcuucaucaagcaguacggcgacugccucggggacaucgcggcccgcgaccugaucugcgcccagaaguucaacggccugaccgugcucccgccccugcugaccgacgagaugaucgcccaguacaccagcgcccuccuggcggggaccaucacguccggcuggaccuucggggccggcgccgcccugcagauccccuucgcgaugcagauggccuaccgguucaacggcaucggggucacccagaacgugcucuacgagaaccagaagcugaucgccaaccaguucaacagcgccaucggcaagauccaggacucccugagcuccaccgccagcgcgcucgggaagcugcaggacguggucaaccagaacgcccaggcccugaacacgcucgugaagcagcuguccagcaacuucggcgccaucuccagcgugcugaacgacauccucucccgccuggacaaggucgaggccgaggugcagaucgaccggcugaucaccgggcgccuccagagccugcagaccuacgugacccagcagcugauccgggcggccgagauccgcgccagcgccaaccucgccgcgaccaagauguccgagugcguccugggccagagcaagcggguggacuucugcggcaagggguaccaccugauguccuucccccagagcgccccgcacggcguggucuuccuccacgugacguacguccccgcccaggagaagaacuucaccaccgcccccgcgaucugccacgacgggaaggcccacuucccccgcgagggcguguucguguccaacgggacccacugguucgucacgcagcggaacuucuacgagccgcagaucaucaccaccgacaacaccuucgugagcggcaacugcgacguggucaucggcaucgugaacaacacgguguacgacccccugcagcccgagcuggacuccuucaaggaggagcucgacaaguacuucaagaaccacaccagccccgacgucgaccugggggacaucuccggcaucaacgccagcguggugaacauccagaaggagaucgaccgccugaacgaggucgccaagaaccucaacgagucccugaucgaccugcaggagcucgggaaguacgagcaguacaucaaguggccgugguacaucuggcugggcuucaucgccggccugaucgcgaucgugauggugaccaucaugcucugcugcaugaccagcugcugcuccugccugaaggggugcugcagcugcggcuccugcugcaaguucgacgaggacgacagcgagcccguccugaagggggugaagcuccacuacacgugaggacuaguuauaagacugacuagcccgaugggccucccaacgggcccuccuccccuccuugcaccgagagaucuaaaaaaaaaaaaaaaaaaaaaaaaaaaaaaaaaaaaaaaaaaaaaaaaaaaaaaaaaaaaaaaaaaaaaaaaaaaaaaaaaaaaaaaaaaaaaaaaaaaa

SEQ ID NO: 25830 - RNA, 4011 nt, Artificial Sequence
  SARS-CoV-2/Wuhan/WIV05/2019__EPI_ISL_402128 spike protein mRNA gc (1-1273)(D614G)
aggagaaagcuuaccauguucguguuccugguccuccugccccuggugagcucccagugcgugaaccucaccacccgcacgcagcugccgcccgccuacaccaacagcuucacccggggcgucuacuaccccgacaagguguuccgcuccagcgugcugcacuccacccaggaccucuuccugcccuucuucagcaacgucacgugguuccacgccauccacguguccgggaccaacggcaccaagcgguucgacaacccggugcugcccuucaacgacggggucuacuucgcgagcaccgagaaguccaacaucauccgcggcuggaucuucgggacgacccucgacagcaagacccagucccugcugaucgugaacaacgccaccaacguggucaucaaggugugcgaguuccaguucugcaacgaccccuuccucggcguguacuaccacaagaacaacaagagcuggauggaguccgaguuccgggucuacagcuccgccaacaacugcacguucgaguacgugagccagcccuuccugauggaccuggagggcaagcaggggaacuucaagaaccuccgcgaguucguguucaagaacaucgacggcuacuucaagaucuacuccaagcacaccccgaucaaccugguccgggaccugccccagggguucagcgcccucgagccccugguggaccugcccaucggcaucaacaucacccgcuuccagacccuccuggcccugcaccgguccuaccucacgccgggggacagcagcuccggcuggaccgcgggcgccgccgccuacuacgugggguaccugcagccccgcaccuuccugcucaaguacaacgagaacggcaccaucacggacgcggucgacugcgcccuggacccccugagcgagaccaagugcacccucaaguccuucaccguggagaaggggaucuaccagacgagcaacuuccgggugcagcccaccgaguccaucguccgcuucccgaacaucaccaaccugugccccuucggcgagguguucaacgccacccgguucgccagcgucuacgccuggaaccgcaagcggaucuccaacugcguggcggacuacagcgugcuguacaacuccgccagcuucuccacguucaagugcuacggcgucagccccaccaagcucaacgaccugugcuucaccaacguguacgccgacuccuucgugauccgcggggacgagguccggcagaucgcccccggccagaccgggaagaucgccgacuacaacuacaagcugccggacgacuucacgggcugcgugaucgcguggaacagcaacaaccucgacuccaaggucgggggcaacuacaacuaccuguaccgccuguuccgcaagagcaaccucaagcccuucgagcgggacaucuccaccgagaucuaccaggccggcagcacccccugcaacgggguggagggcuucaacugcuacuucccccugcaguccuacggguuccagccgaccaacggcgugggguaccagcccuaccggguggucgugcugagcuucgagcuccugcacgcccccgccacggugugcggccccaagaaguccaccaaccuggucaagaacaagugcgugaacuucaacuucaacggccucaccgggaccggcgugcugaccgagagcaacaagaaguuccugccguuccagcaguucgggcgcgacaucgccgacacgaccgacgcgguccgcgacccccagacccuggagauccucgacaucacccccugcagcuucggcgggguguccgugaucacgccgggcaccaacaccagcaaccaggucgccgugcuguaccagggcgugaacugcaccgagguccccguggccauccacgccgaccagcugacgcccaccuggcggguguacuccaccggcagcaacgucuuccagacccgcgccgggugccucaucggcgcggagcacgugaacaacuccuacgagugcgacauccccaucggggccggcaucugcgccagcuaccagacgcagaccaacuccccgcggcgcgcccggagcguggcgucccagagcaucaucgccuacaccaugucccugggcgccgagaacagcgucgccuacuccaacaacagcaucgccauccccaccaacuucacgaucuccgugaccaccgagauccugcccgugagcaugaccaagacgagcgucgacugcaccauguacaucugcggggacuccaccgagugcagcaaccuccugcugcaguacggcuccuucugcacccagcucaaccgcgcgcugacggggaucgccguggagcaggacaagaacacccaggagguguucgcccaggucaagcagaucuacaagacgcccccgaucaaggacuucggcggguucaacuucagccagauccugcccgaccccuccaagcccagcaagcgguccuucaucgaggaccuccuguucaacaaggugacccuggccgacgccggcuucaucaagcaguacggcgacugccucggggacaucgcggcccgcgaccugaucugcgcccagaaguucaacggccugaccgugcucccgccccugcugaccgacgagaugaucgcccaguacaccagcgcccuccuggcggggaccaucacguccggcuggaccuucggggccggcgccgcccugcagauccccuucgcgaugcagauggccuaccgguucaacggcaucggggucacccagaacgugcucuacgagaaccagaagcugaucgccaaccaguucaacagcgccaucggcaagauccaggacucccugagcuccaccgccagcgcgcucgggaagcugcaggacguggucaaccagaacgcccaggcccugaacacgcucgugaagcagcuguccagcaacuucggcgccaucuccagcgugcugaacgacauccucucccgccuggacaaggucgaggccgaggugcagaucgaccggcugaucaccgggcgccuccagagccugcagaccuacgugacccagcagcugauccgggcggccgagauccgcgccagcgccaaccucgccgcgaccaagauguccgagugcguccugggccagagcaagcggguggacuucugcggcaagggguaccaccugauguccuucccccagagcgccccgcacggcguggucuuccuccacgugacguacguccccgcccaggagaagaacuucaccaccgcccccgcgaucugccacgacgggaaggcccacuucccccgcgagggcguguucguguccaacgggacccacugguucgucacgcagcggaacuucuacgagccgcagaucaucaccaccgacaacaccuucgugagcggcaacugcgacguggucaucggcaucgugaacaacacgguguacgacccccugcagcccgagcuggacuccuucaaggaggagcucgacaaguacuucaagaaccacaccagccccgacgucgaccugggggacaucuccggcaucaacgccagcguggugaacauccagaaggagaucgaccgccugaacgaggucgccaagaaccucaacgagucccugaucgaccugcaggagcucgggaaguacgagcaguacaucaaguggccgugguacaucuggcugggcuucaucgccggccugaucgcgaucgugauggugaccaucaugcucugcugcaugaccagcugcugcuccugccugaaggggugcugcagcugcggcuccugcugcaaguucgacgaggacgacagcgagcccguccugaagggggugaagcuccacuacacgugaggacuaguuauaagacugacuagcccgaugggccucccaacgggcccuccuccccuccuugcaccgagagaucuaaaaaaaaaaaaaaaaaaaaaaaaaaaaaaaaaaaaaaaaaaaaaaaaaaaaaaaaaaaaaaaaaaaaaaaaaaaaaaaaaaaaaaaaaaaaaaaaaaaa

SEQ ID NO: 25831 - RNA, 4011 nt, Artificial Sequence
  SARS-CoV-2/Wuhan/WIV05/2019__EPI_ISL_402128 spike protein mRNA gc (1-1273)(A222V_D614G)
aggagaaagcuuaccauguucguguuccugguccuccugccccuggugagcucccagugcgugaaccucaccacccgcacgcagcugccgcccgccuacaccaacagcuucacccggggcgucuacuaccccgacaagguguuccgcuccagcgugcugcacuccacccaggaccucuuccugcccuucuucagcaacgucacgugguuccacgccauccacguguccgggaccaacggcaccaagcgguucgacaacccggugcugcccuucaacgacggggucuacuucgcgagcaccgagaaguccaacaucauccgcggcuggaucuucgggacgacccucgacagcaagacccagucccugcugaucgugaacaacgccaccaacguggucaucaaggugugcgaguuccaguucugcaacgaccccuuccucggcguguacuaccacaagaacaacaagagcuggauggaguccgaguuccgggucuacagcuccgccaacaacugcacguucgaguacgugagccagcccuuccugauggaccuggagggcaagcaggggaacuucaagaaccuccgcgaguucguguucaagaacaucgacggcuacuucaagaucuacuccaagcacaccccgaucaaccugguccgggaccugccccagggguucagcguccucgagccccugguggaccugcccaucggcaucaacaucacccgcuuccagacccuccuggcccugcaccgguccuaccucacgccgggggacagcagcuccggcuggaccgcgggcgccgccgccuacuacgugggguaccugcagccccgcaccuuccugcucaaguacaacgagaacggcaccaucacggacgcggucgacugcgcccuggacccccugagcgagaccaagugcacccucaaguccuucaccguggagaaggggaucuaccagacgagcaacuuccgggugcagcccaccgaguccaucguccgcuucccgaacaucaccaaccugugccccuucggcgagguguucaacgccacccgguucgccagcgucuacgccuggaaccgcaagcggaucuccaacugcguggcggacuacagcgugcuguacaacuccgccagcuucuccacguucaagugcuacggcgucagccccaccaagcucaacgaccugugcuucaccaacguguacgccgacuccuucgugauccgcggggacgagguccggcagaucgcccccggccagaccgggaagaucgccgacuacaacuacaagcugccggacgacuucacgggcugcgugaucgcguggaacagcaacaaccucgacuccaaggucgggggcaacuacaacuaccuguaccgccuguuccgcaagagcaaccucaagcccuucgagcgggacaucuccaccgagaucuaccaggccggcagcacccccugcaacgggguggagggcuucaacugcuacuucccccugcaguccuacggguuccagccgaccaacggcgugggguaccagcccuaccggguggucgugcugagcuucgagcuccugcacgcccccgccacggugugcggccccaagaaguccaccaaccuggucaagaacaagugcgugaacuucaacuucaacggccucaccgggaccggcgugcugaccgagagcaacaagaaguuccugccguuccagcaguucgggcgcgacaucgccgacacgaccgacgcgguccgcgacccccagacccuggagauccucgacaucacccccugcagcuucggcgggguguccgugaucacgccgggcaccaacaccagcaaccaggucgccgugcuguaccagggcgugaacugcaccgagguccccguggccauccacgccgaccagcugacgcccaccuggcggguguacuccaccggcagcaacgucuuccagacccgcgccgggugccucaucggcgcggagcacgugaacaacuccuacgagugcgacauccccaucggggccggcaucugcgccagcuaccagacgcagaccaacuccccgcggcgcgcccggagcguggcgucccagagcaucaucgccuacaccaugucccugggcgccgagaacagcgucgccuacuccaacaacagcaucgccauccccaccaacuucacgaucuccgugaccaccgagauccugcccgugagcaugaccaagacgagcgucgacugcaccauguacaucugcggggacuccaccgagugcagcaaccuccugcugcaguacggcuccuucugcacccagcucaaccgcgcgcugacggggaucgccguggagcaggacaagaacacccaggagguguucgcccaggucaagcagaucuacaagacgcccccgaucaaggacuucggcggguucaacuucagccagauccugcccgaccccuccaagcccagcaagcgguccuucaucgaggaccuccuguucaacaaggugacccuggccgacgccggcuucaucaagcaguacggcgacugccucggggacaucgcggcccgcgaccugaucugcgcccagaaguucaacggccugaccgugcucccgccccugcugaccgacgagaugaucgcccaguacaccagcgcccuccuggcggggaccaucacguccggcuggaccuucggggccggcgccgcccugcagauccccuucgcgaugcagauggccuaccgguucaacggcaucggggucacccagaacgugcucuacgagaaccagaagcugaucgccaaccaguucaacagcgccaucggcaagauccaggacucccugagcuccaccgccagcgcgcucgggaagcugcaggacguggucaaccagaacgcccaggcccugaacacgcucgugaagcagcuguccagcaacuucggcgccaucuccagcgugcugaacgacauccucucccgccuggacaaggucgaggccgaggugcagaucgaccggcugaucaccgggcgccuccagagccugcagaccuacgugacccagcagcugauccgggcggccgagauccgcgccagcgccaaccucgccgcgaccaagauguccgagugcguccugggccagagcaagcggguggacuucugcggcaagggguaccaccugauguccuucccccagagcgccccgcacggcguggucuuccuccacgugacguacguccccgcccaggagaagaacuucaccaccgcccccgcgaucugccacgacgggaaggcccacuucccccgcgagggcguguucguguccaacgggacccacugguucgucacgcagcggaacuucuacgagccgcagaucaucaccaccgacaacaccuucgugagcggcaacugcgacguggucaucggcaucgugaacaacacgguguacgacccccugcagcccgagcuggacuccuucaaggaggagcucgacaaguacuucaagaaccacaccagccccgacgucgaccugggggacaucuccggcaucaacgccagcguggugaacauccagaaggagaucgaccgccugaacgaggucgccaagaaccucaacgagucccugaucgaccugcaggagcucgggaaguacgagcaguacaucaaguggccgugguacaucuggcugggcuucaucgccggccugaucgcgaucgugauggugaccaucaugcucugcugcaugaccagcugcugcuccugccugaaggggugcugcagcugcggcuccugcugcaaguucgacgaggacgacagcgagcccguccugaagggggugaagcuccacuacacgugaggacuaguuauaagacugacuagcccgaugggccucccaacgggcccuccuccccuccuugcaccgagagaucuaaaaaaaaaaaaaaaaaaaaaaaaaaaaaaaaaaaaaaaaaaaaaaaaaaaaaaaaaaaaaaaaaaaaaaaaaaaaaaaaaaaaaaaaaaaaaaaaaaaa

SEQ ID NO: 25832 - RNA, 4011 nt, Artificial Sequence
  SARS-CoV-2/Wuhan/WIV05/2019__EPI_ISL_402128 spike protein mRNA gc (1-1273)(N439K_D614G)
aggagaaagcuuaccauguucguguuccugguccuccugccccuggugagcucccagugcgugaaccucaccacccgcacgcagcugccgcccgccuacaccaacagcuucacccggggcgucuacuaccccgacaagguguuccgcuccagcgugcugcacuccacccaggaccucuuccugcccuucuucagcaacgucacgugguuccacgccauccacguguccgggaccaacggcaccaagcgguucgacaacccggugcugcccuucaacgacggggucuacuucgcgagcaccgagaaguccaacaucauccgcggcuggaucuucgggacgacccucgacagcaagacccagucccugcugaucgugaacaacgccaccaacguggucaucaaggugugcgaguuccaguucugcaacgaccccuuccucggcguguacuaccacaagaacaacaagagcuggauggaguccgaguuccgggucuacagcuccgccaacaacugcacguucgaguacgugagccagcccuuccugauggaccuggagggcaagcaggggaacuucaagaaccuccgcgaguucguguucaagaacaucgacggcuacuucaagaucuacuccaagcacaccccgaucaaccugguccgggaccugccccagggguucagcgcccucgagccccugguggaccugcccaucggcaucaacaucacccgcuuccagacccuccuggcccugcaccgguccuaccucacgccgggggacagcagcuccggcuggaccgcgggcgccgccgccuacuacgugggguaccugcagccccgcaccuuccugcucaaguacaacgagaacggcaccaucacggacgcggucgacugcgcccuggacccccugagcgagaccaagugcacccucaaguccuucaccguggagaaggggaucuaccagacgagcaacuuccgggugcagcccaccgaguccaucguccgcuucccgaacaucaccaaccugugccccuucggcgagguguucaacgccacccgguucgccagcgucuacgccuggaaccgcaagcggaucuccaacugcguggcggacuacagcgugcuguacaacuccgccagcuucuccacguucaagugcuacggcgucagccccaccaagcucaacgaccugugcuucaccaacguguacgccgacuccuucgugauccgcggggacgagguccggcagaucgcccccggccagaccgggaagaucgccgacuacaacuacaagcugccggacgacuucacgggcugcgugaucgcguggaacagcaagaaccucgacuccaaggucgggggcaacuacaacuaccuguaccgccuguuccgcaagagcaaccucaagcccuucgagcgggacaucuccaccgagaucuaccaggccggcagcacccccugcaacgggguggagggcuucaacugcuacuucccccugcaguccuacggguuccagccgaccaacggcgugggguaccagcccuaccggguggucgugcugagcuucgagcuccugcacgcccccgccacggugugcggccccaagaaguccaccaaccuggucaagaacaagugcgugaacuucaacuucaacggccucaccgggaccggcgugcugaccgagagcaacaagaaguuccugccguuccagcaguucgggcgcgacaucgccgacacgaccgacgcgguccgcgacccccagacccuggagauccucgacaucacccccugcagcuucggcgggguguccgugaucacgccgggcaccaacaccagcaaccaggucgccgugcuguaccagggcgugaacugcaccgagguccccguggccauccacgccgaccagcugacgcccaccuggcggguguacuccaccggcagcaacgucuuccagacccgcgccgggugccucaucggcgcggagcacgugaacaacuccuacgagugcgacauccccaucggggccggcaucugcgccagcuaccagacgcagaccaacuccccgcggcgcgcccggagcguggcgucccagagcaucaucgccuacaccaugucccugggcgccgagaacagcgucgccuacuccaacaacagcaucgccauccccaccaacuucacgaucuccgugaccaccgagauccugcccgugagcaugaccaagacgagcgucgacugcaccauguacaucugcggggacuccaccgagugcagcaaccuccugcugcaguacggcuccuucugcacccagcucaaccgcgcgcugacggggaucgccguggagcaggacaagaacacccaggagguguucgcccaggucaagcagaucuacaagacgcccccgaucaaggacuucggcggguucaacuucagccagauccugcccgaccccuccaagcccagcaagcgguccuucaucgaggaccuccuguucaacaaggugacccuggccgacgccggcuucaucaagcaguacggcgacugccucggggacaucgcggcccgcgaccugaucugcgcccagaaguucaacggccugaccgugcucccgccccugcugaccgacgagaugaucgcccaguacaccagcgcccuccuggcggggaccaucacguccggcuggaccuucggggccggcgccgcccugcagauccccuucgcgaugcagauggccuaccgguucaacggcaucggggucacccagaacgugcucuacgagaaccagaagcugaucgccaaccaguucaacagcgccaucggcaagauccaggacucccugagcuccaccgccagcgcgcucgggaagcugcaggacguggucaaccagaacgcccaggcccugaacacgcucgugaagcagcuguccagcaacuucggcgccaucuccagcgugcugaacgacauccucucccgccuggacaaggucgaggccgaggugcagaucgaccggcugaucaccgggcgccuccagagccugcagaccuacgugacccagcagcugauccgggcggccgagauccgcgccagcgccaaccucgccgcgaccaagauguccgagugcguccugggccagagcaagcggguggacuucugcggcaagggguaccaccugauguccuucccccagagcgccccgcacggcguggucuuccuccacgugacguacguccccgcccaggagaagaacuucaccaccgcccccgcgaucugccacgacgggaaggcccacuucccccgcgagggcguguucguguccaacgggacccacugguucgucacgcagcggaacuucuacgagccgcagaucaucaccaccgacaacaccuucgugagcggcaacugcgacguggucaucggcaucgugaacaacacgguguacgacccccugcagcccgagcuggacuccuucaaggaggagcucgacaaguacuucaagaaccacaccagccccgacgucgaccugggggacaucuccggcaucaacgccagcguggugaacauccagaaggagaucgaccgccugaacgaggucgccaagaaccucaacgagucccugaucgaccugcaggagcucgggaaguacgagcaguacaucaaguggccgugguacaucuggcugggcuucaucgccggccugaucgcgaucgugauggugaccaucaugcucugcugcaugaccagcugcugcuccugccugaaggggugcugcagcugcggcuccugcugcaaguucgacgaggacgacagcgagcccguccugaagggggugaagcuccacuacacgugaggacuaguuauaagacugacuagcccgaugggccucccaacgggcccuccuccccuccuugcaccgagagaucuaaaaaaaaaaaaaaaaaaaaaaaaaaaaaaaaaaaaaaaaaaaaaaaaaaaaaaaaaaaaaaaaaaaaaaaaaaaaaaaaaaaaaaaaaaaaaaaaaaaa

SEQ ID NO: 25833 - RNA, 4011 nt, Artificial Sequence
  SARS-CoV-2/Wuhan/WIV05/2019__EPI_ISL_402128 spike protein mRNA gc (1-1273)(S477N_D614G)
aggagaaagcuuaccauguucguguuccugguccuccugccccuggugagcucccagugcgugaaccucaccacccgcacgcagcugccgcccgccuacaccaacagcuucacccggggcgucuacuaccccgacaagguguuccgcuccagcgugcugcacuccacccaggaccucuuccugcccuucuucagcaacgucacgugguuccacgccauccacguguccgggaccaacggcaccaagcgguucgacaacccggugcugcccuucaacgacggggucuacuucgcgagcaccgagaaguccaacaucauccgcggcuggaucuucgggacgacccucgacagcaagacccagucccugcugaucgugaacaacgccaccaacguggucaucaaggugugcgaguuccaguucugcaacgaccccuuccucggcguguacuaccacaagaacaacaagagcuggauggaguccgaguuccgggucuacagcuccgccaacaacugcacguucgaguacgugagccagcccuuccugauggaccuggagggcaagcaggggaacuucaagaaccuccgcgaguucguguucaagaacaucgacggcuacuucaagaucuacuccaagcacaccccgaucaaccugguccgggaccugccccagggguucagcgcccucgagccccugguggaccugcccaucggcaucaacaucacccgcuuccagacccuccuggcccugcaccgguccuaccucacgccgggggacagcagcuccggcuggaccgcgggcgccgccgccuacuacgugggguaccugcagccccgcaccuuccugcucaaguacaacgagaacggcaccaucacggacgcggucgacugcgcccuggacccccugagcgagaccaagugcacccucaaguccuucaccguggagaaggggaucuaccagacgagcaacuuccgggugcagcccaccgaguccaucguccgcuucccgaacaucaccaaccugugccccuucggcgagguguucaacgccacccgguucgccagcgucuacgccuggaaccgcaagcggaucuccaacugcguggcggacuacagcgugcuguacaacuccgccagcuucuccacguucaagugcuacggcgucagccccaccaagcucaacgaccugugcuucaccaacguguacgccgacuccuucgugauccgcggggacgagguccggcagaucgcccccggccagaccgggaagaucgccgacuacaacuacaagcugccggacgacuucacgggcugcgugaucgcguggaacagcaacaaccucgacuccaaggucgggggcaacuacaacuaccuguaccgccuguuccgcaagagcaaccucaagcccuucgagcgggacaucuccaccgagaucuaccaggccggcaacacccccugcaacgggguggagggcuucaacugcuacuucccccugcaguccuacggguuccagccgaccaacggcgugggguaccagcccuaccggguggucgugcugagcuucgagcuccugcacgcccccgccacggugugcggccccaagaaguccaccaaccuggucaagaacaagugcgugaacuucaacuucaacggccucaccgggaccggcgugcugaccgagagcaacaagaaguuccugccguuccagcaguucgggcgcgacaucgccgacacgaccgacgcgguccgcgacccccagacccuggagauccucgacaucacccccugcagcuucggcgggguguccgugaucacgccgggcaccaacaccagcaaccaggucgccgugcuguaccagggcgugaacugcaccgagguccccguggccauccacgccgaccagcugacgcccaccuggcggguguacuccaccggcagcaacgucuuccagacccgcgccgggugccucaucggcgcggagcacgugaacaacuccuacgagugcgacauccccaucggggccggcaucugcgccagcuaccagacgcagaccaacuccccgcggcgcgcccggagcguggcgucccagagcaucaucgccuacaccaugucccugggcgccgagaacagcgucgccuacuccaacaacagcaucgccauccccaccaacuucacgaucuccgugaccaccgagauccugcccgugagcaugaccaagacgagcgucgacugcaccauguacaucugcggggacuccaccgagugcagcaaccuccugcugcaguacggcuccuucugcacccagcucaaccgcgcgcugacggggaucgccguggagcaggacaagaacacccaggagguguucgcccaggucaagcagaucuacaagacgcccccgaucaaggacuucggcggguucaacuucagccagauccugcccgaccccuccaagcccagcaagcgguccuucaucgaggaccuccuguucaacaaggugacccuggccgacgccggcuucaucaagcaguacggcgacugccucggggacaucgcggcccgcgaccugaucugcgcccagaaguucaacggccugaccgugcucccgccccugcugaccgacgagaugaucgcccaguacaccagcgcccuccuggcggggaccaucacguccggcuggaccuucggggccggcgccgcccugcagauccccuucgcgaugcagauggccuaccgguucaacggcaucggggucacccagaacgugcucuacgagaaccagaagcugaucgccaaccaguucaacagcgccaucggcaagauccaggacucccugagcuccaccgccagcgcgcucgggaagcugcaggacguggucaaccagaacgcccaggcccugaacacgcucgugaagcagcuguccagcaacuucggcgccaucuccagcgugcugaacgacauccucucccgccuggacaaggucgaggccgaggugcagaucgaccggcugaucaccgggcgccuccagagccugcagaccuacgugacccagcagcugauccgggcggccgagauccgcgccagcgccaaccucgccgcgaccaagauguccgagugcguccugggccagagcaagcggguggacuucugcggcaagggguaccaccugauguccuucccccagagcgccccgcacggcguggucuuccuccacgugacguacguccccgcccaggagaagaacuucaccaccgcccccgcgaucugccacgacgggaaggcccacuucccccgcgagggcguguucguguccaacgggacccacugguucgucacgcagcggaacuucuacgagccgcagaucaucaccaccgacaacaccuucgugagcggcaacugcgacguggucaucggcaucgugaacaacacgguguacgacccccugcagcccgagcuggacuccuucaaggaggagcucgacaaguacuucaagaaccacaccagccccgacgucgaccugggggacaucuccggcaucaacgccagcguggugaacauccagaaggagaucgaccgccugaacgaggucgccaagaaccucaacgagucccugaucgaccugcaggagcucgggaaguacgagcaguacaucaaguggccgugguacaucuggcugggcuucaucgccggccugaucgcgaucgugauggugaccaucaugcucugcugcaugaccagcugcugcuccugccugaaggggugcugcagcugcggcuccugcugcaaguucgacgaggacgacagcgagcccguccugaagggggugaagcuccacuacacgugaggacuaguuauaagacugacuagcccgaugggccucccaacgggcccuccuccccuccuugcaccgagagaucuaaaaaaaaaaaaaaaaaaaaaaaaaaaaaaaaaaaaaaaaaaaaaaaaaaaaaaaaaaaaaaaaaaaaaaaaaaaaaaaaaaaaaaaaaaaaaaaaaaaa

SEQ ID NO: 25834 - RNA, 4011 nt, Artificial Sequence
  SARS-CoV-2/Wuhan/WIV05/2019__EPI_ISL_402128 spike protein mRNA gc (1-1273)(N501Y_D614G)
aggagaaagcuuaccauguucguguuccugguccuccugccccuggugagcucccagugcgugaaccucaccacccgcacgcagcugccgcccgccuacaccaacagcuucacccggggcgucuacuaccccgacaagguguuccgcuccagcgugcugcacuccacccaggaccucuuccugcccuucuucagcaacgucacgugguuccacgccauccacguguccgggaccaacggcaccaagcgguucgacaacccggugcugcccuucaacgacggggucuacuucgcgagcaccgagaaguccaacaucauccgcggcuggaucuucgggacgacccucgacagcaagacccagucccugcugaucgugaacaacgccaccaacguggucaucaaggugugcgaguuccaguucugcaacgaccccuuccucggcguguacuaccacaagaacaacaagagcuggauggaguccgaguuccgggucuacagcuccgccaacaacugcacguucgaguacgugagccagcccuuccugauggaccuggagggcaagcaggggaacuucaagaaccuccgcgaguucguguucaagaacaucgacggcuacuucaagaucuacuccaagcacaccccgaucaaccugguccgggaccugccccagggguucagcgcccucgagccccugguggaccugcccaucggcaucaacaucacccgcuuccagacccuccuggcccugcaccgguccuaccucacgccgggggacagcagcuccggcuggaccgcgggcgccgccgccuacuacgugggguaccugcagccccgcaccuuccugcucaaguacaacgagaacggcaccaucacggacgcggucgacugcgcccuggacccccugagcgagaccaagugcacccucaaguccuucaccguggagaaggggaucuaccagacgagcaacuuccgggugcagcccaccgaguccaucguccgcuucccgaacaucaccaaccugugccccuucggcgagguguucaacgccacccgguucgccagcgucuacgccuggaaccgcaagcggaucuccaacugcguggcggacuacagcgugcuguacaacuccgccagcuucuccacguucaagugcuacggcgucagccccaccaagcucaacgaccugugcuucaccaacguguacgccgacuccuucgugauccgcggggacgagguccggcagaucgcccccggccagaccgggaagaucgccgacuacaacuacaagcugccggacgacuucacgggcugcgugaucgcguggaacagcaacaaccucgacuccaaggucgggggcaacuacaacuaccuguaccgccuguuccgcaagagcaaccucaagcccuucgagcgggacaucuccaccgagaucuaccaggccggcagcacccccugcaacgggguggagggcuucaacugcuacuucccccugcaguccuacggguuccagccgaccuacggcgugggguaccagcccuaccggguggucgugcugagcuucgagcuccugcacgcccccgccacggugugcggccccaagaaguccaccaaccuggucaagaacaagugcgugaacuucaacuucaacggccucaccgggaccggcgugcugaccgagagcaacaagaaguuccugccguuccagcaguucgggcgcgacaucgccgacacgaccgacgcgguccgcgacccccagacccuggagauccucgacaucacccccugcagcuucggcgggguguccgugaucacgccgggcaccaacaccagcaaccaggucgccgugcuguaccagggcgugaacugcaccgagguccccguggccauccacgccgaccagcugacgcccaccuggcggguguacuccaccggcagcaacgucuuccagacccgcgccgggugccucaucggcgcggagcacgugaacaacuccuacgagugcgacauccccaucggggccggcaucugcgccagcuaccagacgcagaccaacuccccgcggcgcgcccggagcguggcgucccagagcaucaucgccuacaccaugucccugggcgccgagaacagcgucgccuacuccaacaacagcaucgccauccccaccaacuucacgaucuccgugaccaccgagauccugcccgugagcaugaccaagacgagcgucgacugcaccauguacaucugcggggacuccaccgagugcagcaaccuccugcugcaguacggcuccuucugcacccagcucaaccgcgcgcugacggggaucgccguggagcaggacaagaacacccaggagguguucgcccaggucaagcagaucuacaagacgcccccgaucaaggacuucggcggguucaacuucagccagauccugcccgaccccuccaagcccagcaagcgguccuucaucgaggaccuccuguucaacaaggugacccuggccgacgccggcuucaucaagcaguacggcgacugccucggggacaucgcggcccgcgaccugaucugcgcccagaaguucaacggccugaccgugcucccgccccugcugaccgacgagaugaucgcccaguacaccagcgcccuccuggcggggaccaucacguccggcuggaccuucggggccggcgccgcccugcagauccccuucgcgaugcagauggccuaccgguucaacggcaucggggucacccagaacgugcucuacgagaaccagaagcugaucgccaaccaguucaacagcgccaucggcaagauccaggacucccugagcuccaccgccagcgcgcucgggaagcugcaggacguggucaaccagaacgcccaggcccugaacacgcucgugaagcagcuguccagcaacuucggcgccaucuccagcgugcugaacgacauccucucccgccuggacaaggucgaggccgaggugcagaucgaccggcugaucaccgggcgccuccagagccugcagaccuacgugacccagcagcugauccgggcggccgagauccgcgccagcgccaaccucgccgcgaccaagauguccgagugcguccugggccagagcaagcggguggacuucugcggcaagggguaccaccugauguccuucccccagagcgccccgcacggcguggucuuccuccacgugacguacguccccgcccaggagaagaacuucaccaccgcccccgcgaucugccacgacgggaaggcccacuucccccgcgagggcguguucguguccaacgggacccacugguucgucacgcagcggaacuucuacgagccgcagaucaucaccaccgacaacaccuucgugagcggcaacugcgacguggucaucggcaucgugaacaacacgguguacgacccccugcagcccgagcuggacuccuucaaggaggagcucgacaaguacuucaagaaccacaccagccccgacgucgaccugggggacaucuccggcaucaacgccagcguggugaacauccagaaggagaucgaccgccugaacgaggucgccaagaaccucaacgagucccugaucgaccugcaggagcucgggaaguacgagcaguacaucaaguggccgugguacaucuggcugggcuucaucgccggccugaucgcgaucgugauggugaccaucaugcucugcugcaugaccagcugcugcuccugccugaaggggugcugcagcugcggcuccugcugcaaguucgacgaggacgacagcgagcccguccugaagggggugaagcuccacuacacgugaggacuaguuauaagacugacuagcccgaugggccucccaacgggcccuccuccccuccuugcaccgagagaucuaaaaaaaaaaaaaaaaaaaaaaaaaaaaaaaaaaaaaaaaaaaaaaaaaaaaaaaaaaaaaaaaaaaaaaaaaaaaaaaaaaaaaaaaaaaaaaaaaaaa

SEQ ID NO: 25835 - RNA, 4005 nt, Artificial Sequence
  SARS-CoV-2/Wuhan/WIV05/2019__EPI_ISL_402128 spike protein mRNA gc (1-1273)(H69del_V70del_D614G)
aggagaaagcuuaccauguucguguuccugguccuccugccccuggugagcucccagugcgugaaccucaccacccgcacgcagcugccgcccgccuacaccaacagcuucacccggggcgucuacuaccccgacaagguguuccgcuccagcgugcugcacuccacccaggaccucuuccugcccuucuucagcaacgucacgugguuccacgccaucuccgggaccaacggcaccaagcgguucgacaacccggugcugcccuucaacgacggggucuacuucgcgagcaccgagaaguccaacaucauccgcggcuggaucuucgggacgacccucgacagcaagacccagucccugcugaucgugaacaacgccaccaacguggucaucaaggugugcgaguuccaguucugcaacgaccccuuccucggcguguacuaccacaagaacaacaagagcuggauggaguccgaguuccgggucuacagcuccgccaacaacugcacguucgaguacgugagccagcccuuccugauggaccuggagggcaagcaggggaacuucaagaaccuccgcgaguucguguucaagaacaucgacggcuacuucaagaucuacuccaagcacaccccgaucaaccugguccgggaccugccccagggguucagcgcccucgagccccugguggaccugcccaucggcaucaacaucacccgcuuccagacccuccuggcccugcaccgguccuaccucacgccgggggacagcagcuccggcuggaccgcgggcgccgccgccuacuacgugggguaccugcagccccgcaccuuccugcucaaguacaacgagaacggcaccaucacggacgcggucgacugcgcccuggacccccugagcgagaccaagugcacccucaaguccuucaccguggagaaggggaucuaccagacgagcaacuuccgggugcagcccaccgaguccaucguccgcuucccgaacaucaccaaccugugccccuucggcgagguguucaacgccacccgguucgccagcgucuacgccuggaaccgcaagcggaucuccaacugcguggcggacuacagcgugcuguacaacuccgccagcuucuccacguucaagugcuacggcgucagccccaccaagcucaacgaccugugcuucaccaacguguacgccgacuccuucgugauccgcggggacgagguccggcagaucgcccccggccagaccgggaagaucgccgacuacaacuacaagcugccggacgacuucacgggcugcgugaucgcguggaacagcaacaaccucgacuccaaggucgggggcaacuacaacuaccuguaccgccuguuccgcaagagcaaccucaagcccuucgagcgggacaucuccaccgagaucuaccaggccggcagcacccccugcaacgggguggagggcuucaacugcuacuucccccugcaguccuacggguuccagccgaccaacggcgugggguaccagcccuaccggguggucgugcugagcuucgagcuccugcacgcccccgccacggugugcggccccaagaaguccaccaaccuggucaagaacaagugcgugaacuucaacuucaacggccucaccgggaccggcgugcugaccgagagcaacaagaaguuccugccguuccagcaguucgggcgcgacaucgccgacacgaccgacgcgguccgcgacccccagacccuggagauccucgacaucacccccugcagcuucggcgggguguccgugaucacgccgggcaccaacaccagcaaccaggucgccgugcuguaccagggcgugaacugcaccgagguccccguggccauccacgccgaccagcugacgcccaccuggcggguguacuccaccggcagcaacgucuuccagacccgcgccgggugccucaucggcgcggagcacgugaacaacuccuacgagugcgacauccccaucggggccggcaucugcgccagcuaccagacgcagaccaacuccccgcggcgcgcccggagcguggcgucccagagcaucaucgccuacaccaugucccugggcgccgagaacagcgucgccuacuccaacaacagcaucgccauccccaccaacuucacgaucuccgugaccaccgagauccugcccgugagcaugaccaagacgagcgucgacugcaccauguacaucugcggggacuccaccgagugcagcaaccuccugcugcaguacggcuccuucugcacccagcucaaccgcgcgcugacggggaucgccguggagcaggacaagaacacccaggagguguucgcccaggucaagcagaucuacaagacgcccccgaucaaggacuucggcggguucaacuucagccagauccugcccgaccccuccaagcccagcaagcgguccuucaucgaggaccuccuguucaacaaggugacccuggccgacgccggcuucaucaagcaguacggcgacugccucggggacaucgcggcccgcgaccugaucugcgcccagaaguucaacggccugaccgugcucccgccccugcugaccgacgagaugaucgcccaguacaccagcgcccuccuggcggggaccaucacguccggcuggaccuucggggccggcgccgcccugcagauccccuucgcgaugcagauggccuaccgguucaacggcaucggggucacccagaacgugcucuacgagaaccagaagcugaucgccaaccaguucaacagcgccaucggcaagauccaggacucccugagcuccaccgccagcgcgcucgggaagcugcaggacguggucaaccagaacgcccaggcccugaacacgcucgugaagcagcuguccagcaacuucggcgccaucuccagcgugcugaacgacauccucucccgccuggacaaggucgaggccgaggugcagaucgaccggcugaucaccgggcgccuccagagccugcagaccuacgugacccagcagcugauccgggcggccgagauccgcgccagcgccaaccucgccgcgaccaagauguccgagugcguccugggccagagcaagcggguggacuucugcggcaagggguaccaccugauguccuucccccagagcgccccgcacggcguggucuuccuccacgugacguacguccccgcccaggagaagaacuucaccaccgcccccgcgaucugccacgacgggaaggcccacuucccccgcgagggcguguucguguccaacgggacccacugguucgucacgcagcggaacuucuacgagccgcagaucaucaccaccgacaacaccuucgugagcggcaacugcgacguggucaucggcaucgugaacaacacgguguacgacccccugcagcccgagcuggacuccuucaaggaggagcucgacaaguacuucaagaaccacaccagccccgacgucgaccugggggacaucuccggcaucaacgccagcguggugaacauccagaaggagaucgaccgccugaacgaggucgccaagaaccucaacgagucccugaucgaccugcaggagcucgggaaguacgagcaguacaucaaguggccgugguacaucuggcugggcuucaucgccggccugaucgcgaucgugauggugaccaucaugcucugcugcaugaccagcugcugcuccugccugaaggggugcugcagcugcggcuccugcugcaaguucgacgaggacgacagcgagcccguccugaagggggugaagcuccacuacacgugaggacuaguuauaagacugacuagcccgaugggccucccaacgggcccuccuccccuccuugcaccgagagaucuaaaaaaaaaaaaaaaaaaaaaaaaaaaaaaaaaaaaaaaaaaaaaaaaaaaaaaaaaaaaaaaaaaaaaaaaaaaaaaaaaaaaaaaaaaaaaaaaaaaa

SEQ ID NO: 25836 - RNA, 4011 nt, Artificial Sequence
  SARS-CoV-2/Wuhan/WIV05/2019__EPI_ISL_402128 spike protein mRNA gc (1-1273)(Y453F_D614G)
aggagaaagcuuaccauguucguguuccugguccuccugccccuggugagcucccagugcgugaaccucaccacccgcacgcagcugccgcccgccuacaccaacagcuucacccggggcgucuacuaccccgacaagguguuccgcuccagcgugcugcacuccacccaggaccucuuccugcccuucuucagcaacgucacgugguuccacgccauccacguguccgggaccaacggcaccaagcgguucgacaacccggugcugcccuucaacgacggggucuacuucgcgagcaccgagaaguccaacaucauccgcggcuggaucuucgggacgacccucgacagcaagacccagucccugcugaucgugaacaacgccaccaacguggucaucaaggugugcgaguuccaguucugcaacgaccccuuccucggcguguacuaccacaagaacaacaagagcuggauggaguccgaguuccgggucuacagcuccgccaacaacugcacguucgaguacgugagccagcccuuccugauggaccuggagggcaagcaggggaacuucaagaaccuccgcgaguucguguucaagaacaucgacggcuacuucaagaucuacuccaagcacaccccgaucaaccugguccgggaccugccccagggguucagcgcccucgagccccugguggaccugcccaucggcaucaacaucacccgcuuccagacccuccuggcccugcaccgguccuaccucacgccgggggacagcagcuccggcuggaccgcgggcgccgccgccuacuacgugggguaccugcagccccgcaccuuccugcucaaguacaacgagaacggcaccaucacggacgcggucgacugcgcccuggacccccugagcgagaccaagugcacccucaaguccuucaccguggagaaggggaucuaccagacgagcaacuuccgggugcagcccaccgaguccaucguccgcuucccgaacaucaccaaccugugccccuucggcgagguguucaacgccacccgguucgccagcgucuacgccuggaaccgcaagcggaucuccaacugcguggcggacuacagcgugcuguacaacuccgccagcuucuccacguucaagugcuacggcgucagccccaccaagcucaacgaccugugcuucaccaacguguacgccgacuccuucgugauccgcggggacgagguccggcagaucgcccccggccagaccgggaagaucgccgacuacaacuacaagcugccggacgacuucacgggcugcgugaucgcguggaacagcaacaaccucgacuccaaggucgggggcaacuacaacuaccuguuccgccuguuccgcaagagcaaccucaagcccuucgagcgggacaucuccaccgagaucuaccaggccggcagcacccccugcaacgggguggagggcuucaacugcuacuucccccugcaguccuacggguuccagccgaccaacggcgugggguaccagcccuaccggguggucgugcugagcuucgagcuccugcacgcccccgccacggugugcggccccaagaaguccaccaaccuggucaagaacaagugcgugaacuucaacuucaacggccucaccgggaccggcgugcugaccgagagcaacaagaaguuccugccguuccagcaguucgggcgcgacaucgccgacacgaccgacgcgguccgcgacccccagacccuggagauccucgacaucacccccugcagcuucggcgggguguccgugaucacgccgggcaccaacaccagcaaccaggucgccgugcuguaccagggcgugaacugcaccgagguccccguggccauccacgccgaccagcugacgcccaccuggcggguguacuccaccggcagcaacgucuuccagacccgcgccgggugccucaucggcgcggagcacgugaacaacuccuacgagugcgacauccccaucggggccggcaucugcgccagcuaccagacgcagaccaacuccccgcggcgcgcccggagcguggcgucccagagcaucaucgccuacaccaugucccugggcgccgagaacagcgucgccuacuccaacaacagcaucgccauccccaccaacuucacgaucuccgugaccaccgagauccugcccgugagcaugaccaagacgagcgucgacugcaccauguacaucugcggggacuccaccgagugcagcaaccuccugcugcaguacggcuccuucugcacccagcucaaccgcgcgcugacggggaucgccguggagcaggacaagaacacccaggagguguucgcccaggucaagcagaucuacaagacgcccccgaucaaggacuucggcggguucaacuucagccagauccugcccgaccccuccaagcccagcaagcgguccuucaucgaggaccuccuguucaacaaggugacccuggccgacgccggcuucaucaagcaguacggcgacugccucggggacaucgcggcccgcgaccugaucugcgcccagaaguucaacggccugaccgugcucccgccccugcugaccgacgagaugaucgcccaguacaccagcgcccuccuggcggggaccaucacguccggcuggaccuucggggccggcgccgcccugcagauccccuucgcgaugcagauggccuaccgguucaacggcaucggggucacccagaacgugcucuacgagaaccagaagcugaucgccaaccaguucaacagcgccaucggcaagauccaggacucccugagcuccaccgccagcgcgcucgggaagcugcaggacguggucaaccagaacgcccaggcccugaacacgcucgugaagcagcuguccagcaacuucggcgccaucuccagcgugcugaacgacauccucucccgccuggacaaggucgaggccgaggugcagaucgaccggcugaucaccgggcgccuccagagccugcagaccuacgugacccagcagcugauccgggcggccgagauccgcgccagcgccaaccucgccgcgaccaagauguccgagugcguccugggccagagcaagcggguggacuucugcggcaagggguaccaccugauguccuucccccagagcgccccgcacggcguggucuuccuccacgugacguacguccccgcccaggagaagaacuucaccaccgcccccgcgaucugccacgacgggaaggcccacuucccccgcgagggcguguucguguccaacgggacccacugguucgucacgcagcggaacuucuacgagccgcagaucaucaccaccgacaacaccuucgugagcggcaacugcgacguggucaucggcaucgugaacaacacgguguacgacccccugcagcccgagcuggacuccuucaaggaggagcucgacaaguacuucaagaaccacaccagccccgacgucgaccugggggacaucuccggcaucaacgccagcguggugaacauccagaaggagaucgaccgccugaacgaggucgccaagaaccucaacgagucccugaucgaccugcaggagcucgggaaguacgagcaguacaucaaguggccgugguacaucuggcugggcuucaucgccggccugaucgcgaucgugauggugaccaucaugcucugcugcaugaccagcugcugcuccugccugaaggggugcugcagcugcggcuccugcugcaaguucgacgaggacgacagcgagcccguccugaagggggugaagcuccacuacacgugaggacuaguuauaagacugacuagcccgaugggccucccaacgggcccuccuccccuccuugcaccgagagaucuaaaaaaaaaaaaaaaaaaaaaaaaaaaaaaaaaaaaaaaaaaaaaaaaaaaaaaaaaaaaaaaaaaaaaaaaaaaaaaaaaaaaaaaaaaaaaaaaaaaa

SEQ ID NO: 25837 - RNA, 4011 nt, Artificial Sequence
  SARS-CoV-2/Wuhan/WIV05/2019__EPI_ISL_402128 spike protein mRNA gc (1-1273)(D614G_I692V)
aggagaaagcuuaccauguucguguuccugguccuccugccccuggugagcucccagugcgugaaccucaccacccgcacgcagcugccgcccgccuacaccaacagcuucacccggggcgucuacuaccccgacaagguguuccgcuccagcgugcugcacuccacccaggaccucuuccugcccuucuucagcaacgucacgugguuccacgccauccacguguccgggaccaacggcaccaagcgguucgacaacccggugcugcccuucaacgacggggucuacuucgcgagcaccgagaaguccaacaucauccgcggcuggaucuucgggacgacccucgacagcaagacccagucccugcugaucgugaacaacgccaccaacguggucaucaaggugugcgaguuccaguucugcaacgaccccuuccucggcguguacuaccacaagaacaacaagagcuggauggaguccgaguuccgggucuacagcuccgccaacaacugcacguucgaguacgugagccagcccuuccugauggaccuggagggcaagcaggggaacuucaagaaccuccgcgaguucguguucaagaacaucgacggcuacuucaagaucuacuccaagcacaccccgaucaaccugguccgggaccugccccagggguucagcgcccucgagccccugguggaccugcccaucggcaucaacaucacccgcuuccagacccuccuggcccugcaccgguccuaccucacgccgggggacagcagcuccggcuggaccgcgggcgccgccgccuacuacgugggguaccugcagccccgcaccuuccugcucaaguacaacgagaacggcaccaucacggacgcggucgacugcgcccuggacccccugagcgagaccaagugcacccucaaguccuucaccguggagaaggggaucuaccagacgagcaacuuccgggugcagcccaccgaguccaucguccgcuucccgaacaucaccaaccugugccccuucggcgagguguucaacgccacccgguucgccagcgucuacgccuggaaccgcaagcggaucuccaacugcguggcggacuacagcgugcuguacaacuccgccagcuucuccacguucaagugcuacggcgucagccccaccaagcucaacgaccugugcuucaccaacguguacgccgacuccuucgugauccgcggggacgagguccggcagaucgcccccggccagaccgggaagaucgccgacuacaacuacaagcugccggacgacuucacgggcugcgugaucgcguggaacagcaacaaccucgacuccaaggucgggggcaacuacaacuaccuguaccgccuguuccgcaagagcaaccucaagcccuucgagcgggacaucuccaccgagaucuaccaggccggcagcacccccugcaacgggguggagggcuucaacugcuacuucccccugcaguccuacggguuccagccgaccaacggcgugggguaccagcccuaccggguggucgugcugagcuucgagcuccugcacgcccccgccacggugugcggccccaagaaguccaccaaccuggucaagaacaagugcgugaacuucaacuucaacggccucaccgggaccggcgugcugaccgagagcaacaagaaguuccugccguuccagcaguucgggcgcgacaucgccgacacgaccgacgcgguccgcgacccccagacccuggagauccucgacaucacccccugcagcuucggcgggguguccgugaucacgccgggcaccaacaccagcaaccaggucgccgugcuguaccagggcgugaacugcaccgagguccccguggccauccacgccgaccagcugacgcccaccuggcggguguacuccaccggcagcaacgucuuccagacccgcgccgggugccucaucggcgcggagcacgugaacaacuccuacgagugcgacauccccaucggggccggcaucugcgccagcuaccagacgcagaccaacuccccgcggcgcgcccggagcguggcgucccagagcgucaucgccuacaccaugucccugggcgccgagaacagcgucgccuacuccaacaacagcaucgccauccccaccaacuucacgaucuccgugaccaccgagauccugcccgugagcaugaccaagacgagcgucgacugcaccauguacaucugcggggacuccaccgagugcagcaaccuccugcugcaguacggcuccuucugcacccagcucaaccgcgcgcugacggggaucgccguggagcaggacaagaacacccaggagguguucgcccaggucaagcagaucuacaagacgcccccgaucaaggacuucggcggguucaacuucagccagauccugcccgaccccuccaagcccagcaagcgguccuucaucgaggaccuccuguucaacaaggugacccuggccgacgccggcuucaucaagcaguacggcgacugccucggggacaucgcggcccgcgaccugaucugcgcccagaaguucaacggccugaccgugcucccgccccugcugaccgacgagaugaucgcccaguacaccagcgcccuccuggcggggaccaucacguccggcuggaccuucggggccggcgccgcccugcagauccccuucgcgaugcagauggccuaccgguucaacggcaucggggucacccagaacgugcucuacgagaaccagaagcugaucgccaaccaguucaacagcgccaucggcaagauccaggacucccugagcuccaccgccagcgcgcucgggaagcugcaggacguggucaaccagaacgcccaggcccugaacacgcucgugaagcagcuguccagcaacuucggcgccaucuccagcgugcugaacgacauccucucccgccuggacaaggucgaggccgaggugcagaucgaccggcugaucaccgggcgccuccagagccugcagaccuacgugacccagcagcugauccgggcggccgagauccgcgccagcgccaaccucgccgcgaccaagauguccgagugcguccugggccagagcaagcggguggacuucugcggcaagggguaccaccugauguccuucccccagagcgccccgcacggcguggucuuccuccacgugacguacguccccgcccaggagaagaacuucaccaccgcccccgcgaucugccacgacgggaaggcccacuucccccgcgagggcguguucguguccaacgggacccacugguucgucacgcagcggaacuucuacgagccgcagaucaucaccaccgacaacaccuucgugagcggcaacugcgacguggucaucggcaucgugaacaacacgguguacgacccccugcagcccgagcuggacuccuucaaggaggagcucgacaaguacuucaagaaccacaccagccccgacgucgaccugggggacaucuccggcaucaacgccagcguggugaacauccagaaggagaucgaccgccugaacgaggucgccaagaaccucaacgagucccugaucgaccugcaggagcucgggaaguacgagcaguacaucaaguggccgugguacaucuggcugggcuucaucgccggccugaucgcgaucgugauggugaccaucaugcucugcugcaugaccagcugcugcuccugccugaaggggugcugcagcugcggcuccugcugcaaguucgacgaggacgacagcgagcccguccugaagggggugaagcuccacuacacgugaggacuaguuauaagacugacuagcccgaugggccucccaacgggcccuccuccccuccuugcaccgagagaucuaaaaaaaaaaaaaaaaaaaaaaaaaaaaaaaaaaaaaaaaaaaaaaaaaaaaaaaaaaaaaaaaaaaaaaaaaaaaaaaaaaaaaaaaaaaaaaaaaaaa

SEQ ID NO: 25838 - RNA, 4011 nt, Artificial Sequence
  SARS-CoV-2/Wuhan/WIV05/2019__EPI_ISL_402128 spike protein mRNA gc (1-1273)(D614G_M1229I)
aggagaaagcuuaccauguucguguuccugguccuccugccccuggugagcucccagugcgugaaccucaccacccgcacgcagcugccgcccgccuacaccaacagcuucacccggggcgucuacuaccccgacaagguguuccgcuccagcgugcugcacuccacccaggaccucuuccugcccuucuucagcaacgucacgugguuccacgccauccacguguccgggaccaacggcaccaagcgguucgacaacccggugcugcccuucaacgacggggucuacuucgcgagcaccgagaaguccaacaucauccgcggcuggaucuucgggacgacccucgacagcaagacccagucccugcugaucgugaacaacgccaccaacguggucaucaaggugugcgaguuccaguucugcaacgaccccuuccucggcguguacuaccacaagaacaacaagagcuggauggaguccgaguuccgggucuacagcuccgccaacaacugcacguucgaguacgugagccagcccuuccugauggaccuggagggcaagcaggggaacuucaagaaccuccgcgaguucguguucaagaacaucgacggcuacuucaagaucuacuccaagcacaccccgaucaaccugguccgggaccugccccagggguucagcgcccucgagccccugguggaccugcccaucggcaucaacaucacccgcuuccagacccuccuggcccugcaccgguccuaccucacgccgggggacagcagcuccggcuggaccgcgggcgccgccgccuacuacgugggguaccugcagccccgcaccuuccugcucaaguacaacgagaacggcaccaucacggacgcggucgacugcgcccuggacccccugagcgagaccaagugcacccucaaguccuucaccguggagaaggggaucuaccagacgagcaacuuccgggugcagcccaccgaguccaucguccgcuucccgaacaucaccaaccugugccccuucggcgagguguucaacgccacccgguucgccagcgucuacgccuggaaccgcaagcggaucuccaacugcguggcggacuacagcgugcuguacaacuccgccagcuucuccacguucaagugcuacggcgucagccccaccaagcucaacgaccugugcuucaccaacguguacgccgacuccuucgugauccgcggggacgagguccggcagaucgcccccggccagaccgggaagaucgccgacuacaacuacaagcugccggacgacuucacgggcugcgugaucgcguggaacagcaacaaccucgacuccaaggucgggggcaacuacaacuaccuguaccgccuguuccgcaagagcaaccucaagcccuucgagcgggacaucuccaccgagaucuaccaggccggcagcacccccugcaacgggguggagggcuucaacugcuacuucccccugcaguccuacggguuccagccgaccaacggcgugggguaccagcccuaccggguggucgugcugagcuucgagcuccugcacgcccccgccacggugugcggccccaagaaguccaccaaccuggucaagaacaagugcgugaacuucaacuucaacggccucaccgggaccggcgugcugaccgagagcaacaagaaguuccugccguuccagcaguucgggcgcgacaucgccgacacgaccgacgcgguccgcgacccccagacccuggagauccucgacaucacccccugcagcuucggcgggguguccgugaucacgccgggcaccaacaccagcaaccaggucgccgugcuguaccagggcgugaacugcaccgagguccccguggccauccacgccgaccagcugacgcccaccuggcggguguacuccaccggcagcaacgucuuccagacccgcgccgggugccucaucggcgcggagcacgugaacaacuccuacgagugcgacauccccaucggggccggcaucugcgccagcuaccagacgcagaccaacuccccgcggcgcgcccggagcguggcgucccagagcaucaucgccuacaccaugucccugggcgccgagaacagcgucgccuacuccaacaacagcaucgccauccccaccaacuucacgaucuccgugaccaccgagauccugcccgugagcaugaccaagacgagcgucgacugcaccauguacaucugcggggacuccaccgagugcagcaaccuccugcugcaguacggcuccuucugcacccagcucaaccgcgcgcugacggggaucgccguggagcaggacaagaacacccaggagguguucgcccaggucaagcagaucuacaagacgcccccgaucaaggacuucggcggguucaacuucagccagauccugcccgaccccuccaagcccagcaagcgguccuucaucgaggaccuccuguucaacaaggugacccuggccgacgccggcuucaucaagcaguacggcgacugccucggggacaucgcggcccgcgaccugaucugcgcccagaaguucaacggccugaccgugcucccgccccugcugaccgacgagaugaucgcccaguacaccagcgcccuccuggcggggaccaucacguccggcuggaccuucggggccggcgccgcccugcagauccccuucgcgaugcagauggccuaccgguucaacggcaucggggucacccagaacgugcucuacgagaaccagaagcugaucgccaaccaguucaacagcgccaucggcaagauccaggacucccugagcuccaccgccagcgcgcucgggaagcugcaggacguggucaaccagaacgcccaggcccugaacacgcucgugaagcagcuguccagcaacuucggcgccaucuccagcgugcugaacgacauccucucccgccuggacaaggucgaggccgaggugcagaucgaccggcugaucaccgggcgccuccagagccugcagaccuacgugacccagcagcugauccgggcggccgagauccgcgccagcgccaaccucgccgcgaccaagauguccgagugcguccugggccagagcaagcggguggacuucugcggcaagggguaccaccugauguccuucccccagagcgccccgcacggcguggucuuccuccacgugacguacguccccgcccaggagaagaacuucaccaccgcccccgcgaucugccacgacgggaaggcccacuucccccgcgagggcguguucguguccaacgggacccacugguucgucacgcagcggaacuucuacgagccgcagaucaucaccaccgacaacaccuucgugagcggcaacugcgacguggucaucggcaucgugaacaacacgguguacgacccccugcagcccgagcuggacuccuucaaggaggagcucgacaaguacuucaagaaccacaccagccccgacgucgaccugggggacaucuccggcaucaacgccagcguggugaacauccagaaggagaucgaccgccugaacgaggucgccaagaaccucaacgagucccugaucgaccugcaggagcucgggaaguacgagcaguacaucaaguggccgugguacaucuggcugggcuucaucgccggccugaucgcgaucgugaucgugaccaucaugcucugcugcaugaccagcugcugcuccugccugaaggggugcugcagcugcggcuccugcugcaaguucgacgaggacgacagcgagcccguccugaagggggugaagcuccacuacacgugaggacuaguuauaagacugacuagcccgaugggccucccaacgggcccuccuccccuccuugcaccgagagaucuaaaaaaaaaaaaaaaaaaaaaaaaaaaaaaaaaaaaaaaaaaaaaaaaaaaaaaaaaaaaaaaaaaaaaaaaaaaaaaaaaaaaaaaaaaaaaaaaaaaa

SEQ ID NO: 25839 - RNA, 4005 nt, Artificial Sequence
  SARS-CoV-2/Wuhan/WIV05/2019__EPI_ISL_402128 spike protein mRNA gc (1-1273)(H69del_V70del_A222V_Y453F_S477N_D614G_I692V)
aggagaaagcuuaccauguucguguuccugguccuccugccccuggugagcucccagugcgugaaccucaccacccgcacgcagcugccgcccgccuacaccaacagcuucacccggggcgucuacuaccccgacaagguguuccgcuccagcgugcugcacuccacccaggaccucuuccugcccuucuucagcaacgucacgugguuccacgccaucuccgggaccaacggcaccaagcgguucgacaacccggugcugcccuucaacgacggggucuacuucgcgagcaccgagaaguccaacaucauccgcggcuggaucuucgggacgacccucgacagcaagacccagucccugcugaucgugaacaacgccaccaacguggucaucaaggugugcgaguuccaguucugcaacgaccccuuccucggcguguacuaccacaagaacaacaagagcuggauggaguccgaguuccgggucuacagcuccgccaacaacugcacguucgaguacgugagccagcccuuccugauggaccuggagggcaagcaggggaacuucaagaaccuccgcgaguucguguucaagaacaucgacggcuacuucaagaucuacuccaagcacaccccgaucaaccugguccgggaccugccccagggguucagcguccucgagccccugguggaccugcccaucggcaucaacaucacccgcuuccagacccuccuggcccugcaccgguccuaccucacgccgggggacagcagcuccggcuggaccgcgggcgccgccgccuacuacgugggguaccugcagccccgcaccuuccugcucaaguacaacgagaacggcaccaucacggacgcggucgacugcgcccuggacccccugagcgagaccaagugcacccucaaguccuucaccguggagaaggggaucuaccagacgagcaacuuccgggugcagcccaccgaguccaucguccgcuucccgaacaucaccaaccugugccccuucggcgagguguucaacgccacccgguucgccagcgucuacgccuggaaccgcaagcggaucuccaacugcguggcggacuacagcgugcuguacaacuccgccagcuucuccacguucaagugcuacggcgucagccccaccaagcucaacgaccugugcuucaccaacguguacgccgacuccuucgugauccgcggggacgagguccggcagaucgcccccggccagaccgggaagaucgccgacuacaacuacaagcugccggacgacuucacgggcugcgugaucgcguggaacagcaacaaccucgacuccaaggucgggggcaacuacaacuaccuguuccgccuguuccgcaagagcaaccucaagcccuucgagcgggacaucuccaccgagaucuaccaggccggcaacacccccugcaacgggguggagggcuucaacugcuacuucccccugcaguccuacggguuccagccgaccaacggcgugggguaccagcccuaccggguggucgugcugagcuucgagcuccugcacgcccccgccacggugugcggccccaagaaguccaccaaccuggucaagaacaagugcgugaacuucaacuucaacggccucaccgggaccggcgugcugaccgagagcaacaagaaguuccugccguuccagcaguucgggcgcgacaucgccgacacgaccgacgcgguccgcgacccccagacccuggagauccucgacaucacccccugcagcuucggcgggguguccgugaucacgccgggcaccaacaccagcaaccaggucgccgugcuguaccagggcgugaacugcaccgagguccccguggccauccacgccgaccagcugacgcccaccuggcggguguacuccaccggcagcaacgucuuccagacccgcgccgggugccucaucggcgcggagcacgugaacaacuccuacgagugcgacauccccaucggggccggcaucugcgccagcuaccagacgcagaccaacuccccgcggcgcgcccggagcguggcgucccagagcgucaucgccuacaccaugucccugggcgccgagaacagcgucgccuacuccaacaacagcaucgccauccccaccaacuucacgaucuccgugaccaccgagauccugcccgugagcaugaccaagacgagcgucgacugcaccauguacaucugcggggacuccaccgagugcagcaaccuccugcugcaguacggcuccuucugcacccagcucaaccgcgcgcugacggggaucgccguggagcaggacaagaacacccaggagguguucgcccaggucaagcagaucuacaagacgcccccgaucaaggacuucggcggguucaacuucagccagauccugcccgaccccuccaagcccagcaagcgguccuucaucgaggaccuccuguucaacaaggugacccuggccgacgccggcuucaucaagcaguacggcgacugccucggggacaucgcggcccgcgaccugaucugcgcccagaaguucaacggccugaccgugcucccgccccugcugaccgacgagaugaucgcccaguacaccagcgcccuccuggcggggaccaucacguccggcuggaccuucggggccggcgccgcccugcagauccccuucgcgaugcagauggccuaccgguucaacggcaucggggucacccagaacgugcucuacgagaaccagaagcugaucgccaaccaguucaacagcgccaucggcaagauccaggacucccugagcuccaccgccagcgcgcucgggaagcugcaggacguggucaaccagaacgcccaggcccugaacacgcucgugaagcagcuguccagcaacuucggcgccaucuccagcgugcugaacgacauccucucccgccuggacaaggucgaggccgaggugcagaucgaccggcugaucaccgggcgccuccagagccugcagaccuacgugacccagcagcugauccgggcggccgagauccgcgccagcgccaaccucgccgcgaccaagauguccgagugcguccugggccagagcaagcggguggacuucugcggcaagggguaccaccugauguccuucccccagagcgccccgcacggcguggucuuccuccacgugacguacguccccgcccaggagaagaacuucaccaccgcccccgcgaucugccacgacgggaaggcccacuucccccgcgagggcguguucguguccaacgggacccacugguucgucacgcagcggaacuucuacgagccgcagaucaucaccaccgacaacaccuucgugagcggcaacugcgacguggucaucggcaucgugaacaacacgguguacgacccccugcagcccgagcuggacuccuucaaggaggagcucgacaaguacuucaagaaccacaccagccccgacgucgaccugggggacaucuccggcaucaacgccagcguggugaacauccagaaggagaucgaccgccugaacgaggucgccaagaaccucaacgagucccugaucgaccugcaggagcucgggaaguacgagcaguacaucaaguggccgugguacaucuggcugggcuucaucgccggccugaucgcgaucgugauggugaccaucaugcucugcugcaugaccagcugcugcuccugccugaaggggugcugcagcugcggcuccugcugcaaguucgacgaggacgacagcgagcccguccugaagggggugaagcuccacuacacgugaggacuaguuauaagacugacuagcccgaugggccucccaacgggcccuccuccccuccuugcaccgagagaucuaaaaaaaaaaaaaaaaaaaaaaaaaaaaaaaaaaaaaaaaaaaaaaaaaaaaaaaaaaaaaaaaaaaaaaaaaaaaaaaaaaaaaaaaaaaaaaaaaaaa

SEQ ID NO: 25840 - RNA, 4005 nt, Artificial Sequence
  SARS-CoV-2/Wuhan/WIV05/2019__EPI_ISL_402128 spike protein mRNA gc (1-1273)(H69del_V70del_Y453F_D614G_I692V_M1229I)
aggagaaagcuuaccauguucguguuccugguccuccugccccuggugagcucccagugcgugaaccucaccacccgcacgcagcugccgcccgccuacaccaacagcuucacccggggcgucuacuaccccgacaagguguuccgcuccagcgugcugcacuccacccaggaccucuuccugcccuucuucagcaacgucacgugguuccacgccaucuccgggaccaacggcaccaagcgguucgacaacccggugcugcccuucaacgacggggucuacuucgcgagcaccgagaaguccaacaucauccgcggcuggaucuucgggacgacccucgacagcaagacccagucccugcugaucgugaacaacgccaccaacguggucaucaaggugugcgaguuccaguucugcaacgaccccuuccucggcguguacuaccacaagaacaacaagagcuggauggaguccgaguuccgggucuacagcuccgccaacaacugcacguucgaguacgugagccagcccuuccugauggaccuggagggcaagcaggggaacuucaagaaccuccgcgaguucguguucaagaacaucgacggcuacuucaagaucuacuccaagcacaccccgaucaaccugguccgggaccugccccagggguucagcgcccucgagccccugguggaccugcccaucggcaucaacaucacccgcuuccagacccuccuggcccugcaccgguccuaccucacgccgggggacagcagcuccggcuggaccgcgggcgccgccgccuacuacgugggguaccugcagccccgcaccuuccugcucaaguacaacgagaacggcaccaucacggacgcggucgacugcgcccuggacccccugagcgagaccaagugcacccucaaguccuucaccguggagaaggggaucuaccagacgagcaacuuccgggugcagcccaccgaguccaucguccgcuucccgaacaucaccaaccugugccccuucggcgagguguucaacgccacccgguucgccagcgucuacgccuggaaccgcaagcggaucuccaacugcguggcggacuacagcgugcuguacaacuccgccagcuucuccacguucaagugcuacggcgucagccccaccaagcucaacgaccugugcuucaccaacguguacgccgacuccuucgugauccgcggggacgagguccggcagaucgcccccggccagaccgggaagaucgccgacuacaacuacaagcugccggacgacuucacgggcugcgugaucgcguggaacagcaacaaccucgacuccaaggucgggggcaacuacaacuaccuguuccgccuguuccgcaagagcaaccucaagcccuucgagcgggacaucuccaccgagaucuaccaggccggcagcacccccugcaacgggguggagggcuucaacugcuacuucccccugcaguccuacggguuccagccgaccaacggcgugggguaccagcccuaccggguggucgugcugagcuucgagcuccugcacgcccccgccacggugugcggccccaagaaguccaccaaccuggucaagaacaagugcgugaacuucaacuucaacggccucaccgggaccggcgugcugaccgagagcaacaagaaguuccugccguuccagcaguucgggcgcgacaucgccgacacgaccgacgcgguccgcgacccccagacccuggagauccucgacaucacccccugcagcuucggcgggguguccgugaucacgccgggcaccaacaccagcaaccaggucgccgugcuguaccagggcgugaacugcaccgagguccccguggccauccacgccgaccagcugacgcccaccuggcggguguacuccaccggcagcaacgucuuccagacccgcgccgggugccucaucggcgcggagcacgugaacaacuccuacgagugcgacauccccaucggggccggcaucugcgccagcuaccagacgcagaccaacuccccgcggcgcgcccggagcguggcgucccagagcgugaucgccuacaccaugucccugggcgccgagaacagcgucgccuacuccaacaacagcaucgccauccccaccaacuucacgaucuccgugaccaccgagauccugcccgugagcaugaccaagacgagcgucgacugcaccauguacaucugcggggacuccaccgagugcagcaaccuccugcugcaguacggcuccuucugcacccagcucaaccgcgcgcugacggggaucgccguggagcaggacaagaacacccaggagguguucgcccaggucaagcagaucuacaagacgcccccgaucaaggacuucggcggguucaacuucagccagauccugcccgaccccuccaagcccagcaagcgguccuucaucgaggaccuccuguucaacaaggugacccuggccgacgccggcuucaucaagcaguacggcgacugccucggggacaucgcggcccgcgaccugaucugcgcccagaaguucaacggccugaccgugcucccgccccugcugaccgacgagaugaucgcccaguacaccagcgcccuccuggcggggaccaucacguccggcuggaccuucggggccggcgccgcccugcagauccccuucgcgaugcagauggccuaccgguucaacggcaucggggucacccagaacgugcucuacgagaaccagaagcugaucgccaaccaguucaacagcgccaucggcaagauccaggacucccugagcuccaccgccagcgcgcucgggaagcugcaggacguggucaaccagaacgcccaggcccugaacacgcucgugaagcagcuguccagcaacuucggcgccaucuccagcgugcugaacgacauccucucccgccuggacaaggucgaggccgaggugcagaucgaccggcugaucaccgggcgccuccagagccugcagaccuacgugacccagcagcugauccgggcggccgagauccgcgccagcgccaaccucgccgcgaccaagauguccgagugcguccugggccagagcaagcggguggacuucugcggcaagggguaccaccugauguccuucccccagagcgccccgcacggcguggucuuccuccacgugacguacguccccgcccaggagaagaacuucaccaccgcccccgcgaucugccacgacgggaaggcccacuucccccgcgagggcguguucguguccaacgggacccacugguucgucacgcagcggaacuucuacgagccgcagaucaucaccaccgacaacaccuucgugagcggcaacugcgacguggucaucggcaucgugaacaacacgguguacgacccccugcagcccgagcuggacuccuucaaggaggagcucgacaaguacuucaagaaccacaccagccccgacgucgaccugggggacaucuccggcaucaacgccagcguggugaacauccagaaggagaucgaccgccugaacgaggucgccaagaaccucaacgagucccugaucgaccugcaggagcucgggaaguacgagcaguacaucaaguggccgugguacaucuggcugggcuucaucgccggccugaucgcgaucgugaucgugaccaucaugcucugcugcaugaccagcugcugcuccugccugaaggggugcugcagcugcggcuccugcugcaaguucgacgaggacgacagcgagcccguccugaagggggugaagcuccacuacacgugaggacuaguuauaagacugacuagcccgaugggccucccaacgggcccuccuccccuccuugcaccgagagaucuaaaaaaaaaaaaaaaaaaaaaaaaaaaaaaaaaaaaaaaaaaaaaaaaaaaaaaaaaaaaaaaaaaaaaaaaaaaaaaaaaaaaaaaaaaaaaaaaaaaa

SEQ ID NO: 25841 - RNA, 4002 nt, Artificial Sequence
  SARS-CoV-2/Wuhan/WIV05/2019__EPI_ISL_402128 spike protein mRNA gc (1-1273)(H69del_V70del_Y144del_N501Y_A570D_D614G_P681H_T716I_S982 A_D1118H)
aggagaaagcuuaccauguucguguuccugguccuccugccccuggugagcucccagugcgugaaccucaccacccgcacgcagcugccgcccgccuacaccaacagcuucacccggggcgucuacuaccccgacaagguguuccgcuccagcgugcugcacuccacccaggaccucuuccugcccuucuucagcaacgucacgugguuccacgccaucuccgggaccaacggcaccaagcgguucgacaacccggugcugcccuucaacgacggggucuacuucgcgagcaccgagaaguccaacaucauccgcggcuggaucuucgggacgacccucgacagcaagacccagucccugcugaucgugaacaacgccaccaacguggucaucaaggugugcgaguuccaguucugcaacgaccccuuccucggcguguaccacaagaacaacaagagcuggauggaguccgaguuccgggucuacagcuccgccaacaacugcacguucgaguacgugagccagcccuuccugauggaccuggagggcaagcaggggaacuucaagaaccuccgcgaguucguguucaagaacaucgacggcuacuucaagaucuacuccaagcacaccccgaucaaccugguccgggaccugccccagggguucagcgcccucgagccccugguggaccugcccaucggcaucaacaucacccgcuuccagacccuccuggcccugcaccgguccuaccucacgccgggggacagcagcuccggcuggaccgcgggcgccgccgccuacuacgugggguaccugcagccccgcaccuuccugcucaaguacaacgagaacggcaccaucacggacgcggucgacugcgcccuggacccccugagcgagaccaagugcacccucaaguccuucaccguggagaaggggaucuaccagacgagcaacuuccgggugcagcccaccgaguccaucguccgcuucccgaacaucaccaaccugugccccuucggcgagguguucaacgccacccgguucgccagcgucuacgccuggaaccgcaagcggaucuccaacugcguggcggacuacagcgugcuguacaacuccgccagcuucuccacguucaagugcuacggcgucagccccaccaagcucaacgaccugugcuucaccaacguguacgccgacuccuucgugauccgcggggacgagguccggcagaucgcccccggccagaccgggaagaucgccgacuacaacuacaagcugccggacgacuucacgggcugcgugaucgcguggaacagcaacaaccucgacuccaaggucgggggcaacuacaacuaccuguaccgccuguuccgcaagagcaaccucaagcccuucgagcgggacaucuccaccgagaucuaccaggccggcagcacccccugcaacgggguggagggcuucaacugcuacuucccccugcaguccuacggguuccagccgaccuacggcgugggguaccagcccuaccggguggucgugcugagcuucgagcuccugcacgcccccgccacggugugcggccccaagaaguccaccaaccuggucaagaacaagugcgugaacuucaacuucaacggccucaccgggaccggcgugcugaccgagagcaacaagaaguuccugccguuccagcaguucgggcgcgacaucgacgacacgaccgacgcgguccgcgacccccagacccuggagauccucgacaucacccccugcagcuucggcgggguguccgugaucacgccgggcaccaacaccagcaaccaggucgccgugcuguaccagggcgugaacugcaccgagguccccguggccauccacgccgaccagcugacgcccaccuggcggguguacuccaccggcagcaacgucuuccagacccgcgccgggugccucaucggcgcggagcacgugaacaacuccuacgagugcgacauccccaucggggccggcaucugcgccagcuaccagacgcagaccaacucccaccggcgcgcccggagcguggcgucccagagcaucaucgccuacaccaugucccugggcgccgagaacagcgucgccuacuccaacaacagcaucgccauccccaucaacuucacgaucuccgugaccaccgagauccugcccgugagcaugaccaagacgagcgucgacugcaccauguacaucugcggggacuccaccgagugcagcaaccuccugcugcaguacggcuccuucugcacccagcucaaccgcgcgcugacggggaucgccguggagcaggacaagaacacccaggagguguucgcccaggucaagcagaucuacaagacgcccccgaucaaggacuucggcggguucaacuucagccagauccugcccgaccccuccaagcccagcaagcgguccuucaucgaggaccuccuguucaacaaggugacccuggccgacgccggcuucaucaagcaguacggcgacugccucggggacaucgcggcccgcgaccugaucugcgcccagaaguucaacggccugaccgugcucccgccccugcugaccgacgagaugaucgcccaguacaccagcgcccuccuggcggggaccaucacguccggcuggaccuucggggccggcgccgcccugcagauccccuucgcgaugcagauggccuaccgguucaacggcaucggggucacccagaacgugcucuacgagaaccagaagcugaucgccaaccaguucaacagcgccaucggcaagauccaggacucccugagcuccaccgccagcgcgcucgggaagcugcaggacguggucaaccagaacgcccaggcccugaacacgcucgugaagcagcuguccagcaacuucggcgccaucuccagcgugcugaacgacauccucgcccgccuggacaaggucgaggccgaggugcagaucgaccggcugaucaccgggcgccuccagagccugcagaccuacgugacccagcagcugauccgggcggccgagauccgcgccagcgccaaccucgccgcgaccaagauguccgagugcguccugggccagagcaagcggguggacuucugcggcaagggguaccaccugauguccuucccccagagcgccccgcacggcguggucuuccuccacgugacguacguccccgcccaggagaagaacuucaccaccgcccccgcgaucugccacgacgggaaggcccacuucccccgcgagggcguguucguguccaacgggacccacugguucgucacgcagcggaacuucuacgagccgcagaucaucaccacccacaacaccuucgugagcggcaacugcgacguggucaucggcaucgugaacaacacgguguacgacccccugcagcccgagcuggacuccuucaaggaggagcucgacaaguacuucaagaaccacaccagccccgacgucgaccugggggacaucuccggcaucaacgccagcguggugaacauccagaaggagaucgaccgccugaacgaggucgccaagaaccucaacgagucccugaucgaccugcaggagcucgggaaguacgagcaguacaucaaguggccgugguacaucuggcugggcuucaucgccggccugaucgcgaucgugauggugaccaucaugcucugcugcaugaccagcugcugcuccugccugaaggggugcugcagcugcggcuccugcugcaaguucgacgaggacgacagcgagcccguccugaagggggugaagcuccacuacacgugaggacuaguuauaagacugacuagcccgaugggccucccaacgggcccuccuccccuccuugcaccgagagaucuaaaaaaaaaaaaaaaaaaaaaaaaaaaaaaaaaaaaaaaaaaaaaaaaaaaaaaaaaaaaaaaaaaaaaaaaaaaaaaaaaaaaaaaaaaaaaaaaaaaa

SEQ ID NO: 25842 - RNA, 4011 nt, Artificial Sequence
  SARS-CoV-2/Wuhan/WIV05/2019__EPI_ISL_402128 spike protein mRNA gc (1-1273)(K417N_E484K_N501Y_D614G)
aggagaaagcuuaccauguucguguuccugguccuccugccccuggugagcucccagugcgugaaccucaccacccgcacgcagcugccgcccgccuacaccaacagcuucacccggggcgucuacuaccccgacaagguguuccgcuccagcgugcugcacuccacccaggaccucuuccugcccuucuucagcaacgucacgugguuccacgccauccacguguccgggaccaacggcaccaagcgguucgacaacccggugcugcccuucaacgacggggucuacuucgcgagcaccgagaaguccaacaucauccgcggcuggaucuucgggacgacccucgacagcaagacccagucccugcugaucgugaacaacgccaccaacguggucaucaaggugugcgaguuccaguucugcaacgaccccuuccucggcguguacuaccacaagaacaacaagagcuggauggaguccgaguuccgggucuacagcuccgccaacaacugcacguucgaguacgugagccagcccuuccugauggaccuggagggcaagcaggggaacuucaagaaccuccgcgaguucguguucaagaacaucgacggcuacuucaagaucuacuccaagcacaccccgaucaaccugguccgggaccugccccagggguucagcgcccucgagccccugguggaccugcccaucggcaucaacaucacccgcuuccagacccuccuggcccugcaccgguccuaccucacgccgggggacagcagcuccggcuggaccgcgggcgccgccgccuacuacgugggguaccugcagccccgcaccuuccugcucaaguacaacgagaacggcaccaucacggacgcggucgacugcgcccuggacccccugagcgagaccaagugcacccucaaguccuucaccguggagaaggggaucuaccagacgagcaacuuccgggugcagcccaccgaguccaucguccgcuucccgaacaucaccaaccugugccccuucggcgagguguucaacgccacccgguucgccagcgucuacgccuggaaccgcaagcggaucuccaacugcguggcggacuacagcgugcuguacaacuccgccagcuucuccacguucaagugcuacggcgucagccccaccaagcucaacgaccugugcuucaccaacguguacgccgacuccuucgugauccgcggggacgagguccggcagaucgcccccggccagaccgggaacaucgccgacuacaacuacaagcugccggacgacuucacgggcugcgugaucgcguggaacagcaacaaccucgacuccaaggucgggggcaacuacaacuaccuguaccgccuguuccgcaagagcaaccucaagcccuucgagcgggacaucuccaccgagaucuaccaggccggcagcacccccugcaacggggugaagggcuucaacugcuacuucccccugcaguccuacggguuccagccgaccuacggcgugggguaccagcccuaccggguggucgugcugagcuucgagcuccugcacgcccccgccacggugugcggccccaagaaguccaccaaccuggucaagaacaagugcgugaacuucaacuucaacggccucaccgggaccggcgugcugaccgagagcaacaagaaguuccugccguuccagcaguucgggcgcgacaucgccgacacgaccgacgcgguccgcgacccccagacccuggagauccucgacaucacccccugcagcuucggcgggguguccgugaucacgccgggcaccaacaccagcaaccaggucgccgugcuguaccagggcgugaacugcaccgagguccccguggccauccacgccgaccagcugacgcccaccuggcggguguacuccaccggcagcaacgucuuccagacccgcgccgggugccucaucggcgcggagcacgugaacaacuccuacgagugcgacauccccaucggggccggcaucugcgccagcuaccagacgcagaccaacuccccgcggcgcgcccggagcguggcgucccagagcaucaucgccuacaccaugucccugggcgccgagaacagcgucgccuacuccaacaacagcaucgccauccccaccaacuucacgaucuccgugaccaccgagauccugcccgugagcaugaccaagacgagcgucgacugcaccauguacaucugcggggacuccaccgagugcagcaaccuccugcugcaguacggcuccuucugcacccagcucaaccgcgcgcugacggggaucgccguggagcaggacaagaacacccaggagguguucgcccaggucaagcagaucuacaagacgcccccgaucaaggacuucggcggguucaacuucagccagauccugcccgaccccuccaagcccagcaagcgguccuucaucgaggaccuccuguucaacaaggugacccuggccgacgccggcuucaucaagcaguacggcgacugccucggggacaucgcggcccgcgaccugaucugcgcccagaaguucaacggccugaccgugcucccgccccugcugaccgacgagaugaucgcccaguacaccagcgcccuccuggcggggaccaucacguccggcuggaccuucggggccggcgccgcccugcagauccccuucgcgaugcagauggccuaccgguucaacggcaucggggucacccagaacgugcucuacgagaaccagaagcugaucgccaaccaguucaacagcgccaucggcaagauccaggacucccugagcuccaccgccagcgcgcucgggaagcugcaggacguggucaaccagaacgcccaggcccugaacacgcucgugaagcagcuguccagcaacuucggcgccaucuccagcgugcugaacgacauccucucccgccuggacaaggucgaggccgaggugcagaucgaccggcugaucaccgggcgccuccagagccugcagaccuacgugacccagcagcugauccgggcggccgagauccgcgccagcgccaaccucgccgcgaccaagauguccgagugcguccugggccagagcaagcggguggacuucugcggcaagggguaccaccugauguccuucccccagagcgccccgcacggcguggucuuccuccacgugacguacguccccgcccaggagaagaacuucaccaccgcccccgcgaucugccacgacgggaaggcccacuucccccgcgagggcguguucguguccaacgggacccacugguucgucacgcagcggaacuucuacgagccgcagaucaucaccaccgacaacaccuucgugagcggcaacugcgacguggucaucggcaucgugaacaacacgguguacgacccccugcagcccgagcuggacuccuucaaggaggagcucgacaaguacuucaagaaccacaccagccccgacgucgaccugggggacaucuccggcaucaacgccagcguggugaacauccagaaggagaucgaccgccugaacgaggucgccaagaaccucaacgagucccugaucgaccugcaggagcucgggaaguacgagcaguacaucaaguggccgugguacaucuggcugggcuucaucgccggccugaucgcgaucgugauggugaccaucaugcucugcugcaugaccagcugcugcuccugccugaaggggugcugcagcugcggcuccugcugcaaguucgacgaggacgacagcgagcccguccugaagggggugaagcuccacuacacgugaggacuaguuauaagacugacuagcccgaugggccucccaacgggcccuccuccccuccuugcaccgagagaucuaaaaaaaaaaaaaaaaaaaaaaaaaaaaaaaaaaaaaaaaaaaaaaaaaaaaaaaaaaaaaaaaaaaaaaaaaaaaaaaaaaaaaaaaaaaaaaaaaaaa

SEQ ID NO: 25843 - RNA, 4002 nt, Artificial Sequence
  SARS-CoV-2/Wuhan/WIV05/2019__EPI_ISL_402128 spike protein mRNA gc (1-1273)(L18F_D80A_D215G_L242del_A243del_L244del_R246I_K417N_E484 K_N501Y_D614G_A701V)
aggagaaagcuuaccauguucguguuccugguccuccugccccuggugagcucccagugcgugaacuucaccacccgcacgcagcugccgcccgccuacaccaacagcuucacccggggcgucuacuaccccgacaagguguuccgcuccagcgugcugcacuccacccaggaccucuuccugcccuucuucagcaacgucacgugguuccacgccauccacguguccgggaccaacggcaccaagcgguucgccaacccggugcugcccuucaacgacggggucuacuucgcgagcaccgagaaguccaacaucauccgcggcuggaucuucgggacgacccucgacagcaagacccagucccugcugaucgugaacaacgccaccaacguggucaucaaggugugcgaguuccaguucugcaacgaccccuuccucggcguguacuaccacaagaacaacaagagcuggauggaguccgaguuccgggucuacagcuccgccaacaacugcacguucgaguacgugagccagcccuuccugauggaccuggagggcaagcaggggaacuucaagaaccuccgcgaguucguguucaagaacaucgacggcuacuucaagaucuacuccaagcacaccccgaucaaccugguccggggccugccccagggguucagcgcccucgagccccugguggaccugcccaucggcaucaacaucacccgcuuccagacccuccacaucuccuaccucacgccgggggacagcagcuccggcuggaccgcgggcgccgccgccuacuacgugggguaccugcagccccgcaccuuccugcucaaguacaacgagaacggcaccaucacggacgcggucgacugcgcccuggacccccugagcgagaccaagugcacccucaaguccuucaccguggagaaggggaucuaccagacgagcaacuuccgggugcagcccaccgaguccaucguccgcuucccgaacaucaccaaccugugccccuucggcgagguguucaacgccacccgguucgccagcgucuacgccuggaaccgcaagcggaucuccaacugcguggcggacuacagcgugcuguacaacuccgccagcuucuccacguucaagugcuacggcgucagccccaccaagcucaacgaccugugcuucaccaacguguacgccgacuccuucgugauccgcggggacgagguccggcagaucgcccccggccagaccgggaacaucgccgacuacaacuacaagcugccggacgacuucacgggcugcgugaucgcguggaacagcaacaaccucgacuccaaggucgggggcaacuacaacuaccuguaccgccuguuccgcaagagcaaccucaagcccuucgagcgggacaucuccaccgagaucuaccaggccggcagcacccccugcaacggggugaagggcuucaacugcuacuucccccugcaguccuacggguuccagccgaccuacggcgugggguaccagcccuaccggguggucgugcugagcuucgagcuccugcacgcccccgccacggugugcggccccaagaaguccaccaaccuggucaagaacaagugcgugaacuucaacuucaacggccucaccgggaccggcgugcugaccgagagcaacaagaaguuccugccguuccagcaguucgggcgcgacaucgccgacacgaccgacgcgguccgcgacccccagacccuggagauccucgacaucacccccugcagcuucggcgggguguccgugaucacgccgggcaccaacaccagcaaccaggucgccgugcuguaccagggcgugaacugcaccgagguccccguggccauccacgccgaccagcugacgcccaccuggcggguguacuccaccggcagcaacgucuuccagacccgcgccgggugccucaucggcgcggagcacgugaacaacuccuacgagugcgacauccccaucggggccggcaucugcgccagcuaccagacgcagaccaacuccccgcggcgcgcccggagcguggcgucccagagcaucaucgccuacaccaugucccugggcguggagaacagcgucgccuacuccaacaacagcaucgccauccccaccaacuucacgaucuccgugaccaccgagauccugcccgugagcaugaccaagacgagcgucgacugcaccauguacaucugcggggacuccaccgagugcagcaaccuccugcugcaguacggcuccuucugcacccagcucaaccgcgcgcugacggggaucgccguggagcaggacaagaacacccaggagguguucgcccaggucaagcagaucuacaagacgcccccgaucaaggacuucggcggguucaacuucagccagauccugcccgaccccuccaagcccagcaagcgguccuucaucgaggaccuccuguucaacaaggugacccuggccgacgccggcuucaucaagcaguacggcgacugccucggggacaucgcggcccgcgaccugaucugcgcccagaaguucaacggccugaccgugcucccgccccugcugaccgacgagaugaucgcccaguacaccagcgcccuccuggcggggaccaucacguccggcuggaccuucggggccggcgccgcccugcagauccccuucgcgaugcagauggccuaccgguucaacggcaucggggucacccagaacgugcucuacgagaaccagaagcugaucgccaaccaguucaacagcgccaucggcaagauccaggacucccugagcuccaccgccagcgcgcucgggaagcugcaggacguggucaaccagaacgcccaggcccugaacacgcucgugaagcagcuguccagcaacuucggcgccaucuccagcgugcugaacgacauccucucccgccuggacaaggucgaggccgaggugcagaucgaccggcugaucaccgggcgccuccagagccugcagaccuacgugacccagcagcugauccgggcggccgagauccgcgccagcgccaaccucgccgcgaccaagauguccgagugcguccugggccagagcaagcggguggacuucugcggcaagggguaccaccugauguccuucccccagagcgccccgcacggcguggucuuccuccacgugacguacguccccgcccaggagaagaacuucaccaccgcccccgcgaucugccacgacgggaaggcccacuucccccgcgagggcguguucguguccaacgggacccacugguucgucacgcagcggaacuucuacgagccgcagaucaucaccaccgacaacaccuucgugagcggcaacugcgacguggucaucggcaucgugaacaacacgguguacgacccccugcagcccgagcuggacuccuucaaggaggagcucgacaaguacuucaagaaccacaccagccccgacgucgaccugggggacaucuccggcaucaacgccagcguggugaacauccagaaggagaucgaccgccugaacgaggucgccaagaaccucaacgagucccugaucgaccugcaggagcucgggaaguacgagcaguacaucaaguggccgugguacaucuggcugggcuucaucgccggccugaucgcgaucgugauggugaccaucaugcucugcugcaugaccagcugcugcuccugccugaaggggugcugcagcugcggcuccugcugcaaguucgacgaggacgacagcgagcccguccugaagggggugaagcuccacuacacgugaggacuaguuauaagacugacuagcccgaugggccucccaacgggcccuccuccccuccuugcaccgagagaucuaaaaaaaaaaaaaaaaaaaaaaaaaaaaaaaaaaaaaaaaaaaaaaaaaaaaaaaaaaaaaaaaaaaaaaaaaaaaaaaaaaaaaaaaaaaaaaaaaaaa

SEQ ID NO: 25844 - RNA, 4011 nt, Artificial Sequence
  SARS-CoV-2/Wuhan/WIV05/2019__EPI_ISL_402128 spike protein mRNA gc (1-1273)(E484K_D614G)
aggagaaagcuuaccauguucguguuccugguccuccugccccuggugagcucccagugcgugaaccucaccacccgcacgcagcugccgcccgccuacaccaacagcuucacccggggcgucuacuaccccgacaagguguuccgcuccagcgugcugcacuccacccaggaccucuuccugcccuucuucagcaacgucacgugguuccacgccauccacguguccgggaccaacggcaccaagcgguucgacaacccggugcugcccuucaacgacggggucuacuucgcgagcaccgagaaguccaacaucauccgcggcuggaucuucgggacgacccucgacagcaagacccagucccugcugaucgugaacaacgccaccaacguggucaucaaggugugcgaguuccaguucugcaacgaccccuuccucggcguguacuaccacaagaacaacaagagcuggauggaguccgaguuccgggucuacagcuccgccaacaacugcacguucgaguacgugagccagcccuuccugauggaccuggagggcaagcaggggaacuucaagaaccuccgcgaguucguguucaagaacaucgacggcuacuucaagaucuacuccaagcacaccccgaucaaccugguccgggaccugccccagggguucagcgcccucgagccccugguggaccugcccaucggcaucaacaucacccgcuuccagacccuccuggcccugcaccgguccuaccucacgccgggggacagcagcuccggcuggaccgcgggcgccgccgccuacuacgugggguaccugcagccccgcaccuuccugcucaaguacaacgagaacggcaccaucacggacgcggucgacugcgcccuggacccccugagcgagaccaagugcacccucaaguccuucaccguggagaaggggaucuaccagacgagcaacuuccgggugcagcccaccgaguccaucguccgcuucccgaacaucaccaaccugugccccuucggcgagguguucaacgccacccgguucgccagcgucuacgccuggaaccgcaagcggaucuccaacugcguggcggacuacagcgugcuguacaacuccgccagcuucuccacguucaagugcuacggcgucagccccaccaagcucaacgaccugugcuucaccaacguguacgccgacuccuucgugauccgcggggacgagguccggcagaucgcccccggccagaccgggaagaucgccgacuacaacuacaagcugccggacgacuucacgggcugcgugaucgcguggaacagcaacaaccucgacuccaaggucgggggcaacuacaacuaccuguaccgccuguuccgcaagagcaaccucaagcccuucgagcgggacaucuccaccgagaucuaccaggccggcagcacccccugcaacggggugaagggcuucaacugcuacuucccccugcaguccuacggguuccagccgaccaacggcgugggguaccagcccuaccggguggucgugcugagcuucgagcuccugcacgcccccgccacggugugcggccccaagaaguccaccaaccuggucaagaacaagugcgugaacuucaacuucaacggccucaccgggaccggcgugcugaccgagagcaacaagaaguuccugccguuccagcaguucgggcgcgacaucgccgacacgaccgacgcgguccgcgacccccagacccuggagauccucgacaucacccccugcagcuucggcgggguguccgugaucacgccgggcaccaacaccagcaaccaggucgccgugcuguaccagggcgugaacugcaccgagguccccguggccauccacgccgaccagcugacgcccaccuggcggguguacuccaccggcagcaacgucuuccagacccgcgccgggugccucaucggcgcggagcacgugaacaacuccuacgagugcgacauccccaucggggccggcaucugcgccagcuaccagacgcagaccaacuccccgcggcgcgcccggagcguggcgucccagagcaucaucgccuacaccaugucccugggcgccgagaacagcgucgccuacuccaacaacagcaucgccauccccaccaacuucacgaucuccgugaccaccgagauccugcccgugagcaugaccaagacgagcgucgacugcaccauguacaucugcggggacuccaccgagugcagcaaccuccugcugcaguacggcuccuucugcacccagcucaaccgcgcgcugacggggaucgccguggagcaggacaagaacacccaggagguguucgcccaggucaagcagaucuacaagacgcccccgaucaaggacuucggcggguucaacuucagccagauccugcccgaccccuccaagcccagcaagcgguccuucaucgaggaccuccuguucaacaaggugacccuggccgacgccggcuucaucaagcaguacggcgacugccucggggacaucgcggcccgcgaccugaucugcgcccagaaguucaacggccugaccgugcucccgccccugcugaccgacgagaugaucgcccaguacaccagcgcccuccuggcggggaccaucacguccggcuggaccuucggggccggcgccgcccugcagauccccuucgcgaugcagauggccuaccgguucaacggcaucggggucacccagaacgugcucuacgagaaccagaagcugaucgccaaccaguucaacagcgccaucggcaagauccaggacucccugagcuccaccgccagcgcgcucgggaagcugcaggacguggucaaccagaacgcccaggcccugaacacgcucgugaagcagcuguccagcaacuucggcgccaucuccagcgugcugaacgacauccucucccgccuggacaaggucgaggccgaggugcagaucgaccggcugaucaccgggcgccuccagagccugcagaccuacgugacccagcagcugauccgggcggccgagauccgcgccagcgccaaccucgccgcgaccaagauguccgagugcguccugggccagagcaagcggguggacuucugcggcaagggguaccaccugauguccuucccccagagcgccccgcacggcguggucuuccuccacgugacguacguccccgcccaggagaagaacuucaccaccgcccccgcgaucugccacgacgggaaggcccacuucccccgcgagggcguguucguguccaacgggacccacugguucgucacgcagcggaacuucuacgagccgcagaucaucaccaccgacaacaccuucgugagcggcaacugcgacguggucaucggcaucgugaacaacacgguguacgacccccugcagcccgagcuggacuccuucaaggaggagcucgacaaguacuucaagaaccacaccagccccgacgucgaccugggggacaucuccggcaucaacgccagcguggugaacauccagaaggagaucgaccgccugaacgaggucgccaagaaccucaacgagucccugaucgaccugcaggagcucgggaaguacgagcaguacaucaaguggccgugguacaucuggcugggcuucaucgccggccugaucgcgaucgugauggugaccaucaugcucugcugcaugaccagcugcugcuccugccugaaggggugcugcagcugcggcuccugcugcaaguucgacgaggacgacagcgagcccguccugaagggggugaagcuccacuacacgugaggacuaguuauaagacugacuagcccgaugggccucccaacgggcccuccuccccuccuugcaccgagagaucuaaaaaaaaaaaaaaaaaaaaaaaaaaaaaaaaaaaaaaaaaaaaaaaaaaaaaaaaaaaaaaaaaaaaaaaaaaaaaaaaaaaaaaaaaaaaaaaaaaaa

SEQ ID NO: 25845 - RNA, 4011 nt, Artificial Sequence
  SARS-CoV-2/Wuhan/WIV05/2019__EPI_ISL_402128 spike protein mRNA gc (1-1273)(L18F_T20N_P26S_D138Y_R190S_K417T_E484K_N501Y_D614G_H655Y _T1027I)
aggagaaagcuuaccauguucguguuccugguccuccugccccuggugagcucccagugcgugaacuucaccaaccgcacgcagcugccgagcgccuacaccaacagcuucacccggggcgucuacuaccccgacaagguguuccgcuccagcgugcugcacuccacccaggaccucuuccugcccuucuucagcaacgucacgugguuccacgccauccacguguccgggaccaacggcaccaagcgguucgacaacccggugcugcccuucaacgacggggucuacuucgcgagcaccgagaaguccaacaucauccgcggcuggaucuucgggacgacccucgacagcaagacccagucccugcugaucgugaacaacgccaccaacguggucaucaaggugugcgaguuccaguucugcaacuaccccuuccucggcguguacuaccacaagaacaacaagagcuggauggaguccgaguuccgggucuacagcuccgccaacaacugcacguucgaguacgugagccagcccuuccugauggaccuggagggcaagcaggggaacuucaagaaccucagcgaguucguguucaagaacaucgacggcuacuucaagaucuacuccaagcacaccccgaucaaccugguccgggaccugccccagggguucagcgcccucgagccccugguggaccugcccaucggcaucaacaucacccgcuuccagacccuccuggcccugcaccgguccuaccucacgccgggggacagcagcuccggcuggaccgcgggcgccgccgccuacuacgugggguaccugcagccccgcaccuuccugcucaaguacaacgagaacggcaccaucacggacgcggucgacugcgcccuggacccccugagcgagaccaagugcacccucaaguccuucaccguggagaaggggaucuaccagacgagcaacuuccgggugcagcccaccgaguccaucguccgcuucccgaacaucaccaaccugugccccuucggcgagguguucaacgccacccgguucgccagcgucuacgccuggaaccgcaagcggaucuccaacugcguggcggacuacagcgugcuguacaacuccgccagcuucuccacguucaagugcuacggcgucagccccaccaagcucaacgaccugugcuucaccaacguguacgccgacuccuucgugauccgcggggacgagguccggcagaucgcccccggccagaccgggaccaucgccgacuacaacuacaagcugccggacgacuucacgggcugcgugaucgcguggaacagcaacaaccucgacuccaaggucgggggcaacuacaacuaccuguaccgccuguuccgcaagagcaaccucaagcccuucgagcgggacaucuccaccgagaucuaccaggccggcagcacccccugcaacggggugaagggcuucaacugcuacuucccccugcaguccuacggguuccagccgaccuacggcgugggguaccagcccuaccggguggucgugcugagcuucgagcuccugcacgcccccgccacggugugcggccccaagaaguccaccaaccuggucaagaacaagugcgugaacuucaacuucaacggccucaccgggaccggcgugcugaccgagagcaacaagaaguuccugccguuccagcaguucgggcgcgacaucgccgacacgaccgacgcgguccgcgacccccagacccuggagauccucgacaucacccccugcagcuucggcgggguguccgugaucacgccgggcaccaacaccagcaaccaggucgccgugcuguaccagggcgugaacugcaccgagguccccguggccauccacgccgaccagcugacgcccaccuggcggguguacuccaccggcagcaacgucuuccagacccgcgccgggugccucaucggcgcggaguacgugaacaacuccuacgagugcgacauccccaucggggccggcaucugcgccagcuaccagacgcagaccaacuccccgcggcgcgcccggagcguggcgucccagagcaucaucgccuacaccaugucccugggcgccgagaacagcgucgccuacuccaacaacagcaucgccauccccaccaacuucacgaucuccgugaccaccgagauccugcccgugagcaugaccaagacgagcgucgacugcaccauguacaucugcggggacuccaccgagugcagcaaccuccugcugcaguacggcuccuucugcacccagcucaaccgcgcgcugacggggaucgccguggagcaggacaagaacacccaggagguguucgcccaggucaagcagaucuacaagacgcccccgaucaaggacuucggcggguucaacuucagccagauccugcccgaccccuccaagcccagcaagcgguccuucaucgaggaccuccuguucaacaaggugacccuggccgacgccggcuucaucaagcaguacggcgacugccucggggacaucgcggcccgcgaccugaucugcgcccagaaguucaacggccugaccgugcucccgccccugcugaccgacgagaugaucgcccaguacaccagcgcccuccuggcggggaccaucacguccggcuggaccuucggggccggcgccgcccugcagauccccuucgcgaugcagauggccuaccgguucaacggcaucggggucacccagaacgugcucuacgagaaccagaagcugaucgccaaccaguucaacagcgccaucggcaagauccaggacucccugagcuccaccgccagcgcgcucgggaagcugcaggacguggucaaccagaacgcccaggcccugaacacgcucgugaagcagcuguccagcaacuucggcgccaucuccagcgugcugaacgacauccucucccgccuggacaaggucgaggccgaggugcagaucgaccggcugaucaccgggcgccuccagagccugcagaccuacgugacccagcagcugauccgggcggccgagauccgcgccagcgccaaccucgccgcgaucaagauguccgagugcguccugggccagagcaagcggguggacuucugcggcaagggguaccaccugauguccuucccccagagcgccccgcacggcguggucuuccuccacgugacguacguccccgcccaggagaagaacuucaccaccgcccccgcgaucugccacgacgggaaggcccacuucccccgcgagggcguguucguguccaacgggacccacugguucgucacgcagcggaacuucuacgagccgcagaucaucaccaccgacaacaccuucgugagcggcaacugcgacguggucaucggcaucgugaacaacacgguguacgacccccugcagcccgagcuggacuccuucaaggaggagcucgacaaguacuucaagaaccacaccagccccgacgucgaccugggggacaucuccggcaucaacgccagcguggugaacauccagaaggagaucgaccgccugaacgaggucgccaagaaccucaacgagucccugaucgaccugcaggagcucgggaaguacgagcaguacaucaaguggccgugguacaucuggcugggcuucaucgccggccugaucgcgaucgugauggugaccaucaugcucugcugcaugaccagcugcugcuccugccugaaggggugcugcagcugcggcuccugcugcaaguucgacgaggacgacagcgagcccguccugaagggggugaagcuccacuacacgugaggacuaguuauaagacugacuagcccgaugggccucccaacgggcccuccuccccuccuugcaccgagagaucuaaaaaaaaaaaaaaaaaaaaaaaaaaaaaaaaaaaaaaaaaaaaaaaaaaaaaaaaaaaaaaaaaaaaaaaaaaaaaaaaaaaaaaaaaaaaaaaaaaaa

SEQ ID NO: 25846 - RNA, 4011 nt, Artificial Sequence
  SARS-CoV-2/Wuhan/WIV05/2019__EPI_ISL_402128 spike protein mRNA gc (1-1273)(S13I_W152C_L452R_D614G)
aggagaaagcuuaccauguucguguuccugguccuccugccccuggugagcauccagugcgugaaccucaccacccgcacgcagcugccgcccgccuacaccaacagcuucacccggggcgucuacuaccccgacaagguguuccgcuccagcgugcugcacuccacccaggaccucuuccugcccuucuucagcaacgucacgugguuccacgccauccacguguccgggaccaacggcaccaagcgguucgacaacccggugcugcccuucaacgacggggucuacuucgcgagcaccgagaaguccaacaucauccgcggcuggaucuucgggacgacccucgacagcaagacccagucccugcugaucgugaacaacgccaccaacguggucaucaaggugugcgaguuccaguucugcaacgaccccuuccucggcguguacuaccacaagaacaacaagagcugcauggaguccgaguuccgggucuacagcuccgccaacaacugcacguucgaguacgugagccagcccuuccugauggaccuggagggcaagcaggggaacuucaagaaccuccgcgaguucguguucaagaacaucgacggcuacuucaagaucuacuccaagcacaccccgaucaaccugguccgggaccugccccagggguucagcgcccucgagccccugguggaccugcccaucggcaucaacaucacccgcuuccagacccuccuggcccugcaccgguccuaccucacgccgggggacagcagcuccggcuggaccgcgggcgccgccgccuacuacgugggguaccugcagccccgcaccuuccugcucaaguacaacgagaacggcaccaucacggacgcggucgacugcgcccuggacccccugagcgagaccaagugcacccucaaguccuucaccguggagaaggggaucuaccagacgagcaacuuccgggugcagcccaccgaguccaucguccgcuucccgaacaucaccaaccugugccccuucggcgagguguucaacgccacccgguucgccagcgucuacgccuggaaccgcaagcggaucuccaacugcguggcggacuacagcgugcuguacaacuccgccagcuucuccacguucaagugcuacggcgucagccccaccaagcucaacgaccugugcuucaccaacguguacgccgacuccuucgugauccgcggggacgagguccggcagaucgcccccggccagaccgggaagaucgccgacuacaacuacaagcugccggacgacuucacgggcugcgugaucgcguggaacagcaacaaccucgacuccaaggucgggggcaacuacaacuaccgcuaccgccuguuccgcaagagcaaccucaagcccuucgagcgggacaucuccaccgagaucuaccaggccggcagcacccccugcaacgggguggagggcuucaacugcuacuucccccugcaguccuacggguuccagccgaccaacggcgugggguaccagcccuaccggguggucgugcugagcuucgagcuccugcacgcccccgccacggugugcggccccaagaaguccaccaaccuggucaagaacaagugcgugaacuucaacuucaacggccucaccgggaccggcgugcugaccgagagcaacaagaaguuccugccguuccagcaguucgggcgcgacaucgccgacacgaccgacgcgguccgcgacccccagacccuggagauccucgacaucacccccugcagcuucggcgggguguccgugaucacgccgggcaccaacaccagcaaccaggucgccgugcuguaccagggcgugaacugcaccgagguccccguggccauccacgccgaccagcugacgcccaccuggcggguguacuccaccggcagcaacgucuuccagacccgcgccgggugccucaucggcgcggagcacgugaacaacuccuacgagugcgacauccccaucggggccggcaucugcgccagcuaccagacgcagaccaacuccccgcggcgcgcccggagcguggcgucccagagcaucaucgccuacaccaugucccugggcgccgagaacagcgucgccuacuccaacaacagcaucgccauccccaccaacuucacgaucuccgugaccaccgagauccugcccgugagcaugaccaagacgagcgucgacugcaccauguacaucugcggggacuccaccgagugcagcaaccuccugcugcaguacggcuccuucugcacccagcucaaccgcgcgcugacggggaucgccguggagcaggacaagaacacccaggagguguucgcccaggucaagcagaucuacaagacgcccccgaucaaggacuucggcggguucaacuucagccagauccugcccgaccccuccaagcccagcaagcgguccuucaucgaggaccuccuguucaacaaggugacccuggccgacgccggcuucaucaagcaguacggcgacugccucggggacaucgcggcccgcgaccugaucugcgcccagaaguucaacggccugaccgugcucccgccccugcugaccgacgagaugaucgcccaguacaccagcgcccuccuggcggggaccaucacguccggcuggaccuucggggccggcgccgcccugcagauccccuucgcgaugcagauggccuaccgguucaacggcaucggggucacccagaacgugcucuacgagaaccagaagcugaucgccaaccaguucaacagcgccaucggcaagauccaggacucccugagcuccaccgccagcgcgcucgggaagcugcaggacguggucaaccagaacgcccaggcccugaacacgcucgugaagcagcuguccagcaacuucggcgccaucuccagcgugcugaacgacauccucucccgccuggacaaggucgaggccgaggugcagaucgaccggcugaucaccgggcgccuccagagccugcagaccuacgugacccagcagcugauccgggcggccgagauccgcgccagcgccaaccucgccgcgaccaagauguccgagugcguccugggccagagcaagcggguggacuucugcggcaagggguaccaccugauguccuucccccagagcgccccgcacggcguggucuuccuccacgugacguacguccccgcccaggagaagaacuucaccaccgcccccgcgaucugccacgacgggaaggcccacuucccccgcgagggcguguucguguccaacgggacccacugguucgucacgcagcggaacuucuacgagccgcagaucaucaccaccgacaacaccuucgugagcggcaacugcgacguggucaucggcaucgugaacaacacgguguacgacccccugcagcccgagcuggacuccuucaaggaggagcucgacaaguacuucaagaaccacaccagccccgacgucgaccugggggacaucuccggcaucaacgccagcguggugaacauccagaaggagaucgaccgccugaacgaggucgccaagaaccucaacgagucccugaucgaccugcaggagcucgggaaguacgagcaguacaucaaguggccgugguacaucuggcugggcuucaucgccggccugaucgcgaucgugauggugaccaucaugcucugcugcaugaccagcugcugcuccugccugaaggggugcugcagcugcggcuccugcugcaaguucgacgaggacgacagcgagcccguccugaagggggugaagcuccacuacacgugaggacuaguuauaagacugacuagcccgaugggccucccaacgggcccuccuccccuccuugcaccgagagaucuaaaaaaaaaaaaaaaaaaaaaaaaaaaaaaaaaaaaaaaaaaaaaaaaaaaaaaaaaaaaaaaaaaaaaaaaaaaaaaaaaaaaaaaaaaaaaaaaaaaa

SEQ ID NO: 25847 - RNA, 4011 nt, Artificial Sequence; identical to SEQ ID NO: 25829
  SARS-CoV-2/Wuhan/WIV05/2019__EPI_ISL_402128 spike protein mRNA gc (1-1273)

SEQ ID NO: 25848 - RNA, 4011 nt, Artificial Sequence
  SARS-CoV-2/Wuhan/WIV05/2019__EPI_ISL_402128 spike protein mRNA gc (1-1273)(D614G)
aggagaaagcuuaccauguucguguuccugguccuccugccccuggugagcucccagugcgugaaccucaccacccgcacgcagcugccgcccgccuacaccaacagcuucacccggggcgucuacuaccccgacaagguguuccgcuccagcgugcugcacuccacccaggaccucuuccugcccuucuucagcaacgucacgugguuccacgccauccacguguccgggaccaacggcaccaagcgguucgacaacccggugcugcccuucaacgacggggucuacuucgcgagcaccgagaaguccaacaucauccgcggcuggaucuucgggacgacccucgacagcaagacccagucccugcugaucgugaacaacgccaccaacguggucaucaaggugugcgaguuccaguucugcaacgaccccuuccucggcguguacuaccacaagaacaacaagagcuggauggaguccgaguuccgggucuacagcuccgccaacaacugcacguucgaguacgugagccagcccuuccugauggaccuggagggcaagcaggggaacuucaagaaccuccgcgaguucguguucaagaacaucgacggcuacuucaagaucuacuccaagcacaccccgaucaaccugguccgggaccugccccagggguucagcgcccucgagccccugguggaccugcccaucggcaucaacaucacccgcuuccagacccuccuggcccugcaccgguccuaccucacgccgggggacagcagcuccggcuggaccgcgggcgccgccgccuacuacgugggguaccugcagccccgcaccuuccugcucaaguacaacgagaacggcaccaucacggacgcggucgacugcgcccuggacccccugagcgagaccaagugcacccucaaguccuucaccguggagaaggggaucuaccagacgagcaacuuccgggugcagcccaccgaguccaucguccgcuucccgaacaucaccaaccugugccccuucggcgagguguucaacgccacccgguucgccagcgucuacgccuggaaccgcaagcggaucuccaacugcguggcggacuacagcgugcuguacaacuccgccagcuucuccacguucaagugcuacggcgucagccccaccaagcucaacgaccugugcuucaccaacguguacgccgacuccuucgugauccgcggggacgagguccggcagaucgcccccggccagaccgggaagaucgccgacuacaacuacaagcugccggacgacuucacgggcugcgugaucgcguggaacagcaacaaccucgacuccaaggucgggggcaacuacaacuaccuguaccgccuguuccgcaagagcaaccucaagcccuucgagcgggacaucuccaccgagaucuaccaggccggcagcacccccugcaacgggguggagggcuucaacugcuacuucccccugcaguccuacggguuccagccgaccaacggcgugggguaccagcccuaccggguggucgugcugagcuucgagcuccugcacgcccccgccacggugugcggccccaagaaguccaccaaccuggucaagaacaagugcgugaacuucaacuucaacggccucaccgggaccggcgugcugaccgagagcaacaagaaguuccugccguuccagcaguucgggcgcgacaucgccgacacgaccgacgcgguccgcgacccccagacccuggagauccucgacaucacccccugcagcuucggcgggguguccgugaucacgccgggcaccaacaccagcaaccaggucgccgugcuguaccagggcgugaacugcaccgagguccccguggccauccacgccgaccagcugacgcccaccuggcggguguacuccaccgggagcaacgucuuccagacccgcgccggcugccucaucggggcggagcacgugaacaacuccuacgagugcgacauccccaucggcgccggcaucugcgccagcuaccagacgcagaccaacuccccgcggcgcgcccggagcguggcgucccagagcaucaucgccuacaccaugucccugggggccgagaacagcgucgccuacuccaacaacagcaucgccauccccaccaacuucacgaucuccgugaccaccgagauccugcccgugagcaugaccaagacgagcgucgacugcaccauguacaucugcggcgacuccaccgagugcagcaaccuccugcugcaguacggguccuucugcacccagcucaaccgcgcgcugacgggcaucgccguggagcaggacaagaacacccaggagguguucgcccaggucaagcagaucuacaagacgcccccgaucaaggacuucgggggcuucaacuucagccagauccugcccgaccccuccaagcccagcaagcgguccuucaucgaggaccuccuguucaacaaggugacccuggccgacgccggcuucaucaagcaguacggggacugccucggcgacaucgcggcccgcgaccugaucugcgcccagaaguucaacgggcugaccgugcucccgccccugcugaccgacgagaugaucgcccaguacaccagcgcccuccuggcgggcaccaucacguccggguggaccuucggcgccggcgccgcccugcagauccccuucgcgaugcagauggccuaccgguucaacgggaucggcgucacccagaacgugcucuacgagaaccagaagcugaucgccaaccaguucaacagcgccaucgggaagauccaggacucccugagcuccaccgccagcgcgcucggcaagcugcaggacguggucaaccagaacgcccaggcccugaacacgcucgugaagcagcuguccagcaacuucggggccaucuccagcgugcugaacgacauccucucccgccuggacaaggucgaggccgaggugcagaucgaccggcugaucaccggccgccuccagagccugcagaccuacgugacccagcagcugauccgggcggccgagauccgcgccagcgccaaccucgccgcgaccaagauguccgagugcguccugggccagagcaagcggguggacuucugcgggaagggcuaccaccugauguccuucccccagagcgccccgcacgggguggucuuccuccacgugacguacguccccgcccaggagaagaacuucaccaccgcccccgcgaucugccacgacggcaaggcccacuucccccgcgaggggguguucguguccaacggcacccacugguucgucacgcagcggaacuucuacgagccgcagaucaucaccaccgacaacaccuucgugagcggcaacugcgacguggucaucgggaucgugaacaacacgguguacgacccccugcagcccgagcuggacuccuucaaggaggagcucgacaaguacuucaagaaccacaccagccccgacgucgaccugggcgacaucuccgggaucaacgccagcguggugaacauccagaaggagaucgaccgccugaacgaggucgccaagaaccucaacgagucccugaucgaccugcaggagcucggcaaguacgagcaguacaucaaguggccgugguacaucuggcugggcuucaucgccgggcugaucgcgaucgugauggugaccaucaugcucugcugcaugaccagcugcugcuccugccugaagggcugcugcagcugcggguccugcugcaaguucgacgaggacgacagcgagcccguccugaagggcgugaagcuccacuacacgugaggacuaguuauaagacugacuagcccgaugggccucccaacgggcccuccuccccuccuugcaccgagagaucuaaaaaaaaaaaaaaaaaaaaaaaaaaaaaaaaaaaaaaaaaaaaaaaaaaaaaaaaaaaaaaaaaaaaaaaaaaaaaaaaaaaaaaaaaaaaaaaaaaaa

SEQ ID NO: 25849 - RNA, 4011 nt, Artificial Sequence
  SARS-CoV-2/Wuhan/WIV05/2019__EPI_ISL_402128 spike protein mRNA gc (1-1273)(A222V_D614G)
aggagaaagcuuaccauguucguguuccugguccuccugccccuggugagcucccagugcgugaaccucaccacccgcacgcagcugccgcccgccuacaccaacagcuucacccggggcgucuacuaccccgacaagguguuccgcuccagcgugcugcacuccacccaggaccucuuccugcccuucuucagcaacgucacgugguuccacgccauccacguguccgggaccaacggcaccaagcgguucgacaacccggugcugcccuucaacgacggggucuacuucgcgagcaccgagaaguccaacaucauccgcggcuggaucuucgggacgacccucgacagcaagacccagucccugcugaucgugaacaacgccaccaacguggucaucaaggugugcgaguuccaguucugcaacgaccccuuccucggcguguacuaccacaagaacaacaagagcuggauggaguccgaguuccgggucuacagcuccgccaacaacugcacguucgaguacgugagccagcccuuccugauggaccuggagggcaagcaggggaacuucaagaaccuccgcgaguucguguucaagaacaucgacggcuacuucaagaucuacuccaagcacaccccgaucaaccugguccgggaccugccccagggguucagcgugcucgagccccugguggaccugcccaucggcaucaacaucacccgcuuccagacccuccuggcccugcaccgguccuaccucacgccgggggacagcagcuccggcuggaccgccggcgcggccgccuacuacgucggguaccugcagccccgcaccuuccugcucaaguacaacgagaacggcaccaucacggacgccguggacugcgcgcuggacccccugagcgagaccaagugcacccucaaguccuucaccguggagaaggggaucuaccagacgagcaacuuccggguccagcccaccgaguccaucgugcgcuucccgaacaucaccaaccugugccccuucggcgaggucuucaacgccacccgguucgccagcguguacgccuggaaccgcaagcggaucuccaacugcguggccgacuacagcguccuguacaacuccgcgagcuucuccacguucaagugcuacggcgugagccccaccaagcucaacgaccugugcuucaccaacguguacgccgacuccuucgucauccgcggggacgaggugcggcagaucgcccccggccagaccgggaagaucgccgacuacaacuacaagcugccggacgacuucacgggcugcgugaucgccuggaacagcaacaaccucgacuccaaggucgggggcaacuacaacuaccuguaccgccuguuccgcaagagcaaccucaagcccuucgagcgggacaucuccaccgagaucuaccaggcgggcagcacccccugcaacgggguggagggcuucaacugcuacuucccccugcaguccuacggguuccagccgaccaacggcgugggguaccagcccuaccgggucguggugcugagcuucgagcuccugcacgcccccgccacggucugcggccccaagaaguccaccaaccuggugaagaacaagugcgugaacuucaacuucaacggccucaccgggaccggcguccugaccgagagcaacaagaaguuccugccguuccagcaguucgggcgcgacaucgccgacacgaccgacgccgugcgcgacccccagacccuggagauccucgacaucacccccugcagcuucggcgggguguccgucaucacgccgggcaccaacaccagcaaccagguggcggugcuguaccagggcgucaacugcaccgaggugcccguggccauccacgccgaccagcugacgcccaccuggcgggucuacuccaccgggagcaacguguuccagacccgcgccggcugccucaucggggccgagcacgugaacaacuccuacgagugcgacauccccaucggcgcgggcaucugcgccagcuaccagacgcagaccaacuccccgcggcgcgcccggagcgucgccucccagagcaucaucgcguacaccaugucccugggggccgagaacagcguggccuacuccaacaacagcaucgccauccccaccaacuucacgaucuccgugaccaccgagauccugcccgucagcaugaccaagacgagcguggacugcaccauguacaucugcggcgacuccaccgagugcagcaaccuccugcugcaguacggguccuucugcacccagcucaaccgcgcccugacgggcaucgcgguggagcaggacaagaacacccaggaggucuucgcccaggugaagcagaucuacaagacgcccccgaucaaggacuucgggggcuucaacuucagccagauccugcccgaccccuccaagcccagcaagcgguccuucaucgaggaccuccuguucaacaaggugacccuggccgacgccggcuucaucaagcaguacggggacugccucggcgacaucgccgcgcgcgaccugaucugcgcccagaaguucaacgggcugaccguccucccgccccugcugaccgacgagaugaucgcccaguacaccagcgcccuccuggccggcaccaucacguccggguggaccuucggcgcgggcgccgcccugcagauccccuucgccaugcagauggcguaccgguucaacgggaucggcgugacccagaacgugcucuacgagaaccagaagcugaucgccaaccaguucaacagcgccaucgggaagauccaggacucccugagcuccaccgccagcgcccucggcaagcugcaggacgucgugaaccagaacgcgcaggcccugaacacgcucgugaagcagcuguccagcaacuucggggccaucuccagcguccugaacgacauccucucccgccuggacaagguggaggccgaggugcagaucgaccggcugaucaccggccgccuccagagccugcagaccuacgucacccagcagcugauccgggccgcggagauccgcgccagcgccaaccucgccgccaccaagauguccgagugcgugcugggccagagcaagcggguggacuucugcgggaagggcuaccaccugauguccuucccccagagcgcgccgcacggggucguguuccuccacgucacguacgugcccgcccaggagaagaacuucaccaccgcccccgccaucugccacgacggcaaggcgcacuucccccgcgaggggguguucgucuccaacggcacccacugguucgugacgcagcggaacuucuacgagccgcagaucaucaccaccgacaacaccuucgugagcggcaacugcgacgucgugaucgggaucgugaacaacacggucuacgacccccugcagcccgagcuggacuccuucaaggaggagcucgacaaguacuucaagaaccacaccagccccgacguggaccugggcgacaucuccgggaucaacgccagcguggucaacauccagaaggagaucgaccgccugaacgagguggccaagaaccucaacgagucccugaucgaccugcaggagcucggcaaguacgagcaguacaucaaguggccgugguacaucuggcugggcuucaucgccgggcugaucgccaucgugauggucaccaucaugcucugcugcaugaccagcugcugcuccugccugaagggcugcugcagcugcggguccugcugcaaguucgacgaggacgacagcgagcccgugcugaagggcgugaagcuccacuacacgugaggacuaguuauaagacugacuagcccgaugggccucccaacgggcccuccuccccuccuugcaccgagagaucuaaaaaaaaaaaaaaaaaaaaaaaaaaaaaaaaaaaaaaaaaaaaaaaaaaaaaaaaaaaaaaaaaaaaaaaaaaaaaaaaaaaaaaaaaaaaaaaaaaaa

SEQ ID NO: 25850 - RNA, 4011 nt, Artificial Sequence
  SARS-CoV-2/Wuhan/WIV05/2019__EPI_ISL_402128 spike protein mRNA gc (1-1273)(N439K_D614G)
aggagaaagcuuaccauguucguguuccugguccuccugccccuggugagcucccagugcgugaaccucaccacccgcacgcagcugccgcccgccuacaccaacagcuucacccggggcgucuacuaccccgacaagguguuccgcuccagcgugcugcacuccacccaggaccucuuccugcccuucuucagcaacgucacgugguuccacgccauccacguguccgggaccaacggcaccaagcgguucgacaacccggugcugcccuucaacgacggggucuacuucgcgagcaccgagaaguccaacaucauccgcggcuggaucuucgggacgacccucgacagcaagacccagucccugcugaucgugaacaacgccaccaacguggucaucaaggugugcgaguuccaguucugcaacgaccccuuccucggcguguacuaccacaagaacaacaagagcuggauggaguccgaguuccgggucuacagcuccgccaacaacugcacguucgaguacgugagccagcccuuccugauggaccuggagggcaagcaggggaacuucaagaaccuccgcgaguucguguucaagaacaucgacggcuacuucaagaucuacuccaagcacaccccgaucaaccugguccgggaccugccccagggguucagcgcccucgagccccugguggaccugcccaucggcaucaacaucacccgcuuccagacccuccuggcccugcaccgguccuaccucacgccgggggacagcagcuccggcuggaccgcgggcgccgccgccuacuacgugggguaccugcagccccgcaccuuccugcucaaguacaacgagaacggcaccaucacggacgcggucgacugcgcccuggacccccugagcgagaccaagugcacccucaaguccuucaccguggagaaggggaucuaccagacgagcaacuuccgggugcagcccaccgaguccaucguccgcuucccgaacaucaccaaccugugccccuucggcgagguguucaacgccacccgguucgccagcgucuacgccuggaaccgcaagcggaucuccaacugcguggcggacuacagcgugcuguacaacuccgccagcuucuccacguucaagugcuacggcgucagccccaccaagcucaacgaccugugcuucaccaacguguacgccgacuccuucgugauccgcggggacgagguccggcagaucgcccccggccagaccgggaagaucgccgacuacaacuacaagcugccggacgacuucacgggcugcgugaucgcguggaacagcaagaaccucgacuccaaggucgggggcaacuacaacuaccuguaccgccuguuccgcaagagcaaccucaagcccuucgagcgggacaucuccaccgagaucuaccaggccggcagcacccccugcaacgggguggagggcuucaacugcuacuucccccugcaguccuacggguuccagccgaccaacggcgugggguaccagcccuaccggguggucgugcugagcuucgagcuccugcacgcccccgccacggugugcggccccaagaaguccaccaaccuggucaagaacaagugcgugaacuucaacuucaacggccucaccgggaccggcgugcugaccgagagcaacaagaaguuccugccguuccagcaguucgggcgcgacaucgccgacacgaccgacgcgguccgcgacccccagacccuggagauccucgacaucacccccugcagcuucggcgggguguccgugaucacgccgggcaccaacaccagcaaccaggucgccgugcuguaccagggcgugaacugcaccgagguccccguggccauccacgccgaccagcugacgcccaccuggcggguguacuccaccgggagcaacgucuuccagacccgcgccggcugccucaucggggcggagcacgugaacaacuccuacgagugcgacauccccaucggcgccggcaucugcgccagcuaccagacgcagaccaacuccccgcggcgcgcccggagcguggcgucccagagcaucaucgccuacaccaugucccugggggccgagaacagcgucgccuacuccaacaacagcaucgccauccccaccaacuucacgaucuccgugaccaccgagauccugcccgugagcaugaccaagacgagcgucgacugcaccauguacaucugcggcgacuccaccgagugcagcaaccuccugcugcaguacggguccuucugcacccagcucaaccgcgcgcugacgggcaucgccguggagcaggacaagaacacccaggagguguucgcccaggucaagcagaucuacaagacgcccccgaucaaggacuucgggggcuucaacuucagccagauccugcccgaccccuccaagcccagcaagcgguccuucaucgaggaccuccuguucaacaaggugacccuggccgacgccggcuucaucaagcaguacggggacugccucggcgacaucgcggcccgcgaccugaucugcgcccagaaguucaacgggcugaccgugcucccgccccugcugaccgacgagaugaucgcccaguacaccagcgcccuccuggcgggcaccaucacguccggguggaccuucggcgccggcgccgcccugcagauccccuucgcgaugcagauggccuaccgguucaacgggaucggcgucacccagaacgugcucuacgagaaccagaagcugaucgccaaccaguucaacagcgccaucgggaagauccaggacucccugagcuccaccgccagcgcgcucggcaagcugcaggacguggucaaccagaacgcccaggcccugaacacgcucgugaagcagcuguccagcaacuucggggccaucuccagcgugcugaacgacauccucucccgccuggacaaggucgaggccgaggugcagaucgaccggcugaucaccggccgccuccagagccugcagaccuacgugacccagcagcugauccgggcggccgagauccgcgccagcgccaaccucgccgcgaccaagauguccgagugcguccugggccagagcaagcggguggacuucugcgggaagggcuaccaccugauguccuucccccagagcgccccgcacgggguggucuuccuccacgugacguacguccccgcccaggagaagaacuucaccaccgcccccgcgaucugccacgacggcaaggcccacuucccccgcgaggggguguucguguccaacggcacccacugguucgucacgcagcggaacuucuacgagccgcagaucaucaccaccgacaacaccuucgugagcggcaacugcgacguggucaucgggaucgugaacaacacgguguacgacccccugcagcccgagcuggacuccuucaaggaggagcucgacaaguacuucaagaaccacaccagccccgacgucgaccugggcgacaucuccgggaucaacgccagcguggugaacauccagaaggagaucgaccgccugaacgaggucgccaagaaccucaacgagucccugaucgaccugcaggagcucggcaaguacgagcaguacaucaaguggccgugguacaucuggcugggcuucaucgccgggcugaucgcgaucgugauggugaccaucaugcucugcugcaugaccagcugcugcuccugccugaagggcugcugcagcugcggguccugcugcaaguucgacgaggacgacagcgagcccguccugaagggcgugaagcuccacuacacgugaggacuaguuauaagacugacuagcccgaugggccucccaacgggcccuccuccccuccuugcaccgagagaucuaaaaaaaaaaaaaaaaaaaaaaaaaaaaaaaaaaaaaaaaaaaaaaaaaaaaaaaaaaaaaaaaaaaaaaaaaaaaaaaaaaaaaaaaaaaaaaaaaaaa

SEQ ID NO: 25851 - RNA, 4011 nt, Artificial Sequence
  SARS-CoV-2/Wuhan/WIV05/2019__EPI_ISL_402128 spike protein mRNA gc (1-1273)(S477N_D614G)
aggagaaagcuuaccauguucguguuccugguccuccugccccuggugagcucccagugcgugaaccucaccacccgcacgcagcugccgcccgccuacaccaacagcuucacccggggcgucuacuaccccgacaagguguuccgcuccagcgugcugcacuccacccaggaccucuuccugcccuucuucagcaacgucacgugguuccacgccauccacguguccgggaccaacggcaccaagcgguucgacaacccggugcugcccuucaacgacggggucuacuucgcgagcaccgagaaguccaacaucauccgcggcuggaucuucgggacgacccucgacagcaagacccagucccugcugaucgugaacaacgccaccaacguggucaucaaggugugcgaguuccaguucugcaacgaccccuuccucggcguguacuaccacaagaacaacaagagcuggauggaguccgaguuccgggucuacagcuccgccaacaacugcacguucgaguacgugagccagcccuuccugauggaccuggagggcaagcaggggaacuucaagaaccuccgcgaguucguguucaagaacaucgacggcuacuucaagaucuacuccaagcacaccccgaucaaccugguccgggaccugccccagggguucagcgcccucgagccccugguggaccugcccaucggcaucaacaucacccgcuuccagacccuccuggcccugcaccgguccuaccucacgccgggggacagcagcuccggcuggaccgcgggcgccgccgccuacuacgugggguaccugcagccccgcaccuuccugcucaaguacaacgagaacggcaccaucacggacgcggucgacugcgcccuggacccccugagcgagaccaagugcacccucaaguccuucaccguggagaaggggaucuaccagacgagcaacuuccgggugcagcccaccgaguccaucguccgcuucccgaacaucaccaaccugugccccuucggcgagguguucaacgccacccgguucgccagcgucuacgccuggaaccgcaagcggaucuccaacugcguggcggacuacagcgugcuguacaacuccgccagcuucuccacguucaagugcuacggcgucagccccaccaagcucaacgaccugugcuucaccaacguguacgccgacuccuucgugauccgcggggacgagguccggcagaucgcccccggccagaccgggaagaucgccgacuacaacuacaagcugccggacgacuucacgggcugcgugaucgcguggaacagcaacaaccucgacuccaaggucgggggcaacuacaacuaccuguaccgccuguuccgcaagagcaaccucaagcccuucgagcgggacaucuccaccgagaucuaccaggccggcaacacccccugcaacgggguggagggcuucaacugcuacuucccccugcagagcuacggguuccagccgaccaacggcgugggguaccagcccuaccggguggucgugcuguccuucgagcuccugcacgcccccgccacggugugcggccccaagaaguccaccaaccuggucaagaacaagugcgugaacuucaacuucaacggccucaccgggaccggcgugcugaccgagagcaacaagaaguuccugccguuccagcaguucgggcgcgacaucgccgacacgaccgacgcgguccgcgacccccagacccuggagauccucgacaucacccccugcagcuucggcggggugagcgugaucacgccgggcaccaacaccuccaaccaggucgccgugcuguaccagggcgugaacugcaccgagguccccguggccauccacgccgaccagcugacgcccaccuggcggguguacagcaccggguccaacgucuuccagacccgcgccggcugccucaucggggcggagcacgugaacaacagcuacgagugcgacauccccaucggcgccggcaucugcgccuccuaccagacgcagaccaacagcccgcggcgcgcccgguccguggcgagccaguccaucaucgccuacaccaugagccugggggccgagaacuccgucgccuacagcaacaacuccaucgccauccccaccaacuucacgaucagcgugaccaccgagauccugcccguguccaugaccaagacgagcgucgacugcaccauguacaucugcggcgacagcaccgagugcuccaaccuccugcugcaguacgggagcuucugcacccagcucaaccgcgcgcugacgggcaucgccguggagcaggacaagaacacccaggagguguucgcccaggucaagcagaucuacaagacgcccccgaucaaggacuucgggggcuucaacuucucccagauccugcccgaccccagcaagcccuccaagcggagcuucaucgaggaccuccuguucaacaaggugacccuggccgacgccggcuucaucaagcaguacggggacugccucggcgacaucgcggcccgcgaccugaucugcgcccagaaguucaacgggcugaccgugcucccgccccugcugaccgacgagaugaucgcccaguacaccuccgcccuccuggcgggcaccaucacgagcggguggaccuucggcgccggcgccgcccugcagauccccuucgcgaugcagauggccuaccgguucaacgggaucggcgucacccagaacgugcucuacgagaaccagaagcugaucgccaaccaguucaacuccgccaucgggaagauccaggacagccuguccagcaccgccuccgcgcucggcaagcugcaggacguggucaaccagaacgcccaggcccugaacacgcucgugaagcagcugagcuccaacuucggggccaucagcuccgugcugaacgacauccucagccgccuggacaaggucgaggccgaggugcagaucgaccggcugaucaccggccgccuccagucccugcagaccuacgugacccagcagcugauccgggcggccgagauccgcgccagcgccaaccucgccgcgaccaagaugagcgagugcguccugggccaguccaagcggguggacuucugcgggaagggcuaccaccugaugagcuucccccaguccgccccgcacgggguggucuuccuccacgugacguacguccccgcccaggagaagaacuucaccaccgcccccgcgaucugccacgacggcaaggcccacuucccccgcgaggggguguucgugagcaacggcacccacugguucgucacgcagcggaacuucuacgagccgcagaucaucaccaccgacaacaccuucguguccggcaacugcgacguggucaucgggaucgugaacaacacgguguacgacccccugcagcccgagcuggacagcuucaaggaggagcucgacaaguacuucaagaaccacaccucccccgacgucgaccugggcgacaucagcgggaucaacgccuccguggugaacauccagaaggagaucgaccgccugaacgaggucgccaagaaccucaacgagagccugaucgaccugcaggagcucggcaaguacgagcaguacaucaaguggccgugguacaucuggcugggcuucaucgccgggcugaucgcgaucgugauggugaccaucaugcucugcugcaugaccuccugcugcagcugccugaagggcugcugcuccugcgggagcugcugcaaguucgacgaggacgacuccgagcccguccugaagggcgugaagcuccacuacacgugaggacuaguuauaagacugacuagcccgaugggccucccaacgggcccuccuccccuccuugcaccgagagaucuaaaaaaaaaaaaaaaaaaaaaaaaaaaaaaaaaaaaaaaaaaaaaaaaaaaaaaaaaaaaaaaaaaaaaaaaaaaaaaaaaaaaaaaaaaaaaaaaaaaa

SEQ ID NO: 25852 - RNA, 4011 nt, Artificial Sequence
  SARS-CoV-2/Wuhan/WIV05/2019__EPI_ISL_402128 spike protein mRNA gc (1-1273)(N501Y_D614G)
aggagaaagcuuaccauguucguguuccugguccuccugccccuggugagcucccagugcgugaaccucaccacccgcacgcagcugccgcccgccuacaccaacagcuucacccggggcgucuacuaccccgacaagguguuccgcuccagcgugcugcacuccacccaggaccucuuccugcccuucuucagcaacgucacgugguuccacgccauccacguguccgggaccaacggcaccaagcgguucgacaacccggugcugcccuucaacgacggggucuacuucgcgagcaccgagaaguccaacaucauccgcggcuggaucuucgggacgacccucgacagcaagacccagucccugcugaucgugaacaacgccaccaacguggucaucaaggugugcgaguuccaguucugcaacgaccccuuccucggcguguacuaccacaagaacaacaagagcuggauggaguccgaguuccgggucuacagcuccgccaacaacugcacguucgaguacgugagccagcccuuccugauggaccuggagggcaagcaggggaacuucaagaaccuccgcgaguucguguucaagaacaucgacggcuacuucaagaucuacuccaagcacaccccgaucaaccugguccgggaccugccccagggguucagcgcccucgagccccugguggaccugcccaucggcaucaacaucacccgcuuccagacccuccuggcccugcaccgguccuaccucacgccgggggacagcagcuccggcuggaccgcgggcgccgccgccuacuacgugggguaccugcagccccgcaccuuccugcucaaguacaacgagaacggcaccaucacggacgcggucgacugcgcccuggacccccugagcgagaccaagugcacccucaaguccuucaccguggagaaggggaucuaccagacgagcaacuuccgggugcagcccaccgaguccaucguccgcuucccgaacaucaccaaccugugccccuucggcgagguguucaacgccacccgguucgccagcgucuacgccuggaaccgcaagcggaucuccaacugcguggcggacuacagcgugcuguacaacuccgccagcuucuccacguucaagugcuacggcgucagccccaccaagcucaacgaccugugcuucaccaacguguacgccgacuccuucgugauccgcggggacgagguccggcagaucgcccccggccagaccgggaagaucgccgacuacaacuacaagcugccggacgacuucacgggcugcgugaucgcguggaacagcaacaaccucgacuccaaggucgggggcaacuacaacuaccuguaccgccuguuccgcaagagcaaccucaagcccuucgagcgggacaucuccaccgagaucuaccaggccggcagcacccccugcaacgggguggagggcuucaacugcuacuucccccugcaguccuacggguuccagccgaccuacggcgugggguaccagcccuaccggguggucgugcugagcuucgagcuccugcacgcccccgccacggugugcggccccaagaaguccaccaaccuggucaagaacaagugcgugaacuucaacuucaacggccucaccgggaccggcgugcugaccgagagcaacaagaaguuccugccguuccagcaguucgggcgcgacaucgccgacacgaccgacgcgguccgcgacccccagacccuggagauccucgacaucacccccugcagcuucggcgggguguccgugaucacgccgggcaccaacaccagcaaccaggucgccgugcuguaccagggcgugaacugcaccgagguccccguggccauccacgccgaccagcugacgcccaccuggcggguguacuccaccgggagcaacgucuuccagacccgcgccggcugccucaucggggcggagcacgugaacaacuccuacgagugcgacauccccaucggcgccggcaucugcgccagcuaccagacgcagaccaacuccccgcggcgcgcccggagcguggcgucccagagcaucaucgccuacaccaugucccugggggccgagaacagcgucgccuacuccaacaacagcaucgccauccccaccaacuucacgaucuccgugaccaccgagauccugcccgugagcaugaccaagacgagcgucgacugcaccauguacaucugcggcgacuccaccgagugcagcaaccuccugcugcaguacggguccuucugcacccagcucaaccgcgcgcugacgggcaucgccguggagcaggacaagaacacccaggagguguucgcccaggucaagcagaucuacaagacgcccccgaucaaggacuucgggggcuucaacuucagccagauccugcccgaccccuccaagcccagcaagcgguccuucaucgaggaccuccuguucaacaaggugacccuggccgacgccggcuucaucaagcaguacggggacugccucggcgacaucgcggcccgcgaccugaucugcgcccagaaguucaacgggcugaccgugcucccgccccugcugaccgacgagaugaucgcccaguacaccagcgcccuccuggcgggcaccaucacguccggguggaccuucggcgccggcgccgcccugcagauccccuucgcgaugcagauggccuaccgguucaacgggaucggcgucacccagaacgugcucuacgagaaccagaagcugaucgccaaccaguucaacagcgccaucgggaagauccaggacucccugagcuccaccgccagcgcgcucggcaagcugcaggacguggucaaccagaacgcccaggcccugaacacgcucgugaagcagcuguccagcaacuucggggccaucuccagcgugcugaacgacauccucucccgccuggacaaggucgaggccgaggugcagaucgaccggcugaucaccggccgccuccagagccugcagaccuacgugacccagcagcugauccgggcggccgagauccgcgccagcgccaaccucgccgcgaccaagauguccgagugcguccugggccagagcaagcggguggacuucugcgggaagggcuaccaccugauguccuucccccagagcgccccgcacgggguggucuuccuccacgugacguacguccccgcccaggagaagaacuucaccaccgcccccgcgaucugccacgacggcaaggcccacuucccccgcgaggggguguucguguccaacggcacccacugguucgucacgcagcggaacuucuacgagccgcagaucaucaccaccgacaacaccuucgugagcggcaacugcgacguggucaucgggaucgugaacaacacgguguacgacccccugcagcccgagcuggacuccuucaaggaggagcucgacaaguacuucaagaaccacaccagccccgacgucgaccugggcgacaucuccgggaucaacgccagcguggugaacauccagaaggagaucgaccgccugaacgaggucgccaagaaccucaacgagucccugaucgaccugcaggagcucggcaaguacgagcaguacaucaaguggccgugguacaucuggcugggcuucaucgccgggcugaucgcgaucgugauggugaccaucaugcucugcugcaugaccagcugcugcuccugccugaagggcugcugcagcugcggguccugcugcaaguucgacgaggacgacagcgagcccguccugaagggcgugaagcuccacuacacgugaggacuaguuauaagacugacuagcccgaugggccucccaacgggcccuccuccccuccuugcaccgagagaucuaaaaaaaaaaaaaaaaaaaaaaaaaaaaaaaaaaaaaaaaaaaaaaaaaaaaaaaaaaaaaaaaaaaaaaaaaaaaaaaaaaaaaaaaaaaaaaaaaaaa

SEQ ID NO: 25853 - RNA, 4005 nt, Artificial Sequence
  SARS-CoV-2/Wuhan/WIV05/2019__EPI_ISL_402128 spike protein mRNA gc (1-1273)(H69del_V70del_D614G)
aggagaaagcuuaccauguucguguuccugguccuccugccccuggugagcucccagugcgugaaccucaccacccgcacgcagcugccgcccgccuacaccaacagcuucacccggggcgucuacuaccccgacaagguguuccgcuccagcgugcugcacuccacccaggaccucuuccugcccuucuucagcaacgucacgugguuccacgccaucuccgggaccaacggcaccaagcgguucgacaacccggugcugcccuucaacgacgggguguacuucgcgagcaccgagaaguccaacaucauccgcggcuggaucuucgggacgacccucgacagcaagacccagucccugcugaucgucaacaacgccaccaacguggugaucaaggucugcgaguuccaguucugcaacgaccccuuccucggcguguacuaccacaagaacaacaagagcuggauggaguccgaguuccggguguacagcuccgccaacaacugcacguucgaguacgucagccagcccuuccugauggaccuggagggcaagcaggggaacuucaagaaccuccgcgaguucguguucaagaacaucgacggcuacuucaagaucuacuccaagcacaccccgaucaaccuggugcgggaccugccccagggguucagcgcccucgagccccuggucgaccugcccaucggcaucaacaucacccgcuuccagacccuccuggcccugcaccgguccuaccucacgccgggggacagcagcuccggcuggaccgcgggcgccgccgccuacuacgugggguaccugcagccccgcaccuuccugcucaaguacaacgagaacggcaccaucacggacgcgguggacugcgcccuggacccccugagcgagaccaagugcacccucaaguccuucaccgucgagaaggggaucuaccagacgagcaacuuccgggugcagcccaccgaguccaucgugcgcuucccgaacaucaccaaccugugccccuucggcgaggucuucaacgccacccgguucgccagcguguacgccuggaaccgcaagcggaucuccaacugcgucgcggacuacagcgugcuguacaacuccgccagcuucuccacguucaagugcuacggcgugagccccaccaagcucaacgaccugugcuucaccaacgucuacgccgacuccuucgugauccgcggggacgaggugcggcagaucgcccccggccagaccgggaagaucgccgacuacaacuacaagcugccggacgacuucacgggcugcgucaucgcguggaacagcaacaaccucgacuccaaggucgggggcaacuacaacuaccuguaccgccuguuccgcaagagcaaccucaagcccuucgagcgggacaucuccaccgagaucuaccaggccggcagcacccccugcaacgggguggagggcuucaacugcuacuucccccugcaguccuacggguuccagccgaccaacggcgugggguaccagcccuaccggguggugguccugagcuucgagcuccugcacgcccccgccacggugugcggccccaagaaguccaccaaccuggugaagaacaagugcgucaacuucaacuucaacggccucaccgggaccggcgugcugaccgagagcaacaagaaguuccugccguuccagcaguucgggcgcgacaucgccgacacgaccgacgcggugcgcgacccccagacccuggagauccucgacaucacccccugcagcuucggcggggucuccgugaucacgccgggcaccaacaccagcaaccagguggccguccuguaccagggcgugaacugcaccgaggugcccgucgccauccacgccgaccagcugacgcccaccuggcggguguacuccaccgggagcaacguguuccagacccgcgccggcugccucaucggggcggagcacgucaacaacuccuacgagugcgacauccccaucggcgccggcaucugcgccagcuaccagacgcagaccaacuccccgcggcgcgcccggagcguggcgucccagagcaucaucgccuacaccaugucccugggggccgagaacagcguggccuacuccaacaacagcaucgccauccccaccaacuucacgaucuccgucaccaccgagauccugcccgugagcaugaccaagacgagcguggacugcaccauguacaucugcggcgacuccaccgagugcagcaaccuccugcugcaguacggguccuucugcacccagcucaaccgcgcgcugacgggcaucgccgucgagcaggacaagaacacccaggagguguucgcccaggugaagcagaucuacaagacgcccccgaucaaggacuucgggggcuucaacuucagccagauccugcccgaccccuccaagcccagcaagcgguccuucaucgaggaccuccuguucaacaaggucacccuggccgacgccggcuucaucaagcaguacggggacugccucggcgacaucgcggcccgcgaccugaucugcgcccagaaguucaacgggcugaccgugcucccgccccugcugaccgacgagaugaucgcccaguacaccagcgcccuccuggcgggcaccaucacguccggguggaccuucggcgccggcgccgcccugcagauccccuucgcgaugcagauggccuaccgguucaacgggaucggcgugacccagaacguccucuacgagaaccagaagcugaucgccaaccaguucaacagcgccaucgggaagauccaggacucccugagcuccaccgccagcgcgcucggcaagcugcaggacguggugaaccagaacgcccaggcccugaacacgcucgucaagcagcuguccagcaacuucggggccaucuccagcgugcugaacgacauccucucccgccuggacaagguggaggccgagguccagaucgaccggcugaucaccggccgccuccagagccugcagaccuacgugacccagcagcugauccgggcggccgagauccgcgccagcgccaaccucgccgcgaccaagauguccgagugcgugcugggccagagcaagcgggucgacuucugcgggaagggcuaccaccugauguccuucccccagagcgccccgcacggggugguguuccuccacgucacguacgugcccgcccaggagaagaacuucaccaccgcccccgcgaucugccacgacggcaaggcccacuucccccgcgagggggucuucguguccaacggcacccacugguucgugacgcagcggaacuucuacgagccgcagaucaucaccaccgacaacaccuucgucagcggcaacugcgacguggugaucgggaucgucaacaacacgguguacgacccccugcagcccgagcuggacuccuucaaggaggagcucgacaaguacuucaagaaccacaccagccccgacguggaccugggcgacaucuccgggaucaacgccagcgucgugaacauccagaaggagaucgaccgccugaacgagguggccaagaaccucaacgagucccugaucgaccugcaggagcucggcaaguacgagcaguacaucaaguggccgugguacaucuggcugggcuucaucgccgggcugaucgcgaucgucauggugaccaucaugcucugcugcaugaccagcugcugcuccugccugaagggcugcugcagcugcggguccugcugcaaguucgacgaggacgacagcgagcccgugcugaagggcgucaagcuccacuacacgugaggacuaguuauaagacugacuagcccgaugggccucccaacgggcccuccuccccuccuugcaccgagagaucuaaaaaaaaaaaaaaaaaaaaaaaaaaaaaaaaaaaaaaaaaaaaaaaaaaaaaaaaaaaaaaaaaaaaaaaaaaaaaaaaaaaaaaaaaaaaaaaaaaaa

SEQ ID NO: 25854 - RNA, 4011 nt, Artificial Sequence
  SARS-CoV-2/Wuhan/WIV05/2019__EPI_ISL_402128 spike protein mRNA gc (1-1273)(Y453F_D614G)
aggagaaagcuuaccauguucguguuccugguccuccugccccuggugagcucccagugcgugaaccucaccacccgcacgcagcugccgcccgccuacaccaacagcuucacccggggcgucuacuaccccgacaagguguuccgcuccagcgugcugcacuccacccaggaccucuuccugcccuucuucagcaacgucacgugguuccacgccauccacguguccgggaccaacggcaccaagcgguucgacaacccggugcugcccuucaacgacggggucuacuucgcgagcaccgagaaguccaacaucauccgcggcuggaucuucgggacgacccucgacagcaagacccagucccugcugaucgugaacaacgccaccaacguggucaucaaggugugcgaguuccaguucugcaacgaccccuuccucggcguguacuaccacaagaacaacaagagcuggauggaguccgaguuccgggucuacagcuccgccaacaacugcacguucgaguacgugagccagcccuuccugauggaccuggagggcaagcaggggaacuucaagaaccuccgcgaguucguguucaagaacaucgacggcuacuucaagaucuacuccaagcacaccccgaucaaccugguccgggaccugccccagggguucagcgcccucgagccccugguggaccugcccaucggcaucaacaucacccgcuuccagacccuccuggcccugcaccgguccuaccucacgccgggggacagcagcuccggcuggaccgcgggcgccgccgccuacuacgugggguaccugcagccccgcaccuuccugcucaaguacaacgagaacggcaccaucacggacgcggucgacugcgcccuggacccccugagcgagaccaagugcacccucaaguccuucaccguggagaaggggaucuaccagacgagcaacuuccgggugcagcccaccgaguccaucguccgcuucccgaacaucaccaaccugugccccuucggcgagguguucaacgccacccgguucgccagcgucuacgccuggaaccgcaagcggaucuccaacugcguggcggacuacagcgugcuguacaacuccgccagcuucuccacguucaagugcuacggcgucagccccaccaagcucaacgaccugugcuucaccaacguguacgccgacuccuucgugauccgcggggacgagguccggcagaucgcccccggccagaccgggaagaucgccgacuacaacuacaagcugccggacgacuucacgggcugcgugaucgcguggaacagcaacaaccucgacuccaaggucgggggcaacuacaacuaccuguuccgccuguuccgcaagagcaaccucaagcccuucgagcgggacaucuccaccgagaucuaccaggccggcagcacccccugcaacgggguggagggcuucaacugcuacuucccccugcaguccuacggguuccagccgaccaacggcgugggguaccagcccuaccggguggucgugcugagcuucgagcuccugcacgcccccgccacggugugcggccccaagaaguccaccaaccuggucaagaacaagugcgugaacuucaacuucaacggccucaccgggaccggcgugcugaccgagagcaacaagaaguuccugccguuccagcaguucgggcgcgacaucgccgacacgaccgacgcgguccgcgacccccagacccuggagauccucgacaucacccccugcagcuucggcgggguguccgugaucacgccgggcaccaacaccagcaaccaggucgccgugcuguaccagggcgugaacugcaccgagguccccguggccauccacgccgaccagcugacgcccaccuggcggguguacuccaccgggagcaacgucuuccagacccgcgccggcugccucaucggggcggagcacgugaacaacuccuacgagugcgacauccccaucggcgccggcaucugcgccagcuaccagacgcagaccaacuccccgcggcgcgcccggagcguggcgucccagagcaucaucgccuacaccaugucccugggggccgagaacagcgucgccuacuccaacaacagcaucgccauccccaccaacuucacgaucuccgugaccaccgagauccugcccgugagcaugaccaagacgagcgucgacugcaccauguacaucugcggcgacuccaccgagugcagcaaccuccugcugcaguacggguccuucugcacccagcucaaccgcgcgcugacgggcaucgccguggagcaggacaagaacacccaggagguguucgcccaggucaagcagaucuacaagacgcccccgaucaaggacuucgggggcuucaacuucagccagauccugcccgaccccuccaagcccagcaagcgguccuucaucgaggaccuccuguucaacaaggugacccuggccgacgccggcuucaucaagcaguacggggacugccucggcgacaucgcggcccgcgaccugaucugcgcccagaaguucaacgggcugaccgugcucccgccccugcugaccgacgagaugaucgcccaguacaccagcgcccuccuggcgggcaccaucacguccggguggaccuucggcgccggcgccgcccugcagauccccuucgcgaugcagauggccuaccgguucaacgggaucggcgucacccagaacgugcucuacgagaaccagaagcugaucgccaaccaguucaacagcgccaucgggaagauccaggacucccugagcuccaccgccagcgcgcucggcaagcugcaggacguggucaaccagaacgcccaggcccugaacacgcucgugaagcagcuguccagcaacuucggggccaucuccagcgugcugaacgacauccucucccgccuggacaaggucgaggccgaggugcagaucgaccggcugaucaccggccgccuccagagccugcagaccuacgugacccagcagcugauccgggcggccgagauccgcgccagcgccaaccucgccgcgaccaagauguccgagugcguccugggccagagcaagcggguggacuucugcgggaagggcuaccaccugauguccuucccccagagcgccccgcacgggguggucuuccuccacgugacguacguccccgcccaggagaagaacuucaccaccgcccccgcgaucugccacgacggcaaggcccacuucccccgcgaggggguguucguguccaacggcacccacugguucgucacgcagcggaacuucuacgagccgcagaucaucaccaccgacaacaccuucgugagcggcaacugcgacguggucaucgggaucgugaacaacacgguguacgacccccugcagcccgagcuggacuccuucaaggaggagcucgacaaguacuucaagaaccacaccagccccgacgucgaccugggcgacaucuccgggaucaacgccagcguggugaacauccagaaggagaucgaccgccugaacgaggucgccaagaaccucaacgagucccugaucgaccugcaggagcucggcaaguacgagcaguacaucaaguggccgugguacaucuggcugggcuucaucgccgggcugaucgcgaucgugauggugaccaucaugcucugcugcaugaccagcugcugcuccugccugaagggcugcugcagcugcggguccugcugcaaguucgacgaggacgacagcgagcccguccugaagggcgugaagcuccacuacacgugaggacuaguuauaagacugacuagcccgaugggccucccaacgggcccuccuccccuccuugcaccgagagaucuaaaaaaaaaaaaaaaaaaaaaaaaaaaaaaaaaaaaaaaaaaaaaaaaaaaaaaaaaaaaaaaaaaaaaaaaaaaaaaaaaaaaaaaaaaaaaaaaaaaa

SEQ ID NO: 25855 - RNA, 4011 nt, Artificial Sequence
  SARS-CoV-2/Wuhan/WIV05/2019__EPI_ISL_402128 spike protein mRNA gc (1-1273)(D614G_I692V)
aggagaaagcuuaccauguucguguuccugguccuccugccccuggugagcucccagugcgugaaccucaccacccgcacgcagcugccgcccgccuacaccaacagcuucacccggggcgucuacuaccccgacaagguguuccgcuccagcgugcugcacuccacccaggaccucuuccugcccuucuucagcaacgucacgugguuccacgccauccacguguccgggaccaacggcaccaagcgguucgacaacccggugcugcccuucaacgacggggucuacuucgcgagcaccgagaaguccaacaucauccgcggcuggaucuucgggacgacccucgacagcaagacccagucccugcugaucgugaacaacgccaccaacguggucaucaaggugugcgaguuccaguucugcaacgaccccuuccucggcguguacuaccacaagaacaacaagagcuggauggaguccgaguuccgggucuacagcuccgccaacaacugcacguucgaguacgugagccagcccuuccugauggaccuggagggcaagcaggggaacuucaagaaccuccgcgaguucguguucaagaacaucgacggcuacuucaagaucuacuccaagcacaccccgaucaaccugguccgggaccugccccagggguucagcgcccucgagccccugguggaccugcccaucggcaucaacaucacccgcuuccagacccuccuggcccugcaccgguccuaccucacgccgggggacagcagcuccggcuggaccgcgggcgccgccgccuacuacgugggguaccugcagccccgcaccuuccugcucaaguacaacgagaacggcaccaucacggacgcggucgacugcgcccuggacccccugagcgagaccaagugcacccucaaguccuucaccguggagaaggggaucuaccagacgagcaacuuccgggugcagcccaccgaguccaucguccgcuucccgaacaucaccaaccugugccccuucggcgagguguucaacgccacccgguucgccagcgucuacgccuggaaccgcaagcggaucuccaacugcguggcggacuacagcgugcuguacaacuccgccagcuucuccacguucaagugcuacggcgucagccccaccaagcucaacgaccugugcuucaccaacguguacgccgacuccuucgugauccgcggggacgagguccggcagaucgcccccggccagaccgggaagaucgccgacuacaacuacaagcugccggacgacuucacgggcugcgugaucgcguggaacagcaacaaccucgacuccaaggucgggggcaacuacaacuaccuguaccgccuguuccgcaagagcaaccucaagcccuucgagcgggacaucuccaccgagaucuaccaggccggcagcacccccugcaacgggguggagggcuucaacugcuacuucccccugcaguccuacggguuccagccgaccaacggcgugggguaccagcccuaccggguggucgugcugagcuucgagcuccugcacgcccccgccacggugugcggccccaagaaguccaccaaccuggucaagaacaagugcgugaacuucaacuucaacggccucaccgggaccggcgugcugaccgagagcaacaagaaguuccugccguuccagcaguucgggcgcgacaucgccgacacgaccgacgcgguccgcgacccccagacccuggagauccucgacaucacccccugcagcuucggcgggguguccgugaucacgccgggcaccaacaccagcaaccaggucgccgugcuguaccagggcgugaacugcaccgagguccccguggccauccacgccgaccagcugacgcccaccuggcggguguacuccaccgggagcaacgucuuccagacccgcgccggcugccucaucggggcggagcacgugaacaacuccuacgagugcgacauccccaucggcgccggcaucugcgccagcuaccagacgcagaccaacuccccgcggcgcgcccggagcguggcgucccagagcgucaucgccuacaccaugucccugggggccgagaacagcguggccuacuccaacaacagcaucgccauccccaccaacuucacgaucuccgugaccaccgagauccugcccgucagcaugaccaagacgagcguggacugcaccauguacaucugcggcgacuccaccgagugcagcaaccuccugcugcaguacggguccuucugcacccagcucaaccgcgcgcugacgggcaucgccguggagcaggacaagaacacccaggaggucuucgcccaggugaagcagaucuacaagacgcccccgaucaaggacuucgggggcuucaacuucagccagauccugcccgaccccuccaagcccagcaagcgguccuucaucgaggaccuccuguucaacaaggugacccuggccgacgccggcuucaucaagcaguacggggacugccucggcgacaucgcggcccgcgaccugaucugcgcccagaaguucaacgggcugaccguccucccgccccugcugaccgacgagaugaucgcccaguacaccagcgcccuccuggcgggcaccaucacguccggguggaccuucggcgccggcgccgcccugcagauccccuucgcgaugcagauggccuaccgguucaacgggaucggcgugacccagaacgugcucuacgagaaccagaagcugaucgccaaccaguucaacagcgccaucgggaagauccaggacucccugagcuccaccgccagcgcgcucggcaagcugcaggacgucgugaaccagaacgcccaggcccugaacacgcucgugaagcagcuguccagcaacuucggggccaucuccagcguccugaacgacauccucucccgccuggacaagguggaggccgaggugcagaucgaccggcugaucaccggccgccuccagagccugcagaccuacgucacccagcagcugauccgggcggccgagauccgcgccagcgccaaccucgccgcgaccaagauguccgagugcgugcugggccagagcaagcggguggacuucugcgggaagggcuaccaccugauguccuucccccagagcgccccgcacggggucguguuccuccacgucacguacgugcccgcccaggagaagaacuucaccaccgcccccgcgaucugccacgacggcaaggcccacuucccccgcgaggggguguucgucuccaacggcacccacugguucgugacgcagcggaacuucuacgagccgcagaucaucaccaccgacaacaccuucgugagcggcaacugcgacgucgugaucgggaucgugaacaacacggucuacgacccccugcagcccgagcuggacuccuucaaggaggagcucgacaaguacuucaagaaccacaccagccccgacguggaccugggcgacaucuccgggaucaacgccagcguggucaacauccagaaggagaucgaccgccugaacgagguggccaagaaccucaacgagucccugaucgaccugcaggagcucggcaaguacgagcaguacaucaaguggccgugguacaucuggcugggcuucaucgccgggcugaucgcgaucgugauggucaccaucaugcucugcugcaugaccagcugcugcuccugccugaagggcugcugcagcugcggguccugcugcaaguucgacgaggacgacagcgagcccgugcugaagggcgugaagcuccacuacacgugaggacuaguuauaagacugacuagcccgaugggccucccaacgggcccuccuccccuccuugcaccgagagaucuaaaaaaaaaaaaaaaaaaaaaaaaaaaaaaaaaaaaaaaaaaaaaaaaaaaaaaaaaaaaaaaaaaaaaaaaaaaaaaaaaaaaaaaaaaaaaaaaaaaa

SEQ ID NO: 25856 - RNA, 4011 nt, Artificial Sequence
  SARS-CoV-2/Wuhan/WIV05/2019__EPI_ISL_402128 spike protein mRNA gc (1-1273)(D614G_M1229I)
aggagaaagcuuaccauguucguguuccugguccuccugccccuggugagcucccagugcgugaaccucaccacccgcacgcagcugccgcccgccuacaccaacagcuucacccggggcgucuacuaccccgacaagguguuccgcuccagcgugcugcacuccacccaggaccucuuccugcccuucuucagcaacgucacgugguuccacgccauccacguguccgggaccaacggcaccaagcgguucgacaacccggugcugcccuucaacgacggggucuacuucgcgagcaccgagaaguccaacaucauccgcggcuggaucuucgggacgacccucgacagcaagacccagucccugcugaucgugaacaacgccaccaacguggucaucaaggugugcgaguuccaguucugcaacgaccccuuccucggcguguacuaccacaagaacaacaagagcuggauggaguccgaguuccgggucuacagcuccgccaacaacugcacguucgaguacgugagccagcccuuccugauggaccuggagggcaagcaggggaacuucaagaaccuccgcgaguucguguucaagaacaucgacggcuacuucaagaucuacuccaagcacaccccgaucaaccugguccgggaccugccccagggguucagcgcccucgagccccugguggaccugcccaucggcaucaacaucacccgcuuccagacccuccuggcccugcaccgguccuaccucacgccgggggacagcagcuccggcuggaccgcgggcgccgccgccuacuacgugggguaccugcagccccgcaccuuccugcucaaguacaacgagaacggcaccaucacggacgcggucgacugcgcccuggacccccugagcgagaccaagugcacccucaaguccuucaccguggagaaggggaucuaccagacgagcaacuuccgggugcagcccaccgaguccaucguccgcuucccgaacaucaccaaccugugccccuucggcgagguguucaacgccacccgguucgccagcgucuacgccuggaaccgcaagcggaucuccaacugcguggcggacuacagcgugcuguacaacuccgccagcuucuccacguucaagugcuacggcgucagccccaccaagcucaacgaccugugcuucaccaacguguacgccgacuccuucgugauccgcggggacgagguccggcagaucgcccccggccagaccgggaagaucgccgacuacaacuacaagcugccggacgacuucacgggcugcgugaucgcguggaacagcaacaaccucgacuccaaggucgggggcaacuacaacuaccuguaccgccuguuccgcaagagcaaccucaagcccuucgagcgggacaucuccaccgagaucuaccaggccggcagcacccccugcaacgggguggagggcuucaacugcuacuucccccugcaguccuacggguuccagccgaccaacggcgugggguaccagcccuaccggguggucgugcugagcuucgagcuccugcacgcccccgccacggugugcggccccaagaaguccaccaaccuggucaagaacaagugcgugaacuucaacuucaacggccucaccgggaccggcgugcugaccgagagcaacaagaaguuccugccguuccagcaguucgggcgcgacaucgccgacacgaccgacgcgguccgcgacccccagacccuggagauccucgacaucacccccugcagcuucggcgggguguccgugaucacgccgggcaccaacaccagcaaccaggucgccgugcuguaccagggcgugaacugcaccgagguccccguggccauccacgccgaccagcugacgcccaccuggcggguguacuccaccgggagcaacgucuuccagacccgcgccggcugccucaucggggcggagcacgugaacaacuccuacgagugcgacauccccaucggcgccggcaucugcgccagcuaccagacgcagaccaacuccccgcggcgcgcccggagcguggcgucccagagcaucaucgccuacaccaugucccugggggccgagaacagcgucgccuacuccaacaacagcaucgccauccccaccaacuucacgaucuccgugaccaccgagauccugcccgugagcaugaccaagacgagcgucgacugcaccauguacaucugcggcgacuccaccgagugcagcaaccuccugcugcaguacggguccuucugcacccagcucaaccgcgcgcugacgggcaucgccguggagcaggacaagaacacccaggagguguucgcccaggucaagcagaucuacaagacgcccccgaucaaggacuucgggggcuucaacuucagccagauccugcccgaccccuccaagcccagcaagcgguccuucaucgaggaccuccuguucaacaaggugacccuggccgacgccggcuucaucaagcaguacggggacugccucggcgacaucgcggcccgcgaccugaucugcgcccagaaguucaacgggcugaccgugcucccgccccugcugaccgacgagaugaucgcccaguacaccagcgcccuccuggcgggcaccaucacguccggguggaccuucggcgccggcgccgcccugcagauccccuucgcgaugcagauggccuaccgguucaacgggaucggcgucacccagaacgugcucuacgagaaccagaagcugaucgccaaccaguucaacagcgccaucgggaagauccaggacucccugagcuccaccgccagcgcgcucggcaagcugcaggacguggucaaccagaacgcccaggcccugaacacgcucgugaagcagcuguccagcaacuucggggccaucuccagcgugcugaacgacauccucucccgccuggacaaggucgaggccgaggugcagaucgaccggcugaucaccggccgccuccagagccugcagaccuacgugacccagcagcugauccgggcggccgagauccgcgccagcgccaaccucgccgcgaccaagauguccgagugcguccugggccagagcaagcggguggacuucugcgggaagggcuaccaccugauguccuucccccagagcgccccgcacgggguggucuuccuccacgugacguacguccccgcccaggagaagaacuucaccaccgcccccgcgaucugccacgacggcaaggcccacuucccccgcgaggggguguucguguccaacggcacccacugguucgucacgcagcggaacuucuacgagccgcagaucaucaccaccgacaacaccuucgugagcggcaacugcgacguggucaucgggaucgugaacaacacgguguacgacccccugcagcccgagcuggacuccuucaaggaggagcucgacaaguacuucaagaaccacaccagccccgacgucgaccugggcgacaucuccgggaucaacgccagcguggugaacauccagaaggagaucgaccgccugaacgaggucgccaagaaccucaacgagucccugaucgaccugcaggagcucggcaaguacgagcaguacaucaaguggccgugguacaucuggcugggcuucaucgccgggcugaucgcgaucgugaucgugaccaucaugcucugcugcaugaccagcugcugcuccugccugaagggcugcugcagcugcggguccugcugcaaguucgacgaggacgacagcgagcccguccugaagggcgugaagcuccacuacacgugaggacuaguuauaagacugacuagcccgaugggccucccaacgggcccuccuccccuccuugcaccgagagaucuaaaaaaaaaaaaaaaaaaaaaaaaaaaaaaaaaaaaaaaaaaaaaaaaaaaaaaaaaaaaaaaaaaaaaaaaaaaaaaaaaaaaaaaaaaaaaaaaaaaa

SEQ ID NO: 25857 - RNA, 4005 nt, Artificial Sequence
  SARS-CoV-2/Wuhan/WIV05/2019__EPI_ISL_402128 spike protein mRNA gc (1-1273)(H69del_V70del_A222V_Y453F_S477N_D614G_I692V)
aggagaaagcuuaccauguucguguuccugguccuccugccccuggugagcucccagugcgugaaccucaccacccgcacgcagcugccgcccgccuacaccaacagcuucacccggggcgucuacuaccccgacaagguguuccgcuccagcgugcugcacuccacccaggaccucuuccugcccuucuucagcaacgucacgugguuccacgccaucuccgggaccaacggcaccaagcgguucgacaacccggugcugcccuucaacgacgggguguacuucgcgagcaccgagaaguccaacaucauccgcggcuggaucuucgggacgacccucgacagcaagacccagucccugcugaucgucaacaacgccaccaacguggugaucaaggucugcgaguuccaguucugcaacgaccccuuccucggcguguacuaccacaagaacaacaagagcuggauggaguccgaguuccggguguacagcuccgccaacaacugcacguucgaguacgucagccagcccuuccugauggaccuggagggcaagcaggggaacuucaagaaccuccgcgaguucguguucaagaacaucgacggcuacuucaagaucuacuccaagcacaccccgaucaaccuggugcgggaccugccccagggguucagcguccucgagccccugguggaccugcccaucggcaucaacaucacccgcuuccagacccuccuggcccugcaccgguccuaccucacgccgggggacagcagcuccggcuggaccgccggcgcggccgccuacuacgugggguaccugcagccccgcaccuuccugcucaaguacaacgagaacggcaccaucacggacgccgucgacugcgcgcuggacccccugagcgagaccaagugcacccucaaguccuucaccguggagaaggggaucuaccagacgagcaacuuccgggugcagcccaccgaguccaucguccgcuucccgaacaucaccaaccugugccccuucggcgagguguucaacgccacccgguucgccagcgucuacgccuggaaccgcaagcggaucuccaacugcguggccgacuacagcgugcuguacaacuccgcgagcuucuccacguucaagugcuacggcgucagccccaccaagcucaacgaccugugcuucaccaacguguacgccgacuccuucgugauccgcggggacgagguccggcagaucgcccccggccagaccgggaagaucgccgacuacaacuacaagcugccggacgacuucacgggcugcgugaucgccuggaacagcaacaaccucgacuccaaggucgggggcaacuacaacuaccuguuccgccuguuccgcaagagcaaccucaagcccuucgagcgggacaucuccaccgagaucuaccaggcgggcaacacccccugcaacgggguggagggcuucaacugcuacuucccccugcagagcuacggguuccagccgaccaacggcgugggguaccagcccuaccggguggucgugcuguccuucgagcuccugcacgcccccgccacggugugcggccccaagaaguccaccaaccuggucaagaacaagugcgugaacuucaacuucaacggccucaccgggaccggcgugcugaccgagagcaacaagaaguuccugccguuccagcaguucgggcgcgacaucgccgacacgaccgacgccguccgcgacccccagacccuggagauccucgacaucacccccugcagcuucggcggggugagcgugaucacgccgggcaccaacaccuccaaccaggucgcggugcuguaccagggcgugaacugcaccgagguccccguggccauccacgccgaccagcugacgcccaccuggcggguguacagcaccggguccaacgucuuccagacccgcgccggcugccucaucggggccgagcacgugaacaacagcuacgagugcgacauccccaucggcgcgggcaucugcgccuccuaccagacgcagaccaacagcccgcggcgcgcccgguccguggccagccaguccgucaucgcguacaccaugagccugggggccgagaacuccguggccuacagcaacaacuccaucgccauccccaccaacuucacgaucagcgugaccaccgagauccugcccgucuccaugaccaagacgagcguggacugcaccauguacaucugcggcgacagcaccgagugcuccaaccuccugcugcaguacgggagcuucugcacccagcucaaccgcgcccugacgggcaucgcgguggagcaggacaagaacacccaggaggucuucgcccaggugaagcagaucuacaagacgcccccgaucaaggacuucgggggcuucaacuucucccagauccugcccgaccccagcaagcccuccaagcggagcuucaucgaggaccuccuguucaacaaggugacccuggccgacgccggcuucaucaagcaguacggggacugccucggcgacaucgccgcgcgcgaccugaucugcgcccagaaguucaacgggcugaccguccucccgccccugcugaccgacgagaugaucgcccaguacaccuccgcccuccuggccggcaccaucacgagcggguggaccuucggcgcgggcgccgcccugcagauccccuucgccaugcagauggcguaccgguucaacgggaucggcgugacccagaacgugcucuacgagaaccagaagcugaucgccaaccaguucaacuccgccaucgggaagauccaggacagccuguccagcaccgccuccgcccucggcaagcugcaggacgucgugaaccagaacgcgcaggcccugaacacgcucgugaagcagcugagcuccaacuucggggccaucagcuccguccugaacgacauccucagccgccuggacaagguggaggccgaggugcagaucgaccggcugaucaccggccgccuccagucccugcagaccuacgucacccagcagcugauccgggccgcggagauccgcgccagcgccaaccucgccgccaccaagaugagcgagugcgugcugggccaguccaagcggguggacuucugcgggaagggcuaccaccugaugagcuucccccaguccgcgccgcacggggucguguuccuccacgucacguacgugcccgcccaggagaagaacuucaccaccgcccccgccaucugccacgacggcaaggcgcacuucccccgcgaggggguguucgucagcaacggcacccacugguucgugacgcagcggaacuucuacgagccgcagaucaucaccaccgacaacaccuucguguccggcaacugcgacgucgugaucgggaucgugaacaacacggucuacgacccccugcagcccgagcuggacagcuucaaggaggagcucgacaaguacuucaagaaccacaccucccccgacguggaccugggcgacaucagcgggaucaacgccuccguggucaacauccagaaggagaucgaccgccugaacgagguggccaagaaccucaacgagagccugaucgaccugcaggagcucggcaaguacgagcaguacaucaaguggccgugguacaucuggcugggcuucaucgccgggcugaucgccaucgugauggucaccaucaugcucugcugcaugaccuccugcugcagcugccugaagggcugcugcuccugcgggagcugcugcaaguucgacgaggacgacuccgagcccgugcugaagggcgugaagcuccacuacacgugaggacuaguuauaagacugacuagcccgaugggccucccaacgggcccuccuccccuccuugcaccgagagaucuaaaaaaaaaaaaaaaaaaaaaaaaaaaaaaaaaaaaaaaaaaaaaaaaaaaaaaaaaaaaaaaaaaaaaaaaaaaaaaaaaaaaaaaaaaaaaaaaaaaa

SEQ ID NO: 25858 - RNA, 4005 nt, Artificial Sequence
  SARS-CoV-2/Wuhan/WIV05/2019__EPI_ISL_402128 spike protein mRNA gc (1-1273)(H69del_V70del_Y453F_D614G_I692V_M1229I)
aggagaaagcuuaccauguucguguuccugguccuccugccccuggugagcucccagugcgugaaccucaccacccgcacgcagcugccgcccgccuacaccaacagcuucacccggggcgucuacuaccccgacaagguguuccgcuccagcgugcugcacuccacccaggaccucuuccugcccuucuucagcaacgucacgugguuccacgccaucuccgggaccaacggcaccaagcgguucgacaacccggugcugcccuucaacgacgggguguacuucgcgagcaccgagaaguccaacaucauccgcggcuggaucuucgggacgacccucgacagcaagacccagucccugcugaucgucaacaacgccaccaacguggugaucaaggucugcgaguuccaguucugcaacgaccccuuccucggcguguacuaccacaagaacaacaagagcuggauggaguccgaguuccggguguacagcuccgccaacaacugcacguucgaguacgucagccagcccuuccugauggaccuggagggcaagcaggggaacuucaagaaccuccgcgaguucguguucaagaacaucgacggcuacuucaagaucuacuccaagcacaccccgaucaaccuggugcgggaccugccccagggguucagcgcccucgagccccuggucgaccugcccaucggcaucaacaucacccgcuuccagacccuccuggcccugcaccgguccuaccucacgccgggggacagcagcuccggcuggaccgcgggcgccgccgccuacuacgugggguaccugcagccccgcaccuuccugcucaaguacaacgagaacggcaccaucacggacgcgguggacugcgcccuggacccccugagcgagaccaagugcacccucaaguccuucaccgucgagaaggggaucuaccagacgagcaacuuccgggugcagcccaccgaguccaucgugcgcuucccgaacaucaccaaccugugccccuucggcgaggucuucaacgccacccgguucgccagcguguacgccuggaaccgcaagcggaucuccaacugcgucgcggacuacagcgugcuguacaacuccgccagcuucuccacguucaagugcuacggcgugagccccaccaagcucaacgaccugugcuucaccaacgucuacgccgacuccuucgugauccgcggggacgaggugcggcagaucgcccccggccagaccgggaagaucgccgacuacaacuacaagcugccggacgacuucacgggcugcgucaucgcguggaacagcaacaaccucgacuccaaggucgggggcaacuacaacuaccuguuccgccuguuccgcaagagcaaccucaagcccuucgagcgggacaucuccaccgagaucuaccaggccggcagcacccccugcaacgggguggagggcuucaacugcuacuucccccugcaguccuacggguuccagccgaccaacggcgugggguaccagcccuaccggguggugguccugagcuucgagcuccugcacgcccccgccacggugugcggccccaagaaguccaccaaccuggugaagaacaagugcgucaacuucaacuucaacggccucaccgggaccggcgugcugaccgagagcaacaagaaguuccugccguuccagcaguucgggcgcgacaucgccgacacgaccgacgcggugcgcgacccccagacccuggagauccucgacaucacccccugcagcuucggcggggucuccgugaucacgccgggcaccaacaccagcaaccagguggccguccuguaccagggcgugaacugcaccgaggugcccgucgccauccacgccgaccagcugacgcccaccuggcggguguacuccaccgggagcaacguguuccagacccgcgccggcugccucaucggggcggagcacgucaacaacuccuacgagugcgacauccccaucggcgccggcaucugcgccagcuaccagacgcagaccaacuccccgcggcgcgcccggagcguggcgucccagagcgugaucgccuacaccaugucccugggggccgagaacagcgucgccuacuccaacaacagcaucgccauccccaccaacuucacgaucuccgugaccaccgagauccugcccgugagcaugaccaagacgagcgucgacugcaccauguacaucugcggcgacuccaccgagugcagcaaccuccugcugcaguacggguccuucugcacccagcucaaccgcgcgcugacgggcaucgccguggagcaggacaagaacacccaggagguguucgcccaggucaagcagaucuacaagacgcccccgaucaaggacuucgggggcuucaacuucagccagauccugcccgaccccuccaagcccagcaagcgguccuucaucgaggaccuccuguucaacaaggugacccuggccgacgccggcuucaucaagcaguacggggacugccucggcgacaucgcggcccgcgaccugaucugcgcccagaaguucaacgggcugaccgugcucccgccccugcugaccgacgagaugaucgcccaguacaccagcgcccuccuggcgggcaccaucacguccggguggaccuucggcgccggcgccgcccugcagauccccuucgcgaugcagauggccuaccgguucaacgggaucggcgucacccagaacgugcucuacgagaaccagaagcugaucgccaaccaguucaacagcgccaucgggaagauccaggacucccugagcuccaccgccagcgcgcucggcaagcugcaggacguggucaaccagaacgcccaggcccugaacacgcucgugaagcagcuguccagcaacuucggggccaucuccagcgugcugaacgacauccucucccgccuggacaaggucgaggccgaggugcagaucgaccggcugaucaccggccgccuccagagccugcagaccuacgugacccagcagcugauccgggcggccgagauccgcgccagcgccaaccucgccgcgaccaagauguccgagugcguccugggccagagcaagcggguggacuucugcgggaagggcuaccaccugauguccuucccccagagcgccccgcacgggguggucuuccuccacgugacguacguccccgcccaggagaagaacuucaccaccgcccccgcgaucugccacgacggcaaggcccacuucccccgcgaggggguguucguguccaacggcacccacugguucgucacgcagcggaacuucuacgagccgcagaucaucaccaccgacaacaccuucgugagcggcaacugcgacguggucaucgggaucgugaacaacacgguguacgacccccugcagcccgagcuggacuccuucaaggaggagcucgacaaguacuucaagaaccacaccagccccgacgucgaccugggcgacaucuccgggaucaacgccagcguggugaacauccagaaggagaucgaccgccugaacgaggucgccaagaaccucaacgagucccugaucgaccugcaggagcucggcaaguacgagcaguacaucaaguggccgugguacaucuggcugggcuucaucgccgggcugaucgcgaucgugaucgugaccaucaugcucugcugcaugaccagcugcugcuccugccugaagggcugcugcagcugcggguccugcugcaaguucgacgaggacgacagcgagcccguccugaagggcgugaagcuccacuacacgugaggacuaguuauaagacugacuagcccgaugggccucccaacgggcccuccuccccuccuugcaccgagagaucuaaaaaaaaaaaaaaaaaaaaaaaaaaaaaaaaaaaaaaaaaaaaaaaaaaaaaaaaaaaaaaaaaaaaaaaaaaaaaaaaaaaaaaaaaaaaaaaaaaaa

SEQ ID NO: 25859 - RNA, 4002 nt, Artificial Sequence
  SARS-CoV-2/Wuhan/WIV05/2019__EPI_ISL_402128 spike protein mRNA gc (1-1273)(H69del_V70del_Y144del_N501Y_A570D_D614G_P681H_T716I_S982 A_D1118H)
aggagaaagcuuaccauguucguguuccugguccuccugccccuggugagcucccagugcgugaaccucaccacccgcacgcagcugccgcccgccuacaccaacagcuucacccggggcgucuacuaccccgacaagguguuccgcuccagcgugcugcacuccacccaggaccucuuccugcccuucuucagcaacgucacgugguuccacgccaucuccgggaccaacggcaccaagcgguucgacaacccggugcugcccuucaacgacgggguguacuucgcgagcaccgagaaguccaacaucauccgcggcuggaucuucgggacgacccucgacagcaagacccagucccugcugaucgucaacaacgccaccaacguggugaucaaggucugcgaguuccaguucugcaacgaccccuuccucggcguguaccacaagaacaacaagagcuggauggaguccgaguuccggguguacagcuccgccaacaacugcacguucgaguacgucagccagcccuuccugauggaccuggagggcaagcaggggaacuucaagaaccuccgcgaguucguguucaagaacaucgacggcuacuucaagaucuacuccaagcacaccccgaucaaccuggugcgggaccugccccagggguucagcgcccucgagccccuggucgaccugcccaucggcaucaacaucacccgcuuccagacccuccuggcccugcaccgguccuaccucacgccgggggacagcagcuccggcuggaccgcgggcgccgccgccuacuacgugggguaccugcagccccgcaccuuccugcucaaguacaacgagaacggcaccaucacggacgcgguggacugcgcccuggacccccugagcgagaccaagugcacccucaaguccuucaccgucgagaaggggaucuaccagacgagcaacuuccgggugcagcccaccgaguccaucgugcgcuucccgaacaucaccaaccugugccccuucggcgaggucuucaacgccacccgguucgccagcguguacgccuggaaccgcaagcggaucuccaacugcgucgcggacuacagcgugcuguacaacuccgccagcuucuccacguucaagugcuacggcgugagccccaccaagcucaacgaccugugcuucaccaacgucuacgccgacuccuucgugauccgcggggacgaggugcggcagaucgcccccggccagaccgggaagaucgccgacuacaacuacaagcugccggacgacuucacgggcugcgucaucgcguggaacagcaacaaccucgacuccaaggucgggggcaacuacaacuaccuguaccgccuguuccgcaagagcaaccucaagcccuucgagcgggacaucuccaccgagaucuaccaggccggcagcacccccugcaacgggguggagggcuucaacugcuacuucccccugcaguccuacggguuccagccgaccuacggcgugggguaccagcccuaccggguggugguccugagcuucgagcuccugcacgcccccgccacggugugcggccccaagaaguccaccaaccuggugaagaacaagugcgucaacuucaacuucaacggccucaccgggaccggcgugcugaccgagagcaacaagaaguuccugccguuccagcaguucgggcgcgacaucgacgacacgaccgacgccgugcgcgacccccagacccuggagauccucgacaucacccccugcagcuucggcggggucuccgugaucacgccgggcaccaacaccagcaaccagguggcgguccuguaccagggcgugaacugcaccgaggugcccgucgccauccacgccgaccagcugacgcccaccuggcggguguacuccaccgggagcaacguguuccagacccgcgccggcugccucaucggggccgagcacgucaacaacuccuacgagugcgacauccccaucggcgcgggcaucugcgccagcuaccagacgcagaccaacucccaccggcgcgcccggagcguggccucccagagcaucaucgcguacaccaugucccugggggccgagaacagcguggccuacuccaacaacagcaucgccaucccgaucaacuucaccaucuccgucacgaccgagauccugcccgugagcaugaccaagaccagcguggacugcacgauguacaucugcggcgacuccaccgagugcagcaaccuccugcugcaguacggguccuucugcacccagcucaaccgcgcccugaccggcaucgcggucgagcaggacaagaacacgcaggagguguucgcccaggugaagcagaucuacaagaccccgcccaucaaggacuucgggggcuucaacuucagccagauccugcccgaccccuccaagcccagcaagcgguccuucaucgaggaccuccuguucaacaaggucacccuggccgacgccggcuucaucaagcaguacggggacugccucggcgacaucgccgcgcgcgaccugaucugcgcccagaaguucaacgggcugaccgugcugcccccgcuccugacggacgagaugaucgcccaguacaccagcgcccuccuggccggcaccaucaccuccggguggacguucggcgcgggcgccgcccugcagauccccuucgccaugcagauggcguaccgguucaacgggaucggcgugacccagaacguccucuacgagaaccagaagcugaucgccaaccaguucaacagcgccaucgggaagauccaggacucccugagcuccaccgccagcgcccucggcaagcugcaggacguggugaaccagaacgcgcaggcccugaacacccucgucaagcagcuguccagcaacuucggggccaucuccagcgugcugaacgacauccucgcccgccuggacaagguggaggccgagguccagaucgaccggcugaucacgggccgccuccagucccugcagaccuacgugacccagcagcugauccgggcggccgagauccgcgccagcgccaaccucgccgcgaccaagaugagcgagugcgugcugggccaguccaagcgggucgacuucugcgggaagggcuaccaccugaugagcuucccccaguccgcgccccacggggugguguuccuccacgucaccuacgugccggcccaggagaagaacuucacgaccgcccccgccaucugccacgacggcaaggcccacuucccccgcgagggggucuucgugagcaacggcacccacugguucgugacccagcggaacuucuacgagccccagaucaucacgacccacaacaccuucgucuccggcaacugcgacguggugaucgggaucgucaacaacaccguguacgacccgcugcagcccgagcuggacagcuucaaggaggagcucgacaaguacuucaagaaccacacgucccccgacguggaccugggcgacaucagcgggaucaacgccuccgucgugaacauccagaaggagaucgaccgccugaacgagguggccaagaaccucaacgagagccugaucgaccugcaggagcucggcaaguacgagcaguacaucaaguggcccugguacaucuggcugggcuucaucgccgggcugaucgcgaucgucauggugaccaucaugcucugcugcaugaccuccugcugcagcugccugaagggcugcugcuccugcgggagcugcugcaaguucgacgaggacgacuccgagccggugcugaagggcgucaagcuccacuacaccugaggacuaguuauaagacugacuagcccgaugggccucccaacgggcccuccuccccuccuugcaccgagagaucuaaaaaaaaaaaaaaaaaaaaaaaaaaaaaaaaaaaaaaaaaaaaaaaaaaaaaaaaaaaaaaaaaaaaaaaaaaaaaaaaaaaaaaaaaaaaaaaaaaaa

SEQ ID NO: 25860 - RNA, 4011 nt, Artificial Sequence
  SARS-CoV-2/Wuhan/WIV05/2019__EPI_ISL_402128 spike protein mRNA gc (1-1273)(K417N_E484K_N501Y_D614G)
aggagaaagcuuaccauguucguguuccugguccuccugccccuggugagcucccagugcgugaaccucaccacccgcacgcagcugccgcccgccuacaccaacagcuucacccggggcgucuacuaccccgacaagguguuccgcuccagcgugcugcacuccacccaggaccucuuccugcccuucuucagcaacgucacgugguuccacgccauccacguguccgggaccaacggcaccaagcgguucgacaacccggugcugcccuucaacgacggggucuacuucgcgagcaccgagaaguccaacaucauccgcggcuggaucuucgggacgacccucgacagcaagacccagucccugcugaucgugaacaacgccaccaacguggucaucaaggugugcgaguuccaguucugcaacgaccccuuccucggcguguacuaccacaagaacaacaagagcuggauggaguccgaguuccgggucuacagcuccgccaacaacugcacguucgaguacgugagccagcccuuccugauggaccuggagggcaagcaggggaacuucaagaaccuccgcgaguucguguucaagaacaucgacggcuacuucaagaucuacuccaagcacaccccgaucaaccugguccgggaccugccccagggguucagcgcccucgagccccugguggaccugcccaucggcaucaacaucacccgcuuccagacccuccuggcccugcaccgguccuaccucacgccgggggacagcagcuccggcuggaccgcgggcgccgccgccuacuacgugggguaccugcagccccgcaccuuccugcucaaguacaacgagaacggcaccaucacggacgcggucgacugcgcccuggacccccugagcgagaccaagugcacccucaaguccuucaccguggagaaggggaucuaccagacgagcaacuuccgggugcagcccaccgaguccaucguccgcuucccgaacaucaccaaccugugccccuucggcgagguguucaacgccacccgguucgccagcgucuacgccuggaaccgcaagcggaucuccaacugcguggcggacuacagcgugcuguacaacuccgccagcuucuccacguucaagugcuacggcgucagccccaccaagcucaacgaccugugcuucaccaacguguacgccgacuccuucgugauccgcggggacgagguccggcagaucgcccccggccagaccgggaacaucgccgacuacaacuacaagcugccggacgacuucacgggcugcgugaucgcguggaacagcaacaaccucgacuccaaggucgggggcaacuacaacuaccuguaccgccuguuccgcaagagcaaccucaagcccuucgagcgggacaucuccaccgagaucuaccaggccggcagcacccccugcaacggggugaagggcuucaacugcuacuucccccugcaguccuacggguuccagccgaccuacggcgugggguaccagcccuaccggguggucgugcugagcuucgagcuccugcacgcccccgccacggugugcggccccaagaaguccaccaaccuggucaagaacaagugcgugaacuucaacuucaacggccucaccgggaccggcgugcugaccgagagcaacaagaaguuccugccguuccagcaguucgggcgcgacaucgccgacacgaccgacgcgguccgcgacccccagacccuggagauccucgacaucacccccugcagcuucggcgggguguccgugaucacgccgggcaccaacaccagcaaccaggucgccgugcuguaccagggcgugaacugcaccgagguccccguggccauccacgccgaccagcugacgcccaccuggcggguguacuccaccgggagcaacgucuuccagacccgcgccggcugccucaucggggcggagcacgugaacaacuccuacgagugcgacauccccaucggcgccggcaucugcgccagcuaccagacgcagaccaacuccccgcggcgcgcccggagcguggcgucccagagcaucaucgccuacaccaugucccugggggccgagaacagcgucgccuacuccaacaacagcaucgccauccccaccaacuucacgaucuccgugaccaccgagauccugcccgugagcaugaccaagacgagcgucgacugcaccauguacaucugcggcgacuccaccgagugcagcaaccuccugcugcaguacggguccuucugcacccagcucaaccgcgcgcugacgggcaucgccguggagcaggacaagaacacccaggagguguucgcccaggucaagcagaucuacaagacgcccccgaucaaggacuucgggggcuucaacuucagccagauccugcccgaccccuccaagcccagcaagcgguccuucaucgaggaccuccuguucaacaaggugacccuggccgacgccggcuucaucaagcaguacggggacugccucggcgacaucgcggcccgcgaccugaucugcgcccagaaguucaacgggcugaccgugcucccgccccugcugaccgacgagaugaucgcccaguacaccagcgcccuccuggcgggcaccaucacguccggguggaccuucggcgccggcgccgcccugcagauccccuucgcgaugcagauggccuaccgguucaacgggaucggcgucacccagaacgugcucuacgagaaccagaagcugaucgccaaccaguucaacagcgccaucgggaagauccaggacucccugagcuccaccgccagcgcgcucggcaagcugcaggacguggucaaccagaacgcccaggcccugaacacgcucgugaagcagcuguccagcaacuucggggccaucuccagcgugcugaacgacauccucucccgccuggacaaggucgaggccgaggugcagaucgaccggcugaucaccggccgccuccagagccugcagaccuacgugacccagcagcugauccgggcggccgagauccgcgccagcgccaaccucgccgcgaccaagauguccgagugcguccugggccagagcaagcggguggacuucugcgggaagggcuaccaccugauguccuucccccagagcgccccgcacgggguggucuuccuccacgugacguacguccccgcccaggagaagaacuucaccaccgcccccgcgaucugccacgacggcaaggcccacuucccccgcgaggggguguucguguccaacggcacccacugguucgucacgcagcggaacuucuacgagccgcagaucaucaccaccgacaacaccuucgugagcggcaacugcgacguggucaucgggaucgugaacaacacgguguacgacccccugcagcccgagcuggacuccuucaaggaggagcucgacaaguacuucaagaaccacaccagccccgacgucgaccugggcgacaucuccgggaucaacgccagcguggugaacauccagaaggagaucgaccgccugaacgaggucgccaagaaccucaacgagucccugaucgaccugcaggagcucggcaaguacgagcaguacaucaaguggccgugguacaucuggcugggcuucaucgccgggcugaucgcgaucgugauggugaccaucaugcucugcugcaugaccagcugcugcuccugccugaagggcugcugcagcugcggguccugcugcaaguucgacgaggacgacagcgagcccguccugaagggcgugaagcuccacuacacgugaggacuaguuauaagacugacuagcccgaugggccucccaacgggcccuccuccccuccuugcaccgagagaucuaaaaaaaaaaaaaaaaaaaaaaaaaaaaaaaaaaaaaaaaaaaaaaaaaaaaaaaaaaaaaaaaaaaaaaaaaaaaaaaaaaaaaaaaaaaaaaaaaaaa

SEQ ID NO: 25861 - RNA, 4002 nt, Artificial Sequence
  SARS-CoV-2/Wuhan/WIV05/2019__EPI_ISL_402128 spike protein mRNA gc (1-1273)(L18F_D80A_D215G_L242del_A243del_L244del_R246I_K417N_E484 K_N501Y_D614G_A701V)
aggagaaagcuuaccauguucguguuccugguccuccugccccuggugagcucccagugcgugaacuucaccacccgcacgcagcucccgcccgccuacaccaacagcuucacccggggcgucuacuaccccgacaagguguuccgcuccagcgugcugcacuccacccaggaccuguuccuccccuucuucagcaacgucacgugguuccacgccauccacguguccgggaccaacggcaccaagcgguucgcgaacccggugcugcccuucaacgacggggucuacuucgccagcaccgagaaguccaacaucauccgcggcuggaucuucgggacgacccuggacagcaagacccagucccuccugaucgugaacaacgccaccaacguggucaucaaggugugcgaguuccaguucugcaacgaccccuuccugggcguguacuaccacaagaacaacaagagcuggauggaguccgaguuccgggucuacagcuccgccaacaacugcacguucgaguacgugagccagcccuuccucauggaccuggagggcaagcaggggaacuucaagaaccugcgcgaguucguguucaagaacaucgacggcuacuucaagaucuacuccaagcacaccccgaucaaccucguccgggggcugccccagggcuucagcgcccuggagccccucguggaccugcccaucgggaucaacaucacccgcuuccagacccugcacaucuccuaccucacgccgggcgacagcagcuccggcuggaccgcgggggccgccgccuacuacgugggcuaccugcagccccggaccuuccugcucaaguacaacgagaacgggaccaucacggacgcggucgacugcgcccuggacccccugagcgagaccaagugcacccucaaguccuucaccguggagaagggcaucuaccagacgagcaacuuccgcgugcagcccaccgaguccaucguccgguucccgaacaucaccaaccugugccccuucggcgagguguucaacgccacccgcuucgccagcgucuacgccuggaaccggaagcgcaucuccaacugcguggcggacuacagcgugcuguacaacuccgccagcuucuccacguucaagugcuacggggucagccccaccaagcucaacgaccugugcuucaccaacguguacgccgacuccuucgugauccggggcgacgagguccgccagaucgcccccgggcagaccggcaacaucgccgacuacaacuacaagcugccggacgacuucacggggugcgugaucgcguggaacagcaacaaccucgacuccaaggugggcggcaacuacaacuaccuguaccggcuguuccgcaagagcaaccucaagcccuucgagcgggacaucuccaccgagaucuaccaggccgggagcacccccugcaacggcgucaagggguucaacugcuacuucccccugcaguccuacggcuuccagccgaccuacggggugggcuaccagcccuaccgcguggucgugcugagcuucgagcuccugcacgcccccgccacggugugcggccccaagaaguccaccaaccuggucaagaacaagugcgugaacuucaacuucaacgggcucaccggcaccggggugcugaccgagagcaacaagaaguuccugccguuccagcaguucggccgggacaucgccgacacgaccgacgcgguccgcgacccccagacccucgagauccuggacaucacccccugcagcuucgggggcguguccgugaucacgccgggcaccaacaccagcaaccaggucgccgugcuguaccagggggugaacugcaccgagguccccguggccauccacgccgaccagcugacgcccaccuggcgcguguacuccaccggcagcaacgucuuccagacccgggccgggugccucaucggcgcggagcacgugaacaacuccuacgagugcgacauccccaucggcgccgggaucugcgccagcuaccagacgcagaccaacuccccgcgccgggcccgcagcguggcgucccagagcaucaucgccuacaccaugucccugggcgucgagaacagcguggccuacuccaacaacagcaucgccauccccaccaacuucacgaucuccgugaccaccgagauccugcccgucagcaugaccaagacgagcguggacugcaccauguacaucugcggggacuccaccgagugcagcaaccuccugcugcaguacggcuccuucugcacccagcucaaccgggcccugacggggaucgcgguggagcaggacaagaacacccaggaggucuucgcccaggugaagcagaucuacaagacgcccccgaucaaggacuucggcggcuucaacuucagccagauccugcccgaccccuccaagcccagcaagcgcuccuucaucgaggaccuccuguucaacaaggugacccuggccgacgccggguucaucaagcaguacggcgacugccucggggacaucgccgcgcgggaccugaucugcgcccagaaguucaacggccugaccguccucccgccccugcugaccgacgagaugaucgcccaguacaccagcgcccuccuggccgggaccaucacguccggcuggaccuucggcgcgggggccgcccugcagauccccuucgccaugcagauggcguaccgcuucaacggcaucggggugacccagaacgugcucuacgagaaccagaagcugaucgccaaccaguucaacagcgccaucggcaagauccaggacucccugagcuccaccgccagcgcccucgggaagcugcaggacgucgugaaccagaacgcgcaggcccugaacacgcucgugaagcagcuguccagcaacuucggcgccaucuccagcguccugaacgacauccucucccggcuggacaagguggaggccgaggugcagaucgaccgccugaucaccggccggcuccagagccugcagaccuacgucacccagcagcugauccgcgccgcggagauccgggccagcgccaaccucgccgccaccaagauguccgagugcgugcuggggcagagcaagcgcguggacuucugcggcaagggguaccaccugauguccuucccccagagcgcgccgcacggcgucguguuccuccacgucacguacgugcccgcccaggagaagaacuucaccaccgcccccgccaucugccacgacgggaaggcgcacuucccccgggagggcguguucgucuccaacggcacccacugguucgugacgcagcgcaacuucuacgagccgcagaucaucaccaccgacaacaccuucgugagcgggaacugcgacgucgugaucggcaucgugaacaacacggucuacgacccccugcagcccgagcuggacuccuucaaggaggagcucgacaaguacuucaagaaccacaccagccccgacguggaccugggggacaucuccggcaucaacgccagcguggucaacauccagaaggagaucgaccggcugaacgagguggccaagaaccucaacgagucccugaucgaccugcaggagcucggcaaguacgagcaguacaucaaguggccgugguacaucuggcugggguucaucgccggccugaucgccaucgugauggucaccaucaugcucugcugcaugaccagcugcugcuccugccugaaggggugcugcagcugcggcuccugcugcaaguucgacgaggacgacagcgagcccgugcugaagggggugaagcuccacuacacgugaggacuaguuauaagacugacuagcccgaugggccucccaacgggcccuccuccccuccuugcaccgagagaucuaaaaaaaaaaaaaaaaaaaaaaaaaaaaaaaaaaaaaaaaaaaaaaaaaaaaaaaaaaaaaaaaaaaaaaaaaaaaaaaaaaaaaaaaaaaaaaaaaaaa

SEQ ID NO: 25862 - RNA, 4011 nt, Artificial Sequence
  SARS-CoV-2/Wuhan/WIV05/2019__EPI_ISL_402128 spike protein mRNA gc (1-1273)(E484K_D614G)
aggagaaagcuuaccauguucguguuccugguccuccugccccuggugagcucccagugcgugaaccucaccacccgcacgcagcugccgcccgccuacaccaacagcuucacccggggcgucuacuaccccgacaagguguuccgcuccagcgugcugcacuccacccaggaccucuuccugcccuucuucagcaacgucacgugguuccacgccauccacguguccgggaccaacggcaccaagcgguucgacaacccggugcugcccuucaacgacggggucuacuucgcgagcaccgagaaguccaacaucauccgcggcuggaucuucgggacgacccucgacagcaagacccagucccugcugaucgugaacaacgccaccaacguggucaucaaggugugcgaguuccaguucugcaacgaccccuuccucggcguguacuaccacaagaacaacaagagcuggauggaguccgaguuccgggucuacagcuccgccaacaacugcacguucgaguacgugagccagcccuuccugauggaccuggagggcaagcaggggaacuucaagaaccuccgcgaguucguguucaagaacaucgacggcuacuucaagaucuacuccaagcacaccccgaucaaccugguccgggaccugccccagggguucagcgcccucgagccccugguggaccugcccaucggcaucaacaucacccgcuuccagacccuccuggcccugcaccgguccuaccucacgccgggggacagcagcuccggcuggaccgcgggcgccgccgccuacuacgugggguaccugcagccccgcaccuuccugcucaaguacaacgagaacggcaccaucacggacgcggucgacugcgcccuggacccccugagcgagaccaagugcacccucaaguccuucaccguggagaaggggaucuaccagacgagcaacuuccgggugcagcccaccgaguccaucguccgcuucccgaacaucaccaaccugugccccuucggcgagguguucaacgccacccgguucgccagcgucuacgccuggaaccgcaagcggaucuccaacugcguggcggacuacagcgugcuguacaacuccgccagcuucuccacguucaagugcuacggcgucagccccaccaagcucaacgaccugugcuucaccaacguguacgccgacuccuucgugauccgcggggacgagguccggcagaucgcccccggccagaccgggaagaucgccgacuacaacuacaagcugccggacgacuucacgggcugcgugaucgcguggaacagcaacaaccucgacuccaaggucgggggcaacuacaacuaccuguaccgccuguuccgcaagagcaaccucaagcccuucgagcgggacaucuccaccgagaucuaccaggccggcagcacccccugcaacggggugaagggcuucaacugcuacuucccccugcaguccuacggguuccagccgaccaacggcgugggguaccagcccuaccggguggucgugcugagcuucgagcuccugcacgcccccgccacggugugcggccccaagaaguccaccaaccuggucaagaacaagugcgugaacuucaacuucaacggccucaccgggaccggcgugcugaccgagagcaacaagaaguuccugccguuccagcaguucgggcgcgacaucgccgacacgaccgacgcgguccgcgacccccagacccuggagauccucgacaucacccccugcagcuucggcgggguguccgugaucacgccgggcaccaacaccagcaaccaggucgccgugcuguaccagggcgugaacugcaccgagguccccguggccauccacgccgaccagcugacgcccaccuggcggguguacuccaccgggagcaacgucuuccagacccgcgccggcugccucaucggggcggagcacgugaacaacuccuacgagugcgacauccccaucggcgccggcaucugcgccagcuaccagacgcagaccaacuccccgcggcgcgcccggagcguggcgucccagagcaucaucgccuacaccaugucccugggggccgagaacagcgucgccuacuccaacaacagcaucgccauccccaccaacuucacgaucuccgugaccaccgagauccugcccgugagcaugaccaagacgagcgucgacugcaccauguacaucugcggcgacuccaccgagugcagcaaccuccugcugcaguacggguccuucugcacccagcucaaccgcgcgcugacgggcaucgccguggagcaggacaagaacacccaggagguguucgcccaggucaagcagaucuacaagacgcccccgaucaaggacuucgggggcuucaacuucagccagauccugcccgaccccuccaagcccagcaagcgguccuucaucgaggaccuccuguucaacaaggugacccuggccgacgccggcuucaucaagcaguacggggacugccucggcgacaucgcggcccgcgaccugaucugcgcccagaaguucaacgggcugaccgugcucccgccccugcugaccgacgagaugaucgcccaguacaccagcgcccuccuggcgggcaccaucacguccggguggaccuucggcgccggcgccgcccugcagauccccuucgcgaugcagauggccuaccgguucaacgggaucggcgucacccagaacgugcucuacgagaaccagaagcugaucgccaaccaguucaacagcgccaucgggaagauccaggacucccugagcuccaccgccagcgcgcucggcaagcugcaggacguggucaaccagaacgcccaggcccugaacacgcucgugaagcagcuguccagcaacuucggggccaucuccagcgugcugaacgacauccucucccgccuggacaaggucgaggccgaggugcagaucgaccggcugaucaccggccgccuccagagccugcagaccuacgugacccagcagcugauccgggcggccgagauccgcgccagcgccaaccucgccgcgaccaagauguccgagugcguccugggccagagcaagcggguggacuucugcgggaagggcuaccaccugauguccuucccccagagcgccccgcacgggguggucuuccuccacgugacguacguccccgcccaggagaagaacuucaccaccgcccccgcgaucugccacgacggcaaggcccacuucccccgcgaggggguguucguguccaacggcacccacugguucgucacgcagcggaacuucuacgagccgcagaucaucaccaccgacaacaccuucgugagcggcaacugcgacguggucaucgggaucgugaacaacacgguguacgacccccugcagcccgagcuggacuccuucaaggaggagcucgacaaguacuucaagaaccacaccagccccgacgucgaccugggcgacaucuccgggaucaacgccagcguggugaacauccagaaggagaucgaccgccugaacgaggucgccaagaaccucaacgagucccugaucgaccugcaggagcucggcaaguacgagcaguacaucaaguggccgugguacaucuggcugggcuucaucgccgggcugaucgcgaucgugauggugaccaucaugcucugcugcaugaccagcugcugcuccugccugaagggcugcugcagcugcggguccugcugcaaguucgacgaggacgacagcgagcccguccugaagggcgugaagcuccacuacacgugaggacuaguuauaagacugacuagcccgaugggccucccaacgggcccuccuccccuccuugcaccgagagaucuaaaaaaaaaaaaaaaaaaaaaaaaaaaaaaaaaaaaaaaaaaaaaaaaaaaaaaaaaaaaaaaaaaaaaaaaaaaaaaaaaaaaaaaaaaaaaaaaaaaa

SEQ ID NO: 25863 - RNA, 4011 nt, Artificial Sequence
  SARS-CoV-2/Wuhan/WIV05/2019__EPI_ISL_402128 spike protein mRNA gc (1-1273)(L18F_T20N_P26S_D138Y_R190S_K417T_E484K_N501Y_D614G_H655Y _T1027I)
aggagaaagcuuaccauguucguguuccugguccuccugccccuggugagcucccagugcgugaacuucaccaaccgcacccagcucccgagcgccuacacgaacuccuucacccggggcgucuacuaccccgacaagguguuccgcagcuccgugcugcacagcacccaggaccuguuccuccccuucuucuccaacgucaccugguuccacgccauccacgugagcgggacgaacggcaccaagcgguucgacaaccccgugcugccguucaacgacggggucuacuucgcguccaccgagaaguccaacaucauccgcggcuggaucuucgggaccacgcuggacuccaagacccagagccuccugaucgugaacaacgccaccaacguggucaucaaggugugcgaguuccaguucugcaacuaccccuuccugggcguguacuaccacaagaacaacaaguccuggauggagagcgaguuccgggucuacuccagcgccaacaacugcaccuucgaguacgugucccagcccuuccucauggaccuggagggcaagcaggggaacuucaagaaccugagcgaguucguguucaagaacaucgacggcuacuucaagaucuacuccaagcacacgcccaucaaccucguccgcgaccugccgcagggguucagcgcccuggagccccucguggaccugcccaucggcaucaacaucacccgguuccagacccugcucgcccugcaccgcagcuaccugacccccggggacuccagcuccggcuggacggcgggcgccgccgccuacuacgugggguaccuccagccgcggaccuuccugcugaaguacaacgagaacggcaccaucaccgacgcggucgacugcgcccucgacccccugagcgagacgaagugcacccugaaguccuucaccguggagaaggggaucuaccagaccagcaacuuccgcgugcagcccacggaguccaucguccgguuccccaacaucaccaaccucugcccguucggcgagguguucaacgccacccgcuucgccagcgucuacgccuggaaccggaagcgcaucuccaacugcguggcggacuacagcgugcuguacaacuccgccagcuucuccaccuucaagugcuacggcgucagccccacgaagcugaacgaccucugcuucaccaacguguacgccgacuccuucgugauccgcggggacgagguccggcagaucgcccccggccagaccgggaccaucgccgacuacaacuacaagcugcccgacgacuucacgggcugcgugaucgcguggaacagcaacaaccuggacuccaaggucgggggcaacuacaacuaccucuaccggcuguuccgcaagagcaaccugaagccguucgagcgggacaucuccaccgagaucuaccaggccggcagcacccccugcaacggggugaagggcuucaacugcuacuucccccuccagagcuacggguuccagcccaccuacggcgugggguaccagccguaccgcguggucgugcuguccuucgagcugcuccacgcccccgccacggugugcggccccaagaaguccaccaaccuggucaagaacaagugcgugaacuucaacuucaacggccugaccgggaccggcgugcucaccgagagcaacaagaaguuccugcccuuccagcaguucgggcgggacaucgccgacacgaccgacgcgguccgcgacccgcagacccuggagauccuggacaucacccccugcagcuucggcgggguguccgugaucacgcccggcaccaacaccagcaaccaggucgccgugcucuaccagggcgugaacugcaccgaggucccgguggccauccacgccgaccagcugacgcccaccuggcgcguguacuccaccgggagcaacgucuuccagacccgggccggcugccugaucggggcggaguacgugaacaacuccuacgagugcgacauccccaucggcgccggcaucugcgccagcuaccagacgcagaccaacagcccccgccgggcccgcagcguggcgucccagagcaucaucgccuacaccaugucccucggggccgagaacagcgucgccuacuccaacaacagcaucgccaucccgaccaacuucacgaucagcgugaccaccgagauccugcccguguccaugaccaagacgagcgucgacugcaccauguacaucugcggcgacuccaccgagugcagcaaccugcuccugcaguacggguccuucugcacccagcugaaccgggcgcucacgggcaucgccguggagcaggacaagaacacccaggagguguucgcccaggucaagcagaucuacaagaccccgcccaucaaggacuucgggggcuucaacuucagccagauccugcccgaccccuccaagcccagcaagcgcuccuucaucgaggaccuccuguucaacaaggugacccuggccgacgccggcuucaucaagcaguacggggacugccugggcgacaucgcggcccgggaccucaucugcgcccagaaguucaacgggcugacggugcugcccccgcuccugaccgacgagaugaucgcccaguacaccagcgcccugcucgcgggcaccaucacguccggguggaccuucggcgccggcgccgcccugcagauccccuucgcgaugcagauggccuaccgcuucaacgggaucggcgucacccagaacgugcuguacgagaaccagaagcucaucgccaaccaguucaacagcgccaucgggaagauccaggacucccugagcuccaccgccagcgcgcugggcaagcuccaggacguggucaaccagaacgcccaggcccugaacacgcuggugaagcagcucuccagcaacuucggggccaucuccagcgugcugaacgacauccugagccggcucgacaaggucgaggccgaggugcagaucgaccgccugaucaccggccggcugcagucccuccagaccuacgugacccagcagcugauccgcgcggccgagauccgggccagcgccaaccuggccgcgaucaagauguccgagugcguccucggccagagcaagcgcguggacuucugcgggaagggcuaccaccugauguccuucccccagagcgcgccccacgggguggucuuccugcacgugaccuacgucccggcccaggagaagaacuucacgaccgcccccgccaucugccacgacggcaaggcccacuucccccgggaggggguguucguguccaacggcacccacugguucgucacccagcgcaacuucuacgagccccagaucaucacgaccgacaacaccuucgugagcggcaacugcgacguggucaucgggaucgugaacaacaccguguacgacccgcuccagcccgagcuggacuccuucaaggaggagcuggacaaguacuucaagaaccacacgagccccgacgucgaccucggcgacaucuccgggaucaacgccagcguggugaacauccagaaggagaucgaccggcugaacgaggucgccaagaaccugaacgagucccucaucgaccugcaggagcugggcaaguacgagcaguacaucaaguggcccugguacaucuggcucggcuucaucgccgggcugaucgcgaucgugauggugaccaucaugcugugcugcaugaccagcugcugcuccugccucaagggcugcugcagcugcggguccugcugcaaguucgacgaggacgacagcgagccgguccugaagggcgugaagcugcacuacaccugaggacuaguuauaagacugacuagcccgaugggccucccaacgggcccuccuccccuccuugcaccgagagaucuaaaaaaaaaaaaaaaaaaaaaaaaaaaaaaaaaaaaaaaaaaaaaaaaaaaaaaaaaaaaaaaaaaaaaaaaaaaaaaaaaaaaaaaaaaaaaaaaaaaa

SEQ ID NO: 25864 - RNA, 4011 nt, Artificial Sequence
  SARS-CoV-2/Wuhan/WIV05/2019__EPI_ISL_402128 spike protein mRNA gc (1-1273)(S13I_W152C_L452R_D614G)
aggagaaagcuuaccauguucguguuccugguccuccugccccuggugagcauccagugcgugaaccucaccacccgcacgcagcugccgcccgccuacaccaacuccuucacccggggcgucuacuaccccgacaagguguuccgcagcuccgugcugcacagcacccaggaccucuuccugcccuucuucuccaacgucacgugguuccacgccauccacgugagcgggaccaacggcaccaagcgguucgacaacccggugcugcccuucaacgacggggucuacuucgcguccaccgagaaguccaacaucauccgcggcuggaucuucgggacgacccucgacagcaagacccagagccugcugaucgugaacaacgccaccaacguggucaucaaggugugcgaguuccaguucugcaacgaccccuuccucggcguguacuaccacaagaacaacaaguccugcauggagagcgaguuccgggucuacuccagcgccaacaacugcacguucgaguacgugucccagcccuuccugauggaccuggagggcaagcaggggaacuucaagaaccuccgcgaguucguguucaagaacaucgacggcuacuucaagaucuacagcaagcacaccccgaucaaccugguccgggaccugccccagggguucuccgcccucgagccccugguggaccugcccaucggcaucaacaucacccgcuuccagacccuccuggcccugcaccggagcuaccucacgccgggggacuccagcagcggcuggaccgcgggcgccgccgccuacuacgugggguaccugcagccccgcaccuuccugcucaaguacaacgagaacggcaccaucacggacgcggucgacugcgcccuggacccccuguccgagaccaagugcacccucaagagcuucaccguggagaaggggaucuaccagacguccaacuuccgggugcagcccaccgagagcaucguccgcuucccgaacaucaccaaccugugccccuucggcgagguguucaacgccacccgguucgccuccgucuacgccuggaaccgcaagcggaucagcaacugcguggcggacuacuccgugcuguacaacagcgccuccuucagcacguucaagugcuacggcgucucccccaccaagcucaacgaccugugcuucaccaacguguacgccgacagcuucgugauccgcggggacgagguccggcagaucgcccccggccagaccgggaagaucgccgacuacaacuacaagcugccggacgacuucacgggcugcgugaucgcguggaacuccaacaaccucgacagcaaggucgggggcaacuacaacuaccgcuaccggcuguuccgcaaguccaaccugaagcccuucgagcgggacaucagcaccgagaucuaccaggccggcuccacccccugcaacgggguggagggcuucaacugcuacuucccccuccagagcuacggguuccagccgaccaacggcgugggguaccagcccuaccgcguggucgugcuguccuucgagcugcuccacgcccccgccacggugugcggccccaagaaguccaccaaccuggucaagaacaagugcgugaacuucaacuucaacggccugaccgggaccggcgugcucaccgagagcaacaagaaguuccugccguuccagcaguucgggcgcgacaucgccgacacgaccgacgcgguccgggacccccagacccuggagauccuggacaucacccccugcagcuucggcggggugagcgugaucacgccgggcaccaacaccuccaaccaggucgccgugcucuaccagggcgugaacugcaccgagguccccguggccauccacgccgaccagcugacgcccaccuggcgcguguacagcaccggguccaacgucuuccagacccgggccggcugccugaucggggcggagcacgugaacaacagcuacgagugcgacauccccaucggcgccggcaucugcgccuccuaccagacgcagaccaacagcccgcgccgggcccgcuccguggcgagccaguccaucaucgccuacaccaugagccucggggccgagaacuccgucgccuacagcaacaacuccaucgccauccccaccaacuucacgaucagcgugaccaccgagauccugcccguguccaugaccaagacgagcgucgacugcaccauguacaucugcggcgacagcaccgagugcuccaaccugcuccugcaguacgggagcuucugcacccagcugaaccgggcgcucacgggcaucgccguggagcaggacaagaacacccaggagguguucgcccaggucaagcagaucuacaagacgcccccgaucaaggacuucgggggcuucaacuucucccagauccugcccgaccccagcaagcccuccaagcgcagcuucaucgaggaccuccuguucaacaaggugacccuggccgacgccggcuucaucaagcaguacggggacugccugggcgacaucgcggcccgggaccucaucugcgcccagaaguucaacgggcugaccgugcugccgccccuccugaccgacgagaugaucgcccaguacaccuccgcccugcucgcgggcaccaucacgagcggguggaccuucggcgccggcgccgcccugcagauccccuucgcgaugcagauggccuaccgcuucaacgggaucggcgucacccagaacgugcuguacgagaaccagaagcucaucgccaaccaguucaacuccgccaucgggaagauccaggacagccuguccagcaccgccuccgcgcugggcaagcuccaggacguggucaaccagaacgcccaggcccugaacacgcuggugaagcagcucagcuccaacuucggggccaucagcuccgugcugaacgacauccugagccggcucgacaaggucgaggccgaggugcagaucgaccgccugaucaccggccggcugcagucccuccagaccuacgugacccagcagcugauccgcgcggccgagauccgggccagcgccaaccuggccgcgaccaagaugagcgagugcguccucggccaguccaagcgcguggacuucugcgggaagggcuaccaccugaugagcuucccccaguccgccccgcacgggguggucuuccugcacgugacguacguccccgcccaggagaagaacuucaccaccgcccccgcgaucugccacgacggcaaggcccacuucccccgggaggggguguucgugagcaacggcacccacugguucgucacgcagcgcaacuucuacgagccgcagaucaucaccaccgacaacaccuucguguccggcaacugcgacguggucaucgggaucgugaacaacacgguguacgacccccuccagcccgagcuggacagcuucaaggaggagcuggacaaguacuucaagaaccacaccucccccgacgucgaccucggcgacaucagcgggaucaacgccuccguggugaacauccagaaggagaucgaccggcugaacgaggucgccaagaaccugaacgagagccucaucgaccugcaggagcugggcaaguacgagcaguacaucaaguggccgugguacaucuggcucggcuucaucgccgggcugaucgcgaucgugauggugaccaucaugcugugcugcaugaccuccugcugcagcugccucaagggcugcugcuccugcgggagcugcugcaaguucgacgaggacgacuccgagcccguccugaagggcgugaagcugcacuacacgugaggacuaguuauaagacugacuagcccgaugggccucccaacgggcccuccuccccuccuugcaccgagagaucuaaaaaaaaaaaaaaaaaaaaaaaaaaaaaaaaaaaaaaaaaaaaaaaaaaaaaaaaaaaaaaaaaaaaaaaaaaaaaaaaaaaaaaaaaaaaaaaaaaaa

SEQ ID NO: 25865 - RNA, 4011 nt, Artificial Sequence
  SARS-CoV-2/Wuhan/WIV05/2019__EPI_ISL_402128 spike protein mRNA gc (1-1273)
aggagaaagcuuaccauguucguguuccuggugcugcugccccuggugagcagccagugcgugaaccugaccacccggacccagcugccaccagccuacaccaacagcuucacccggggcgucuacuaccccgacaagguguuccggagcagcguccugcacagcacccaggaccuguuccugcccuucuucagcaacgugaccugguuccacgccauccacgugagcggcaccaacggcaccaagcgguucgacaaccccgugcugcccuucaacgacggcguguacuucgccagcaccgagaagagcaacaucauccggggcuggaucuucggcaccacccuggacagcaagacccagagccugcugaucgugaauaacgccaccaacguggugaucaaggugugcgaguuccaguucugcaacgaccccuuccugggcguguacuaccacaagaacaacaagagcuggauggagagcgaguuccggguguacagcagcgccaacaacugcaccuucgaguacgugagccagcccuuccugauggaccuggagggcaagcagggcaacuucaagaaccugcgggaguucguguucaagaacaucgacggcuacuucaagaucuacagcaagcacaccccaaucaaccuggugcgggaucugccccagggcuucucagcccuggagccccugguggaccugcccaucggcaucaacaucacccgguuccagacccugcuggcccugcaccggagcuaccugaccccaggcgacagcagcagcggguggacagcaggcgcggcugcuuacuacgugggcuaccugcagccccggaccuuccugcugaaguacaacgagaacggcaccaucaccgacgccguggacugcgcccuggacccucugagcgagaccaagugcacccugaagagcuucaccguggagaagggcaucuaccagaccagcaacuuccgggugcagcccaccgagagcaucgugcgguuccccaacaucaccaaccugugccccuucggcgagguguucaacgccacccgguucgccagcguguacgccuggaaccggaagcggaucagcaacugcguggccgacuacagcgugcuguacaacagcgccagcuucagcaccuucaagugcuacggcgugagccccaccaagcugaacgaccugugcuucaccaacguguacgccgacagcuucgugauccguggcgacgaggugcggcagaucgcacccggccagacaggcaagaucgccgacuacaacuacaagcugcccgacgacuucaccggcugcgugaucgccuggaacagcaacaaccucgacagcaaggugggcggcaacuacaacuaccuguaccggcuguuccggaagagcaaccugaagcccuucgagcgggacaucagcaccgagaucuaccaagccggcuccaccccuugcaacggcguggagggcuucaacugcuacuucccucugcagagcuacggcuuccagcccaccaacggcgugggcuaccagcccuaccgggugguggugcugagcuucgagcugcugcacgccccagccaccguguguggccccaagaagagcaccaaccuggugaagaacaagugcgugaacuucaacuucaacggccuuaccggcaccggcgugcugaccgagagcaacaagaaauuccugcccuuucagcaguucggccgggacaucgccgacaccaccgacgcugugcgggauccccagacccuggagauccuggacaucaccccuugcagcuucggcggcgugagcgugaucaccccaggcaccaacaccagcaaccagguggccgugcuguaccaggacgugaacugcaccgaggugcccguggccauccacgccgaccagcugacacccaccuggcgggucuacagcaccggcagcaacguguuccagacccgggccgguugccugaucggcgccgagcacgugaacaacagcuacgagugcgacauccccaucggcgccggcaucugugccagcuaccagacccagaccaauucaccccggagggcaaggagcguggccagccagagcaucaucgccuacaccaugagccugggcgccgagaacagcguggccuacagcaacaacagcaucgccauccccaccaacuucaccaucagcgugaccaccgagauucugcccgugagcaugaccaagaccagcguggacugcaccauguacaucugcggcgacagcaccgagugcagcaaccugcugcugcaguacggcagcuucugcacccagcugaaccgggcccugaccggcaucgccguggagcaggacaagaacacccaggagguguucgcccaggugaagcagaucuacaagaccccucccaucaaggacuucggcggcuucaacuucagccagauccugcccgaccccagcaagcccagcaagcggagcuucaucgaggaccugcuguucaacaaggugacccuagccgacgccggcuucaucaagcaguacggcgacugccucggcgacauagccgcccgggaccugaucugcgcccagaaguucaacggccugaccgugcugccuccccugcugaccgacgagaugaucgcccaguacaccagcgcccuguuagccggaaccaucaccagcggcuggacuuucggcgcuggagccgcucugcagauccccuucgccaugcagauggccuaccgguucaacggcaucggcgugacccagaacgugcuguacgagaaccagaagcugaucgccaaccaguucaacagcgccaucggcaagauccaggacagccugagcagcaccgcuagcgcccugggcaagcugcaggacguggugaaccagaacgcccaggcccugaacacccuggugaagcagcugagcagcaacuucggcgccaucagcagcgugcugaacgacauccugagccggcuggacaaggucgaggccgaggugcagaucgaccggcugaucacuggccggcugcagagccugcagaccuacgugacccagcagcugauccgggccgccgagauucgggccagcgccaaccuggccgccaccaagaugagcgagugcgugcugggccagagcaagcggguggacuucugcggcaagggcuaccaccugaugagcuuuccccagagcgcaccccacggagugguguuccugcacgugaccuacgugcccgcccaggagaagaacuucaccaccgccccagccaucugccacgacggcaaggcccacuuuccccgggagggcguguucgugagcaacggcacccacugguucgugacccagcggaacuucuacgagccccagaucaucaccaccgacaacaccuucgugagcggcaacugcgacguggugaucggcaucgugaacaacaccguguacgauccccugcagcccgagcuggacagcuucaaggaggagcuggacaaguacuucaagaaucacaccagccccgacguggaccugggcgacaucagcggcaucaacgccagcguggugaacauccagaaggagaucgaucggcugaacgagguggccaagaaccugaacgagagccugaucgaccugcaggagcugggcaaguacgagcaguacaucaaguggcccugguacaucuggcugggcuucaucgccggccugaucgccaucgugauggugaccaucaugcugugcugcaugaccagcugcugcagcugccugaagggcuguugcagcugcggcagcugcugcaaguucgacgaggacgacagcgagcccgugcugaagggcgugaagcugcacuacaccugaggacuaguuauaagacugacuagcccgaugggccucccaacgggcccuccuccccuccuugcaccgagagaucuaaaaaaaaaaaaaaaaaaaaaaaaaaaaaaaaaaaaaaaaaaaaaaaaaaaaaaaaaaaaaaaaaaaaaaaaaaaaaaaaaaaaaaaaaaaaaaaaaaaa

SEQ ID NO: 25866 - RNA, 4011 nt, Artificial Sequence
  SARS-CoV-2/Wuhan/WIV05/2019__EPI_ISL_402128 spike protein mRNA gc (1-1273)(D614G)
aggagaaagcuuaccauguucguguuccuggugcugcugccccuggugagcagccagugcgugaaccugaccacccggacccagcugccaccagccuacaccaacagcuucacccggggcgucuacuaccccgacaagguguuccggagcagcguccugcacagcacccaggaccuguuccugcccuucuucagcaacgugaccugguuccacgccauccacgugagcggcaccaacggcaccaagcgguucgacaaccccgugcugcccuucaacgacggcguguacuucgccagcaccgagaagagcaacaucauccggggcuggaucuucggcaccacccuggacagcaagacccagagccugcugaucgugaauaacgccaccaacguggugaucaaggugugcgaguuccaguucugcaacgaccccuuccugggcguguacuaccacaagaacaacaagagcuggauggagagcgaguuccggguguacagcagcgccaacaacugcaccuucgaguacgugagccagcccuuccugauggaccuggagggcaagcagggcaacuucaagaaccugcgggaguucguguucaagaacaucgacggcuacuucaagaucuacagcaagcacaccccaaucaaccuggugcgggaucugccccagggcuucucagcccuggagccccugguggaccugcccaucggcaucaacaucacccgguuccagacccugcuggcccugcaccggagcuaccugaccccaggcgacagcagcagcggguggacagcaggcgcggcugcuuacuacgugggcuaccugcagccccggaccuuccugcugaaguacaacgagaacggcaccaucaccgacgccguggacugcgcccuggacccucugagcgagaccaagugcacccugaagagcuucaccguggagaagggcaucuaccagaccagcaacuuccgggugcagcccaccgagagcaucgugcgguuccccaacaucaccaaccugugccccuucggcgagguguucaacgccacccgguucgccagcguguacgccuggaaccggaagcggaucagcaacugcguggccgacuacagcgugcuguacaacagcgccagcuucagcaccuucaagugcuacggcgugagccccaccaagcugaacgaccugugcuucaccaacguguacgccgacagcuucgugauccguggcgacgaggugcggcagaucgcacccggccagacaggcaagaucgccgacuacaacuacaagcugcccgacgacuucaccggcugcgugaucgccuggaacagcaacaaccucgacagcaaggugggcggcaacuacaacuaccuguaccggcuguuccggaagagcaaccugaagcccuucgagcgggacaucagcaccgagaucuaccaagccggcuccaccccuugcaacggcguggagggcuucaacugcuacuucccucugcagagcuacggcuuccagcccaccaacggcgugggcuaccagcccuaccgggugguggugcugagcuucgagcugcugcacgccccagccaccguguguggccccaagaagagcaccaaccuggugaagaacaagugcgugaacuucaacuucaacggccuuaccggcaccggcgugcugaccgagagcaacaagaaauuccugcccuuucagcaguucggccgggacaucgccgacaccaccgacgcugugcgggauccccagacccuggagauccuggacaucaccccuugcagcuucggcggcgugagcgugaucaccccaggcaccaacaccagcaaccagguggccgugcuguaccagggcgugaacugcaccgaggugcccguggccauccacgccgaccagcugacacccaccuggcgggucuacagcaccggcagcaacguguuccagacccgggccgguugccugaucggcgccgagcacgugaacaacagcuacgagugcgacauccccaucggcgccggcaucugugccagcuaccagacccagaccaauucaccccggagggcaaggagcguggccagccagagcaucaucgccuacaccaugagccugggcgccgagaacagcguggccuacagcaacaacagcaucgccauccccaccaacuucaccaucagcgugaccaccgagauucugcccgugagcaugaccaagaccagcguggacugcaccauguacaucugcggcgacagcaccgagugcagcaaccugcugcugcaguacggcagcuucugcacccagcugaaccgggcccugaccggcaucgccguggagcaggacaagaacacccaggagguguucgcccaggugaagcagaucuacaagaccccucccaucaaggacuucggcggcuucaacuucagccagauccugcccgaccccagcaagcccagcaagcggagcuucaucgaggaccugcuguucaacaaggugacccuagccgacgccggcuucaucaagcaguacggcgacugccucggcgacauagccgcccgggaccugaucugcgcccagaaguucaacggccugaccgugcugccuccccugcugaccgacgagaugaucgcccaguacaccagcgcccuguuagccggaaccaucaccagcggcuggacuuucggcgcuggagccgcucugcagauccccuucgccaugcagauggccuaccgguucaacggcaucggcgugacccagaacgugcuguacgagaaccagaagcugaucgccaaccaguucaacagcgccaucggcaagauccaggacagccugagcagcaccgcuagcgcccugggcaagcugcaggacguggugaaccagaacgcccaggcccugaacacccuggugaagcagcugagcagcaacuucggcgccaucagcagcgugcugaacgacauccugagccggcuggacaaggucgaggccgaggugcagaucgaccggcugaucacuggccggcugcagagccugcagaccuacgugacccagcagcugauccgggccgccgagauucgggccagcgccaaccuggccgccaccaagaugagcgagugcgugcugggccagagcaagcggguggacuucugcggcaagggcuaccaccugaugagcuuuccccagagcgcaccccacggagugguguuccugcacgugaccuacgugcccgcccaggagaagaacuucaccaccgccccagccaucugccacgacggcaaggcccacuuuccccgggagggcguguucgugagcaacggcacccacugguucgugacccagcggaacuucuacgagccccagaucaucaccaccgacaacaccuucgugagcggcaacugcgacguggugaucggcaucgugaacaacaccguguacgauccccugcagcccgagcuggacagcuucaaggaggagcuggacaaguacuucaagaaucacaccagccccgacguggaccugggcgacaucagcggcaucaacgccagcguggugaacauccagaaggagaucgaucggcugaacgagguggccaagaaccugaacgagagccugaucgaccugcaggagcugggcaaguacgagcaguacaucaaguggcccugguacaucuggcugggcuucaucgccggccugaucgccaucgugauggugaccaucaugcugugcugcaugaccagcugcugcagcugccugaagggcuguugcagcugcggcagcugcugcaaguucgacgaggacgacagcgagcccgugcugaagggcgugaagcugcacuacaccugaggacuaguuauaagacugacuagcccgaugggccucccaacgggcccuccuccccuccuugcaccgagagaucuaaaaaaaaaaaaaaaaaaaaaaaaaaaaaaaaaaaaaaaaaaaaaaaaaaaaaaaaaaaaaaaaaaaaaaaaaaaaaaaaaaaaaaaaaaaaaaaaaaaa

SEQ ID NO: 25867 - RNA, 4011 nt, Artificial Sequence
  SARS-CoV-2/Wuhan/WIV05/2019__EPI_ISL_402128 spike protein mRNA gc (1-1273)(A222V_D614G)
aggagaaagcuuaccauguucguguuccuggugcugcugccccuggugagcagccagugcgugaaccugaccacccggacccagcugccaccagccuacaccaacagcuucacccggggcgucuacuaccccgacaagguguuccggagcagcguccugcacagcacccaggaccuguuccugcccuucuucagcaacgugaccugguuccacgccauccacgugagcggcaccaacggcaccaagcgguucgacaaccccgugcugcccuucaacgacggcguguacuucgccagcaccgagaagagcaacaucauccggggcuggaucuucggcaccacccuggacagcaagacccagagccugcugaucgugaauaacgccaccaacguggugaucaaggugugcgaguuccaguucugcaacgaccccuuccugggcguguacuaccacaagaacaacaagagcuggauggagagcgaguuccggguguacagcagcgccaacaacugcaccuucgaguacgugagccagcccuuccugauggaccuggagggcaagcagggcaacuucaagaaccugcgggaguucguguucaagaacaucgacggcuacuucaagaucuacagcaagcacaccccaaucaaccuggugcgggaucugccccagggcuucucagugcuggagccccugguggaccugcccaucggcaucaacaucacccgguuccagacccugcuggcccugcaccggagcuaccugaccccaggcgacagcagcagcggguggacagcaggcgcggcugcuuacuacgugggcuaccugcagccccggaccuuccugcugaaguacaacgagaacggcaccaucaccgacgccguggacugcgcccuggacccucugagcgagaccaagugcacccugaagagcuucaccguggagaagggcaucuaccagaccagcaacuuccgggugcagcccaccgagagcaucgugcgguuccccaacaucaccaaccugugccccuucggcgagguguucaacgccacccgguucgccagcguguacgccuggaaccggaagcggaucagcaacugcguggccgacuacagcgugcuguacaacagcgccagcuucagcaccuucaagugcuacggcgugagccccaccaagcugaacgaccugugcuucaccaacguguacgccgacagcuucgugauccguggcgacgaggugcggcagaucgcacccggccagacaggcaagaucgccgacuacaacuacaagcugcccgacgacuucaccggcugcgugaucgccuggaacagcaacaaccucgacagcaaggugggcggcaacuacaacuaccuguaccggcuguuccggaagagcaaccugaagcccuucgagcgggacaucagcaccgagaucuaccaagccggcuccaccccuugcaacggcguggagggcuucaacugcuacuucccucugcagagcuacggcuuccagcccaccaacggcgugggcuaccagcccuaccgggugguggugcugagcuucgagcugcugcacgccccagccaccguguguggccccaagaagagcaccaaccuggugaagaacaagugcgugaacuucaacuucaacggccuuaccggcaccggcgugcugaccgagagcaacaagaaauuccugcccuuucagcaguucggccgggacaucgccgacaccaccgacgcugugcgggauccccagacccuggagauccuggacaucaccccuugcagcuucggcggcgugagcgugaucaccccaggcaccaacaccagcaaccagguggccgugcuguaccagggcgugaacugcaccgaggugcccguggccauccacgccgaccagcugacacccaccuggcgggucuacagcaccggcagcaacguguuccagacccgggccgguugccugaucggcgccgagcacgugaacaacagcuacgagugcgacauccccaucggcgccggcaucugugccagcuaccagacccagaccaauucaccccggagggcaaggagcguggccagccagagcaucaucgccuacaccaugagccugggcgccgagaacagcguggccuacagcaacaacagcaucgccauccccaccaacuucaccaucagcgugaccaccgagauucugcccgugagcaugaccaagaccagcguggacugcaccauguacaucugcggcgacagcaccgagugcagcaaccugcugcugcaguacggcagcuucugcacccagcugaaccgggcccugaccggcaucgccguggagcaggacaagaacacccaggagguguucgcccaggugaagcagaucuacaagaccccucccaucaaggacuucggcggcuucaacuucagccagauccugcccgaccccagcaagcccagcaagcggagcuucaucgaggaccugcuguucaacaaggugacccuagccgacgccggcuucaucaagcaguacggcgacugccucggcgacauagccgcccgggaccugaucugcgcccagaaguucaacggccugaccgugcugccuccccugcugaccgacgagaugaucgcccaguacaccagcgcccuguuagccggaaccaucaccagcggcuggacuuucggcgcuggagccgcucugcagauccccuucgccaugcagauggccuaccgguucaacggcaucggcgugacccagaacgugcuguacgagaaccagaagcugaucgccaaccaguucaacagcgccaucggcaagauccaggacagccugagcagcaccgcuagcgcccugggcaagcugcaggacguggugaaccagaacgcccaggcccugaacacccuggugaagcagcugagcagcaacuucggcgccaucagcagcgugcugaacgacauccugagccggcuggacaaggucgaggccgaggugcagaucgaccggcugaucacuggccggcugcagagccugcagaccuacgugacccagcagcugauccgggccgccgagauucgggccagcgccaaccuggccgccaccaagaugagcgagugcgugcugggccagagcaagcggguggacuucugcggcaagggcuaccaccugaugagcuuuccccagagcgcaccccacggagugguguuccugcacgugaccuacgugcccgcccaggagaagaacuucaccaccgccccagccaucugccacgacggcaaggcccacuuuccccgggagggcguguucgugagcaacggcacccacugguucgugacccagcggaacuucuacgagccccagaucaucaccaccgacaacaccuucgugagcggcaacugcgacguggugaucggcaucgugaacaacaccguguacgauccccugcagcccgagcuggacagcuucaaggaggagcuggacaaguacuucaagaaucacaccagccccgacguggaccugggcgacaucagcggcaucaacgccagcguggugaacauccagaaggagaucgaucggcugaacgagguggccaagaaccugaacgagagccugaucgaccugcaggagcugggcaaguacgagcaguacaucaaguggcccugguacaucuggcugggcuucaucgccggccugaucgccaucgugauggugaccaucaugcugugcugcaugaccagcugcugcagcugccugaagggcuguugcagcugcggcagcugcugcaaguucgacgaggacgacagcgagcccgugcugaagggcgugaagcugcacuacaccugaggacuaguuauaagacugacuagcccgaugggccucccaacgggcccuccuccccuccuugcaccgagagaucuaaaaaaaaaaaaaaaaaaaaaaaaaaaaaaaaaaaaaaaaaaaaaaaaaaaaaaaaaaaaaaaaaaaaaaaaaaaaaaaaaaaaaaaaaaaaaaaaaaaa

SEQ ID NO: 25868 - RNA, 4011 nt, Artificial Sequence
  SARS-CoV-2/Wuhan/WIV05/2019__EPI_ISL_402128 spike protein mRNA gc (1-1273)(N439K_D614G)
aggagaaagcuuaccauguucguguuccuggugcugcugccccuggugagcagccagugcgugaaccugaccacccggacccagcugccaccagccuacaccaacagcuucacccggggcgucuacuaccccgacaagguguuccggagcagcguccugcacagcacccaggaccuguuccugcccuucuucagcaacgugaccugguuccacgccauccacgugagcggcaccaacggcaccaagcgguucgacaaccccgugcugcccuucaacgacggcguguacuucgccagcaccgagaagagcaacaucauccggggcuggaucuucggcaccacccuggacagcaagacccagagccugcugaucgugaauaacgccaccaacguggugaucaaggugugcgaguuccaguucugcaacgaccccuuccugggcguguacuaccacaagaacaacaagagcuggauggagagcgaguuccggguguacagcagcgccaacaacugcaccuucgaguacgugagccagcccuuccugauggaccuggagggcaagcagggcaacuucaagaaccugcgggaguucguguucaagaacaucgacggcuacuucaagaucuacagcaagcacaccccaaucaaccuggugcgggaucugccccagggcuucucagcccuggagccccugguggaccugcccaucggcaucaacaucacccgguuccagacccugcuggcccugcaccggagcuaccugaccccaggcgacagcagcagcggguggacagcaggcgcggcugcuuacuacgugggcuaccugcagccccggaccuuccugcugaaguacaacgagaacggcaccaucaccgacgccguggacugcgcccuggacccucugagcgagaccaagugcacccugaagagcuucaccguggagaagggcaucuaccagaccagcaacuuccgggugcagcccaccgagagcaucgugcgguuccccaacaucaccaaccugugccccuucggcgagguguucaacgccacccgguucgccagcguguacgccuggaaccggaagcggaucagcaacugcguggccgacuacagcgugcuguacaacagcgccagcuucagcaccuucaagugcuacggcgugagccccaccaagcugaacgaccugugcuucaccaacguguacgccgacagcuucgugauccguggcgacgaggugcggcagaucgcacccggccagacaggcaagaucgccgacuacaacuacaagcugcccgacgacuucaccggcugcgugaucgccuggaacagcaagaaccucgacagcaaggugggcggcaacuacaacuaccuguaccggcuguuccggaagagcaaccugaagcccuucgagcgggacaucagcaccgagaucuaccaagccggcuccaccccuugcaacggcguggagggcuucaacugcuacuucccucugcagagcuacggcuuccagcccaccaacggcgugggcuaccagcccuaccgggugguggugcugagcuucgagcugcugcacgccccagccaccguguguggccccaagaagagcaccaaccuggugaagaacaagugcgugaacuucaacuucaacggccuuaccggcaccggcgugcugaccgagagcaacaagaaauuccugcccuuucagcaguucggccgggacaucgccgacaccaccgacgcugugcgggauccccagacccuggagauccuggacaucaccccuugcagcuucggcggcgugagcgugaucaccccaggcaccaacaccagcaaccagguggccgugcuguaccagggcgugaacugcaccgaggugcccguggccauccacgccgaccagcugacacccaccuggcgggucuacagcaccggcagcaacguguuccagacccgggccgguugccugaucggcgccgagcacgugaacaacagcuacgagugcgacauccccaucggcgccggcaucugugccagcuaccagacccagaccaauucaccccggagggcaaggagcguggccagccagagcaucaucgccuacaccaugagccugggcgccgagaacagcguggccuacagcaacaacagcaucgccauccccaccaacuucaccaucagcgugaccaccgagauucugcccgugagcaugaccaagaccagcguggacugcaccauguacaucugcggcgacagcaccgagugcagcaaccugcugcugcaguacggcagcuucugcacccagcugaaccgggcccugaccggcaucgccguggagcaggacaagaacacccaggagguguucgcccaggugaagcagaucuacaagaccccucccaucaaggacuucggcggcuucaacuucagccagauccugcccgaccccagcaagcccagcaagcggagcuucaucgaggaccugcuguucaacaaggugacccuagccgacgccggcuucaucaagcaguacggcgacugccucggcgacauagccgcccgggaccugaucugcgcccagaaguucaacggccugaccgugcugccuccccugcugaccgacgagaugaucgcccaguacaccagcgcccuguuagccggaaccaucaccagcggcuggacuuucggcgcuggagccgcucugcagauccccuucgccaugcagauggccuaccgguucaacggcaucggcgugacccagaacgugcuguacgagaaccagaagcugaucgccaaccaguucaacagcgccaucggcaagauccaggacagccugagcagcaccgcuagcgcccugggcaagcugcaggacguggugaaccagaacgcccaggcccugaacacccuggugaagcagcugagcagcaacuucggcgccaucagcagcgugcugaacgacauccugagccggcuggacaaggucgaggccgaggugcagaucgaccggcugaucacuggccggcugcagagccugcagaccuacgugacccagcagcugauccgggccgccgagauucgggccagcgccaaccuggccgccaccaagaugagcgagugcgugcugggccagagcaagcggguggacuucugcggcaagggcuaccaccugaugagcuuuccccagagcgcaccccacggagugguguuccugcacgugaccuacgugcccgcccaggagaagaacuucaccaccgccccagccaucugccacgacggcaaggcccacuuuccccgggagggcguguucgugagcaacggcacccacugguucgugacccagcggaacuucuacgagccccagaucaucaccaccgacaacaccuucgugagcggcaacugcgacguggugaucggcaucgugaacaacaccguguacgauccccugcagcccgagcuggacagcuucaaggaggagcuggacaaguacuucaagaaucacaccagccccgacguggaccugggcgacaucagcggcaucaacgccagcguggugaacauccagaaggagaucgaucggcugaacgagguggccaagaaccugaacgagagccugaucgaccugcaggagcugggcaaguacgagcaguacaucaaguggcccugguacaucuggcugggcuucaucgccggccugaucgccaucgugauggugaccaucaugcugugcugcaugaccagcugcugcagcugccugaagggcuguugcagcugcggcagcugcugcaaguucgacgaggacgacagcgagcccgugcugaagggcgugaagcugcacuacaccugaggacuaguuauaagacugacuagcccgaugggccucccaacgggcccuccuccccuccuugcaccgagagaucuaaaaaaaaaaaaaaaaaaaaaaaaaaaaaaaaaaaaaaaaaaaaaaaaaaaaaaaaaaaaaaaaaaaaaaaaaaaaaaaaaaaaaaaaaaaaaaaaaaaa

SEQ ID NO: 25869 - RNA, 4011 nt, Artificial Sequence
  SARS-CoV-2/Wuhan/WIV05/2019__EPI_ISL_402128 spike protein mRNA gc (1-1273)(S477N_D614G)
aggagaaagcuuaccauguucguguuccuggugcugcugccccuggugagcagccagugcgugaaccugaccacccggacccagcugccaccagccuacaccaacagcuucacccggggcgucuacuaccccgacaagguguuccggagcagcguccugcacagcacccaggaccuguuccugcccuucuucagcaacgugaccugguuccacgccauccacgugagcggcaccaacggcaccaagcgguucgacaaccccgugcugcccuucaacgacggcguguacuucgccagcaccgagaagagcaacaucauccggggcuggaucuucggcaccacccuggacagcaagacccagagccugcugaucgugaauaacgccaccaacguggugaucaaggugugcgaguuccaguucugcaacgaccccuuccugggcguguacuaccacaagaacaacaagagcuggauggagagcgaguuccggguguacagcagcgccaacaacugcaccuucgaguacgugagccagcccuuccugauggaccuggagggcaagcagggcaacuucaagaaccugcgggaguucguguucaagaacaucgacggcuacuucaagaucuacagcaagcacaccccaaucaaccuggugcgggaucugccccagggcuucucagcccuggagccccugguggaccugcccaucggcaucaacaucacccgguuccagacccugcuggcccugcaccggagcuaccugaccccaggcgacagcagcagcggguggacagcaggcgcggcugcuuacuacgugggcuaccugcagccccggaccuuccugcugaaguacaacgagaacggcaccaucaccgacgccguggacugcgcccuggacccucugagcgagaccaagugcacccugaagagcuucaccguggagaagggcaucuaccagaccagcaacuuccgggugcagcccaccgagagcaucgugcgguuccccaacaucaccaaccugugccccuucggcgagguguucaacgccacccgguucgccagcguguacgccuggaaccggaagcggaucagcaacugcguggccgacuacagcgugcuguacaacagcgccagcuucagcaccuucaagugcuacggcgugagccccaccaagcugaacgaccugugcuucaccaacguguacgccgacagcuucgugauccguggcgacgaggugcggcagaucgcacccggccagacaggcaagaucgccgacuacaacuacaagcugcccgacgacuucaccggcugcgugaucgccuggaacagcaacaaccucgacagcaaggugggcggcaacuacaacuaccuguaccggcuguuccggaagagcaaccugaagcccuucgagcgggacaucagcaccgagaucuaccaagccggcaacaccccuugcaacggcguggagggcuucaacugcuacuucccucugcagagcuacggcuuccagcccaccaacggcgugggcuaccagcccuaccgggugguggugcugagcuucgagcugcugcacgccccagccaccguguguggccccaagaagagcaccaaccuggugaagaacaagugcgugaacuucaacuucaacggccuuaccggcaccggcgugcugaccgagagcaacaagaaauuccugcccuuucagcaguucggccgggacaucgccgacaccaccgacgcugugcgggauccccagacccuggagauccuggacaucaccccuugcagcuucggcggcgugagcgugaucaccccaggcaccaacaccagcaaccagguggccgugcuguaccagggcgugaacugcaccgaggugcccguggccauccacgccgaccagcugacacccaccuggcgggucuacagcaccggcagcaacguguuccagacccgggccgguugccugaucggcgccgagcacgugaacaacagcuacgagugcgacauccccaucggcgccggcaucugugccagcuaccagacccagaccaauucaccccggagggcaaggagcguggccagccagagcaucaucgccuacaccaugagccugggcgccgagaacagcguggccuacagcaacaacagcaucgccauccccaccaacuucaccaucagcgugaccaccgagauucugcccgugagcaugaccaagaccagcguggacugcaccauguacaucugcggcgacagcaccgagugcagcaaccugcugcugcaguacggcagcuucugcacccagcugaaccgggcccugaccggcaucgccguggagcaggacaagaacacccaggagguguucgcccaggugaagcagaucuacaagaccccucccaucaaggacuucggcggcuucaacuucagccagauccugcccgaccccagcaagcccagcaagcggagcuucaucgaggaccugcuguucaacaaggugacccuagccgacgccggcuucaucaagcaguacggcgacugccucggcgacauagccgcccgggaccugaucugcgcccagaaguucaacggccugaccgugcugccuccccugcugaccgacgagaugaucgcccaguacaccagcgcccuguuagccggaaccaucaccagcggcuggacuuucggcgcuggagccgcucugcagauccccuucgccaugcagauggccuaccgguucaacggcaucggcgugacccagaacgugcuguacgagaaccagaagcugaucgccaaccaguucaacagcgccaucggcaagauccaggacagccugagcagcaccgcuagcgcccugggcaagcugcaggacguggugaaccagaacgcccaggcccugaacacccuggugaagcagcugagcagcaacuucggcgccaucagcagcgugcugaacgacauccugagccggcuggacaaggucgaggccgaggugcagaucgaccggcugaucacuggccggcugcagagccugcagaccuacgugacccagcagcugauccgggccgccgagauucgggccagcgccaaccuggccgccaccaagaugagcgagugcgugcugggccagagcaagcggguggacuucugcggcaagggcuaccaccugaugagcuuuccccagagcgcaccccacggagugguguuccugcacgugaccuacgugcccgcccaggagaagaacuucaccaccgccccagccaucugccacgacggcaaggcccacuuuccccgggagggcguguucgugagcaacggcacccacugguucgugacccagcggaacuucuacgagccccagaucaucaccaccgacaacaccuucgugagcggcaacugcgacguggugaucggcaucgugaacaacaccguguacgauccccugcagcccgagcuggacagcuucaaggaggagcuggacaaguacuucaagaaucacaccagccccgacguggaccugggcgacaucagcggcaucaacgccagcguggugaacauccagaaggagaucgaucggcugaacgagguggccaagaaccugaacgagagccugaucgaccugcaggagcugggcaaguacgagcaguacaucaaguggcccugguacaucuggcugggcuucaucgccggccugaucgccaucgugauggugaccaucaugcugugcugcaugaccagcugcugcagcugccugaagggcuguugcagcugcggcagcugcugcaaguucgacgaggacgacagcgagcccgugcugaagggcgugaagcugcacuacaccugaggacuaguuauaagacugacuagcccgaugggccucccaacgggcccuccuccccuccuugcaccgagagaucuaaaaaaaaaaaaaaaaaaaaaaaaaaaaaaaaaaaaaaaaaaaaaaaaaaaaaaaaaaaaaaaaaaaaaaaaaaaaaaaaaaaaaaaaaaaaaaaaaaaa

SEQ ID NO: 25870 - RNA, 4011 nt, Artificial Sequence
  SARS-CoV-2/Wuhan/WIV05/2019__EPI_ISL_402128 spike protein mRNA gc (1-1273)(N501Y_D614G)
aggagaaagcuuaccauguucguguuccuggugcugcugccccuggugagcagccagugcgugaaccugaccacccggacccagcugccaccagccuacaccaacagcuucacccggggcgucuacuaccccgacaagguguuccggagcagcguccugcacagcacccaggaccuguuccugcccuucuucagcaacgugaccugguuccacgccauccacgugagcggcaccaacggcaccaagcgguucgacaaccccgugcugcccuucaacgacggcguguacuucgccagcaccgagaagagcaacaucauccggggcuggaucuucggcaccacccuggacagcaagacccagagccugcugaucgugaauaacgccaccaacguggugaucaaggugugcgaguuccaguucugcaacgaccccuuccugggcguguacuaccacaagaacaacaagagcuggauggagagcgaguuccggguguacagcagcgccaacaacugcaccuucgaguacgugagccagcccuuccugauggaccuggagggcaagcagggcaacuucaagaaccugcgggaguucguguucaagaacaucgacggcuacuucaagaucuacagcaagcacaccccaaucaaccuggugcgggaucugccccagggcuucucagcccuggagccccugguggaccugcccaucggcaucaacaucacccgguuccagacccugcuggcccugcaccggagcuaccugaccccaggcgacagcagcagcggguggacagcaggcgcggcugcuuacuacgugggcuaccugcagccccggaccuuccugcugaaguacaacgagaacggcaccaucaccgacgccguggacugcgcccuggacccucugagcgagaccaagugcacccugaagagcuucaccguggagaagggcaucuaccagaccagcaacuuccgggugcagcccaccgagagcaucgugcgguuccccaacaucaccaaccugugccccuucggcgagguguucaacgccacccgguucgccagcguguacgccuggaaccggaagcggaucagcaacugcguggccgacuacagcgugcuguacaacagcgccagcuucagcaccuucaagugcuacggcgugagccccaccaagcugaacgaccugugcuucaccaacguguacgccgacagcuucgugauccguggcgacgaggugcggcagaucgcacccggccagacaggcaagaucgccgacuacaacuacaagcugcccgacgacuucaccggcugcgugaucgccuggaacagcaacaaccucgacagcaaggugggcggcaacuacaacuaccuguaccggcuguuccggaagagcaaccugaagcccuucgagcgggacaucagcaccgagaucuaccaagccggcuccaccccuugcaacggcguggagggcuucaacugcuacuucccucugcagagcuacggcuuccagcccaccuacggcgugggcuaccagcccuaccgggugguggugcugagcuucgagcugcugcacgccccagccaccguguguggccccaagaagagcaccaaccuggugaagaacaagugcgugaacuucaacuucaacggccuuaccggcaccggcgugcugaccgagagcaacaagaaauuccugcccuuucagcaguucggccgggacaucgccgacaccaccgacgcugugcgggauccccagacccuggagauccuggacaucaccccuugcagcuucggcggcgugagcgugaucaccccaggcaccaacaccagcaaccagguggccgugcuguaccagggcgugaacugcaccgaggugcccguggccauccacgccgaccagcugacacccaccuggcgggucuacagcaccggcagcaacguguuccagacccgggccgguugccugaucggcgccgagcacgugaacaacagcuacgagugcgacauccccaucggcgccggcaucugugccagcuaccagacccagaccaauucaccccggagggcaaggagcguggccagccagagcaucaucgccuacaccaugagccugggcgccgagaacagcguggccuacagcaacaacagcaucgccauccccaccaacuucaccaucagcgugaccaccgagauucugcccgugagcaugaccaagaccagcguggacugcaccauguacaucugcggcgacagcaccgagugcagcaaccugcugcugcaguacggcagcuucugcacccagcugaaccgggcccugaccggcaucgccguggagcaggacaagaacacccaggagguguucgcccaggugaagcagaucuacaagaccccucccaucaaggacuucggcggcuucaacuucagccagauccugcccgaccccagcaagcccagcaagcggagcuucaucgaggaccugcuguucaacaaggugacccuagccgacgccggcuucaucaagcaguacggcgacugccucggcgacauagccgcccgggaccugaucugcgcccagaaguucaacggccugaccgugcugccuccccugcugaccgacgagaugaucgcccaguacaccagcgcccuguuagccggaaccaucaccagcggcuggacuuucggcgcuggagccgcucugcagauccccuucgccaugcagauggccuaccgguucaacggcaucggcgugacccagaacgugcuguacgagaaccagaagcugaucgccaaccaguucaacagcgccaucggcaagauccaggacagccugagcagcaccgcuagcgcccugggcaagcugcaggacguggugaaccagaacgcccaggcccugaacacccuggugaagcagcugagcagcaacuucggcgccaucagcagcgugcugaacgacauccugagccggcuggacaaggucgaggccgaggugcagaucgaccggcugaucacuggccggcugcagagccugcagaccuacgugacccagcagcugauccgggccgccgagauucgggccagcgccaaccuggccgccaccaagaugagcgagugcgugcugggccagagcaagcggguggacuucugcggcaagggcuaccaccugaugagcuuuccccagagcgcaccccacggagugguguuccugcacgugaccuacgugcccgcccaggagaagaacuucaccaccgccccagccaucugccacgacggcaaggcccacuuuccccgggagggcguguucgugagcaacggcacccacugguucgugacccagcggaacuucuacgagccccagaucaucaccaccgacaacaccuucgugagcggcaacugcgacguggugaucggcaucgugaacaacaccguguacgauccccugcagcccgagcuggacagcuucaaggaggagcuggacaaguacuucaagaaucacaccagccccgacguggaccugggcgacaucagcggcaucaacgccagcguggugaacauccagaaggagaucgaucggcugaacgagguggccaagaaccugaacgagagccugaucgaccugcaggagcugggcaaguacgagcaguacaucaaguggcccugguacaucuggcugggcuucaucgccggccugaucgccaucgugauggugaccaucaugcugugcugcaugaccagcugcugcagcugccugaagggcuguugcagcugcggcagcugcugcaaguucgacgaggacgacagcgagcccgugcugaagggcgugaagcugcacuacaccugaggacuaguuauaagacugacuagcccgaugggccucccaacgggcccuccuccccuccuugcaccgagagaucuaaaaaaaaaaaaaaaaaaaaaaaaaaaaaaaaaaaaaaaaaaaaaaaaaaaaaaaaaaaaaaaaaaaaaaaaaaaaaaaaaaaaaaaaaaaaaaaaaaaa

SEQ ID NO: 25871 - RNA, 4005 nt, Artificial Sequence
  SARS-CoV-2/Wuhan/WIV05/2019__EPI_ISL_402128 spike protein mRNA gc (1-1273)(H69del_V70del_D614G)
aggagaaagcuuaccauguucguguuccuggugcugcugccccuggugagcagccagugcgugaaccugaccacccggacccagcugccaccagccuacaccaacagcuucacccggggcgucuacuaccccgacaagguguuccggagcagcguccugcacagcacccaggaccuguuccugcccuucuucagcaacgugaccugguuccacgccaucagcggcaccaacggcaccaagcgguucgacaaccccgugcugcccuucaacgacggcguguacuucgccagcaccgagaagagcaacaucauccggggcuggaucuucggcaccacccuggacagcaagacccagagccugcugaucgugaauaacgccaccaacguggugaucaaggugugcgaguuccaguucugcaacgaccccuuccugggcguguacuaccacaagaacaacaagagcuggauggagagcgaguuccggguguacagcagcgccaacaacugcaccuucgaguacgugagccagcccuuccugauggaccuggagggcaagcagggcaacuucaagaaccugcgggaguucguguucaagaacaucgacggcuacuucaagaucuacagcaagcacaccccaaucaaccuggugcgggaucugccccagggcuucucagcccuggagccccugguggaccugcccaucggcaucaacaucacccgguuccagacccugcuggcccugcaccggagcuaccugaccccaggcgacagcagcagcggguggacagcaggcgcggcugcuuacuacgugggcuaccugcagccccggaccuuccugcugaaguacaacgagaacggcaccaucaccgacgccguggacugcgcccuggacccucugagcgagaccaagugcacccugaagagcuucaccguggagaagggcaucuaccagaccagcaacuuccgggugcagcccaccgagagcaucgugcgguuccccaacaucaccaaccugugccccuucggcgagguguucaacgccacccgguucgccagcguguacgccuggaaccggaagcggaucagcaacugcguggccgacuacagcgugcuguacaacagcgccagcuucagcaccuucaagugcuacggcgugagccccaccaagcugaacgaccugugcuucaccaacguguacgccgacagcuucgugauccguggcgacgaggugcggcagaucgcacccggccagacaggcaagaucgccgacuacaacuacaagcugcccgacgacuucaccggcugcgugaucgccuggaacagcaacaaccucgacagcaaggugggcggcaacuacaacuaccuguaccggcuguuccggaagagcaaccugaagcccuucgagcgggacaucagcaccgagaucuaccaagccggcuccaccccuugcaacggcguggagggcuucaacugcuacuucccucugcagagcuacggcuuccagcccaccaacggcgugggcuaccagcccuaccgggugguggugcugagcuucgagcugcugcacgccccagccaccguguguggccccaagaagagcaccaaccuggugaagaacaagugcgugaacuucaacuucaacggccuuaccggcaccggcgugcugaccgagagcaacaagaaauuccugcccuuucagcaguucggccgggacaucgccgacaccaccgacgcugugcgggauccccagacccuggagauccuggacaucaccccuugcagcuucggcggcgugagcgugaucaccccaggcaccaacaccagcaaccagguggccgugcuguaccagggcgugaacugcaccgaggugcccguggccauccacgccgaccagcugacacccaccuggcgggucuacagcaccggcagcaacguguuccagacccgggccgguugccugaucggcgccgagcacgugaacaacagcuacgagugcgacauccccaucggcgccggcaucugugccagcuaccagacccagaccaauucaccccggagggcaaggagcguggccagccagagcaucaucgccuacaccaugagccugggcgccgagaacagcguggccuacagcaacaacagcaucgccauccccaccaacuucaccaucagcgugaccaccgagauucugcccgugagcaugaccaagaccagcguggacugcaccauguacaucugcggcgacagcaccgagugcagcaaccugcugcugcaguacggcagcuucugcacccagcugaaccgggcccugaccggcaucgccguggagcaggacaagaacacccaggagguguucgcccaggugaagcagaucuacaagaccccucccaucaaggacuucggcggcuucaacuucagccagauccugcccgaccccagcaagcccagcaagcggagcuucaucgaggaccugcuguucaacaaggugacccuagccgacgccggcuucaucaagcaguacggcgacugccucggcgacauagccgcccgggaccugaucugcgcccagaaguucaacggccugaccgugcugccuccccugcugaccgacgagaugaucgcccaguacaccagcgcccuguuagccggaaccaucaccagcggcuggacuuucggcgcuggagccgcucugcagauccccuucgccaugcagauggccuaccgguucaacggcaucggcgugacccagaacgugcuguacgagaaccagaagcugaucgccaaccaguucaacagcgccaucggcaagauccaggacagccugagcagcaccgcuagcgcccugggcaagcugcaggacguggugaaccagaacgcccaggcccugaacacccuggugaagcagcugagcagcaacuucggcgccaucagcagcgugcugaacgacauccugagccggcuggacaaggucgaggccgaggugcagaucgaccggcugaucacuggccggcugcagagccugcagaccuacgugacccagcagcugauccgggccgccgagauucgggccagcgccaaccuggccgccaccaagaugagcgagugcgugcugggccagagcaagcggguggacuucugcggcaagggcuaccaccugaugagcuuuccccagagcgcaccccacggagugguguuccugcacgugaccuacgugcccgcccaggagaagaacuucaccaccgccccagccaucugccacgacggcaaggcccacuuuccccgggagggcguguucgugagcaacggcacccacugguucgugacccagcggaacuucuacgagccccagaucaucaccaccgacaacaccuucgugagcggcaacugcgacguggugaucggcaucgugaacaacaccguguacgauccccugcagcccgagcuggacagcuucaaggaggagcuggacaaguacuucaagaaucacaccagccccgacguggaccugggcgacaucagcggcaucaacgccagcguggugaacauccagaaggagaucgaucggcugaacgagguggccaagaaccugaacgagagccugaucgaccugcaggagcugggcaaguacgagcaguacaucaaguggcccugguacaucuggcugggcuucaucgccggccugaucgccaucgugauggugaccaucaugcugugcugcaugaccagcugcugcagcugccugaagggcuguugcagcugcggcagcugcugcaaguucgacgaggacgacagcgagcccgugcugaagggcgugaagcugcacuacaccugaggacuaguuauaagacugacuagcccgaugggccucccaacgggcccuccuccccuccuugcaccgagagaucuaaaaaaaaaaaaaaaaaaaaaaaaaaaaaaaaaaaaaaaaaaaaaaaaaaaaaaaaaaaaaaaaaaaaaaaaaaaaaaaaaaaaaaaaaaaaaaaaaaaa

SEQ ID NO: 25872 - RNA, 4011 nt, Artificial Sequence
  SARS-CoV-2/Wuhan/WIV05/2019__EPI_ISL_402128 spike protein mRNA gc (1-1273)(Y453F_D614G)
aggagaaagcuuaccauguucguguuccuggugcugcugccccuggugagcagccagugcgugaaccugaccacccggacccagcugccaccagccuacaccaacagcuucacccggggcgucuacuaccccgacaagguguuccggagcagcguccugcacagcacccaggaccuguuccugcccuucuucagcaacgugaccugguuccacgccauccacgugagcggcaccaacggcaccaagcgguucgacaaccccgugcugcccuucaacgacggcguguacuucgccagcaccgagaagagcaacaucauccggggcuggaucuucggcaccacccuggacagcaagacccagagccugcugaucgugaauaacgccaccaacguggugaucaaggugugcgaguuccaguucugcaacgaccccuuccugggcguguacuaccacaagaacaacaagagcuggauggagagcgaguuccggguguacagcagcgccaacaacugcaccuucgaguacgugagccagcccuuccugauggaccuggagggcaagcagggcaacuucaagaaccugcgggaguucguguucaagaacaucgacggcuacuucaagaucuacagcaagcacaccccaaucaaccuggugcgggaucugccccagggcuucucagcccuggagccccugguggaccugcccaucggcaucaacaucacccgguuccagacccugcuggcccugcaccggagcuaccugaccccaggcgacagcagcagcggguggacagcaggcgcggcugcuuacuacgugggcuaccugcagccccggaccuuccugcugaaguacaacgagaacggcaccaucaccgacgccguggacugcgcccuggacccucugagcgagaccaagugcacccugaagagcuucaccguggagaagggcaucuaccagaccagcaacuuccgggugcagcccaccgagagcaucgugcgguuccccaacaucaccaaccugugccccuucggcgagguguucaacgccacccgguucgccagcguguacgccuggaaccggaagcggaucagcaacugcguggccgacuacagcgugcuguacaacagcgccagcuucagcaccuucaagugcuacggcgugagccccaccaagcugaacgaccugugcuucaccaacguguacgccgacagcuucgugauccguggcgacgaggugcggcagaucgcacccggccagacaggcaagaucgccgacuacaacuacaagcugcccgacgacuucaccggcugcgugaucgccuggaacagcaacaaccucgacagcaaggugggcggcaacuacaacuaccuguuccggcuguuccggaagagcaaccugaagcccuucgagcgggacaucagcaccgagaucuaccaagccggcuccaccccuugcaacggcguggagggcuucaacugcuacuucccucugcagagcuacggcuuccagcccaccaacggcgugggcuaccagcccuaccgggugguggugcugagcuucgagcugcugcacgccccagccaccguguguggccccaagaagagcaccaaccuggugaagaacaagugcgugaacuucaacuucaacggccuuaccggcaccggcgugcugaccgagagcaacaagaaauuccugcccuuucagcaguucggccgggacaucgccgacaccaccgacgcugugcgggauccccagacccuggagauccuggacaucaccccuugcagcuucggcggcgugagcgugaucaccccaggcaccaacaccagcaaccagguggccgugcuguaccagggcgugaacugcaccgaggugcccguggccauccacgccgaccagcugacacccaccuggcgggucuacagcaccggcagcaacguguuccagacccgggccgguugccugaucggcgccgagcacgugaacaacagcuacgagugcgacauccccaucggcgccggcaucugugccagcuaccagacccagaccaauucaccccggagggcaaggagcguggccagccagagcaucaucgccuacaccaugagccugggcgccgagaacagcguggccuacagcaacaacagcaucgccauccccaccaacuucaccaucagcgugaccaccgagauucugcccgugagcaugaccaagaccagcguggacugcaccauguacaucugcggcgacagcaccgagugcagcaaccugcugcugcaguacggcagcuucugcacccagcugaaccgggcccugaccggcaucgccguggagcaggacaagaacacccaggagguguucgcccaggugaagcagaucuacaagaccccucccaucaaggacuucggcggcuucaacuucagccagauccugcccgaccccagcaagcccagcaagcggagcuucaucgaggaccugcuguucaacaaggugacccuagccgacgccggcuucaucaagcaguacggcgacugccucggcgacauagccgcccgggaccugaucugcgcccagaaguucaacggccugaccgugcugccuccccugcugaccgacgagaugaucgcccaguacaccagcgcccuguuagccggaaccaucaccagcggcuggacuuucggcgcuggagccgcucugcagauccccuucgccaugcagauggccuaccgguucaacggcaucggcgugacccagaacgugcuguacgagaaccagaagcugaucgccaaccaguucaacagcgccaucggcaagauccaggacagccugagcagcaccgcuagcgcccugggcaagcugcaggacguggugaaccagaacgcccaggcccugaacacccuggugaagcagcugagcagcaacuucggcgccaucagcagcgugcugaacgacauccugagccggcuggacaaggucgaggccgaggugcagaucgaccggcugaucacuggccggcugcagagccugcagaccuacgugacccagcagcugauccgggccgccgagauucgggccagcgccaaccuggccgccaccaagaugagcgagugcgugcugggccagagcaagcggguggacuucugcggcaagggcuaccaccugaugagcuuuccccagagcgcaccccacggagugguguuccugcacgugaccuacgugcccgcccaggagaagaacuucaccaccgccccagccaucugccacgacggcaaggcccacuuuccccgggagggcguguucgugagcaacggcacccacugguucgugacccagcggaacuucuacgagccccagaucaucaccaccgacaacaccuucgugagcggcaacugcgacguggugaucggcaucgugaacaacaccguguacgauccccugcagcccgagcuggacagcuucaaggaggagcuggacaaguacuucaagaaucacaccagccccgacguggaccugggcgacaucagcggcaucaacgccagcguggugaacauccagaaggagaucgaucggcugaacgagguggccaagaaccugaacgagagccugaucgaccugcaggagcugggcaaguacgagcaguacaucaaguggcccugguacaucuggcugggcuucaucgccggccugaucgccaucgugauggugaccaucaugcugugcugcaugaccagcugcugcagcugccugaagggcuguugcagcugcggcagcugcugcaaguucgacgaggacgacagcgagcccgugcugaagggcgugaagcugcacuacaccugaggacuaguuauaagacugacuagcccgaugggccucccaacgggcccuccuccccuccuugcaccgagagaucuaaaaaaaaaaaaaaaaaaaaaaaaaaaaaaaaaaaaaaaaaaaaaaaaaaaaaaaaaaaaaaaaaaaaaaaaaaaaaaaaaaaaaaaaaaaaaaaaaaaa

SEQ ID NO: 25873 - RNA, 4011 nt, Artificial Sequence
  SARS-CoV-2/Wuhan/WIV05/2019__EPI_ISL_402128 spike protein mRNA gc (1-1273)(D614G_I692V)
aggagaaagcuuaccauguucguguuccuggugcugcugccccuggugagcagccagugcgugaaccugaccacccggacccagcugccaccagccuacaccaacagcuucacccggggcgucuacuaccccgacaagguguuccggagcagcguccugcacagcacccaggaccuguuccugcccuucuucagcaacgugaccugguuccacgccauccacgugagcggcaccaacggcaccaagcgguucgacaaccccgugcugcccuucaacgacggcguguacuucgccagcaccgagaagagcaacaucauccggggcuggaucuucggcaccacccuggacagcaagacccagagccugcugaucgugaauaacgccaccaacguggugaucaaggugugcgaguuccaguucugcaacgaccccuuccugggcguguacuaccacaagaacaacaagagcuggauggagagcgaguuccggguguacagcagcgccaacaacugcaccuucgaguacgugagccagcccuuccugauggaccuggagggcaagcagggcaacuucaagaaccugcgggaguucguguucaagaacaucgacggcuacuucaagaucuacagcaagcacaccccaaucaaccuggugcgggaucugccccagggcuucucagcccuggagccccugguggaccugcccaucggcaucaacaucacccgguuccagacccugcuggcccugcaccggagcuaccugaccccaggcgacagcagcagcggguggacagcaggcgcggcugcuuacuacgugggcuaccugcagccccggaccuuccugcugaaguacaacgagaacggcaccaucaccgacgccguggacugcgcccuggacccucugagcgagaccaagugcacccugaagagcuucaccguggagaagggcaucuaccagaccagcaacuuccgggugcagcccaccgagagcaucgugcgguuccccaacaucaccaaccugugccccuucggcgagguguucaacgccacccgguucgccagcguguacgccuggaaccggaagcggaucagcaacugcguggccgacuacagcgugcuguacaacagcgccagcuucagcaccuucaagugcuacggcgugagccccaccaagcugaacgaccugugcuucaccaacguguacgccgacagcuucgugauccguggcgacgaggugcggcagaucgcacccggccagacaggcaagaucgccgacuacaacuacaagcugcccgacgacuucaccggcugcgugaucgccuggaacagcaacaaccucgacagcaaggugggcggcaacuacaacuaccuguaccggcuguuccggaagagcaaccugaagcccuucgagcgggacaucagcaccgagaucuaccaagccggcuccaccccuugcaacggcguggagggcuucaacugcuacuucccucugcagagcuacggcuuccagcccaccaacggcgugggcuaccagcccuaccgggugguggugcugagcuucgagcugcugcacgccccagccaccguguguggccccaagaagagcaccaaccuggugaagaacaagugcgugaacuucaacuucaacggccuuaccggcaccggcgugcugaccgagagcaacaagaaauuccugcccuuucagcaguucggccgggacaucgccgacaccaccgacgcugugcgggauccccagacccuggagauccuggacaucaccccuugcagcuucggcggcgugagcgugaucaccccaggcaccaacaccagcaaccagguggccgugcuguaccagggcgugaacugcaccgaggugcccguggccauccacgccgaccagcugacacccaccuggcgggucuacagcaccggcagcaacguguuccagacccgggccgguugccugaucggcgccgagcacgugaacaacagcuacgagugcgacauccccaucggcgccggcaucugugccagcuaccagacccagaccaauucaccccggagggcaaggagcguggccagccagagcgugaucgccuacaccaugagccugggcgccgagaacagcguggccuacagcaacaacagcaucgccauccccaccaacuucaccaucagcgugaccaccgagauucugcccgugagcaugaccaagaccagcguggacugcaccauguacaucugcggcgacagcaccgagugcagcaaccugcugcugcaguacggcagcuucugcacccagcugaaccgggcccugaccggcaucgccguggagcaggacaagaacacccaggagguguucgcccaggugaagcagaucuacaagaccccucccaucaaggacuucggcggcuucaacuucagccagauccugcccgaccccagcaagcccagcaagcggagcuucaucgaggaccugcuguucaacaaggugacccuagccgacgccggcuucaucaagcaguacggcgacugccucggcgacauagccgcccgggaccugaucugcgcccagaaguucaacggccugaccgugcugccuccccugcugaccgacgagaugaucgcccaguacaccagcgcccuguuagccggaaccaucaccagcggcuggacuuucggcgcuggagccgcucugcagauccccuucgccaugcagauggccuaccgguucaacggcaucggcgugacccagaacgugcuguacgagaaccagaagcugaucgccaaccaguucaacagcgccaucggcaagauccaggacagccugagcagcaccgcuagcgcccugggcaagcugcaggacguggugaaccagaacgcccaggcccugaacacccuggugaagcagcugagcagcaacuucggcgccaucagcagcgugcugaacgacauccugagccggcuggacaaggucgaggccgaggugcagaucgaccggcugaucacuggccggcugcagagccugcagaccuacgugacccagcagcugauccgggccgccgagauucgggccagcgccaaccuggccgccaccaagaugagcgagugcgugcugggccagagcaagcggguggacuucugcggcaagggcuaccaccugaugagcuuuccccagagcgcaccccacggagugguguuccugcacgugaccuacgugcccgcccaggagaagaacuucaccaccgccccagccaucugccacgacggcaaggcccacuuuccccgggagggcguguucgugagcaacggcacccacugguucgugacccagcggaacuucuacgagccccagaucaucaccaccgacaacaccuucgugagcggcaacugcgacguggugaucggcaucgugaacaacaccguguacgauccccugcagcccgagcuggacagcuucaaggaggagcuggacaaguacuucaagaaucacaccagccccgacguggaccugggcgacaucagcggcaucaacgccagcguggugaacauccagaaggagaucgaucggcugaacgagguggccaagaaccugaacgagagccugaucgaccugcaggagcugggcaaguacgagcaguacaucaaguggcccugguacaucuggcugggcuucaucgccggccugaucgccaucgugauggugaccaucaugcugugcugcaugaccagcugcugcagcugccugaagggcuguugcagcugcggcagcugcugcaaguucgacgaggacgacagcgagcccgugcugaagggcgugaagcugcacuacaccugaggacuaguuauaagacugacuagcccgaugggccucccaacgggcccuccuccccuccuugcaccgagagaucuaaaaaaaaaaaaaaaaaaaaaaaaaaaaaaaaaaaaaaaaaaaaaaaaaaaaaaaaaaaaaaaaaaaaaaaaaaaaaaaaaaaaaaaaaaaaaaaaaaaa

SEQ ID NO: 25874 - RNA, 4011 nt, Artificial Sequence
  SARS-CoV-2/Wuhan/WIV05/2019__EPI_ISL_402128 spike protein mRNA gc (1-1273)(D614G_M1229I)
aggagaaagcuuaccauguucguguuccuggugcugcugccccuggugagcagccagugcgugaaccugaccacccggacccagcugccaccagccuacaccaacagcuucacccggggcgucuacuaccccgacaagguguuccggagcagcguccugcacagcacccaggaccuguuccugcccuucuucagcaacgugaccugguuccacgccauccacgugagcggcaccaacggcaccaagcgguucgacaaccccgugcugcccuucaacgacggcguguacuucgccagcaccgagaagagcaacaucauccggggcuggaucuucggcaccacccuggacagcaagacccagagccugcugaucgugaauaacgccaccaacguggugaucaaggugugcgaguuccaguucugcaacgaccccuuccugggcguguacuaccacaagaacaacaagagcuggauggagagcgaguuccggguguacagcagcgccaacaacugcaccuucgaguacgugagccagcccuuccugauggaccuggagggcaagcagggcaacuucaagaaccugcgggaguucguguucaagaacaucgacggcuacuucaagaucuacagcaagcacaccccaaucaaccuggugcgggaucugccccagggcuucucagcccuggagccccugguggaccugcccaucggcaucaacaucacccgguuccagacccugcuggcccugcaccggagcuaccugaccccaggcgacagcagcagcggguggacagcaggcgcggcugcuuacuacgugggcuaccugcagccccggaccuuccugcugaaguacaacgagaacggcaccaucaccgacgccguggacugcgcccuggacccucugagcgagaccaagugcacccugaagagcuucaccguggagaagggcaucuaccagaccagcaacuuccgggugcagcccaccgagagcaucgugcgguuccccaacaucaccaaccugugccccuucggcgagguguucaacgccacccgguucgccagcguguacgccuggaaccggaagcggaucagcaacugcguggccgacuacagcgugcuguacaacagcgccagcuucagcaccuucaagugcuacggcgugagccccaccaagcugaacgaccugugcuucaccaacguguacgccgacagcuucgugauccguggcgacgaggugcggcagaucgcacccggccagacaggcaagaucgccgacuacaacuacaagcugcccgacgacuucaccggcugcgugaucgccuggaacagcaacaaccucgacagcaaggugggcggcaacuacaacuaccuguaccggcuguuccggaagagcaaccugaagcccuucgagcgggacaucagcaccgagaucuaccaagccggcuccaccccuugcaacggcguggagggcuucaacugcuacuucccucugcagagcuacggcuuccagcccaccaacggcgugggcuaccagcccuaccgggugguggugcugagcuucgagcugcugcacgccccagccaccguguguggccccaagaagagcaccaaccuggugaagaacaagugcgugaacuucaacuucaacggccuuaccggcaccggcgugcugaccgagagcaacaagaaauuccugcccuuucagcaguucggccgggacaucgccgacaccaccgacgcugugcgggauccccagacccuggagauccuggacaucaccccuugcagcuucggcggcgugagcgugaucaccccaggcaccaacaccagcaaccagguggccgugcuguaccagggcgugaacugcaccgaggugcccguggccauccacgccgaccagcugacacccaccuggcgggucuacagcaccggcagcaacguguuccagacccgggccgguugccugaucggcgccgagcacgugaacaacagcuacgagugcgacauccccaucggcgccggcaucugugccagcuaccagacccagaccaauucaccccggagggcaaggagcguggccagccagagcaucaucgccuacaccaugagccugggcgccgagaacagcguggccuacagcaacaacagcaucgccauccccaccaacuucaccaucagcgugaccaccgagauucugcccgugagcaugaccaagaccagcguggacugcaccauguacaucugcggcgacagcaccgagugcagcaaccugcugcugcaguacggcagcuucugcacccagcugaaccgggcccugaccggcaucgccguggagcaggacaagaacacccaggagguguucgcccaggugaagcagaucuacaagaccccucccaucaaggacuucggcggcuucaacuucagccagauccugcccgaccccagcaagcccagcaagcggagcuucaucgaggaccugcuguucaacaaggugacccuagccgacgccggcuucaucaagcaguacggcgacugccucggcgacauagccgcccgggaccugaucugcgcccagaaguucaacggccugaccgugcugccuccccugcugaccgacgagaugaucgcccaguacaccagcgcccuguuagccggaaccaucaccagcggcuggacuuucggcgcuggagccgcucugcagauccccuucgccaugcagauggccuaccgguucaacggcaucggcgugacccagaacgugcuguacgagaaccagaagcugaucgccaaccaguucaacagcgccaucggcaagauccaggacagccugagcagcaccgcuagcgcccugggcaagcugcaggacguggugaaccagaacgcccaggcccugaacacccuggugaagcagcugagcagcaacuucggcgccaucagcagcgugcugaacgacauccugagccggcuggacaaggucgaggccgaggugcagaucgaccggcugaucacuggccggcugcagagccugcagaccuacgugacccagcagcugauccgggccgccgagauucgggccagcgccaaccuggccgccaccaagaugagcgagugcgugcugggccagagcaagcggguggacuucugcggcaagggcuaccaccugaugagcuuuccccagagcgcaccccacggagugguguuccugcacgugaccuacgugcccgcccaggagaagaacuucaccaccgccccagccaucugccacgacggcaaggcccacuuuccccgggagggcguguucgugagcaacggcacccacugguucgugacccagcggaacuucuacgagccccagaucaucaccaccgacaacaccuucgugagcggcaacugcgacguggugaucggcaucgugaacaacaccguguacgauccccugcagcccgagcuggacagcuucaaggaggagcuggacaaguacuucaagaaucacaccagccccgacguggaccugggcgacaucagcggcaucaacgccagcguggugaacauccagaaggagaucgaucggcugaacgagguggccaagaaccugaacgagagccugaucgaccugcaggagcugggcaaguacgagcaguacaucaaguggcccugguacaucuggcugggcuucaucgccggccugaucgccaucgugaucgugaccaucaugcugugcugcaugaccagcugcugcagcugccugaagggcuguugcagcugcggcagcugcugcaaguucgacgaggacgacagcgagcccgugcugaagggcgugaagcugcacuacaccugaggacuaguuauaagacugacuagcccgaugggccucccaacgggcccuccuccccuccuugcaccgagagaucuaaaaaaaaaaaaaaaaaaaaaaaaaaaaaaaaaaaaaaaaaaaaaaaaaaaaaaaaaaaaaaaaaaaaaaaaaaaaaaaaaaaaaaaaaaaaaaaaaaaa

SEQ ID NO: 25875 - RNA, 4005 nt, Artificial Sequence
  SARS-CoV-2/Wuhan/WIV05/2019__EPI_ISL_402128 spike protein mRNA gc (1-1273)(H69del_V70del_A222V_Y453F_S477N_D614G_I692V)
aggagaaagcuuaccauguucguguuccuggugcugcugccccuggugagcagccagugcgugaaccugaccacccggacccagcugccaccagccuacaccaacagcuucacccggggcgucuacuaccccgacaagguguuccggagcagcguccugcacagcacccaggaccuguuccugcccuucuucagcaacgugaccugguuccacgccaucagcggcaccaacggcaccaagcgguucgacaaccccgugcugcccuucaacgacggcguguacuucgccagcaccgagaagagcaacaucauccggggcuggaucuucggcaccacccuggacagcaagacccagagccugcugaucgugaauaacgccaccaacguggugaucaaggugugcgaguuccaguucugcaacgaccccuuccugggcguguacuaccacaagaacaacaagagcuggauggagagcgaguuccggguguacagcagcgccaacaacugcaccuucgaguacgugagccagcccuuccugauggaccuggagggcaagcagggcaacuucaagaaccugcgggaguucguguucaagaacaucgacggcuacuucaagaucuacagcaagcacaccccaaucaaccuggugcgggaucugccccagggcuucucagugcuggagccccugguggaccugcccaucggcaucaacaucacccgguuccagacccugcuggcccugcaccggagcuaccugaccccaggcgacagcagcagcggguggacagcaggcgcggcugcuuacuacgugggcuaccugcagccccggaccuuccugcugaaguacaacgagaacggcaccaucaccgacgccguggacugcgcccuggacccucugagcgagaccaagugcacccugaagagcuucaccguggagaagggcaucuaccagaccagcaacuuccgggugcagcccaccgagagcaucgugcgguuccccaacaucaccaaccugugccccuucggcgagguguucaacgccacccgguucgccagcguguacgccuggaaccggaagcggaucagcaacugcguggccgacuacagcgugcuguacaacagcgccagcuucagcaccuucaagugcuacggcgugagccccaccaagcugaacgaccugugcuucaccaacguguacgccgacagcuucgugauccguggcgacgaggugcggcagaucgcacccggccagacaggcaagaucgccgacuacaacuacaagcugcccgacgacuucaccggcugcgugaucgccuggaacagcaacaaccucgacagcaaggugggcggcaacuacaacuaccuguuccggcuguuccggaagagcaaccugaagcccuucgagcgggacaucagcaccgagaucuaccaagccggcaacaccccuugcaacggcguggagggcuucaacugcuacuucccucugcagagcuacggcuuccagcccaccaacggcgugggcuaccagcccuaccgggugguggugcugagcuucgagcugcugcacgccccagccaccguguguggccccaagaagagcaccaaccuggugaagaacaagugcgugaacuucaacuucaacggccuuaccggcaccggcgugcugaccgagagcaacaagaaauuccugcccuuucagcaguucggccgggacaucgccgacaccaccgacgcugugcgggauccccagacccuggagauccuggacaucaccccuugcagcuucggcggcgugagcgugaucaccccaggcaccaacaccagcaaccagguggccgugcuguaccagggcgugaacugcaccgaggugcccguggccauccacgccgaccagcugacacccaccuggcgggucuacagcaccggcagcaacguguuccagacccgggccgguugccugaucggcgccgagcacgugaacaacagcuacgagugcgacauccccaucggcgccggcaucugugccagcuaccagacccagaccaauucaccccggagggcaaggagcguggccagccagagcgugaucgccuacaccaugagccugggcgccgagaacagcguggccuacagcaacaacagcaucgccauccccaccaacuucaccaucagcgugaccaccgagauucugcccgugagcaugaccaagaccagcguggacugcaccauguacaucugcggcgacagcaccgagugcagcaaccugcugcugcaguacggcagcuucugcacccagcugaaccgggcccugaccggcaucgccguggagcaggacaagaacacccaggagguguucgcccaggugaagcagaucuacaagaccccucccaucaaggacuucggcggcuucaacuucagccagauccugcccgaccccagcaagcccagcaagcggagcuucaucgaggaccugcuguucaacaaggugacccuagccgacgccggcuucaucaagcaguacggcgacugccucggcgacauagccgcccgggaccugaucugcgcccagaaguucaacggccugaccgugcugccuccccugcugaccgacgagaugaucgcccaguacaccagcgcccuguuagccggaaccaucaccagcggcuggacuuucggcgcuggagccgcucugcagauccccuucgccaugcagauggccuaccgguucaacggcaucggcgugacccagaacgugcuguacgagaaccagaagcugaucgccaaccaguucaacagcgccaucggcaagauccaggacagccugagcagcaccgcuagcgcccugggcaagcugcaggacguggugaaccagaacgcccaggcccugaacacccuggugaagcagcugagcagcaacuucggcgccaucagcagcgugcugaacgacauccugagccggcuggacaaggucgaggccgaggugcagaucgaccggcugaucacuggccggcugcagagccugcagaccuacgugacccagcagcugauccgggccgccgagauucgggccagcgccaaccuggccgccaccaagaugagcgagugcgugcugggccagagcaagcggguggacuucugcggcaagggcuaccaccugaugagcuuuccccagagcgcaccccacggagugguguuccugcacgugaccuacgugcccgcccaggagaagaacuucaccaccgccccagccaucugccacgacggcaaggcccacuuuccccgggagggcguguucgugagcaacggcacccacugguucgugacccagcggaacuucuacgagccccagaucaucaccaccgacaacaccuucgugagcggcaacugcgacguggugaucggcaucgugaacaacaccguguacgauccccugcagcccgagcuggacagcuucaaggaggagcuggacaaguacuucaagaaucacaccagccccgacguggaccugggcgacaucagcggcaucaacgccagcguggugaacauccagaaggagaucgaucggcugaacgagguggccaagaaccugaacgagagccugaucgaccugcaggagcugggcaaguacgagcaguacaucaaguggcccugguacaucuggcugggcuucaucgccggccugaucgccaucgugauggugaccaucaugcugugcugcaugaccagcugcugcagcugccugaagggcuguugcagcugcggcagcugcugcaaguucgacgaggacgacagcgagcccgugcugaagggcgugaagcugcacuacaccugaggacuaguuauaagacugacuagcccgaugggccucccaacgggcccuccuccccuccuugcaccgagagaucuaaaaaaaaaaaaaaaaaaaaaaaaaaaaaaaaaaaaaaaaaaaaaaaaaaaaaaaaaaaaaaaaaaaaaaaaaaaaaaaaaaaaaaaaaaaaaaaaaaaa

SEQ ID NO: 25876 - RNA, 4005 nt, Artificial Sequence
  SARS-CoV-2/Wuhan/WIV05/2019__EPI_ISL_402128 spike protein mRNA gc (1-1273)(H69del_V70del_Y453F_D614G_I692V_M1229I)
aggagaaagcuuaccauguucguguuccuggugcugcugccccuggugagcagccagugcgugaaccugaccacccggacccagcugccaccagccuacaccaacagcuucacccggggcgucuacuaccccgacaagguguuccggagcagcguccugcacagcacccaggaccuguuccugcccuucuucagcaacgugaccugguuccacgccaucagcggcaccaacggcaccaagcgguucgacaaccccgugcugcccuucaacgacggcguguacuucgccagcaccgagaagagcaacaucauccggggcuggaucuucggcaccacccuggacagcaagacccagagccugcugaucgugaauaacgccaccaacguggugaucaaggugugcgaguuccaguucugcaacgaccccuuccugggcguguacuaccacaagaacaacaagagcuggauggagagcgaguuccggguguacagcagcgccaacaacugcaccuucgaguacgugagccagcccuuccugauggaccuggagggcaagcagggcaacuucaagaaccugcgggaguucguguucaagaacaucgacggcuacuucaagaucuacagcaagcacaccccaaucaaccuggugcgggaucugccccagggcuucucagcccuggagccccugguggaccugcccaucggcaucaacaucacccgguuccagacccugcuggcccugcaccggagcuaccugaccccaggcgacagcagcagcggguggacagcaggcgcggcugcuuacuacgugggcuaccugcagccccggaccuuccugcugaaguacaacgagaacggcaccaucaccgacgccguggacugcgcccuggacccucugagcgagaccaagugcacccugaagagcuucaccguggagaagggcaucuaccagaccagcaacuuccgggugcagcccaccgagagcaucgugcgguuccccaacaucaccaaccugugccccuucggcgagguguucaacgccacccgguucgccagcguguacgccuggaaccggaagcggaucagcaacugcguggccgacuacagcgugcuguacaacagcgccagcuucagcaccuucaagugcuacggcgugagccccaccaagcugaacgaccugugcuucaccaacguguacgccgacagcuucgugauccguggcgacgaggugcggcagaucgcacccggccagacaggcaagaucgccgacuacaacuacaagcugcccgacgacuucaccggcugcgugaucgccuggaacagcaacaaccucgacagcaaggugggcggcaacuacaacuaccuguuccggcuguuccggaagagcaaccugaagcccuucgagcgggacaucagcaccgagaucuaccaagccggcuccaccccuugcaacggcguggagggcuucaacugcuacuucccucugcagagcuacggcuuccagcccaccaacggcgugggcuaccagcccuaccgggugguggugcugagcuucgagcugcugcacgccccagccaccguguguggccccaagaagagcaccaaccuggugaagaacaagugcgugaacuucaacuucaacggccuuaccggcaccggcgugcugaccgagagcaacaagaaauuccugcccuuucagcaguucggccgggacaucgccgacaccaccgacgcugugcgggauccccagacccuggagauccuggacaucaccccuugcagcuucggcggcgugagcgugaucaccccaggcaccaacaccagcaaccagguggccgugcuguaccagggcgugaacugcaccgaggugcccguggccauccacgccgaccagcugacacccaccuggcgggucuacagcaccggcagcaacguguuccagacccgggccgguugccugaucggcgccgagcacgugaacaacagcuacgagugcgacauccccaucggcgccggcaucugugccagcuaccagacccagaccaauucaccccggagggcaaggagcguggccagccagagcgugaucgccuacaccaugagccugggcgccgagaacagcguggccuacagcaacaacagcaucgccauccccaccaacuucaccaucagcgugaccaccgagauucugcccgugagcaugaccaagaccagcguggacugcaccauguacaucugcggcgacagcaccgagugcagcaaccugcugcugcaguacggcagcuucugcacccagcugaaccgggcccugaccggcaucgccguggagcaggacaagaacacccaggagguguucgcccaggugaagcagaucuacaagaccccucccaucaaggacuucggcggcuucaacuucagccagauccugcccgaccccagcaagcccagcaagcggagcuucaucgaggaccugcuguucaacaaggugacccuagccgacgccggcuucaucaagcaguacggcgacugccucggcgacauagccgcccgggaccugaucugcgcccagaaguucaacggccugaccgugcugccuccccugcugaccgacgagaugaucgcccaguacaccagcgcccuguuagccggaaccaucaccagcggcuggacuuucggcgcuggagccgcucugcagauccccuucgccaugcagauggccuaccgguucaacggcaucggcgugacccagaacgugcuguacgagaaccagaagcugaucgccaaccaguucaacagcgccaucggcaagauccaggacagccugagcagcaccgcuagcgcccugggcaagcugcaggacguggugaaccagaacgcccaggcccugaacacccuggugaagcagcugagcagcaacuucggcgccaucagcagcgugcugaacgacauccugagccggcuggacaaggucgaggccgaggugcagaucgaccggcugaucacuggccggcugcagagccugcagaccuacgugacccagcagcugauccgggccgccgagauucgggccagcgccaaccuggccgccaccaagaugagcgagugcgugcugggccagagcaagcggguggacuucugcggcaagggcuaccaccugaugagcuuuccccagagcgcaccccacggagugguguuccugcacgugaccuacgugcccgcccaggagaagaacuucaccaccgccccagccaucugccacgacggcaaggcccacuuuccccgggagggcguguucgugagcaacggcacccacugguucgugacccagcggaacuucuacgagccccagaucaucaccaccgacaacaccuucgugagcggcaacugcgacguggugaucggcaucgugaacaacaccguguacgauccccugcagcccgagcuggacagcuucaaggaggagcuggacaaguacuucaagaaucacaccagccccgacguggaccugggcgacaucagcggcaucaacgccagcguggugaacauccagaaggagaucgaucggcugaacgagguggccaagaaccugaacgagagccugaucgaccugcaggagcugggcaaguacgagcaguacaucaaguggcccugguacaucuggcugggcuucaucgccggccugaucgccaucgugaucgugaccaucaugcugugcugcaugaccagcugcugcagcugccugaagggcuguugcagcugcggcagcugcugcaaguucgacgaggacgacagcgagcccgugcugaagggcgugaagcugcacuacaccugaggacuaguuauaagacugacuagcccgaugggccucccaacgggcccuccuccccuccuugcaccgagagaucuaaaaaaaaaaaaaaaaaaaaaaaaaaaaaaaaaaaaaaaaaaaaaaaaaaaaaaaaaaaaaaaaaaaaaaaaaaaaaaaaaaaaaaaaaaaaaaaaaaaa

SEQ ID NO: 25877 - RNA, 4002 nt, Artificial Sequence
  SARS-CoV-2/Wuhan/WIV05/2019__EPI_ISL_402128 spike protein mRNA gc (1-1273)(H69del_V70del_Y144del_N501Y_A570D_D614G_P681H_T716I_S982 A_D1118H)
aggagaaagcuuaccauguucguguuccuggugcugcugccccuggugagcagccagugcgugaaccugaccacccggacccagcugccaccagccuacaccaacagcuucacccggggcgucuacuaccccgacaagguguuccggagcagcguccugcacagcacccaggaccuguuccugcccuucuucagcaacgugaccugguuccacgccaucagcggcaccaacggcaccaagcgguucgacaaccccgugcugcccuucaacgacggcguguacuucgccagcaccgagaagagcaacaucauccggggcuggaucuucggcaccacccuggacagcaagacccagagccugcugaucgugaauaacgccaccaacguggugaucaaggugugcgaguuccaguucugcaacgaccccuuccugggcguguaccacaagaacaacaagagcuggauggagagcgaguuccggguguacagcagcgccaacaacugcaccuucgaguacgugagccagcccuuccugauggaccuggagggcaagcagggcaacuucaagaaccugcgggaguucguguucaagaacaucgacggcuacuucaagaucuacagcaagcacaccccaaucaaccuggugcgggaucugccccagggcuucucagcccuggagccccugguggaccugcccaucggcaucaacaucacccgguuccagacccugcuggcccugcaccggagcuaccugaccccaggcgacagcagcagcggguggacagcaggcgcggcugcuuacuacgugggcuaccugcagccccggaccuuccugcugaaguacaacgagaacggcaccaucaccgacgccguggacugcgcccuggacccucugagcgagaccaagugcacccugaagagcuucaccguggagaagggcaucuaccagaccagcaacuuccgggugcagcccaccgagagcaucgugcgguuccccaacaucaccaaccugugccccuucggcgagguguucaacgccacccgguucgccagcguguacgccuggaaccggaagcggaucagcaacugcguggccgacuacagcgugcuguacaacagcgccagcuucagcaccuucaagugcuacggcgugagccccaccaagcugaacgaccugugcuucaccaacguguacgccgacagcuucgugauccguggcgacgaggugcggcagaucgcacccggccagacaggcaagaucgccgacuacaacuacaagcugcccgacgacuucaccggcugcgugaucgccuggaacagcaacaaccucgacagcaaggugggcggcaacuacaacuaccuguaccggcuguuccggaagagcaaccugaagcccuucgagcgggacaucagcaccgagaucuaccaagccggcuccaccccuugcaacggcguggagggcuucaacugcuacuucccucugcagagcuacggcuuccagcccaccuacggcgugggcuaccagcccuaccgggugguggugcugagcuucgagcugcugcacgccccagccaccguguguggccccaagaagagcaccaaccuggugaagaacaagugcgugaacuucaacuucaacggccuuaccggcaccggcgugcugaccgagagcaacaagaaauuccugcccuuucagcaguucggccgggacaucgacgacaccaccgacgcugugcgggauccccagacccuggagauccuggacaucaccccuugcagcuucggcggcgugagcgugaucaccccaggcaccaacaccagcaaccagguggccgugcuguaccagggcgugaacugcaccgaggugcccguggccauccacgccgaccagcugacacccaccuggcgggucuacagcaccggcagcaacguguuccagacccgggccgguugccugaucggcgccgagcacgugaacaacagcuacgagugcgacauccccaucggcgccggcaucugugccagcuaccagacccagaccaauucacaccggagggcaaggagcguggccagccagagcaucaucgccuacaccaugagccugggcgccgagaacagcguggccuacagcaacaacagcaucgccauccccaucaacuucaccaucagcgugaccaccgagauucugcccgugagcaugaccaagaccagcguggacugcaccauguacaucugcggcgacagcaccgagugcagcaaccugcugcugcaguacggcagcuucugcacccagcugaaccgggcccugaccggcaucgccguggagcaggacaagaacacccaggagguguucgcccaggugaagcagaucuacaagaccccucccaucaaggacuucggcggcuucaacuucagccagauccugcccgaccccagcaagcccagcaagcggagcuucaucgaggaccugcuguucaacaaggugacccuagccgacgccggcuucaucaagcaguacggcgacugccucggcgacauagccgcccgggaccugaucugcgcccagaaguucaacggccugaccgugcugccuccccugcugaccgacgagaugaucgcccaguacaccagcgcccuguuagccggaaccaucaccagcggcuggacuuucggcgcuggagccgcucugcagauccccuucgccaugcagauggccuaccgguucaacggcaucggcgugacccagaacgugcuguacgagaaccagaagcugaucgccaaccaguucaacagcgccaucggcaagauccaggacagccugagcagcaccgcuagcgcccugggcaagcugcaggacguggugaaccagaacgcccaggcccugaacacccuggugaagcagcugagcagcaacuucggcgccaucagcagcgugcugaacgacauccuggcccggcuggacaaggucgaggccgaggugcagaucgaccggcugaucacuggccggcugcagagccugcagaccuacgugacccagcagcugauccgggccgccgagauucgggccagcgccaaccuggccgccaccaagaugagcgagugcgugcugggccagagcaagcggguggacuucugcggcaagggcuaccaccugaugagcuuuccccagagcgcaccccacggagugguguuccugcacgugaccuacgugcccgcccaggagaagaacuucaccaccgccccagccaucugccacgacggcaaggcccacuuuccccgggagggcguguucgugagcaacggcacccacugguucgugacccagcggaacuucuacgagccccagaucaucaccacccacaacaccuucgugagcggcaacugcgacguggugaucggcaucgugaacaacaccguguacgauccccugcagcccgagcuggacagcuucaaggaggagcuggacaaguacuucaagaaucacaccagccccgacguggaccugggcgacaucagcggcaucaacgccagcguggugaacauccagaaggagaucgaucggcugaacgagguggccaagaaccugaacgagagccugaucgaccugcaggagcugggcaaguacgagcaguacaucaaguggcccugguacaucuggcugggcuucaucgccggccugaucgccaucgugauggugaccaucaugcugugcugcaugaccagcugcugcagcugccugaagggcuguugcagcugcggcagcugcugcaaguucgacgaggacgacagcgagcccgugcugaagggcgugaagcugcacuacaccugaggacuaguuauaagacugacuagcccgaugggccucccaacgggcccuccuccccuccuugcaccgagagaucuaaaaaaaaaaaaaaaaaaaaaaaaaaaaaaaaaaaaaaaaaaaaaaaaaaaaaaaaaaaaaaaaaaaaaaaaaaaaaaaaaaaaaaaaaaaaaaaaaaaa

SEQ ID NO: 25878 - RNA, 4011 nt, Artificial Sequence
  SARS-CoV-2/Wuhan/WIV05/2019__EPI_ISL_402128 spike protein mRNA gc (1-1273)(K417N_E484K_N501Y_D614G)
aggagaaagcuuaccauguucguguuccuggugcugcugccccuggugagcagccagugcgugaaccugaccacccggacccagcugccaccagccuacaccaacagcuucacccggggcgucuacuaccccgacaagguguuccggagcagcguccugcacagcacccaggaccuguuccugcccuucuucagcaacgugaccugguuccacgccauccacgugagcggcaccaacggcaccaagcgguucgacaaccccgugcugcccuucaacgacggcguguacuucgccagcaccgagaagagcaacaucauccggggcuggaucuucggcaccacccuggacagcaagacccagagccugcugaucgugaauaacgccaccaacguggugaucaaggugugcgaguuccaguucugcaacgaccccuuccugggcguguacuaccacaagaacaacaagagcuggauggagagcgaguuccggguguacagcagcgccaacaacugcaccuucgaguacgugagccagcccuuccugauggaccuggagggcaagcagggcaacuucaagaaccugcgggaguucguguucaagaacaucgacggcuacuucaagaucuacagcaagcacaccccaaucaaccuggugcgggaucugccccagggcuucucagcccuggagccccugguggaccugcccaucggcaucaacaucacccgguuccagacccugcuggcccugcaccggagcuaccugaccccaggcgacagcagcagcggguggacagcaggcgcggcugcuuacuacgugggcuaccugcagccccggaccuuccugcugaaguacaacgagaacggcaccaucaccgacgccguggacugcgcccuggacccucugagcgagaccaagugcacccugaagagcuucaccguggagaagggcaucuaccagaccagcaacuuccgggugcagcccaccgagagcaucgugcgguuccccaacaucaccaaccugugccccuucggcgagguguucaacgccacccgguucgccagcguguacgccuggaaccggaagcggaucagcaacugcguggccgacuacagcgugcuguacaacagcgccagcuucagcaccuucaagugcuacggcgugagccccaccaagcugaacgaccugugcuucaccaacguguacgccgacagcuucgugauccguggcgacgaggugcggcagaucgcacccggccagacaggcaacaucgccgacuacaacuacaagcugcccgacgacuucaccggcugcgugaucgccuggaacagcaacaaccucgacagcaaggugggcggcaacuacaacuaccuguaccggcuguuccggaagagcaaccugaagcccuucgagcgggacaucagcaccgagaucuaccaagccggcuccaccccuugcaacggcgugaagggcuucaacugcuacuucccucugcagagcuacggcuuccagcccaccuacggcgugggcuaccagcccuaccgggugguggugcugagcuucgagcugcugcacgccccagccaccguguguggccccaagaagagcaccaaccuggugaagaacaagugcgugaacuucaacuucaacggccuuaccggcaccggcgugcugaccgagagcaacaagaaauuccugcccuuucagcaguucggccgggacaucgccgacaccaccgacgcugugcgggauccccagacccuggagauccuggacaucaccccuugcagcuucggcggcgugagcgugaucaccccaggcaccaacaccagcaaccagguggccgugcuguaccagggcgugaacugcaccgaggugcccguggccauccacgccgaccagcugacacccaccuggcgggucuacagcaccggcagcaacguguuccagacccgggccgguugccugaucggcgccgagcacgugaacaacagcuacgagugcgacauccccaucggcgccggcaucugugccagcuaccagacccagaccaauucaccccggagggcaaggagcguggccagccagagcaucaucgccuacaccaugagccugggcgccgagaacagcguggccuacagcaacaacagcaucgccauccccaccaacuucaccaucagcgugaccaccgagauucugcccgugagcaugaccaagaccagcguggacugcaccauguacaucugcggcgacagcaccgagugcagcaaccugcugcugcaguacggcagcuucugcacccagcugaaccgggcccugaccggcaucgccguggagcaggacaagaacacccaggagguguucgcccaggugaagcagaucuacaagaccccucccaucaaggacuucggcggcuucaacuucagccagauccugcccgaccccagcaagcccagcaagcggagcuucaucgaggaccugcuguucaacaaggugacccuagccgacgccggcuucaucaagcaguacggcgacugccucggcgacauagccgcccgggaccugaucugcgcccagaaguucaacggccugaccgugcugccuccccugcugaccgacgagaugaucgcccaguacaccagcgcccuguuagccggaaccaucaccagcggcuggacuuucggcgcuggagccgcucugcagauccccuucgccaugcagauggccuaccgguucaacggcaucggcgugacccagaacgugcuguacgagaaccagaagcugaucgccaaccaguucaacagcgccaucggcaagauccaggacagccugagcagcaccgcuagcgcccugggcaagcugcaggacguggugaaccagaacgcccaggcccugaacacccuggugaagcagcugagcagcaacuucggcgccaucagcagcgugcugaacgacauccugagccggcuggacaaggucgaggccgaggugcagaucgaccggcugaucacuggccggcugcagagccugcagaccuacgugacccagcagcugauccgggccgccgagauucgggccagcgccaaccuggccgccaccaagaugagcgagugcgugcugggccagagcaagcggguggacuucugcggcaagggcuaccaccugaugagcuuuccccagagcgcaccccacggagugguguuccugcacgugaccuacgugcccgcccaggagaagaacuucaccaccgccccagccaucugccacgacggcaaggcccacuuuccccgggagggcguguucgugagcaacggcacccacugguucgugacccagcggaacuucuacgagccccagaucaucaccaccgacaacaccuucgugagcggcaacugcgacguggugaucggcaucgugaacaacaccguguacgauccccugcagcccgagcuggacagcuucaaggaggagcuggacaaguacuucaagaaucacaccagccccgacguggaccugggcgacaucagcggcaucaacgccagcguggugaacauccagaaggagaucgaucggcugaacgagguggccaagaaccugaacgagagccugaucgaccugcaggagcugggcaaguacgagcaguacaucaaguggcccugguacaucuggcugggcuucaucgccggccugaucgccaucgugauggugaccaucaugcugugcugcaugaccagcugcugcagcugccugaagggcuguugcagcugcggcagcugcugcaaguucgacgaggacgacagcgagcccgugcugaagggcgugaagcugcacuacaccugaggacuaguuauaagacugacuagcccgaugggccucccaacgggcccuccuccccuccuugcaccgagagaucuaaaaaaaaaaaaaaaaaaaaaaaaaaaaaaaaaaaaaaaaaaaaaaaaaaaaaaaaaaaaaaaaaaaaaaaaaaaaaaaaaaaaaaaaaaaaaaaaaaaa

SEQ ID NO: 25879 - RNA, 4002 nt, Artificial Sequence
  SARS-CoV-2/Wuhan/WIV05/2019__EPI_ISL_402128 spike protein mRNA gc (1-1273)(L18F_D80A_D215G_L242del_A243del_L244del_R246I_K417N_E484 K_N501Y_D614G_A701V)
aggagaaagcuuaccauguucguguuccuggugcugcugccccuggugagcagccagugcgugaacuucaccacccggacccagcugccaccagccuacaccaacagcuucacccggggcgucuacuaccccgacaagguguuccggagcagcguccugcacagcacccaggaccuguuccugcccuucuucagcaacgugaccugguuccacgccauccacgugagcggcaccaacggcaccaagcgguucgccaaccccgugcugcccuucaacgacggcguguacuucgccagcaccgagaagagcaacaucauccggggcuggaucuucggcaccacccuggacagcaagacccagagccugcugaucgugaauaacgccaccaacguggugaucaaggugugcgaguuccaguucugcaacgaccccuuccugggcguguacuaccacaagaacaacaagagcuggauggagagcgaguuccggguguacagcagcgccaacaacugcaccuucgaguacgugagccagcccuuccugauggaccuggagggcaagcagggcaacuucaagaaccugcgggaguucguguucaagaacaucgacggcuacuucaagaucuacagcaagcacaccccaaucaaccuggugcggggccugccccagggcuucucagcccuggagccccugguggaccugcccaucggcaucaacaucacccgguuccagacccugcacaucagcuaccugaccccaggcgacagcagcagcggguggacagcaggcgcggcugcuuacuacgugggcuaccugcagccccggaccuuccugcugaaguacaacgagaacggcaccaucaccgacgccguggacugcgcccuggacccucugagcgagaccaagugcacccugaagagcuucaccguggagaagggcaucuaccagaccagcaacuuccgggugcagcccaccgagagcaucgugcgguuccccaacaucaccaaccugugccccuucggcgagguguucaacgccacccgguucgccagcguguacgccuggaaccggaagcggaucagcaacugcguggccgacuacagcgugcuguacaacagcgccagcuucagcaccuucaagugcuacggcgugagccccaccaagcugaacgaccugugcuucaccaacguguacgccgacagcuucgugauccguggcgacgaggugcggcagaucgcacccggccagacaggcaacaucgccgacuacaacuacaagcugcccgacgacuucaccggcugcgugaucgccuggaacagcaacaaccucgacagcaaggugggcggcaacuacaacuaccuguaccggcuguuccggaagagcaaccugaagcccuucgagcgggacaucagcaccgagaucuaccaagccggcuccaccccuugcaacggcgugaagggcuucaacugcuacuucccucugcagagcuacggcuuccagcccaccuacggcgugggcuaccagcccuaccgggugguggugcugagcuucgagcugcugcacgccccagccaccguguguggccccaagaagagcaccaaccuggugaagaacaagugcgugaacuucaacuucaacggccuuaccggcaccggcgugcugaccgagagcaacaagaaauuccugcccuuucagcaguucggccgggacaucgccgacaccaccgacgcugugcgggauccccagacccuggagauccuggacaucaccccuugcagcuucggcggcgugagcgugaucaccccaggcaccaacaccagcaaccagguggccgugcuguaccagggcgugaacugcaccgaggugcccguggccauccacgccgaccagcugacacccaccuggcgggucuacagcaccggcagcaacguguuccagacccgggccgguugccugaucggcgccgagcacgugaacaacagcuacgagugcgacauccccaucggcgccggcaucugugccagcuaccagacccagaccaauucaccccggagggcaaggagcguggccagccagagcaucaucgccuacaccaugagccugggcguggagaacagcguggccuacagcaacaacagcaucgccauccccaccaacuucaccaucagcgugaccaccgagauucugcccgugagcaugaccaagaccagcguggacugcaccauguacaucugcggcgacagcaccgagugcagcaaccugcugcugcaguacggcagcuucugcacccagcugaaccgggcccugaccggcaucgccguggagcaggacaagaacacccaggagguguucgcccaggugaagcagaucuacaagaccccucccaucaaggacuucggcggcuucaacuucagccagauccugcccgaccccagcaagcccagcaagcggagcuucaucgaggaccugcuguucaacaaggugacccuagccgacgccggcuucaucaagcaguacggcgacugccucggcgacauagccgcccgggaccugaucugcgcccagaaguucaacggccugaccgugcugccuccccugcugaccgacgagaugaucgcccaguacaccagcgcccuguuagccggaaccaucaccagcggcuggacuuucggcgcuggagccgcucugcagauccccuucgccaugcagauggccuaccgguucaacggcaucggcgugacccagaacgugcuguacgagaaccagaagcugaucgccaaccaguucaacagcgccaucggcaagauccaggacagccugagcagcaccgcuagcgcccugggcaagcugcaggacguggugaaccagaacgcccaggcccugaacacccuggugaagcagcugagcagcaacuucggcgccaucagcagcgugcugaacgacauccugagccggcuggacaaggucgaggccgaggugcagaucgaccggcugaucacuggccggcugcagagccugcagaccuacgugacccagcagcugauccgggccgccgagauucgggccagcgccaaccuggccgccaccaagaugagcgagugcgugcugggccagagcaagcggguggacuucugcggcaagggcuaccaccugaugagcuuuccccagagcgcaccccacggagugguguuccugcacgugaccuacgugcccgcccaggagaagaacuucaccaccgccccagccaucugccacgacggcaaggcccacuuuccccgggagggcguguucgugagcaacggcacccacugguucgugacccagcggaacuucuacgagccccagaucaucaccaccgacaacaccuucgugagcggcaacugcgacguggugaucggcaucgugaacaacaccguguacgauccccugcagcccgagcuggacagcuucaaggaggagcuggacaaguacuucaagaaucacaccagccccgacguggaccugggcgacaucagcggcaucaacgccagcguggugaacauccagaaggagaucgaucggcugaacgagguggccaagaaccugaacgagagccugaucgaccugcaggagcugggcaaguacgagcaguacaucaaguggcccugguacaucuggcugggcuucaucgccggccugaucgccaucgugauggugaccaucaugcugugcugcaugaccagcugcugcagcugccugaagggcuguugcagcugcggcagcugcugcaaguucgacgaggacgacagcgagcccgugcugaagggcgugaagcugcacuacaccugaggacuaguuauaagacugacuagcccgaugggccucccaacgggcccuccuccccuccuugcaccgagagaucuaaaaaaaaaaaaaaaaaaaaaaaaaaaaaaaaaaaaaaaaaaaaaaaaaaaaaaaaaaaaaaaaaaaaaaaaaaaaaaaaaaaaaaaaaaaaaaaaaaaa

SEQ ID NO: 25880 - RNA, 4011 nt, Artificial Sequence
  SARS-CoV-2/Wuhan/WIV05/2019__EPI_ISL_402128 spike protein mRNA gc (1-1273)(E484K_D614G)
aggagaaagcuuaccauguucguguuccuggugcugcugccccuggugagcagccagugcgugaaccugaccacccggacccagcugccaccagccuacaccaacagcuucacccggggcgucuacuaccccgacaagguguuccggagcagcguccugcacagcacccaggaccuguuccugcccuucuucagcaacgugaccugguuccacgccauccacgugagcggcaccaacggcaccaagcgguucgacaaccccgugcugcccuucaacgacggcguguacuucgccagcaccgagaagagcaacaucauccggggcuggaucuucggcaccacccuggacagcaagacccagagccugcugaucgugaauaacgccaccaacguggugaucaaggugugcgaguuccaguucugcaacgaccccuuccugggcguguacuaccacaagaacaacaagagcuggauggagagcgaguuccggguguacagcagcgccaacaacugcaccuucgaguacgugagccagcccuuccugauggaccuggagggcaagcagggcaacuucaagaaccugcgggaguucguguucaagaacaucgacggcuacuucaagaucuacagcaagcacaccccaaucaaccuggugcgggaucugccccagggcuucucagcccuggagccccugguggaccugcccaucggcaucaacaucacccgguuccagacccugcuggcccugcaccggagcuaccugaccccaggcgacagcagcagcggguggacagcaggcgcggcugcuuacuacgugggcuaccugcagccccggaccuuccugcugaaguacaacgagaacggcaccaucaccgacgccguggacugcgcccuggacccucugagcgagaccaagugcacccugaagagcuucaccguggagaagggcaucuaccagaccagcaacuuccgggugcagcccaccgagagcaucgugcgguuccccaacaucaccaaccugugccccuucggcgagguguucaacgccacccgguucgccagcguguacgccuggaaccggaagcggaucagcaacugcguggccgacuacagcgugcuguacaacagcgccagcuucagcaccuucaagugcuacggcgugagccccaccaagcugaacgaccugugcuucaccaacguguacgccgacagcuucgugauccguggcgacgaggugcggcagaucgcacccggccagacaggcaagaucgccgacuacaacuacaagcugcccgacgacuucaccggcugcgugaucgccuggaacagcaacaaccucgacagcaaggugggcggcaacuacaacuaccuguaccggcuguuccggaagagcaaccugaagcccuucgagcgggacaucagcaccgagaucuaccaagccggcuccaccccuugcaacggcgugaagggcuucaacugcuacuucccucugcagagcuacggcuuccagcccaccaacggcgugggcuaccagcccuaccgggugguggugcugagcuucgagcugcugcacgccccagccaccguguguggccccaagaagagcaccaaccuggugaagaacaagugcgugaacuucaacuucaacggccuuaccggcaccggcgugcugaccgagagcaacaagaaauuccugcccuuucagcaguucggccgggacaucgccgacaccaccgacgcugugcgggauccccagacccuggagauccuggacaucaccccuugcagcuucggcggcgugagcgugaucaccccaggcaccaacaccagcaaccagguggccgugcuguaccagggcgugaacugcaccgaggugcccguggccauccacgccgaccagcugacacccaccuggcgggucuacagcaccggcagcaacguguuccagacccgggccgguugccugaucggcgccgagcacgugaacaacagcuacgagugcgacauccccaucggcgccggcaucugugccagcuaccagacccagaccaauucaccccggagggcaaggagcguggccagccagagcaucaucgccuacaccaugagccugggcgccgagaacagcguggccuacagcaacaacagcaucgccauccccaccaacuucaccaucagcgugaccaccgagauucugcccgugagcaugaccaagaccagcguggacugcaccauguacaucugcggcgacagcaccgagugcagcaaccugcugcugcaguacggcagcuucugcacccagcugaaccgggcccugaccggcaucgccguggagcaggacaagaacacccaggagguguucgcccaggugaagcagaucuacaagaccccucccaucaaggacuucggcggcuucaacuucagccagauccugcccgaccccagcaagcccagcaagcggagcuucaucgaggaccugcuguucaacaaggugacccuagccgacgccggcuucaucaagcaguacggcgacugccucggcgacauagccgcccgggaccugaucugcgcccagaaguucaacggccugaccgugcugccuccccugcugaccgacgagaugaucgcccaguacaccagcgcccuguuagccggaaccaucaccagcggcuggacuuucggcgcuggagccgcucugcagauccccuucgccaugcagauggccuaccgguucaacggcaucggcgugacccagaacgugcuguacgagaaccagaagcugaucgccaaccaguucaacagcgccaucggcaagauccaggacagccugagcagcaccgcuagcgcccugggcaagcugcaggacguggugaaccagaacgcccaggcccugaacacccuggugaagcagcugagcagcaacuucggcgccaucagcagcgugcugaacgacauccugagccggcuggacaaggucgaggccgaggugcagaucgaccggcugaucacuggccggcugcagagccugcagaccuacgugacccagcagcugauccgggccgccgagauucgggccagcgccaaccuggccgccaccaagaugagcgagugcgugcugggccagagcaagcggguggacuucugcggcaagggcuaccaccugaugagcuuuccccagagcgcaccccacggagugguguuccugcacgugaccuacgugcccgcccaggagaagaacuucaccaccgccccagccaucugccacgacggcaaggcccacuuuccccgggagggcguguucgugagcaacggcacccacugguucgugacccagcggaacuucuacgagccccagaucaucaccaccgacaacaccuucgugagcggcaacugcgacguggugaucggcaucgugaacaacaccguguacgauccccugcagcccgagcuggacagcuucaaggaggagcuggacaaguacuucaagaaucacaccagccccgacguggaccugggcgacaucagcggcaucaacgccagcguggugaacauccagaaggagaucgaucggcugaacgagguggccaagaaccugaacgagagccugaucgaccugcaggagcugggcaaguacgagcaguacaucaaguggcccugguacaucuggcugggcuucaucgccggccugaucgccaucgugauggugaccaucaugcugugcugcaugaccagcugcugcagcugccugaagggcuguugcagcugcggcagcugcugcaaguucgacgaggacgacagcgagcccgugcugaagggcgugaagcugcacuacaccugaggacuaguuauaagacugacuagcccgaugggccucccaacgggcccuccuccccuccuugcaccgagagaucuaaaaaaaaaaaaaaaaaaaaaaaaaaaaaaaaaaaaaaaaaaaaaaaaaaaaaaaaaaaaaaaaaaaaaaaaaaaaaaaaaaaaaaaaaaaaaaaaaaaa

SEQ ID NO: 25881 - RNA, 4011 nt, Artificial Sequence
  SARS-CoV-2/Wuhan/WIV05/2019__EPI_ISL_402128 spike protein mRNA gc (1-1273)(L18F_T20N_P26S_D138Y_R190S_K417T_E484K_N501Y_D614G_H655Y _T1027I)
aggagaaagcuuaccauguucguguuccuggugcugcugccccuggugagcagccagugcgugaacuucaccaaccggacccagcugccaagcgccuacaccaacagcuucacccggggcgucuacuaccccgacaagguguuccggagcagcguccugcacagcacccaggaccuguuccugcccuucuucagcaacgugaccugguuccacgccauccacgugagcggcaccaacggcaccaagcgguucgacaaccccgugcugcccuucaacgacggcguguacuucgccagcaccgagaagagcaacaucauccggggcuggaucuucggcaccacccuggacagcaagacccagagccugcugaucgugaauaacgccaccaacguggugaucaaggugugcgaguuccaguucugcaacuaccccuuccugggcguguacuaccacaagaacaacaagagcuggauggagagcgaguuccggguguacagcagcgccaacaacugcaccuucgaguacgugagccagcccuuccugauggaccuggagggcaagcagggcaacuucaagaaccugagcgaguucguguucaagaacaucgacggcuacuucaagaucuacagcaagcacaccccaaucaaccuggugcgggaucugccccagggcuucucagcccuggagccccugguggaccugcccaucggcaucaacaucacccgguuccagacccugcuggcccugcaccggagcuaccugaccccaggcgacagcagcagcggguggacagcaggcgcggcugcuuacuacgugggcuaccugcagccccggaccuuccugcugaaguacaacgagaacggcaccaucaccgacgccguggacugcgcccuggacccucugagcgagaccaagugcacccugaagagcuucaccguggagaagggcaucuaccagaccagcaacuuccgggugcagcccaccgagagcaucgugcgguuccccaacaucaccaaccugugccccuucggcgagguguucaacgccacccgguucgccagcguguacgccuggaaccggaagcggaucagcaacugcguggccgacuacagcgugcuguacaacagcgccagcuucagcaccuucaagugcuacggcgugagccccaccaagcugaacgaccugugcuucaccaacguguacgccgacagcuucgugauccguggcgacgaggugcggcagaucgcacccggccagacaggcaccaucgccgacuacaacuacaagcugcccgacgacuucaccggcugcgugaucgccuggaacagcaacaaccucgacagcaaggugggcggcaacuacaacuaccuguaccggcuguuccggaagagcaaccugaagcccuucgagcgggacaucagcaccgagaucuaccaagccggcuccaccccuugcaacggcgugaagggcuucaacugcuacuucccucugcagagcuacggcuuccagcccaccuacggcgugggcuaccagcccuaccgggugguggugcugagcuucgagcugcugcacgccccagccaccguguguggccccaagaagagcaccaaccuggugaagaacaagugcgugaacuucaacuucaacggccuuaccggcaccggcgugcugaccgagagcaacaagaaauuccugcccuuucagcaguucggccgggacaucgccgacaccaccgacgcugugcgggauccccagacccuggagauccuggacaucaccccuugcagcuucggcggcgugagcgugaucaccccaggcaccaacaccagcaaccagguggccgugcuguaccagggcgugaacugcaccgaggugcccguggccauccacgccgaccagcugacacccaccuggcgggucuacagcaccggcagcaacguguuccagacccgggccgguugccugaucggcgccgaguacgugaacaacagcuacgagugcgacauccccaucggcgccggcaucugugccagcuaccagacccagaccaauucaccccggagggcaaggagcguggccagccagagcaucaucgccuacaccaugagccugggcgccgagaacagcguggccuacagcaacaacagcaucgccauccccaccaacuucaccaucagcgugaccaccgagauucugcccgugagcaugaccaagaccagcguggacugcaccauguacaucugcggcgacagcaccgagugcagcaaccugcugcugcaguacggcagcuucugcacccagcugaaccgggcccugaccggcaucgccguggagcaggacaagaacacccaggagguguucgcccaggugaagcagaucuacaagaccccucccaucaaggacuucggcggcuucaacuucagccagauccugcccgaccccagcaagcccagcaagcggagcuucaucgaggaccugcuguucaacaaggugacccuagccgacgccggcuucaucaagcaguacggcgacugccucggcgacauagccgcccgggaccugaucugcgcccagaaguucaacggccugaccgugcugccuccccugcugaccgacgagaugaucgcccaguacaccagcgcccuguuagccggaaccaucaccagcggcuggacuuucggcgcuggagccgcucugcagauccccuucgccaugcagauggccuaccgguucaacggcaucggcgugacccagaacgugcuguacgagaaccagaagcugaucgccaaccaguucaacagcgccaucggcaagauccaggacagccugagcagcaccgcuagcgcccugggcaagcugcaggacguggugaaccagaacgcccaggcccugaacacccuggugaagcagcugagcagcaacuucggcgccaucagcagcgugcugaacgacauccugagccggcuggacaaggucgaggccgaggugcagaucgaccggcugaucacuggccggcugcagagccugcagaccuacgugacccagcagcugauccgggccgccgagauucgggccagcgccaaccuggccgccaucaagaugagcgagugcgugcugggccagagcaagcggguggacuucugcggcaagggcuaccaccugaugagcuuuccccagagcgcaccccacggagugguguuccugcacgugaccuacgugcccgcccaggagaagaacuucaccaccgccccagccaucugccacgacggcaaggcccacuuuccccgggagggcguguucgugagcaacggcacccacugguucgugacccagcggaacuucuacgagccccagaucaucaccaccgacaacaccuucgugagcggcaacugcgacguggugaucggcaucgugaacaacaccguguacgauccccugcagcccgagcuggacagcuucaaggaggagcuggacaaguacuucaagaaucacaccagccccgacguggaccugggcgacaucagcggcaucaacgccagcguggugaacauccagaaggagaucgaucggcugaacgagguggccaagaaccugaacgagagccugaucgaccugcaggagcugggcaaguacgagcaguacaucaaguggcccugguacaucuggcugggcuucaucgccggccugaucgccaucgugauggugaccaucaugcugugcugcaugaccagcugcugcagcugccugaagggcuguugcagcugcggcagcugcugcaaguucgacgaggacgacagcgagcccgugcugaagggcgugaagcugcacuacaccugaggacuaguuauaagacugacuagcccgaugggccucccaacgggcccuccuccccuccuugcaccgagagaucuaaaaaaaaaaaaaaaaaaaaaaaaaaaaaaaaaaaaaaaaaaaaaaaaaaaaaaaaaaaaaaaaaaaaaaaaaaaaaaaaaaaaaaaaaaaaaaaaaaaa

SEQ ID NO: 25882 - RNA, 4011 nt, Artificial Sequence
  SARS-CoV-2/Wuhan/WIV05/2019__EPI_ISL_402128 spike protein mRNA gc (1-1273)(S13I_W152C_L452R_D614G)
aggagaaagcuuaccauguucguguuccuggugcugcugccccuggugagcauccagugcgugaaccugaccacccggacccagcugccaccagccuacaccaacagcuucacccggggcgucuacuaccccgacaagguguuccggagcagcguccugcacagcacccaggaccuguuccugcccuucuucagcaacgugaccugguuccacgccauccacgugagcggcaccaacggcaccaagcgguucgacaaccccgugcugcccuucaacgacggcguguacuucgccagcaccgagaagagcaacaucauccggggcuggaucuucggcaccacccuggacagcaagacccagagccugcugaucgugaauaacgccaccaacguggugaucaaggugugcgaguuccaguucugcaacgaccccuuccugggcguguacuaccacaagaacaacaagagcugcauggagagcgaguuccggguguacagcagcgccaacaacugcaccuucgaguacgugagccagcccuuccugauggaccuggagggcaagcagggcaacuucaagaaccugcgggaguucguguucaagaacaucgacggcuacuucaagaucuacagcaagcacaccccaaucaaccuggugcgggaucugccccagggcuucucagcccuggagccccugguggaccugcccaucggcaucaacaucacccgguuccagacccugcuggcccugcaccggagcuaccugaccccaggcgacagcagcagcggguggacagcaggcgcggcugcuuacuacgugggcuaccugcagccccggaccuuccugcugaaguacaacgagaacggcaccaucaccgacgccguggacugcgcccuggacccucugagcgagaccaagugcacccugaagagcuucaccguggagaagggcaucuaccagaccagcaacuuccgggugcagcccaccgagagcaucgugcgguuccccaacaucaccaaccugugccccuucggcgagguguucaacgccacccgguucgccagcguguacgccuggaaccggaagcggaucagcaacugcguggccgacuacagcgugcuguacaacagcgccagcuucagcaccuucaagugcuacggcgugagccccaccaagcugaacgaccugugcuucaccaacguguacgccgacagcuucgugauccguggcgacgaggugcggcagaucgcacccggccagacaggcaagaucgccgacuacaacuacaagcugcccgacgacuucaccggcugcgugaucgccuggaacagcaacaaccucgacagcaaggugggcggcaacuacaacuaccgcuaccggcuguuccggaagagcaaccugaagcccuucgagcgggacaucagcaccgagaucuaccaagccggcuccaccccuugcaacggcguggagggcuucaacugcuacuucccucugcagagcuacggcuuccagcccaccaacggcgugggcuaccagcccuaccgggugguggugcugagcuucgagcugcugcacgccccagccaccguguguggccccaagaagagcaccaaccuggugaagaacaagugcgugaacuucaacuucaacggccuuaccggcaccggcgugcugaccgagagcaacaagaaauuccugcccuuucagcaguucggccgggacaucgccgacaccaccgacgcugugcgggauccccagacccuggagauccuggacaucaccccuugcagcuucggcggcgugagcgugaucaccccaggcaccaacaccagcaaccagguggccgugcuguaccagggcgugaacugcaccgaggugcccguggccauccacgccgaccagcugacacccaccuggcgggucuacagcaccggcagcaacguguuccagacccgggccgguugccugaucggcgccgagcacgugaacaacagcuacgagugcgacauccccaucggcgccggcaucugugccagcuaccagacccagaccaauucaccccggagggcaaggagcguggccagccagagcaucaucgccuacaccaugagccugggcgccgagaacagcguggccuacagcaacaacagcaucgccauccccaccaacuucaccaucagcgugaccaccgagauucugcccgugagcaugaccaagaccagcguggacugcaccauguacaucugcggcgacagcaccgagugcagcaaccugcugcugcaguacggcagcuucugcacccagcugaaccgggcccugaccggcaucgccguggagcaggacaagaacacccaggagguguucgcccaggugaagcagaucuacaagaccccucccaucaaggacuucggcggcuucaacuucagccagauccugcccgaccccagcaagcccagcaagcggagcuucaucgaggaccugcuguucaacaaggugacccuagccgacgccggcuucaucaagcaguacggcgacugccucggcgacauagccgcccgggaccugaucugcgcccagaaguucaacggccugaccgugcugccuccccugcugaccgacgagaugaucgcccaguacaccagcgcccuguuagccggaaccaucaccagcggcuggacuuucggcgcuggagccgcucugcagauccccuucgccaugcagauggccuaccgguucaacggcaucggcgugacccagaacgugcuguacgagaaccagaagcugaucgccaaccaguucaacagcgccaucggcaagauccaggacagccugagcagcaccgcuagcgcccugggcaagcugcaggacguggugaaccagaacgcccaggcccugaacacccuggugaagcagcugagcagcaacuucggcgccaucagcagcgugcugaacgacauccugagccggcuggacaaggucgaggccgaggugcagaucgaccggcugaucacuggccggcugcagagccugcagaccuacgugacccagcagcugauccgggccgccgagauucgggccagcgccaaccuggccgccaccaagaugagcgagugcgugcugggccagagcaagcggguggacuucugcggcaagggcuaccaccugaugagcuuuccccagagcgcaccccacggagugguguuccugcacgugaccuacgugcccgcccaggagaagaacuucaccaccgccccagccaucugccacgacggcaaggcccacuuuccccgggagggcguguucgugagcaacggcacccacugguucgugacccagcggaacuucuacgagccccagaucaucaccaccgacaacaccuucgugagcggcaacugcgacguggugaucggcaucgugaacaacaccguguacgauccccugcagcccgagcuggacagcuucaaggaggagcuggacaaguacuucaagaaucacaccagccccgacguggaccugggcgacaucagcggcaucaacgccagcguggugaacauccagaaggagaucgaucggcugaacgagguggccaagaaccugaacgagagccugaucgaccugcaggagcugggcaaguacgagcaguacaucaaguggcccugguacaucuggcugggcuucaucgccggccugaucgccaucgugauggugaccaucaugcugugcugcaugaccagcugcugcagcugccugaagggcuguugcagcugcggcagcugcugcaaguucgacgaggacgacagcgagcccgugcugaagggcgugaagcugcacuacaccugaggacuaguuauaagacugacuagcccgaugggccucccaacgggcccuccuccccuccuugcaccgagagaucuaaaaaaaaaaaaaaaaaaaaaaaaaaaaaaaaaaaaaaaaaaaaaaaaaaaaaaaaaaaaaaaaaaaaaaaaaaaaaaaaaaaaaaaaaaaaaaaaaaaa

SEQ ID NO: 25883 - RNA, 4011 nt, Artificial Sequence
  SARS-CoV-2/Wuhan/WIV05/2019__EPI_ISL_402128 spike protein mRNA gc (1-1273)
aggagaaagcuuaccauguucguguuccuggugcugcugccccuggugagcagccagugcgugaaccugaccacccggacccagcugcccccugccuacaccaacagcuucacccggggcguguacuaccccgacaagguguuccggagcagcgugcugcacagcacccaggaccuguuccugcccuucuucagcaacgugaccugguuccacgccauccacgugagcggcaccaacggcaccaagcgguucgacaacccagugcugcccuucaacgacggcguguacuucgccagcaccgagaagucaaacaucauccggggcuggaucuucggcaccacccuggacagcaagacacagagccugcugaucgugaacaacgccaccaacguggugaucaaggugugcgaguuucaguucugcaacgaccccuuccugggcguguacuaccacaagaacaacaagagcuggauggagagcgaguuccgggucuacagcagcgcuaacaauugcaccuucgaguacgugagccagcccuuccugauggaccucgagggcaagcagggcaacuucaagaaccugcgggaguucguguucaagaacaucgauggcuacuucaagaucuacagcaagcacacccccaucaaccuggugcgggaccugccccagggauucagcgcccuggagccucugguggaccugcccaucggcaucaacaucaccagguuccagacccugcuggcccugcaccggagcuaccugacccccggcgacagcagcagcggcuggaccgccggcgccgccgcauacuacgugggcuaccugcagccacggaccuuccugcugaaguacaacgagaacggcaccaucaccgacgccguggacugcgcccuggacccccugagcgagaccaagugcacccuaaagagcuucaccguggagaagggcaucuaccagaccagcaacuuccgggugcagcccacugagagcaucgugcgguuccccaacauuaccaaccugugucccuucggcgagguguucaacgccacccgguucgccagcguguacgccuggaaccggaagcggaucagcaacugcguggccgacuacagcgugcuguacaacagcgccagcuucagcaccuucaagugcuacggcgugagcccuaccaagcugaacgaccugugcuucaccaacguguacgcugacagcuucgugauccggggcgacgaggugcggcagaucgcccccggccagaccggcaagaucgccgacuacaacuacaagcugcccgacgacuucaccggcugcgugaucgccuggaacagcaacaaccuggacagcaaggugggcggcaacuacaacuaccuguaccggcuguuccguaagagcaaccugaagccauucgagcgggacaucagcaccgagaucuaccaggccggcagcacccccugcaacgguguggagggcuuuaacugcuacuucccccugcagagcuacggcuuccagcccaccaacggcgugggcuaccagcccuaccgggugguggugcugagcuucgagcugcugcacgcccccgccaccgugugcggcccuaaaaagagcaccaaccuggugaagaacaagugcgugaacuucaauuucaacggccugaccggcaccggcgugcugaccgagagcaacaagaaguuccugcccuuccagcaguucggccgggauaucgccgacaccaccgacgcagugcgggacccccagacccuggagauccuggacaucaccccaugcagcuucggcggcgugagcgucaucacccccggcacaaacaccagcaaccagguggccgugcuguaccaggacgugaacugcaccgaggugcccguggccauccacgccgaccagcugacccccaccuggcggguguacagcaccggaagcaacguguuccagacccgggccggcugccugaucggcgccgagcacgugaacaacuccuacgagugcgacauccccaucggcgcuggcaucugcgccagcuaccagacccagaccaacagcccccggcgggcccggagcguggccagccagagcaucaucgccuacaccaugagcuuaggcgccgagaacagcguggccuacagcaacaacagcaucgcgaucccuaccaacuucaccaucagcgugaccaccgagauacugcccgugagcaugaccaagaccagcguggacuguaccauguacaucugcggcgacagcaccgagugcagcaaccugcugcugcaguacggcagcuucugcacccagcugaaccgggcccugaccggcaucgccguggagcaggacaagaacacccaagagguguucgcccaggugaagcagaucuacaagacucccccaaucaaggacuucggcggcuucaacuucagccagauccugcccgaccccagcaagcccagcaagcggagcuucaucgaggaccugcuguucaacaaggugacccuggccgacgccggcuucaucaagcaguacggcgauugccugggcgacaucgccgcucgggaccugaucugcgcccagaaguucaacgggcugaccgugcugcccccucugcugaccgacgagaugaucgcccaguacaccagcgcccugcuugccggcaccaucaccagcggcuggaccuucggcgccggcgcagcccugcagauccccuucgccaugcagauggccuaccgguucaacggcaucggcgugacccagaacgugcuguacgagaaccagaagcugaucgccaaccaguucaacagcgccaucggcaagauccaggacagccugagcagcaccgccagcgcccugggcaagcugcaggacguggugaaccagaacgcucaggcccugaacacccuggugaagcagcugagcagcaacuucggcgccaucagcucagugcugaaugacauccugagcaggcuggacaagguggaggccgaggugcagaucgaccggcugaucaccggccggcugcagagccugcagaccuacgugacccagcagcugauccgggccgccgagauccgggccagcgccaaccuggcagccaccaagaugagcgagugcgugcugggccagagcaagcggguggacuuuugcggcaagggcuaccaccugaugagcuucccccagagcgccccacacggcgugguguuccuccacgucacauacgugcccgcccaggagaagaacuucaccaccgcccccgccauuugccacgacggcaaggcucacuucccccgggagggcguguucgugagcaacggaacccacugguucgugacccagcggaacuucuacgagccccagaucaucaccaccgacaacaccuucgugagcggcaacugcgacguggugaucggcaucgugaacaacaccguguacgacccccugcagccugagcuggacagcuucaaggaggagcuggacaaguacuucaagaaccacaccagccccgauguggaccugggcgacaucagcggcaucaacgccagcguggugaacauccagaaggagaucgaccggcugaacgagguggccaagaaccugaacgagagccugaucgaccugcaggagcugggcaaguacgagcaguacaucaaguggcccugguacaucuggcugggcuucaucgccggccugaucgccaucgugauggugaccaucaugcugugcugcaugaccagcugcuguagcugccugaagggcugcugcagcugcggcagcugcugcaaguucgacgaggacgacagcgagccagugcugaagggcgugaagcugcacuacaccugaggacuaguuauaagacugacuagcccgaugggccucccaacgggcccuccuccccuccuugcaccgagagaucuaaaaaaaaaaaaaaaaaaaaaaaaaaaaaaaaaaaaaaaaaaaaaaaaaaaaaaaaaaaaaaaaaaaaaaaaaaaaaaaaaaaaaaaaaaaaaaaaaaaa

SEQ ID NO: 25884 - RNA, 4011 nt, Artificial Sequence
  SARS-CoV-2/Wuhan/WIV05/2019__EPI_ISL_402128 spike protein mRNA gc (1-1273)(D614G)
aggagaaagcuuaccauguucguguuccuggugcugcugccccuggugagcagccagugcgugaaccugaccacccggacccagcugcccccugccuacaccaacagcuucacccggggcguguacuaccccgacaagguguuccggagcagcgugcugcacagcacccaggaccuguuccugcccuucuucagcaacgugaccugguuccacgccauccacgugagcggcaccaacggcaccaagcgguucgacaacccagugcugcccuucaacgacggcguguacuucgccagcaccgagaagucaaacaucauccggggcuggaucuucggcaccacccuggacagcaagacacagagccugcugaucgugaacaacgccaccaacguggugaucaaggugugcgaguuucaguucugcaacgaccccuuccugggcguguacuaccacaagaacaacaagagcuggauggagagcgaguuccgggucuacagcagcgcuaacaauugcaccuucgaguacgugagccagcccuuccugauggaccucgagggcaagcagggcaacuucaagaaccugcgggaguucguguucaagaacaucgauggcuacuucaagaucuacagcaagcacacccccaucaaccuggugcgggaccugccccagggauucagcgcccuggagccucugguggaccugcccaucggcaucaacaucaccagguuccagacccugcuggcccugcaccggagcuaccugacccccggcgacagcagcagcggcuggaccgccggcgccgccgcauacuacgugggcuaccugcagccacggaccuuccugcugaaguacaacgagaacggcaccaucaccgacgccguggacugcgcccuggacccccugagcgagaccaagugcacccuaaagagcuucaccguggagaagggcaucuaccagaccagcaacuuccgggugcagcccacugagagcaucgugcgguuccccaacauuaccaaccugugucccuucggcgagguguucaacgccacccgguucgccagcguguacgccuggaaccggaagcggaucagcaacugcguggccgacuacagcgugcuguacaacagcgccagcuucagcaccuucaagugcuacggcgugagcccuaccaagcugaacgaccugugcuucaccaacguguacgcugacagcuucgugauccggggcgacgaggugcggcagaucgcccccggccagaccggcaagaucgccgacuacaacuacaagcugcccgacgacuucaccggcugcgugaucgccuggaacagcaacaaccuggacagcaaggugggcggcaacuacaacuaccuguaccggcuguuccguaagagcaaccugaagccauucgagcgggacaucagcaccgagaucuaccaggccggcagcacccccugcaacgguguggagggcuuuaacugcuacuucccccugcagagcuacggcuuccagcccaccaacggcgugggcuaccagcccuaccgggugguggugcugagcuucgagcugcugcacgcccccgccaccgugugcggcccuaaaaagagcaccaaccuggugaagaacaagugcgugaacuucaauuucaacggccugaccggcaccggcgugcugaccgagagcaacaagaaguuccugcccuuccagcaguucggccgggauaucgccgacaccaccgacgcagugcgggacccccagacccuggagauccuggacaucaccccaugcagcuucggcggcgugagcgucaucacccccggcacaaacaccagcaaccagguggccgugcuguaccagggagugaacugcaccgaggugcccguggccauccacgccgaccagcugacccccaccuggcggguguacagcaccggcagcaacguguuccagacccgggccggcugccugaucggcgccgagcacgugaacaacuccuacgagugcgacauccccaucggcgcuggcaucugcgccagcuaccagacccagaccaacagcccccggcgggcccggagcguggccagccagagcaucaucgccuacaccaugagcuuaggcgccgagaacagcguggccuacagcaacaacagcaucgcgaucccuaccaacuucaccaucagcgugaccaccgagauacugcccgugagcaugaccaagaccagcguggacuguaccauguacaucugcggcgacagcaccgagugcagcaaccugcugcugcaguacggcagcuucugcacccagcugaaccgggcccugaccggcaucgccguggagcaggacaagaacacccaagagguguucgcccaggugaagcagaucuacaagacucccccaaucaaggacuucggcggcuucaacuucagccagauccugcccgaccccagcaagcccagcaagcggagcuucaucgaggaccugcuguucaacaaggugacccuggccgacgccggcuucaucaagcaguacggcgacugccugggggauaucgccgcucgggaccugaucugcgcccagaaguucaacggccugaccgugcugcccccucugcugaccgacgagaugaucgcccaguacaccagcgcccugcuugccggcaccaucaccagcggcuggaccuucggcgccggcgcagcccugcagauccccuucgccaugcagauggccuaccgguucaacggcaucggcgugacccagaacgugcuguacgagaaccagaagcugaucgccaaccaguucaacagcgccaucggcaagauccaggacagccugagcagcaccgccagcgcccugggcaagcugcaggacguggugaaccagaacgcucaggcccugaacacccuggugaagcagcugagcagcaacuucggcgccaucagcucagugcugaaugacauccugagcaggcuggacaagguggaggccgaggugcagaucgaccggcugaucaccggccggcugcagagccugcagaccuacgugacccagcagcugauccgggccgccgagauccgggccagcgccaaccuggcagccaccaagaugagcgagugcgugcugggccagagcaagcggguggacuuuugcggcaagggcuaccaccugaugagcuucccccagagcgccccacacggcgugguguuccuccacgucacauacgugcccgcccaggagaagaacuucaccaccgcccccgccauuugccacgacggcaaggcucacuucccccgggagggaguguucgugagcaacggcacccacugguucgugacccagcggaacuucuacgagccccagaucaucaccaccgacaacaccuucgugagcggcaacugcgacguggugaucggcaucgugaacaacaccguguacgacccccugcagccugagcuggacagcuucaaggaggagcuggacaaguacuucaagaaccacaccagccccgacguggaucugggcgacaucagcggcaucaacgccagcguggugaacauccagaaggagaucgaccggcugaacgagguggccaagaaccugaacgagagccugaucgaccugcaggagcugggcaaguacgagcaguacaucaaguggcccugguacaucuggcugggcuucaucgccggccugaucgccaucgugauggugaccaucaugcugugcugcaugaccagcugcuguagcugccugaagggcugcugcagcugcggcagcugcugcaaguucgacgaggacgacagcgagccagugcugaagggcgugaagcugcacuacaccugaggacuaguuauaagacugacuagcccgaugggccucccaacgggcccuccuccccuccuugcaccgagagaucuaaaaaaaaaaaaaaaaaaaaaaaaaaaaaaaaaaaaaaaaaaaaaaaaaaaaaaaaaaaaaaaaaaaaaaaaaaaaaaaaaaaaaaaaaaaaaaaaaaaa

SEQ ID NO: 25885 - RNA, 4011 nt, Artificial Sequence
  SARS-CoV-2/Wuhan/WIV05/2019__EPI_ISL_402128 spike protein mRNA gc (1-1273)(A222V_D614G)
aggagaaagcuuaccauguucguguuccuggugcugcugccccuggugagcagccagugcgugaaccugaccacccggacccagcugcccccugccuacaccaacagcuucacccggggcguguacuaccccgacaagguguuccggagcagcgugcugcacagcacccaggaccuguuccugcccuucuucagcaacgugaccugguuccacgccauccacgugagcggcaccaacggcaccaagcgguucgacaacccagugcugcccuucaacgacggcguguacuucgccagcaccgagaagucaaacaucauccggggcuggaucuucggcaccacccuggacagcaagacacagagccugcugaucgugaacaacgccaccaacguggugaucaaggugugcgaguuucaguucugcaacgaccccuuccugggcguguacuaccacaagaacaacaagagcuggauggagagcgaguuccgggucuacagcagcgcuaacaauugcaccuucgaguacgugagccagcccuuccugauggaccucgagggcaagcagggcaacuucaagaaccugcgggaguucguguucaagaacaucgauggcuacuucaagaucuacagcaagcacacccccaucaaccuggugcgggaccugccccagggauucagcgugcuggagccucugguggaccugcccaucggcaucaacaucaccagguuccagacccugcuggcccugcaccggagcuaccugacccccggcgacagcagcagcggcuggaccgccggcgccgccgccuacuacgugggcuaccugcagccacggaccuuccugcugaaguacaacgagaacggcaccaucaccgacgcaguggacugcgcccuggacccccugagcgagaccaagugcacccuaaagagcuucaccguggagaagggcaucuaccagaccagcaacuuccgggugcagcccacugagagcaucgugcgguuccccaacauuaccaaccugugucccuucggcgagguguucaacgccacccgguucgccagcguguacgccuggaaccggaagcggaucagcaacugcguggccgacuacagcgugcuguacaacagcgccagcuucagcaccuucaagugcuacggcgugagcccuaccaagcugaacgaccugugcuucaccaacguguacgccgacagcuucgugauccggggcgacgaggugcggcagaucgcucccggccagaccggcaagaucgccgacuacaacuacaagcugcccgacgacuucaccggcugcgugaucgccuggaacagcaacaaccuggacagcaaggugggcggcaacuacaacuaccuguaccggcuguuccguaagagcaaccugaagccauucgagcgggacaucagcaccgagaucuaccaggccggcagcacccccugcaacgguguggagggcuuuaacugcuacuucccccugcagagcuacggcuuccagcccaccaacggcgugggcuaccagcccuaccgggugguggugcugagcuucgagcugcugcacgcccccgccaccgugugcggcccuaaaaagagcaccaaccuggugaagaacaagugcgugaacuucaauuucaacggccugaccggcaccggcgugcugaccgagagcaacaagaaguuccugcccuuccagcaguucggccgggauaucgccgacaccaccgacgccgugcgggacccccagacccuggagauccuggacaucaccccaugcagcuucggcggcgucagcgugaucacccccggcacaaacaccagcaaccagguggcagugcuguaccagggagugaacugcaccgaggugcccguggccauccacgccgaccagcugacccccaccuggcggguguacagcaccggcagcaacguguuccagacccgggccggcugccugaucggcgccgagcacgugaacaacuccuacgagugcgacauccccaucggcgccggcaucugcgcuagcuaccagacccagaccaacagcccccggcgggcccggagcguggccagccagagcaucaucgccuacaccaugagcuuaggcgccgagaacagcguggccuacagcaacaacagcaucgccaucccuaccaacuucaccaucagcgugaccaccgagauacugcccgugagcaugaccaagaccagcguggacuguaccauguacaucugcggcgacagcaccgagugcagcaaccugcugcugcaguacggcagcuucugcacccagcugaaccgggcgcugaccggcaucgccguggagcaggacaagaacacccaagagguguucgcccaggugaagcagaucuacaagacucccccaaucaaggacuucggcggcuucaacuucagccagauccugcccgaccccagcaagcccagcaagcggagcuucaucgaggaccugcuguucaacaaggugacccuggccgacgccggcuucaucaagcaguacggcgacugccugggggauaucgccgcccgggaccugaucugcgcucagaaguucaacggccugaccgugcugcccccucugcugaccgacgagaugaucgcccaguacaccagcgcccugcuugccggcaccaucaccagcggcuggaccuucggcgccggcgccgcacugcagauccccuucgccaugcagauggccuaccgguucaacggcaucggcgugacccagaacgugcuguacgagaaccagaagcugaucgccaaccaguucaacagcgccaucggcaagauccaggacagccugagcagcaccgccagcgcccugggcaagcugcaggacguggugaaccagaacgcccaggcucugaacacccuggugaagcagcugagcagcaacuucggcgccaucagcucagugcugaaugacauccugagcaggcuggacaagguggaggccgaggugcagaucgaccggcugaucaccggccggcugcagagccugcagaccuacgugacccagcagcugauccgggccgccgagauccgggccagcgccaaccuggccgcaaccaagaugagcgagugcgugcugggccagagcaagcggguggacuuuugcggcaagggcuaccaccugaugagcuucccccagagcgccccacacggcguggucuuccuccacgugacauacgugcccgcccaggagaagaacuucaccaccgcccccgccauuugccacgacggcaaggcccacuucccccgggagggaguguucgugagcaacggcacccacugguucgugacccagcggaacuucuacgagccccagaucaucaccaccgacaacaccuucgugagcggcaacugcgacguggugaucggcaucgugaacaacaccguguacgacccccugcagccugagcuggacagcuucaaggaggagcuggacaaguacuucaagaaccacaccagccccgacguggaucugggcgacaucagcggcaucaacgcuagcguggugaacauccagaaggagaucgaccggcugaacgagguggccaagaaccugaacgagagccugaucgaccugcaggagcugggcaaguacgagcaguacaucaaguggcccugguacaucuggcugggcuucaucgccggccugaucgccaucgugauggugaccaucaugcugugcugcaugaccagcugcuguagcugccugaagggcugcugcagcugcggcagcugcugcaaguucgacgaggacgacagcgagccagugcugaagggcgugaagcugcacuacaccugaggacuaguuauaagacugacuagcccgaugggccucccaacgggcccuccuccccuccuugcaccgagagaucuaaaaaaaaaaaaaaaaaaaaaaaaaaaaaaaaaaaaaaaaaaaaaaaaaaaaaaaaaaaaaaaaaaaaaaaaaaaaaaaaaaaaaaaaaaaaaaaaaaaa

SEQ ID NO: 25886 - RNA, 4011 nt, Artificial Sequence
  SARS-CoV-2/Wuhan/WIV05/2019__EPI_ISL_402128 spike protein mRNA gc (1-1273)(N439K_D614G)
aggagaaagcuuaccauguucguguuccuggugcugcugccccuggugagcagccagugcgugaaccugaccacccggacccagcugcccccugccuacaccaacagcuucacccggggcguguacuaccccgacaagguguuccggagcagcgugcugcacagcacccaggaccuguuccugcccuucuucagcaacgugaccugguuccacgccauccacgugagcggcaccaacggcaccaagcgguucgacaacccagugcugcccuucaacgacggcguguacuucgccagcaccgagaagucaaacaucauccggggcuggaucuucggcaccacccuggacagcaagacacagagccugcugaucgugaacaacgccaccaacguggugaucaaggugugcgaguuucaguucugcaacgaccccuuccugggcguguacuaccacaagaacaacaagagcuggauggagagcgaguuccgggucuacagcagcgcuaacaauugcaccuucgaguacgugagccagcccuuccugauggaccucgagggcaagcagggcaacuucaagaaccugcgggaguucguguucaagaacaucgauggcuacuucaagaucuacagcaagcacacccccaucaaccuggugcgggaccugccccagggauucagcgcccuggagccucugguggaccugcccaucggcaucaacaucaccagguuccagacccugcuggcccugcaccggagcuaccugacccccggcgacagcagcagcggcuggaccgccggcgccgccgcauacuacgugggcuaccugcagccacggaccuuccugcugaaguacaacgagaacggcaccaucaccgacgccguggacugcgcccuggacccccugagcgagaccaagugcacccuaaagagcuucaccguggagaagggcaucuaccagaccagcaacuuccgggugcagcccacugagagcaucgugcgguuccccaacauuaccaaccugugucccuucggcgagguguucaacgccacccgguucgccagcguguacgccuggaaccggaagcggaucagcaacugcguggccgacuacagcgugcuguacaacagcgccagcuucagcaccuucaagugcuacggcgugagcccuaccaagcugaacgaccugugcuucaccaacguguacgcugacagcuucgugauccggggcgacgaggugcggcagaucgcccccggccagaccggcaagaucgccgacuacaacuacaagcugcccgacgacuucaccggcugcgugaucgccuggaacagcaagaaccuggacagcaaggugggcggcaacuacaacuaccuguaccggcuguuccguaagagcaaccugaagccauucgagcgggacaucagcaccgagaucuaccaggccggcagcacccccugcaacgguguggagggcuuuaacugcuacuucccccugcagagcuacggcuuccagcccaccaacggcgugggcuaccagcccuaccgggugguggugcugagcuucgagcugcugcacgcccccgccaccgugugcggcccuaaaaagagcaccaaccuggugaagaacaagugcgugaacuucaacuucaauggccugaccggcaccggcgugcugaccgagagcaacaagaaguuccugcccuuccagcaguucggccgggauaucgccgacaccaccgacgcagugcgggacccccagacccuggagauccuggacaucaccccaugcagcuucggcggcgugagcgucaucacccccggcacaaacaccagcaaccagguggccgugcuguaccagggagugaacugcaccgaggugcccguggccauccacgccgaccagcugacccccaccuggcggguguacagcaccggcagcaacguguuccagacccgggccggcugccugaucggcgccgagcacgugaacaacuccuacgagugcgacauccccaucggcgcuggcaucugcgccagcuaccagacccagaccaacagcccccggcgggcccggagcguggccagccagagcaucaucgccuacaccaugagcuuaggcgccgagaacagcguggccuacagcaacaacagcaucgcgaucccuaccaacuucaccaucagcgugaccaccgagauacugcccgugagcaugaccaagaccagcguggacuguaccauguacaucugcggcgacagcaccgagugcagcaaccugcugcugcaguacggcagcuucugcacccagcugaaccgggcccugaccggcaucgccguggagcaggacaagaacacccaagagguguucgcccaggugaagcagaucuacaagacucccccaaucaaggacuucggcggcuucaacuucagccagauccugcccgaccccagcaagcccagcaagcggagcuucaucgaggaccugcuguucaacaaggugacccuggccgacgccggcuucaucaagcaguacggcgacugccugggggauaucgccgcucgggaccugaucugcgcccagaaguucaacggccugaccgugcugcccccucugcugaccgacgagaugaucgcccaguacaccagcgcccugcuugccggcaccaucaccagcggcuggaccuucggcgccggcgcagcccugcagauccccuucgccaugcagauggccuaccgguucaacggcaucggcgugacccagaacgugcuguacgagaaccagaagcugaucgccaaccaguucaacagcgccaucggcaagauccaggacagccugagcagcaccgccagcgcccugggcaagcugcaggacguggugaaccagaacgcucaggcccugaacacccuggugaagcagcugagcagcaacuucggcgccaucagcucagugcugaacgacauccugagcaggcuggacaagguggaggccgaggugcagaucgaccggcugaucaccggccggcugcagagccugcagaccuacgugacccagcagcugauccgggccgccgagauccgggccagcgccaaucuggcagccaccaagaugagcgagugcgugcugggccagagcaagcggguggacuuuugcggcaagggcuaccaccugaugagcuucccccagagcgccccacacggcgugguguuccuccacgucacauacgugcccgcccaggagaagaacuucaccaccgcccccgccauuugccacgacggcaaggcucacuucccccgggagggaguguucgugagcaacggcacccacugguucgugacccagcggaacuucuacgagccccagaucaucaccaccgacaacaccuucgugagcggcaacugcgacguggugaucggcaucgugaacaacaccguguacgacccccugcagccugagcuggacagcuucaaggaggagcuggacaaguacuucaagaaccacaccagccccgacguggaucugggcgacaucagcggcaucaacgccagcguggugaacauccagaaggagaucgaccggcugaacgagguggccaagaaccugaacgagagccugaucgaccugcaggagcugggcaaguacgagcaguacaucaaguggcccugguacaucuggcugggcuucaucgccggccugaucgccaucgugauggugaccaucaugcugugcugcaugaccagcugcuguagcugccugaagggcugcugcagcugcggcagcugcugcaaguucgacgaggacgacagcgagccagugcugaagggcgugaagcugcacuacaccugaggacuaguuauaagacugacuagcccgaugggccucccaacgggcccuccuccccuccuugcaccgagagaucuaaaaaaaaaaaaaaaaaaaaaaaaaaaaaaaaaaaaaaaaaaaaaaaaaaaaaaaaaaaaaaaaaaaaaaaaaaaaaaaaaaaaaaaaaaaaaaaaaaaa

SEQ ID NO: 25887 - RNA, 4011 nt, Artificial Sequence
  SARS-CoV-2/Wuhan/WIV05/2019__EPI_ISL_402128 spike protein mRNA gc (1-1273)(S477N_D614G)
aggagaaagcuuaccauguucguguuccuggugcugcugccccuggugagcagccagugcgugaaccugaccacccggacccagcugcccccugccuacaccaacagcuucacccggggcguguacuaccccgacaagguguuccggagcagcgugcugcacagcacccaggaccuguuccugcccuucuucagcaacgugaccugguuccacgccauccacgugagcggcaccaacggcaccaagcgguucgacaacccagugcugcccuucaacgacggcguguacuucgccagcaccgagaagucaaacaucauccggggcuggaucuucggcaccacccuggacagcaagacacagagccugcugaucgugaacaacgccaccaacguggugaucaaggugugcgaguuucaguucugcaacgaccccuuccugggcguguacuaccacaagaacaacaagagcuggauggagagcgaguuccgggucuacagcagcgcuaacaauugcaccuucgaguacgugagccagcccuuccugauggaccucgagggcaagcagggcaacuucaagaaccugcgggaguucguguucaagaacaucgauggcuacuucaagaucuacagcaagcacacccccaucaaccuggugcgggaccugccccagggauucagcgcccuggagccucugguggaccugcccaucggcaucaacaucaccagguuccagacccugcuggcccugcaccggagcuaccugacccccggcgacagcagcagcggcuggaccgccggcgccgccgcauacuacgugggcuaccugcagccacggaccuuccugcugaaguacaacgagaacggcaccaucaccgacgccguggacugcgcccuggacccccugagcgagaccaagugcacccuaaagagcuucaccguggagaagggcaucuaccagaccagcaacuuccgggugcagcccacugagagcaucgugcgguuccccaacauuaccaaccugugucccuucggcgagguguucaacgccacccgguucgccagcguguacgccuggaaccggaagcggaucagcaacugcguggccgacuacagcgugcuguacaacagcgccagcuucagcaccuucaagugcuacggcgugagcccuaccaagcugaacgaccugugcuucaccaacguguacgcugacagcuucgugauccggggcgacgaggugcggcagaucgcccccggccagaccggcaagaucgccgacuacaacuacaagcugcccgacgacuucaccggcugcgugaucgccuggaacagcaacaaccuggacagcaaggugggcggcaacuacaacuaccuguaccggcuguuccguaagagcaaccugaagccauucgagcgggacaucagcaccgagaucuaccaggccggcaacacccccugcaacgguguggagggcuuuaacugcuacuucccccugcagagcuacggcuuccagcccaccaacggcgugggcuaccagcccuaccgggugguggugcugagcuucgagcugcugcacgcccccgccaccgugugcggcccuaaaaagagcaccaaccuggugaagaacaagugcgugaauuucaacuucaacggccugaccggcaccggcgugcugaccgagagcaacaagaaguuccugcccuuccagcaguucggccgggauaucgccgacaccaccgacgcagugcgggacccccagacccuggagauccuggacaucaccccaugcagcuucggcggcgugagcgucaucacccccggcacaaacaccagcaaccagguggccgugcuguaccagggagugaacugcaccgaggugcccguggccauccacgccgaccagcugacccccaccuggcggguguacagcaccggcagcaacguguuccagacccgggccggcugccugaucggcgccgagcacgugaacaacagcuacgagugcgacauccccaucggcgcuggcaucugcgccuccuaccagacccagaccaacagcccccggcgggcccggagcguggccagccagagcaucaucgccuacaccaugagcuuaggcgccgagaacagcguggccuacagcaacaacagcaucgcgaucccuaccaacuucaccaucagcgugaccaccgagauacugcccgugagcaugaccaagaccagcguggacuguaccauguacaucugcggcgacagcaccgagugcagcaaccugcugcugcaguacggcagcuucugcacccagcugaaccgggcccugaccggcaucgccguggagcaggacaagaacacccaagagguguucgcccaggugaagcagaucuacaagacucccccaaucaaggacuucggcggcuucaacuucagccagauccugcccgaccccagcaagcccagcaagcggagcuucaucgaggaccugcuguucaacaaggugacccuggccgacgccggcuucaucaagcaguacggcgacugccugggggauaucgccgcucgggaccugaucugcgcccagaaguucaacggccugaccgugcugcccccucugcugaccgacgagaugaucgcccaguacaccagcgcccugcuugccggcaccaucaccagcggcuggaccuucggcgccggcgcagcccugcagauccccuucgccaugcagauggccuaccgguucaacggcaucggcgugacccagaacgugcuguacgagaaccagaagcugaucgccaaccaguucaacagcgccaucggcaagauccaggacagccugagcagcaccgccagcgcccugggcaagcugcaggacguggugaaccagaacgcucaggcccugaacacccuggugaagcagcugagcagcaauuucggcgccaucagcagcgugcugaacgacauccugucaaggcuggacaagguggaggccgaggugcagaucgaccggcugaucaccggccggcugcagagccugcagaccuacgugacccagcagcugauccgggccgccgagauccgggccagcgccaaccuggcagccaccaagaugagcgagugcgugcugggccagagcaagcggguggacuuuugcggcaagggcuaccaccugaugagcuucccccagagcgccccacacggcgugguguuccuccacgucacauacgugcccgcccaggagaagaacuucaccaccgcccccgccauuugccacgacggcaaggcucacuucccccgggagggaguguucgugagcaacggcacccacugguucgugacccagcggaacuucuacgagccccagaucaucaccaccgacaacaccuucgugagcggcaacugcgacguggugaucggcaucgugaacaacaccguguacgacccccugcagccugagcuggacagcuucaaggaggagcuggacaaguacuucaagaaccacaccagccccgacguggaucugggcgacaucagcggcaucaacgccagcguggugaacauccagaaggagaucgaccggcugaacgagguggccaagaaccugaacgagagccugaucgaccugcaggagcugggcaaguacgagcaguacaucaaguggcccugguacaucuggcugggcuucaucgccggccugaucgccaucgugauggugaccaucaugcugugcugcaugaccagcugcuguagcugccugaagggcugcugcagcugcggcagcugcugcaaguucgacgaggacgacagcgagccagugcugaagggcgugaagcugcacuacaccugaggacuaguuauaagacugacuagcccgaugggccucccaacgggcccuccuccccuccuugcaccgagagaucuaaaaaaaaaaaaaaaaaaaaaaaaaaaaaaaaaaaaaaaaaaaaaaaaaaaaaaaaaaaaaaaaaaaaaaaaaaaaaaaaaaaaaaaaaaaaaaaaaaaa

SEQ ID NO: 25888 - RNA, 4011 nt, Artificial Sequence
  SARS-CoV-2/Wuhan/WIV05/2019__EPI_ISL_402128 spike protein mRNA gc (1-1273)(N501Y_D614G)
aggagaaagcuuaccauguucguguuccuggugcugcugccccuggugagcagccagugcgugaaccugaccacccggacccagcugcccccugccuacaccaacagcuucacccggggcguguacuaccccgacaagguguuccggagcagcgugcugcacagcacccaggaccuguuccugcccuucuucagcaacgugaccugguuccacgccauccacgugagcggcaccaacggcaccaagcgguucgacaacccagugcugcccuucaacgacggcguguacuucgccagcaccgagaagucaaacaucauccggggcuggaucuucggcaccacccuggacagcaagacacagagccugcugaucgugaacaacgccaccaacguggugaucaaggugugcgaguuucaguucugcaacgaccccuuccugggcguguacuaccacaagaacaacaagagcuggauggagagcgaguuccgggucuacagcagcgcuaacaauugcaccuucgaguacgugagccagcccuuccugauggaccucgagggcaagcagggcaacuucaagaaccugcgggaguucguguucaagaacaucgauggcuacuucaagaucuacagcaagcacacccccaucaaccuggugcgggaccugccccagggauucagcgcccuggagccucugguggaccugcccaucggcaucaacaucaccagguuccagacccugcuggcccugcaccggagcuaccugacccccggcgacagcagcagcggcuggaccgccggcgccgccgcauacuacgugggcuaccugcagccacggaccuuccugcugaaguacaacgagaacggcaccaucaccgacgccguggacugcgcccuggacccccugagcgagaccaagugcacccuaaagagcuucaccguggagaagggcaucuaccagaccagcaacuuccgggugcagcccacugagagcaucgugcgguuccccaacauuaccaaccugugucccuucggcgagguguucaacgccacccgguucgccagcguguacgccuggaaccggaagcggaucagcaacugcguggccgacuacagcgugcuguacaacagcgccagcuucagcaccuucaagugcuacggcgugagcccuaccaagcugaacgaccugugcuucaccaacguguacgcugacagcuucgugauccggggcgacgaggugcggcagaucgcccccggccagaccggcaagaucgccgacuacaacuacaagcugcccgacgacuucaccggcugcgugaucgccuggaacagcaacaaccuggacagcaaggugggcggcaacuacaacuaccuguaccggcuguuccguaagagcaaccugaagccauucgagcgggacaucagcaccgagaucuaccaggccggcagcacccccugcaacgguguggagggcuuuaacugcuacuucccccugcagagcuacggcuuccagcccaccuacggcgugggcuaccagcccuaccgggugguggugcugagcuucgagcugcugcacgcccccgccaccgugugcggcccuaaaaagagcaccaaccuggugaagaacaagugcgugaacuucaacuucaauggccugaccggcaccggcgugcugaccgagagcaacaagaaguuccugcccuuccagcaguucggccgggauaucgccgacaccaccgacgcagugcgggacccccagacccuggagauccuggacaucaccccaugcagcuucggcggcgugagcgucaucacccccggcacaaacaccagcaaccagguggccgugcuguaccagggagugaacugcaccgaggugcccguggccauccacgccgaccagcugacccccaccuggcggguguacagcaccggcagcaacguguuccagacccgggccggcugccugaucggcgccgagcacgugaacaacuccuacgagugcgacauccccaucggcgcuggcaucugcgccagcuaccagacccagaccaacagcccccggcgggcccggagcguggccagccagagcaucaucgccuacaccaugagcuuaggcgccgagaacagcguggccuacagcaacaacagcaucgcgaucccuaccaacuucaccaucagcgugaccaccgagauacugcccgugagcaugaccaagaccagcguggacuguaccauguacaucugcggcgacagcaccgagugcagcaaccugcugcugcaguacggcagcuucugcacccagcugaaccgggcccugaccggcaucgccguggagcaggacaagaacacccaagagguguucgcccaggugaagcagaucuacaagacucccccaaucaaggacuucggcggcuucaacuucagccagauccugcccgaccccagcaagcccagcaagcggagcuucaucgaggaccugcuguucaacaaggugacccuggccgacgccggcuucaucaagcaguacggcgacugccugggggauaucgccgcucgggaccugaucugcgcccagaaguucaacggccugaccgugcugcccccucugcugaccgacgagaugaucgcccaguacaccagcgcccugcuugccggcaccaucaccagcggcuggaccuucggcgccggcgcagcccugcagauccccuucgccaugcagauggccuaccgguucaacggcaucggcgugacccagaacgugcuguacgagaaccagaagcugaucgccaaccaguucaacagcgccaucggcaagauccaggacagccugagcagcaccgccagcgcccugggcaagcugcaggacguggugaaccagaacgcucaggcccugaacacccuggugaagcagcugagcagcaacuucggcgccaucagcucagugcugaacgacauccugagcaggcuggacaagguggaggccgaggugcagaucgaccggcugaucaccggccggcugcagagccugcagaccuacgugacccagcagcugauccgggccgccgagauccgggccagcgccaaucuggcagccaccaagaugagcgagugcgugcugggccagagcaagcggguggacuuuugcggcaagggcuaccaccugaugagcuucccccagagcgccccacacggcgugguguuccuccacgucacauacgugcccgcccaggagaagaacuucaccaccgcccccgccauuugccacgacggcaaggcucacuucccccgggagggaguguucgugagcaacggcacccacugguucgugacccagcggaacuucuacgagccccagaucaucaccaccgacaacaccuucgugagcggcaacugcgacguggugaucggcaucgugaacaacaccguguacgacccccugcagccugagcuggacagcuucaaggaggagcuggacaaguacuucaagaaccacaccagccccgacguggaucugggcgacaucagcggcaucaacgccagcguggugaacauccagaaggagaucgaccggcugaacgagguggccaagaaccugaacgagagccugaucgaccugcaggagcugggcaaguacgagcaguacaucaaguggcccugguacaucuggcugggcuucaucgccggccugaucgccaucgugauggugaccaucaugcugugcugcaugaccagcugcuguagcugccugaagggcugcugcagcugcggcagcugcugcaaguucgacgaggacgacagcgagccagugcugaagggcgugaagcugcacuacaccugaggacuaguuauaagacugacuagcccgaugggccucccaacgggcccuccuccccuccuugcaccgagagaucuaaaaaaaaaaaaaaaaaaaaaaaaaaaaaaaaaaaaaaaaaaaaaaaaaaaaaaaaaaaaaaaaaaaaaaaaaaaaaaaaaaaaaaaaaaaaaaaaaaaa

SEQ ID NO: 25889 - RNA, 4005 nt, Artificial Sequence
  SARS-CoV-2/Wuhan/WIV05/2019__EPI_ISL_402128 spike protein mRNA gc (1-1273)(H69del_V70del_D614G)
aggagaaagcuuaccauguucguguuccuggugcugcugccccuggugagcagccagugcgugaaccugaccacccggacccagcugcccccugccuacaccaacagcuucacccggggcguguacuaccccgacaagguguuccggagcagcgugcugcacagcacccaggaccuguuccugcccuucuucagcaacgugaccugguuccacgccaucagcggcaccaacggcaccaagcgguucgacaacccagugcugcccuucaacgacggcguguacuucgccagcaccgagaagucaaacaucauccggggcuggaucuucggcaccacccuggacagcaagacacagagccugcugaucgugaacaacgccaccaacguggugaucaaggugugcgaguuucaguucugcaacgaccccuuccugggcguguacuaccacaagaacaacaagagcuggauggagagcgaguuccggguguacagcagcgcuaacaauugcaccuucgaguacgucagccagcccuuccugauggaccucgagggcaagcagggcaacuucaagaaccugcgggaguucguguucaagaacaucgauggcuacuucaagaucuacagcaagcacacccccaucaaccuggugcgggaccugccccagggauucagcgcccuggagccucugguggaccugcccaucggcaucaacaucaccagguuccagacccugcuggcccugcaccggagcuaccugacccccggcgacagcagcagcggcuggaccgccggcgccgccgcauacuacgugggcuaccugcagccacggaccuuccugcugaaguacaacgagaacggcaccaucaccgacgccguggacugcgcccuggacccccugagcgagaccaagugcacccuaaagagcuucaccguggagaagggcaucuaccagaccagcaacuuccgggugcagcccacugagagcaucgugcgguuccccaacauuaccaaccugugucccuucggcgagguguucaacgccacccgguucgccagcguguacgccuggaaccggaagcggaucagcaacugcguggccgacuacagcgugcuguacaacagcgccagcuucagcaccuucaagugcuacggcgugagcccuaccaagcugaacgaccugugcuucaccaacguguacgcugacagcuucgugauccggggcgacgaggugcggcagaucgcccccggccagaccggcaagaucgccgacuacaacuacaagcugcccgacgacuucaccggcugcgugaucgccuggaacagcaacaaccuggacagcaaggugggcggcaacuacaacuaccuguaccggcuguuccguaagagcaaccugaagccauucgagcgggacaucagcaccgagaucuaccaggccggcagcacccccugcaacgguguggagggcuuuaacugcuacuucccccugcagagcuacggcuuccagcccaccaacggcgugggcuaccagcccuaccgggugguggugcugagcuucgagcugcugcacgcccccgccaccgugugcggcccuaaaaagagcaccaaccuggugaagaacaagugcgugaacuucaauuucaacggccugaccggcaccggcgugcugaccgagagcaacaagaaguuccugcccuuccagcaguucggccgggauaucgccgacaccaccgacgcagugcgggacccccagacccuggagauccuggacaucaccccaugcagcuucggcggcgugagcgugaucacccccggcacaaacaccagcaaccaggucgccgugcuguaccagggagugaacugcaccgaggugcccguggccauccacgccgaccagcugacccccaccuggcggguguacagcaccggcagcaacguguuccagacccgggccggcugccugaucggcgccgagcacgugaacaacuccuacgagugcgacauccccaucggcgcuggcaucugcgccagcuaccagacccagaccaacagcccccggcgggcccggagcguggccagccagagcaucaucgccuacaccaugagcuuaggcgccgagaacagcguggccuacagcaacaacagcaucgcgaucccuaccaacuucaccaucagcgugaccaccgagauacugcccgugagcaugaccaagaccagcguggacuguaccauguacaucugcggcgacagcaccgagugcagcaaccugcugcugcaguacggcagcuucugcacccagcugaaccgggcccugaccggcaucgccguggagcaggacaagaacacccaagagguguucgcccaggugaagcagaucuacaagacucccccaaucaaggacuucggcggcuucaacuucagccagauccugcccgaccccagcaagcccagcaagcggagcuucaucgaggaccugcuguucaacaaggugacccuggccgacgccggcuucaucaagcaguacggcgacugccugggggauaucgccgcucgggaccugaucugcgcccagaaguucaacggccugaccgugcugcccccucugcugaccgacgagaugaucgcccaguacaccagcgcccugcuugccggcaccaucaccagcggcuggaccuucggcgccggcgcagcccugcagauccccuucgccaugcagauggccuaccgguucaacggcaucggcgugacccagaacgugcuguacgagaaccagaagcugaucgccaaccaguucaacagcgccaucggcaagauccaggacagccugagcagcaccgccagcgcccugggcaagcugcaggacguggugaaccagaacgcucaggcccugaacacccuggugaagcagcugagcagcaacuucggcgccaucagcucagugcugaaugacauccugagcaggcuggacaagguggaggccgaggugcagaucgaccggcugaucaccggccggcugcagagccugcagaccuacgugacccagcagcugauccgggccgccgagauccgggccagcgccaaccuggcagccaccaagaugagcgagugcgugcugggccagagcaagcggguggacuuuugcggcaagggcuaccaccugaugagcuucccccagagcgccccacacggcgugguguuccuccacgugacauacguccccgcccaggagaagaacuucaccaccgcccccgccauuugccacgacggcaaggcucacuucccccgggagggaguguucgugagcaacggcacccacugguucgugacccagcggaacuucuacgagccccagaucaucaccaccgacaacaccuucgugagcggcaacugcgacguggugaucggcaucgugaacaacaccguguacgacccccugcagccugagcuggacagcuucaaggaggagcuggacaaguacuucaagaaccacaccagccccgacguggaucugggcgacaucagcggcaucaacgccagcguggugaacauccagaaggagaucgaccggcugaacgagguggccaagaaccugaacgagagccugaucgaccugcaggagcugggcaaguacgagcaguacaucaaguggcccugguacaucuggcugggcuucaucgccggccugaucgccaucgugauggugaccaucaugcugugcugcaugaccagcugcuguagcugccugaagggcugcugcagcugcggcagcugcugcaaguucgacgaggacgacagcgagccagugcugaagggcgugaagcugcacuacaccugaggacuaguuauaagacugacuagcccgaugggccucccaacgggcccuccuccccuccuugcaccgagagaucuaaaaaaaaaaaaaaaaaaaaaaaaaaaaaaaaaaaaaaaaaaaaaaaaaaaaaaaaaaaaaaaaaaaaaaaaaaaaaaaaaaaaaaaaaaaaaaaaaaaa

SEQ ID NO: 25890 - RNA, 4011 nt, Artificial Sequence
  SARS-CoV-2/Wuhan/WIV05/2019__EPI_ISL_402128 spike protein mRNA gc (1-1273)(Y453F_D614G)
aggagaaagcuuaccauguucguguuccuggugcugcugccccuggugagcagccagugcgugaaccugaccacccggacccagcugcccccugccuacaccaacagcuucacccggggcguguacuaccccgacaagguguuccggagcagcgugcugcacagcacccaggaccuguuccugcccuucuucagcaacgugaccugguuccacgccauccacgugagcggcaccaacggcaccaagcgguucgacaacccagugcugcccuucaacgacggcguguacuucgccagcaccgagaagucaaacaucauccggggcuggaucuucggcaccacccuggacagcaagacacagagccugcugaucgugaacaacgccaccaacguggugaucaaggugugcgaguuucaguucugcaacgaccccuuccugggcguguacuaccacaagaacaacaagagcuggauggagagcgaguuccgggucuacagcagcgcuaacaauugcaccuucgaguacgugagccagcccuuccugauggaccucgagggcaagcagggcaacuucaagaaccugcgggaguucguguucaagaacaucgauggcuacuucaagaucuacagcaagcacacccccaucaaccuggugcgggaccugccccagggauucagcgcccuggagccucugguggaccugcccaucggcaucaacaucaccagguuccagacccugcuggcccugcaccggagcuaccugacccccggcgacagcagcagcggcuggaccgccggcgccgccgcauacuacgugggcuaccugcagccacggaccuuccugcugaaguacaacgagaacggcaccaucaccgacgccguggacugcgcccuggacccccugagcgagaccaagugcacccuaaagagcuucaccguggagaagggcaucuaccagaccagcaacuuccgggugcagcccacugagagcaucgugcgguuccccaacauuaccaaccugugucccuucggcgagguguucaacgccacccgguucgccagcguguacgccuggaaccggaagcggaucagcaacugcguggccgacuacagcgugcuguacaacagcgccagcuucagcaccuucaagugcuacggcgugagcccuaccaagcugaacgaccugugcuucaccaacguguacgcugacagcuucgugauccggggcgacgaggugcggcagaucgcccccggccagaccggcaagaucgccgacuacaacuacaagcugcccgacgacuucaccggcugcgugaucgccuggaacagcaacaaccuggacagcaaggugggcggcaacuacaacuaccuguuccggcuguuccguaagagcaaccugaagccauuugagcgggacaucagcaccgagaucuaccaggccggcagcacccccugcaacgguguggagggcuucaacugcuacuucccccugcagagcuacggcuuccagcccaccaacggcgugggcuaccagcccuaccgggugguggugcugagcuucgagcugcugcacgcccccgccaccgugugcggcccuaaaaagagcaccaaccuggugaagaacaagugcgugaacuucaauuucaacggccugaccggcaccggcgugcugaccgagagcaacaagaaguuccugcccuuccagcaguucggccgggauaucgccgacaccaccgacgcagugcgggacccccagacccuggagauccuggacaucaccccaugcagcuucggcggcgugagcgucaucacccccggcacaaacaccagcaaccagguggccgugcuguaccagggagugaacugcaccgaggugcccguggccauccacgccgaccagcugacccccaccuggcggguguacagcaccggcagcaacguguuccagacccgggccggcugccugaucggcgccgagcacgugaacaacuccuacgagugcgacauccccaucggcgcuggcaucugcgccagcuaccagacccagaccaacagcccccggcgggcccggagcguggccagccagagcaucaucgccuacaccaugagcuuaggcgccgagaacagcguggccuacagcaacaacagcaucgcgaucccuaccaacuucaccaucagcgugaccaccgagauacugcccgugagcaugaccaagaccagcguggacuguaccauguacaucugcggcgacagcaccgagugcagcaaccugcugcugcaguacggcagcuucugcacccagcugaaccgggcccugaccggcaucgccguggagcaggacaagaacacccaagagguguucgcccaggugaagcagaucuacaagacucccccaaucaaggacuucggcggcuucaacuucagccagauccugcccgaccccagcaagcccagcaagcggagcuucaucgaggaccugcuguucaacaaggugacccuggccgacgccggcuucaucaagcaguacggcgacugccugggggauaucgccgcucgggaccugaucugcgcccagaaguucaacggccugaccgugcugcccccucugcugaccgacgagaugaucgcccaguacaccagcgcccugcuugccggcaccaucaccagcggcuggaccuucggcgccggcgcagcccugcagauccccuucgccaugcagauggccuaccgguucaacggcaucggcgugacccagaacgugcuguacgagaaccagaagcugaucgccaaccaguucaacagcgccaucggcaagauccaggacagccugagcagcaccgccagcgcccugggcaagcugcaggacguggugaaccagaacgcucaggcccugaacacccuggugaagcagcugagcagcaacuuuggcgccaucagcucagugcugaaugacauccugagcaggcuggacaagguggaggccgaggugcagaucgaccggcugaucaccggccggcugcagagccugcagaccuacgugacccagcagcugauccgggccgccgagauccgggccagcgccaaccuggcagccaccaagaugagcgagugcgugcugggccagagcaagcggguggacuucugcggcaagggcuaccaccugaugagcuucccccagagcgccccacacggcgugguguuccuccacgucacauacgugcccgcccaggagaagaacuucaccaccgcccccgccauuugccacgacggcaaggcucacuucccccgggagggaguguucgugagcaacggcacccacugguucgugacccagcggaacuucuacgagccccagaucaucaccaccgacaacaccuucgugagcggcaacugcgacguggugaucggcaucgugaacaacaccguguacgacccccugcagccugagcuggacagcuucaaggaggagcuggacaaguacuucaagaaccacaccagccccgacguggaucugggcgacaucagcggcaucaacgccagcguggugaacauccagaaggagaucgaccggcugaacgagguggccaagaaccugaacgagagccugaucgaccugcaggagcugggcaaguacgagcaguacaucaaguggcccugguacaucuggcugggcuucaucgccggccugaucgccaucgugauggugaccaucaugcugugcugcaugaccagcugcuguagcugccugaagggcugcugcagcugcggcagcugcugcaaguucgacgaggacgacagcgagccagugcugaagggcgugaagcugcacuacaccugaggacuaguuauaagacugacuagcccgaugggccucccaacgggcccuccuccccuccuugcaccgagagaucuaaaaaaaaaaaaaaaaaaaaaaaaaaaaaaaaaaaaaaaaaaaaaaaaaaaaaaaaaaaaaaaaaaaaaaaaaaaaaaaaaaaaaaaaaaaaaaaaaaaa

SEQ ID NO: 25891 - RNA, 4011 nt, Artificial Sequence
  SARS-CoV-2/Wuhan/WIV05/2019__EPI_ISL_402128 spike protein mRNA gc (1-1273)(D614G_I692V)
aggagaaagcuuaccauguucguguuccuggugcugcugccccuggugagcagccagugcgugaaccugaccacccggacccagcugcccccugccuacaccaacagcuucacccggggcguguacuaccccgacaagguguuccggagcagcgugcugcacagcacccaggaccuguuccugcccuucuucagcaacgugaccugguuccacgccauccacgugagcggcaccaacggcaccaagcgguucgacaacccagugcugcccuucaacgacggcguguacuucgccagcaccgagaagucaaacaucauccggggcuggaucuucggcaccacccuggacagcaagacacagagccugcugaucgugaacaacgccaccaacguggugaucaaggugugcgaguuucaguucugcaacgaccccuuccugggcguguacuaccacaagaacaacaagagcuggauggagagcgaguuccgggucuacagcagcgcuaacaauugcaccuucgaguacgugagccagcccuuccugauggaccucgagggcaagcagggcaacuucaagaaccugcgggaguucguguucaagaacaucgauggcuacuucaagaucuacagcaagcacacccccaucaaccuggugcgggaccugccccagggauucagcgcccuggagccucugguggaccugcccaucggcaucaacaucaccagguuccagacccugcuggcccugcaccggagcuaccugacccccggcgacagcagcagcggcuggaccgccggcgccgccgcauacuacgugggcuaccugcagccacggaccuuccugcugaaguacaacgagaacggcaccaucaccgacgccguggacugcgcccuggacccccugagcgagaccaagugcacccuaaagagcuucaccguggagaagggcaucuaccagaccagcaacuuccgggugcagcccacugagagcaucgugcgguuccccaacauuaccaaccugugucccuucggcgagguguucaacgccacccgguucgccagcguguacgccuggaaccggaagcggaucagcaacugcguggccgacuacagcgugcuguacaacagcgccagcuucagcaccuucaagugcuacggcgugagcccuaccaagcugaacgaccugugcuucaccaacguguacgcugacagcuucgugauccggggcgacgaggugcggcagaucgcccccggccagaccggcaagaucgccgacuacaacuacaagcugcccgacgacuucaccggcugcgugaucgccuggaacagcaacaaccuggacagcaaggugggcggcaacuacaacuaccuguaccggcuguuccguaagagcaaccugaagccauucgagcgggacaucagcaccgagaucuaccaggccggcagcacccccugcaacgguguggagggcuuuaacugcuacuucccccugcagagcuacggcuuccagcccaccaacggcgugggcuaccagcccuaccgggugguggugcugagcuucgagcugcugcacgcccccgccaccgugugcggcccuaaaaagagcaccaaccuggugaagaacaagugcgugaacuucaauuucaacggccugaccggcaccggcgugcugaccgagagcaacaagaaguuccugcccuuccagcaguucggccgggauaucgccgacaccaccgacgcagugcgggacccccagacccuggagauccuggacaucaccccaugcagcuucggcggcgugagcgucaucacccccggcacaaacaccagcaaccagguggccgugcuguaccagggagugaacugcaccgaggugcccguggccauccacgccgaccagcugacccccaccuggcggguguacagcaccggcagcaacguguuccagacccgggccggcugccugaucggcgccgagcacgugaacaacuccuacgagugcgacauccccaucggcgcuggcaucugcgccagcuaccagacccagaccaacagcccccggcgggcccggagcguggccagccagagcgugaucgccuacaccaugagcuuaggcgccgagaacagcguggccuacagcaacaacagcaucgcgaucccuaccaacuucaccaucagcgugaccaccgagauccugcccgugagcaugaccaagaccagcguggacuguaccauguacauaugcggcgacagcaccgagugcagcaaccugcugcugcaguacggcagcuucugcacccagcugaaccgggcccugaccggcaucgccguggagcaggacaagaacacccaagagguguucgcccaggugaagcagaucuacaagacucccccaaucaaggacuucggcggcuucaacuucagccagauccugcccgaccccagcaagcccagcaagcggagcuucaucgaggaccugcuguucaacaaggugacccuggccgacgccggcuucaucaagcaguacggcgacugccugggggauaucgccgcucgggaccugaucugcgcccagaaguucaacggccugaccgugcugcccccucugcugaccgacgagaugaucgcccaguacaccagcgcccugcuugccggcaccaucaccagcggcuggaccuucggcgccggcgcagcccugcagauccccuucgccaugcagauggccuaccgguucaacggcaucggcgugacccagaacgugcuguacgagaaccagaagcugaucgccaaccaguucaacagcgccaucggcaagauccaggacagccugagcagcaccgccagcgcccugggcaagcugcaggacguggugaaccagaacgcucaggcccugaacacccuggugaagcagcugagcagcaacuucggcgccaucagcucagugcugaaugacauccugagcaggcuggacaagguggaggccgaggugcagaucgaccggcugaucaccggccggcugcagagccugcagaccuacgugacccagcagcugauccgggccgccgagauccgggccagcgccaaccuggcagccaccaagaugagcgagugcgugcugggccagagcaagcggguggacuuuugcggcaagggcuaccaccugaugagcuucccccagagcgccccacacggcguggucuuccuccacgugacauacgugcccgcccaggagaagaacuucaccaccgcccccgccaucugccacgacggcaaggcucacuucccccgggagggaguguucgugagcaacggcacccacugguucgugacccagcggaacuucuacgagccccagauuaucaccaccgacaacaccuucgugagcggcaacugcgacguggugaucggcaucgugaacaacaccguguacgacccccugcagccugagcuggacagcuucaaggaggagcuggacaaguacuucaagaaccacaccagccccgacguggaucugggcgacaucagcggcaucaacgccagcguggugaacauccagaaggagaucgaccggcugaacgagguggccaagaaccugaacgagagccugaucgaccugcaggagcugggcaaguacgagcaguacaucaaguggcccugguacaucuggcugggcuucaucgccggccugaucgccaucgugauggugaccaucaugcugugcugcaugaccagcugcuguagcugccugaagggcugcugcagcugcggcagcugcugcaaguucgacgaggacgacagcgagccagugcugaagggcgugaagcugcacuacaccugaggacuaguuauaagacugacuagcccgaugggccucccaacgggcccuccuccccuccuugcaccgagagaucuaaaaaaaaaaaaaaaaaaaaaaaaaaaaaaaaaaaaaaaaaaaaaaaaaaaaaaaaaaaaaaaaaaaaaaaaaaaaaaaaaaaaaaaaaaaaaaaaaaaa

SEQ ID NO: 25892 - RNA, 4011 nt, Artificial Sequence
  SARS-CoV-2/Wuhan/WIV05/2019__EPI_ISL_402128 spike protein mRNA gc (1-1273)(D614G_M1229I)
aggagaaagcuuaccauguucguguuccuggugcugcugccccuggugagcagccagugcgugaaccugaccacccggacccagcugcccccugccuacaccaacagcuucacccggggcguguacuaccccgacaagguguuccggagcagcgugcugcacagcacccaggaccuguuccugcccuucuucagcaacgugaccugguuccacgccauccacgugagcggcaccaacggcaccaagcgguucgacaacccagugcugcccuucaacgacggcguguacuucgccagcaccgagaagucaaacaucauccggggcuggaucuucggcaccacccuggacagcaagacacagagccugcugaucgugaacaacgccaccaacguggugaucaaggugugcgaguuucaguucugcaacgaccccuuccugggcguguacuaccacaagaacaacaagagcuggauggagagcgaguuccgggucuacagcagcgcuaacaauugcaccuucgaguacgugagccagcccuuccugauggaccucgagggcaagcagggcaacuucaagaaccugcgggaguucguguucaagaacaucgauggcuacuucaagaucuacagcaagcacacccccaucaaccuggugcgggaccugccccagggauucagcgcccuggagccucugguggaccugcccaucggcaucaacaucaccagguuccagacccugcuggcccugcaccggagcuaccugacccccggcgacagcagcagcggcuggaccgccggcgccgccgcauacuacgugggcuaccugcagccacggaccuuccugcugaaguacaacgagaacggcaccaucaccgacgccguggacugcgcccuggacccccugagcgagaccaagugcacccuaaagagcuucaccguggagaagggcaucuaccagaccagcaacuuccgggugcagcccacugagagcaucgugcgguuccccaacauuaccaaccugugucccuucggcgagguguucaacgccacccgguucgccagcguguacgccuggaaccggaagcggaucagcaacugcguggccgacuacagcgugcuguacaacagcgccagcuucagcaccuucaagugcuacggcgugagcccuaccaagcugaacgaccugugcuucaccaacguguacgcugacagcuucgugauccggggcgacgaggugcggcagaucgcccccggccagaccggcaagaucgccgacuacaacuacaagcugcccgacgacuucaccggcugcgugaucgccuggaacagcaacaaccuggacagcaaggugggcggcaacuacaacuaccuguaccggcuguuccguaagagcaaccugaagccauucgagcgggacaucagcaccgagaucuaccaggccggcagcacccccugcaacgguguggagggcuuuaacugcuacuucccccugcagagcuacggcuuccagcccaccaacggcgugggcuaccagcccuaccgggugguggugcugagcuucgagcugcugcacgcccccgccaccgugugcggcccuaaaaagagcaccaaccuggugaagaacaagugcgugaacuucaauuucaacggccugaccggcaccggcgugcugaccgagagcaacaagaaguuccugcccuuccagcaguucggccgggauaucgccgacaccaccgacgcagugcgggacccccagacccuggagauccuggacaucaccccaugcagcuucggcggcgugagcgucaucacccccggcacaaacaccagcaaccagguggccgugcuguaccagggagugaacugcaccgaggugcccguggccauccacgccgaccagcugacccccaccuggcggguguacagcaccggcagcaacguguuccagacccgggccggcugccugaucggcgccgagcacgugaacaacuccuacgagugcgacauccccaucggcgcuggcaucugcgccagcuaccagacccagaccaacagcccccggcgggcccggagcguggccagccagagcaucaucgccuacaccaugagcuuaggcgccgagaacagcguggccuacagcaacaacagcaucgcgaucccuaccaacuucaccaucagcgugaccaccgagauacugcccgugagcaugaccaagaccagcguggacuguaccauguacaucugcggcgacagcaccgagugcagcaaccugcugcugcaguacggcagcuucugcacccagcugaaccgggcccugaccggcaucgccguggagcaggacaagaacacccaagagguguucgcccaggugaagcagaucuacaagacucccccaaucaaggacuucggcggcuucaacuucagccagauccugcccgaccccagcaagcccagcaagcggagcuucaucgaggaccugcuguucaacaaggugacccuggccgacgccggcuucaucaagcaguacggcgacugccugggggauaucgccgcucgggaccugaucugcgcccagaaguucaacggccugaccgugcugcccccucugcugaccgacgagaugaucgcccaguacaccagcgcccugcuugccggcaccaucaccagcggcuggaccuucggcgccggcgcagcccugcagauccccuucgccaugcagauggccuaccgguucaacggcaucggcgugacccagaacgugcuguacgagaaccagaagcugaucgccaaccaguucaacagcgccaucggcaagauccaggacagccugagcagcaccgccagcgcccugggcaagcugcaggacguggugaaccagaacgcucaggcccugaacacccuggugaagcagcugagcagcaacuucggcgccaucagcucagugcugaaugacauccugagcaggcuggacaagguggaggccgaggugcagaucgaccggcugaucaccggccggcugcagagccugcagaccuacgugacccagcagcugauccgggccgccgagauccgggccagcgccaaccuggcagccaccaagaugagcgagugcgugcugggccagagcaagcggguggacuuuugcggcaagggcuaccaccugaugagcuucccccagagcgccccacacggcgugguguuccuccacgucacauacgugcccgcccaggagaagaacuucaccaccgcccccgccauuugccacgacggcaaggcucacuucccccgggagggaguguucgugagcaacggcacccacugguucgugacccagcggaacuucuacgagccccagaucaucaccaccgacaacaccuucgugagcggcaacugcgacguggugaucggcaucgugaacaacaccguguacgacccccugcagccugagcuggacagcuucaaggaggagcuggacaaguacuucaagaaccacaccagccccgacguggaucugggcgacaucagcggcaucaacgccagcguggugaacauccagaaggagaucgaccggcugaacgagguggccaagaaccugaacgagagccugaucgaccugcaggagcugggcaaguacgagcaguacaucaaguggcccugguacaucuggcugggcuucaucgccggccugaucgccaucgugaucgugaccaucaugcugugcugcaugaccagcugcuguagcugccugaagggcugcugcagcugcggcagcugcugcaaguucgacgaggacgacagcgagccagugcugaagggcgugaagcugcacuacaccugaggacuaguuauaagacugacuagcccgaugggccucccaacgggcccuccuccccuccuugcaccgagagaucuaaaaaaaaaaaaaaaaaaaaaaaaaaaaaaaaaaaaaaaaaaaaaaaaaaaaaaaaaaaaaaaaaaaaaaaaaaaaaaaaaaaaaaaaaaaaaaaaaaaa

SEQ ID NO: 25893 - RNA, 4005 nt, Artificial Sequence
  SARS-CoV-2/Wuhan/WIV05/2019__EPI_ISL_402128 spike protein mRNA gc (1-1273)(H69del_V70del_A222V_Y453F_S477N_D614G_I692V)
aggagaaagcuuaccauguucguguuccuggugcugcugccccuggugagcagccagugcgugaaccugaccacccggacccagcugcccccugccuacaccaacagcuucacccggggcguguacuaccccgacaagguguuccggagcagcgugcugcacagcacccaggaccuguuccugcccuucuucagcaacgugaccugguuccacgccaucagcggcaccaacggcaccaagcgguucgacaacccagugcugcccuucaacgacggcguguacuucgccagcaccgagaagucaaacaucauccggggcuggaucuucggcaccacccuggacagcaagacacagagccugcugaucgugaacaacgccaccaacguggugaucaaggugugcgaguuucaguucugcaacgaccccuuccugggcguguacuaccacaagaacaacaagagcuggauggagagcgaguuccggguguacagcagcgcuaacaauugcaccuucgaguacgucagccagcccuuccugauggaccucgagggcaagcagggcaacuucaagaaccugcgggaguucguguucaagaacaucgauggcuacuucaagaucuacagcaagcacacccccaucaaccuggugcgggaccugccccagggauucagcgugcuggagccucugguggaccugcccaucggcaucaacaucaccagguuccagacccugcuggcccugcaccggagcuaccugacccccggcgacagcagcagcggcuggaccgccggcgccgccgccuacuacgugggcuaccugcagccacggaccuuccugcugaaguacaacgagaacggcaccaucaccgacgcaguggacugcgcccuggacccccugagcgagaccaagugcacccuaaagagcuucaccguggagaagggcaucuaccagaccagcaacuuccgggugcagcccacugagagcaucgugcgguuccccaacauuaccaaccugugucccuucggcgagguguucaacgccacccgguucgccagcguguacgccuggaaccggaagcggaucagcaacugcguggccgacuacagcgugcuguacaacagcgccagcuucagcaccuucaagugcuacggcgugagcccuaccaagcugaacgaccugugcuucaccaacguguacgccgacagcuucgugauccggggcgacgaggugcggcagaucgcucccggccagaccggcaagaucgccgacuacaacuacaagcugcccgacgacuucaccggcugcgugaucgccuggaacagcaacaaccuggacagcaaggugggcggcaacuacaacuaccuguuccggcuguuccguaagagcaaccugaagccauuugagcgggacaucagcaccgagaucuaccaggccggcaacacccccugcaacgguguggagggcuucaacugcuacuucccccugcagagcuacggcuuccagcccaccaacggcgugggcuaccagcccuaccgggugguggugcugagcuucgagcugcugcacgcccccgccaccgugugcggcccuaaaaagagcaccaaccuggugaagaacaagugcgugaauuucaacuucaacggccugaccggcaccggcgugcugaccgagagcaacaagaaguuccugcccuuccagcaguucggccgggauaucgccgacaccaccgacgccgugcgggacccccagacccuggagauccuggacaucaccccaugcagcuucggcggcgugagcgucaucacccccggcacaaacaccagcaaccagguggcagugcuguaccagggagugaacugcaccgaggugcccguggccauccacgccgaccagcugacccccaccuggcggguguacagcaccggcagcaacguguuccagacccgggccggcugccugaucggcgccgagcacgugaacaacagcuacgagugcgacauccccaucggcgccggcaucugcgcuuccuaccagacccagaccaacagcccccggcgggcccggagcguggccagccagagcgugaucgccuacaccaugagcuuaggcgccgagaacagcguggccuacagcaacaacagcaucgccaucccuaccaacuucaccaucagcgugaccaccgagauccugcccgugagcaugaccaagaccagcguggacuguaccauguacauaugcggcgacagcaccgagugcagcaaccugcugcugcaguacggcagcuucugcacccagcugaaccgggcgcugaccggcaucgccguggagcaggacaagaacacccaagagguguucgcccaggugaagcagaucuacaagacucccccaaucaaggacuucggcggcuucaacuucagccagauccugcccgaccccagcaagcccagcaagcggagcuucaucgaggaccugcuguucaacaaggugacccuggccgacgccggcuucaucaagcaguacggcgacugccugggggauaucgccgcccgggaccugaucugcgcucagaaguucaacggccugaccgugcugcccccucugcugaccgacgagaugaucgcccaguacaccagcgcccugcuugccggcaccaucaccagcggcuggaccuucggcgccggcgccgcacugcagauccccuucgccaugcagauggccuaccgguucaacggcaucggcgugacccagaacgugcuguacgagaaccagaagcugaucgccaaccaguucaacagcgccaucggcaagauccaggacagccugagcagcaccgccagcgcccugggcaagcugcaggacguggugaaccagaacgcccaggcucugaacacccuggugaagcagcugagcagcaauuuuggcgccaucagcagcgugcugaacgacauccugucaaggcuggacaagguggaggccgaggugcagaucgaccggcugaucaccggccggcugcagagccugcagaccuacgugacccagcagcugauccgggccgccgagauccgggccagcgccaaccuggccgcaaccaagaugagcgagugcgugcugggccagagcaagcggguggacuucugcggcaagggcuaccaccugaugagcuucccccagagcgccccacacggcguggucuuccuccacgugacauacgugcccgcccaggagaagaacuucaccaccgcccccgccaucugccacgacggcaaggcccacuucccccgggagggaguguucgugagcaacggcacccacugguucgugacccagcggaacuucuacgagccccagauuaucaccaccgacaacaccuucgugagcggcaacugcgacguggugaucggcaucgugaacaacaccguguacgacccccugcagccugagcuggacagcuucaaggaggagcuggacaaguacuucaagaaccacaccagccccgacguggaucugggcgacaucagcggcaucaacgcuagcguggugaacauccagaaggagaucgaccggcugaacgagguggccaagaaccugaacgagagccugaucgaccugcaggagcugggcaaguacgagcaguacaucaaguggcccugguacaucuggcugggcuucaucgccggccugaucgccaucgugauggugaccaucaugcugugcugcaugaccagcugcuguagcugccugaagggcugcugcagcugcggcagcugcugcaaguucgacgaggacgacagcgagccagugcugaagggcgugaagcugcacuacaccugaggacuaguuauaagacugacuagcccgaugggccucccaacgggcccuccuccccuccuugcaccgagagaucuaaaaaaaaaaaaaaaaaaaaaaaaaaaaaaaaaaaaaaaaaaaaaaaaaaaaaaaaaaaaaaaaaaaaaaaaaaaaaaaaaaaaaaaaaaaaaaaaaaaa

SEQ ID NO: 25894 - RNA, 4005 nt, Artificial Sequence
  SARS-CoV-2/Wuhan/WIV05/2019__EPI_ISL_402128 spike protein mRNA gc (1-1273)(H69del_V70del_Y453F_D614G_I692V_M1229I)
aggagaaagcuuaccauguucguguuccuggugcugcugccccuggugagcagccagugcgugaaccugaccacccggacccagcugcccccugccuacaccaacagcuucacccggggcguguacuaccccgacaagguguuccggagcagcgugcugcacagcacccaggaccuguuccugcccuucuucagcaacgugaccugguuccacgccaucagcggcaccaacggcaccaagcgguucgacaacccagugcugcccuucaacgacggcguguacuucgccagcaccgagaagucaaacaucauccggggcuggaucuucggcaccacccuggacagcaagacacagagccugcugaucgugaacaacgccaccaacguggugaucaaggugugcgaguuucaguucugcaacgaccccuuccugggcguguacuaccacaagaacaacaagagcuggauggagagcgaguuccggguguacagcagcgcuaacaauugcaccuucgaguacgucagccagcccuuccugauggaccucgagggcaagcagggcaacuucaagaaccugcgggaguucguguucaagaacaucgauggcuacuucaagaucuacagcaagcacacccccaucaaccuggugcgggaccugccccagggauucagcgcccuggagccucugguggaccugcccaucggcaucaacaucaccagguuccagacccugcuggcccugcaccggagcuaccugacccccggcgacagcagcagcggcuggaccgccggcgccgccgcauacuacgugggcuaccugcagccacggaccuuccugcugaaguacaacgagaacggcaccaucaccgacgccguggacugcgcccuggacccccugagcgagaccaagugcacccuaaagagcuucaccguggagaagggcaucuaccagaccagcaacuuccgggugcagcccacugagagcaucgugcgguuccccaacauuaccaaccugugucccuucggcgagguguucaacgccacccgguucgccagcguguacgccuggaaccggaagcggaucagcaacugcguggccgacuacagcgugcuguacaacagcgccagcuucagcaccuucaagugcuacggcgugagcccuaccaagcugaacgaccugugcuucaccaacguguacgcugacagcuucgugauccggggcgacgaggugcggcagaucgcccccggccagaccggcaagaucgccgacuacaacuacaagcugcccgacgacuucaccggcugcgugaucgccuggaacagcaacaaccuggacagcaaggugggcggcaacuacaacuaccuguuccggcuguuccguaagagcaaccugaagccauuugagcgggacaucagcaccgagaucuaccaggccggcagcacccccugcaacgguguggagggcuucaacugcuacuucccccugcagagcuacggcuuccagcccaccaacggcgugggcuaccagcccuaccgggugguggugcugagcuucgagcugcugcacgcccccgccaccgugugcggcccuaaaaagagcaccaaccuggugaagaacaagugcgugaacuucaauuucaacggccugaccggcaccggcgugcugaccgagagcaacaagaaguuccugcccuuccagcaguucggccgggauaucgccgacaccaccgacgcagugcgggacccccagacccuggagauccuggacaucaccccaugcagcuucggcggcgugagcgugaucacccccggcacaaacaccagcaaccaggucgccgugcuguaccagggagugaacugcaccgaggugcccguggccauccacgccgaccagcugacccccaccuggcggguguacagcaccggcagcaacguguuccagacccgggccggcugccugaucggcgccgagcacgugaacaacuccuacgagugcgacauccccaucggcgcuggcaucugcgccagcuaccagacccagaccaacagcccccggcgggcccggagcguggccagccagagcgugaucgccuacaccaugagcuuaggcgccgagaacagcguggccuacagcaacaacagcaucgcgaucccuaccaacuucaccaucagcgugaccaccgagauccugcccgugagcaugaccaagaccagcguggacuguaccauguacauaugcggcgacagcaccgagugcagcaaccugcugcugcaguacggcagcuucugcacccagcugaaccgggcccugaccggcaucgccguggagcaggacaagaacacccaagagguguucgcccaggugaagcagaucuacaagacucccccaaucaaggacuucggcggcuucaacuucagccagauccugcccgaccccagcaagcccagcaagcggagcuucaucgaggaccugcuguucaacaaggugacccuggccgacgccggcuucaucaagcaguacggcgacugccugggggauaucgccgcucgggaccugaucugcgcccagaaguucaacggccugaccgugcugcccccucugcugaccgacgagaugaucgcccaguacaccagcgcccugcuugccggcaccaucaccagcggcuggaccuucggcgccggcgcagcccugcagauccccuucgccaugcagauggccuaccgguucaacggcaucggcgugacccagaacgugcuguacgagaaccagaagcugaucgccaaccaguucaacagcgccaucggcaagauccaggacagccugagcagcaccgccagcgcccugggcaagcugcaggacguggugaaccagaacgcucaggcccugaacacccuggugaagcagcugagcagcaacuuuggcgccaucagcucagugcugaaugacauccugagcaggcuggacaagguggaggccgaggugcagaucgaccggcugaucaccggccggcugcagagccugcagaccuacgugacccagcagcugauccgggccgccgagauccgggccagcgccaaccuggcagccaccaagaugagcgagugcgugcugggccagagcaagcggguggacuucugcggcaagggcuaccaccugaugagcuucccccagagcgccccacacggcgugguguuccuccacgucacauacgugcccgcccaggagaagaacuucaccaccgcccccgccaucugccacgacggcaaggcucacuucccccgggagggaguguucgugagcaacggcacccacugguucgugacccagcggaacuucuacgagccccagauuaucaccaccgacaacaccuucgugagcggcaacugcgacguggugaucggcaucgugaacaacaccguguacgacccccugcagccugagcuggacagcuucaaggaggagcuggacaaguacuucaagaaccacaccagccccgacguggaucugggcgacaucagcggcaucaacgccagcguggugaacauccagaaggagaucgaccggcugaacgagguggccaagaaccugaacgagagccugaucgaccugcaggagcugggcaaguacgagcaguacaucaaguggcccugguacaucuggcugggcuucaucgccggccugaucgccaucgugaucgugaccaucaugcugugcugcaugaccagcugcuguagcugccugaagggcugcugcagcugcggcagcugcugcaaguucgacgaggacgacagcgagccagugcugaagggcgugaagcugcacuacaccugaggacuaguuauaagacugacuagcccgaugggccucccaacgggcccuccuccccuccuugcaccgagagaucuaaaaaaaaaaaaaaaaaaaaaaaaaaaaaaaaaaaaaaaaaaaaaaaaaaaaaaaaaaaaaaaaaaaaaaaaaaaaaaaaaaaaaaaaaaaaaaaaaaaa

SEQ ID NO: 25895 - RNA, 4002 nt, Artificial Sequence
  SARS-CoV-2/Wuhan/WIV05/2019__EPI_ISL_402128 spike protein mRNA gc (1-1273)(H69del_V70del_Y144del_N501Y_A570D_D614G_P681H_T716I_S982 A_D1118H)
aggagaaagcuuaccauguucguguuccuggugcugcugccccuggugagcagccagugcgugaaccugaccacccggacccagcugcccccugccuacaccaacagcuucacccggggcguguacuaccccgacaagguguuccggagcagcgugcugcacagcacccaggaccuguuccugcccuucuucagcaacgugaccugguuccacgccaucagcggcaccaacggcaccaagcgguucgacaacccagugcugcccuucaacgacggcguguacuucgccagcaccgagaagucaaacaucauccggggcuggaucuucggcaccacccuggacagcaagacacagagccugcugaucgugaacaacgccaccaacguggugaucaaggugugcgaguuucaguucugcaacgaccccuuccugggcguguaccacaagaacaacaagagcuggauggagagcgaguuccggguguacagcagcgcuaacaauugcaccuucgaguacgucagccagcccuuccugauggaccucgagggcaagcagggcaacuucaagaaccugcgggaguucguguucaagaacaucgauggcuacuucaagaucuacagcaagcacacccccaucaaccuggugcgggaccugccccagggauucagcgcccuggagccucugguggaccugcccaucggcaucaacaucaccagguuccagacccugcuggcccugcaccggagcuaccugacccccggcgacagcagcagcggcuggaccgccggcgccgccgcauacuacgugggcuaccugcagccacggaccuuccugcugaaguacaacgagaacggcaccaucaccgacgccguggacugcgcccuggacccccugagcgagaccaagugcacccuaaagagcuucaccguggagaagggcaucuaccagaccagcaacuuccgggugcagcccacugagagcaucgugcgguuccccaacauuaccaaccugugucccuucggcgagguguucaacgccacccgguucgccagcguguacgccuggaaccggaagcggaucagcaacugcguggccgacuacagcgugcuguacaacagcgccagcuucagcaccuucaagugcuacggcgugagcccuaccaagcugaacgaccugugcuucaccaacguguacgcugacagcuucgugauccggggcgacgaggugcggcagaucgcccccggccagaccggcaagaucgccgacuacaacuacaagcugcccgacgacuucaccggcugcgugaucgccuggaacagcaacaaccuggacagcaaggugggcggcaacuacaacuaccuguaccggcuguuccguaagagcaaccugaagccauucgagcgggacaucagcaccgagaucuaccaggccggcagcacccccugcaacgguguggagggcuuuaacugcuacuucccccugcagagcuacggcuuccagcccaccuacggcgugggcuaccagcccuaccgggugguggugcugagcuucgagcugcugcacgcccccgccaccgugugcggcccuaaaaagagcaccaaccuggugaagaacaagugcgugaacuucaacuucaauggccugaccggcaccggcgugcugaccgagagcaacaagaaguuccugcccuuccagcaguucggccgggauaucgacgacaccaccgacgccgugcgggacccccagacccuggagauccuggacaucaccccaugcagcuucggcggcgugagcgugaucacccccggcacaaacaccagcaaccaggucgcagugcuguaccagggagugaacugcaccgaggugcccguggccauccacgccgaccagcugacccccaccuggcggguguacagcaccggcagcaacguguuccagacccgggccggcugccugaucggcgccgagcacgugaacaacuccuacgagugcgacauccccaucggcgccggcaucugcgcuagcuaccagacccagaccaacagccaccggcgggcccggagcguggccagccagagcaucaucgccuacaccaugagcuuaggcgccgagaacagcguggccuacagcaacaacagcaucgccauccccaucaacuucaccauaagcgugaccaccgagauccugccugugagcaugaccaagaccagcguggacuguaccauguacaucugcggcgacagcaccgagugcagcaaccugcugcugcaguacggcagcuucugcacccagcugaaccgggcgcugaccggcaucgccguggagcaggacaagaacacccaagagguguucgcccaggugaagcagaucuacaagaccccacccaucaaggacuucggcggcuucaacuucagccagauccugcccgaccccagcaagcccagcaagcggagcuucaucgaggaccugcuguucaacaaggugacucuggccgacgccggcuucaucaagcaguacggcgauugccugggggacaucgccgcccgggaccugaucugcgcucagaaguucaacggccugaccgugcugccuccccugcugaccgacgagaugaucgcccaguacaccagcgcccugcuugccggcaccaucaccagcggcuggaccuucggcgccggcgccgcacugcagauccccuucgccaugcagauggccuaccgguucaacggcaucggcgugacccagaacgugcuguacgagaaccagaagcugaucgccaaccaguucaacagcgccaucggcaagauccaggacagccugagcagcaccgccagcgcccugggcaagcugcaggacguggugaaccagaacgcccaggcucugaacacccuggugaagcagcugagcagcaacuucggcgccaucagcucagugcugaacgacauccuggccaggcuggacaagguggaggccgaggugcagaucgaccggcugaucaccggccggcugcagagccugcagaccuacgugacccagcagcugauccgggccgccgagauucgggccagcgccaaucuggcagccaccaagaugagcgagugcgugcugggccagagcaagcggguggacuuuugcggcaagggcuaccaccugaugagcuucccccagagcgcuccccacggcgugguguuccuccacgugaccuacgucccagcccaggagaagaacuucacaaccgcccccgccaucugccacgacggcaaggcccacuucccccgggagggaguguucgugagcaacggcacccacugguucgugacccagcggaacuucuacgagccccagaucaucaccacccacaacaccuucgugagcggcaacugcgacguggugaucggcaucgugaacaacaccguguacgacccccugcagcccgagcuggacagcuucaaggaggagcuggacaaguacuucaagaaccacaccagcccugacguggaucugggcgacaucagcggcaucaacgccagcguggugaacauccagaaggagaucgaccggcugaacgagguggccaagaaccugaacgagagccugaucgaccugcaggagcugggcaaguacgagcaguacaucaaguggcccugguacaucuggcugggcuucaucgccggccugaucgccaucgugauggugaccaucaugcugugcugcaugaccagcugcuguagcugccugaagggcugcugcagcugcggcagcugcugcaaguucgacgaggacgacagcgagcccgugcugaagggcgugaagcugcacuacaccugaggacuaguuauaagacugacuagcccgaugggccucccaacgggcccuccuccccuccuugcaccgagagaucuaaaaaaaaaaaaaaaaaaaaaaaaaaaaaaaaaaaaaaaaaaaaaaaaaaaaaaaaaaaaaaaaaaaaaaaaaaaaaaaaaaaaaaaaaaaaaaaaaaaa

SEQ ID NO: 25896 - RNA, 4011 nt, Artificial Sequence
  SARS-CoV-2/Wuhan/WIV05/2019__EPI_ISL_402128 spike protein mRNA gc (1-1273)(K417N_E484K_N501Y_D614G)
aggagaaagcuuaccauguucguguuccuggugcugcugccccuggugagcagccagugcgugaaccugaccacccggacccagcugcccccugccuacaccaacagcuucacccggggcguguacuaccccgacaagguguuccggagcagcgugcugcacagcacccaggaccuguuccugcccuucuucagcaacgugaccugguuccacgccauccacgugagcggcaccaacggcaccaagcgguucgacaacccagugcugcccuucaacgacggcguguacuucgccagcaccgagaagucaaacaucauccggggcuggaucuucggcaccacccuggacagcaagacacagagccugcugaucgugaacaacgccaccaacguggugaucaaggugugcgaguuucaguucugcaacgaccccuuccugggcguguacuaccacaagaacaacaagagcuggauggagagcgaguuccgggucuacagcagcgcuaacaauugcaccuucgaguacgugagccagcccuuccugauggaccucgagggcaagcagggcaacuucaagaaccugcgggaguucguguucaagaacaucgauggcuacuucaagaucuacagcaagcacacccccaucaaccuggugcgggaccugccccagggauucagcgcccuggagccucugguggaccugcccaucggcaucaacaucaccagguuccagacccugcuggcccugcaccggagcuaccugacccccggcgacagcagcagcggcuggaccgccggcgccgccgcauacuacgugggcuaccugcagccacggaccuuccugcugaaguacaacgagaacggcaccaucaccgacgccguggacugcgcccuggacccccugagcgagaccaagugcacccuaaagagcuucaccguggagaagggcaucuaccagaccagcaacuuccgggugcagcccacugagagcaucgugcgguuccccaacauuaccaaccugugucccuucggcgagguguucaacgccacccgguucgccagcguguacgccuggaaccggaagcggaucagcaacugcguggccgacuacagcgugcuguacaacagcgccagcuucagcaccuucaagugcuacggcgugagcccuaccaagcugaacgaccugugcuucaccaacguguacgcugacagcuucgugauccggggcgacgaggugcggcagaucgcccccggccagaccggcaacaucgccgacuacaacuacaagcugcccgacgacuucaccggcugcgugaucgccuggaacagcaacaaccuggacagcaaggugggcggcaacuacaacuaccuguaccggcuguuccguaagagcaaccugaagccauucgagcgggacaucagcaccgagaucuaccaggccggcagcacccccugcaacggugugaagggcuuuaacugcuacuucccccugcagagcuacggcuuccagcccaccuacggcgugggcuaccagcccuaccgggugguggugcugagcuucgagcugcugcacgcccccgccaccgugugcggcccuaaaaagagcaccaaccuggugaagaacaagugcgugaacuucaauuucaacggccugaccggcaccggcgugcugaccgagagcaacaagaaguuccugcccuuccagcaguucggccgggauaucgccgacaccaccgacgcagugcgggacccccagacccuggagauccuggacaucaccccaugcagcuucggcggcgugagcgucaucacccccggcacaaacaccagcaaccagguggccgugcuguaccagggagugaacugcaccgaggugcccguggccauccacgccgaccagcugacccccaccuggcggguguacagcaccggcagcaacguguuccagacccgggccggcugccugaucggcgccgagcacgugaacaacuccuacgagugcgacauccccaucggcgcuggcaucugcgccagcuaccagacccagaccaacagcccccggcgggcccggagcguggccagccagagcaucaucgccuacaccaugagcuuaggcgccgagaacagcguggccuacagcaacaacagcaucgcgaucccuaccaacuucaccaucagcgugaccaccgagauacugcccgugagcaugaccaagaccagcguggacuguaccauguacaucugcggcgacagcaccgagugcagcaaccugcugcugcaguacggcagcuucugcacccagcugaaccgggcccugaccggcaucgccguggagcaggacaagaacacccaagagguguucgcccaggugaagcagaucuacaagacucccccaaucaaggacuucggcggcuucaacuucagccagauccugcccgaccccagcaagcccagcaagcggagcuucaucgaggaccugcuguucaacaaggugacccuggccgacgccggcuucaucaagcaguacggcgacugccugggggauaucgccgcucgggaccugaucugcgcccagaaguucaacggccugaccgugcugcccccucugcugaccgacgagaugaucgcccaguacaccagcgcccugcuugccggcaccaucaccagcggcuggaccuucggcgccggcgcagcccugcagauccccuucgccaugcagauggccuaccgguucaacggcaucggcgugacccagaacgugcuguacgagaaccagaagcugaucgccaaccaguucaacagcgccaucggcaagauccaggacagccugagcagcaccgccagcgcccugggcaagcugcaggacguggugaaccagaacgcucaggcccugaacacccuggugaagcagcugagcagcaacuucggcgccaucagcucagugcugaaugacauccugagcaggcuggacaagguggaggccgaggugcagaucgaccggcugaucaccggccggcugcagagccugcagaccuacgugacccagcagcugauccgggccgccgagauccgggccagcgccaaccuggcagccaccaagaugagcgagugcgugcugggccagagcaagcggguggacuuuugcggcaagggcuaccaccugaugagcuucccccagagcgccccacacggcgugguguuccuccacgucacauacgugcccgcccaggagaagaacuucaccaccgcccccgccauuugccacgacggcaaggcucacuucccccgggagggaguguucgugagcaacggcacccacugguucgugacccagcggaacuucuacgagccccagaucaucaccaccgacaacaccuucgugagcggcaacugcgacguggugaucggcaucgugaacaacaccguguacgacccccugcagccugagcuggacagcuucaaggaggagcuggacaaguacuucaagaaccacaccagccccgacguggaucugggcgacaucagcggcaucaacgccagcguggugaacauccagaaggagaucgaccggcugaacgagguggccaagaaccugaacgagagccugaucgaccugcaggagcugggcaaguacgagcaguacaucaaguggcccugguacaucuggcugggcuucaucgccggccugaucgccaucgugauggugaccaucaugcugugcugcaugaccagcugcuguagcugccugaagggcugcugcagcugcggcagcugcugcaaguucgacgaggacgacagcgagccagugcugaagggcgugaagcugcacuacaccugaggacuaguuauaagacugacuagcccgaugggccucccaacgggcccuccuccccuccuugcaccgagagaucuaaaaaaaaaaaaaaaaaaaaaaaaaaaaaaaaaaaaaaaaaaaaaaaaaaaaaaaaaaaaaaaaaaaaaaaaaaaaaaaaaaaaaaaaaaaaaaaaaaaa

SEQ ID NO: 25897 - RNA, 4002 nt, Artificial Sequence
  SARS-CoV-2/Wuhan/WIV05/2019__EPI_ISL_402128 spike protein mRNA gc (1-1273)(L18F_D80A_D215G_L242del_A243del_L244del_R246I_K417N_E484 K_N501Y_D614G_A701V)
aggagaaagcuuaccauguucguguuccuggugcugcugccccuggugagcagccagugcgugaacuucaccacccggacccagcugcccccugccuacaccaacagcuucacccggggcguguacuaccccgacaagguguuccggagcagcgugcugcacagcacccaggaccuguuccugcccuucuucagcaacgugaccugguuccacgccauccacgugagcggcaccaacggcaccaagcgguucgccaacccagugcugcccuucaacgacggcguguacuucgccagcaccgagaagucaaacaucauccggggcuggaucuuuggcaccacccuggacagcaagacacagagccugcugaucgugaacaacgcuaccaacguggugaucaaggugugcgaguuccaguucugcaacgaccccuuccugggcguguacuaccacaagaacaacaagagcuggauggagagcgaguuccgggucuacagcagcgccaacaauugcaccuucgaguacgugagccagcccuuccugauggaccuggagggcaagcagggcaacuucaagaaccuccgggaguucguguucaagaacaucgacggcuacuucaagaucuacagcaagcacacccccaucaaccuggugcggggacugccccagggcuucagcgcccuggagccucugguggaucugcccaucggcaucaacaucaccagguuccagacccugcacaucagcuaccugacccccggcgacagcagcagcggcuggaccgccggcgccgccgcauacuacgugggcuaccugcagccacggaccuuccugcugaaguacaacgagaacggcaccaucaccgacgccguggacugcgcccuggacccccugagcgagaccaagugcacccuuaagagcuucaccguggagaagggcaucuaccagaccagcaacuuccgggugcagcccacugagagcauugugcgguuccccaacaucaccaaccugugucccuucggcgagguguucaacgccacccgguucgccagcguguacgccuggaaccggaagcggaucagcaacugcguggccgacuacagcgugcuguacaacagcgccagcuucagcaccuucaagugcuacggcgugagcccuaccaagcugaacgaccugugcuucaccaacguguacgcugacagcuucgugauccggggcgacgaggugcggcagaucgcccccggccagaccggcaacaucgccgacuacaacuacaagcugcccgacgacuucaccggcugcgugaucgccuggaacagcaacaaccuggacagcaaggugggcggcaacuacaacuaccuguaccggcuauuccguaagagcaaccugaagccauuugagcgggacaucagcaccgagaucuaccaggccgguagcacccccugcaacggcgugaagggcuucaacugcuacuucccccugcagagcuacggcuuccagcccaccuacggcgugggcuaccagcccuaccgggugguggugcugagcuucgagcugcugcacgcccccgccaccgugugcggcccuaaaaagagcaccaaccuggugaagaacaagugcgugaacuucaauuucaacggccugaccggcaccggcgugcugaccgagagcaacaagaaguuccugcccuuccagcaguucggccgggacaucgccgacaccaccgaugcagugcgggacccccagacccuggagauccuggacaucaccccaugcagcuucggcggcgugagcgucaucacccccggaacaaacaccagcaaccagguggccgugcuguaccagggcgugaacugcaccgaggugcccguggccauccacgccgaccagcugacccccaccuggcggguguacagcaccggcagcaacguguuccagacccgggccggcugccugaucggcgccgagcacgugaacaacuccuacgagugcgacauccccaucggcgcuggcaucugcgccagcuaccagacccagaccaacagcccccggcgggcccggagcguggccagccagagcaucaucgccuacaccaugagccugggcguggagaacagcguggccuacagcaacaacagcaucgccaucccuaccaacuucaccauaagcgugaccaccgagauccugcccgugagcaugaccaagaccagcguggacuguaccauguacaucugcggcgacagcaccgagugcagcaaccuguuacugcaguacggcagcuucugcacccagcugaaccgggcgcugaccggcaucgccguggagcaggacaagaacacccaagagguguucgcccaggugaagcagaucuacaagacucccccaaucaaggacuucggcggcuucaacuucagccagauccugcccgaccccagcaagcccagcaagcggagcuucaucgaggaccugcuguucaacaaggugacccuggccgacgccggcuucaucaagcaguacggggacugccugggcgacaucgccgcccgggaccugaucugcgcucagaaguucaacggccugaccgugcugcccccucugcugaccgaugagaugaucgcccaguacaccagcgcccugcuggccggcaccaucaccagcggcuggaccuucggcgccggcgccgcacugcagauccccuucgccaugcagauggccuaccgguucaacggcaucggcgugacccagaacgugcuguacgagaaccagaagcugaucgccaaccaguucaacagcgccaucggcaagauccaggacagccugagcagcaccgccagcgcccugggcaagcugcaggacguggugaaccagaacgcccaggcucugaacacccuggugaagcagcugagcagcaacuuuggcgccaucagcucagugcugaaugacauccugagccggcuggacaagguggaggccgaggugcagaucgacaggcugaucaccggccggcugcagagccugcagaccuacgugacccagcagcugauccgggccgccgagauucgggccagcgccaaccuggccgcaaccaagaugagcgagugcgugcugggccagagcaagcggguggacuucugcggcaagggcuaccaccugaugagcuucccccagagcgccccacacggcguggucuuccugcacgugacauacgugcccgcccaggagaagaacuucaccaccgcccccgccaucugccacgacggaaaggcccacuucccccgggagggcguguucgugagcaacggcacccacugguucgugacccagcggaacuucuacgagccccagaucaucaccaccgacaacaccuucgugagcggcaacugcgacguggugaucggcaucgugaacaacaccguguacgacccccugcagccugagcuggacagcuucaaggaggagcucgacaaguacuucaagaaccacaccagccccgacguggaccugggcgacaucagcggcaucaacgcuagcguggugaacauccagaaggagaucgaucggcugaacgagguggccaagaaccugaacgagagccugaucgaccugcaggagcugggcaaguacgagcaguacaucaaguggcccugguacaucuggcugggcuucaucgccggccugaucgccaucgugauggugaccaucaugcugugcugcaugaccagcugcuguagcugccugaagggcugcugcagcugcggcagcugcugcaaguucgacgaggacgacagcgagccagugcugaagggcgugaagcugcacuacaccugaggacuaguuauaagacugacuagcccgaugggccucccaacgggcccuccuccccuccuugcaccgagagaucuaaaaaaaaaaaaaaaaaaaaaaaaaaaaaaaaaaaaaaaaaaaaaaaaaaaaaaaaaaaaaaaaaaaaaaaaaaaaaaaaaaaaaaaaaaaaaaaaaaaa

SEQ ID NO: 25898 - RNA, 4011 nt, Artificial Sequence
  SARS-CoV-2/Wuhan/WIV05/2019__EPI_ISL_402128 spike protein mRNA gc (1-1273)(E484K_D614G)
aggagaaagcuuaccauguucguguuccuggugcugcugccccuggugagcagccagugcgugaaccugaccacccggacccagcugcccccugccuacaccaacagcuucacccggggcguguacuaccccgacaagguguuccggagcagcgugcugcacagcacccaggaccuguuccugcccuucuucagcaacgugaccugguuccacgccauccacgugagcggcaccaacggcaccaagcgguucgacaacccagugcugcccuucaacgacggcguguacuucgccagcaccgagaagucaaacaucauccggggcuggaucuucggcaccacccuggacagcaagacacagagccugcugaucgugaacaacgccaccaacguggugaucaaggugugcgaguuucaguucugcaacgaccccuuccugggcguguacuaccacaagaacaacaagagcuggauggagagcgaguuccgggucuacagcagcgcuaacaauugcaccuucgaguacgugagccagcccuuccugauggaccucgagggcaagcagggcaacuucaagaaccugcgggaguucguguucaagaacaucgauggcuacuucaagaucuacagcaagcacacccccaucaaccuggugcgggaccugccccagggauucagcgcccuggagccucugguggaccugcccaucggcaucaacaucaccagguuccagacccugcuggcccugcaccggagcuaccugacccccggcgacagcagcagcggcuggaccgccggcgccgccgcauacuacgugggcuaccugcagccacggaccuuccugcugaaguacaacgagaacggcaccaucaccgacgccguggacugcgcccuggacccccugagcgagaccaagugcacccuaaagagcuucaccguggagaagggcaucuaccagaccagcaacuuccgggugcagcccacugagagcaucgugcgguuccccaacauuaccaaccugugucccuucggcgagguguucaacgccacccgguucgccagcguguacgccuggaaccggaagcggaucagcaacugcguggccgacuacagcgugcuguacaacagcgccagcuucagcaccuucaagugcuacggcgugagcccuaccaagcugaacgaccugugcuucaccaacguguacgcugacagcuucgugauccggggcgacgaggugcggcagaucgcccccggccagaccggcaagaucgccgacuacaacuacaagcugcccgacgacuucaccggcugcgugaucgccuggaacagcaacaaccuggacagcaaggugggcggcaacuacaacuaccuguaccggcuguuccguaagagcaaccugaagccauucgagcgggacaucagcaccgagaucuaccaggccggcagcacccccugcaacggugugaagggcuuuaacugcuacuucccccugcagagcuacggcuuccagcccaccaacggcgugggcuaccagcccuaccgggugguggugcugagcuucgagcugcugcacgcccccgccaccgugugcggcccuaaaaagagcaccaaccuggugaagaacaagugcgugaacuucaauuucaacggccugaccggcaccggcgugcugaccgagagcaacaagaaguuccugcccuuccagcaguucggccgggauaucgccgacaccaccgacgcagugcgggacccccagacccuggagauccuggacaucaccccaugcagcuucggcggcgugagcgucaucacccccggcacaaacaccagcaaccagguggccgugcuguaccagggagugaacugcaccgaggugcccguggccauccacgccgaccagcugacccccaccuggcggguguacagcaccggcagcaacguguuccagacccgggccggcugccugaucggcgccgagcacgugaacaacuccuacgagugcgacauccccaucggcgcuggcaucugcgccagcuaccagacccagaccaacagcccccggcgggcccggagcguggccagccagagcaucaucgccuacaccaugagcuuaggcgccgagaacagcguggccuacagcaacaacagcaucgcgaucccuaccaacuucaccaucagcgugaccaccgagauacugcccgugagcaugaccaagaccagcguggacuguaccauguacaucugcggcgacagcaccgagugcagcaaccugcugcugcaguacggcagcuucugcacccagcugaaccgggcccugaccggcaucgccguggagcaggacaagaacacccaagagguguucgcccaggugaagcagaucuacaagacucccccaaucaaggacuucggcggcuucaacuucagccagauccugcccgaccccagcaagcccagcaagcggagcuucaucgaggaccugcuguucaacaaggugacccuggccgacgccggcuucaucaagcaguacggcgacugccugggggauaucgccgcucgggaccugaucugcgcccagaaguucaacggccugaccgugcugcccccucugcugaccgacgagaugaucgcccaguacaccagcgcccugcuugccggcaccaucaccagcggcuggaccuucggcgccggcgcagcccugcagauccccuucgccaugcagauggccuaccgguucaacggcaucggcgugacccagaacgugcuguacgagaaccagaagcugaucgccaaccaguucaacagcgccaucggcaagauccaggacagccugagcagcaccgccagcgcccugggcaagcugcaggacguggugaaccagaacgcucaggcccugaacacccuggugaagcagcugagcagcaacuucggcgccaucagcucagugcugaaugacauccugagcaggcuggacaagguggaggccgaggugcagaucgaccggcugaucaccggccggcugcagagccugcagaccuacgugacccagcagcugauccgggccgccgagauccgggccagcgccaaccuggcagccaccaagaugagcgagugcgugcugggccagagcaagcggguggacuuuugcggcaagggcuaccaccugaugagcuucccccagagcgccccacacggcgugguguuccuccacgucacauacgugcccgcccaggagaagaacuucaccaccgcccccgccauuugccacgacggcaaggcucacuucccccgggagggaguguucgugagcaacggcacccacugguucgugacccagcggaacuucuacgagccccagaucaucaccaccgacaacaccuucgugagcggcaacugcgacguggugaucggcaucgugaacaacaccguguacgacccccugcagccugagcuggacagcuucaaggaggagcuggacaaguacuucaagaaccacaccagccccgacguggaucugggcgacaucagcggcaucaacgccagcguggugaacauccagaaggagaucgaccggcugaacgagguggccaagaaccugaacgagagccugaucgaccugcaggagcugggcaaguacgagcaguacaucaaguggcccugguacaucuggcugggcuucaucgccggccugaucgccaucgugauggugaccaucaugcugugcugcaugaccagcugcuguagcugccugaagggcugcugcagcugcggcagcugcugcaaguucgacgaggacgacagcgagccagugcugaagggcgugaagcugcacuacaccugaggacuaguuauaagacugacuagcccgaugggccucccaacgggcccuccuccccuccuugcaccgagagaucuaaaaaaaaaaaaaaaaaaaaaaaaaaaaaaaaaaaaaaaaaaaaaaaaaaaaaaaaaaaaaaaaaaaaaaaaaaaaaaaaaaaaaaaaaaaaaaaaaaaa

SEQ ID NO: 25899 - RNA, 4011 nt, Artificial Sequence
  SARS-CoV-2/Wuhan/WIV05/2019__EPI_ISL_402128 spike protein mRNA gc (1-1273)(L18F_T20N_P26S_D138Y_R190S_K417T_E484K_N501Y_D614G_H655Y _T1027I)
aggagaaagcuuaccauguucguguuccuggugcugcugccccuggugagcagccagugcgugaacuucaccaaccggacccagcugcccagcgccuacaccaacagcuucacccggggcguguacuacccugacaagguguuccggagcagcgugcugcacagcacccaggaccuguuccugcccuucuucagcaacgugaccugguuccacgccauccacgugagcggcaccaacggcaccaagcgguucgacaaccccgugcugccauucaacgacggcguguacuucgccagcaccgagaagucaaacaucauccggggcuggaucuuuggcaccacccuggacagcaagacccagagccugcugaucgugaacaacgccacaaacguggugaucaaggugugcgaguuccaguucugcaacuaccccuuccugggcguguacuaccacaagaacaacaagagcuggauggagagcgaguuccgggucuacagcagcgcuaauaacugcaccuucgaguacgugagccagcccuuccugauggaccuggagggcaagcagggcaacuucaagaaccucagcgaguucguguucaagaacaucgacggcuacuucaagaucuacagcaagcacacccccaucaaccuggugcgggaucugccccagggauucagcgcccuggagccccugguggaccugccuaucggcaucaacaucacccgguuccagacccugcuggcccugcacaggagcuaccugacccccggcgacagcagcagcggcuggaccgccggcgccgccgcauacuacgugggcuaccugcagccccggaccuuccugcugaaguacaacgagaacggcaccaucaccgacgccguggacugcgcccuggacccacugagcgagaccaagugcacccuaaagagcuucaccguggagaagggcaucuaccagaccagcaacuuccgggugcagcccaccgagagcaucgugcgguuccccaacauuacuaaccugugucccuucggcgagguguucaacgccacccgguucgccagcguguacgccuggaaccggaagcggaucagcaacugcguggccgacuacagcgugcuguacaacagcgccagcuucagcaccuucaagugcuacggcgugagccccaccaagcugaacgaccugugcuucaccaacguguacgcugacagcuucgugauccggggcgacgaggugcggcagaucgccccuggccagaccggcaccaucgccgacuacaacuacaagcugcccgacgacuucaccggcugcgugaucgccuggaacagcaacaaccuggacagcaaggugggcggcaacuacaacuaccuguaccggcuguuccguaagagcaaccugaagcccuuugagcgggacaucagcaccgagaucuaccaggccggcagcaccccaugcaacggugugaagggcuucaacugcuacuucccccugcagagcuacggcuuccagcccaccuacggcgugggcuaccagcccuaccgggugguggugcugagcuucgagcugcugcacgcccccgccaccgugugcggccccaaaaagagcaccaaccuggugaagaacaagugcgugaacuucaauuucaacggccugaccggcaccggcgugcugaccgagagcaacaagaaguuccugccuuuccagcaguucggccgggacaucgccgauaccaccgacgcagugcgggacccccagacccuggagauccuggacaucacccccugcagcuucggcggcgugagcgucaucaccccaggcacaaacaccagcaaccagguggccgugcuguaccagggagugaacugcaccgaggugcccguggccauccacgccgaccagcugacccccaccuggcggguguacuccaccggcagcaacguguuccagacccgggccggcugccugaucggcgccgaguacgugaacaacagcuacgagugcgacauccccaucggcgcuggcaucugcgccagcuaccagacccagaccaacagcccccggcgggcccggagcguggccagccagagcaucaucgccuacaccaugagccugggcgccgagaacagcguggccuacagcaacaacagcaucgcgauccccaccaacuucaccaucagcgugaccaccgagauauuaccugugagcaugaccaagaccagcguggacuguaccauguacaucugcggcgacagcaccgagugcagcaaccugcugcugcaguacggcagcuucugcacccagcugaaccgggcccugaccggcaucgccguggagcaggacaagaacacccaagagguguucgcccaggugaagcagaucuacaagacuccacccaucaaggacuucggcggcuucaacuucagccagauccugcccgaccccagcaagcccagcaagcggagcuucaucgaggaccugcuguucaacaaggugacccuggccgacgccggcuucaucaagcaguacggcgacugccugggggacaucgccgcucgggaucugaucugcgcccagaaguucaacggccugaccgugcugccuccccugcugaccgacgagaugaucgcccaguacaccagcgcccugcuggccggcaccaucaccagcggcuggaccuucggcgccggcgcagcccuucagauccccuucgccaugcagauggccuaccgguucaacggcaucggcgugacccagaacgugcuguacgagaaccagaagcugaucgccaaccaguucaacagcgccaucggcaagauccaggacagccugagcagcaccgccagcgcccugggcaagcugcaggacguggugaaccagaacgcucaggcccugaacacccuggugaagcagcugagcucaaacuuuggcgccaucagcagcgugcugaaugacauccugagccggcuggacaagguggaggccgaggugcagaucgacaggcugaucaccggccggcugcagagccugcagaccuacgugacccagcagcugauccgggccgccgagauccgggccagcgccaaccuggcagccauuaagaugagcgagugcgugcugggccagagcaagcggguggacuucugcggcaagggcuaccaccugaugagcuucccccagagcgcuccccacggcgugguguuccugcacgucaccuacgugccagcccaggagaagaacuucacaaccgcccccgccaucugccacgacggcaaggcccacuucccccgggagggaguguucgugagcaacggcacccacugguucgugacccagcggaacuucuacgagccccagaucaucaccaccgacaacaccuucgugagcggcaacugcgacguggugaucggcaucgugaacaacaccguguacgacccccuccagcccgagcuggacagcuucaaggaggagcuggacaaguacuucaagaaccacaccagcccugacguggaccugggcgauaucagcggcaucaacgccagcguggugaacauccagaaggagaucgaccggcugaacgagguggccaagaaccugaacgagagccugaucgaccugcaggagcugggcaaguacgagcaguacaucaaguggcccugguacaucuggcugggcuucaucgccggccugaucgccaucgugauggugaccaucaugcugugcugcaugaccagcugcuguagcugccugaagggcugcugcagcugcggcagcugcugcaaguucgacgaggacgacagcgagcccgugcugaagggcgugaagcugcacuacaccugaggacuaguuauaagacugacuagcccgaugggccucccaacgggcccuccuccccuccuugcaccgagagaucuaaaaaaaaaaaaaaaaaaaaaaaaaaaaaaaaaaaaaaaaaaaaaaaaaaaaaaaaaaaaaaaaaaaaaaaaaaaaaaaaaaaaaaaaaaaaaaaaaaaa

SEQ ID NO: 25900 - RNA, 4011 nt, Artificial Sequence
  SARS-CoV-2/Wuhan/WIV05/2019__EPI_ISL_402128 spike protein mRNA gc (1-1273)(S13I_W152C_L452R_D614G)
aggagaaagcuuaccauguucguguuccuggugcugcugccccuggugagcauccagugcgugaaccugaccacccggacccagcugcccccugccuacaccaacagcuucacccggggcguguacuaccccgacaagguguuccggagcagcgugcugcacagcacccaggaccuguuccugcccuucuucagcaacgugaccugguuccacgccauccacgugagcggcaccaacggcaccaagcgguucgacaacccagugcugcccuucaacgacggcguguacuucgccagcaccgagaagucaaacaucauccggggcuggaucuucggcaccacccuggacagcaagacacagagccugcugaucgugaacaacgccaccaacguggugaucaaggugugcgaguuucaguucugcaacgaccccuuccugggcguguacuaccacaagaacaacaagagcugcauggagagcgaguuccgggucuacagcagcgcuaacaauugcaccuucgaguacgugagccagcccuuccugauggaccucgagggcaagcagggcaacuucaagaaccugcgggaguucguguucaagaacaucgauggcuacuucaagaucuacagcaagcacacccccaucaaccuggugcgggaccugccccagggauucagcgcccuggagccucugguggaccugcccaucggcaucaacaucaccagguuccagacccugcuggcccugcaccggagcuaccugacccccggcgacagcagcagcggcuggaccgccggcgccgccgcauacuacgugggcuaccugcagccacggaccuuccugcugaaguacaacgagaacggcaccaucaccgacgccguggacugcgcccuggacccccugagcgagaccaaguguacccuaaagagcuucaccguggagaagggcaucuaccagaccagcaacuuccgggugcagcccacugagagcauugugcgguuccccaacaucaccaaccugugccccuucggcgagguguucaacgccacccgguucgccagcguguacgccuggaaccggaagcggaucagcaacugcguggccgacuacagcgugcuguacaacagcgccagcuucagcaccuucaagugcuacggcgugagcccuaccaagcugaacgaccugugcuucaccaacguguacgcugacagcuucgugauccggggcgacgaggugcggcagaucgcccccggccagaccggcaagaucgccgacuacaacuacaagcugcccgacgacuucaccggcugcgugaucgccuggaacagcaacaaccuggacagcaaggugggcggcaacuacaacuaccgguaccggcuguuccguaagagcaaccugaagccauucgagcgggacaucagcaccgagaucuaccaggccggcagcacccccugcaacgguguggagggcuuuaacugcuacuucccccugcagagcuacggcuuccagcccaccaacggcgugggcuaccagcccuaccgggugguggugcugagcuucgagcugcugcacgcccccgccaccgugugcggcccuaaaaagagcaccaaccuggugaagaacaagugcgugaacuucaauuucaacggccugaccggcaccggcgugcugaccgagagcaacaagaaguuccugcccuuccagcaguucggccgggauaucgccgacaccaccgacgcagugcgggacccccagacccuggagauccuggacaucaccccaugcagcuucggcggcgugagcgucaucacccccggcacaaacaccagcaaccagguggccgugcuguaccagggagugaacugcaccgaggugcccguggccauccacgccgaccagcugacccccaccuggcggguguacagcaccggcagcaacguguuccagacccgggccggcugccugaucggcgccgagcacgugaacaacagcuacgagugcgacauccccaucggcgcuggcaucugugccuccuaccagacccagaccaacagcccccggcgggcccggagcguggccagccagagcaucaucgccuacaccaugagccugggcgccgagaacagcguggccuacagcaacaacagcaucgcgaucccuaccaacuucaccauaagcgugaccaccgagaucuuacccgugagcaugaccaagaccagcguggacugcaccauguacaucugcggcgacagcaccgagugcagcaaccugcugcugcaguacggcagcuucugcacccagcugaaccgggcccugaccggcaucgccguggagcaggacaagaacacccaagagguguucgcccaggugaagcagaucuacaagacucccccaaucaaggacuucggcggcuucaacuucagccagauccugcccgaccccagcaagcccagcaagcggagcuucaucgaggaccugcuguucaacaaggugacccuggccgacgccggcuucaucaagcaguacggcgacugccugggggauaucgccgcucgggaccugaucugcgcccagaaguucaacggccugaccgugcugcccccucugcugaccgacgagaugaucgcccaguacaccagcgcccugcuggccggcaccaucaccagcggcuggaccuucggcgccggcgcagcccuucagauccccuucgccaugcagauggccuacagguucaacggcaucggcgugacccagaacgugcuguacgagaaccagaagcugaucgccaaccaguucaacagcgccaucggcaagauccaggacagccugagcagcaccgccagcgcccugggcaagcugcaggacguggugaaccagaacgcucaggcccugaacacccuggugaagcagcugagcagcaacuucggcgccaucagcagcgugcugaaugacauccugucacggcuggacaagguggaggccgaggugcagaucgaccggcugaucaccggccggcugcagagccugcagaccuacgugacccagcagcugauccgggccgccgagauucgggccagcgccaaccuggcagccaccaagaugagcgagugcgugcugggccagagcaagcggguggacuuuugcggcaagggcuaccaccugaugagcuucccccagagcgccccacacggcgugguguuccugcacgucacauacgugcccgcccaggagaagaacuucaccaccgcccccgccaucugccacgacggcaaggcucacuucccccgggagggaguguucgugagcaacggcacccacugguucgugacccagcggaacuucuacgagccccagaucaucaccaccgacaacaccuucgugagcggcaacugcgacguggugaucggcaucgugaacaacaccguguacgacccccuccagccugagcuggacagcuucaaggaggagcuggacaaguacuucaagaaccacaccagccccgacguggaucugggcgacaucagcggcaucaacgccagcguggugaacauccagaaggagaucgaccggcugaacgagguggccaagaaccugaacgagagccugaucgaccugcaggagcugggcaaguacgagcaguacaucaaguggcccugguacaucuggcugggcuucaucgccggccugaucgccaucgugauggugaccaucaugcugugcugcaugaccagcuguugcagcugccugaagggcugcugcagcugcggcagcugcugcaaguucgacgaggacgacagcgagccagugcugaagggcgugaagcugcacuacaccugaggacuaguuauaagacugacuagcccgaugggccucccaacgggcccuccuccccuccuugcaccgagagaucuaaaaaaaaaaaaaaaaaaaaaaaaaaaaaaaaaaaaaaaaaaaaaaaaaaaaaaaaaaaaaaaaaaaaaaaaaaaaaaaaaaaaaaaaaaaaaaaaaaaa

SEQ ID NO: 25901 - RNA, 4011 nt, Artificial Sequence
  SARS-CoV-2/Wuhan/WIV05/2019__EPI_ISL_402128 spike protein mRNA gc mod (1-1273)
aggagaaagcuuaccauguucguguuucuggugcugcugccccugguguccagccagugugugaaccugaccaccagaacacagcugccuccagccuacaccaacagcuucaccagaggcguguacuaccccgacaagguguucagauccagcgugcugcacucuacccaggaccuguuccugccuuucuucagcaacgugaccugguuccacgccauccacguguccggcaccaauggcaccaagagauucgacaaccccgugcugcccuucaacgacgggguguacuuugccagcaccgagaaguccaacaucaucagaggcuggaucuucggcaccacacuggacagcaagacccagagccugcugaucgugaacaacgccaccaacguggucaucaaagugugcgaguuccaguucugcaacgaccccuuccugggcgucuacuaccacaagaacaacaagagcuggauggaaagcgaguuccggguguacagcagcgccaacaacugcaccuucgaguacgugucccagccuuuccugauggaccuggaaggcaagcagggcaacuucaagaaccugcgcgaguucguguucaagaacaucgacggcuacuucaaaaucuacagcaagcacaccccuaucaaccucgugcgggaucugccucagggcuucucugcucuggaaccccugguggaucugcccaucggcaucaacaucacccgguuucagacacugcuggcccugcacagaagcuaccugacaccuggcgauagcagcagcggauggacagcuggugccgccgcuuacuaugugggcuaccugcagccuagaaccuuccugcugaaguacaacgagaacggcaccaucaccgacgccguggauugugcucuggauccucugagcgagacaaagugcacccugaaguccuucaccguggaaaagggcaucuaccagaccagcaacuuccgggugcagcccaccgaauccaucgugcgguuccccaauaucaccaaucugugccccuucggcgagguguucaaugccaccagauucgccucuguguacgccuggaaccggaagcggaucagcaauugcguggccgacuacuccgugcuguacaacuccgccagcuucagcaccuucaagugcuacggcguguccccuaccaagcugaacgaccugugcuucacaaacguguacgccgacagcuucgugauccggggagaugaagugcggcagauugccccuggacagacaggcaagaucgccgacuacaacuacaagcugcccgacgacuucaccggcugugugauugccuggaacagcaacaaccuggacuccaaagucggcggcaacuacaauuaccuguaccggcuguuccggaaguccaaucugaagcccuucgagcgggacaucagcaccgaaaucuaucaggccggcagcaccccuugcaacggcguggaaggcuucaacugcuacuucccacugcaguccuacggcuuucagcccacaaauggcgugggcuaucagcccuacagagugguggugcugagcuucgaacugcugcaugcuccugccacagugugcggcccuaagaaaagcaccaaucucgugaagaacaaaugcgugaacuucaacuucaacggccugaccggcaccggcgugcugacagagagcaacaagaaguuccugccauuccagcaguuuggccgggauaucgccgauaccacagacgccguuagagauccccagacacuggaaauccuggacaucaccccaugcagcuucggcggagugucugugaucaccccuggcaccaacaccagcaaucagguggcagugcuguaccaggacgugaacuguaccgaagugcccguggccauucacgccgaucagcugacaccuacauggcggguguacuccaccggcagcaauguguuucagaccagagccggcugucugaucggagccgagcacgugaacaauagcuacgagugcgacauccccaucggcgcuggcaucugugccagcuaccagacacagacaaacagccccagacgggcuagaagcguggccagccagagcaucauugccuacacaaugucucugggcgccgagaacagcguggccuacuccaacaacucuaucgcuauccccaccaacuucaccaucagcgugaccaccgagauccugccuguguccaugaccaagaccagcguggacugcaccauguacaucugcggcgauuccaccgagugcuccaaccugcugcugcaguacggcagcuucugcacccagcugaauagagcccugacagggaucgccguggaacaggacaagaacacccaagagguguucgcccaagugaagcaaaucuacaagaccccuccuaucaaggacuucggcggcuucaauuucagccagauucugcccgauccuagcaagcccagcaagcggagcuucaucgaggaccugcuguucaacaaagugacacuggccgacgccggcuucaucaagcaguauggcgauugucugggcgacauugccgccagggaucugauuugcgcccagaaguuuaacggacugacagugcugccuccucugcugaccgaugagaugaucgcccaguacacaucugcccugcuggccggcacaaucacaagcggcuggacauuuggagcuggcgccgcucugcagauccccuuugcuaugcagauggccuaccgguucaacggcaucggagugacccagaaugugcuguacgagaaccagaagcugaucgccaaccaguucaacagcgccaucggcaagauccaggacagccugagcagcacagcaagcgcccugggaaagcugcaggacguggucaaccagaaugcccaggcacugaacacccuggucaagcagcuguccuccaacuucggcgccaucagcucugugcugaacgauauccugagcagacuggacaaggucgaggccgaggugcagaucgacagacugaucacaggcagacugcagagccuccagacauacgugacccagcagcugaucagagccgccgagauuagagccucugccaaucuggccgccaccaagaugucugagugugugcugggccagagcaagagaguggacuuuugcggcaagggcuaccaccugaugagcuucccucagucugccccucacggcgugguguuucugcacgugacauaugugcccgcucaagagaagaauuucaccaccgcuccagccaucugccacgacggcaaagcccacuuuccuagagaaggcguguucguguccaacggcacccauugguucgugacacagcggaacuucuacgagccccagaucaucaccaccgacaacaccuucgugucuggcaacugcgacguugugaucggcauugugaacaauaccguguacgacccucugcagcccgagcuggacagcuucaaagaggaacuggacaaguacuuuaagaaccacacaagccccgacguggaccugggcgauaucagcggaaucaaugccagcgucgugaacauccagaaagagaucgaccggcugaacgagguggccaagaaucugaacgagagccugaucgaccugcaagaacuggggaaguacgagcaguacaucaaguggcccugguacaucuggcugggcuuuaucgccggacugauugccaucgugauggucacaaucaugcuguguugcaugaccagcugcuguagcugccugaagggcuguuguagcuguggcagcugcugcaaguucgacgaggacgauucugagcccgugcugaagggcgugaaacugcacuacaccugaggacuaguuauaagacugacuagcccgaugggccucccaacgggcccuccuccccuccuugcaccgagagaucuaaaaaaaaaaaaaaaaaaaaaaaaaaaaaaaaaaaaaaaaaaaaaaaaaaaaaaaaaaaaaaaaaaaaaaaaaaaaaaaaaaaaaaaaaaaaaaaaaaaa

SEQ ID NO: 25902 - RNA, 4011 nt, Artificial Sequence
  SARS-CoV-2/Wuhan/WIV05/2019__EPI_ISL_402128 spike protein mRNA gc mod (1-1273)(D614G)
aggagaaagcuuaccauguucguguuucuggugcugcugccccugguguccagccagugugugaaccugaccaccagaacacagcugccuccagccuacaccaacagcuucaccagaggcguguacuaccccgacaagguguucagauccagcgugcugcacucuacccaggaccuguuccugccuuucuucagcaacgugaccugguuccacgccauccacguguccggcaccaauggcaccaagagauucgacaaccccgugcugcccuucaacgacgggguguacuuugccagcaccgagaaguccaacaucaucagaggcuggaucuucggcaccacacuggacagcaagacccagagccugcugaucgugaacaacgccaccaacguggucaucaaagugugcgaguuccaguucugcaacgaccccuuccugggcgucuacuaccacaagaacaacaagagcuggauggaaagcgaguuccggguguacagcagcgccaacaacugcaccuucgaguacgugucccagccuuuccugauggaccuggaaggcaagcagggcaacuucaagaaccugcgcgaguucguguucaagaacaucgacggcuacuucaaaaucuacagcaagcacaccccuaucaaccucgugcgggaucugccucagggcuucucugcucuggaaccccugguggaucugcccaucggcaucaacaucacccgguuucagacacugcuggcccugcacagaagcuaccugacaccuggcgauagcagcagcggauggacagcuggugccgccgcuuacuaugugggcuaccugcagccuagaaccuuccugcugaaguacaacgagaacggcaccaucaccgacgccguggauugugcucuggauccucugagcgagacaaagugcacccugaaguccuucaccguggaaaagggcaucuaccagaccagcaacuuccgggugcagcccaccgaauccaucgugcgguuccccaauaucaccaaucugugccccuucggcgagguguucaaugccaccagauucgccucuguguacgccuggaaccggaagcggaucagcaauugcguggccgacuacuccgugcuguacaacuccgccagcuucagcaccuucaagugcuacggcguguccccuaccaagcugaacgaccugugcuucacaaacguguacgccgacagcuucgugauccggggagaugaagugcggcagauugccccuggacagacaggcaagaucgccgacuacaacuacaagcugcccgacgacuucaccggcugugugauugccuggaacagcaacaaccuggacuccaaagucggcggcaacuacaauuaccuguaccggcuguuccggaaguccaaucugaagcccuucgagcgggacaucagcaccgaaaucuaucaggccggcagcaccccuugcaacggcguggaaggcuucaacugcuacuucccacugcaguccuacggcuuucagcccacaaauggcgugggcuaucagcccuacagagugguggugcugagcuucgaacugcugcaugcuccugccacagugugcggcccuaagaaaagcaccaaucucgugaagaacaaaugcgugaacuucaacuucaacggccugaccggcaccggcgugcugacagagagcaacaagaaguuccugccauuccagcaguuuggccgggauaucgccgauaccacagacgccguuagagauccccagacacuggaaauccuggacaucaccccaugcagcuucggcggagugucugugaucaccccuggcaccaacaccagcaaucagguggcagugcuguaccagggcgugaacuguaccgaagugcccguggccauucacgccgaucagcugacaccuacauggcggguguacuccaccggcagcaauguguuucagaccagagccggcugucugaucggagccgagcacgugaacaauagcuacgagugcgacauccccaucggcgcuggcaucugugccagcuaccagacacagacaaacagccccagacgggcuagaagcguggccagccagagcaucauugccuacacaaugucucugggcgccgagaacagcguggccuacuccaacaacucuaucgcuauccccaccaacuucaccaucagcgugaccaccgagauccugccuguguccaugaccaagaccagcguggacugcaccauguacaucugcggcgauuccaccgagugcuccaaccugcugcugcaguacggcagcuucugcacccagcugaauagagcccugacagggaucgccguggaacaggacaagaacacccaagagguguucgcccaagugaagcaaaucuacaagaccccuccuaucaaggacuucggcggcuucaauuucagccagauucugcccgauccuagcaagcccagcaagcggagcuucaucgaggaccugcuguucaacaaagugacacuggccgacgccggcuucaucaagcaguauggcgauugucugggcgacauugccgccagggaucugauuugcgcccagaaguuuaacggacugacagugcugccuccucugcugaccgaugagaugaucgcccaguacacaucugcccugcuggccggcacaaucacaagcggcuggacauuuggagcuggcgccgcucugcagauccccuuugcuaugcagauggccuaccgguucaacggcaucggagugacccagaaugugcuguacgagaaccagaagcugaucgccaaccaguucaacagcgccaucggcaagauccaggacagccugagcagcacagcaagcgcccugggaaagcugcaggacguggucaaccagaaugcccaggcacugaacacccuggucaagcagcuguccuccaacuucggcgccaucagcucugugcugaacgauauccugagcagacuggacaaggucgaggccgaggugcagaucgacagacugaucacaggcagacugcagagccuccagacauacgugacccagcagcugaucagagccgccgagauuagagccucugccaaucuggccgccaccaagaugucugagugugugcugggccagagcaagagaguggacuuuugcggcaagggcuaccaccugaugagcuucccucagucugccccucacggcgugguguuucugcacgugacauaugugcccgcucaagagaagaauuucaccaccgcuccagccaucugccacgacggcaaagcccacuuuccuagagaaggcguguucguguccaacggcacccauugguucgugacacagcggaacuucuacgagccccagaucaucaccaccgacaacaccuucgugucuggcaacugcgacguugugaucggcauugugaacaauaccguguacgacccucugcagcccgagcuggacagcuucaaagaggaacuggacaaguacuuuaagaaccacacaagccccgacguggaccugggcgauaucagcggaaucaaugccagcgucgugaacauccagaaagagaucgaccggcugaacgagguggccaagaaucugaacgagagccugaucgaccugcaagaacuggggaaguacgagcaguacaucaaguggcccugguacaucuggcugggcuuuaucgccggacugauugccaucgugauggucacaaucaugcuguguugcaugaccagcugcuguagcugccugaagggcuguuguagcuguggcagcugcugcaaguucgacgaggacgauucugagcccgugcugaagggcgugaaacugcacuacaccugaggacuaguuauaagacugacuagcccgaugggccucccaacgggcccuccuccccuccuugcaccgagagaucuaaaaaaaaaaaaaaaaaaaaaaaaaaaaaaaaaaaaaaaaaaaaaaaaaaaaaaaaaaaaaaaaaaaaaaaaaaaaaaaaaaaaaaaaaaaaaaaaaaaa

SEQ ID NO: 25903 - RNA, 4011 nt, Artificial Sequence
  SARS-CoV-2/Wuhan/WIV05/2019__EPI_ISL_402128 spike protein mRNA gc mod (1-1273)(A222V_D614G)
aggagaaagcuuaccauguucguguuucuggugcugcugccccugguguccagccagugugugaaccugaccaccagaacacagcugccuccagccuacaccaacagcuucaccagaggcguguacuaccccgacaagguguucagauccagcgugcugcacucuacccaggaccuguuccugccuuucuucagcaacgugaccugguuccacgccauccacguguccggcaccaauggcaccaagagauucgacaaccccgugcugcccuucaacgacgggguguacuuugccagcaccgagaaguccaacaucaucagaggcuggaucuucggcaccacacuggacagcaagacccagagccugcugaucgugaacaacgccaccaacguggucaucaaagugugcgaguuccaguucugcaacgaccccuuccugggcgucuacuaccacaagaacaacaagagcuggauggaaagcgaguuccggguguacagcagcgccaacaacugcaccuucgaguacgugucccagccuuuccugauggaccuggaaggcaagcagggcaacuucaagaaccugcgcgaguucguguucaagaacaucgacggcuacuucaaaaucuacagcaagcacaccccuaucaaccucgugcgggaucugccucagggcuucucugugcuggaaccccugguggaucugcccaucggcaucaacaucacccgguuucagacacugcuggcccugcacagaagcuaccugacaccuggcgauagcagcagcggauggacagcuggugccgccgcuuacuaugugggcuaccugcagccuagaaccuuccugcugaaguacaacgagaacggcaccaucaccgacgccguggauugugcucuggauccucugagcgagacaaagugcacccugaaguccuucaccguggaaaagggcaucuaccagaccagcaacuuccgggugcagcccaccgaauccaucgugcgguuccccaauaucaccaaucugugccccuucggcgagguguucaaugccaccagauucgccucuguguacgccuggaaccggaagcggaucagcaauugcguggccgacuacuccgugcuguacaacuccgccagcuucagcaccuucaagugcuacggcguguccccuaccaagcugaacgaccugugcuucacaaacguguacgccgacagcuucgugauccggggagaugaagugcggcagauugccccuggacagacaggcaagaucgccgacuacaacuacaagcugcccgacgacuucaccggcugugugauugccuggaacagcaacaaccuggacuccaaagucggcggcaacuacaauuaccuguaccggcuguuccggaaguccaaucugaagcccuucgagcgggacaucagcaccgaaaucuaucaggccggcagcaccccuugcaacggcguggaaggcuucaacugcuacuucccacugcaguccuacggcuuucagcccacaaauggcgugggcuaucagcccuacagagugguggugcugagcuucgaacugcugcaugcuccugccacagugugcggcccuaagaaaagcaccaaucucgugaagaacaaaugcgugaacuucaacuucaacggccugaccggcaccggcgugcugacagagagcaacaagaaguuccugccauuccagcaguuuggccgggauaucgccgauaccacagacgccguuagagauccccagacacuggaaauccuggacaucaccccaugcagcuucggcggagugucugugaucaccccuggcaccaacaccagcaaucagguggcagugcuguaccagggcgugaacuguaccgaagugcccguggccauucacgccgaucagcugacaccuacauggcggguguacuccaccggcagcaauguguuucagaccagagccggcugucugaucggagccgagcacgugaacaauagcuacgagugcgacauccccaucggcgcuggcaucugugccagcuaccagacacagacaaacagccccagacgggcuagaagcguggccagccagagcaucauugccuacacaaugucucugggcgccgagaacagcguggccuacuccaacaacucuaucgcuauccccaccaacuucaccaucagcgugaccaccgagauccugccuguguccaugaccaagaccagcguggacugcaccauguacaucugcggcgauuccaccgagugcuccaaccugcugcugcaguacggcagcuucugcacccagcugaauagagcccugacagggaucgccguggaacaggacaagaacacccaagagguguucgcccaagugaagcaaaucuacaagaccccuccuaucaaggacuucggcggcuucaauuucagccagauucugcccgauccuagcaagcccagcaagcggagcuucaucgaggaccugcuguucaacaaagugacacuggccgacgccggcuucaucaagcaguauggcgauugucugggcgacauugccgccagggaucugauuugcgcccagaaguuuaacggacugacagugcugccuccucugcugaccgaugagaugaucgcccaguacacaucugcccugcuggccggcacaaucacaagcggcuggacauuuggagcuggcgccgcucugcagauccccuuugcuaugcagauggccuaccgguucaacggcaucggagugacccagaaugugcuguacgagaaccagaagcugaucgccaaccaguucaacagcgccaucggcaagauccaggacagccugagcagcacagcaagcgcccugggaaagcugcaggacguggucaaccagaaugcccaggcacugaacacccuggucaagcagcuguccuccaacuucggcgccaucagcucugugcugaacgauauccugagcagacuggacaaggucgaggccgaggugcagaucgacagacugaucacaggcagacugcagagccuccagacauacgugacccagcagcugaucagagccgccgagauuagagccucugccaaucuggccgccaccaagaugucugagugugugcugggccagagcaagagaguggacuuuugcggcaagggcuaccaccugaugagcuucccucagucugccccucacggcgugguguuucugcacgugacauaugugcccgcucaagagaagaauuucaccaccgcuccagccaucugccacgacggcaaagcccacuuuccuagagaaggcguguucguguccaacggcacccauugguucgugacacagcggaacuucuacgagccccagaucaucaccaccgacaacaccuucgugucuggcaacugcgacguugugaucggcauugugaacaauaccguguacgacccucugcagcccgagcuggacagcuucaaagaggaacuggacaaguacuuuaagaaccacacaagccccgacguggaccugggcgauaucagcggaaucaaugccagcgucgugaacauccagaaagagaucgaccggcugaacgagguggccaagaaucugaacgagagccugaucgaccugcaagaacuggggaaguacgagcaguacaucaaguggcccugguacaucuggcugggcuuuaucgccggacugauugccaucgugauggucacaaucaugcuguguugcaugaccagcugcuguagcugccugaagggcuguuguagcuguggcagcugcugcaaguucgacgaggacgauucugagcccgugcugaagggcgugaaacugcacuacaccugaggacuaguuauaagacugacuagcccgaugggccucccaacgggcccuccuccccuccuugcaccgagagaucuaaaaaaaaaaaaaaaaaaaaaaaaaaaaaaaaaaaaaaaaaaaaaaaaaaaaaaaaaaaaaaaaaaaaaaaaaaaaaaaaaaaaaaaaaaaaaaaaaaaa

SEQ ID NO: 25904 - RNA, 4011 nt, Artificial Sequence
  SARS-CoV-2/Wuhan/WIV05/2019__EPI_ISL_402128 spike protein mRNA gc mod (1-1273)(N439K_D614G)
aggagaaagcuuaccauguucguguuucuggugcugcugccccugguguccagccagugugugaaccugaccaccagaacacagcugccuccagccuacaccaacagcuucaccagaggcguguacuaccccgacaagguguucagauccagcgugcugcacucuacccaggaccuguuccugccuuucuucagcaacgugaccugguuccacgccauccacguguccggcaccaauggcaccaagagauucgacaaccccgugcugcccuucaacgacgggguguacuuugccagcaccgagaaguccaacaucaucagaggcuggaucuucggcaccacacuggacagcaagacccagagccugcugaucgugaacaacgccaccaacguggucaucaaagugugcgaguuccaguucugcaacgaccccuuccugggcgucuacuaccacaagaacaacaagagcuggauggaaagcgaguuccggguguacagcagcgccaacaacugcaccuucgaguacgugucccagccuuuccugauggaccuggaaggcaagcagggcaacuucaagaaccugcgcgaguucguguucaagaacaucgacggcuacuucaaaaucuacagcaagcacaccccuaucaaccucgugcgggaucugccucagggcuucucugcucuggaaccccugguggaucugcccaucggcaucaacaucacccgguuucagacacugcuggcccugcacagaagcuaccugacaccuggcgauagcagcagcggauggacagcuggugccgccgcuuacuaugugggcuaccugcagccuagaaccuuccugcugaaguacaacgagaacggcaccaucaccgacgccguggauugugcucuggauccucugagcgagacaaagugcacccugaaguccuucaccguggaaaagggcaucuaccagaccagcaacuuccgggugcagcccaccgaauccaucgugcgguuccccaauaucaccaaucugugccccuucggcgagguguucaaugccaccagauucgccucuguguacgccuggaaccggaagcggaucagcaauugcguggccgacuacuccgugcuguacaacuccgccagcuucagcaccuucaagugcuacggcguguccccuaccaagcugaacgaccugugcuucacaaacguguacgccgacagcuucgugauccggggagaugaagugcggcagauugccccuggacagacaggcaagaucgccgacuacaacuacaagcugcccgacgacuucaccggcugugugauugccuggaacagcaagaaccuggacuccaaagucggcggcaacuacaauuaccuguaccggcuguuccggaaguccaaucugaagcccuucgagcgggacaucagcaccgaaaucuaucaggccggcagcaccccuugcaacggcguggaaggcuucaacugcuacuucccacugcaguccuacggcuuucagcccacaaauggcgugggcuaucagcccuacagagugguggugcugagcuucgaacugcugcaugcuccugccacagugugcggcccuaagaaaagcaccaaucucgugaagaacaaaugcgugaacuucaacuucaacggccugaccggcaccggcgugcugacagagagcaacaagaaguuccugccauuccagcaguuuggccgggauaucgccgauaccacagacgccguuagagauccccagacacuggaaauccuggacaucaccccaugcagcuucggcggagugucugugaucaccccuggcaccaacaccagcaaucagguggcagugcuguaccagggcgugaacuguaccgaagugcccguggccauucacgccgaucagcugacaccuacauggcggguguacuccaccggcagcaauguguuucagaccagagccggcugucugaucggagccgagcacgugaacaauagcuacgagugcgacauccccaucggcgcuggcaucugugccagcuaccagacacagacaaacagccccagacgggcuagaagcguggccagccagagcaucauugccuacacaaugucucugggcgccgagaacagcguggccuacuccaacaacucuaucgcuauccccaccaacuucaccaucagcgugaccaccgagauccugccuguguccaugaccaagaccagcguggacugcaccauguacaucugcggcgauuccaccgagugcuccaaccugcugcugcaguacggcagcuucugcacccagcugaauagagcccugacagggaucgccguggaacaggacaagaacacccaagagguguucgcccaagugaagcaaaucuacaagaccccuccuaucaaggacuucggcggcuucaauuucagccagauucugcccgauccuagcaagcccagcaagcggagcuucaucgaggaccugcuguucaacaaagugacacuggccgacgccggcuucaucaagcaguauggcgauugucugggcgacauugccgccagggaucugauuugcgcccagaaguuuaacggacugacagugcugccuccucugcugaccgaugagaugaucgcccaguacacaucugcccugcuggccggcacaaucacaagcggcuggacauuuggagcuggcgccgcucugcagauccccuuugcuaugcagauggccuaccgguucaacggcaucggagugacccagaaugugcuguacgagaaccagaagcugaucgccaaccaguucaacagcgccaucggcaagauccaggacagccugagcagcacagcaagcgcccugggaaagcugcaggacguggucaaccagaaugcccaggcacugaacacccuggucaagcagcuguccuccaacuucggcgccaucagcucugugcugaacgauauccugagcagacuggacaaggucgaggccgaggugcagaucgacagacugaucacaggcagacugcagagccuccagacauacgugacccagcagcugaucagagccgccgagauuagagccucugccaaucuggccgccaccaagaugucugagugugugcugggccagagcaagagaguggacuuuugcggcaagggcuaccaccugaugagcuucccucagucugccccucacggcgugguguuucugcacgugacauaugugcccgcucaagagaagaauuucaccaccgcuccagccaucugccacgacggcaaagcccacuuuccuagagaaggcguguucguguccaacggcacccauugguucgugacacagcggaacuucuacgagccccagaucaucaccaccgacaacaccuucgugucuggcaacugcgacguugugaucggcauugugaacaauaccguguacgacccucugcagcccgagcuggacagcuucaaagaggaacuggacaaguacuuuaagaaccacacaagccccgacguggaccugggcgauaucagcggaaucaaugccagcgucgugaacauccagaaagagaucgaccggcugaacgagguggccaagaaucugaacgagagccugaucgaccugcaagaacuggggaaguacgagcaguacaucaaguggcccugguacaucuggcugggcuuuaucgccggacugauugccaucgugauggucacaaucaugcuguguugcaugaccagcugcuguagcugccugaagggcuguuguagcuguggcagcugcugcaaguucgacgaggacgauucugagcccgugcugaagggcgugaaacugcacuacaccugaggacuaguuauaagacugacuagcccgaugggccucccaacgggcccuccuccccuccuugcaccgagagaucuaaaaaaaaaaaaaaaaaaaaaaaaaaaaaaaaaaaaaaaaaaaaaaaaaaaaaaaaaaaaaaaaaaaaaaaaaaaaaaaaaaaaaaaaaaaaaaaaaaaa

SEQ ID NO: 25905 - RNA, 4011 nt, Artificial Sequence
  SARS-CoV-2/Wuhan/WIV05/2019__EPI_ISL_402128 spike protein mRNA gc mod (1-1273)(S477N_D614G)
aggagaaagcuuaccauguucguguuucuggugcugcugccccugguguccagccagugugugaaccugaccaccagaacacagcugccuccagccuacaccaacagcuucaccagaggcguguacuaccccgacaagguguucagauccagcgugcugcacucuacccaggaccuguuccugccuuucuucagcaacgugaccugguuccacgccauccacguguccggcaccaauggcaccaagagauucgacaaccccgugcugcccuucaacgacgggguguacuuugccagcaccgagaaguccaacaucaucagaggcuggaucuucggcaccacacuggacagcaagacccagagccugcugaucgugaacaacgccaccaacguggucaucaaagugugcgaguuccaguucugcaacgaccccuuccugggcgucuacuaccacaagaacaacaagagcuggauggaaagcgaguuccggguguacagcagcgccaacaacugcaccuucgaguacgugucccagccuuuccugauggaccuggaaggcaagcagggcaacuucaagaaccugcgcgaguucguguucaagaacaucgacggcuacuucaaaaucuacagcaagcacaccccuaucaaccucgugcgggaucugccucagggcuucucugcucuggaaccccugguggaucugcccaucggcaucaacaucacccgguuucagacacugcuggcccugcacagaagcuaccugacaccuggcgauagcagcagcggauggacagcuggugccgccgcuuacuaugugggcuaccugcagccuagaaccuuccugcugaaguacaacgagaacggcaccaucaccgacgccguggauugugcucuggauccucugagcgagacaaagugcacccugaaguccuucaccguggaaaagggcaucuaccagaccagcaacuuccgggugcagcccaccgaauccaucgugcgguuccccaauaucaccaaucugugccccuucggcgagguguucaaugccaccagauucgccucuguguacgccuggaaccggaagcggaucagcaauugcguggccgacuacuccgugcuguacaacuccgccagcuucagcaccuucaagugcuacggcguguccccuaccaagcugaacgaccugugcuucacaaacguguacgccgacagcuucgugauccggggagaugaagugcggcagauugccccuggacagacaggcaagaucgccgacuacaacuacaagcugcccgacgacuucaccggcugugugauugccuggaacagcaacaaccuggacuccaaagucggcggcaacuacaauuaccuguaccggcuguuccggaaguccaaucugaagcccuucgagcgggacaucagcaccgaaaucuaucaggccggcaacaccccuugcaacggcguggaaggcuucaacugcuacuucccacugcaguccuacggcuuucagcccacaaauggcgugggcuaucagcccuacagagugguggugcugagcuucgaacugcugcaugcuccugccacagugugcggcccuaagaaaagcaccaaucucgugaagaacaaaugcgugaacuucaacuucaacggccugaccggcaccggcgugcugacagagagcaacaagaaguuccugccauuccagcaguuuggccgggauaucgccgauaccacagacgccguuagagauccccagacacuggaaauccuggacaucaccccaugcagcuucggcggagugucugugaucaccccuggcaccaacaccagcaaucagguggcagugcuguaccagggcgugaacuguaccgaagugcccguggccauucacgccgaucagcugacaccuacauggcggguguacuccaccggcagcaauguguuucagaccagagccggcugucugaucggagccgagcacgugaacaauagcuacgagugcgacauccccaucggcgcuggcaucugugccagcuaccagacacagacaaacagccccagacgggcuagaagcguggccagccagagcaucauugccuacacaaugucucugggcgccgagaacagcguggccuacuccaacaacucuaucgcuauccccaccaacuucaccaucagcgugaccaccgagauccugccuguguccaugaccaagaccagcguggacugcaccauguacaucugcggcgauuccaccgagugcuccaaccugcugcugcaguacggcagcuucugcacccagcugaauagagcccugacagggaucgccguggaacaggacaagaacacccaagagguguucgcccaagugaagcaaaucuacaagaccccuccuaucaaggacuucggcggcuucaauuucagccagauucugcccgauccuagcaagcccagcaagcggagcuucaucgaggaccugcuguucaacaaagugacacuggccgacgccggcuucaucaagcaguauggcgauugucugggcgacauugccgccagggaucugauuugcgcccagaaguuuaacggacugacagugcugccuccucugcugaccgaugagaugaucgcccaguacacaucugcccugcuggccggcacaaucacaagcggcuggacauuuggagcuggcgccgcucugcagauccccuuugcuaugcagauggccuaccgguucaacggcaucggagugacccagaaugugcuguacgagaaccagaagcugaucgccaaccaguucaacagcgccaucggcaagauccaggacagccugagcagcacagcaagcgcccugggaaagcugcaggacguggucaaccagaaugcccaggcacugaacacccuggucaagcagcuguccuccaacuucggcgccaucagcucugugcugaacgauauccugagcagacuggacaaggucgaggccgaggugcagaucgacagacugaucacaggcagacugcagagccuccagacauacgugacccagcagcugaucagagccgccgagauuagagccucugccaaucuggccgccaccaagaugucugagugugugcugggccagagcaagagaguggacuuuugcggcaagggcuaccaccugaugagcuucccucagucugccccucacggcgugguguuucugcacgugacauaugugcccgcucaagagaagaauuucaccaccgcuccagccaucugccacgacggcaaagcccacuuuccuagagaaggcguguucguguccaacggcacccauugguucgugacacagcggaacuucuacgagccccagaucaucaccaccgacaacaccuucgugucuggcaacugcgacguugugaucggcauugugaacaauaccguguacgacccucugcagcccgagcuggacagcuucaaagaggaacuggacaaguacuuuaagaaccacacaagccccgacguggaccugggcgauaucagcggaaucaaugccagcgucgugaacauccagaaagagaucgaccggcugaacgagguggccaagaaucugaacgagagccugaucgaccugcaagaacuggggaaguacgagcaguacaucaaguggcccugguacaucuggcugggcuuuaucgccggacugauugccaucgugauggucacaaucaugcuguguugcaugaccagcugcuguagcugccugaagggcuguuguagcuguggcagcugcugcaaguucgacgaggacgauucugagcccgugcugaagggcgugaaacugcacuacaccugaggacuaguuauaagacugacuagcccgaugggccucccaacgggcccuccuccccuccuugcaccgagagaucuaaaaaaaaaaaaaaaaaaaaaaaaaaaaaaaaaaaaaaaaaaaaaaaaaaaaaaaaaaaaaaaaaaaaaaaaaaaaaaaaaaaaaaaaaaaaaaaaaaaa

SEQ ID NO: 25906 - RNA, 4011 nt, Artificial Sequence
  SARS-CoV-2/Wuhan/WIV05/2019__EPI_ISL_402128 spike protein mRNA gc mod (1-1273)(N501Y_D614G)
aggagaaagcuuaccauguucguguuucuggugcugcugccccugguguccagccagugugugaaccugaccaccagaacacagcugccuccagccuacaccaacagcuucaccagaggcguguacuaccccgacaagguguucagauccagcgugcugcacucuacccaggaccuguuccugccuuucuucagcaacgugaccugguuccacgccauccacguguccggcaccaauggcaccaagagauucgacaaccccgugcugcccuucaacgacgggguguacuuugccagcaccgagaaguccaacaucaucagaggcuggaucuucggcaccacacuggacagcaagacccagagccugcugaucgugaacaacgccaccaacguggucaucaaagugugcgaguuccaguucugcaacgaccccuuccugggcgucuacuaccacaagaacaacaagagcuggauggaaagcgaguuccggguguacagcagcgccaacaacugcaccuucgaguacgugucccagccuuuccugauggaccuggaaggcaagcagggcaacuucaagaaccugcgcgaguucguguucaagaacaucgacggcuacuucaaaaucuacagcaagcacaccccuaucaaccucgugcgggaucugccucagggcuucucugcucuggaaccccugguggaucugcccaucggcaucaacaucacccgguuucagacacugcuggcccugcacagaagcuaccugacaccuggcgauagcagcagcggauggacagcuggugccgccgcuuacuaugugggcuaccugcagccuagaaccuuccugcugaaguacaacgagaacggcaccaucaccgacgccguggauugugcucuggauccucugagcgagacaaagugcacccugaaguccuucaccguggaaaagggcaucuaccagaccagcaacuuccgggugcagcccaccgaauccaucgugcgguuccccaauaucaccaaucugugccccuucggcgagguguucaaugccaccagauucgccucuguguacgccuggaaccggaagcggaucagcaauugcguggccgacuacuccgugcuguacaacuccgccagcuucagcaccuucaagugcuacggcguguccccuaccaagcugaacgaccugugcuucacaaacguguacgccgacagcuucgugauccggggagaugaagugcggcagauugccccuggacagacaggcaagaucgccgacuacaacuacaagcugcccgacgacuucaccggcugugugauugccuggaacagcaacaaccuggacuccaaagucggcggcaacuacaauuaccuguaccggcuguuccggaaguccaaucugaagcccuucgagcgggacaucagcaccgaaaucuaucaggccggcagcaccccuugcaacggcguggaaggcuucaacugcuacuucccacugcaguccuacggcuuucagcccacauacggcgugggcuaucagcccuacagagugguggugcugagcuucgaacugcugcaugcuccugccacagugugcggcccuaagaaaagcaccaaucucgugaagaacaaaugcgugaacuucaacuucaacggccugaccggcaccggcgugcugacagagagcaacaagaaguuccugccauuccagcaguuuggccgggauaucgccgauaccacagacgccguuagagauccccagacacuggaaauccuggacaucaccccaugcagcuucggcggagugucugugaucaccccuggcaccaacaccagcaaucagguggcagugcuguaccagggcgugaacuguaccgaagugcccguggccauucacgccgaucagcugacaccuacauggcggguguacuccaccggcagcaauguguuucagaccagagccggcugucugaucggagccgagcacgugaacaauagcuacgagugcgacauccccaucggcgcuggcaucugugccagcuaccagacacagacaaacagccccagacgggcuagaagcguggccagccagagcaucauugccuacacaaugucucugggcgccgagaacagcguggccuacuccaacaacucuaucgcuauccccaccaacuucaccaucagcgugaccaccgagauccugccuguguccaugaccaagaccagcguggacugcaccauguacaucugcggcgauuccaccgagugcuccaaccugcugcugcaguacggcagcuucugcacccagcugaauagagcccugacagggaucgccguggaacaggacaagaacacccaagagguguucgcccaagugaagcaaaucuacaagaccccuccuaucaaggacuucggcggcuucaauuucagccagauucugcccgauccuagcaagcccagcaagcggagcuucaucgaggaccugcuguucaacaaagugacacuggccgacgccggcuucaucaagcaguauggcgauugucugggcgacauugccgccagggaucugauuugcgcccagaaguuuaacggacugacagugcugccuccucugcugaccgaugagaugaucgcccaguacacaucugcccugcuggccggcacaaucacaagcggcuggacauuuggagcuggcgccgcucugcagauccccuuugcuaugcagauggccuaccgguucaacggcaucggagugacccagaaugugcuguacgagaaccagaagcugaucgccaaccaguucaacagcgccaucggcaagauccaggacagccugagcagcacagcaagcgcccugggaaagcugcaggacguggucaaccagaaugcccaggcacugaacacccuggucaagcagcuguccuccaacuucggcgccaucagcucugugcugaacgauauccugagcagacuggacaaggucgaggccgaggugcagaucgacagacugaucacaggcagacugcagagccuccagacauacgugacccagcagcugaucagagccgccgagauuagagccucugccaaucuggccgccaccaagaugucugagugugugcugggccagagcaagagaguggacuuuugcggcaagggcuaccaccugaugagcuucccucagucugccccucacggcgugguguuucugcacgugacauaugugcccgcucaagagaagaauuucaccaccgcuccagccaucugccacgacggcaaagcccacuuuccuagagaaggcguguucguguccaacggcacccauugguucgugacacagcggaacuucuacgagccccagaucaucaccaccgacaacaccuucgugucuggcaacugcgacguugugaucggcauugugaacaauaccguguacgacccucugcagcccgagcuggacagcuucaaagaggaacuggacaaguacuuuaagaaccacacaagccccgacguggaccugggcgauaucagcggaaucaaugccagcgucgugaacauccagaaagagaucgaccggcugaacgagguggccaagaaucugaacgagagccugaucgaccugcaagaacuggggaaguacgagcaguacaucaaguggcccugguacaucuggcugggcuuuaucgccggacugauugccaucgugauggucacaaucaugcuguguugcaugaccagcugcuguagcugccugaagggcuguuguagcuguggcagcugcugcaaguucgacgaggacgauucugagcccgugcugaagggcgugaaacugcacuacaccugaggacuaguuauaagacugacuagcccgaugggccucccaacgggcccuccuccccuccuugcaccgagagaucuaaaaaaaaaaaaaaaaaaaaaaaaaaaaaaaaaaaaaaaaaaaaaaaaaaaaaaaaaaaaaaaaaaaaaaaaaaaaaaaaaaaaaaaaaaaaaaaaaaaa

SEQ ID NO: 25907 - RNA, 4005 nt, Artificial Sequence
  SARS-CoV-2/Wuhan/WIV05/2019__EPI_ISL_402128 spike protein mRNA gc mod (1-1273)(H69del_V70del_D614G)
aggagaaagcuuaccauguucguguuucuggugcugcugccccugguguccagccagugugugaaccugaccaccagaacacagcugccuccagccuacaccaacagcuucaccagaggcguguacuaccccgacaagguguucagauccagcgugcugcacucuacccaggaccuguuccugccuuucuucagcaacgugaccugguuccacgccaucuccggcaccaauggcaccaagagauucgacaaccccgugcugcccuucaacgacgggguguacuuugccagcaccgagaaguccaacaucaucagaggcuggaucuucggcaccacacuggacagcaagacccagagccugcugaucgugaacaacgccaccaacguggucaucaaagugugcgaguuccaguucugcaacgaccccuuccugggcgucuacuaccacaagaacaacaagagcuggauggaaagcgaguuccggguguacagcagcgccaacaacugcaccuucgaguacgugucccagccuuuccugauggaccuggaaggcaagcagggcaacuucaagaaccugcgcgaguucguguucaagaacaucgacggcuacuucaaaaucuacagcaagcacaccccuaucaaccucgugcgggaucugccucagggcuucucugcucuggaaccccugguggaucugcccaucggcaucaacaucacccgguuucagacacugcuggcccugcacagaagcuaccugacaccuggcgauagcagcagcggauggacagcuggugccgccgcuuacuaugugggcuaccugcagccuagaaccuuccugcugaaguacaacgagaacggcaccaucaccgacgccguggauugugcucuggauccucugagcgagacaaagugcacccugaaguccuucaccguggaaaagggcaucuaccagaccagcaacuuccgggugcagcccaccgaauccaucgugcgguuccccaauaucaccaaucugugccccuucggcgagguguucaaugccaccagauucgccucuguguacgccuggaaccggaagcggaucagcaauugcguggccgacuacuccgugcuguacaacuccgccagcuucagcaccuucaagugcuacggcguguccccuaccaagcugaacgaccugugcuucacaaacguguacgccgacagcuucgugauccggggagaugaagugcggcagauugccccuggacagacaggcaagaucgccgacuacaacuacaagcugcccgacgacuucaccggcugugugauugccuggaacagcaacaaccuggacuccaaagucggcggcaacuacaauuaccuguaccggcuguuccggaaguccaaucugaagcccuucgagcgggacaucagcaccgaaaucuaucaggccggcagcaccccuugcaacggcguggaaggcuucaacugcuacuucccacugcaguccuacggcuuucagcccacaaauggcgugggcuaucagcccuacagagugguggugcugagcuucgaacugcugcaugcuccugccacagugugcggcccuaagaaaagcaccaaucucgugaagaacaaaugcgugaacuucaacuucaacggccugaccggcaccggcgugcugacagagagcaacaagaaguuccugccauuccagcaguuuggccgggauaucgccgauaccacagacgccguuagagauccccagacacuggaaauccuggacaucaccccaugcagcuucggcggagugucugugaucaccccuggcaccaacaccagcaaucagguggcagugcuguaccagggcgugaacuguaccgaagugcccguggccauucacgccgaucagcugacaccuacauggcggguguacuccaccggcagcaauguguuucagaccagagccggcugucugaucggagccgagcacgugaacaauagcuacgagugcgacauccccaucggcgcuggcaucugugccagcuaccagacacagacaaacagccccagacgggcuagaagcguggccagccagagcaucauugccuacacaaugucucugggcgccgagaacagcguggccuacuccaacaacucuaucgcuauccccaccaacuucaccaucagcgugaccaccgagauccugccuguguccaugaccaagaccagcguggacugcaccauguacaucugcggcgauuccaccgagugcuccaaccugcugcugcaguacggcagcuucugcacccagcugaauagagcccugacagggaucgccguggaacaggacaagaacacccaagagguguucgcccaagugaagcaaaucuacaagaccccuccuaucaaggacuucggcggcuucaauuucagccagauucugcccgauccuagcaagcccagcaagcggagcuucaucgaggaccugcuguucaacaaagugacacuggccgacgccggcuucaucaagcaguauggcgauugucugggcgacauugccgccagggaucugauuugcgcccagaaguuuaacggacugacagugcugccuccucugcugaccgaugagaugaucgcccaguacacaucugcccugcuggccggcacaaucacaagcggcuggacauuuggagcuggcgccgcucugcagauccccuuugcuaugcagauggccuaccgguucaacggcaucggagugacccagaaugugcuguacgagaaccagaagcugaucgccaaccaguucaacagcgccaucggcaagauccaggacagccugagcagcacagcaagcgcccugggaaagcugcaggacguggucaaccagaaugcccaggcacugaacacccuggucaagcagcuguccuccaacuucggcgccaucagcucugugcugaacgauauccugagcagacuggacaaggucgaggccgaggugcagaucgacagacugaucacaggcagacugcagagccuccagacauacgugacccagcagcugaucagagccgccgagauuagagccucugccaaucuggccgccaccaagaugucugagugugugcugggccagagcaagagaguggacuuuugcggcaagggcuaccaccugaugagcuucccucagucugccccucacggcgugguguuucugcacgugacauaugugcccgcucaagagaagaauuucaccaccgcuccagccaucugccacgacggcaaagcccacuuuccuagagaaggcguguucguguccaacggcacccauugguucgugacacagcggaacuucuacgagccccagaucaucaccaccgacaacaccuucgugucuggcaacugcgacguugugaucggcauugugaacaauaccguguacgacccucugcagcccgagcuggacagcuucaaagaggaacuggacaaguacuuuaagaaccacacaagccccgacguggaccugggcgauaucagcggaaucaaugccagcgucgugaacauccagaaagagaucgaccggcugaacgagguggccaagaaucugaacgagagccugaucgaccugcaagaacuggggaaguacgagcaguacaucaaguggcccugguacaucuggcugggcuuuaucgccggacugauugccaucgugauggucacaaucaugcuguguugcaugaccagcugcuguagcugccugaagggcuguuguagcuguggcagcugcugcaaguucgacgaggacgauucugagcccgugcugaagggcgugaaacugcacuacaccugaggacuaguuauaagacugacuagcccgaugggccucccaacgggcccuccuccccuccuugcaccgagagaucuaaaaaaaaaaaaaaaaaaaaaaaaaaaaaaaaaaaaaaaaaaaaaaaaaaaaaaaaaaaaaaaaaaaaaaaaaaaaaaaaaaaaaaaaaaaaaaaaaaaa

SEQ ID NO: 25908 - RNA, 4011 nt, Artificial Sequence
  SARS-CoV-2/Wuhan/WIV05/2019__EPI_ISL_402128 spike protein mRNA gc mod (1-1273)(Y453F_D614G)
aggagaaagcuuaccauguucguguuucuggugcugcugccccugguguccagccagugugugaaccugaccaccagaacacagcugccuccagccuacaccaacagcuucaccagaggcguguacuaccccgacaagguguucagauccagcgugcugcacucuacccaggaccuguuccugccuuucuucagcaacgugaccugguuccacgccauccacguguccggcaccaauggcaccaagagauucgacaaccccgugcugcccuucaacgacgggguguacuuugccagcaccgagaaguccaacaucaucagaggcuggaucuucggcaccacacuggacagcaagacccagagccugcugaucgugaacaacgccaccaacguggucaucaaagugugcgaguuccaguucugcaacgaccccuuccugggcgucuacuaccacaagaacaacaagagcuggauggaaagcgaguuccggguguacagcagcgccaacaacugcaccuucgaguacgugucccagccuuuccugauggaccuggaaggcaagcagggcaacuucaagaaccugcgcgaguucguguucaagaacaucgacggcuacuucaaaaucuacagcaagcacaccccuaucaaccucgugcgggaucugccucagggcuucucugcucuggaaccccugguggaucugcccaucggcaucaacaucacccgguuucagacacugcuggcccugcacagaagcuaccugacaccuggcgauagcagcagcggauggacagcuggugccgccgcuuacuaugugggcuaccugcagccuagaaccuuccugcugaaguacaacgagaacggcaccaucaccgacgccguggauugugcucuggauccucugagcgagacaaagugcacccugaaguccuucaccguggaaaagggcaucuaccagaccagcaacuuccgggugcagcccaccgaauccaucgugcgguuccccaauaucaccaaucugugccccuucggcgagguguucaaugccaccagauucgccucuguguacgccuggaaccggaagcggaucagcaauugcguggccgacuacuccgugcuguacaacuccgccagcuucagcaccuucaagugcuacggcguguccccuaccaagcugaacgaccugugcuucacaaacguguacgccgacagcuucgugauccggggagaugaagugcggcagauugccccuggacagacaggcaagaucgccgacuacaacuacaagcugcccgacgacuucaccggcugugugauugccuggaacagcaacaaccuggacuccaaagucggcggcaacuacaauuaccuguuccggcuguuccggaaguccaaucugaagcccuucgagcgggacaucagcaccgaaaucuaucaggccggcagcaccccuugcaacggcguggaaggcuucaacugcuacuucccacugcaguccuacggcuuucagcccacaaauggcgugggcuaucagcccuacagagugguggugcugagcuucgaacugcugcaugcuccugccacagugugcggcccuaagaaaagcaccaaucucgugaagaacaaaugcgugaacuucaacuucaacggccugaccggcaccggcgugcugacagagagcaacaagaaguuccugccauuccagcaguuuggccgggauaucgccgauaccacagacgccguuagagauccccagacacuggaaauccuggacaucaccccaugcagcuucggcggagugucugugaucaccccuggcaccaacaccagcaaucagguggcagugcuguaccagggcgugaacuguaccgaagugcccguggccauucacgccgaucagcugacaccuacauggcggguguacuccaccggcagcaauguguuucagaccagagccggcugucugaucggagccgagcacgugaacaauagcuacgagugcgacauccccaucggcgcuggcaucugugccagcuaccagacacagacaaacagccccagacgggcuagaagcguggccagccagagcaucauugccuacacaaugucucugggcgccgagaacagcguggccuacuccaacaacucuaucgcuauccccaccaacuucaccaucagcgugaccaccgagauccugccuguguccaugaccaagaccagcguggacugcaccauguacaucugcggcgauuccaccgagugcuccaaccugcugcugcaguacggcagcuucugcacccagcugaauagagcccugacagggaucgccguggaacaggacaagaacacccaagagguguucgcccaagugaagcaaaucuacaagaccccuccuaucaaggacuucggcggcuucaauuucagccagauucugcccgauccuagcaagcccagcaagcggagcuucaucgaggaccugcuguucaacaaagugacacuggccgacgccggcuucaucaagcaguauggcgauugucugggcgacauugccgccagggaucugauuugcgcccagaaguuuaacggacugacagugcugccuccucugcugaccgaugagaugaucgcccaguacacaucugcccugcuggccggcacaaucacaagcggcuggacauuuggagcuggcgccgcucugcagauccccuuugcuaugcagauggccuaccgguucaacggcaucggagugacccagaaugugcuguacgagaaccagaagcugaucgccaaccaguucaacagcgccaucggcaagauccaggacagccugagcagcacagcaagcgcccugggaaagcugcaggacguggucaaccagaaugcccaggcacugaacacccuggucaagcagcuguccuccaacuucggcgccaucagcucugugcugaacgauauccugagcagacuggacaaggucgaggccgaggugcagaucgacagacugaucacaggcagacugcagagccuccagacauacgugacccagcagcugaucagagccgccgagauuagagccucugccaaucuggccgccaccaagaugucugagugugugcugggccagagcaagagaguggacuuuugcggcaagggcuaccaccugaugagcuucccucagucugccccucacggcgugguguuucugcacgugacauaugugcccgcucaagagaagaauuucaccaccgcuccagccaucugccacgacggcaaagcccacuuuccuagagaaggcguguucguguccaacggcacccauugguucgugacacagcggaacuucuacgagccccagaucaucaccaccgacaacaccuucgugucuggcaacugcgacguugugaucggcauugugaacaauaccguguacgacccucugcagcccgagcuggacagcuucaaagaggaacuggacaaguacuuuaagaaccacacaagccccgacguggaccugggcgauaucagcggaaucaaugccagcgucgugaacauccagaaagagaucgaccggcugaacgagguggccaagaaucugaacgagagccugaucgaccugcaagaacuggggaaguacgagcaguacaucaaguggcccugguacaucuggcugggcuuuaucgccggacugauugccaucgugauggucacaaucaugcuguguugcaugaccagcugcuguagcugccugaagggcuguuguagcuguggcagcugcugcaaguucgacgaggacgauucugagcccgugcugaagggcgugaaacugcacuacaccugaggacuaguuauaagacugacuagcccgaugggccucccaacgggcccuccuccccuccuugcaccgagagaucuaaaaaaaaaaaaaaaaaaaaaaaaaaaaaaaaaaaaaaaaaaaaaaaaaaaaaaaaaaaaaaaaaaaaaaaaaaaaaaaaaaaaaaaaaaaaaaaaaaaa

SEQ ID NO: 25909 - RNA, 4011 nt, Artificial Sequence
  SARS-CoV-2/Wuhan/WIV05/2019__EPI_ISL_402128 spike protein mRNA gc mod (1-1273)(D614G_I692V)
aggagaaagcuuaccauguucguguuucuggugcugcugccccugguguccagccagugugugaaccugaccaccagaacacagcugccuccagccuacaccaacagcuucaccagaggcguguacuaccccgacaagguguucagauccagcgugcugcacucuacccaggaccuguuccugccuuucuucagcaacgugaccugguuccacgccauccacguguccggcaccaauggcaccaagagauucgacaaccccgugcugcccuucaacgacgggguguacuuugccagcaccgagaaguccaacaucaucagaggcuggaucuucggcaccacacuggacagcaagacccagagccugcugaucgugaacaacgccaccaacguggucaucaaagugugcgaguuccaguucugcaacgaccccuuccugggcgucuacuaccacaagaacaacaagagcuggauggaaagcgaguuccggguguacagcagcgccaacaacugcaccuucgaguacgugucccagccuuuccugauggaccuggaaggcaagcagggcaacuucaagaaccugcgcgaguucguguucaagaacaucgacggcuacuucaaaaucuacagcaagcacaccccuaucaaccucgugcgggaucugccucagggcuucucugcucuggaaccccugguggaucugcccaucggcaucaacaucacccgguuucagacacugcuggcccugcacagaagcuaccugacaccuggcgauagcagcagcggauggacagcuggugccgccgcuuacuaugugggcuaccugcagccuagaaccuuccugcugaaguacaacgagaacggcaccaucaccgacgccguggauugugcucuggauccucugagcgagacaaagugcacccugaaguccuucaccguggaaaagggcaucuaccagaccagcaacuuccgggugcagcccaccgaauccaucgugcgguuccccaauaucaccaaucugugccccuucggcgagguguucaaugccaccagauucgccucuguguacgccuggaaccggaagcggaucagcaauugcguggccgacuacuccgugcuguacaacuccgccagcuucagcaccuucaagugcuacggcguguccccuaccaagcugaacgaccugugcuucacaaacguguacgccgacagcuucgugauccggggagaugaagugcggcagauugccccuggacagacaggcaagaucgccgacuacaacuacaagcugcccgacgacuucaccggcugugugauugccuggaacagcaacaaccuggacuccaaagucggcggcaacuacaauuaccuguaccggcuguuccggaaguccaaucugaagcccuucgagcgggacaucagcaccgaaaucuaucaggccggcagcaccccuugcaacggcguggaaggcuucaacugcuacuucccacugcaguccuacggcuuucagcccacaaauggcgugggcuaucagcccuacagagugguggugcugagcuucgaacugcugcaugcuccugccacagugugcggcccuaagaaaagcaccaaucucgugaagaacaaaugcgugaacuucaacuucaacggccugaccggcaccggcgugcugacagagagcaacaagaaguuccugccauuccagcaguuuggccgggauaucgccgauaccacagacgccguuagagauccccagacacuggaaauccuggacaucaccccaugcagcuucggcggagugucugugaucaccccuggcaccaacaccagcaaucagguggcagugcuguaccagggcgugaacuguaccgaagugcccguggccauucacgccgaucagcugacaccuacauggcggguguacuccaccggcagcaauguguuucagaccagagccggcugucugaucggagccgagcacgugaacaauagcuacgagugcgacauccccaucggcgcuggcaucugugccagcuaccagacacagacaaacagccccagacgggcuagaagcguggccagccagagcgugauugccuacacaaugucucugggcgccgagaacagcguggccuacuccaacaacucuaucgcuauccccaccaacuucaccaucagcgugaccaccgagauccugccuguguccaugaccaagaccagcguggacugcaccauguacaucugcggcgauuccaccgagugcuccaaccugcugcugcaguacggcagcuucugcacccagcugaauagagcccugacagggaucgccguggaacaggacaagaacacccaagagguguucgcccaagugaagcaaaucuacaagaccccuccuaucaaggacuucggcggcuucaauuucagccagauucugcccgauccuagcaagcccagcaagcggagcuucaucgaggaccugcuguucaacaaagugacacuggccgacgccggcuucaucaagcaguauggcgauugucugggcgacauugccgccagggaucugauuugcgcccagaaguuuaacggacugacagugcugccuccucugcugaccgaugagaugaucgcccaguacacaucugcccugcuggccggcacaaucacaagcggcuggacauuuggagcuggcgccgcucugcagauccccuuugcuaugcagauggccuaccgguucaacggcaucggagugacccagaaugugcuguacgagaaccagaagcugaucgccaaccaguucaacagcgccaucggcaagauccaggacagccugagcagcacagcaagcgcccugggaaagcugcaggacguggucaaccagaaugcccaggcacugaacacccuggucaagcagcuguccuccaacuucggcgccaucagcucugugcugaacgauauccugagcagacuggacaaggucgaggccgaggugcagaucgacagacugaucacaggcagacugcagagccuccagacauacgugacccagcagcugaucagagccgccgagauuagagccucugccaaucuggccgccaccaagaugucugagugugugcugggccagagcaagagaguggacuuuugcggcaagggcuaccaccugaugagcuucccucagucugccccucacggcgugguguuucugcacgugacauaugugcccgcucaagagaagaauuucaccaccgcuccagccaucugccacgacggcaaagcccacuuuccuagagaaggcguguucguguccaacggcacccauugguucgugacacagcggaacuucuacgagccccagaucaucaccaccgacaacaccuucgugucuggcaacugcgacguugugaucggcauugugaacaauaccguguacgacccucugcagcccgagcuggacagcuucaaagaggaacuggacaaguacuuuaagaaccacacaagccccgacguggaccugggcgauaucagcggaaucaaugccagcgucgugaacauccagaaagagaucgaccggcugaacgagguggccaagaaucugaacgagagccugaucgaccugcaagaacuggggaaguacgagcaguacaucaaguggcccugguacaucuggcugggcuuuaucgccggacugauugccaucgugauggucacaaucaugcuguguugcaugaccagcugcuguagcugccugaagggcuguuguagcuguggcagcugcugcaaguucgacgaggacgauucugagcccgugcugaagggcgugaaacugcacuacaccugaggacuaguuauaagacugacuagcccgaugggccucccaacgggcccuccuccccuccuugcaccgagagaucuaaaaaaaaaaaaaaaaaaaaaaaaaaaaaaaaaaaaaaaaaaaaaaaaaaaaaaaaaaaaaaaaaaaaaaaaaaaaaaaaaaaaaaaaaaaaaaaaaaaa

SEQ ID NO: 25910 - RNA, 4011 nt, Artificial Sequence
  SARS-CoV-2/Wuhan/WIV05/2019__EPI_ISL_402128 spike protein mRNA gc mod (1-1273)(D614G_M1229I)
aggagaaagcuuaccauguucguguuucuggugcugcugccccugguguccagccagugugugaaccugaccaccagaacacagcugccuccagccuacaccaacagcuucaccagaggcguguacuaccccgacaagguguucagauccagcgugcugcacucuacccaggaccuguuccugccuuucuucagcaacgugaccugguuccacgccauccacguguccggcaccaauggcaccaagagauucgacaaccccgugcugcccuucaacgacgggguguacuuugccagcaccgagaaguccaacaucaucagaggcuggaucuucggcaccacacuggacagcaagacccagagccugcugaucgugaacaacgccaccaacguggucaucaaagugugcgaguuccaguucugcaacgaccccuuccugggcgucuacuaccacaagaacaacaagagcuggauggaaagcgaguuccggguguacagcagcgccaacaacugcaccuucgaguacgugucccagccuuuccugauggaccuggaaggcaagcagggcaacuucaagaaccugcgcgaguucguguucaagaacaucgacggcuacuucaaaaucuacagcaagcacaccccuaucaaccucgugcgggaucugccucagggcuucucugcucuggaaccccugguggaucugcccaucggcaucaacaucacccgguuucagacacugcuggcccugcacagaagcuaccugacaccuggcgauagcagcagcggauggacagcuggugccgccgcuuacuaugugggcuaccugcagccuagaaccuuccugcugaaguacaacgagaacggcaccaucaccgacgccguggauugugcucuggauccucugagcgagacaaagugcacccugaaguccuucaccguggaaaagggcaucuaccagaccagcaacuuccgggugcagcccaccgaauccaucgugcgguuccccaauaucaccaaucugugccccuucggcgagguguucaaugccaccagauucgccucuguguacgccuggaaccggaagcggaucagcaauugcguggccgacuacuccgugcuguacaacuccgccagcuucagcaccuucaagugcuacggcguguccccuaccaagcugaacgaccugugcuucacaaacguguacgccgacagcuucgugauccggggagaugaagugcggcagauugccccuggacagacaggcaagaucgccgacuacaacuacaagcugcccgacgacuucaccggcugugugauugccuggaacagcaacaaccuggacuccaaagucggcggcaacuacaauuaccuguaccggcuguuccggaaguccaaucugaagcccuucgagcgggacaucagcaccgaaaucuaucaggccggcagcaccccuugcaacggcguggaaggcuucaacugcuacuucccacugcaguccuacggcuuucagcccacaaauggcgugggcuaucagcccuacagagugguggugcugagcuucgaacugcugcaugcuccugccacagugugcggcccuaagaaaagcaccaaucucgugaagaacaaaugcgugaacuucaacuucaacggccugaccggcaccggcgugcugacagagagcaacaagaaguuccugccauuccagcaguuuggccgggauaucgccgauaccacagacgccguuagagauccccagacacuggaaauccuggacaucaccccaugcagcuucggcggagugucugugaucaccccuggcaccaacaccagcaaucagguggcagugcuguaccagggcgugaacuguaccgaagugcccguggccauucacgccgaucagcugacaccuacauggcggguguacuccaccggcagcaauguguuucagaccagagccggcugucugaucggagccgagcacgugaacaauagcuacgagugcgacauccccaucggcgcuggcaucugugccagcuaccagacacagacaaacagccccagacgggcuagaagcguggccagccagagcaucauugccuacacaaugucucugggcgccgagaacagcguggccuacuccaacaacucuaucgcuauccccaccaacuucaccaucagcgugaccaccgagauccugccuguguccaugaccaagaccagcguggacugcaccauguacaucugcggcgauuccaccgagugcuccaaccugcugcugcaguacggcagcuucugcacccagcugaauagagcccugacagggaucgccguggaacaggacaagaacacccaagagguguucgcccaagugaagcaaaucuacaagaccccuccuaucaaggacuucggcggcuucaauuucagccagauucugcccgauccuagcaagcccagcaagcggagcuucaucgaggaccugcuguucaacaaagugacacuggccgacgccggcuucaucaagcaguauggcgauugucugggcgacauugccgccagggaucugauuugcgcccagaaguuuaacggacugacagugcugccuccucugcugaccgaugagaugaucgcccaguacacaucugcccugcuggccggcacaaucacaagcggcuggacauuuggagcuggcgccgcucugcagauccccuuugcuaugcagauggccuaccgguucaacggcaucggagugacccagaaugugcuguacgagaaccagaagcugaucgccaaccaguucaacagcgccaucggcaagauccaggacagccugagcagcacagcaagcgcccugggaaagcugcaggacguggucaaccagaaugcccaggcacugaacacccuggucaagcagcuguccuccaacuucggcgccaucagcucugugcugaacgauauccugagcagacuggacaaggucgaggccgaggugcagaucgacagacugaucacaggcagacugcagagccuccagacauacgugacccagcagcugaucagagccgccgagauuagagccucugccaaucuggccgccaccaagaugucugagugugugcugggccagagcaagagaguggacuuuugcggcaagggcuaccaccugaugagcuucccucagucugccccucacggcgugguguuucugcacgugacauaugugcccgcucaagagaagaauuucaccaccgcuccagccaucugccacgacggcaaagcccacuuuccuagagaaggcguguucguguccaacggcacccauugguucgugacacagcggaacuucuacgagccccagaucaucaccaccgacaacaccuucgugucuggcaacugcgacguugugaucggcauugugaacaauaccguguacgacccucugcagcccgagcuggacagcuucaaagaggaacuggacaaguacuuuaagaaccacacaagccccgacguggaccugggcgauaucagcggaaucaaugccagcgucgugaacauccagaaagagaucgaccggcugaacgagguggccaagaaucugaacgagagccugaucgaccugcaagaacuggggaaguacgagcaguacaucaaguggcccugguacaucuggcugggcuuuaucgccggacugauugccaucgugaucgucacaaucaugcuguguugcaugaccagcugcuguagcugccugaagggcuguuguagcuguggcagcugcugcaaguucgacgaggacgauucugagcccgugcugaagggcgugaaacugcacuacaccugaggacuaguuauaagacugacuagcccgaugggccucccaacgggcccuccuccccuccuugcaccgagagaucuaaaaaaaaaaaaaaaaaaaaaaaaaaaaaaaaaaaaaaaaaaaaaaaaaaaaaaaaaaaaaaaaaaaaaaaaaaaaaaaaaaaaaaaaaaaaaaaaaaaa

SEQ ID NO: 25911 - RNA, 4005 nt, Artificial Sequence
  SARS-CoV-2/Wuhan/WIV05/2019__EPI_ISL_402128 spike protein mRNA gc mod (1-1273)(H69del_V70del_A222V_Y453F_S477N_D614G_I692V)
aggagaaagcuuaccauguucguguuucuggugcugcugccccugguguccagccagugugugaaccugaccaccagaacacagcugccuccagccuacaccaacagcuucaccagaggcguguacuaccccgacaagguguucagauccagcgugcugcacucuacccaggaccuguuccugccuuucuucagcaacgugaccugguuccacgccaucuccggcaccaauggcaccaagagauucgacaaccccgugcugcccuucaacgacgggguguacuuugccagcaccgagaaguccaacaucaucagaggcuggaucuucggcaccacacuggacagcaagacccagagccugcugaucgugaacaacgccaccaacguggucaucaaagugugcgaguuccaguucugcaacgaccccuuccugggcgucuacuaccacaagaacaacaagagcuggauggaaagcgaguuccggguguacagcagcgccaacaacugcaccuucgaguacgugucccagccuuuccugauggaccuggaaggcaagcagggcaacuucaagaaccugcgcgaguucguguucaagaacaucgacggcuacuucaaaaucuacagcaagcacaccccuaucaaccucgugcgggaucugccucagggcuucucugugcuggaaccccugguggaucugcccaucggcaucaacaucacccgguuucagacacugcuggcccugcacagaagcuaccugacaccuggcgauagcagcagcggauggacagcuggugccgccgcuuacuaugugggcuaccugcagccuagaaccuuccugcugaaguacaacgagaacggcaccaucaccgacgccguggauugugcucuggauccucugagcgagacaaagugcacccugaaguccuucaccguggaaaagggcaucuaccagaccagcaacuuccgggugcagcccaccgaauccaucgugcgguuccccaauaucaccaaucugugccccuucggcgagguguucaaugccaccagauucgccucuguguacgccuggaaccggaagcggaucagcaauugcguggccgacuacuccgugcuguacaacuccgccagcuucagcaccuucaagugcuacggcguguccccuaccaagcugaacgaccugugcuucacaaacguguacgccgacagcuucgugauccggggagaugaagugcggcagauugccccuggacagacaggcaagaucgccgacuacaacuacaagcugcccgacgacuucaccggcugugugauugccuggaacagcaacaaccuggacuccaaagucggcggcaacuacaauuaccuguuccggcuguuccggaaguccaaucugaagcccuucgagcgggacaucagcaccgaaaucuaucaggccggcaacaccccuugcaacggcguggaaggcuucaacugcuacuucccacugcaguccuacggcuuucagcccacaaauggcgugggcuaucagcccuacagagugguggugcugagcuucgaacugcugcaugcuccugccacagugugcggcccuaagaaaagcaccaaucucgugaagaacaaaugcgugaacuucaacuucaacggccugaccggcaccggcgugcugacagagagcaacaagaaguuccugccauuccagcaguuuggccgggauaucgccgauaccacagacgccguuagagauccccagacacuggaaauccuggacaucaccccaugcagcuucggcggagugucugugaucaccccuggcaccaacaccagcaaucagguggcagugcuguaccagggcgugaacuguaccgaagugcccguggccauucacgccgaucagcugacaccuacauggcggguguacuccaccggcagcaauguguuucagaccagagccggcugucugaucggagccgagcacgugaacaauagcuacgagugcgacauccccaucggcgcuggcaucugugccagcuaccagacacagacaaacagccccagacgggcuagaagcguggccagccagagcgugauugccuacacaaugucucugggcgccgagaacagcguggccuacuccaacaacucuaucgcuauccccaccaacuucaccaucagcgugaccaccgagauccugccuguguccaugaccaagaccagcguggacugcaccauguacaucugcggcgauuccaccgagugcuccaaccugcugcugcaguacggcagcuucugcacccagcugaauagagcccugacagggaucgccguggaacaggacaagaacacccaagagguguucgcccaagugaagcaaaucuacaagaccccuccuaucaaggacuucggcggcuucaauuucagccagauucugcccgauccuagcaagcccagcaagcggagcuucaucgaggaccugcuguucaacaaagugacacuggccgacgccggcuucaucaagcaguauggcgauugucugggcgacauugccgccagggaucugauuugcgcccagaaguuuaacggacugacagugcugccuccucugcugaccgaugagaugaucgcccaguacacaucugcccugcuggccggcacaaucacaagcggcuggacauuuggagcuggcgccgcucugcagauccccuuugcuaugcagauggccuaccgguucaacggcaucggagugacccagaaugugcuguacgagaaccagaagcugaucgccaaccaguucaacagcgccaucggcaagauccaggacagccugagcagcacagcaagcgcccugggaaagcugcaggacguggucaaccagaaugcccaggcacugaacacccuggucaagcagcuguccuccaacuucggcgccaucagcucugugcugaacgauauccugagcagacuggacaaggucgaggccgaggugcagaucgacagacugaucacaggcagacugcagagccuccagacauacgugacccagcagcugaucagagccgccgagauuagagccucugccaaucuggccgccaccaagaugucugagugugugcugggccagagcaagagaguggacuuuugcggcaagggcuaccaccugaugagcuucccucagucugccccucacggcgugguguuucugcacgugacauaugugcccgcucaagagaagaauuucaccaccgcuccagccaucugccacgacggcaaagcccacuuuccuagagaaggcguguucguguccaacggcacccauugguucgugacacagcggaacuucuacgagccccagaucaucaccaccgacaacaccuucgugucuggcaacugcgacguugugaucggcauugugaacaauaccguguacgacccucugcagcccgagcuggacagcuucaaagaggaacuggacaaguacuuuaagaaccacacaagccccgacguggaccugggcgauaucagcggaaucaaugccagcgucgugaacauccagaaagagaucgaccggcugaacgagguggccaagaaucugaacgagagccugaucgaccugcaagaacuggggaaguacgagcaguacaucaaguggcccugguacaucuggcugggcuuuaucgccggacugauugccaucgugauggucacaaucaugcuguguugcaugaccagcugcuguagcugccugaagggcuguuguagcuguggcagcugcugcaaguucgacgaggacgauucugagcccgugcugaagggcgugaaacugcacuacaccugaggacuaguuauaagacugacuagcccgaugggccucccaacgggcccuccuccccuccuugcaccgagagaucuaaaaaaaaaaaaaaaaaaaaaaaaaaaaaaaaaaaaaaaaaaaaaaaaaaaaaaaaaaaaaaaaaaaaaaaaaaaaaaaaaaaaaaaaaaaaaaaaaaaa

SEQ ID NO: 25912 - RNA, 4005 nt, Artificial Sequence
  SARS-CoV-2/Wuhan/WIV05/2019__EPI_ISL_402128 spike protein mRNA gc mod (1-1273)(H69del_V70del_Y453F_D614G_I692V_M1229I)
aggagaaagcuuaccauguucguguuucuggugcugcugccccugguguccagccagugugugaaccugaccaccagaacacagcugccuccagccuacaccaacagcuucaccagaggcguguacuaccccgacaagguguucagauccagcgugcugcacucuacccaggaccuguuccugccuuucuucagcaacgugaccugguuccacgccaucuccggcaccaauggcaccaagagauucgacaaccccgugcugcccuucaacgacgggguguacuuugccagcaccgagaaguccaacaucaucagaggcuggaucuucggcaccacacuggacagcaagacccagagccugcugaucgugaacaacgccaccaacguggucaucaaagugugcgaguuccaguucugcaacgaccccuuccugggcgucuacuaccacaagaacaacaagagcuggauggaaagcgaguuccggguguacagcagcgccaacaacugcaccuucgaguacgugucccagccuuuccugauggaccuggaaggcaagcagggcaacuucaagaaccugcgcgaguucguguucaagaacaucgacggcuacuucaaaaucuacagcaagcacaccccuaucaaccucgugcgggaucugccucagggcuucucugcucuggaaccccugguggaucugcccaucggcaucaacaucacccgguuucagacacugcuggcccugcacagaagcuaccugacaccuggcgauagcagcagcggauggacagcuggugccgccgcuuacuaugugggcuaccugcagccuagaaccuuccugcugaaguacaacgagaacggcaccaucaccgacgccguggauugugcucuggauccucugagcgagacaaagugcacccugaaguccuucaccguggaaaagggcaucuaccagaccagcaacuuccgggugcagcccaccgaauccaucgugcgguuccccaauaucaccaaucugugccccuucggcgagguguucaaugccaccagauucgccucuguguacgccuggaaccggaagcggaucagcaauugcguggccgacuacuccgugcuguacaacuccgccagcuucagcaccuucaagugcuacggcguguccccuaccaagcugaacgaccugugcuucacaaacguguacgccgacagcuucgugauccggggagaugaagugcggcagauugccccuggacagacaggcaagaucgccgacuacaacuacaagcugcccgacgacuucaccggcugugugauugccuggaacagcaacaaccuggacuccaaagucggcggcaacuacaauuaccuguuccggcuguuccggaaguccaaucugaagcccuucgagcgggacaucagcaccgaaaucuaucaggccggcagcaccccuugcaacggcguggaaggcuucaacugcuacuucccacugcaguccuacggcuuucagcccacaaauggcgugggcuaucagcccuacagagugguggugcugagcuucgaacugcugcaugcuccugccacagugugcggcccuaagaaaagcaccaaucucgugaagaacaaaugcgugaacuucaacuucaacggccugaccggcaccggcgugcugacagagagcaacaagaaguuccugccauuccagcaguuuggccgggauaucgccgauaccacagacgccguuagagauccccagacacuggaaauccuggacaucaccccaugcagcuucggcggagugucugugaucaccccuggcaccaacaccagcaaucagguggcagugcuguaccagggcgugaacuguaccgaagugcccguggccauucacgccgaucagcugacaccuacauggcggguguacuccaccggcagcaauguguuucagaccagagccggcugucugaucggagccgagcacgugaacaauagcuacgagugcgacauccccaucggcgcuggcaucugugccagcuaccagacacagacaaacagccccagacgggcuagaagcguggccagccagagcgugauugccuacacaaugucucugggcgccgagaacagcguggccuacuccaacaacucuaucgcuauccccaccaacuucaccaucagcgugaccaccgagauccugccuguguccaugaccaagaccagcguggacugcaccauguacaucugcggcgauuccaccgagugcuccaaccugcugcugcaguacggcagcuucugcacccagcugaauagagcccugacagggaucgccguggaacaggacaagaacacccaagagguguucgcccaagugaagcaaaucuacaagaccccuccuaucaaggacuucggcggcuucaauuucagccagauucugcccgauccuagcaagcccagcaagcggagcuucaucgaggaccugcuguucaacaaagugacacuggccgacgccggcuucaucaagcaguauggcgauugucugggcgacauugccgccagggaucugauuugcgcccagaaguuuaacggacugacagugcugccuccucugcugaccgaugagaugaucgcccaguacacaucugcccugcuggccggcacaaucacaagcggcuggacauuuggagcuggcgccgcucugcagauccccuuugcuaugcagauggccuaccgguucaacggcaucggagugacccagaaugugcuguacgagaaccagaagcugaucgccaaccaguucaacagcgccaucggcaagauccaggacagccugagcagcacagcaagcgcccugggaaagcugcaggacguggucaaccagaaugcccaggcacugaacacccuggucaagcagcuguccuccaacuucggcgccaucagcucugugcugaacgauauccugagcagacuggacaaggucgaggccgaggugcagaucgacagacugaucacaggcagacugcagagccuccagacauacgugacccagcagcugaucagagccgccgagauuagagccucugccaaucuggccgccaccaagaugucugagugugugcugggccagagcaagagaguggacuuuugcggcaagggcuaccaccugaugagcuucccucagucugccccucacggcgugguguuucugcacgugacauaugugcccgcucaagagaagaauuucaccaccgcuccagccaucugccacgacggcaaagcccacuuuccuagagaaggcguguucguguccaacggcacccauugguucgugacacagcggaacuucuacgagccccagaucaucaccaccgacaacaccuucgugucuggcaacugcgacguugugaucggcauugugaacaauaccguguacgacccucugcagcccgagcuggacagcuucaaagaggaacuggacaaguacuuuaagaaccacacaagccccgacguggaccugggcgauaucagcggaaucaaugccagcgucgugaacauccagaaagagaucgaccggcugaacgagguggccaagaaucugaacgagagccugaucgaccugcaagaacuggggaaguacgagcaguacaucaaguggcccugguacaucuggcugggcuuuaucgccggacugauugccaucgugaucgucacaaucaugcuguguugcaugaccagcugcuguagcugccugaagggcuguuguagcuguggcagcugcugcaaguucgacgaggacgauucugagcccgugcugaagggcgugaaacugcacuacaccugaggacuaguuauaagacugacuagcccgaugggccucccaacgggcccuccuccccuccuugcaccgagagaucuaaaaaaaaaaaaaaaaaaaaaaaaaaaaaaaaaaaaaaaaaaaaaaaaaaaaaaaaaaaaaaaaaaaaaaaaaaaaaaaaaaaaaaaaaaaaaaaaaaaa

SEQ ID NO: 25913 - RNA, 4002 nt, Artificial Sequence
  SARS-CoV-2/Wuhan/WIV05/2019__EPI_ISL_402128 spike protein mRNA gc mod (1-1273)(H69del_V70del_Y144del_N501Y_A570D_D614G_P681H_T716I_S982 A_D1118H)
aggagaaagcuuaccauguucguguuucuggugcugcugccccugguguccagccagugugugaaccugaccaccagaacacagcugccuccagccuacaccaacagcuucaccagaggcguguacuaccccgacaagguguucagauccagcgugcugcacucuacccaggaccuguuccugccuuucuucagcaacgugaccugguuccacgccaucuccggcaccaauggcaccaagagauucgacaaccccgugcugcccuucaacgacgggguguacuuugccagcaccgagaaguccaacaucaucagaggcuggaucuucggcaccacacuggacagcaagacccagagccugcugaucgugaacaacgccaccaacguggucaucaaagugugcgaguuccaguucugcaacgaccccuuccugggcgucuaccacaagaacaacaagagcuggauggaaagcgaguuccggguguacagcagcgccaacaacugcaccuucgaguacgugucccagccuuuccugauggaccuggaaggcaagcagggcaacuucaagaaccugcgcgaguucguguucaagaacaucgacggcuacuucaaaaucuacagcaagcacaccccuaucaaccucgugcgggaucugccucagggcuucucugcucuggaaccccugguggaucugcccaucggcaucaacaucacccgguuucagacacugcuggcccugcacagaagcuaccugacaccuggcgauagcagcagcggauggacagcuggugccgccgcuuacuaugugggcuaccugcagccuagaaccuuccugcugaaguacaacgagaacggcaccaucaccgacgccguggauugugcucuggauccucugagcgagacaaagugcacccugaaguccuucaccguggaaaagggcaucuaccagaccagcaacuuccgggugcagcccaccgaauccaucgugcgguuccccaauaucaccaaucugugccccuucggcgagguguucaaugccaccagauucgccucuguguacgccuggaaccggaagcggaucagcaauugcguggccgacuacuccgugcuguacaacuccgccagcuucagcaccuucaagugcuacggcguguccccuaccaagcugaacgaccugugcuucacaaacguguacgccgacagcuucgugauccggggagaugaagugcggcagauugccccuggacagacaggcaagaucgccgacuacaacuacaagcugcccgacgacuucaccggcugugugauugccuggaacagcaacaaccuggacuccaaagucggcggcaacuacaauuaccuguaccggcuguuccggaaguccaaucugaagcccuucgagcgggacaucagcaccgaaaucuaucaggccggcagcaccccuugcaacggcguggaaggcuucaacugcuacuucccacugcaguccuacggcuuucagcccacauacggcgugggcuaucagcccuacagagugguggugcugagcuucgaacugcugcaugcuccugccacagugugcggcccuaagaaaagcaccaaucucgugaagaacaaaugcgugaacuucaacuucaacggccugaccggcaccggcgugcugacagagagcaacaagaaguuccugccauuccagcaguuuggccgggauaucgacgauaccacagacgccguuagagauccccagacacuggaaauccuggacaucaccccaugcagcuucggcggagugucugugaucaccccuggcaccaacaccagcaaucagguggcagugcuguaccagggcgugaacuguaccgaagugcccguggccauucacgccgaucagcugacaccuacauggcggguguacuccaccggcagcaauguguuucagaccagagccggcugucugaucggagccgagcacgugaacaauagcuacgagugcgacauccccaucggcgcuggcaucugugccagcuaccagacacagacaaacagccacagacgggcuagaagcguggccagccagagcaucauugccuacacaaugucucugggcgccgagaacagcguggccuacuccaacaacucuaucgcuauccccaucaacuucaccaucagcgugaccaccgagauccugccuguguccaugaccaagaccagcguggacugcaccauguacaucugcggcgauuccaccgagugcuccaaccugcugcugcaguacggcagcuucugcacccagcugaauagagcccugacagggaucgccguggaacaggacaagaacacccaagagguguucgcccaagugaagcaaaucuacaagaccccuccuaucaaggacuucggcggcuucaauuucagccagauucugcccgauccuagcaagcccagcaagcggagcuucaucgaggaccugcuguucaacaaagugacacuggccgacgccggcuucaucaagcaguauggcgauugucugggcgacauugccgccagggaucugauuugcgcccagaaguuuaacggacugacagugcugccuccucugcugaccgaugagaugaucgcccaguacacaucugcccugcuggccggcacaaucacaagcggcuggacauuuggagcuggcgccgcucugcagauccccuuugcuaugcagauggccuaccgguucaacggcaucggagugacccagaaugugcuguacgagaaccagaagcugaucgccaaccaguucaacagcgccaucggcaagauccaggacagccugagcagcacagcaagcgcccugggaaagcugcaggacguggucaaccagaaugcccaggcacugaacacccuggucaagcagcuguccuccaacuucggcgccaucagcucugugcugaacgauauccuggccagacuggacaaggucgaggccgaggugcagaucgacagacugaucacaggcagacugcagagccuccagacauacgugacccagcagcugaucagagccgccgagauuagagccucugccaaucuggccgccaccaagaugucugagugugugcugggccagagcaagagaguggacuuuugcggcaagggcuaccaccugaugagcuucccucagucugccccucacggcgugguguuucugcacgugacauaugugcccgcucaagagaagaauuucaccaccgcuccagccaucugccacgacggcaaagcccacuuuccuagagaaggcguguucguguccaacggcacccauugguucgugacacagcggaacuucuacgagccccagaucaucaccacccacaacaccuucgugucuggcaacugcgacguugugaucggcauugugaacaauaccguguacgacccucugcagcccgagcuggacagcuucaaagaggaacuggacaaguacuuuaagaaccacacaagccccgacguggaccugggcgauaucagcggaaucaaugccagcgucgugaacauccagaaagagaucgaccggcugaacgagguggccaagaaucugaacgagagccugaucgaccugcaagaacuggggaaguacgagcaguacaucaaguggcccugguacaucuggcugggcuuuaucgccggacugauugccaucgugauggucacaaucaugcuguguugcaugaccagcugcuguagcugccugaagggcuguuguagcuguggcagcugcugcaaguucgacgaggacgauucugagcccgugcugaagggcgugaaacugcacuacaccugaggacuaguuauaagacugacuagcccgaugggccucccaacgggcccuccuccccuccuugcaccgagagaucuaaaaaaaaaaaaaaaaaaaaaaaaaaaaaaaaaaaaaaaaaaaaaaaaaaaaaaaaaaaaaaaaaaaaaaaaaaaaaaaaaaaaaaaaaaaaaaaaaaaa

SEQ ID NO: 25914 - RNA, 4011 nt, Artificial Sequence
  SARS-CoV-2/Wuhan/WIV05/2019__EPI_ISL_402128 spike protein mRNA gc mod (1-1273)(K417N_E484K_N501Y_D614G)
aggagaaagcuuaccauguucguguuucuggugcugcugccccugguguccagccagugugugaaccugaccaccagaacacagcugccuccagccuacaccaacagcuucaccagaggcguguacuaccccgacaagguguucagauccagcgugcugcacucuacccaggaccuguuccugccuuucuucagcaacgugaccugguuccacgccauccacguguccggcaccaauggcaccaagagauucgacaaccccgugcugcccuucaacgacgggguguacuuugccagcaccgagaaguccaacaucaucagaggcuggaucuucggcaccacacuggacagcaagacccagagccugcugaucgugaacaacgccaccaacguggucaucaaagugugcgaguuccaguucugcaacgaccccuuccugggcgucuacuaccacaagaacaacaagagcuggauggaaagcgaguuccggguguacagcagcgccaacaacugcaccuucgaguacgugucccagccuuuccugauggaccuggaaggcaagcagggcaacuucaagaaccugcgcgaguucguguucaagaacaucgacggcuacuucaaaaucuacagcaagcacaccccuaucaaccucgugcgggaucugccucagggcuucucugcucuggaaccccugguggaucugcccaucggcaucaacaucacccgguuucagacacugcuggcccugcacagaagcuaccugacaccuggcgauagcagcagcggauggacagcuggugccgccgcuuacuaugugggcuaccugcagccuagaaccuuccugcugaaguacaacgagaacggcaccaucaccgacgccguggauugugcucuggauccucugagcgagacaaagugcacccugaaguccuucaccguggaaaagggcaucuaccagaccagcaacuuccgggugcagcccaccgaauccaucgugcgguuccccaauaucaccaaucugugccccuucggcgagguguucaaugccaccagauucgccucuguguacgccuggaaccggaagcggaucagcaauugcguggccgacuacuccgugcuguacaacuccgccagcuucagcaccuucaagugcuacggcguguccccuaccaagcugaacgaccugugcuucacaaacguguacgccgacagcuucgugauccggggagaugaagugcggcagauugccccuggacagacaggcaacaucgccgacuacaacuacaagcugcccgacgacuucaccggcugugugauugccuggaacagcaacaaccuggacuccaaagucggcggcaacuacaauuaccuguaccggcuguuccggaaguccaaucugaagcccuucgagcgggacaucagcaccgaaaucuaucaggccggcagcaccccuugcaacggcgugaagggcuucaacugcuacuucccacugcaguccuacggcuuucagcccacauacggcgugggcuaucagcccuacagagugguggugcugagcuucgaacugcugcaugcuccugccacagugugcggcccuaagaaaagcaccaaucucgugaagaacaaaugcgugaacuucaacuucaacggccugaccggcaccggcgugcugacagagagcaacaagaaguuccugccauuccagcaguuuggccgggauaucgccgauaccacagacgccguuagagauccccagacacuggaaauccuggacaucaccccaugcagcuucggcggagugucugugaucaccccuggcaccaacaccagcaaucagguggcagugcuguaccagggcgugaacuguaccgaagugcccguggccauucacgccgaucagcugacaccuacauggcggguguacuccaccggcagcaauguguuucagaccagagccggcugucugaucggagccgagcacgugaacaauagcuacgagugcgacauccccaucggcgcuggcaucugugccagcuaccagacacagacaaacagccccagacgggcuagaagcguggccagccagagcaucauugccuacacaaugucucugggcgccgagaacagcguggccuacuccaacaacucuaucgcuauccccaccaacuucaccaucagcgugaccaccgagauccugccuguguccaugaccaagaccagcguggacugcaccauguacaucugcggcgauuccaccgagugcuccaaccugcugcugcaguacggcagcuucugcacccagcugaauagagcccugacagggaucgccguggaacaggacaagaacacccaagagguguucgcccaagugaagcaaaucuacaagaccccuccuaucaaggacuucggcggcuucaauuucagccagauucugcccgauccuagcaagcccagcaagcggagcuucaucgaggaccugcuguucaacaaagugacacuggccgacgccggcuucaucaagcaguauggcgauugucugggcgacauugccgccagggaucugauuugcgcccagaaguuuaacggacugacagugcugccuccucugcugaccgaugagaugaucgcccaguacacaucugcccugcuggccggcacaaucacaagcggcuggacauuuggagcuggcgccgcucugcagauccccuuugcuaugcagauggccuaccgguucaacggcaucggagugacccagaaugugcuguacgagaaccagaagcugaucgccaaccaguucaacagcgccaucggcaagauccaggacagccugagcagcacagcaagcgcccugggaaagcugcaggacguggucaaccagaaugcccaggcacugaacacccuggucaagcagcuguccuccaacuucggcgccaucagcucugugcugaacgauauccugagcagacuggacaaggucgaggccgaggugcagaucgacagacugaucacaggcagacugcagagccuccagacauacgugacccagcagcugaucagagccgccgagauuagagccucugccaaucuggccgccaccaagaugucugagugugugcugggccagagcaagagaguggacuuuugcggcaagggcuaccaccugaugagcuucccucagucugccccucacggcgugguguuucugcacgugacauaugugcccgcucaagagaagaauuucaccaccgcuccagccaucugccacgacggcaaagcccacuuuccuagagaaggcguguucguguccaacggcacccauugguucgugacacagcggaacuucuacgagccccagaucaucaccaccgacaacaccuucgugucuggcaacugcgacguugugaucggcauugugaacaauaccguguacgacccucugcagcccgagcuggacagcuucaaagaggaacuggacaaguacuuuaagaaccacacaagccccgacguggaccugggcgauaucagcggaaucaaugccagcgucgugaacauccagaaagagaucgaccggcugaacgagguggccaagaaucugaacgagagccugaucgaccugcaagaacuggggaaguacgagcaguacaucaaguggcccugguacaucuggcugggcuuuaucgccggacugauugccaucgugauggucacaaucaugcuguguugcaugaccagcugcuguagcugccugaagggcuguuguagcuguggcagcugcugcaaguucgacgaggacgauucugagcccgugcugaagggcgugaaacugcacuacaccugaggacuaguuauaagacugacuagcccgaugggccucccaacgggcccuccuccccuccuugcaccgagagaucuaaaaaaaaaaaaaaaaaaaaaaaaaaaaaaaaaaaaaaaaaaaaaaaaaaaaaaaaaaaaaaaaaaaaaaaaaaaaaaaaaaaaaaaaaaaaaaaaaaaa

SEQ ID NO: 25915 - RNA, 4002 nt, Artificial Sequence
  SARS-CoV-2/Wuhan/WIV05/2019__EPI_ISL_402128 spike protein mRNA gc mod (1-1273)(L18F_D80A_D215G_L242del_A243del_L244del_R246I_K417N_E484 K_N501Y_D614G_A701V)
aggagaaagcuuaccauguucguguuucuggugcugcugccccugguguccagccagugugugaacuucaccaccagaacacagcugccuccagccuacaccaacagcuucaccagaggcguguacuaccccgacaagguguucagauccagcgugcugcacucuacccaggaccuguuccugccuuucuucagcaacgugaccugguuccacgccauccacguguccggcaccaauggcaccaagagauucgccaaccccgugcugcccuucaacgacgggguguacuuugccagcaccgagaaguccaacaucaucagaggcuggaucuucggcaccacacuggacagcaagacccagagccugcugaucgugaacaacgccaccaacguggucaucaaagugugcgaguuccaguucugcaacgaccccuuccugggcgucuacuaccacaagaacaacaagagcuggauggaaagcgaguuccggguguacagcagcgccaacaacugcaccuucgaguacgugucccagccuuuccugauggaccuggaaggcaagcagggcaacuucaagaaccugcgcgaguucguguucaagaacaucgacggcuacuucaaaaucuacagcaagcacaccccuaucaaccucgugcggggccugccucagggcuucucugcucuggaaccccugguggaucugcccaucggcaucaacaucacccgguuucagacacugcacaucagcuaccugacaccuggcgauagcagcagcggauggacagcuggugccgccgcuuacuaugugggcuaccugcagccuagaaccuuccugcugaaguacaacgagaacggcaccaucaccgacgccguggauugugcucuggauccucugagcgagacaaagugcacccugaaguccuucaccguggaaaagggcaucuaccagaccagcaacuuccgggugcagcccaccgaauccaucgugcgguuccccaauaucaccaaucugugccccuucggcgagguguucaaugccaccagauucgccucuguguacgccuggaaccggaagcggaucagcaauugcguggccgacuacuccgugcuguacaacuccgccagcuucagcaccuucaagugcuacggcguguccccuaccaagcugaacgaccugugcuucacaaacguguacgccgacagcuucgugauccggggagaugaagugcggcagauugccccuggacagacaggcaacaucgccgacuacaacuacaagcugcccgacgacuucaccggcugugugauugccuggaacagcaacaaccuggacuccaaagucggcggcaacuacaauuaccuguaccggcuguuccggaaguccaaucugaagcccuucgagcgggacaucagcaccgaaaucuaucaggccggcagcaccccuugcaacggcgugaagggcuucaacugcuacuucccacugcaguccuacggcuuucagcccacauacggcgugggcuaucagcccuacagagugguggugcugagcuucgaacugcugcaugcuccugccacagugugcggcccuaagaaaagcaccaaucucgugaagaacaaaugcgugaacuucaacuucaacggccugaccggcaccggcgugcugacagagagcaacaagaaguuccugccauuccagcaguuuggccgggauaucgccgauaccacagacgccguuagagauccccagacacuggaaauccuggacaucaccccaugcagcuucggcggagugucugugaucaccccuggcaccaacaccagcaaucagguggcagugcuguaccagggcgugaacuguaccgaagugcccguggccauucacgccgaucagcugacaccuacauggcggguguacuccaccggcagcaauguguuucagaccagagccggcugucugaucggagccgagcacgugaacaauagcuacgagugcgacauccccaucggcgcuggcaucugugccagcuaccagacacagacaaacagccccagacgggcuagaagcguggccagccagagcaucauugccuacacaaugucucugggcguggagaacagcguggccuacuccaacaacucuaucgcuauccccaccaacuucaccaucagcgugaccaccgagauccugccuguguccaugaccaagaccagcguggacugcaccauguacaucugcggcgauuccaccgagugcuccaaccugcugcugcaguacggcagcuucugcacccagcugaauagagcccugacagggaucgccguggaacaggacaagaacacccaagagguguucgcccaagugaagcaaaucuacaagaccccuccuaucaaggacuucggcggcuucaauuucagccagauucugcccgauccuagcaagcccagcaagcggagcuucaucgaggaccugcuguucaacaaagugacacuggccgacgccggcuucaucaagcaguauggcgauugucugggcgacauugccgccagggaucugauuugcgcccagaaguuuaacggacugacagugcugccuccucugcugaccgaugagaugaucgcccaguacacaucugcccugcuggccggcacaaucacaagcggcuggacauuuggagcuggcgccgcucugcagauccccuuugcuaugcagauggccuaccgguucaacggcaucggagugacccagaaugugcuguacgagaaccagaagcugaucgccaaccaguucaacagcgccaucggcaagauccaggacagccugagcagcacagcaagcgcccugggaaagcugcaggacguggucaaccagaaugcccaggcacugaacacccuggucaagcagcuguccuccaacuucggcgccaucagcucugugcugaacgauauccugagcagacuggacaaggucgaggccgaggugcagaucgacagacugaucacaggcagacugcagagccuccagacauacgugacccagcagcugaucagagccgccgagauuagagccucugccaaucuggccgccaccaagaugucugagugugugcugggccagagcaagagaguggacuuuugcggcaagggcuaccaccugaugagcuucccucagucugccccucacggcgugguguuucugcacgugacauaugugcccgcucaagagaagaauuucaccaccgcuccagccaucugccacgacggcaaagcccacuuuccuagagaaggcguguucguguccaacggcacccauugguucgugacacagcggaacuucuacgagccccagaucaucaccaccgacaacaccuucgugucuggcaacugcgacguugugaucggcauugugaacaauaccguguacgacccucugcagcccgagcuggacagcuucaaagaggaacuggacaaguacuuuaagaaccacacaagccccgacguggaccugggcgauaucagcggaaucaaugccagcgucgugaacauccagaaagagaucgaccggcugaacgagguggccaagaaucugaacgagagccugaucgaccugcaagaacuggggaaguacgagcaguacaucaaguggcccugguacaucuggcugggcuuuaucgccggacugauugccaucgugauggucacaaucaugcuguguugcaugaccagcugcuguagcugccugaagggcuguuguagcuguggcagcugcugcaaguucgacgaggacgauucugagcccgugcugaagggcgugaaacugcacuacaccugaggacuaguuauaagacugacuagcccgaugggccucccaacgggcccuccuccccuccuugcaccgagagaucuaaaaaaaaaaaaaaaaaaaaaaaaaaaaaaaaaaaaaaaaaaaaaaaaaaaaaaaaaaaaaaaaaaaaaaaaaaaaaaaaaaaaaaaaaaaaaaaaaaaa

SEQ ID NO: 25916 - RNA, 4011 nt, Artificial Sequence
  SARS-CoV-2/Wuhan/WIV05/2019__EPI_ISL_402128 spike protein mRNA gc mod (1-1273)(E484K_D614G)
aggagaaagcuuaccauguucguguuucuggugcugcugccccugguguccagccagugugugaaccugaccaccagaacacagcugccuccagccuacaccaacagcuucaccagaggcguguacuaccccgacaagguguucagauccagcgugcugcacucuacccaggaccuguuccugccuuucuucagcaacgugaccugguuccacgccauccacguguccggcaccaauggcaccaagagauucgacaaccccgugcugcccuucaacgacgggguguacuuugccagcaccgagaaguccaacaucaucagaggcuggaucuucggcaccacacuggacagcaagacccagagccugcugaucgugaacaacgccaccaacguggucaucaaagugugcgaguuccaguucugcaacgaccccuuccugggcgucuacuaccacaagaacaacaagagcuggauggaaagcgaguuccggguguacagcagcgccaacaacugcaccuucgaguacgugucccagccuuuccugauggaccuggaaggcaagcagggcaacuucaagaaccugcgcgaguucguguucaagaacaucgacggcuacuucaaaaucuacagcaagcacaccccuaucaaccucgugcgggaucugccucagggcuucucugcucuggaaccccugguggaucugcccaucggcaucaacaucacccgguuucagacacugcuggcccugcacagaagcuaccugacaccuggcgauagcagcagcggauggacagcuggugccgccgcuuacuaugugggcuaccugcagccuagaaccuuccugcugaaguacaacgagaacggcaccaucaccgacgccguggauugugcucuggauccucugagcgagacaaagugcacccugaaguccuucaccguggaaaagggcaucuaccagaccagcaacuuccgggugcagcccaccgaauccaucgugcgguuccccaauaucaccaaucugugccccuucggcgagguguucaaugccaccagauucgccucuguguacgccuggaaccggaagcggaucagcaauugcguggccgacuacuccgugcuguacaacuccgccagcuucagcaccuucaagugcuacggcguguccccuaccaagcugaacgaccugugcuucacaaacguguacgccgacagcuucgugauccggggagaugaagugcggcagauugccccuggacagacaggcaagaucgccgacuacaacuacaagcugcccgacgacuucaccggcugugugauugccuggaacagcaacaaccuggacuccaaagucggcggcaacuacaauuaccuguaccggcuguuccggaaguccaaucugaagcccuucgagcgggacaucagcaccgaaaucuaucaggccggcagcaccccuugcaacggcgugaagggcuucaacugcuacuucccacugcaguccuacggcuuucagcccacaaauggcgugggcuaucagcccuacagagugguggugcugagcuucgaacugcugcaugcuccugccacagugugcggcccuaagaaaagcaccaaucucgugaagaacaaaugcgugaacuucaacuucaacggccugaccggcaccggcgugcugacagagagcaacaagaaguuccugccauuccagcaguuuggccgggauaucgccgauaccacagacgccguuagagauccccagacacuggaaauccuggacaucaccccaugcagcuucggcggagugucugugaucaccccuggcaccaacaccagcaaucagguggcagugcuguaccagggcgugaacuguaccgaagugcccguggccauucacgccgaucagcugacaccuacauggcggguguacuccaccggcagcaauguguuucagaccagagccggcugucugaucggagccgagcacgugaacaauagcuacgagugcgacauccccaucggcgcuggcaucugugccagcuaccagacacagacaaacagccccagacgggcuagaagcguggccagccagagcaucauugccuacacaaugucucugggcgccgagaacagcguggccuacuccaacaacucuaucgcuauccccaccaacuucaccaucagcgugaccaccgagauccugccuguguccaugaccaagaccagcguggacugcaccauguacaucugcggcgauuccaccgagugcuccaaccugcugcugcaguacggcagcuucugcacccagcugaauagagcccugacagggaucgccguggaacaggacaagaacacccaagagguguucgcccaagugaagcaaaucuacaagaccccuccuaucaaggacuucggcggcuucaauuucagccagauucugcccgauccuagcaagcccagcaagcggagcuucaucgaggaccugcuguucaacaaagugacacuggccgacgccggcuucaucaagcaguauggcgauugucugggcgacauugccgccagggaucugauuugcgcccagaaguuuaacggacugacagugcugccuccucugcugaccgaugagaugaucgcccaguacacaucugcccugcuggccggcacaaucacaagcggcuggacauuuggagcuggcgccgcucugcagauccccuuugcuaugcagauggccuaccgguucaacggcaucggagugacccagaaugugcuguacgagaaccagaagcugaucgccaaccaguucaacagcgccaucggcaagauccaggacagccugagcagcacagcaagcgcccugggaaagcugcaggacguggucaaccagaaugcccaggcacugaacacccuggucaagcagcuguccuccaacuucggcgccaucagcucugugcugaacgauauccugagcagacuggacaaggucgaggccgaggugcagaucgacagacugaucacaggcagacugcagagccuccagacauacgugacccagcagcugaucagagccgccgagauuagagccucugccaaucuggccgccaccaagaugucugagugugugcugggccagagcaagagaguggacuuuugcggcaagggcuaccaccugaugagcuucccucagucugccccucacggcgugguguuucugcacgugacauaugugcccgcucaagagaagaauuucaccaccgcuccagccaucugccacgacggcaaagcccacuuuccuagagaaggcguguucguguccaacggcacccauugguucgugacacagcggaacuucuacgagccccagaucaucaccaccgacaacaccuucgugucuggcaacugcgacguugugaucggcauugugaacaauaccguguacgacccucugcagcccgagcuggacagcuucaaagaggaacuggacaaguacuuuaagaaccacacaagccccgacguggaccugggcgauaucagcggaaucaaugccagcgucgugaacauccagaaagagaucgaccggcugaacgagguggccaagaaucugaacgagagccugaucgaccugcaagaacuggggaaguacgagcaguacaucaaguggcccugguacaucuggcugggcuuuaucgccggacugauugccaucgugauggucacaaucaugcuguguugcaugaccagcugcuguagcugccugaagggcuguuguagcuguggcagcugcugcaaguucgacgaggacgauucugagcccgugcugaagggcgugaaacugcacuacaccugaggacuaguuauaagacugacuagcccgaugggccucccaacgggcccuccuccccuccuugcaccgagagaucuaaaaaaaaaaaaaaaaaaaaaaaaaaaaaaaaaaaaaaaaaaaaaaaaaaaaaaaaaaaaaaaaaaaaaaaaaaaaaaaaaaaaaaaaaaaaaaaaaaaa

SEQ ID NO: 25917 - RNA, 4011 nt, Artificial Sequence
  SARS-CoV-2/Wuhan/WIV05/2019__EPI_ISL_402128 spike protein mRNA gc mod (1-1273)(L18F_T20N_P26S_D138Y_R190S_K417T_E484K_N501Y_D614G_H655Y _T1027I)
aggagaaagcuuaccauguucguguuucuggugcugcugccccugguguccagccagugugugaacuucaccaacagaacacagcugccuagcgccuacaccaacagcuucaccagaggcguguacuaccccgacaagguguucagauccagcgugcugcacucuacccaggaccuguuccugccuuucuucagcaacgugaccugguuccacgccauccacguguccggcaccaauggcaccaagagauucgacaaccccgugcugcccuucaacgacgggguguacuuugccagcaccgagaaguccaacaucaucagaggcuggaucuucggcaccacacuggacagcaagacccagagccugcugaucgugaacaacgccaccaacguggucaucaaagugugcgaguuccaguucugcaacuaccccuuccugggcgucuacuaccacaagaacaacaagagcuggauggaaagcgaguuccggguguacagcagcgccaacaacugcaccuucgaguacgugucccagccuuuccugauggaccuggaaggcaagcagggcaacuucaagaaccugagcgaguucguguucaagaacaucgacggcuacuucaaaaucuacagcaagcacaccccuaucaaccucgugcgggaucugccucagggcuucucugcucuggaaccccugguggaucugcccaucggcaucaacaucacccgguuucagacacugcuggcccugcacagaagcuaccugacaccuggcgauagcagcagcggauggacagcuggugccgccgcuuacuaugugggcuaccugcagccuagaaccuuccugcugaaguacaacgagaacggcaccaucaccgacgccguggauugugcucuggauccucugagcgagacaaagugcacccugaaguccuucaccguggaaaagggcaucuaccagaccagcaacuuccgggugcagcccaccgaauccaucgugcgguuccccaauaucaccaaucugugccccuucggcgagguguucaaugccaccagauucgccucuguguacgccuggaaccggaagcggaucagcaauugcguggccgacuacuccgugcuguacaacuccgccagcuucagcaccuucaagugcuacggcguguccccuaccaagcugaacgaccugugcuucacaaacguguacgccgacagcuucgugauccggggagaugaagugcggcagauugccccuggacagacaggcaccaucgccgacuacaacuacaagcugcccgacgacuucaccggcugugugauugccuggaacagcaacaaccuggacuccaaagucggcggcaacuacaauuaccuguaccggcuguuccggaaguccaaucugaagcccuucgagcgggacaucagcaccgaaaucuaucaggccggcagcaccccuugcaacggcgugaagggcuucaacugcuacuucccacugcaguccuacggcuuucagcccacauacggcgugggcuaucagcccuacagagugguggugcugagcuucgaacugcugcaugcuccugccacagugugcggcccuaagaaaagcaccaaucucgugaagaacaaaugcgugaacuucaacuucaacggccugaccggcaccggcgugcugacagagagcaacaagaaguuccugccauuccagcaguuuggccgggauaucgccgauaccacagacgccguuagagauccccagacacuggaaauccuggacaucaccccaugcagcuucggcggagugucugugaucaccccuggcaccaacaccagcaaucagguggcagugcuguaccagggcgugaacuguaccgaagugcccguggccauucacgccgaucagcugacaccuacauggcggguguacuccaccggcagcaauguguuucagaccagagccggcugucugaucggagccgaguacgugaacaauagcuacgagugcgacauccccaucggcgcuggcaucugugccagcuaccagacacagacaaacagccccagacgggcuagaagcguggccagccagagcaucauugccuacacaaugucucugggcgccgagaacagcguggccuacuccaacaacucuaucgcuauccccaccaacuucaccaucagcgugaccaccgagauccugccuguguccaugaccaagaccagcguggacugcaccauguacaucugcggcgauuccaccgagugcuccaaccugcugcugcaguacggcagcuucugcacccagcugaauagagcccugacagggaucgccguggaacaggacaagaacacccaagagguguucgcccaagugaagcaaaucuacaagaccccuccuaucaaggacuucggcggcuucaauuucagccagauucugcccgauccuagcaagcccagcaagcggagcuucaucgaggaccugcuguucaacaaagugacacuggccgacgccggcuucaucaagcaguauggcgauugucugggcgacauugccgccagggaucugauuugcgcccagaaguuuaacggacugacagugcugccuccucugcugaccgaugagaugaucgcccaguacacaucugcccugcuggccggcacaaucacaagcggcuggacauuuggagcuggcgccgcucugcagauccccuuugcuaugcagauggccuaccgguucaacggcaucggagugacccagaaugugcuguacgagaaccagaagcugaucgccaaccaguucaacagcgccaucggcaagauccaggacagccugagcagcacagcaagcgcccugggaaagcugcaggacguggucaaccagaaugcccaggcacugaacacccuggucaagcagcuguccuccaacuucggcgccaucagcucugugcugaacgauauccugagcagacuggacaaggucgaggccgaggugcagaucgacagacugaucacaggcagacugcagagccuccagacauacgugacccagcagcugaucagagccgccgagauuagagccucugccaaucuggccgccaucaagaugucugagugugugcugggccagagcaagagaguggacuuuugcggcaagggcuaccaccugaugagcuucccucagucugccccucacggcgugguguuucugcacgugacauaugugcccgcucaagagaagaauuucaccaccgcuccagccaucugccacgacggcaaagcccacuuuccuagagaaggcguguucguguccaacggcacccauugguucgugacacagcggaacuucuacgagccccagaucaucaccaccgacaacaccuucgugucuggcaacugcgacguugugaucggcauugugaacaauaccguguacgacccucugcagcccgagcuggacagcuucaaagaggaacuggacaaguacuuuaagaaccacacaagccccgacguggaccugggcgauaucagcggaaucaaugccagcgucgugaacauccagaaagagaucgaccggcugaacgagguggccaagaaucugaacgagagccugaucgaccugcaagaacuggggaaguacgagcaguacaucaaguggcccugguacaucuggcugggcuuuaucgccggacugauugccaucgugauggucacaaucaugcuguguugcaugaccagcugcuguagcugccugaagggcuguuguagcuguggcagcugcugcaaguucgacgaggacgauucugagcccgugcugaagggcgugaaacugcacuacaccugaggacuaguuauaagacugacuagcccgaugggccucccaacgggcccuccuccccuccuugcaccgagagaucuaaaaaaaaaaaaaaaaaaaaaaaaaaaaaaaaaaaaaaaaaaaaaaaaaaaaaaaaaaaaaaaaaaaaaaaaaaaaaaaaaaaaaaaaaaaaaaaaaaaa

SEQ ID NO: 25918 - RNA, 4011 nt, Artificial Sequence
  SARS-CoV-2/Wuhan/WIV05/2019__EPI_ISL_402128 spike protein mRNA gc mod (1-1273)(S13I_W152C_L452R_D614G)
aggagaaagcuuaccauguucguguuucuggugcugcugccccugguguccauccagugugugaaccugaccaccagaacacagcugccuccagccuacaccaacagcuucaccagaggcguguacuaccccgacaagguguucagauccagcgugcugcacucuacccaggaccuguuccugccuuucuucagcaacgugaccugguuccacgccauccacguguccggcaccaauggcaccaagagauucgacaaccccgugcugcccuucaacgacgggguguacuuugccagcaccgagaaguccaacaucaucagaggcuggaucuucggcaccacacuggacagcaagacccagagccugcugaucgugaacaacgccaccaacguggucaucaaagugugcgaguuccaguucugcaacgaccccuuccugggcgucuacuaccacaagaacaacaagagcugcauggaaagcgaguuccggguguacagcagcgccaacaacugcaccuucgaguacgugucccagccuuuccugauggaccuggaaggcaagcagggcaacuucaagaaccugcgcgaguucguguucaagaacaucgacggcuacuucaaaaucuacagcaagcacaccccuaucaaccucgugcgggaucugccucagggcuucucugcucuggaaccccugguggaucugcccaucggcaucaacaucacccgguuucagacacugcuggcccugcacagaagcuaccugacaccuggcgauagcagcagcggauggacagcuggugccgccgcuuacuaugugggcuaccugcagccuagaaccuuccugcugaaguacaacgagaacggcaccaucaccgacgccguggauugugcucuggauccucugagcgagacaaagugcacccugaaguccuucaccguggaaaagggcaucuaccagaccagcaacuuccgggugcagcccaccgaauccaucgugcgguuccccaauaucaccaaucugugccccuucggcgagguguucaaugccaccagauucgccucuguguacgccuggaaccggaagcggaucagcaauugcguggccgacuacuccgugcuguacaacuccgccagcuucagcaccuucaagugcuacggcguguccccuaccaagcugaacgaccugugcuucacaaacguguacgccgacagcuucgugauccggggagaugaagugcggcagauugccccuggacagacaggcaagaucgccgacuacaacuacaagcugcccgacgacuucaccggcugugugauugccuggaacagcaacaaccuggacuccaaagucggcggcaacuacaauuaccgcuaccggcuguuccggaaguccaaucugaagcccuucgagcgggacaucagcaccgaaaucuaucaggccggcagcaccccuugcaacggcguggaaggcuucaacugcuacuucccacugcaguccuacggcuuucagcccacaaauggcgugggcuaucagcccuacagagugguggugcugagcuucgaacugcugcaugcuccugccacagugugcggcccuaagaaaagcaccaaucucgugaagaacaaaugcgugaacuucaacuucaacggccugaccggcaccggcgugcugacagagagcaacaagaaguuccugccauuccagcaguuuggccgggauaucgccgauaccacagacgccguuagagauccccagacacuggaaauccuggacaucaccccaugcagcuucggcggagugucugugaucaccccuggcaccaacaccagcaaucagguggcagugcuguaccagggcgugaacuguaccgaagugcccguggccauucacgccgaucagcugacaccuacauggcggguguacuccaccggcagcaauguguuucagaccagagccggcugucugaucggagccgagcacgugaacaauagcuacgagugcgacauccccaucggcgcuggcaucugugccagcuaccagacacagacaaacagccccagacgggcuagaagcguggccagccagagcaucauugccuacacaaugucucugggcgccgagaacagcguggccuacuccaacaacucuaucgcuauccccaccaacuucaccaucagcgugaccaccgagauccugccuguguccaugaccaagaccagcguggacugcaccauguacaucugcggcgauuccaccgagugcuccaaccugcugcugcaguacggcagcuucugcacccagcugaauagagcccugacagggaucgccguggaacaggacaagaacacccaagagguguucgcccaagugaagcaaaucuacaagaccccuccuaucaaggacuucggcggcuucaauuucagccagauucugcccgauccuagcaagcccagcaagcggagcuucaucgaggaccugcuguucaacaaagugacacuggccgacgccggcuucaucaagcaguauggcgauugucugggcgacauugccgccagggaucugauuugcgcccagaaguuuaacggacugacagugcugccuccucugcugaccgaugagaugaucgcccaguacacaucugcccugcuggccggcacaaucacaagcggcuggacauuuggagcuggcgccgcucugcagauccccuuugcuaugcagauggccuaccgguucaacggcaucggagugacccagaaugugcuguacgagaaccagaagcugaucgccaaccaguucaacagcgccaucggcaagauccaggacagccugagcagcacagcaagcgcccugggaaagcugcaggacguggucaaccagaaugcccaggcacugaacacccuggucaagcagcuguccuccaacuucggcgccaucagcucugugcugaacgauauccugagcagacuggacaaggucgaggccgaggugcagaucgacagacugaucacaggcagacugcagagccuccagacauacgugacccagcagcugaucagagccgccgagauuagagccucugccaaucuggccgccaccaagaugucugagugugugcugggccagagcaagagaguggacuuuugcggcaagggcuaccaccugaugagcuucccucagucugccccucacggcgugguguuucugcacgugacauaugugcccgcucaagagaagaauuucaccaccgcuccagccaucugccacgacggcaaagcccacuuuccuagagaaggcguguucguguccaacggcacccauugguucgugacacagcggaacuucuacgagccccagaucaucaccaccgacaacaccuucgugucuggcaacugcgacguugugaucggcauugugaacaauaccguguacgacccucugcagcccgagcuggacagcuucaaagaggaacuggacaaguacuuuaagaaccacacaagccccgacguggaccugggcgauaucagcggaaucaaugccagcgucgugaacauccagaaagagaucgaccggcugaacgagguggccaagaaucugaacgagagccugaucgaccugcaagaacuggggaaguacgagcaguacaucaaguggcccugguacaucuggcugggcuuuaucgccggacugauugccaucgugauggucacaaucaugcuguguugcaugaccagcugcuguagcugccugaagggcuguuguagcuguggcagcugcugcaaguucgacgaggacgauucugagcccgugcugaagggcgugaaacugcacuacaccugaggacuaguuauaagacugacuagcccgaugggccucccaacgggcccuccuccccuccuugcaccgagagaucuaaaaaaaaaaaaaaaaaaaaaaaaaaaaaaaaaaaaaaaaaaaaaaaaaaaaaaaaaaaaaaaaaaaaaaaaaaaaaaaaaaaaaaaaaaaaaaaaaaaa

SEQ ID NO: 25919 - RNA, 4011 nt, Artificial Sequence
  SARS-CoV-2/Wuhan/WIV05/2019__EPI_ISL_402128 spike protein mRNA gc mod (1-1273)
aggagaaagcuuaccauguucguguuccuggugcugcugccucugguguccagccagugugugaaccugaccaccagaacacagcugccuccagccuacaccaacagcuuuaccagaggcguguacuaccccgacaagguguucagauccagcgugcugcacucuacccaggaccuguuccugccuuucuucagcaacgugaccugguuccacgccauccacguguccggcaccaauggcaccaagagauucgacaaccccgugcugcccuucaacgacgggguguacuuugccagcaccgagaaguccaacaucaucagaggcuggaucuucggcaccacacuggacagcaagacccagagccugcugaucgugaacaacgccaccaacguggucaucaaagugugcgaguuccaguucugcaacgaccccuuccugggcgucuacuaccacaagaacaacaagagcuggauggaaagcgaguuccggguguacagcagcgccaacaacugcaccuucgaguacgugucccagccuuuccugauggaccuggaaggcaagcagggcaacuucaagaaccugcgcgaguucguguuuaagaacaucgacggcuacuucaagaucuacagcaagcacaccccuaucaaccucgugcgggaucugccucagggcuucucugcucuggaaccccugguggaucugcccaucggcaucaacaucacccgguuucagacacugcuggcccugcacagaagcuaccugacaccuggcgauagcagcagcggauggacagcuggugccgccgcuuacuaugugggcuaccugcagccuagaaccuuccugcugaaguacaacgagaacggcaccaucaccgacgccguggauugugcucuggauccucugagcgagacaaagugcacccugaaguccuucaccguggaaaagggcaucuaccagaccagcaacuuccgggugcagcccaccgaauccaucgugcgguuccccaauaucaccaaucugugccccuucggcgagguguucaaugccaccagauucgccucuguguacgccuggaaccggaagcggaucagcaauugcguggccgacuacuccgugcuguacaacuccgccagcuucagcaccuucaagugcuacggcguguccccuaccaagcugaacgaccugugcuucacaaacguguacgccgacagcuucgugauccggggagaugaagugcggcagauugccccuggacagacaggcaagaucgccgacuacaacuacaagcugcccgacgacuucaccggcugugugauugccuggaacagcaacaaccuggacuccaaagucggcggcaacuacaauuaccuguaccggcuguuccggaaguccaaucugaagcccuucgagcgggacaucuccaccgagaucuaucaggccggcagcaccccuuguaacggcguggaaggcuucaacugcuacuucccacugcaguccuacggcuuucagcccacaaauggcgugggcuaucagcccuacagagugguggugcugagcuucgaacugcugcaugccccugccacagugugcggcccuaagaaaagcaccaaucucgugaagaacaaaugcgugaacuucaacuucaacggccugaccggcaccggcgugcugacagagagcaacaagaaguuccugccauuccagcaguuuggccgggauaucgccgauaccacagacgccguuagagauccccagacacuggaaauccuggacaucaccccuugcagcuucggcggagugucugugaucaccccuggcaccaacaccagcaaucagguggcagugcuguaccaggacgugaacuguaccgaagugcccguggccauucacgccgaucagcugacaccuacauggcggguguacuccaccggcagcaauguguuucagaccagagccggcugucugaucggagccgagcacgugaacaauagcuacgagugcgacauccccaucggcgcuggaaucugcgccagcuaccagacacagacaaacagcccucggagagccagaagcguggccagccagagcaucauugccuacacaaugucucugggcgccgagaacagcguggccuacuccaacaacucuaucgcuauccccaccaacuucaccaucagcgugaccacagagauccugccuguguccaugaccaagaccagcguggacugcaccauguacaucugcggcgauuccaccgagugcuccaaccugcugcugcaguacggcagcuucugcacccagcugaauagagcccugacagggaucgccguggaacaggacaagaacacccaagagguguucgcccaagugaagcagaucuacaagaccccuccuaucaaggacuucggcggcuucaauuucagccagauucugcccgauccuagcaagcccagcaagcggagcuucaucgaggaccugcuguucaacaaagugacacuggccgacgccggcuucaucaagcaguauggcgauugucugggcgacauugccgccagggaucugauuugcgcccagaaguuuaacggacugacagugcugccuccucugcugaccgaugagaugaucgcccaguacacaucugcccugcuggccggcacaaucacaagcggcuggacauuuggagcaggcgccgcucugcagauccccuuugcuaugcagauggccuaccgguucaacggcaucggagugacccagaaugugcuguacgagaaccagaagcugaucgccaaccaguucaacagcgccaucggcaagauccaggacagccugagcagcacagcaagcgcccugggaaagcugcaggacguggucaaccagaaugcccaggcacugaacacccuggucaagcagcuguccuccaacuucggcgccaucagcucugugcugaacgauauccugagcagacuggacaaggucgaggccgaggugcagaucgacagacugaucacaggcagacugcagagccuccagacauacgugacccagcagcugaucagagccgccgagauuagagccucugccaaucuggccgccaccaagaugucugagugugugcugggccagagcaagagaguggacuuuugcggcaagggcuaccaccugaugagcuucccucagucugccccucacggcgugguguuucugcacgugacauaugugcccgcucaagagaagaauuucaccaccgcuccagccaucugccacgacggcaaagcccacuuuccuagagaaggcguguucguguccaacggcacccauugguucgugacacagcggaacuucuacgagccccagaucaucaccaccgacaacaccuucgugucuggcaacugcgacgucgugaucggcauugugaacaauaccguguacgacccucugcagcccgagcuggacagcuucaaagaggaacuggacaaguacuuuaagaaccacacaagccccgacguggaccugggcgauaucagcggaaucaaugccagcgucgugaacauccagaaagagaucgaccggcugaacgagguggccaagaaucugaacgagagccugaucgaccugcaagaacuggggaaguacgagcaguacaucaaguggcccugguacaucuggcugggcuuuaucgccggacugauugccaucgugauggucacaaucaugcuguguugcaugaccagcugcuguagcugccugaagggcuguuguagcuguggcagcugcugcaaguucgacgaggacgauucugagcccgugcugaagggcgugaaacugcacuacacaugaggacuaguuauaagacugacuagcccgaugggccucccaacgggcccuccuccccuccuugcaccgagagaucuaaaaaaaaaaaaaaaaaaaaaaaaaaaaaaaaaaaaaaaaaaaaaaaaaaaaaaaaaaaaaaaaaaaaaaaaaaaaaaaaaaaaaaaaaaaaaaaaaaaa

SEQ ID NO: 25920 - RNA, 4011 nt, Artificial Sequence
  SARS-CoV-2/Wuhan/WIV05/2019__EPI_ISL_402128 spike protein mRNA gc mod (1-1273)(D614G)
aggagaaagcuuaccauguucguguuccuggugcugcugccucugguguccagccagugugugaaccugaccaccagaacacagcugccuccagccuacaccaacagcuuuaccagaggcguguacuaccccgacaagguguucagauccagcgugcugcacucuacccaggaccuguuccugccuuucuucagcaacgugaccugguuccacgccauccacguguccggcaccaauggcaccaagagauucgacaaccccgugcugcccuucaacgacgggguguacuuugccagcaccgagaaguccaacaucaucagaggcuggaucuucggcaccacacuggacagcaagacccagagccugcugaucgugaacaacgccaccaacguggucaucaaagugugcgaguuccaguucugcaacgaccccuuccugggcgucuacuaccacaagaacaacaagagcuggauggaaagcgaguuccggguguacagcagcgccaacaacugcaccuucgaguacgugucccagccuuuccugauggaccuggaaggcaagcagggcaacuucaagaaccugcgcgaguucguguuuaagaacaucgacggcuacuucaagaucuacagcaagcacaccccuaucaaccucgugcgggaucugccucagggcuucucugcucuggaaccccugguggaucugcccaucggcaucaacaucacccgguuucagacacugcuggcccugcacagaagcuaccugacaccuggcgauagcagcagcggauggacagcuggugccgccgcuuacuaugugggcuaccugcagccuagaaccuuccugcugaaguacaacgagaacggcaccaucaccgacgccguggauugugcucuggauccucugagcgagacaaagugcacccugaaguccuucaccguggaaaagggcaucuaccagaccagcaacuuccgggugcagcccaccgaauccaucgugcgguuccccaauaucaccaaucugugccccuucggcgagguguucaaugccaccagauucgccucuguguacgccuggaaccggaagcggaucagcaauugcguggccgacuacuccgugcuguacaacuccgccagcuucagcaccuucaagugcuacggcguguccccuaccaagcugaacgaccugugcuucacaaacguguacgccgacagcuucgugauccggggagaugaagugcggcagauugccccuggacagacaggcaagaucgccgacuacaacuacaagcugcccgacgacuucaccggcugugugauugccuggaacagcaacaaccuggacuccaaagucggcggcaacuacaauuaccuguaccggcuguuccggaaguccaaucugaagcccuucgagcgggacaucuccaccgagaucuaucaggccggcagcaccccuuguaacggcguggaaggcuucaacugcuacuucccacugcaguccuacggcuuucagcccacaaauggcgugggcuaucagcccuacagagugguggugcugagcuucgaacugcugcaugccccugccacagugugcggcccuaagaaaagcaccaaucucgugaagaacaaaugcgugaacuucaacuucaacggccugaccggcaccggcgugcugacagagagcaacaagaaguuccugccauuccagcaguuuggccgggauaucgccgauaccacagacgccguuagagauccccagacacuggaaauccuggacaucaccccuugcagcuucggcggagugucugugaucaccccuggcaccaacaccagcaaucagguggcagugcuguaccagggcgugaacuguaccgaagugcccguggccauucacgccgaucagcugacaccuacauggcggguguacuccaccggcagcaauguguuucagaccagagccggcugucugaucggagccgagcacgugaacaauagcuacgagugcgacauccccaucggcgcuggaaucugcgccagcuaccagacacagacaaacagcccucggagagccagaagcguggccagccagagcaucauugccuacacaaugucucugggcgccgagaacagcguggccuacuccaacaacucuaucgcuauccccaccaacuucaccaucagcgugaccacagagauccugccuguguccaugaccaagaccagcguggacugcaccauguacaucugcggcgauuccaccgagugcuccaaccugcugcugcaguacggcagcuucugcacccagcugaauagagcccugacagggaucgccguggaacaggacaagaacacccaagagguguucgcccaagugaagcagaucuacaagaccccuccuaucaaggacuucggcggcuucaauuucagccagauucugcccgauccuagcaagcccagcaagcggagcuucaucgaggaccugcuguucaacaaagugacacuggccgacgccggcuucaucaagcaguauggcgauugucugggcgacauugccgccagggaucugauuugcgcccagaaguuuaacggacugacagugcugccuccucugcugaccgaugagaugaucgcccaguacacaucugcccugcuggccggcacaaucacaagcggcuggacauuuggagcaggcgccgcucugcagauccccuuugcuaugcagauggccuaccgguucaacggcaucggagugacccagaaugugcuguacgagaaccagaagcugaucgccaaccaguucaacagcgccaucggcaagauccaggacagccugagcagcacagcaagcgcccugggaaagcugcaggacguggucaaccagaaugcccaggcacugaacacccuggucaagcagcuguccuccaacuucggcgccaucagcucugugcugaacgauauccugagcagacuggacaaggucgaggccgaggugcagaucgacagacugaucacaggcagacugcagagccuccagacauacgugacccagcagcugaucagagccgccgagauuagagccucugccaaucuggccgccaccaagaugucugagugugugcugggccagagcaagagaguggacuuuugcggcaagggcuaccaccugaugagcuucccucagucugccccucacggcgugguguuucugcacgugacauaugugcccgcucaagagaagaauuucaccaccgcuccagccaucugccacgacggcaaagcccacuuuccuagagaaggcguguucguguccaacggcacccauugguucgugacacagcggaacuucuacgagccccagaucaucaccaccgacaacaccuucgugucuggcaacugcgacgucgugaucggcauugugaacaauaccguguacgacccucugcagcccgagcuggacagcuucaaagaggaacuggacaaguacuuuaagaaccacacaagccccgacguggaccugggcgauaucagcggaaucaaugccagcgucgugaacauccagaaagagaucgaccggcugaacgagguggccaagaaucugaacgagagccugaucgaccugcaagaacuggggaaguacgagcaguacaucaaguggcccugguacaucuggcugggcuuuaucgccggacugauugccaucgugauggucacaaucaugcuguguugcaugaccagcugcuguagcugccugaagggcuguuguagcuguggcagcugcugcaaguucgacgaggacgauucugagcccgugcugaagggcgugaaacugcacuacacaugaggacuaguuauaagacugacuagcccgaugggccucccaacgggcccuccuccccuccuugcaccgagagaucuaaaaaaaaaaaaaaaaaaaaaaaaaaaaaaaaaaaaaaaaaaaaaaaaaaaaaaaaaaaaaaaaaaaaaaaaaaaaaaaaaaaaaaaaaaaaaaaaaaaa

SEQ ID NO: 25921 - RNA, 4011 nt, Artificial Sequence
  SARS-CoV-2/Wuhan/WIV05/2019__EPI_ISL_402128 spike protein mRNA gc mod (1-1273)(A222V_D614G)
aggagaaagcuuaccauguucguguuccuggugcugcugccucugguguccagccagugugugaaccugaccaccagaacacagcugccuccagccuacaccaacagcuuuaccagaggcguguacuaccccgacaagguguucagauccagcgugcugcacucuacccaggaccuguuccugccuuucuucagcaacgugaccugguuccacgccauccacguguccggcaccaauggcaccaagagauucgacaaccccgugcugcccuucaacgacgggguguacuuugccagcaccgagaaguccaacaucaucagaggcuggaucuucggcaccacacuggacagcaagacccagagccugcugaucgugaacaacgccaccaacguggucaucaaagugugcgaguuccaguucugcaacgaccccuuccugggcgucuacuaccacaagaacaacaagagcuggauggaaagcgaguuccggguguacagcagcgccaacaacugcaccuucgaguacgugucccagccuuuccugauggaccuggaaggcaagcagggcaacuucaagaaccugcgcgaguucguguuuaagaacaucgacggcuacuucaagaucuacagcaagcacaccccuaucaaccucgugcgggaucugccucagggcuucucugugcuggaaccccugguggaucugcccaucggcaucaacaucacccgguuucagacacugcuggcccugcacagaagcuaccugacaccuggcgauagcagcagcggauggacagcuggugccgccgcuuacuaugugggcuaccugcagccuagaaccuuccugcugaaguacaacgagaacggcaccaucaccgacgccguggauugugcucuggauccucugagcgagacaaagugcacccugaaguccuucaccguggaaaagggcaucuaccagaccagcaacuuccgggugcagcccaccgaauccaucgugcgguuccccaauaucaccaaucugugccccuucggcgagguguucaaugccaccagauucgccucuguguacgccuggaaccggaagcggaucagcaauugcguggccgacuacuccgugcuguacaacuccgccagcuucagcaccuucaagugcuacggcguguccccuaccaagcugaacgaccugugcuucacaaacguguacgccgacagcuucgugauccggggagaugaagugcggcagauugccccuggacagacaggcaagaucgccgacuacaacuacaagcugcccgacgacuucaccggcugugugauugccuggaacagcaacaaccuggacuccaaagucggcggcaacuacaauuaccuguaccggcuguuccggaaguccaaucugaagcccuucgagcgggacaucuccaccgagaucuaucaggccggcagcaccccuuguaacggcguggaaggcuucaacugcuacuucccacugcaguccuacggcuuucagcccacaaauggcgugggcuaucagcccuacagagugguggugcugagcuucgaacugcugcaugccccugccacagugugcggcccuaagaaaagcaccaaucucgugaagaacaaaugcgugaacuucaacuucaacggccugaccggcaccggcgugcugacagagagcaacaagaaguuccugccauuccagcaguuuggccgggauaucgccgauaccacagacgccguuagagauccccagacacuggaaauccuggacaucaccccuugcagcuucggcggagugucugugaucaccccuggcaccaacaccagcaaucagguggcagugcuguaccagggcgugaacuguaccgaagugcccguggccauucacgccgaucagcugacaccuacauggcggguguacuccaccggcagcaauguguuucagaccagagccggcugucugaucggagccgagcacgugaacaauagcuacgagugcgacauccccaucggcgcuggaaucugcgccagcuaccagacacagacaaacagcccucggagagccagaagcguggccagccagagcaucauugccuacacaaugucucugggcgccgagaacagcguggccuacuccaacaacucuaucgcuauccccaccaacuucaccaucagcgugaccacagagauccugccuguguccaugaccaagaccagcguggacugcaccauguacaucugcggcgauuccaccgagugcuccaaccugcugcugcaguacggcagcuucugcacccagcugaauagagcccugacagggaucgccguggaacaggacaagaacacccaagagguguucgcccaagugaagcagaucuacaagaccccuccuaucaaggacuucggcggcuucaauuucagccagauucugcccgauccuagcaagcccagcaagcggagcuucaucgaggaccugcuguucaacaaagugacacuggccgacgccggcuucaucaagcaguauggcgauugucugggcgacauugccgccagggaucugauuugcgcccagaaguuuaacggacugacagugcugccuccucugcugaccgaugagaugaucgcccaguacacaucugcccugcuggccggcacaaucacaagcggcuggacauuuggagcaggcgccgcucugcagauccccuuugcuaugcagauggccuaccgguucaacggcaucggagugacccagaaugugcuguacgagaaccagaagcugaucgccaaccaguucaacagcgccaucggcaagauccaggacagccugagcagcacagcaagcgcccugggaaagcugcaggacguggucaaccagaaugcccaggcacugaacacccuggucaagcagcuguccuccaacuucggcgccaucagcucugugcugaacgauauccugagcagacuggacaaggucgaggccgaggugcagaucgacagacugaucacaggcagacugcagagccuccagacauacgugacccagcagcugaucagagccgccgagauuagagccucugccaaucuggccgccaccaagaugucugagugugugcugggccagagcaagagaguggacuuuugcggcaagggcuaccaccugaugagcuucccucagucugccccucacggcgugguguuucugcacgugacauaugugcccgcucaagagaagaauuucaccaccgcuccagccaucugccacgacggcaaagcccacuuuccuagagaaggcguguucguguccaacggcacccauugguucgugacacagcggaacuucuacgagccccagaucaucaccaccgacaacaccuucgugucuggcaacugcgacgucgugaucggcauugugaacaauaccguguacgacccucugcagcccgagcuggacagcuucaaagaggaacuggacaaguacuuuaagaaccacacaagccccgacguggaccugggcgauaucagcggaaucaaugccagcgucgugaacauccagaaagagaucgaccggcugaacgagguggccaagaaucugaacgagagccugaucgaccugcaagaacuggggaaguacgagcaguacaucaaguggcccugguacaucuggcugggcuuuaucgccggacugauugccaucgugauggucacaaucaugcuguguugcaugaccagcugcuguagcugccugaagggcuguuguagcuguggcagcugcugcaaguucgacgaggacgauucugagcccgugcugaagggcgugaaacugcacuacacaugaggacuaguuauaagacugacuagcccgaugggccucccaacgggcccuccuccccuccuugcaccgagagaucuaaaaaaaaaaaaaaaaaaaaaaaaaaaaaaaaaaaaaaaaaaaaaaaaaaaaaaaaaaaaaaaaaaaaaaaaaaaaaaaaaaaaaaaaaaaaaaaaaaaa

SEQ ID NO: 25922 - RNA, 4011 nt, Artificial Sequence
  SARS-CoV-2/Wuhan/WIV05/2019__EPI_ISL_402128 spike protein mRNA gc mod (1-1273)(N439K_D614G)
aggagaaagcuuaccauguucguguuccuggugcugcugccucugguguccagccagugugugaaccugaccaccagaacacagcugccuccagccuacaccaacagcuuuaccagaggcguguacuaccccgacaagguguucagauccagcgugcugcacucuacccaggaccuguuccugccuuucuucagcaacgugaccugguuccacgccauccacguguccggcaccaauggcaccaagagauucgacaaccccgugcugcccuucaacgacgggguguacuuugccagcaccgagaaguccaacaucaucagaggcuggaucuucggcaccacacuggacagcaagacccagagccugcugaucgugaacaacgccaccaacguggucaucaaagugugcgaguuccaguucugcaacgaccccuuccugggcgucuacuaccacaagaacaacaagagcuggauggaaagcgaguuccggguguacagcagcgccaacaacugcaccuucgaguacgugucccagccuuuccugauggaccuggaaggcaagcagggcaacuucaagaaccugcgcgaguucguguuuaagaacaucgacggcuacuucaagaucuacagcaagcacaccccuaucaaccucgugcgggaucugccucagggcuucucugcucuggaaccccugguggaucugcccaucggcaucaacaucacccgguuucagacacugcuggcccugcacagaagcuaccugacaccuggcgauagcagcagcggauggacagcuggugccgccgcuuacuaugugggcuaccugcagccuagaaccuuccugcugaaguacaacgagaacggcaccaucaccgacgccguggauugugcucuggauccucugagcgagacaaagugcacccugaaguccuucaccguggaaaagggcaucuaccagaccagcaacuuccgggugcagcccaccgaauccaucgugcgguuccccaauaucaccaaucugugccccuucggcgagguguucaaugccaccagauucgccucuguguacgccuggaaccggaagcggaucagcaauugcguggccgacuacuccgugcuguacaacuccgccagcuucagcaccuucaagugcuacggcguguccccuaccaagcugaacgaccugugcuucacaaacguguacgccgacagcuucgugauccggggagaugaagugcggcagauugccccuggacagacaggcaagaucgccgacuacaacuacaagcugcccgacgacuucaccggcugugugauugccuggaacagcaagaaccuggacuccaaagucggcggcaacuacaauuaccuguaccggcuguuccggaaguccaaucugaagcccuucgagcgggacaucuccaccgagaucuaucaggccggcagcaccccuuguaacggcguggaaggcuucaacugcuacuucccacugcaguccuacggcuuucagcccacaaauggcgugggcuaucagcccuacagagugguggugcugagcuucgaacugcugcaugccccugccacagugugcggcccuaagaaaagcaccaaucucgugaagaacaaaugcgugaacuucaacuucaacggccugaccggcaccggcgugcugacagagagcaacaagaaguuccugccauuccagcaguuuggccgggauaucgccgauaccacagacgccguuagagauccccagacacuggaaauccuggacaucaccccuugcagcuucggcggagugucugugaucaccccuggcaccaacaccagcaaucagguggcagugcuguaccagggcgugaacuguaccgaagugcccguggccauucacgccgaucagcugacaccuacauggcggguguacuccaccggcagcaauguguuucagaccagagccggcugucugaucggagccgagcacgugaacaauagcuacgagugcgacauccccaucggcgcuggaaucugcgccagcuaccagacacagacaaacagcccucggagagccagaagcguggccagccagagcaucauugccuacacaaugucucugggcgccgagaacagcguggccuacuccaacaacucuaucgcuauccccaccaacuucaccaucagcgugaccacagagauccugccuguguccaugaccaagaccagcguggacugcaccauguacaucugcggcgauuccaccgagugcuccaaccugcugcugcaguacggcagcuucugcacccagcugaauagagcccugacagggaucgccguggaacaggacaagaacacccaagagguguucgcccaagugaagcagaucuacaagaccccuccuaucaaggacuucggcggcuucaauuucagccagauucugcccgauccuagcaagcccagcaagcggagcuucaucgaggaccugcuguucaacaaagugacacuggccgacgccggcuucaucaagcaguauggcgauugucugggcgacauugccgccagggaucugauuugcgcccagaaguuuaacggacugacagugcugccuccucugcugaccgaugagaugaucgcccaguacacaucugcccugcuggccggcacaaucacaagcggcuggacauuuggagcaggcgccgcucugcagauccccuuugcuaugcagauggccuaccgguucaacggcaucggagugacccagaaugugcuguacgagaaccagaagcugaucgccaaccaguucaacagcgccaucggcaagauccaggacagccugagcagcacagcaagcgcccugggaaagcugcaggacguggucaaccagaaugcccaggcacugaacacccuggucaagcagcuguccuccaacuucggcgccaucagcucugugcugaacgauauccugagcagacuggacaaggucgaggccgaggugcagaucgacagacugaucacaggcagacugcagagccuccagacauacgugacccagcagcugaucagagccgccgagauuagagccucugccaaucuggccgccaccaagaugucugagugugugcugggccagagcaagagaguggacuuuugcggcaagggcuaccaccugaugagcuucccucagucugccccucacggcgugguguuucugcacgugacauaugugcccgcucaagagaagaauuucaccaccgcuccagccaucugccacgacggcaaagcccacuuuccuagagaaggcguguucguguccaacggcacccauugguucgugacacagcggaacuucuacgagccccagaucaucaccaccgacaacaccuucgugucuggcaacugcgacgucgugaucggcauugugaacaauaccguguacgacccucugcagcccgagcuggacagcuucaaagaggaacuggacaaguacuuuaagaaccacacaagccccgacguggaccugggcgauaucagcggaaucaaugccagcgucgugaacauccagaaagagaucgaccggcugaacgagguggccaagaaucugaacgagagccugaucgaccugcaagaacuggggaaguacgagcaguacaucaaguggcccugguacaucuggcugggcuuuaucgccggacugauugccaucgugauggucacaaucaugcuguguugcaugaccagcugcuguagcugccugaagggcuguuguagcuguggcagcugcugcaaguucgacgaggacgauucugagcccgugcugaagggcgugaaacugcacuacacaugaggacuaguuauaagacugacuagcccgaugggccucccaacgggcccuccuccccuccuugcaccgagagaucuaaaaaaaaaaaaaaaaaaaaaaaaaaaaaaaaaaaaaaaaaaaaaaaaaaaaaaaaaaaaaaaaaaaaaaaaaaaaaaaaaaaaaaaaaaaaaaaaaaaa

SEQ ID NO: 25923 - RNA, 4011 nt, Artificial Sequence
  SARS-CoV-2/Wuhan/WIV05/2019__EPI_ISL_402128 spike protein mRNA gc mod (1-1273)(S477N_D614G)
aggagaaagcuuaccauguucguguuccuggugcugcugccucugguguccagccagugugugaaccugaccaccagaacacagcugccuccagccuacaccaacagcuuuaccagaggcguguacuaccccgacaagguguucagauccagcgugcugcacucuacccaggaccuguuccugccuuucuucagcaacgugaccugguuccacgccauccacguguccggcaccaauggcaccaagagauucgacaaccccgugcugcccuucaacgacgggguguacuuugccagcaccgagaaguccaacaucaucagaggcuggaucuucggcaccacacuggacagcaagacccagagccugcugaucgugaacaacgccaccaacguggucaucaaagugugcgaguuccaguucugcaacgaccccuuccugggcgucuacuaccacaagaacaacaagagcuggauggaaagcgaguuccggguguacagcagcgccaacaacugcaccuucgaguacgugucccagccuuuccugauggaccuggaaggcaagcagggcaacuucaagaaccugcgcgaguucguguuuaagaacaucgacggcuacuucaagaucuacagcaagcacaccccuaucaaccucgugcgggaucugccucagggcuucucugcucuggaaccccugguggaucugcccaucggcaucaacaucacccgguuucagacacugcuggcccugcacagaagcuaccugacaccuggcgauagcagcagcggauggacagcuggugccgccgcuuacuaugugggcuaccugcagccuagaaccuuccugcugaaguacaacgagaacggcaccaucaccgacgccguggauugugcucuggauccucugagcgagacaaagugcacccugaaguccuucaccguggaaaagggcaucuaccagaccagcaacuuccgggugcagcccaccgaauccaucgugcgguuccccaauaucaccaaucugugccccuucggcgagguguucaaugccaccagauucgccucuguguacgccuggaaccggaagcggaucagcaauugcguggccgacuacuccgugcuguacaacuccgccagcuucagcaccuucaagugcuacggcguguccccuaccaagcugaacgaccugugcuucacaaacguguacgccgacagcuucgugauccggggagaugaagugcggcagauugccccuggacagacaggcaagaucgccgacuacaacuacaagcugcccgacgacuucaccggcugugugauugccuggaacagcaacaaccuggacuccaaagucggcggcaacuacaauuaccuguaccggcuguuccggaaguccaaucugaagcccuucgagcgggacaucuccaccgagaucuaucaggccggcaacaccccuuguaacggcguggaaggcuucaacugcuacuucccacugcaguccuacggcuuucagcccacaaauggcgugggcuaucagcccuacagagugguggugcugagcuucgaacugcugcaugccccugccacagugugcggcccuaagaaaagcaccaaucucgugaagaacaaaugcgugaacuucaacuucaacggccugaccggcaccggcgugcugacagagagcaacaagaaguuccugccauuccagcaguuuggccgggauaucgccgauaccacagacgccguuagagauccccagacacuggaaauccuggacaucaccccuugcagcuucggcggagugucugugaucaccccuggcaccaacaccagcaaucagguggcagugcuguaccagggcgugaacuguaccgaagugcccguggccauucacgccgaucagcugacaccuacauggcggguguacuccaccggcagcaauguguuucagaccagagccggcugucugaucggagccgagcacgugaacaauagcuacgagugcgacauccccaucggcgcuggaaucugcgccagcuaccagacacagacaaacagcccucggagagccagaagcguggccagccagagcaucauugccuacacaaugucucugggcgccgagaacagcguggccuacuccaacaacucuaucgcuauccccaccaacuucaccaucagcgugaccacagagauccugccuguguccaugaccaagaccagcguggacugcaccauguacaucugcggcgauuccaccgagugcuccaaccugcugcugcaguacggcagcuucugcacccagcugaauagagcccugacagggaucgccguggaacaggacaagaacacccaagagguguucgcccaagugaagcagaucuacaagaccccuccuaucaaggacuucggcggcuucaauuucagccagauucugcccgauccuagcaagcccagcaagcggagcuucaucgaggaccugcuguucaacaaagugacacuggccgacgccggcuucaucaagcaguauggcgauugucugggcgacauugccgccagggaucugauuugcgcccagaaguuuaacggacugacagugcugccuccucugcugaccgaugagaugaucgcccaguacacaucugcccugcuggccggcacaaucacaagcggcuggacauuuggagcaggcgccgcucugcagauccccuuugcuaugcagauggccuaccgguucaacggcaucggagugacccagaaugugcuguacgagaaccagaagcugaucgccaaccaguucaacagcgccaucggcaagauccaggacagccugagcagcacagcaagcgcccugggaaagcugcaggacguggucaaccagaaugcccaggcacugaacacccuggucaagcagcuguccuccaacuucggcgccaucagcucugugcugaacgauauccugagcagacuggacaaggucgaggccgaggugcagaucgacagacugaucacaggcagacugcagagccuccagacauacgugacccagcagcugaucagagccgccgagauuagagccucugccaaucuggccgccaccaagaugucugagugugugcugggccagagcaagagaguggacuuuugcggcaagggcuaccaccugaugagcuucccucagucugccccucacggcgugguguuucugcacgugacauaugugcccgcucaagagaagaauuucaccaccgcuccagccaucugccacgacggcaaagcccacuuuccuagagaaggcguguucguguccaacggcacccauugguucgugacacagcggaacuucuacgagccccagaucaucaccaccgacaacaccuucgugucuggcaacugcgacgucgugaucggcauugugaacaauaccguguacgacccucugcagcccgagcuggacagcuucaaagaggaacuggacaaguacuuuaagaaccacacaagccccgacguggaccugggcgauaucagcggaaucaaugccagcgucgugaacauccagaaagagaucgaccggcugaacgagguggccaagaaucugaacgagagccugaucgaccugcaagaacuggggaaguacgagcaguacaucaaguggcccugguacaucuggcugggcuuuaucgccggacugauugccaucgugauggucacaaucaugcuguguugcaugaccagcugcuguagcugccugaagggcuguuguagcuguggcagcugcugcaaguucgacgaggacgauucugagcccgugcugaagggcgugaaacugcacuacacaugaggacuaguuauaagacugacuagcccgaugggccucccaacgggcccuccuccccuccuugcaccgagagaucuaaaaaaaaaaaaaaaaaaaaaaaaaaaaaaaaaaaaaaaaaaaaaaaaaaaaaaaaaaaaaaaaaaaaaaaaaaaaaaaaaaaaaaaaaaaaaaaaaaaa

SEQ ID NO: 25924 - RNA, 4011 nt, Artificial Sequence
  SARS-CoV-2/Wuhan/WIV05/2019__EPI_ISL_402128 spike protein mRNA gc mod (1-1273)(N501Y_D614G)
aggagaaagcuuaccauguucguguuccuggugcugcugccucugguguccagccagugugugaaccugaccaccagaacacagcugccuccagccuacaccaacagcuuuaccagaggcguguacuaccccgacaagguguucagauccagcgugcugcacucuacccaggaccuguuccugccuuucuucagcaacgugaccugguuccacgccauccacguguccggcaccaauggcaccaagagauucgacaaccccgugcugcccuucaacgacgggguguacuuugccagcaccgagaaguccaacaucaucagaggcuggaucuucggcaccacacuggacagcaagacccagagccugcugaucgugaacaacgccaccaacguggucaucaaagugugcgaguuccaguucugcaacgaccccuuccugggcgucuacuaccacaagaacaacaagagcuggauggaaagcgaguuccggguguacagcagcgccaacaacugcaccuucgaguacgugucccagccuuuccugauggaccuggaaggcaagcagggcaacuucaagaaccugcgcgaguucguguuuaagaacaucgacggcuacuucaagaucuacagcaagcacaccccuaucaaccucgugcgggaucugccucagggcuucucugcucuggaaccccugguggaucugcccaucggcaucaacaucacccgguuucagacacugcuggcccugcacagaagcuaccugacaccuggcgauagcagcagcggauggacagcuggugccgccgcuuacuaugugggcuaccugcagccuagaaccuuccugcugaaguacaacgagaacggcaccaucaccgacgccguggauugugcucuggauccucugagcgagacaaagugcacccugaaguccuucaccguggaaaagggcaucuaccagaccagcaacuuccgggugcagcccaccgaauccaucgugcgguuccccaauaucaccaaucugugccccuucggcgagguguucaaugccaccagauucgccucuguguacgccuggaaccggaagcggaucagcaauugcguggccgacuacuccgugcuguacaacuccgccagcuucagcaccuucaagugcuacggcguguccccuaccaagcugaacgaccugugcuucacaaacguguacgccgacagcuucgugauccggggagaugaagugcggcagauugccccuggacagacaggcaagaucgccgacuacaacuacaagcugcccgacgacuucaccggcugugugauugccuggaacagcaacaaccuggacuccaaagucggcggcaacuacaauuaccuguaccggcuguuccggaaguccaaucugaagcccuucgagcgggacaucuccaccgagaucuaucaggccggcagcaccccuuguaacggcguggaaggcuucaacugcuacuucccacugcaguccuacggcuuucagcccacauacggcgugggcuaucagcccuacagagugguggugcugagcuucgaacugcugcaugccccugccacagugugcggcccuaagaaaagcaccaaucucgugaagaacaaaugcgugaacuucaacuucaacggccugaccggcaccggcgugcugacagagagcaacaagaaguuccugccauuccagcaguuuggccgggauaucgccgauaccacagacgccguuagagauccccagacacuggaaauccuggacaucaccccuugcagcuucggcggagugucugugaucaccccuggcaccaacaccagcaaucagguggcagugcuguaccagggcgugaacuguaccgaagugcccguggccauucacgccgaucagcugacaccuacauggcggguguacuccaccggcagcaauguguuucagaccagagccggcugucugaucggagccgagcacgugaacaauagcuacgagugcgacauccccaucggcgcuggaaucugcgccagcuaccagacacagacaaacagcccucggagagccagaagcguggccagccagagcaucauugccuacacaaugucucugggcgccgagaacagcguggccuacuccaacaacucuaucgcuauccccaccaacuucaccaucagcgugaccacagagauccugccuguguccaugaccaagaccagcguggacugcaccauguacaucugcggcgauuccaccgagugcuccaaccugcugcugcaguacggcagcuucugcacccagcugaauagagcccugacagggaucgccguggaacaggacaagaacacccaagagguguucgcccaagugaagcagaucuacaagaccccuccuaucaaggacuucggcggcuucaauuucagccagauucugcccgauccuagcaagcccagcaagcggagcuucaucgaggaccugcuguucaacaaagugacacuggccgacgccggcuucaucaagcaguauggcgauugucugggcgacauugccgccagggaucugauuugcgcccagaaguuuaacggacugacagugcugccuccucugcugaccgaugagaugaucgcccaguacacaucugcccugcuggccggcacaaucacaagcggcuggacauuuggagcaggcgccgcucugcagauccccuuugcuaugcagauggccuaccgguucaacggcaucggagugacccagaaugugcuguacgagaaccagaagcugaucgccaaccaguucaacagcgccaucggcaagauccaggacagccugagcagcacagcaagcgcccugggaaagcugcaggacguggucaaccagaaugcccaggcacugaacacccuggucaagcagcuguccuccaacuucggcgccaucagcucugugcugaacgauauccugagcagacuggacaaggucgaggccgaggugcagaucgacagacugaucacaggcagacugcagagccuccagacauacgugacccagcagcugaucagagccgccgagauuagagccucugccaaucuggccgccaccaagaugucugagugugugcugggccagagcaagagaguggacuuuugcggcaagggcuaccaccugaugagcuucccucagucugccccucacggcgugguguuucugcacgugacauaugugcccgcucaagagaagaauuucaccaccgcuccagccaucugccacgacggcaaagcccacuuuccuagagaaggcguguucguguccaacggcacccauugguucgugacacagcggaacuucuacgagccccagaucaucaccaccgacaacaccuucgugucuggcaacugcgacgucgugaucggcauugugaacaauaccguguacgacccucugcagcccgagcuggacagcuucaaagaggaacuggacaaguacuuuaagaaccacacaagccccgacguggaccugggcgauaucagcggaaucaaugccagcgucgugaacauccagaaagagaucgaccggcugaacgagguggccaagaaucugaacgagagccugaucgaccugcaagaacuggggaaguacgagcaguacaucaaguggcccugguacaucuggcugggcuuuaucgccggacugauugccaucgugauggucacaaucaugcuguguugcaugaccagcugcuguagcugccugaagggcuguuguagcuguggcagcugcugcaaguucgacgaggacgauucugagcccgugcugaagggcgugaaacugcacuacacaugaggacuaguuauaagacugacuagcccgaugggccucccaacgggcccuccuccccuccuugcaccgagagaucuaaaaaaaaaaaaaaaaaaaaaaaaaaaaaaaaaaaaaaaaaaaaaaaaaaaaaaaaaaaaaaaaaaaaaaaaaaaaaaaaaaaaaaaaaaaaaaaaaaaa

SEQ ID NO: 25925 - RNA, 4005 nt, Artificial Sequence
  SARS-CoV-2/Wuhan/WIV05/2019__EPI_ISL_402128 spike protein mRNA gc mod (1-1273)(H69del_V70del_D614G)
aggagaaagcuuaccauguucguguuccuggugcugcugccucugguguccagccagugugugaaccugaccaccagaacacagcugccuccagccuacaccaacagcuuuaccagaggcguguacuaccccgacaagguguucagauccagcgugcugcacucuacccaggaccuguuccugccuuucuucagcaacgugaccugguuccacgccaucuccggcaccaauggcaccaagagauucgacaaccccgugcugcccuucaacgacgggguguacuuugccagcaccgagaaguccaacaucaucagaggcuggaucuucggcaccacacuggacagcaagacccagagccugcugaucgugaacaacgccaccaacguggucaucaaagugugcgaguuccaguucugcaacgaccccuuccugggcgucuacuaccacaagaacaacaagagcuggauggaaagcgaguuccggguguacagcagcgccaacaacugcaccuucgaguacgugucccagccuuuccugauggaccuggaaggcaagcagggcaacuucaagaaccugcgcgaguucguguuuaagaacaucgacggcuacuucaagaucuacagcaagcacaccccuaucaaccucgugcgggaucugccucagggcuucucugcucuggaaccccugguggaucugcccaucggcaucaacaucacccgguuucagacacugcuggcccugcacagaagcuaccugacaccuggcgauagcagcagcggauggacagcuggugccgccgcuuacuaugugggcuaccugcagccuagaaccuuccugcugaaguacaacgagaacggcaccaucaccgacgccguggauugugcucuggauccucugagcgagacaaagugcacccugaaguccuucaccguggaaaagggcaucuaccagaccagcaacuuccgggugcagcccaccgaauccaucgugcgguuccccaauaucaccaaucugugccccuucggcgagguguucaaugccaccagauucgccucuguguacgccuggaaccggaagcggaucagcaauugcguggccgacuacuccgugcuguacaacuccgccagcuucagcaccuucaagugcuacggcguguccccuaccaagcugaacgaccugugcuucacaaacguguacgccgacagcuucgugauccggggagaugaagugcggcagauugccccuggacagacaggcaagaucgccgacuacaacuacaagcugcccgacgacuucaccggcugugugauugccuggaacagcaacaaccuggacuccaaagucggcggcaacuacaauuaccuguaccggcuguuccggaaguccaaucugaagcccuucgagcgggacaucuccaccgagaucuaucaggccggcagcaccccuuguaacggcguggaaggcuucaacugcuacuucccacugcaguccuacggcuuucagcccacaaauggcgugggcuaucagcccuacagagugguggugcugagcuucgaacugcugcaugccccugccacagugugcggcccuaagaaaagcaccaaucucgugaagaacaaaugcgugaacuucaacuucaacggccugaccggcaccggcgugcugacagagagcaacaagaaguuccugccauuccagcaguuuggccgggauaucgccgauaccacagacgccguuagagauccccagacacuggaaauccuggacaucaccccuugcagcuucggcggagugucugugaucaccccuggcaccaacaccagcaaucagguggcagugcuguaccagggcgugaacuguaccgaagugcccguggccauucacgccgaucagcugacaccuacauggcggguguacuccaccggcagcaauguguuucagaccagagccggcugucugaucggagccgagcacgugaacaauagcuacgagugcgacauccccaucggcgcuggaaucugcgccagcuaccagacacagacaaacagcccucggagagccagaagcguggccagccagagcaucauugccuacacaaugucucugggcgccgagaacagcguggccuacuccaacaacucuaucgcuauccccaccaacuucaccaucagcgugaccacagagauccugccuguguccaugaccaagaccagcguggacugcaccauguacaucugcggcgauuccaccgagugcuccaaccugcugcugcaguacggcagcuucugcacccagcugaauagagcccugacagggaucgccguggaacaggacaagaacacccaagagguguucgcccaagugaagcagaucuacaagaccccuccuaucaaggacuucggcggcuucaauuucagccagauucugcccgauccuagcaagcccagcaagcggagcuucaucgaggaccugcuguucaacaaagugacacuggccgacgccggcuucaucaagcaguauggcgauugucugggcgacauugccgccagggaucugauuugcgcccagaaguuuaacggacugacagugcugccuccucugcugaccgaugagaugaucgcccaguacacaucugcccugcuggccggcacaaucacaagcggcuggacauuuggagcaggcgccgcucugcagauccccuuugcuaugcagauggccuaccgguucaacggcaucggagugacccagaaugugcuguacgagaaccagaagcugaucgccaaccaguucaacagcgccaucggcaagauccaggacagccugagcagcacagcaagcgcccugggaaagcugcaggacguggucaaccagaaugcccaggcacugaacacccuggucaagcagcuguccuccaacuucggcgccaucagcucugugcugaacgauauccugagcagacuggacaaggucgaggccgaggugcagaucgacagacugaucacaggcagacugcagagccuccagacauacgugacccagcagcugaucagagccgccgagauuagagccucugccaaucuggccgccaccaagaugucugagugugugcugggccagagcaagagaguggacuuuugcggcaagggcuaccaccugaugagcuucccucagucugccccucacggcgugguguuucugcacgugacauaugugcccgcucaagagaagaauuucaccaccgcuccagccaucugccacgacggcaaagcccacuuuccuagagaaggcguguucguguccaacggcacccauugguucgugacacagcggaacuucuacgagccccagaucaucaccaccgacaacaccuucgugucuggcaacugcgacgucgugaucggcauugugaacaauaccguguacgacccucugcagcccgagcuggacagcuucaaagaggaacuggacaaguacuuuaagaaccacacaagccccgacguggaccugggcgauaucagcggaaucaaugccagcgucgugaacauccagaaagagaucgaccggcugaacgagguggccaagaaucugaacgagagccugaucgaccugcaagaacuggggaaguacgagcaguacaucaaguggcccugguacaucuggcugggcuuuaucgccggacugauugccaucgugauggucacaaucaugcuguguugcaugaccagcugcuguagcugccugaagggcuguuguagcuguggcagcugcugcaaguucgacgaggacgauucugagcccgugcugaagggcgugaaacugcacuacacaugaggacuaguuauaagacugacuagcccgaugggccucccaacgggcccuccuccccuccuugcaccgagagaucuaaaaaaaaaaaaaaaaaaaaaaaaaaaaaaaaaaaaaaaaaaaaaaaaaaaaaaaaaaaaaaaaaaaaaaaaaaaaaaaaaaaaaaaaaaaaaaaaaaaa

SEQ ID NO: 25926 - RNA, 4011 nt, Artificial Sequence
  SARS-CoV-2/Wuhan/WIV05/2019__EPI_ISL_402128 spike protein mRNA gc mod (1-1273)(Y453F_D614G)
aggagaaagcuuaccauguucguguuccuggugcugcugccucugguguccagccagugugugaaccugaccaccagaacacagcugccuccagccuacaccaacagcuuuaccagaggcguguacuaccccgacaagguguucagauccagcgugcugcacucuacccaggaccuguuccugccuuucuucagcaacgugaccugguuccacgccauccacguguccggcaccaauggcaccaagagauucgacaaccccgugcugcccuucaacgacgggguguacuuugccagcaccgagaaguccaacaucaucagaggcuggaucuucggcaccacacuggacagcaagacccagagccugcugaucgugaacaacgccaccaacguggucaucaaagugugcgaguuccaguucugcaacgaccccuuccugggcgucuacuaccacaagaacaacaagagcuggauggaaagcgaguuccggguguacagcagcgccaacaacugcaccuucgaguacgugucccagccuuuccugauggaccuggaaggcaagcagggcaacuucaagaaccugcgcgaguucguguuuaagaacaucgacggcuacuucaagaucuacagcaagcacaccccuaucaaccucgugcgggaucugccucagggcuucucugcucuggaaccccugguggaucugcccaucggcaucaacaucacccgguuucagacacugcuggcccugcacagaagcuaccugacaccuggcgauagcagcagcggauggacagcuggugccgccgcuuacuaugugggcuaccugcagccuagaaccuuccugcugaaguacaacgagaacggcaccaucaccgacgccguggauugugcucuggauccucugagcgagacaaagugcacccugaaguccuucaccguggaaaagggcaucuaccagaccagcaacuuccgggugcagcccaccgaauccaucgugcgguuccccaauaucaccaaucugugccccuucggcgagguguucaaugccaccagauucgccucuguguacgccuggaaccggaagcggaucagcaauugcguggccgacuacuccgugcuguacaacuccgccagcuucagcaccuucaagugcuacggcguguccccuaccaagcugaacgaccugugcuucacaaacguguacgccgacagcuucgugauccggggagaugaagugcggcagauugccccuggacagacaggcaagaucgccgacuacaacuacaagcugcccgacgacuucaccggcugugugauugccuggaacagcaacaaccuggacuccaaagucggcggcaacuacaauuaccuguuccggcuguuccggaaguccaaucugaagcccuucgagcgggacaucuccaccgagaucuaucaggccggcagcaccccuuguaacggcguggaaggcuucaacugcuacuucccacugcaguccuacggcuuucagcccacaaauggcgugggcuaucagcccuacagagugguggugcugagcuucgaacugcugcaugccccugccacagugugcggcccuaagaaaagcaccaaucucgugaagaacaaaugcgugaacuucaacuucaacggccugaccggcaccggcgugcugacagagagcaacaagaaguuccugccauuccagcaguuuggccgggauaucgccgauaccacagacgccguuagagauccccagacacuggaaauccuggacaucaccccuugcagcuucggcggagugucugugaucaccccuggcaccaacaccagcaaucagguggcagugcuguaccagggcgugaacuguaccgaagugcccguggccauucacgccgaucagcugacaccuacauggcggguguacuccaccggcagcaauguguuucagaccagagccggcugucugaucggagccgagcacgugaacaauagcuacgagugcgacauccccaucggcgcuggaaucugcgccagcuaccagacacagacaaacagcccucggagagccagaagcguggccagccagagcaucauugccuacacaaugucucugggcgccgagaacagcguggccuacuccaacaacucuaucgcuauccccaccaacuucaccaucagcgugaccacagagauccugccuguguccaugaccaagaccagcguggacugcaccauguacaucugcggcgauuccaccgagugcuccaaccugcugcugcaguacggcagcuucugcacccagcugaauagagcccugacagggaucgccguggaacaggacaagaacacccaagagguguucgcccaagugaagcagaucuacaagaccccuccuaucaaggacuucggcggcuucaauuucagccagauucugcccgauccuagcaagcccagcaagcggagcuucaucgaggaccugcuguucaacaaagugacacuggccgacgccggcuucaucaagcaguauggcgauugucugggcgacauugccgccagggaucugauuugcgcccagaaguuuaacggacugacagugcugccuccucugcugaccgaugagaugaucgcccaguacacaucugcccugcuggccggcacaaucacaagcggcuggacauuuggagcaggcgccgcucugcagauccccuuugcuaugcagauggccuaccgguucaacggcaucggagugacccagaaugugcuguacgagaaccagaagcugaucgccaaccaguucaacagcgccaucggcaagauccaggacagccugagcagcacagcaagcgcccugggaaagcugcaggacguggucaaccagaaugcccaggcacugaacacccuggucaagcagcuguccuccaacuucggcgccaucagcucugugcugaacgauauccugagcagacuggacaaggucgaggccgaggugcagaucgacagacugaucacaggcagacugcagagccuccagacauacgugacccagcagcugaucagagccgccgagauuagagccucugccaaucuggccgccaccaagaugucugagugugugcugggccagagcaagagaguggacuuuugcggcaagggcuaccaccugaugagcuucccucagucugccccucacggcgugguguuucugcacgugacauaugugcccgcucaagagaagaauuucaccaccgcuccagccaucugccacgacggcaaagcccacuuuccuagagaaggcguguucguguccaacggcacccauugguucgugacacagcggaacuucuacgagccccagaucaucaccaccgacaacaccuucgugucuggcaacugcgacgucgugaucggcauugugaacaauaccguguacgacccucugcagcccgagcuggacagcuucaaagaggaacuggacaaguacuuuaagaaccacacaagccccgacguggaccugggcgauaucagcggaaucaaugccagcgucgugaacauccagaaagagaucgaccggcugaacgagguggccaagaaucugaacgagagccugaucgaccugcaagaacuggggaaguacgagcaguacaucaaguggcccugguacaucuggcugggcuuuaucgccggacugauugccaucgugauggucacaaucaugcuguguugcaugaccagcugcuguagcugccugaagggcuguuguagcuguggcagcugcugcaaguucgacgaggacgauucugagcccgugcugaagggcgugaaacugcacuacacaugaggacuaguuauaagacugacuagcccgaugggccucccaacgggcccuccuccccuccuugcaccgagagaucuaaaaaaaaaaaaaaaaaaaaaaaaaaaaaaaaaaaaaaaaaaaaaaaaaaaaaaaaaaaaaaaaaaaaaaaaaaaaaaaaaaaaaaaaaaaaaaaaaaaa

SEQ ID NO: 25927 - RNA, 4011 nt, Artificial Sequence
  SARS-CoV-2/Wuhan/WIV05/2019__EPI_ISL_402128 spike protein mRNA gc mod (1-1273)(D614G_I692V)
aggagaaagcuuaccauguucguguuccuggugcugcugccucugguguccagccagugugugaaccugaccaccagaacacagcugccuccagccuacaccaacagcuuuaccagaggcguguacuaccccgacaagguguucagauccagcgugcugcacucuacccaggaccuguuccugccuuucuucagcaacgugaccugguuccacgccauccacguguccggcaccaauggcaccaagagauucgacaaccccgugcugcccuucaacgacgggguguacuuugccagcaccgagaaguccaacaucaucagaggcuggaucuucggcaccacacuggacagcaagacccagagccugcugaucgugaacaacgccaccaacguggucaucaaagugugcgaguuccaguucugcaacgaccccuuccugggcgucuacuaccacaagaacaacaagagcuggauggaaagcgaguuccggguguacagcagcgccaacaacugcaccuucgaguacgugucccagccuuuccugauggaccuggaaggcaagcagggcaacuucaagaaccugcgcgaguucguguuuaagaacaucgacggcuacuucaagaucuacagcaagcacaccccuaucaaccucgugcgggaucugccucagggcuucucugcucuggaaccccugguggaucugcccaucggcaucaacaucacccgguuucagacacugcuggcccugcacagaagcuaccugacaccuggcgauagcagcagcggauggacagcuggugccgccgcuuacuaugugggcuaccugcagccuagaaccuuccugcugaaguacaacgagaacggcaccaucaccgacgccguggauugugcucuggauccucugagcgagacaaagugcacccugaaguccuucaccguggaaaagggcaucuaccagaccagcaacuuccgggugcagcccaccgaauccaucgugcgguuccccaauaucaccaaucugugccccuucggcgagguguucaaugccaccagauucgccucuguguacgccuggaaccggaagcggaucagcaauugcguggccgacuacuccgugcuguacaacuccgccagcuucagcaccuucaagugcuacggcguguccccuaccaagcugaacgaccugugcuucacaaacguguacgccgacagcuucgugauccggggagaugaagugcggcagauugccccuggacagacaggcaagaucgccgacuacaacuacaagcugcccgacgacuucaccggcugugugauugccuggaacagcaacaaccuggacuccaaagucggcggcaacuacaauuaccuguaccggcuguuccggaaguccaaucugaagcccuucgagcgggacaucuccaccgagaucuaucaggccggcagcaccccuuguaacggcguggaaggcuucaacugcuacuucccacugcaguccuacggcuuucagcccacaaauggcgugggcuaucagcccuacagagugguggugcugagcuucgaacugcugcaugccccugccacagugugcggcccuaagaaaagcaccaaucucgugaagaacaaaugcgugaacuucaacuucaacggccugaccggcaccggcgugcugacagagagcaacaagaaguuccugccauuccagcaguuuggccgggauaucgccgauaccacagacgccguuagagauccccagacacuggaaauccuggacaucaccccuugcagcuucggcggagugucugugaucaccccuggcaccaacaccagcaaucagguggcagugcuguaccagggcgugaacuguaccgaagugcccguggccauucacgccgaucagcugacaccuacauggcggguguacuccaccggcagcaauguguuucagaccagagccggcugucugaucggagccgagcacgugaacaauagcuacgagugcgacauccccaucggcgcuggaaucugcgccagcuaccagacacagacaaacagcccucggagagccagaagcguggccagccagagcgugauugccuacacaaugucucugggcgccgagaacagcguggccuacuccaacaacucuaucgcuauccccaccaacuucaccaucagcgugaccacagagauccugccuguguccaugaccaagaccagcguggacugcaccauguacaucugcggcgauuccaccgagugcuccaaccugcugcugcaguacggcagcuucugcacccagcugaauagagcccugacagggaucgccguggaacaggacaagaacacccaagagguguucgcccaagugaagcagaucuacaagaccccuccuaucaaggacuucggcggcuucaauuucagccagauucugcccgauccuagcaagcccagcaagcggagcuucaucgaggaccugcuguucaacaaagugacacuggccgacgccggcuucaucaagcaguauggcgauugucugggcgacauugccgccagggaucugauuugcgcccagaaguuuaacggacugacagugcugccuccucugcugaccgaugagaugaucgcccaguacacaucugcccugcuggccggcacaaucacaagcggcuggacauuuggagcaggcgccgcucugcagauccccuuugcuaugcagauggccuaccgguucaacggcaucggagugacccagaaugugcuguacgagaaccagaagcugaucgccaaccaguucaacagcgccaucggcaagauccaggacagccugagcagcacagcaagcgcccugggaaagcugcaggacguggucaaccagaaugcccaggcacugaacacccuggucaagcagcuguccuccaacuucggcgccaucagcucugugcugaacgauauccugagcagacuggacaaggucgaggccgaggugcagaucgacagacugaucacaggcagacugcagagccuccagacauacgugacccagcagcugaucagagccgccgagauuagagccucugccaaucuggccgccaccaagaugucugagugugugcugggccagagcaagagaguggacuuuugcggcaagggcuaccaccugaugagcuucccucagucugccccucacggcgugguguuucugcacgugacauaugugcccgcucaagagaagaauuucaccaccgcuccagccaucugccacgacggcaaagcccacuuuccuagagaaggcguguucguguccaacggcacccauugguucgugacacagcggaacuucuacgagccccagaucaucaccaccgacaacaccuucgugucuggcaacugcgacgucgugaucggcauugugaacaauaccguguacgacccucugcagcccgagcuggacagcuucaaagaggaacuggacaaguacuuuaagaaccacacaagccccgacguggaccugggcgauaucagcggaaucaaugccagcgucgugaacauccagaaagagaucgaccggcugaacgagguggccaagaaucugaacgagagccugaucgaccugcaagaacuggggaaguacgagcaguacaucaaguggcccugguacaucuggcugggcuuuaucgccggacugauugccaucgugauggucacaaucaugcuguguugcaugaccagcugcuguagcugccugaagggcuguuguagcuguggcagcugcugcaaguucgacgaggacgauucugagcccgugcugaagggcgugaaacugcacuacacaugaggacuaguuauaagacugacuagcccgaugggccucccaacgggcccuccuccccuccuugcaccgagagaucuaaaaaaaaaaaaaaaaaaaaaaaaaaaaaaaaaaaaaaaaaaaaaaaaaaaaaaaaaaaaaaaaaaaaaaaaaaaaaaaaaaaaaaaaaaaaaaaaaaaa

SEQ ID NO: 25928 - RNA, 4011 nt, Artificial Sequence
  SARS-CoV-2/Wuhan/WIV05/2019__EPI_ISL_402128 spike protein mRNA gc mod (1-1273)(D614G_M1229I)
aggagaaagcuuaccauguucguguuccuggugcugcugccucugguguccagccagugugugaaccugaccaccagaacacagcugccuccagccuacaccaacagcuuuaccagaggcguguacuaccccgacaagguguucagauccagcgugcugcacucuacccaggaccuguuccugccuuucuucagcaacgugaccugguuccacgccauccacguguccggcaccaauggcaccaagagauucgacaaccccgugcugcccuucaacgacgggguguacuuugccagcaccgagaaguccaacaucaucagaggcuggaucuucggcaccacacuggacagcaagacccagagccugcugaucgugaacaacgccaccaacguggucaucaaagugugcgaguuccaguucugcaacgaccccuuccugggcgucuacuaccacaagaacaacaagagcuggauggaaagcgaguuccggguguacagcagcgccaacaacugcaccuucgaguacgugucccagccuuuccugauggaccuggaaggcaagcagggcaacuucaagaaccugcgcgaguucguguuuaagaacaucgacggcuacuucaagaucuacagcaagcacaccccuaucaaccucgugcgggaucugccucagggcuucucugcucuggaaccccugguggaucugcccaucggcaucaacaucacccgguuucagacacugcuggcccugcacagaagcuaccugacaccuggcgauagcagcagcggauggacagcuggugccgccgcuuacuaugugggcuaccugcagccuagaaccuuccugcugaaguacaacgagaacggcaccaucaccgacgccguggauugugcucuggauccucugagcgagacaaagugcacccugaaguccuucaccguggaaaagggcaucuaccagaccagcaacuuccgggugcagcccaccgaauccaucgugcgguuccccaauaucaccaaucugugccccuucggcgagguguucaaugccaccagauucgccucuguguacgccuggaaccggaagcggaucagcaauugcguggccgacuacuccgugcuguacaacuccgccagcuucagcaccuucaagugcuacggcguguccccuaccaagcugaacgaccugugcuucacaaacguguacgccgacagcuucgugauccggggagaugaagugcggcagauugccccuggacagacaggcaagaucgccgacuacaacuacaagcugcccgacgacuucaccggcugugugauugccuggaacagcaacaaccuggacuccaaagucggcggcaacuacaauuaccuguaccggcuguuccggaaguccaaucugaagcccuucgagcgggacaucuccaccgagaucuaucaggccggcagcaccccuuguaacggcguggaaggcuucaacugcuacuucccacugcaguccuacggcuuucagcccacaaauggcgugggcuaucagcccuacagagugguggugcugagcuucgaacugcugcaugccccugccacagugugcggcccuaagaaaagcaccaaucucgugaagaacaaaugcgugaacuucaacuucaacggccugaccggcaccggcgugcugacagagagcaacaagaaguuccugccauuccagcaguuuggccgggauaucgccgauaccacagacgccguuagagauccccagacacuggaaauccuggacaucaccccuugcagcuucggcggagugucugugaucaccccuggcaccaacaccagcaaucagguggcagugcuguaccagggcgugaacuguaccgaagugcccguggccauucacgccgaucagcugacaccuacauggcggguguacuccaccggcagcaauguguuucagaccagagccggcugucugaucggagccgagcacgugaacaauagcuacgagugcgacauccccaucggcgcuggaaucugcgccagcuaccagacacagacaaacagcccucggagagccagaagcguggccagccagagcaucauugccuacacaaugucucugggcgccgagaacagcguggccuacuccaacaacucuaucgcuauccccaccaacuucaccaucagcgugaccacagagauccugccuguguccaugaccaagaccagcguggacugcaccauguacaucugcggcgauuccaccgagugcuccaaccugcugcugcaguacggcagcuucugcacccagcugaauagagcccugacagggaucgccguggaacaggacaagaacacccaagagguguucgcccaagugaagcagaucuacaagaccccuccuaucaaggacuucggcggcuucaauuucagccagauucugcccgauccuagcaagcccagcaagcggagcuucaucgaggaccugcuguucaacaaagugacacuggccgacgccggcuucaucaagcaguauggcgauugucugggcgacauugccgccagggaucugauuugcgcccagaaguuuaacggacugacagugcugccuccucugcugaccgaugagaugaucgcccaguacacaucugcccugcuggccggcacaaucacaagcggcuggacauuuggagcaggcgccgcucugcagauccccuuugcuaugcagauggccuaccgguucaacggcaucggagugacccagaaugugcuguacgagaaccagaagcugaucgccaaccaguucaacagcgccaucggcaagauccaggacagccugagcagcacagcaagcgcccugggaaagcugcaggacguggucaaccagaaugcccaggcacugaacacccuggucaagcagcuguccuccaacuucggcgccaucagcucugugcugaacgauauccugagcagacuggacaaggucgaggccgaggugcagaucgacagacugaucacaggcagacugcagagccuccagacauacgugacccagcagcugaucagagccgccgagauuagagccucugccaaucuggccgccaccaagaugucugagugugugcugggccagagcaagagaguggacuuuugcggcaagggcuaccaccugaugagcuucccucagucugccccucacggcgugguguuucugcacgugacauaugugcccgcucaagagaagaauuucaccaccgcuccagccaucugccacgacggcaaagcccacuuuccuagagaaggcguguucguguccaacggcacccauugguucgugacacagcggaacuucuacgagccccagaucaucaccaccgacaacaccuucgugucuggcaacugcgacgucgugaucggcauugugaacaauaccguguacgacccucugcagcccgagcuggacagcuucaaagaggaacuggacaaguacuuuaagaaccacacaagccccgacguggaccugggcgauaucagcggaaucaaugccagcgucgugaacauccagaaagagaucgaccggcugaacgagguggccaagaaucugaacgagagccugaucgaccugcaagaacuggggaaguacgagcaguacaucaaguggcccugguacaucuggcugggcuuuaucgccggacugauugccaucgugaucgucacaaucaugcuguguugcaugaccagcugcuguagcugccugaagggcuguuguagcuguggcagcugcugcaaguucgacgaggacgauucugagcccgugcugaagggcgugaaacugcacuacacaugaggacuaguuauaagacugacuagcccgaugggccucccaacgggcccuccuccccuccuugcaccgagagaucuaaaaaaaaaaaaaaaaaaaaaaaaaaaaaaaaaaaaaaaaaaaaaaaaaaaaaaaaaaaaaaaaaaaaaaaaaaaaaaaaaaaaaaaaaaaaaaaaaaaa

SEQ ID NO: 25929 - RNA, 4005 nt, Artificial Sequence
  SARS-CoV-2/Wuhan/WIV05/2019__EPI_ISL_402128 spike protein mRNA gc mod (1-1273)(H69del_V70del_A222V_Y453F_S477N_D614G_I692V)
aggagaaagcuuaccauguucguguuccuggugcugcugccucugguguccagccagugugugaaccugaccaccagaacacagcugccuccagccuacaccaacagcuuuaccagaggcguguacuaccccgacaagguguucagauccagcgugcugcacucuacccaggaccuguuccugccuuucuucagcaacgugaccugguuccacgccaucuccggcaccaauggcaccaagagauucgacaaccccgugcugcccuucaacgacgggguguacuuugccagcaccgagaaguccaacaucaucagaggcuggaucuucggcaccacacuggacagcaagacccagagccugcugaucgugaacaacgccaccaacguggucaucaaagugugcgaguuccaguucugcaacgaccccuuccugggcgucuacuaccacaagaacaacaagagcuggauggaaagcgaguuccggguguacagcagcgccaacaacugcaccuucgaguacgugucccagccuuuccugauggaccuggaaggcaagcagggcaacuucaagaaccugcgcgaguucguguuuaagaacaucgacggcuacuucaagaucuacagcaagcacaccccuaucaaccucgugcgggaucugccucagggcuucucugugcuggaaccccugguggaucugcccaucggcaucaacaucacccgguuucagacacugcuggcccugcacagaagcuaccugacaccuggcgauagcagcagcggauggacagcuggugccgccgcuuacuaugugggcuaccugcagccuagaaccuuccugcugaaguacaacgagaacggcaccaucaccgacgccguggauugugcucuggauccucugagcgagacaaagugcacccugaaguccuucaccguggaaaagggcaucuaccagaccagcaacuuccgggugcagcccaccgaauccaucgugcgguuccccaauaucaccaaucugugccccuucggcgagguguucaaugccaccagauucgccucuguguacgccuggaaccggaagcggaucagcaauugcguggccgacuacuccgugcuguacaacuccgccagcuucagcaccuucaagugcuacggcguguccccuaccaagcugaacgaccugugcuucacaaacguguacgccgacagcuucgugauccggggagaugaagugcggcagauugccccuggacagacaggcaagaucgccgacuacaacuacaagcugcccgacgacuucaccggcugugugauugccuggaacagcaacaaccuggacuccaaagucggcggcaacuacaauuaccuguuccggcuguuccggaaguccaaucugaagcccuucgagcgggacaucuccaccgagaucuaucaggccggcaacaccccuuguaacggcguggaaggcuucaacugcuacuucccacugcaguccuacggcuuucagcccacaaauggcgugggcuaucagcccuacagagugguggugcugagcuucgaacugcugcaugccccugccacagugugcggcccuaagaaaagcaccaaucucgugaagaacaaaugcgugaacuucaacuucaacggccugaccggcaccggcgugcugacagagagcaacaagaaguuccugccauuccagcaguuuggccgggauaucgccgauaccacagacgccguuagagauccccagacacuggaaauccuggacaucaccccuugcagcuucggcggagugucugugaucaccccuggcaccaacaccagcaaucagguggcagugcuguaccagggcgugaacuguaccgaagugcccguggccauucacgccgaucagcugacaccuacauggcggguguacuccaccggcagcaauguguuucagaccagagccggcugucugaucggagccgagcacgugaacaauagcuacgagugcgacauccccaucggcgcuggaaucugcgccagcuaccagacacagacaaacagcccucggagagccagaagcguggccagccagagcgugauugccuacacaaugucucugggcgccgagaacagcguggccuacuccaacaacucuaucgcuauccccaccaacuucaccaucagcgugaccacagagauccugccuguguccaugaccaagaccagcguggacugcaccauguacaucugcggcgauuccaccgagugcuccaaccugcugcugcaguacggcagcuucugcacccagcugaauagagcccugacagggaucgccguggaacaggacaagaacacccaagagguguucgcccaagugaagcagaucuacaagaccccuccuaucaaggacuucggcggcuucaauuucagccagauucugcccgauccuagcaagcccagcaagcggagcuucaucgaggaccugcuguucaacaaagugacacuggccgacgccggcuucaucaagcaguauggcgauugucugggcgacauugccgccagggaucugauuugcgcccagaaguuuaacggacugacagugcugccuccucugcugaccgaugagaugaucgcccaguacacaucugcccugcuggccggcacaaucacaagcggcuggacauuuggagcaggcgccgcucugcagauccccuuugcuaugcagauggccuaccgguucaacggcaucggagugacccagaaugugcuguacgagaaccagaagcugaucgccaaccaguucaacagcgccaucggcaagauccaggacagccugagcagcacagcaagcgcccugggaaagcugcaggacguggucaaccagaaugcccaggcacugaacacccuggucaagcagcuguccuccaacuucggcgccaucagcucugugcugaacgauauccugagcagacuggacaaggucgaggccgaggugcagaucgacagacugaucacaggcagacugcagagccuccagacauacgugacccagcagcugaucagagccgccgagauuagagccucugccaaucuggccgccaccaagaugucugagugugugcugggccagagcaagagaguggacuuuugcggcaagggcuaccaccugaugagcuucccucagucugccccucacggcgugguguuucugcacgugacauaugugcccgcucaagagaagaauuucaccaccgcuccagccaucugccacgacggcaaagcccacuuuccuagagaaggcguguucguguccaacggcacccauugguucgugacacagcggaacuucuacgagccccagaucaucaccaccgacaacaccuucgugucuggcaacugcgacgucgugaucggcauugugaacaauaccguguacgacccucugcagcccgagcuggacagcuucaaagaggaacuggacaaguacuuuaagaaccacacaagccccgacguggaccugggcgauaucagcggaaucaaugccagcgucgugaacauccagaaagagaucgaccggcugaacgagguggccaagaaucugaacgagagccugaucgaccugcaagaacuggggaaguacgagcaguacaucaaguggcccugguacaucuggcugggcuuuaucgccggacugauugccaucgugauggucacaaucaugcuguguugcaugaccagcugcuguagcugccugaagggcuguuguagcuguggcagcugcugcaaguucgacgaggacgauucugagcccgugcugaagggcgugaaacugcacuacacaugaggacuaguuauaagacugacuagcccgaugggccucccaacgggcccuccuccccuccuugcaccgagagaucuaaaaaaaaaaaaaaaaaaaaaaaaaaaaaaaaaaaaaaaaaaaaaaaaaaaaaaaaaaaaaaaaaaaaaaaaaaaaaaaaaaaaaaaaaaaaaaaaaaaa

SEQ ID NO: 25930 - RNA, 4005 nt, Artificial Sequence
  SARS-CoV-2/Wuhan/WIV05/2019__EPI_ISL_402128 spike protein mRNA gc mod (1-1273)(H69del_V70del_Y453F_D614G_I692V_M1229I)
aggagaaagcuuaccauguucguguuccuggugcugcugccucugguguccagccagugugugaaccugaccaccagaacacagcugccuccagccuacaccaacagcuuuaccagaggcguguacuaccccgacaagguguucagauccagcgugcugcacucuacccaggaccuguuccugccuuucuucagcaacgugaccugguuccacgccaucuccggcaccaauggcaccaagagauucgacaaccccgugcugcccuucaacgacgggguguacuuugccagcaccgagaaguccaacaucaucagaggcuggaucuucggcaccacacuggacagcaagacccagagccugcugaucgugaacaacgccaccaacguggucaucaaagugugcgaguuccaguucugcaacgaccccuuccugggcgucuacuaccacaagaacaacaagagcuggauggaaagcgaguuccggguguacagcagcgccaacaacugcaccuucgaguacgugucccagccuuuccugauggaccuggaaggcaagcagggcaacuucaagaaccugcgcgaguucguguuuaagaacaucgacggcuacuucaagaucuacagcaagcacaccccuaucaaccucgugcgggaucugccucagggcuucucugcucuggaaccccugguggaucugcccaucggcaucaacaucacccgguuucagacacugcuggcccugcacagaagcuaccugacaccuggcgauagcagcagcggauggacagcuggugccgccgcuuacuaugugggcuaccugcagccuagaaccuuccugcugaaguacaacgagaacggcaccaucaccgacgccguggauugugcucuggauccucugagcgagacaaagugcacccugaaguccuucaccguggaaaagggcaucuaccagaccagcaacuuccgggugcagcccaccgaauccaucgugcgguuccccaauaucaccaaucugugccccuucggcgagguguucaaugccaccagauucgccucuguguacgccuggaaccggaagcggaucagcaauugcguggccgacuacuccgugcuguacaacuccgccagcuucagcaccuucaagugcuacggcguguccccuaccaagcugaacgaccugugcuucacaaacguguacgccgacagcuucgugauccggggagaugaagugcggcagauugccccuggacagacaggcaagaucgccgacuacaacuacaagcugcccgacgacuucaccggcugugugauugccuggaacagcaacaaccuggacuccaaagucggcggcaacuacaauuaccuguuccggcuguuccggaaguccaaucugaagcccuucgagcgggacaucuccaccgagaucuaucaggccggcagcaccccuuguaacggcguggaaggcuucaacugcuacuucccacugcaguccuacggcuuucagcccacaaauggcgugggcuaucagcccuacagagugguggugcugagcuucgaacugcugcaugccccugccacagugugcggcccuaagaaaagcaccaaucucgugaagaacaaaugcgugaacuucaacuucaacggccugaccggcaccggcgugcugacagagagcaacaagaaguuccugccauuccagcaguuuggccgggauaucgccgauaccacagacgccguuagagauccccagacacuggaaauccuggacaucaccccuugcagcuucggcggagugucugugaucaccccuggcaccaacaccagcaaucagguggcagugcuguaccagggcgugaacuguaccgaagugcccguggccauucacgccgaucagcugacaccuacauggcggguguacuccaccggcagcaauguguuucagaccagagccggcugucugaucggagccgagcacgugaacaauagcuacgagugcgacauccccaucggcgcuggaaucugcgccagcuaccagacacagacaaacagcccucggagagccagaagcguggccagccagagcgugauugccuacacaaugucucugggcgccgagaacagcguggccuacuccaacaacucuaucgcuauccccaccaacuucaccaucagcgugaccacagagauccugccuguguccaugaccaagaccagcguggacugcaccauguacaucugcggcgauuccaccgagugcuccaaccugcugcugcaguacggcagcuucugcacccagcugaauagagcccugacagggaucgccguggaacaggacaagaacacccaagagguguucgcccaagugaagcagaucuacaagaccccuccuaucaaggacuucggcggcuucaauuucagccagauucugcccgauccuagcaagcccagcaagcggagcuucaucgaggaccugcuguucaacaaagugacacuggccgacgccggcuucaucaagcaguauggcgauugucugggcgacauugccgccagggaucugauuugcgcccagaaguuuaacggacugacagugcugccuccucugcugaccgaugagaugaucgcccaguacacaucugcccugcuggccggcacaaucacaagcggcuggacauuuggagcaggcgccgcucugcagauccccuuugcuaugcagauggccuaccgguucaacggcaucggagugacccagaaugugcuguacgagaaccagaagcugaucgccaaccaguucaacagcgccaucggcaagauccaggacagccugagcagcacagcaagcgcccugggaaagcugcaggacguggucaaccagaaugcccaggcacugaacacccuggucaagcagcuguccuccaacuucggcgccaucagcucugugcugaacgauauccugagcagacuggacaaggucgaggccgaggugcagaucgacagacugaucacaggcagacugcagagccuccagacauacgugacccagcagcugaucagagccgccgagauuagagccucugccaaucuggccgccaccaagaugucugagugugugcugggccagagcaagagaguggacuuuugcggcaagggcuaccaccugaugagcuucccucagucugccccucacggcgugguguuucugcacgugacauaugugcccgcucaagagaagaauuucaccaccgcuccagccaucugccacgacggcaaagcccacuuuccuagagaaggcguguucguguccaacggcacccauugguucgugacacagcggaacuucuacgagccccagaucaucaccaccgacaacaccuucgugucuggcaacugcgacgucgugaucggcauugugaacaauaccguguacgacccucugcagcccgagcuggacagcuucaaagaggaacuggacaaguacuuuaagaaccacacaagccccgacguggaccugggcgauaucagcggaaucaaugccagcgucgugaacauccagaaagagaucgaccggcugaacgagguggccaagaaucugaacgagagccugaucgaccugcaagaacuggggaaguacgagcaguacaucaaguggcccugguacaucuggcugggcuuuaucgccggacugauugccaucgugaucgucacaaucaugcuguguugcaugaccagcugcuguagcugccugaagggcuguuguagcuguggcagcugcugcaaguucgacgaggacgauucugagcccgugcugaagggcgugaaacugcacuacacaugaggacuaguuauaagacugacuagcccgaugggccucccaacgggcccuccuccccuccuugcaccgagagaucuaaaaaaaaaaaaaaaaaaaaaaaaaaaaaaaaaaaaaaaaaaaaaaaaaaaaaaaaaaaaaaaaaaaaaaaaaaaaaaaaaaaaaaaaaaaaaaaaaaaa

SEQ ID NO: 25931 - RNA, 4002 nt, Artificial Sequence
  SARS-CoV-2/Wuhan/WIV05/2019__EPI_ISL_402128 spike protein mRNA gc mod (1-1273)(H69del_V70del_Y144del_N501Y_A570D_D614G_P681H_T716I_S982 A_D1118H)
aggagaaagcuuaccauguucguguuccuggugcugcugccucugguguccagccagugugugaaccugaccaccagaacacagcugccuccagccuacaccaacagcuuuaccagaggcguguacuaccccgacaagguguucagauccagcgugcugcacucuacccaggaccuguuccugccuuucuucagcaacgugaccugguuccacgccaucuccggcaccaauggcaccaagagauucgacaaccccgugcugcccuucaacgacgggguguacuuugccagcaccgagaaguccaacaucaucagaggcuggaucuucggcaccacacuggacagcaagacccagagccugcugaucgugaacaacgccaccaacguggucaucaaagugugcgaguuccaguucugcaacgaccccuuccugggcgucuaccacaagaacaacaagagcuggauggaaagcgaguuccggguguacagcagcgccaacaacugcaccuucgaguacgugucccagccuuuccugauggaccuggaaggcaagcagggcaacuucaagaaccugcgcgaguucguguuuaagaacaucgacggcuacuucaagaucuacagcaagcacaccccuaucaaccucgugcgggaucugccucagggcuucucugcucuggaaccccugguggaucugcccaucggcaucaacaucacccgguuucagacacugcuggcccugcacagaagcuaccugacaccuggcgauagcagcagcggauggacagcuggugccgccgcuuacuaugugggcuaccugcagccuagaaccuuccugcugaaguacaacgagaacggcaccaucaccgacgccguggauugugcucuggauccucugagcgagacaaagugcacccugaaguccuucaccguggaaaagggcaucuaccagaccagcaacuuccgggugcagcccaccgaauccaucgugcgguuccccaauaucaccaaucugugccccuucggcgagguguucaaugccaccagauucgccucuguguacgccuggaaccggaagcggaucagcaauugcguggccgacuacuccgugcuguacaacuccgccagcuucagcaccuucaagugcuacggcguguccccuaccaagcugaacgaccugugcuucacaaacguguacgccgacagcuucgugauccggggagaugaagugcggcagauugccccuggacagacaggcaagaucgccgacuacaacuacaagcugcccgacgacuucaccggcugugugauugccuggaacagcaacaaccuggacuccaaagucggcggcaacuacaauuaccuguaccggcuguuccggaaguccaaucugaagcccuucgagcgggacaucuccaccgagaucuaucaggccggcagcaccccuuguaacggcguggaaggcuucaacugcuacuucccacugcaguccuacggcuuucagcccacauacggcgugggcuaucagcccuacagagugguggugcugagcuucgaacugcugcaugccccugccacagugugcggcccuaagaaaagcaccaaucucgugaagaacaaaugcgugaacuucaacuucaacggccugaccggcaccggcgugcugacagagagcaacaagaaguuccugccauuccagcaguuuggccgggauaucgacgauaccacagacgccguuagagauccccagacacuggaaauccuggacaucaccccuugcagcuucggcggagugucugugaucaccccuggcaccaacaccagcaaucagguggcagugcuguaccagggcgugaacuguaccgaagugcccguggccauucacgccgaucagcugacaccuacauggcggguguacuccaccggcagcaauguguuucagaccagagccggcugucugaucggagccgagcacgugaacaauagcuacgagugcgacauccccaucggcgcuggaaucugcgccagcuaccagacacagacaaacagccaccggagagccagaagcguggccagccagagcaucauugccuacacaaugucucugggcgccgagaacagcguggccuacuccaacaacucuaucgcuauccccaucaacuucaccaucagcgugaccacagagauccugccuguguccaugaccaagaccagcguggacugcaccauguacaucugcggcgauuccaccgagugcuccaaccugcugcugcaguacggcagcuucugcacccagcugaauagagcccugacagggaucgccguggaacaggacaagaacacccaagagguguucgcccaagugaagcagaucuacaagaccccuccuaucaaggacuucggcggcuucaauuucagccagauucugcccgauccuagcaagcccagcaagcggagcuucaucgaggaccugcuguucaacaaagugacacuggccgacgccggcuucaucaagcaguauggcgauugucugggcgacauugccgccagggaucugauuugcgcccagaaguuuaacggacugacagugcugccuccucugcugaccgaugagaugaucgcccaguacacaucugcccugcuggccggcacaaucacaagcggcuggacauuuggagcaggcgccgcucugcagauccccuuugcuaugcagauggccuaccgguucaacggcaucggagugacccagaaugugcuguacgagaaccagaagcugaucgccaaccaguucaacagcgccaucggcaagauccaggacagccugagcagcacagcaagcgcccugggaaagcugcaggacguggucaaccagaaugcccaggcacugaacacccuggucaagcagcuguccuccaacuucggcgccaucagcucugugcugaacgauauccuggccagacuggacaaggucgaggccgaggugcagaucgacagacugaucacaggcagacugcagagccuccagacauacgugacccagcagcugaucagagccgccgagauuagagccucugccaaucuggccgccaccaagaugucugagugugugcugggccagagcaagagaguggacuuuugcggcaagggcuaccaccugaugagcuucccucagucugccccucacggcgugguguuucugcacgugacauaugugcccgcucaagagaagaauuucaccaccgcuccagccaucugccacgacggcaaagcccacuuuccuagagaaggcguguucguguccaacggcacccauugguucgugacacagcggaacuucuacgagccccagaucaucaccacccacaacaccuucgugucuggcaacugcgacgucgugaucggcauugugaacaauaccguguacgacccucugcagcccgagcuggacagcuucaaagaggaacuggacaaguacuuuaagaaccacacaagccccgacguggaccugggcgauaucagcggaaucaaugccagcgucgugaacauccagaaagagaucgaccggcugaacgagguggccaagaaucugaacgagagccugaucgaccugcaagaacuggggaaguacgagcaguacaucaaguggcccugguacaucuggcugggcuuuaucgccggacugauugccaucgugauggucacaaucaugcuguguugcaugaccagcugcuguagcugccugaagggcuguuguagcuguggcagcugcugcaaguucgacgaggacgauucugagcccgugcugaagggcgugaaacugcacuacacaugaggacuaguuauaagacugacuagcccgaugggccucccaacgggcccuccuccccuccuugcaccgagagaucuaaaaaaaaaaaaaaaaaaaaaaaaaaaaaaaaaaaaaaaaaaaaaaaaaaaaaaaaaaaaaaaaaaaaaaaaaaaaaaaaaaaaaaaaaaaaaaaaaaaa

SEQ ID NO: 25932 - RNA, 4011 nt, Artificial Sequence
  SARS-CoV-2/Wuhan/WIV05/2019__EPI_ISL_402128 spike protein mRNA gc mod (1-1273)(K417N_E484K_N501Y_D614G)
aggagaaagcuuaccauguucguguuccuggugcugcugccucugguguccagccagugugugaaccugaccaccagaacacagcugccuccagccuacaccaacagcuuuaccagaggcguguacuaccccgacaagguguucagauccagcgugcugcacucuacccaggaccuguuccugccuuucuucagcaacgugaccugguuccacgccauccacguguccggcaccaauggcaccaagagauucgacaaccccgugcugcccuucaacgacgggguguacuuugccagcaccgagaaguccaacaucaucagaggcuggaucuucggcaccacacuggacagcaagacccagagccugcugaucgugaacaacgccaccaacguggucaucaaagugugcgaguuccaguucugcaacgaccccuuccugggcgucuacuaccacaagaacaacaagagcuggauggaaagcgaguuccggguguacagcagcgccaacaacugcaccuucgaguacgugucccagccuuuccugauggaccuggaaggcaagcagggcaacuucaagaaccugcgcgaguucguguuuaagaacaucgacggcuacuucaagaucuacagcaagcacaccccuaucaaccucgugcgggaucugccucagggcuucucugcucuggaaccccugguggaucugcccaucggcaucaacaucacccgguuucagacacugcuggcccugcacagaagcuaccugacaccuggcgauagcagcagcggauggacagcuggugccgccgcuuacuaugugggcuaccugcagccuagaaccuuccugcugaaguacaacgagaacggcaccaucaccgacgccguggauugugcucuggauccucugagcgagacaaagugcacccugaaguccuucaccguggaaaagggcaucuaccagaccagcaacuuccgggugcagcccaccgaauccaucgugcgguuccccaauaucaccaaucugugccccuucggcgagguguucaaugccaccagauucgccucuguguacgccuggaaccggaagcggaucagcaauugcguggccgacuacuccgugcuguacaacuccgccagcuucagcaccuucaagugcuacggcguguccccuaccaagcugaacgaccugugcuucacaaacguguacgccgacagcuucgugauccggggagaugaagugcggcagauugccccuggacagacaggcaacaucgccgacuacaacuacaagcugcccgacgacuucaccggcugugugauugccuggaacagcaacaaccuggacuccaaagucggcggcaacuacaauuaccuguaccggcuguuccggaaguccaaucugaagcccuucgagcgggacaucuccaccgagaucuaucaggccggcagcaccccuuguaacggcgugaagggcuucaacugcuacuucccacugcaguccuacggcuuucagcccacauacggcgugggcuaucagcccuacagagugguggugcugagcuucgaacugcugcaugccccugccacagugugcggcccuaagaaaagcaccaaucucgugaagaacaaaugcgugaacuucaacuucaacggccugaccggcaccggcgugcugacagagagcaacaagaaguuccugccauuccagcaguuuggccgggauaucgccgauaccacagacgccguuagagauccccagacacuggaaauccuggacaucaccccuugcagcuucggcggagugucugugaucaccccuggcaccaacaccagcaaucagguggcagugcuguaccagggcgugaacuguaccgaagugcccguggccauucacgccgaucagcugacaccuacauggcggguguacuccaccggcagcaauguguuucagaccagagccggcugucugaucggagccgagcacgugaacaauagcuacgagugcgacauccccaucggcgcuggaaucugcgccagcuaccagacacagacaaacagcccucggagagccagaagcguggccagccagagcaucauugccuacacaaugucucugggcgccgagaacagcguggccuacuccaacaacucuaucgcuauccccaccaacuucaccaucagcgugaccacagagauccugccuguguccaugaccaagaccagcguggacugcaccauguacaucugcggcgauuccaccgagugcuccaaccugcugcugcaguacggcagcuucugcacccagcugaauagagcccugacagggaucgccguggaacaggacaagaacacccaagagguguucgcccaagugaagcagaucuacaagaccccuccuaucaaggacuucggcggcuucaauuucagccagauucugcccgauccuagcaagcccagcaagcggagcuucaucgaggaccugcuguucaacaaagugacacuggccgacgccggcuucaucaagcaguauggcgauugucugggcgacauugccgccagggaucugauuugcgcccagaaguuuaacggacugacagugcugccuccucugcugaccgaugagaugaucgcccaguacacaucugcccugcuggccggcacaaucacaagcggcuggacauuuggagcaggcgccgcucugcagauccccuuugcuaugcagauggccuaccgguucaacggcaucggagugacccagaaugugcuguacgagaaccagaagcugaucgccaaccaguucaacagcgccaucggcaagauccaggacagccugagcagcacagcaagcgcccugggaaagcugcaggacguggucaaccagaaugcccaggcacugaacacccuggucaagcagcuguccuccaacuucggcgccaucagcucugugcugaacgauauccugagcagacuggacaaggucgaggccgaggugcagaucgacagacugaucacaggcagacugcagagccuccagacauacgugacccagcagcugaucagagccgccgagauuagagccucugccaaucuggccgccaccaagaugucugagugugugcugggccagagcaagagaguggacuuuugcggcaagggcuaccaccugaugagcuucccucagucugccccucacggcgugguguuucugcacgugacauaugugcccgcucaagagaagaauuucaccaccgcuccagccaucugccacgacggcaaagcccacuuuccuagagaaggcguguucguguccaacggcacccauugguucgugacacagcggaacuucuacgagccccagaucaucaccaccgacaacaccuucgugucuggcaacugcgacgucgugaucggcauugugaacaauaccguguacgacccucugcagcccgagcuggacagcuucaaagaggaacuggacaaguacuuuaagaaccacacaagccccgacguggaccugggcgauaucagcggaaucaaugccagcgucgugaacauccagaaagagaucgaccggcugaacgagguggccaagaaucugaacgagagccugaucgaccugcaagaacuggggaaguacgagcaguacaucaaguggcccugguacaucuggcugggcuuuaucgccggacugauugccaucgugauggucacaaucaugcuguguugcaugaccagcugcuguagcugccugaagggcuguuguagcuguggcagcugcugcaaguucgacgaggacgauucugagcccgugcugaagggcgugaaacugcacuacacaugaggacuaguuauaagacugacuagcccgaugggccucccaacgggcccuccuccccuccuugcaccgagagaucuaaaaaaaaaaaaaaaaaaaaaaaaaaaaaaaaaaaaaaaaaaaaaaaaaaaaaaaaaaaaaaaaaaaaaaaaaaaaaaaaaaaaaaaaaaaaaaaaaaaa

SEQ ID NO: 25933 - RNA, 4002 nt, Artificial Sequence
  SARS-CoV-2/Wuhan/WIV05/2019__EPI_ISL_402128 spike protein mRNA gc mod (1-1273)(L18F_D80A_D215G_L242del_A243del_L244del_R246I_K417N_E484 K_N501Y_D614G_A701V)
aggagaaagcuuaccauguucguguuccuggugcugcugccucugguguccagccagugugugaacuucaccaccagaacacagcugccuccagccuacaccaacagcuuuaccagaggcguguacuaccccgacaagguguucagauccagcgugcugcacucuacccaggaccuguuccugccuuucuucagcaacgugaccugguuccacgccauccacguguccggcaccaauggcaccaagagauucgccaaccccgugcugcccuucaacgacgggguguacuuugccagcaccgagaaguccaacaucaucagaggcuggaucuucggcaccacacuggacagcaagacccagagccugcugaucgugaacaacgccaccaacguggucaucaaagugugcgaguuccaguucugcaacgaccccuuccugggcgucuacuaccacaagaacaacaagagcuggauggaaagcgaguuccggguguacagcagcgccaacaacugcaccuucgaguacgugucccagccuuuccugauggaccuggaaggcaagcagggcaacuucaagaaccugcgcgaguucguguuuaagaacaucgacggcuacuucaagaucuacagcaagcacaccccuaucaaccucgugcggggccugccucagggcuucucugcucuggaaccccugguggaucugcccaucggcaucaacaucacccgguuucagacacugcacaucagcuaccugacaccuggcgauagcagcagcggauggacagcuggugccgccgcuuacuaugugggcuaccugcagccuagaaccuuccugcugaaguacaacgagaacggcaccaucaccgacgccguggauugugcucuggauccucugagcgagacaaagugcacccugaaguccuucaccguggaaaagggcaucuaccagaccagcaacuuccgggugcagcccaccgaauccaucgugcgguuccccaauaucaccaaucugugccccuucggcgagguguucaaugccaccagauucgccucuguguacgccuggaaccggaagcggaucagcaauugcguggccgacuacuccgugcuguacaacuccgccagcuucagcaccuucaagugcuacggcguguccccuaccaagcugaacgaccugugcuucacaaacguguacgccgacagcuucgugauccggggagaugaagugcggcagauugccccuggacagacaggcaacaucgccgacuacaacuacaagcugcccgacgacuucaccggcugugugauugccuggaacagcaacaaccuggacuccaaagucggcggcaacuacaauuaccuguaccggcuguuccggaaguccaaucugaagcccuucgagcgggacaucuccaccgagaucuaucaggccggcagcaccccuuguaacggcgugaagggcuucaacugcuacuucccacugcaguccuacggcuuucagcccacauacggcgugggcuaucagcccuacagagugguggugcugagcuucgaacugcugcaugccccugccacagugugcggcccuaagaaaagcaccaaucucgugaagaacaaaugcgugaacuucaacuucaacggccugaccggcaccggcgugcugacagagagcaacaagaaguuccugccauuccagcaguuuggccgggauaucgccgauaccacagacgccguuagagauccccagacacuggaaauccuggacaucaccccuugcagcuucggcggagugucugugaucaccccuggcaccaacaccagcaaucagguggcagugcuguaccagggcgugaacuguaccgaagugcccguggccauucacgccgaucagcugacaccuacauggcggguguacuccaccggcagcaauguguuucagaccagagccggcugucugaucggagccgagcacgugaacaauagcuacgagugcgacauccccaucggcgcuggaaucugcgccagcuaccagacacagacaaacagcccucggagagccagaagcguggccagccagagcaucauugccuacacaaugucucugggcguggagaacagcguggccuacuccaacaacucuaucgcuauccccaccaacuucaccaucagcgugaccacagagauccugccuguguccaugaccaagaccagcguggacugcaccauguacaucugcggcgauuccaccgagugcuccaaccugcugcugcaguacggcagcuucugcacccagcugaauagagcccugacagggaucgccguggaacaggacaagaacacccaagagguguucgcccaagugaagcagaucuacaagaccccuccuaucaaggacuucggcggcuucaauuucagccagauucugcccgauccuagcaagcccagcaagcggagcuucaucgaggaccugcuguucaacaaagugacacuggccgacgccggcuucaucaagcaguauggcgauugucugggcgacauugccgccagggaucugauuugcgcccagaaguuuaacggacugacagugcugccuccucugcugaccgaugagaugaucgcccaguacacaucugcccugcuggccggcacaaucacaagcggcuggacauuuggagcaggcgccgcucugcagauccccuuugcuaugcagauggccuaccgguucaacggcaucggagugacccagaaugugcuguacgagaaccagaagcugaucgccaaccaguucaacagcgccaucggcaagauccaggacagccugagcagcacagcaagcgcccugggaaagcugcaggacguggucaaccagaaugcccaggcacugaacacccuggucaagcagcuguccuccaacuucggcgccaucagcucugugcugaacgauauccugagcagacuggacaaggucgaggccgaggugcagaucgacagacugaucacaggcagacugcagagccuccagacauacgugacccagcagcugaucagagccgccgagauuagagccucugccaaucuggccgccaccaagaugucugagugugugcugggccagagcaagagaguggacuuuugcggcaagggcuaccaccugaugagcuucccucagucugccccucacggcgugguguuucugcacgugacauaugugcccgcucaagagaagaauuucaccaccgcuccagccaucugccacgacggcaaagcccacuuuccuagagaaggcguguucguguccaacggcacccauugguucgugacacagcggaacuucuacgagccccagaucaucaccaccgacaacaccuucgugucuggcaacugcgacgucgugaucggcauugugaacaauaccguguacgacccucugcagcccgagcuggacagcuucaaagaggaacuggacaaguacuuuaagaaccacacaagccccgacguggaccugggcgauaucagcggaaucaaugccagcgucgugaacauccagaaagagaucgaccggcugaacgagguggccaagaaucugaacgagagccugaucgaccugcaagaacuggggaaguacgagcaguacaucaaguggcccugguacaucuggcugggcuuuaucgccggacugauugccaucgugauggucacaaucaugcuguguugcaugaccagcugcuguagcugccugaagggcuguuguagcuguggcagcugcugcaaguucgacgaggacgauucugagcccgugcugaagggcgugaaacugcacuacacaugaggacuaguuauaagacugacuagcccgaugggccucccaacgggcccuccuccccuccuugcaccgagagaucuaaaaaaaaaaaaaaaaaaaaaaaaaaaaaaaaaaaaaaaaaaaaaaaaaaaaaaaaaaaaaaaaaaaaaaaaaaaaaaaaaaaaaaaaaaaaaaaaaaaa

SEQ ID NO: 25934 - RNA, 4011 nt, Artificial Sequence
  SARS-CoV-2/Wuhan/WIV05/2019__EPI_ISL_402128 spike protein mRNA gc mod (1-1273)(E484K_D614G)
aggagaaagcuuaccauguucguguuccuggugcugcugccucugguguccagccagugugugaaccugaccaccagaacacagcugccuccagccuacaccaacagcuuuaccagaggcguguacuaccccgacaagguguucagauccagcgugcugcacucuacccaggaccuguuccugccuuucuucagcaacgugaccugguuccacgccauccacguguccggcaccaauggcaccaagagauucgacaaccccgugcugcccuucaacgacgggguguacuuugccagcaccgagaaguccaacaucaucagaggcuggaucuucggcaccacacuggacagcaagacccagagccugcugaucgugaacaacgccaccaacguggucaucaaagugugcgaguuccaguucugcaacgaccccuuccugggcgucuacuaccacaagaacaacaagagcuggauggaaagcgaguuccggguguacagcagcgccaacaacugcaccuucgaguacgugucccagccuuuccugauggaccuggaaggcaagcagggcaacuucaagaaccugcgcgaguucguguuuaagaacaucgacggcuacuucaagaucuacagcaagcacaccccuaucaaccucgugcgggaucugccucagggcuucucugcucuggaaccccugguggaucugcccaucggcaucaacaucacccgguuucagacacugcuggcccugcacagaagcuaccugacaccuggcgauagcagcagcggauggacagcuggugccgccgcuuacuaugugggcuaccugcagccuagaaccuuccugcugaaguacaacgagaacggcaccaucaccgacgccguggauugugcucuggauccucugagcgagacaaagugcacccugaaguccuucaccguggaaaagggcaucuaccagaccagcaacuuccgggugcagcccaccgaauccaucgugcgguuccccaauaucaccaaucugugccccuucggcgagguguucaaugccaccagauucgccucuguguacgccuggaaccggaagcggaucagcaauugcguggccgacuacuccgugcuguacaacuccgccagcuucagcaccuucaagugcuacggcguguccccuaccaagcugaacgaccugugcuucacaaacguguacgccgacagcuucgugauccggggagaugaagugcggcagauugccccuggacagacaggcaagaucgccgacuacaacuacaagcugcccgacgacuucaccggcugugugauugccuggaacagcaacaaccuggacuccaaagucggcggcaacuacaauuaccuguaccggcuguuccggaaguccaaucugaagcccuucgagcgggacaucuccaccgagaucuaucaggccggcagcaccccuuguaacggcgugaagggcuucaacugcuacuucccacugcaguccuacggcuuucagcccacaaauggcgugggcuaucagcccuacagagugguggugcugagcuucgaacugcugcaugccccugccacagugugcggcccuaagaaaagcaccaaucucgugaagaacaaaugcgugaacuucaacuucaacggccugaccggcaccggcgugcugacagagagcaacaagaaguuccugccauuccagcaguuuggccgggauaucgccgauaccacagacgccguuagagauccccagacacuggaaauccuggacaucaccccuugcagcuucggcggagugucugugaucaccccuggcaccaacaccagcaaucagguggcagugcuguaccagggcgugaacuguaccgaagugcccguggccauucacgccgaucagcugacaccuacauggcggguguacuccaccggcagcaauguguuucagaccagagccggcugucugaucggagccgagcacgugaacaauagcuacgagugcgacauccccaucggcgcuggaaucugcgccagcuaccagacacagacaaacagcccucggagagccagaagcguggccagccagagcaucauugccuacacaaugucucugggcgccgagaacagcguggccuacuccaacaacucuaucgcuauccccaccaacuucaccaucagcgugaccacagagauccugccuguguccaugaccaagaccagcguggacugcaccauguacaucugcggcgauuccaccgagugcuccaaccugcugcugcaguacggcagcuucugcacccagcugaauagagcccugacagggaucgccguggaacaggacaagaacacccaagagguguucgcccaagugaagcagaucuacaagaccccuccuaucaaggacuucggcggcuucaauuucagccagauucugcccgauccuagcaagcccagcaagcggagcuucaucgaggaccugcuguucaacaaagugacacuggccgacgccggcuucaucaagcaguauggcgauugucugggcgacauugccgccagggaucugauuugcgcccagaaguuuaacggacugacagugcugccuccucugcugaccgaugagaugaucgcccaguacacaucugcccugcuggccggcacaaucacaagcggcuggacauuuggagcaggcgccgcucugcagauccccuuugcuaugcagauggccuaccgguucaacggcaucggagugacccagaaugugcuguacgagaaccagaagcugaucgccaaccaguucaacagcgccaucggcaagauccaggacagccugagcagcacagcaagcgcccugggaaagcugcaggacguggucaaccagaaugcccaggcacugaacacccuggucaagcagcuguccuccaacuucggcgccaucagcucugugcugaacgauauccugagcagacuggacaaggucgaggccgaggugcagaucgacagacugaucacaggcagacugcagagccuccagacauacgugacccagcagcugaucagagccgccgagauuagagccucugccaaucuggccgccaccaagaugucugagugugugcugggccagagcaagagaguggacuuuugcggcaagggcuaccaccugaugagcuucccucagucugccccucacggcgugguguuucugcacgugacauaugugcccgcucaagagaagaauuucaccaccgcuccagccaucugccacgacggcaaagcccacuuuccuagagaaggcguguucguguccaacggcacccauugguucgugacacagcggaacuucuacgagccccagaucaucaccaccgacaacaccuucgugucuggcaacugcgacgucgugaucggcauugugaacaauaccguguacgacccucugcagcccgagcuggacagcuucaaagaggaacuggacaaguacuuuaagaaccacacaagccccgacguggaccugggcgauaucagcggaaucaaugccagcgucgugaacauccagaaagagaucgaccggcugaacgagguggccaagaaucugaacgagagccugaucgaccugcaagaacuggggaaguacgagcaguacaucaaguggcccugguacaucuggcugggcuuuaucgccggacugauugccaucgugauggucacaaucaugcuguguugcaugaccagcugcuguagcugccugaagggcuguuguagcuguggcagcugcugcaaguucgacgaggacgauucugagcccgugcugaagggcgugaaacugcacuacacaugaggacuaguuauaagacugacuagcccgaugggccucccaacgggcccuccuccccuccuugcaccgagagaucuaaaaaaaaaaaaaaaaaaaaaaaaaaaaaaaaaaaaaaaaaaaaaaaaaaaaaaaaaaaaaaaaaaaaaaaaaaaaaaaaaaaaaaaaaaaaaaaaaaaa

SEQ ID NO: 25935 - RNA, 4011 nt, Artificial Sequence
  SARS-CoV-2/Wuhan/WIV05/2019__EPI_ISL_402128 spike protein mRNA gc mod (1-1273)(L18F_T20N_P26S_D138Y_R190S_K417T_E484K_N501Y_D614G_H655Y _T1027I)
aggagaaagcuuaccauguucguguuccuggugcugcugccucugguguccagccagugugugaacuucaccaacagaacacagcugccuagcgccuacaccaacagcuuuaccagaggcguguacuaccccgacaagguguucagauccagcgugcugcacucuacccaggaccuguuccugccuuucuucagcaacgugaccugguuccacgccauccacguguccggcaccaauggcaccaagagauucgacaaccccgugcugcccuucaacgacgggguguacuuugccagcaccgagaaguccaacaucaucagaggcuggaucuucggcaccacacuggacagcaagacccagagccugcugaucgugaacaacgccaccaacguggucaucaaagugugcgaguuccaguucugcaacuaccccuuccugggcgucuacuaccacaagaacaacaagagcuggauggaaagcgaguuccggguguacagcagcgccaacaacugcaccuucgaguacgugucccagccuuuccugauggaccuggaaggcaagcagggcaacuucaagaaccugagcgaguucguguuuaagaacaucgacggcuacuucaagaucuacagcaagcacaccccuaucaaccucgugcgggaucugccucagggcuucucugcucuggaaccccugguggaucugcccaucggcaucaacaucacccgguuucagacacugcuggcccugcacagaagcuaccugacaccuggcgauagcagcagcggauggacagcuggugccgccgcuuacuaugugggcuaccugcagccuagaaccuuccugcugaaguacaacgagaacggcaccaucaccgacgccguggauugugcucuggauccucugagcgagacaaagugcacccugaaguccuucaccguggaaaagggcaucuaccagaccagcaacuuccgggugcagcccaccgaauccaucgugcgguuccccaauaucaccaaucugugccccuucggcgagguguucaaugccaccagauucgccucuguguacgccuggaaccggaagcggaucagcaauugcguggccgacuacuccgugcuguacaacuccgccagcuucagcaccuucaagugcuacggcguguccccuaccaagcugaacgaccugugcuucacaaacguguacgccgacagcuucgugauccggggagaugaagugcggcagauugccccuggacagacaggcaccaucgccgacuacaacuacaagcugcccgacgacuucaccggcugugugauugccuggaacagcaacaaccuggacuccaaagucggcggcaacuacaauuaccuguaccggcuguuccggaaguccaaucugaagcccuucgagcgggacaucuccaccgagaucuaucaggccggcagcaccccuuguaacggcgugaagggcuucaacugcuacuucccacugcaguccuacggcuuucagcccacauacggcgugggcuaucagcccuacagagugguggugcugagcuucgaacugcugcaugccccugccacagugugcggcccuaagaaaagcaccaaucucgugaagaacaaaugcgugaacuucaacuucaacggccugaccggcaccggcgugcugacagagagcaacaagaaguuccugccauuccagcaguuuggccgggauaucgccgauaccacagacgccguuagagauccccagacacuggaaauccuggacaucaccccuugcagcuucggcggagugucugugaucaccccuggcaccaacaccagcaaucagguggcagugcuguaccagggcgugaacuguaccgaagugcccguggccauucacgccgaucagcugacaccuacauggcggguguacuccaccggcagcaauguguuucagaccagagccggcugucugaucggagccgaguacgugaacaauagcuacgagugcgacauccccaucggcgcuggaaucugcgccagcuaccagacacagacaaacagcccucggagagccagaagcguggccagccagagcaucauugccuacacaaugucucugggcgccgagaacagcguggccuacuccaacaacucuaucgcuauccccaccaacuucaccaucagcgugaccacagagauccugccuguguccaugaccaagaccagcguggacugcaccauguacaucugcggcgauuccaccgagugcuccaaccugcugcugcaguacggcagcuucugcacccagcugaauagagcccugacagggaucgccguggaacaggacaagaacacccaagagguguucgcccaagugaagcagaucuacaagaccccuccuaucaaggacuucggcggcuucaauuucagccagauucugcccgauccuagcaagcccagcaagcggagcuucaucgaggaccugcuguucaacaaagugacacuggccgacgccggcuucaucaagcaguauggcgauugucugggcgacauugccgccagggaucugauuugcgcccagaaguuuaacggacugacagugcugccuccucugcugaccgaugagaugaucgcccaguacacaucugcccugcuggccggcacaaucacaagcggcuggacauuuggagcaggcgccgcucugcagauccccuuugcuaugcagauggccuaccgguucaacggcaucggagugacccagaaugugcuguacgagaaccagaagcugaucgccaaccaguucaacagcgccaucggcaagauccaggacagccugagcagcacagcaagcgcccugggaaagcugcaggacguggucaaccagaaugcccaggcacugaacacccuggucaagcagcuguccuccaacuucggcgccaucagcucugugcugaacgauauccugagcagacuggacaaggucgaggccgaggugcagaucgacagacugaucacaggcagacugcagagccuccagacauacgugacccagcagcugaucagagccgccgagauuagagccucugccaaucuggccgccaucaagaugucugagugugugcugggccagagcaagagaguggacuuuugcggcaagggcuaccaccugaugagcuucccucagucugccccucacggcgugguguuucugcacgugacauaugugcccgcucaagagaagaauuucaccaccgcuccagccaucugccacgacggcaaagcccacuuuccuagagaaggcguguucguguccaacggcacccauugguucgugacacagcggaacuucuacgagccccagaucaucaccaccgacaacaccuucgugucuggcaacugcgacgucgugaucggcauugugaacaauaccguguacgacccucugcagcccgagcuggacagcuucaaagaggaacuggacaaguacuuuaagaaccacacaagccccgacguggaccugggcgauaucagcggaaucaaugccagcgucgugaacauccagaaagagaucgaccggcugaacgagguggccaagaaucugaacgagagccugaucgaccugcaagaacuggggaaguacgagcaguacaucaaguggcccugguacaucuggcugggcuuuaucgccggacugauugccaucgugauggucacaaucaugcuguguugcaugaccagcugcuguagcugccugaagggcuguuguagcuguggcagcugcugcaaguucgacgaggacgauucugagcccgugcugaagggcgugaaacugcacuacacaugaggacuaguuauaagacugacuagcccgaugggccucccaacgggcccuccuccccuccuugcaccgagagaucuaaaaaaaaaaaaaaaaaaaaaaaaaaaaaaaaaaaaaaaaaaaaaaaaaaaaaaaaaaaaaaaaaaaaaaaaaaaaaaaaaaaaaaaaaaaaaaaaaaaa

SEQ ID NO: 25936 - RNA, 4011 nt, Artificial Sequence
  SARS-CoV-2/Wuhan/WIV05/2019__EPI_ISL_402128 spike protein mRNA gc mod (1-1273)(S13I_W152C_L452R_D614G)
aggagaaagcuuaccauguucguguuccuggugcugcugccucugguguccauccagugugugaaccugaccaccagaacacagcugccuccagccuacaccaacagcuuuaccagaggcguguacuaccccgacaagguguucagauccagcgugcugcacucuacccaggaccuguuccugccuuucuucagcaacgugaccugguuccacgccauccacguguccggcaccaauggcaccaagagauucgacaaccccgugcugcccuucaacgacgggguguacuuugccagcaccgagaaguccaacaucaucagaggcuggaucuucggcaccacacuggacagcaagacccagagccugcugaucgugaacaacgccaccaacguggucaucaaagugugcgaguuccaguucugcaacgaccccuuccugggcgucuacuaccacaagaacaacaagagcugcauggaaagcgaguuccggguguacagcagcgccaacaacugcaccuucgaguacgugucccagccuuuccugauggaccuggaaggcaagcagggcaacuucaagaaccugcgcgaguucguguuuaagaacaucgacggcuacuucaagaucuacagcaagcacaccccuaucaaccucgugcgggaucugccucagggcuucucugcucuggaaccccugguggaucugcccaucggcaucaacaucacccgguuucagacacugcuggcccugcacagaagcuaccugacaccuggcgauagcagcagcggauggacagcuggugccgccgcuuacuaugugggcuaccugcagccuagaaccuuccugcugaaguacaacgagaacggcaccaucaccgacgccguggauugugcucuggauccucugagcgagacaaagugcacccugaaguccuucaccguggaaaagggcaucuaccagaccagcaacuuccgggugcagcccaccgaauccaucgugcgguuccccaauaucaccaaucugugccccuucggcgagguguucaaugccaccagauucgccucuguguacgccuggaaccggaagcggaucagcaauugcguggccgacuacuccgugcuguacaacuccgccagcuucagcaccuucaagugcuacggcguguccccuaccaagcugaacgaccugugcuucacaaacguguacgccgacagcuucgugauccggggagaugaagugcggcagauugccccuggacagacaggcaagaucgccgacuacaacuacaagcugcccgacgacuucaccggcugugugauugccuggaacagcaacaaccuggacuccaaagucggcggcaacuacaauuaccgcuaccggcuguuccggaaguccaaucugaagcccuucgagcgggacaucuccaccgagaucuaucaggccggcagcaccccuuguaacggcguggaaggcuucaacugcuacuucccacugcaguccuacggcuuucagcccacaaauggcgugggcuaucagcccuacagagugguggugcugagcuucgaacugcugcaugccccugccacagugugcggcccuaagaaaagcaccaaucucgugaagaacaaaugcgugaacuucaacuucaacggccugaccggcaccggcgugcugacagagagcaacaagaaguuccugccauuccagcaguuuggccgggauaucgccgauaccacagacgccguuagagauccccagacacuggaaauccuggacaucaccccuugcagcuucggcggagugucugugaucaccccuggcaccaacaccagcaaucagguggcagugcuguaccagggcgugaacuguaccgaagugcccguggccauucacgccgaucagcugacaccuacauggcggguguacuccaccggcagcaauguguuucagaccagagccggcugucugaucggagccgagcacgugaacaauagcuacgagugcgacauccccaucggcgcuggaaucugcgccagcuaccagacacagacaaacagcccucggagagccagaagcguggccagccagagcaucauugccuacacaaugucucugggcgccgagaacagcguggccuacuccaacaacucuaucgcuauccccaccaacuucaccaucagcgugaccacagagauccugccuguguccaugaccaagaccagcguggacugcaccauguacaucugcggcgauuccaccgagugcuccaaccugcugcugcaguacggcagcuucugcacccagcugaauagagcccugacagggaucgccguggaacaggacaagaacacccaagagguguucgcccaagugaagcagaucuacaagaccccuccuaucaaggacuucggcggcuucaauuucagccagauucugcccgauccuagcaagcccagcaagcggagcuucaucgaggaccugcuguucaacaaagugacacuggccgacgccggcuucaucaagcaguauggcgauugucugggcgacauugccgccagggaucugauuugcgcccagaaguuuaacggacugacagugcugccuccucugcugaccgaugagaugaucgcccaguacacaucugcccugcuggccggcacaaucacaagcggcuggacauuuggagcaggcgccgcucugcagauccccuuugcuaugcagauggccuaccgguucaacggcaucggagugacccagaaugugcuguacgagaaccagaagcugaucgccaaccaguucaacagcgccaucggcaagauccaggacagccugagcagcacagcaagcgcccugggaaagcugcaggacguggucaaccagaaugcccaggcacugaacacccuggucaagcagcuguccuccaacuucggcgccaucagcucugugcugaacgauauccugagcagacuggacaaggucgaggccgaggugcagaucgacagacugaucacaggcagacugcagagccuccagacauacgugacccagcagcugaucagagccgccgagauuagagccucugccaaucuggccgccaccaagaugucugagugugugcugggccagagcaagagaguggacuuuugcggcaagggcuaccaccugaugagcuucccucagucugccccucacggcgugguguuucugcacgugacauaugugcccgcucaagagaagaauuucaccaccgcuccagccaucugccacgacggcaaagcccacuuuccuagagaaggcguguucguguccaacggcacccauugguucgugacacagcggaacuucuacgagccccagaucaucaccaccgacaacaccuucgugucuggcaacugcgacgucgugaucggcauugugaacaauaccguguacgacccucugcagcccgagcuggacagcuucaaagaggaacuggacaaguacuuuaagaaccacacaagccccgacguggaccugggcgauaucagcggaaucaaugccagcgucgugaacauccagaaagagaucgaccggcugaacgagguggccaagaaucugaacgagagccugaucgaccugcaagaacuggggaaguacgagcaguacaucaaguggcccugguacaucuggcugggcuuuaucgccggacugauugccaucgugauggucacaaucaugcuguguugcaugaccagcugcuguagcugccugaagggcuguuguagcuguggcagcugcugcaaguucgacgaggacgauucugagcccgugcugaagggcgugaaacugcacuacacaugaggacuaguuauaagacugacuagcccgaugggccucccaacgggcccuccuccccuccuugcaccgagagaucuaaaaaaaaaaaaaaaaaaaaaaaaaaaaaaaaaaaaaaaaaaaaaaaaaaaaaaaaaaaaaaaaaaaaaaaaaaaaaaaaaaaaaaaaaaaaaaaaaaaa

SEQ ID NO: 25937 - RNA, 4011 nt, Artificial Sequence
  SARS-CoV-2/Wuhan/WIV05/2019__EPI_ISL_402128 spike protein mRNA gc (1-1273)(K986P_V987P)
aggagaaagcuuaccauguucguguuccugguccuccugccccuggugagcucccagugcgugaaccucaccacccgcacgcagcugccgcccgccuacaccaacagcuucacccggggcgucuacuaccccgacaagguguuccgcuccagcgugcugcacuccacccaggaccucuuccugcccuucuucagcaacgucacgugguuccacgccauccacguguccgggaccaacggcaccaagcgguucgacaacccggugcugcccuucaacgacggggucuacuucgcgagcaccgagaaguccaacaucauccgcggcuggaucuucgggacgacccucgacagcaagacccagucccugcugaucgugaacaacgccaccaacguggucaucaaggugugcgaguuccaguucugcaacgaccccuuccucggcguguacuaccacaagaacaacaagagcuggauggaguccgaguuccgggucuacagcuccgccaacaacugcacguucgaguacgugagccagcccuuccugauggaccuggagggcaagcaggggaacuucaagaaccuccgcgaguucguguucaagaacaucgacggcuacuucaagaucuacuccaagcacaccccgaucaaccugguccgggaccugccccagggguucagcgcccucgagccccugguggaccugcccaucggcaucaacaucacccgcuuccagacccuccuggcccugcaccgguccuaccucacgccgggggacagcagcuccggcuggaccgcgggcgccgccgccuacuacgugggguaccugcagccccgcaccuuccugcucaaguacaacgagaacggcaccaucacggacgcggucgacugcgcccuggacccccugagcgagaccaagugcacccucaaguccuucaccguggagaaggggaucuaccagacgagcaacuuccgggugcagcccaccgaguccaucguccgcuucccgaacaucaccaaccugugccccuucggcgagguguucaacgccacccgguucgccagcgucuacgccuggaaccgcaagcggaucuccaacugcguggcggacuacagcgugcuguacaacuccgccagcuucuccacguucaagugcuacggcgucagccccaccaagcucaacgaccugugcuucaccaacguguacgccgacuccuucgugauccgcggggacgagguccggcagaucgcccccggccagaccgggaagaucgccgacuacaacuacaagcugccggacgacuucacgggcugcgugaucgcguggaacagcaacaaccucgacuccaaggucgggggcaacuacaacuaccuguaccgccuguuccgcaagagcaaccucaagcccuucgagcgggacaucuccaccgagaucuaccaggccggcagcacccccugcaacgggguggagggcuucaacugcuacuucccccugcaguccuacggguuccagccgaccaacggcgugggguaccagcccuaccggguggucgugcugagcuucgagcuccugcacgcccccgccacggugugcggccccaagaaguccaccaaccuggucaagaacaagugcgugaacuucaacuucaacggccucaccgggaccggcgugcugaccgagagcaacaagaaguuccugccguuccagcaguucgggcgcgacaucgccgacacgaccgacgcgguccgcgacccccagacccuggagauccucgacaucacccccugcagcuucggcgggguguccgugaucacgccgggcaccaacaccagcaaccaggucgccgugcuguaccaggacgugaacugcaccgagguccccguggccauccacgccgaccagcugacgcccaccuggcggguguacuccaccggcagcaacgucuuccagacccgcgccgggugccucaucggcgcggagcacgugaacaacuccuacgagugcgacauccccaucggggccggcaucugcgccagcuaccagacgcagaccaacuccccgcggcgcgcccggagcguggcgucccagagcaucaucgccuacaccaugucccugggcgccgagaacagcgucgccuacuccaacaacagcaucgccauccccaccaacuucacgaucuccgugaccaccgagauccugcccgugagcaugaccaagacgagcgucgacugcaccauguacaucugcggggacuccaccgagugcagcaaccuccugcugcaguacggcuccuucugcacccagcucaaccgcgcgcugacggggaucgccguggagcaggacaagaacacccaggagguguucgcccaggucaagcagaucuacaagacgcccccgaucaaggacuucggcggguucaacuucagccagauccugcccgaccccuccaagcccagcaagcgguccuucaucgaggaccuccuguucaacaaggugacccuggccgacgccggcuucaucaagcaguacggcgacugccucggggacaucgcggcccgcgaccugaucugcgcccagaaguucaacggccugaccgugcucccgccccugcugaccgacgagaugaucgcccaguacaccagcgcccuccuggcggggaccaucacguccggcuggaccuucggggccggcgccgcccugcagauccccuucgcgaugcagauggccuaccgguucaacggcaucggggucacccagaacgugcucuacgagaaccagaagcugaucgccaaccaguucaacagcgccaucggcaagauccaggacucccugagcuccaccgccagcgcgcucgggaagcugcaggacguggucaaccagaacgcccaggcccugaacacgcucgugaagcagcuguccagcaacuucggcgccaucuccagcgugcugaacgacauccucucccgccuggacccgcccgaggccgaggugcagaucgaccggcugaucaccgggcgccuccagagccugcagaccuacgugacccagcagcugauccgggcggccgagauccgcgccagcgccaaccucgccgcgaccaagauguccgagugcguccugggccagagcaagcggguggacuucugcggcaagggguaccaccugauguccuucccccagagcgccccgcacggcguggucuuccuccacgugacguacguccccgcccaggagaagaacuucaccaccgcccccgcgaucugccacgacgggaaggcccacuucccccgcgagggcguguucguguccaacgggacccacugguucgucacgcagcggaacuucuacgagccgcagaucaucaccaccgacaacaccuucgugagcggcaacugcgacguggucaucggcaucgugaacaacacgguguacgacccccugcagcccgagcuggacuccuucaaggaggagcucgacaaguacuucaagaaccacaccagccccgacgucgaccugggggacaucuccggcaucaacgccagcguggugaacauccagaaggagaucgaccgccugaacgaggucgccaagaaccucaacgagucccugaucgaccugcaggagcucgggaaguacgagcaguacaucaaguggccgugguacaucuggcugggcuucaucgccggccugaucgcgaucgugauggugaccaucaugcucugcugcaugaccagcugcugcuccugccugaaggggugcugcagcugcggcuccugcugcaaguucgacgaggacgacagcgagcccguccugaagggggugaagcuccacuacacgugaggacuaguuauaagacugacuagcccgaugggccucccaacgggcccuccuccccuccuugcaccgagagaucuaaaaaaaaaaaaaaaaaaaaaaaaaaaaaaaaaaaaaaaaaaaaaaaaaaaaaaaaaaaaaaaaaaaaaaaaaaaaaaaaaaaaaaaaaaaaaaaaaaaa

SEQ ID NO: 25938 - RNA, 4011 nt, Artificial Sequence
  SARS-CoV-2/Wuhan/WIV05/2019__EPI_ISL_402128 spike protein mRNA gc (1-1273)(K986P_V987P_ D614G)
aggagaaagcuuaccauguucguguuccugguccuccugccccuggugagcucccagugcgugaaccucaccacccgcacgcagcugccgcccgccuacaccaacagcuucacccggggcgucuacuaccccgacaagguguuccgcuccagcgugcugcacuccacccaggaccucuuccugcccuucuucagcaacgucacgugguuccacgccauccacguguccgggaccaacggcaccaagcgguucgacaacccggugcugcccuucaacgacggggucuacuucgcgagcaccgagaaguccaacaucauccgcggcuggaucuucgggacgacccucgacagcaagacccagucccugcugaucgugaacaacgccaccaacguggucaucaaggugugcgaguuccaguucugcaacgaccccuuccucggcguguacuaccacaagaacaacaagagcuggauggaguccgaguuccgggucuacagcuccgccaacaacugcacguucgaguacgugagccagcccuuccugauggaccuggagggcaagcaggggaacuucaagaaccuccgcgaguucguguucaagaacaucgacggcuacuucaagaucuacuccaagcacaccccgaucaaccugguccgggaccugccccagggguucagcgcccucgagccccugguggaccugcccaucggcaucaacaucacccgcuuccagacccuccuggcccugcaccgguccuaccucacgccgggggacagcagcuccggcuggaccgcgggcgccgccgccuacuacgugggguaccugcagccccgcaccuuccugcucaaguacaacgagaacggcaccaucacggacgcggucgacugcgcccuggacccccugagcgagaccaagugcacccucaaguccuucaccguggagaaggggaucuaccagacgagcaacuuccgggugcagcccaccgaguccaucguccgcuucccgaacaucaccaaccugugccccuucggcgagguguucaacgccacccgguucgccagcgucuacgccuggaaccgcaagcggaucuccaacugcguggcggacuacagcgugcuguacaacuccgccagcuucuccacguucaagugcuacggcgucagccccaccaagcucaacgaccugugcuucaccaacguguacgccgacuccuucgugauccgcggggacgagguccggcagaucgcccccggccagaccgggaagaucgccgacuacaacuacaagcugccggacgacuucacgggcugcgugaucgcguggaacagcaacaaccucgacuccaaggucgggggcaacuacaacuaccuguaccgccuguuccgcaagagcaaccucaagcccuucgagcgggacaucuccaccgagaucuaccaggccggcagcacccccugcaacgggguggagggcuucaacugcuacuucccccugcaguccuacggguuccagccgaccaacggcgugggguaccagcccuaccggguggucgugcugagcuucgagcuccugcacgcccccgccacggugugcggccccaagaaguccaccaaccuggucaagaacaagugcgugaacuucaacuucaacggccucaccgggaccggcgugcugaccgagagcaacaagaaguuccugccguuccagcaguucgggcgcgacaucgccgacacgaccgacgcgguccgcgacccccagacccuggagauccucgacaucacccccugcagcuucggcgggguguccgugaucacgccgggcaccaacaccagcaaccaggucgccgugcuguaccagggcgugaacugcaccgagguccccguggccauccacgccgaccagcugacgcccaccuggcggguguacuccaccggcagcaacgucuuccagacccgcgccgggugccucaucggcgcggagcacgugaacaacuccuacgagugcgacauccccaucggggccggcaucugcgccagcuaccagacgcagaccaacuccccgcggcgcgcccggagcguggcgucccagagcaucaucgccuacaccaugucccugggcgccgagaacagcgucgccuacuccaacaacagcaucgccauccccaccaacuucacgaucuccgugaccaccgagauccugcccgugagcaugaccaagacgagcgucgacugcaccauguacaucugcggggacuccaccgagugcagcaaccuccugcugcaguacggcuccuucugcacccagcucaaccgcgcgcugacggggaucgccguggagcaggacaagaacacccaggagguguucgcccaggucaagcagaucuacaagacgcccccgaucaaggacuucggcggguucaacuucagccagauccugcccgaccccuccaagcccagcaagcgguccuucaucgaggaccuccuguucaacaaggugacccuggccgacgccggcuucaucaagcaguacggcgacugccucggggacaucgcggcccgcgaccugaucugcgcccagaaguucaacggccugaccgugcucccgccccugcugaccgacgagaugaucgcccaguacaccagcgcccuccuggcggggaccaucacguccggcuggaccuucggggccggcgccgcccugcagauccccuucgcgaugcagauggccuaccgguucaacggcaucggggucacccagaacgugcucuacgagaaccagaagcugaucgccaaccaguucaacagcgccaucggcaagauccaggacucccugagcuccaccgccagcgcgcucgggaagcugcaggacguggucaaccagaacgcccaggcccugaacacgcucgugaagcagcuguccagcaacuucggcgccaucuccagcgugcugaacgacauccucucccgccuggacccgcccgaggccgaggugcagaucgaccggcugaucaccgggcgccuccagagccugcagaccuacgugacccagcagcugauccgggcggccgagauccgcgccagcgccaaccucgccgcgaccaagauguccgagugcguccugggccagagcaagcggguggacuucugcggcaagggguaccaccugauguccuucccccagagcgccccgcacggcguggucuuccuccacgugacguacguccccgcccaggagaagaacuucaccaccgcccccgcgaucugccacgacgggaaggcccacuucccccgcgagggcguguucguguccaacgggacccacugguucgucacgcagcggaacuucuacgagccgcagaucaucaccaccgacaacaccuucgugagcggcaacugcgacguggucaucggcaucgugaacaacacgguguacgacccccugcagcccgagcuggacuccuucaaggaggagcucgacaaguacuucaagaaccacaccagccccgacgucgaccugggggacaucuccggcaucaacgccagcguggugaacauccagaaggagaucgaccgccugaacgaggucgccaagaaccucaacgagucccugaucgaccugcaggagcucgggaaguacgagcaguacaucaaguggccgugguacaucuggcugggcuucaucgccggccugaucgcgaucgugauggugaccaucaugcucugcugcaugaccagcugcugcuccugccugaaggggugcugcagcugcggcuccugcugcaaguucgacgaggacgacagcgagcccguccugaagggggugaagcuccacuacacgugaggacuaguuauaagacugacuagcccgaugggccucccaacgggcccuccuccccuccuugcaccgagagaucuaaaaaaaaaaaaaaaaaaaaaaaaaaaaaaaaaaaaaaaaaaaaaaaaaaaaaaaaaaaaaaaaaaaaaaaaaaaaaaaaaaaaaaaaaaaaaaaaaaaa

SEQ ID NO: 25939 - RNA, 4011 nt, Artificial Sequence
  SARS-CoV-2/Wuhan/WIV05/2019__EPI_ISL_402128 spike protein mRNA gc (1-1273)(K986P_V987P_A222V_D614G)
aggagaaagcuuaccauguucguguuccugguccuccugccccuggugagcucccagugcgugaaccucaccacccgcacgcagcugccgcccgccuacaccaacagcuucacccggggcgucuacuaccccgacaagguguuccgcuccagcgugcugcacuccacccaggaccucuuccugcccuucuucagcaacgucacgugguuccacgccauccacguguccgggaccaacggcaccaagcgguucgacaacccggugcugcccuucaacgacggggucuacuucgcgagcaccgagaaguccaacaucauccgcggcuggaucuucgggacgacccucgacagcaagacccagucccugcugaucgugaacaacgccaccaacguggucaucaaggugugcgaguuccaguucugcaacgaccccuuccucggcguguacuaccacaagaacaacaagagcuggauggaguccgaguuccgggucuacagcuccgccaacaacugcacguucgaguacgugagccagcccuuccugauggaccuggagggcaagcaggggaacuucaagaaccuccgcgaguucguguucaagaacaucgacggcuacuucaagaucuacuccaagcacaccccgaucaaccugguccgggaccugccccagggguucagcguccucgagccccugguggaccugcccaucggcaucaacaucacccgcuuccagacccuccuggcccugcaccgguccuaccucacgccgggggacagcagcuccggcuggaccgcgggcgccgccgccuacuacgugggguaccugcagccccgcaccuuccugcucaaguacaacgagaacggcaccaucacggacgcggucgacugcgcccuggacccccugagcgagaccaagugcacccucaaguccuucaccguggagaaggggaucuaccagacgagcaacuuccgggugcagcccaccgaguccaucguccgcuucccgaacaucaccaaccugugccccuucggcgagguguucaacgccacccgguucgccagcgucuacgccuggaaccgcaagcggaucuccaacugcguggcggacuacagcgugcuguacaacuccgccagcuucuccacguucaagugcuacggcgucagccccaccaagcucaacgaccugugcuucaccaacguguacgccgacuccuucgugauccgcggggacgagguccggcagaucgcccccggccagaccgggaagaucgccgacuacaacuacaagcugccggacgacuucacgggcugcgugaucgcguggaacagcaacaaccucgacuccaaggucgggggcaacuacaacuaccuguaccgccuguuccgcaagagcaaccucaagcccuucgagcgggacaucuccaccgagaucuaccaggccggcagcacccccugcaacgggguggagggcuucaacugcuacuucccccugcaguccuacggguuccagccgaccaacggcgugggguaccagcccuaccggguggucgugcugagcuucgagcuccugcacgcccccgccacggugugcggccccaagaaguccaccaaccuggucaagaacaagugcgugaacuucaacuucaacggccucaccgggaccggcgugcugaccgagagcaacaagaaguuccugccguuccagcaguucgggcgcgacaucgccgacacgaccgacgcgguccgcgacccccagacccuggagauccucgacaucacccccugcagcuucggcgggguguccgugaucacgccgggcaccaacaccagcaaccaggucgccgugcuguaccagggcgugaacugcaccgagguccccguggccauccacgccgaccagcugacgcccaccuggcggguguacuccaccggcagcaacgucuuccagacccgcgccgggugccucaucggcgcggagcacgugaacaacuccuacgagugcgacauccccaucggggccggcaucugcgccagcuaccagacgcagaccaacuccccgcggcgcgcccggagcguggcgucccagagcaucaucgccuacaccaugucccugggcgccgagaacagcgucgccuacuccaacaacagcaucgccauccccaccaacuucacgaucuccgugaccaccgagauccugcccgugagcaugaccaagacgagcgucgacugcaccauguacaucugcggggacuccaccgagugcagcaaccuccugcugcaguacggcuccuucugcacccagcucaaccgcgcgcugacggggaucgccguggagcaggacaagaacacccaggagguguucgcccaggucaagcagaucuacaagacgcccccgaucaaggacuucggcggguucaacuucagccagauccugcccgaccccuccaagcccagcaagcgguccuucaucgaggaccuccuguucaacaaggugacccuggccgacgccggcuucaucaagcaguacggcgacugccucggggacaucgcggcccgcgaccugaucugcgcccagaaguucaacggccugaccgugcucccgccccugcugaccgacgagaugaucgcccaguacaccagcgcccuccuggcggggaccaucacguccggcuggaccuucggggccggcgccgcccugcagauccccuucgcgaugcagauggccuaccgguucaacggcaucggggucacccagaacgugcucuacgagaaccagaagcugaucgccaaccaguucaacagcgccaucggcaagauccaggacucccugagcuccaccgccagcgcgcucgggaagcugcaggacguggucaaccagaacgcccaggcccugaacacgcucgugaagcagcuguccagcaacuucggcgccaucuccagcgugcugaacgacauccucucccgccuggacccgcccgaggccgaggugcagaucgaccggcugaucaccgggcgccuccagagccugcagaccuacgugacccagcagcugauccgggcggccgagauccgcgccagcgccaaccucgccgcgaccaagauguccgagugcguccugggccagagcaagcggguggacuucugcggcaagggguaccaccugauguccuucccccagagcgccccgcacggcguggucuuccuccacgugacguacguccccgcccaggagaagaacuucaccaccgcccccgcgaucugccacgacgggaaggcccacuucccccgcgagggcguguucguguccaacgggacccacugguucgucacgcagcggaacuucuacgagccgcagaucaucaccaccgacaacaccuucgugagcggcaacugcgacguggucaucggcaucgugaacaacacgguguacgacccccugcagcccgagcuggacuccuucaaggaggagcucgacaaguacuucaagaaccacaccagccccgacgucgaccugggggacaucuccggcaucaacgccagcguggugaacauccagaaggagaucgaccgccugaacgaggucgccaagaaccucaacgagucccugaucgaccugcaggagcucgggaaguacgagcaguacaucaaguggccgugguacaucuggcugggcuucaucgccggccugaucgcgaucgugauggugaccaucaugcucugcugcaugaccagcugcugcuccugccugaaggggugcugcagcugcggcuccugcugcaaguucgacgaggacgacagcgagcccguccugaagggggugaagcuccacuacacgugaggacuaguuauaagacugacuagcccgaugggccucccaacgggcccuccuccccuccuugcaccgagagaucuaaaaaaaaaaaaaaaaaaaaaaaaaaaaaaaaaaaaaaaaaaaaaaaaaaaaaaaaaaaaaaaaaaaaaaaaaaaaaaaaaaaaaaaaaaaaaaaaaaaa

SEQ ID NO: 25940 - RNA, 4011 nt, Artificial Sequence
  SARS-CoV-2/Wuhan/WIV05/2019__EPI_ISL_402128 spike protein mRNA gc (1-1273)(K986P_V987P_N439K_D614G)
aggagaaagcuuaccauguucguguuccugguccuccugccccuggugagcucccagugcgugaaccucaccacccgcacgcagcugccgcccgccuacaccaacagcuucacccggggcgucuacuaccccgacaagguguuccgcuccagcgugcugcacuccacccaggaccucuuccugcccuucuucagcaacgucacgugguuccacgccauccacguguccgggaccaacggcaccaagcgguucgacaacccggugcugcccuucaacgacggggucuacuucgcgagcaccgagaaguccaacaucauccgcggcuggaucuucgggacgacccucgacagcaagacccagucccugcugaucgugaacaacgccaccaacguggucaucaaggugugcgaguuccaguucugcaacgaccccuuccucggcguguacuaccacaagaacaacaagagcuggauggaguccgaguuccgggucuacagcuccgccaacaacugcacguucgaguacgugagccagcccuuccugauggaccuggagggcaagcaggggaacuucaagaaccuccgcgaguucguguucaagaacaucgacggcuacuucaagaucuacuccaagcacaccccgaucaaccugguccgggaccugccccagggguucagcgcccucgagccccugguggaccugcccaucggcaucaacaucacccgcuuccagacccuccuggcccugcaccgguccuaccucacgccgggggacagcagcuccggcuggaccgcgggcgccgccgccuacuacgugggguaccugcagccccgcaccuuccugcucaaguacaacgagaacggcaccaucacggacgcggucgacugcgcccuggacccccugagcgagaccaagugcacccucaaguccuucaccguggagaaggggaucuaccagacgagcaacuuccgggugcagcccaccgaguccaucguccgcuucccgaacaucaccaaccugugccccuucggcgagguguucaacgccacccgguucgccagcgucuacgccuggaaccgcaagcggaucuccaacugcguggcggacuacagcgugcuguacaacuccgccagcuucuccacguucaagugcuacggcgucagccccaccaagcucaacgaccugugcuucaccaacguguacgccgacuccuucgugauccgcggggacgagguccggcagaucgcccccggccagaccgggaagaucgccgacuacaacuacaagcugccggacgacuucacgggcugcgugaucgcguggaacagcaagaaccucgacuccaaggucgggggcaacuacaacuaccuguaccgccuguuccgcaagagcaaccucaagcccuucgagcgggacaucuccaccgagaucuaccaggccggcagcacccccugcaacgggguggagggcuucaacugcuacuucccccugcaguccuacggguuccagccgaccaacggcgugggguaccagcccuaccggguggucgugcugagcuucgagcuccugcacgcccccgccacggugugcggccccaagaaguccaccaaccuggucaagaacaagugcgugaacuucaacuucaacggccucaccgggaccggcgugcugaccgagagcaacaagaaguuccugccguuccagcaguucgggcgcgacaucgccgacacgaccgacgcgguccgcgacccccagacccuggagauccucgacaucacccccugcagcuucggcgggguguccgugaucacgccgggcaccaacaccagcaaccaggucgccgugcuguaccagggcgugaacugcaccgagguccccguggccauccacgccgaccagcugacgcccaccuggcggguguacuccaccggcagcaacgucuuccagacccgcgccgggugccucaucggcgcggagcacgugaacaacuccuacgagugcgacauccccaucggggccggcaucugcgccagcuaccagacgcagaccaacuccccgcggcgcgcccggagcguggcgucccagagcaucaucgccuacaccaugucccugggcgccgagaacagcgucgccuacuccaacaacagcaucgccauccccaccaacuucacgaucuccgugaccaccgagauccugcccgugagcaugaccaagacgagcgucgacugcaccauguacaucugcggggacuccaccgagugcagcaaccuccugcugcaguacggcuccuucugcacccagcucaaccgcgcgcugacggggaucgccguggagcaggacaagaacacccaggagguguucgcccaggucaagcagaucuacaagacgcccccgaucaaggacuucggcggguucaacuucagccagauccugcccgaccccuccaagcccagcaagcgguccuucaucgaggaccuccuguucaacaaggugacccuggccgacgccggcuucaucaagcaguacggcgacugccucggggacaucgcggcccgcgaccugaucugcgcccagaaguucaacggccugaccgugcucccgccccugcugaccgacgagaugaucgcccaguacaccagcgcccuccuggcggggaccaucacguccggcuggaccuucggggccggcgccgcccugcagauccccuucgcgaugcagauggccuaccgguucaacggcaucggggucacccagaacgugcucuacgagaaccagaagcugaucgccaaccaguucaacagcgccaucggcaagauccaggacucccugagcuccaccgccagcgcgcucgggaagcugcaggacguggucaaccagaacgcccaggcccugaacacgcucgugaagcagcuguccagcaacuucggcgccaucuccagcgugcugaacgacauccucucccgccuggacccgcccgaggccgaggugcagaucgaccggcugaucaccgggcgccuccagagccugcagaccuacgugacccagcagcugauccgggcggccgagauccgcgccagcgccaaccucgccgcgaccaagauguccgagugcguccugggccagagcaagcggguggacuucugcggcaagggguaccaccugauguccuucccccagagcgccccgcacggcguggucuuccuccacgugacguacguccccgcccaggagaagaacuucaccaccgcccccgcgaucugccacgacgggaaggcccacuucccccgcgagggcguguucguguccaacgggacccacugguucgucacgcagcggaacuucuacgagccgcagaucaucaccaccgacaacaccuucgugagcggcaacugcgacguggucaucggcaucgugaacaacacgguguacgacccccugcagcccgagcuggacuccuucaaggaggagcucgacaaguacuucaagaaccacaccagccccgacgucgaccugggggacaucuccggcaucaacgccagcguggugaacauccagaaggagaucgaccgccugaacgaggucgccaagaaccucaacgagucccugaucgaccugcaggagcucgggaaguacgagcaguacaucaaguggccgugguacaucuggcugggcuucaucgccggccugaucgcgaucgugauggugaccaucaugcucugcugcaugaccagcugcugcuccugccugaaggggugcugcagcugcggcuccugcugcaaguucgacgaggacgacagcgagcccguccugaagggggugaagcuccacuacacgugaggacuaguuauaagacugacuagcccgaugggccucccaacgggcccuccuccccuccuugcaccgagagaucuaaaaaaaaaaaaaaaaaaaaaaaaaaaaaaaaaaaaaaaaaaaaaaaaaaaaaaaaaaaaaaaaaaaaaaaaaaaaaaaaaaaaaaaaaaaaaaaaaaaa

SEQ ID NO: 25941 - RNA, 4011 nt, Artificial Sequence
  SARS-CoV-2/Wuhan/WIV05/2019__EPI_ISL_402128 spike protein mRNA gc (1-1273)(K986P_V987P_S477N_D614G)
aggagaaagcuuaccauguucguguuccugguccuccugccccuggugagcucccagugcgugaaccucaccacccgcacgcagcugccgcccgccuacaccaacagcuucacccggggcgucuacuaccccgacaagguguuccgcuccagcgugcugcacuccacccaggaccucuuccugcccuucuucagcaacgucacgugguuccacgccauccacguguccgggaccaacggcaccaagcgguucgacaacccggugcugcccuucaacgacggggucuacuucgcgagcaccgagaaguccaacaucauccgcggcuggaucuucgggacgacccucgacagcaagacccagucccugcugaucgugaacaacgccaccaacguggucaucaaggugugcgaguuccaguucugcaacgaccccuuccucggcguguacuaccacaagaacaacaagagcuggauggaguccgaguuccgggucuacagcuccgccaacaacugcacguucgaguacgugagccagcccuuccugauggaccuggagggcaagcaggggaacuucaagaaccuccgcgaguucguguucaagaacaucgacggcuacuucaagaucuacuccaagcacaccccgaucaaccugguccgggaccugccccagggguucagcgcccucgagccccugguggaccugcccaucggcaucaacaucacccgcuuccagacccuccuggcccugcaccgguccuaccucacgccgggggacagcagcuccggcuggaccgcgggcgccgccgccuacuacgugggguaccugcagccccgcaccuuccugcucaaguacaacgagaacggcaccaucacggacgcggucgacugcgcccuggacccccugagcgagaccaagugcacccucaaguccuucaccguggagaaggggaucuaccagacgagcaacuuccgggugcagcccaccgaguccaucguccgcuucccgaacaucaccaaccugugccccuucggcgagguguucaacgccacccgguucgccagcgucuacgccuggaaccgcaagcggaucuccaacugcguggcggacuacagcgugcuguacaacuccgccagcuucuccacguucaagugcuacggcgucagccccaccaagcucaacgaccugugcuucaccaacguguacgccgacuccuucgugauccgcggggacgagguccggcagaucgcccccggccagaccgggaagaucgccgacuacaacuacaagcugccggacgacuucacgggcugcgugaucgcguggaacagcaacaaccucgacuccaaggucgggggcaacuacaacuaccuguaccgccuguuccgcaagagcaaccucaagcccuucgagcgggacaucuccaccgagaucuaccaggccggcaacacccccugcaacgggguggagggcuucaacugcuacuucccccugcaguccuacggguuccagccgaccaacggcgugggguaccagcccuaccggguggucgugcugagcuucgagcuccugcacgcccccgccacggugugcggccccaagaaguccaccaaccuggucaagaacaagugcgugaacuucaacuucaacggccucaccgggaccggcgugcugaccgagagcaacaagaaguuccugccguuccagcaguucgggcgcgacaucgccgacacgaccgacgcgguccgcgacccccagacccuggagauccucgacaucacccccugcagcuucggcgggguguccgugaucacgccgggcaccaacaccagcaaccaggucgccgugcuguaccagggcgugaacugcaccgagguccccguggccauccacgccgaccagcugacgcccaccuggcggguguacuccaccggcagcaacgucuuccagacccgcgccgggugccucaucggcgcggagcacgugaacaacuccuacgagugcgacauccccaucggggccggcaucugcgccagcuaccagacgcagaccaacuccccgcggcgcgcccggagcguggcgucccagagcaucaucgccuacaccaugucccugggcgccgagaacagcgucgccuacuccaacaacagcaucgccauccccaccaacuucacgaucuccgugaccaccgagauccugcccgugagcaugaccaagacgagcgucgacugcaccauguacaucugcggggacuccaccgagugcagcaaccuccugcugcaguacggcuccuucugcacccagcucaaccgcgcgcugacggggaucgccguggagcaggacaagaacacccaggagguguucgcccaggucaagcagaucuacaagacgcccccgaucaaggacuucggcggguucaacuucagccagauccugcccgaccccuccaagcccagcaagcgguccuucaucgaggaccuccuguucaacaaggugacccuggccgacgccggcuucaucaagcaguacggcgacugccucggggacaucgcggcccgcgaccugaucugcgcccagaaguucaacggccugaccgugcucccgccccugcugaccgacgagaugaucgcccaguacaccagcgcccuccuggcggggaccaucacguccggcuggaccuucggggccggcgccgcccugcagauccccuucgcgaugcagauggccuaccgguucaacggcaucggggucacccagaacgugcucuacgagaaccagaagcugaucgccaaccaguucaacagcgccaucggcaagauccaggacucccugagcuccaccgccagcgcgcucgggaagcugcaggacguggucaaccagaacgcccaggcccugaacacgcucgugaagcagcuguccagcaacuucggcgccaucuccagcgugcugaacgacauccucucccgccuggacccgcccgaggccgaggugcagaucgaccggcugaucaccgggcgccuccagagccugcagaccuacgugacccagcagcugauccgggcggccgagauccgcgccagcgccaaccucgccgcgaccaagauguccgagugcguccugggccagagcaagcggguggacuucugcggcaagggguaccaccugauguccuucccccagagcgccccgcacggcguggucuuccuccacgugacguacguccccgcccaggagaagaacuucaccaccgcccccgcgaucugccacgacgggaaggcccacuucccccgcgagggcguguucguguccaacgggacccacugguucgucacgcagcggaacuucuacgagccgcagaucaucaccaccgacaacaccuucgugagcggcaacugcgacguggucaucggcaucgugaacaacacgguguacgacccccugcagcccgagcuggacuccuucaaggaggagcucgacaaguacuucaagaaccacaccagccccgacgucgaccugggggacaucuccggcaucaacgccagcguggugaacauccagaaggagaucgaccgccugaacgaggucgccaagaaccucaacgagucccugaucgaccugcaggagcucgggaaguacgagcaguacaucaaguggccgugguacaucuggcugggcuucaucgccggccugaucgcgaucgugauggugaccaucaugcucugcugcaugaccagcugcugcuccugccugaaggggugcugcagcugcggcuccugcugcaaguucgacgaggacgacagcgagcccguccugaagggggugaagcuccacuacacgugaggacuaguuauaagacugacuagcccgaugggccucccaacgggcccuccuccccuccuugcaccgagagaucuaaaaaaaaaaaaaaaaaaaaaaaaaaaaaaaaaaaaaaaaaaaaaaaaaaaaaaaaaaaaaaaaaaaaaaaaaaaaaaaaaaaaaaaaaaaaaaaaaaaa

SEQ ID NO: 25942 - RNA, 4011 nt, Artificial Sequence
  SARS-CoV-2/Wuhan/WIV05/2019__EPI_ISL_402128 spike protein mRNA gc (1-1273)(K986P_V987P_N501Y_D614G)
aggagaaagcuuaccauguucguguuccugguccuccugccccuggugagcucccagugcgugaaccucaccacccgcacgcagcugccgcccgccuacaccaacagcuucacccggggcgucuacuaccccgacaagguguuccgcuccagcgugcugcacuccacccaggaccucuuccugcccuucuucagcaacgucacgugguuccacgccauccacguguccgggaccaacggcaccaagcgguucgacaacccggugcugcccuucaacgacggggucuacuucgcgagcaccgagaaguccaacaucauccgcggcuggaucuucgggacgacccucgacagcaagacccagucccugcugaucgugaacaacgccaccaacguggucaucaaggugugcgaguuccaguucugcaacgaccccuuccucggcguguacuaccacaagaacaacaagagcuggauggaguccgaguuccgggucuacagcuccgccaacaacugcacguucgaguacgugagccagcccuuccugauggaccuggagggcaagcaggggaacuucaagaaccuccgcgaguucguguucaagaacaucgacggcuacuucaagaucuacuccaagcacaccccgaucaaccugguccgggaccugccccagggguucagcgcccucgagccccugguggaccugcccaucggcaucaacaucacccgcuuccagacccuccuggcccugcaccgguccuaccucacgccgggggacagcagcuccggcuggaccgcgggcgccgccgccuacuacgugggguaccugcagccccgcaccuuccugcucaaguacaacgagaacggcaccaucacggacgcggucgacugcgcccuggacccccugagcgagaccaagugcacccucaaguccuucaccguggagaaggggaucuaccagacgagcaacuuccgggugcagcccaccgaguccaucguccgcuucccgaacaucaccaaccugugccccuucggcgagguguucaacgccacccgguucgccagcgucuacgccuggaaccgcaagcggaucuccaacugcguggcggacuacagcgugcuguacaacuccgccagcuucuccacguucaagugcuacggcgucagccccaccaagcucaacgaccugugcuucaccaacguguacgccgacuccuucgugauccgcggggacgagguccggcagaucgcccccggccagaccgggaagaucgccgacuacaacuacaagcugccggacgacuucacgggcugcgugaucgcguggaacagcaacaaccucgacuccaaggucgggggcaacuacaacuaccuguaccgccuguuccgcaagagcaaccucaagcccuucgagcgggacaucuccaccgagaucuaccaggccggcagcacccccugcaacgggguggagggcuucaacugcuacuucccccugcaguccuacggguuccagccgaccuacggcgugggguaccagcccuaccggguggucgugcugagcuucgagcuccugcacgcccccgccacggugugcggccccaagaaguccaccaaccuggucaagaacaagugcgugaacuucaacuucaacggccucaccgggaccggcgugcugaccgagagcaacaagaaguuccugccguuccagcaguucgggcgcgacaucgccgacacgaccgacgcgguccgcgacccccagacccuggagauccucgacaucacccccugcagcuucggcgggguguccgugaucacgccgggcaccaacaccagcaaccaggucgccgugcuguaccagggcgugaacugcaccgagguccccguggccauccacgccgaccagcugacgcccaccuggcggguguacuccaccggcagcaacgucuuccagacccgcgccgggugccucaucggcgcggagcacgugaacaacuccuacgagugcgacauccccaucggggccggcaucugcgccagcuaccagacgcagaccaacuccccgcggcgcgcccggagcguggcgucccagagcaucaucgccuacaccaugucccugggcgccgagaacagcgucgccuacuccaacaacagcaucgccauccccaccaacuucacgaucuccgugaccaccgagauccugcccgugagcaugaccaagacgagcgucgacugcaccauguacaucugcggggacuccaccgagugcagcaaccuccugcugcaguacggcuccuucugcacccagcucaaccgcgcgcugacggggaucgccguggagcaggacaagaacacccaggagguguucgcccaggucaagcagaucuacaagacgcccccgaucaaggacuucggcggguucaacuucagccagauccugcccgaccccuccaagcccagcaagcgguccuucaucgaggaccuccuguucaacaaggugacccuggccgacgccggcuucaucaagcaguacggcgacugccucggggacaucgcggcccgcgaccugaucugcgcccagaaguucaacggccugaccgugcucccgccccugcugaccgacgagaugaucgcccaguacaccagcgcccuccuggcggggaccaucacguccggcuggaccuucggggccggcgccgcccugcagauccccuucgcgaugcagauggccuaccgguucaacggcaucggggucacccagaacgugcucuacgagaaccagaagcugaucgccaaccaguucaacagcgccaucggcaagauccaggacucccugagcuccaccgccagcgcgcucgggaagcugcaggacguggucaaccagaacgcccaggcccugaacacgcucgugaagcagcuguccagcaacuucggcgccaucuccagcgugcugaacgacauccucucccgccuggacccgcccgaggccgaggugcagaucgaccggcugaucaccgggcgccuccagagccugcagaccuacgugacccagcagcugauccgggcggccgagauccgcgccagcgccaaccucgccgcgaccaagauguccgagugcguccugggccagagcaagcggguggacuucugcggcaagggguaccaccugauguccuucccccagagcgccccgcacggcguggucuuccuccacgugacguacguccccgcccaggagaagaacuucaccaccgcccccgcgaucugccacgacgggaaggcccacuucccccgcgagggcguguucguguccaacgggacccacugguucgucacgcagcggaacuucuacgagccgcagaucaucaccaccgacaacaccuucgugagcggcaacugcgacguggucaucggcaucgugaacaacacgguguacgacccccugcagcccgagcuggacuccuucaaggaggagcucgacaaguacuucaagaaccacaccagccccgacgucgaccugggggacaucuccggcaucaacgccagcguggugaacauccagaaggagaucgaccgccugaacgaggucgccaagaaccucaacgagucccugaucgaccugcaggagcucgggaaguacgagcaguacaucaaguggccgugguacaucuggcugggcuucaucgccggccugaucgcgaucgugauggugaccaucaugcucugcugcaugaccagcugcugcuccugccugaaggggugcugcagcugcggcuccugcugcaaguucgacgaggacgacagcgagcccguccugaagggggugaagcuccacuacacgugaggacuaguuauaagacugacuagcccgaugggccucccaacgggcccuccuccccuccuugcaccgagagaucuaaaaaaaaaaaaaaaaaaaaaaaaaaaaaaaaaaaaaaaaaaaaaaaaaaaaaaaaaaaaaaaaaaaaaaaaaaaaaaaaaaaaaaaaaaaaaaaaaaaa

SEQ ID NO: 25943 - RNA, 4005 nt, Artificial Sequence
  SARS-CoV-2/Wuhan/WIV05/2019__EPI_ISL_402128 spike protein mRNA gc (1-1273)(K986P_V987P_H69del_V70del_D614G)
aggagaaagcuuaccauguucguguuccugguccuccugccccuggugagcucccagugcgugaaccucaccacccgcacgcagcugccgcccgccuacaccaacagcuucacccggggcgucuacuaccccgacaagguguuccgcuccagcgugcugcacuccacccaggaccucuuccugcccuucuucagcaacgucacgugguuccacgccaucuccgggaccaacggcaccaagcgguucgacaacccggugcugcccuucaacgacggggucuacuucgcgagcaccgagaaguccaacaucauccgcggcuggaucuucgggacgacccucgacagcaagacccagucccugcugaucgugaacaacgccaccaacguggucaucaaggugugcgaguuccaguucugcaacgaccccuuccucggcguguacuaccacaagaacaacaagagcuggauggaguccgaguuccgggucuacagcuccgccaacaacugcacguucgaguacgugagccagcccuuccugauggaccuggagggcaagcaggggaacuucaagaaccuccgcgaguucguguucaagaacaucgacggcuacuucaagaucuacuccaagcacaccccgaucaaccugguccgggaccugccccagggguucagcgcccucgagccccugguggaccugcccaucggcaucaacaucacccgcuuccagacccuccuggcccugcaccgguccuaccucacgccgggggacagcagcuccggcuggaccgcgggcgccgccgccuacuacgugggguaccugcagccccgcaccuuccugcucaaguacaacgagaacggcaccaucacggacgcggucgacugcgcccuggacccccugagcgagaccaagugcacccucaaguccuucaccguggagaaggggaucuaccagacgagcaacuuccgggugcagcccaccgaguccaucguccgcuucccgaacaucaccaaccugugccccuucggcgagguguucaacgccacccgguucgccagcgucuacgccuggaaccgcaagcggaucuccaacugcguggcggacuacagcgugcuguacaacuccgccagcuucuccacguucaagugcuacggcgucagccccaccaagcucaacgaccugugcuucaccaacguguacgccgacuccuucgugauccgcggggacgagguccggcagaucgcccccggccagaccgggaagaucgccgacuacaacuacaagcugccggacgacuucacgggcugcgugaucgcguggaacagcaacaaccucgacuccaaggucgggggcaacuacaacuaccuguaccgccuguuccgcaagagcaaccucaagcccuucgagcgggacaucuccaccgagaucuaccaggccggcagcacccccugcaacgggguggagggcuucaacugcuacuucccccugcaguccuacggguuccagccgaccaacggcgugggguaccagcccuaccggguggucgugcugagcuucgagcuccugcacgcccccgccacggugugcggccccaagaaguccaccaaccuggucaagaacaagugcgugaacuucaacuucaacggccucaccgggaccggcgugcugaccgagagcaacaagaaguuccugccguuccagcaguucgggcgcgacaucgccgacacgaccgacgcgguccgcgacccccagacccuggagauccucgacaucacccccugcagcuucggcgggguguccgugaucacgccgggcaccaacaccagcaaccaggucgccgugcuguaccagggcgugaacugcaccgagguccccguggccauccacgccgaccagcugacgcccaccuggcggguguacuccaccggcagcaacgucuuccagacccgcgccgggugccucaucggcgcggagcacgugaacaacuccuacgagugcgacauccccaucggggccggcaucugcgccagcuaccagacgcagaccaacuccccgcggcgcgcccggagcguggcgucccagagcaucaucgccuacaccaugucccugggcgccgagaacagcgucgccuacuccaacaacagcaucgccauccccaccaacuucacgaucuccgugaccaccgagauccugcccgugagcaugaccaagacgagcgucgacugcaccauguacaucugcggggacuccaccgagugcagcaaccuccugcugcaguacggcuccuucugcacccagcucaaccgcgcgcugacggggaucgccguggagcaggacaagaacacccaggagguguucgcccaggucaagcagaucuacaagacgcccccgaucaaggacuucggcggguucaacuucagccagauccugcccgaccccuccaagcccagcaagcgguccuucaucgaggaccuccuguucaacaaggugacccuggccgacgccggcuucaucaagcaguacggcgacugccucggggacaucgcggcccgcgaccugaucugcgcccagaaguucaacggccugaccgugcucccgccccugcugaccgacgagaugaucgcccaguacaccagcgcccuccuggcggggaccaucacguccggcuggaccuucggggccggcgccgcccugcagauccccuucgcgaugcagauggccuaccgguucaacggcaucggggucacccagaacgugcucuacgagaaccagaagcugaucgccaaccaguucaacagcgccaucggcaagauccaggacucccugagcuccaccgccagcgcgcucgggaagcugcaggacguggucaaccagaacgcccaggcccugaacacgcucgugaagcagcuguccagcaacuucggcgccaucuccagcgugcugaacgacauccucucccgccuggacccgcccgaggccgaggugcagaucgaccggcugaucaccgggcgccuccagagccugcagaccuacgugacccagcagcugauccgggcggccgagauccgcgccagcgccaaccucgccgcgaccaagauguccgagugcguccugggccagagcaagcggguggacuucugcggcaagggguaccaccugauguccuucccccagagcgccccgcacggcguggucuuccuccacgugacguacguccccgcccaggagaagaacuucaccaccgcccccgcgaucugccacgacgggaaggcccacuucccccgcgagggcguguucguguccaacgggacccacugguucgucacgcagcggaacuucuacgagccgcagaucaucaccaccgacaacaccuucgugagcggcaacugcgacguggucaucggcaucgugaacaacacgguguacgacccccugcagcccgagcuggacuccuucaaggaggagcucgacaaguacuucaagaaccacaccagccccgacgucgaccugggggacaucuccggcaucaacgccagcguggugaacauccagaaggagaucgaccgccugaacgaggucgccaagaaccucaacgagucccugaucgaccugcaggagcucgggaaguacgagcaguacaucaaguggccgugguacaucuggcugggcuucaucgccggccugaucgcgaucgugauggugaccaucaugcucugcugcaugaccagcugcugcuccugccugaaggggugcugcagcugcggcuccugcugcaaguucgacgaggacgacagcgagcccguccugaagggggugaagcuccacuacacgugaggacuaguuauaagacugacuagcccgaugggccucccaacgggcccuccuccccuccuugcaccgagagaucuaaaaaaaaaaaaaaaaaaaaaaaaaaaaaaaaaaaaaaaaaaaaaaaaaaaaaaaaaaaaaaaaaaaaaaaaaaaaaaaaaaaaaaaaaaaaaaaaaaaa

SEQ ID NO: 25944 - RNA, 4011 nt, Artificial Sequence
  SARS-CoV-2/Wuhan/WIV05/2019__EPI_ISL_402128 spike protein mRNA gc (1-1273)(K986P_V987P_Y453F_D614G)
aggagaaagcuuaccauguucguguuccugguccuccugccccuggugagcucccagugcgugaaccucaccacccgcacgcagcugccgcccgccuacaccaacagcuucacccggggcgucuacuaccccgacaagguguuccgcuccagcgugcugcacuccacccaggaccucuuccugcccuucuucagcaacgucacgugguuccacgccauccacguguccgggaccaacggcaccaagcgguucgacaacccggugcugcccuucaacgacggggucuacuucgcgagcaccgagaaguccaacaucauccgcggcuggaucuucgggacgacccucgacagcaagacccagucccugcugaucgugaacaacgccaccaacguggucaucaaggugugcgaguuccaguucugcaacgaccccuuccucggcguguacuaccacaagaacaacaagagcuggauggaguccgaguuccgggucuacagcuccgccaacaacugcacguucgaguacgugagccagcccuuccugauggaccuggagggcaagcaggggaacuucaagaaccuccgcgaguucguguucaagaacaucgacggcuacuucaagaucuacuccaagcacaccccgaucaaccugguccgggaccugccccagggguucagcgcccucgagccccugguggaccugcccaucggcaucaacaucacccgcuuccagacccuccuggcccugcaccgguccuaccucacgccgggggacagcagcuccggcuggaccgcgggcgccgccgccuacuacgugggguaccugcagccccgcaccuuccugcucaaguacaacgagaacggcaccaucacggacgcggucgacugcgcccuggacccccugagcgagaccaagugcacccucaaguccuucaccguggagaaggggaucuaccagacgagcaacuuccgggugcagcccaccgaguccaucguccgcuucccgaacaucaccaaccugugccccuucggcgagguguucaacgccacccgguucgccagcgucuacgccuggaaccgcaagcggaucuccaacugcguggcggacuacagcgugcuguacaacuccgccagcuucuccacguucaagugcuacggcgucagccccaccaagcucaacgaccugugcuucaccaacguguacgccgacuccuucgugauccgcggggacgagguccggcagaucgcccccggccagaccgggaagaucgccgacuacaacuacaagcugccggacgacuucacgggcugcgugaucgcguggaacagcaacaaccucgacuccaaggucgggggcaacuacaacuaccuguuccgccuguuccgcaagagcaaccucaagcccuucgagcgggacaucuccaccgagaucuaccaggccggcagcacccccugcaacgggguggagggcuucaacugcuacuucccccugcaguccuacggguuccagccgaccaacggcgugggguaccagcccuaccggguggucgugcugagcuucgagcuccugcacgcccccgccacggugugcggccccaagaaguccaccaaccuggucaagaacaagugcgugaacuucaacuucaacggccucaccgggaccggcgugcugaccgagagcaacaagaaguuccugccguuccagcaguucgggcgcgacaucgccgacacgaccgacgcgguccgcgacccccagacccuggagauccucgacaucacccccugcagcuucggcgggguguccgugaucacgccgggcaccaacaccagcaaccaggucgccgugcuguaccagggcgugaacugcaccgagguccccguggccauccacgccgaccagcugacgcccaccuggcggguguacuccaccggcagcaacgucuuccagacccgcgccgggugccucaucggcgcggagcacgugaacaacuccuacgagugcgacauccccaucggggccggcaucugcgccagcuaccagacgcagaccaacuccccgcggcgcgcccggagcguggcgucccagagcaucaucgccuacaccaugucccugggcgccgagaacagcgucgccuacuccaacaacagcaucgccauccccaccaacuucacgaucuccgugaccaccgagauccugcccgugagcaugaccaagacgagcgucgacugcaccauguacaucugcggggacuccaccgagugcagcaaccuccugcugcaguacggcuccuucugcacccagcucaaccgcgcgcugacggggaucgccguggagcaggacaagaacacccaggagguguucgcccaggucaagcagaucuacaagacgcccccgaucaaggacuucggcggguucaacuucagccagauccugcccgaccccuccaagcccagcaagcgguccuucaucgaggaccuccuguucaacaaggugacccuggccgacgccggcuucaucaagcaguacggcgacugccucggggacaucgcggcccgcgaccugaucugcgcccagaaguucaacggccugaccgugcucccgccccugcugaccgacgagaugaucgcccaguacaccagcgcccuccuggcggggaccaucacguccggcuggaccuucggggccggcgccgcccugcagauccccuucgcgaugcagauggccuaccgguucaacggcaucggggucacccagaacgugcucuacgagaaccagaagcugaucgccaaccaguucaacagcgccaucggcaagauccaggacucccugagcuccaccgccagcgcgcucgggaagcugcaggacguggucaaccagaacgcccaggcccugaacacgcucgugaagcagcuguccagcaacuucggcgccaucuccagcgugcugaacgacauccucucccgccuggacccgcccgaggccgaggugcagaucgaccggcugaucaccgggcgccuccagagccugcagaccuacgugacccagcagcugauccgggcggccgagauccgcgccagcgccaaccucgccgcgaccaagauguccgagugcguccugggccagagcaagcggguggacuucugcggcaagggguaccaccugauguccuucccccagagcgccccgcacggcguggucuuccuccacgugacguacguccccgcccaggagaagaacuucaccaccgcccccgcgaucugccacgacgggaaggcccacuucccccgcgagggcguguucguguccaacgggacccacugguucgucacgcagcggaacuucuacgagccgcagaucaucaccaccgacaacaccuucgugagcggcaacugcgacguggucaucggcaucgugaacaacacgguguacgacccccugcagcccgagcuggacuccuucaaggaggagcucgacaaguacuucaagaaccacaccagccccgacgucgaccugggggacaucuccggcaucaacgccagcguggugaacauccagaaggagaucgaccgccugaacgaggucgccaagaaccucaacgagucccugaucgaccugcaggagcucgggaaguacgagcaguacaucaaguggccgugguacaucuggcugggcuucaucgccggccugaucgcgaucgugauggugaccaucaugcucugcugcaugaccagcugcugcuccugccugaaggggugcugcagcugcggcuccugcugcaaguucgacgaggacgacagcgagcccguccugaagggggugaagcuccacuacacgugaggacuaguuauaagacugacuagcccgaugggccucccaacgggcccuccuccccuccuugcaccgagagaucuaaaaaaaaaaaaaaaaaaaaaaaaaaaaaaaaaaaaaaaaaaaaaaaaaaaaaaaaaaaaaaaaaaaaaaaaaaaaaaaaaaaaaaaaaaaaaaaaaaaa

SEQ ID NO: 25945 - RNA, 4011 nt, Artificial Sequence
  SARS-CoV-2/Wuhan/WIV05/2019__EPI_ISL_402128 spike protein mRNA gc (1-1273)(K986P_V987P_D614G_I692V)
aggagaaagcuuaccauguucguguuccugguccuccugccccuggugagcucccagugcgugaaccucaccacccgcacgcagcugccgcccgccuacaccaacagcuucacccggggcgucuacuaccccgacaagguguuccgcuccagcgugcugcacuccacccaggaccucuuccugcccuucuucagcaacgucacgugguuccacgccauccacguguccgggaccaacggcaccaagcgguucgacaacccggugcugcccuucaacgacggggucuacuucgcgagcaccgagaaguccaacaucauccgcggcuggaucuucgggacgacccucgacagcaagacccagucccugcugaucgugaacaacgccaccaacguggucaucaaggugugcgaguuccaguucugcaacgaccccuuccucggcguguacuaccacaagaacaacaagagcuggauggaguccgaguuccgggucuacagcuccgccaacaacugcacguucgaguacgugagccagcccuuccugauggaccuggagggcaagcaggggaacuucaagaaccuccgcgaguucguguucaagaacaucgacggcuacuucaagaucuacuccaagcacaccccgaucaaccugguccgggaccugccccagggguucagcgcccucgagccccugguggaccugcccaucggcaucaacaucacccgcuuccagacccuccuggcccugcaccgguccuaccucacgccgggggacagcagcuccggcuggaccgcgggcgccgccgccuacuacgugggguaccugcagccccgcaccuuccugcucaaguacaacgagaacggcaccaucacggacgcggucgacugcgcccuggacccccugagcgagaccaagugcacccucaaguccuucaccguggagaaggggaucuaccagacgagcaacuuccgggugcagcccaccgaguccaucguccgcuucccgaacaucaccaaccugugccccuucggcgagguguucaacgccacccgguucgccagcgucuacgccuggaaccgcaagcggaucuccaacugcguggcggacuacagcgugcuguacaacuccgccagcuucuccacguucaagugcuacggcgucagccccaccaagcucaacgaccugugcuucaccaacguguacgccgacuccuucgugauccgcggggacgagguccggcagaucgcccccggccagaccgggaagaucgccgacuacaacuacaagcugccggacgacuucacgggcugcgugaucgcguggaacagcaacaaccucgacuccaaggucgggggcaacuacaacuaccuguaccgccuguuccgcaagagcaaccucaagcccuucgagcgggacaucuccaccgagaucuaccaggccggcagcacccccugcaacgggguggagggcuucaacugcuacuucccccugcaguccuacggguuccagccgaccaacggcgugggguaccagcccuaccggguggucgugcugagcuucgagcuccugcacgcccccgccacggugugcggccccaagaaguccaccaaccuggucaagaacaagugcgugaacuucaacuucaacggccucaccgggaccggcgugcugaccgagagcaacaagaaguuccugccguuccagcaguucgggcgcgacaucgccgacacgaccgacgcgguccgcgacccccagacccuggagauccucgacaucacccccugcagcuucggcgggguguccgugaucacgccgggcaccaacaccagcaaccaggucgccgugcuguaccagggcgugaacugcaccgagguccccguggccauccacgccgaccagcugacgcccaccuggcggguguacuccaccggcagcaacgucuuccagacccgcgccgggugccucaucggcgcggagcacgugaacaacuccuacgagugcgacauccccaucggggccggcaucugcgccagcuaccagacgcagaccaacuccccgcggcgcgcccggagcguggcgucccagagcgucaucgccuacaccaugucccugggcgccgagaacagcgucgccuacuccaacaacagcaucgccauccccaccaacuucacgaucuccgugaccaccgagauccugcccgugagcaugaccaagacgagcgucgacugcaccauguacaucugcggggacuccaccgagugcagcaaccuccugcugcaguacggcuccuucugcacccagcucaaccgcgcgcugacggggaucgccguggagcaggacaagaacacccaggagguguucgcccaggucaagcagaucuacaagacgcccccgaucaaggacuucggcggguucaacuucagccagauccugcccgaccccuccaagcccagcaagcgguccuucaucgaggaccuccuguucaacaaggugacccuggccgacgccggcuucaucaagcaguacggcgacugccucggggacaucgcggcccgcgaccugaucugcgcccagaaguucaacggccugaccgugcucccgccccugcugaccgacgagaugaucgcccaguacaccagcgcccuccuggcggggaccaucacguccggcuggaccuucggggccggcgccgcccugcagauccccuucgcgaugcagauggccuaccgguucaacggcaucggggucacccagaacgugcucuacgagaaccagaagcugaucgccaaccaguucaacagcgccaucggcaagauccaggacucccugagcuccaccgccagcgcgcucgggaagcugcaggacguggucaaccagaacgcccaggcccugaacacgcucgugaagcagcuguccagcaacuucggcgccaucuccagcgugcugaacgacauccucucccgccuggacccgcccgaggccgaggugcagaucgaccggcugaucaccgggcgccuccagagccugcagaccuacgugacccagcagcugauccgggcggccgagauccgcgccagcgccaaccucgccgcgaccaagauguccgagugcguccugggccagagcaagcggguggacuucugcggcaagggguaccaccugauguccuucccccagagcgccccgcacggcguggucuuccuccacgugacguacguccccgcccaggagaagaacuucaccaccgcccccgcgaucugccacgacgggaaggcccacuucccccgcgagggcguguucguguccaacgggacccacugguucgucacgcagcggaacuucuacgagccgcagaucaucaccaccgacaacaccuucgugagcggcaacugcgacguggucaucggcaucgugaacaacacgguguacgacccccugcagcccgagcuggacuccuucaaggaggagcucgacaaguacuucaagaaccacaccagccccgacgucgaccugggggacaucuccggcaucaacgccagcguggugaacauccagaaggagaucgaccgccugaacgaggucgccaagaaccucaacgagucccugaucgaccugcaggagcucgggaaguacgagcaguacaucaaguggccgugguacaucuggcugggcuucaucgccggccugaucgcgaucgugauggugaccaucaugcucugcugcaugaccagcugcugcuccugccugaaggggugcugcagcugcggcuccugcugcaaguucgacgaggacgacagcgagcccguccugaagggggugaagcuccacuacacgugaggacuaguuauaagacugacuagcccgaugggccucccaacgggcccuccuccccuccuugcaccgagagaucuaaaaaaaaaaaaaaaaaaaaaaaaaaaaaaaaaaaaaaaaaaaaaaaaaaaaaaaaaaaaaaaaaaaaaaaaaaaaaaaaaaaaaaaaaaaaaaaaaaaa

SEQ ID NO: 25946 - RNA, 4011 nt, Artificial Sequence
  SARS-CoV-2/Wuhan/WIV05/2019__EPI_ISL_402128 spike protein mRNA gc (1-1273)(K986P_V987P_D614G_M1229I)
aggagaaagcuuaccauguucguguuccugguccuccugccccuggugagcucccagugcgugaaccucaccacccgcacgcagcugccgcccgccuacaccaacagcuucacccggggcgucuacuaccccgacaagguguuccgcuccagcgugcugcacuccacccaggaccucuuccugcccuucuucagcaacgucacgugguuccacgccauccacguguccgggaccaacggcaccaagcgguucgacaacccggugcugcccuucaacgacggggucuacuucgcgagcaccgagaaguccaacaucauccgcggcuggaucuucgggacgacccucgacagcaagacccagucccugcugaucgugaacaacgccaccaacguggucaucaaggugugcgaguuccaguucugcaacgaccccuuccucggcguguacuaccacaagaacaacaagagcuggauggaguccgaguuccgggucuacagcuccgccaacaacugcacguucgaguacgugagccagcccuuccugauggaccuggagggcaagcaggggaacuucaagaaccuccgcgaguucguguucaagaacaucgacggcuacuucaagaucuacuccaagcacaccccgaucaaccugguccgggaccugccccagggguucagcgcccucgagccccugguggaccugcccaucggcaucaacaucacccgcuuccagacccuccuggcccugcaccgguccuaccucacgccgggggacagcagcuccggcuggaccgcgggcgccgccgccuacuacgugggguaccugcagccccgcaccuuccugcucaaguacaacgagaacggcaccaucacggacgcggucgacugcgcccuggacccccugagcgagaccaagugcacccucaaguccuucaccguggagaaggggaucuaccagacgagcaacuuccgggugcagcccaccgaguccaucguccgcuucccgaacaucaccaaccugugccccuucggcgagguguucaacgccacccgguucgccagcgucuacgccuggaaccgcaagcggaucuccaacugcguggcggacuacagcgugcuguacaacuccgccagcuucuccacguucaagugcuacggcgucagccccaccaagcucaacgaccugugcuucaccaacguguacgccgacuccuucgugauccgcggggacgagguccggcagaucgcccccggccagaccgggaagaucgccgacuacaacuacaagcugccggacgacuucacgggcugcgugaucgcguggaacagcaacaaccucgacuccaaggucgggggcaacuacaacuaccuguaccgccuguuccgcaagagcaaccucaagcccuucgagcgggacaucuccaccgagaucuaccaggccggcagcacccccugcaacgggguggagggcuucaacugcuacuucccccugcaguccuacggguuccagccgaccaacggcgugggguaccagcccuaccggguggucgugcugagcuucgagcuccugcacgcccccgccacggugugcggccccaagaaguccaccaaccuggucaagaacaagugcgugaacuucaacuucaacggccucaccgggaccggcgugcugaccgagagcaacaagaaguuccugccguuccagcaguucgggcgcgacaucgccgacacgaccgacgcgguccgcgacccccagacccuggagauccucgacaucacccccugcagcuucggcgggguguccgugaucacgccgggcaccaacaccagcaaccaggucgccgugcuguaccagggcgugaacugcaccgagguccccguggccauccacgccgaccagcugacgcccaccuggcggguguacuccaccggcagcaacgucuuccagacccgcgccgggugccucaucggcgcggagcacgugaacaacuccuacgagugcgacauccccaucggggccggcaucugcgccagcuaccagacgcagaccaacuccccgcggcgcgcccggagcguggcgucccagagcaucaucgccuacaccaugucccugggcgccgagaacagcgucgccuacuccaacaacagcaucgccauccccaccaacuucacgaucuccgugaccaccgagauccugcccgugagcaugaccaagacgagcgucgacugcaccauguacaucugcggggacuccaccgagugcagcaaccuccugcugcaguacggcuccuucugcacccagcucaaccgcgcgcugacggggaucgccguggagcaggacaagaacacccaggagguguucgcccaggucaagcagaucuacaagacgcccccgaucaaggacuucggcggguucaacuucagccagauccugcccgaccccuccaagcccagcaagcgguccuucaucgaggaccuccuguucaacaaggugacccuggccgacgccggcuucaucaagcaguacggcgacugccucggggacaucgcggcccgcgaccugaucugcgcccagaaguucaacggccugaccgugcucccgccccugcugaccgacgagaugaucgcccaguacaccagcgcccuccuggcggggaccaucacguccggcuggaccuucggggccggcgccgcccugcagauccccuucgcgaugcagauggccuaccgguucaacggcaucggggucacccagaacgugcucuacgagaaccagaagcugaucgccaaccaguucaacagcgccaucggcaagauccaggacucccugagcuccaccgccagcgcgcucgggaagcugcaggacguggucaaccagaacgcccaggcccugaacacgcucgugaagcagcuguccagcaacuucggcgccaucuccagcgugcugaacgacauccucucccgccuggacccgcccgaggccgaggugcagaucgaccggcugaucaccgggcgccuccagagccugcagaccuacgugacccagcagcugauccgggcggccgagauccgcgccagcgccaaccucgccgcgaccaagauguccgagugcguccugggccagagcaagcggguggacuucugcggcaagggguaccaccugauguccuucccccagagcgccccgcacggcguggucuuccuccacgugacguacguccccgcccaggagaagaacuucaccaccgcccccgcgaucugccacgacgggaaggcccacuucccccgcgagggcguguucguguccaacgggacccacugguucgucacgcagcggaacuucuacgagccgcagaucaucaccaccgacaacaccuucgugagcggcaacugcgacguggucaucggcaucgugaacaacacgguguacgacccccugcagcccgagcuggacuccuucaaggaggagcucgacaaguacuucaagaaccacaccagccccgacgucgaccugggggacaucuccggcaucaacgccagcguggugaacauccagaaggagaucgaccgccugaacgaggucgccaagaaccucaacgagucccugaucgaccugcaggagcucgggaaguacgagcaguacaucaaguggccgugguacaucuggcugggcuucaucgccggccugaucgcgaucgugaucgugaccaucaugcucugcugcaugaccagcugcugcuccugccugaaggggugcugcagcugcggcuccugcugcaaguucgacgaggacgacagcgagcccguccugaagggggugaagcuccacuacacgugaggacuaguuauaagacugacuagcccgaugggccucccaacgggcccuccuccccuccuugcaccgagagaucuaaaaaaaaaaaaaaaaaaaaaaaaaaaaaaaaaaaaaaaaaaaaaaaaaaaaaaaaaaaaaaaaaaaaaaaaaaaaaaaaaaaaaaaaaaaaaaaaaaaa

SEQ ID NO: 25947 - RNA, 4005 nt, Artificial Sequence
  SARS-CoV-2/Wuhan/WIV05/2019__EPI_ISL_402128 spike protein mRNA gc (1-1273)(K986P_V987P_H69del_V70del_A222V_Y453F_S477N_D614G_I692V)
aggagaaagcuuaccauguucguguuccugguccuccugccccuggugagcucccagugcgugaaccucaccacccgcacgcagcugccgcccgccuacaccaacagcuucacccggggcgucuacuaccccgacaagguguuccgcuccagcgugcugcacuccacccaggaccucuuccugcccuucuucagcaacgucacgugguuccacgccaucuccgggaccaacggcaccaagcgguucgacaacccggugcugcccuucaacgacggggucuacuucgcgagcaccgagaaguccaacaucauccgcggcuggaucuucgggacgacccucgacagcaagacccagucccugcugaucgugaacaacgccaccaacguggucaucaaggugugcgaguuccaguucugcaacgaccccuuccucggcguguacuaccacaagaacaacaagagcuggauggaguccgaguuccgggucuacagcuccgccaacaacugcacguucgaguacgugagccagcccuuccugauggaccuggagggcaagcaggggaacuucaagaaccuccgcgaguucguguucaagaacaucgacggcuacuucaagaucuacuccaagcacaccccgaucaaccugguccgggaccugccccagggguucagcguccucgagccccugguggaccugcccaucggcaucaacaucacccgcuuccagacccuccuggcccugcaccgguccuaccucacgccgggggacagcagcuccggcuggaccgcgggcgccgccgccuacuacgugggguaccugcagccccgcaccuuccugcucaaguacaacgagaacggcaccaucacggacgcggucgacugcgcccuggacccccugagcgagaccaagugcacccucaaguccuucaccguggagaaggggaucuaccagacgagcaacuuccgggugcagcccaccgaguccaucguccgcuucccgaacaucaccaaccugugccccuucggcgagguguucaacgccacccgguucgccagcgucuacgccuggaaccgcaagcggaucuccaacugcguggcggacuacagcgugcuguacaacuccgccagcuucuccacguucaagugcuacggcgucagccccaccaagcucaacgaccugugcuucaccaacguguacgccgacuccuucgugauccgcggggacgagguccggcagaucgcccccggccagaccgggaagaucgccgacuacaacuacaagcugccggacgacuucacgggcugcgugaucgcguggaacagcaacaaccucgacuccaaggucgggggcaacuacaacuaccuguuccgccuguuccgcaagagcaaccucaagcccuucgagcgggacaucuccaccgagaucuaccaggccggcaacacccccugcaacgggguggagggcuucaacugcuacuucccccugcaguccuacggguuccagccgaccaacggcgugggguaccagcccuaccggguggucgugcugagcuucgagcuccugcacgcccccgccacggugugcggccccaagaaguccaccaaccuggucaagaacaagugcgugaacuucaacuucaacggccucaccgggaccggcgugcugaccgagagcaacaagaaguuccugccguuccagcaguucgggcgcgacaucgccgacacgaccgacgcgguccgcgacccccagacccuggagauccucgacaucacccccugcagcuucggcgggguguccgugaucacgccgggcaccaacaccagcaaccaggucgccgugcuguaccagggcgugaacugcaccgagguccccguggccauccacgccgaccagcugacgcccaccuggcggguguacuccaccggcagcaacgucuuccagacccgcgccgggugccucaucggcgcggagcacgugaacaacuccuacgagugcgacauccccaucggggccggcaucugcgccagcuaccagacgcagaccaacuccccgcggcgcgcccggagcguggcgucccagagcgucaucgccuacaccaugucccugggcgccgagaacagcgucgccuacuccaacaacagcaucgccauccccaccaacuucacgaucuccgugaccaccgagauccugcccgugagcaugaccaagacgagcgucgacugcaccauguacaucugcggggacuccaccgagugcagcaaccuccugcugcaguacggcuccuucugcacccagcucaaccgcgcgcugacggggaucgccguggagcaggacaagaacacccaggagguguucgcccaggucaagcagaucuacaagacgcccccgaucaaggacuucggcggguucaacuucagccagauccugcccgaccccuccaagcccagcaagcgguccuucaucgaggaccuccuguucaacaaggugacccuggccgacgccggcuucaucaagcaguacggcgacugccucggggacaucgcggcccgcgaccugaucugcgcccagaaguucaacggccugaccgugcucccgccccugcugaccgacgagaugaucgcccaguacaccagcgcccuccuggcggggaccaucacguccggcuggaccuucggggccggcgccgcccugcagauccccuucgcgaugcagauggccuaccgguucaacggcaucggggucacccagaacgugcucuacgagaaccagaagcugaucgccaaccaguucaacagcgccaucggcaagauccaggacucccugagcuccaccgccagcgcgcucgggaagcugcaggacguggucaaccagaacgcccaggcccugaacacgcucgugaagcagcuguccagcaacuucggcgccaucuccagcgugcugaacgacauccucucccgccuggacccgcccgaggccgaggugcagaucgaccggcugaucaccgggcgccuccagagccugcagaccuacgugacccagcagcugauccgggcggccgagauccgcgccagcgccaaccucgccgcgaccaagauguccgagugcguccugggccagagcaagcggguggacuucugcggcaagggguaccaccugauguccuucccccagagcgccccgcacggcguggucuuccuccacgugacguacguccccgcccaggagaagaacuucaccaccgcccccgcgaucugccacgacgggaaggcccacuucccccgcgagggcguguucguguccaacgggacccacugguucgucacgcagcggaacuucuacgagccgcagaucaucaccaccgacaacaccuucgugagcggcaacugcgacguggucaucggcaucgugaacaacacgguguacgacccccugcagcccgagcuggacuccuucaaggaggagcucgacaaguacuucaagaaccacaccagccccgacgucgaccugggggacaucuccggcaucaacgccagcguggugaacauccagaaggagaucgaccgccugaacgaggucgccaagaaccucaacgagucccugaucgaccugcaggagcucgggaaguacgagcaguacaucaaguggccgugguacaucuggcugggcuucaucgccggccugaucgcgaucgugauggugaccaucaugcucugcugcaugaccagcugcugcuccugccugaaggggugcugcagcugcggcuccugcugcaaguucgacgaggacgacagcgagcccguccugaagggggugaagcuccacuacacgugaggacuaguuauaagacugacuagcccgaugggccucccaacgggcccuccuccccuccuugcaccgagagaucuaaaaaaaaaaaaaaaaaaaaaaaaaaaaaaaaaaaaaaaaaaaaaaaaaaaaaaaaaaaaaaaaaaaaaaaaaaaaaaaaaaaaaaaaaaaaaaaaaaaa

SEQ ID NO: 25948 - RNA, 4005 nt, Artificial Sequence
  SARS-CoV-2/Wuhan/WIV05/2019__EPI_ISL_402128 spike protein mRNA gc (1-1273)(K986P_V987P_H69del_V70del_Y453F_D614G_I692V_M1229I)
aggagaaagcuuaccauguucguguuccugguccuccugccccuggugagcucccagugcgugaaccucaccacccgcacgcagcugccgcccgccuacaccaacagcuucacccggggcgucuacuaccccgacaagguguuccgcuccagcgugcugcacuccacccaggaccucuuccugcccuucuucagcaacgucacgugguuccacgccaucuccgggaccaacggcaccaagcgguucgacaacccggugcugcccuucaacgacggggucuacuucgcgagcaccgagaaguccaacaucauccgcggcuggaucuucgggacgacccucgacagcaagacccagucccugcugaucgugaacaacgccaccaacguggucaucaaggugugcgaguuccaguucugcaacgaccccuuccucggcguguacuaccacaagaacaacaagagcuggauggaguccgaguuccgggucuacagcuccgccaacaacugcacguucgaguacgugagccagcccuuccugauggaccuggagggcaagcaggggaacuucaagaaccuccgcgaguucguguucaagaacaucgacggcuacuucaagaucuacuccaagcacaccccgaucaaccugguccgggaccugccccagggguucagcgcccucgagccccugguggaccugcccaucggcaucaacaucacccgcuuccagacccuccuggcccugcaccgguccuaccucacgccgggggacagcagcuccggcuggaccgcgggcgccgccgccuacuacgugggguaccugcagccccgcaccuuccugcucaaguacaacgagaacggcaccaucacggacgcggucgacugcgcccuggacccccugagcgagaccaagugcacccucaaguccuucaccguggagaaggggaucuaccagacgagcaacuuccgggugcagcccaccgaguccaucguccgcuucccgaacaucaccaaccugugccccuucggcgagguguucaacgccacccgguucgccagcgucuacgccuggaaccgcaagcggaucuccaacugcguggcggacuacagcgugcuguacaacuccgccagcuucuccacguucaagugcuacggcgucagccccaccaagcucaacgaccugugcuucaccaacguguacgccgacuccuucgugauccgcggggacgagguccggcagaucgcccccggccagaccgggaagaucgccgacuacaacuacaagcugccggacgacuucacgggcugcgugaucgcguggaacagcaacaaccucgacuccaaggucgggggcaacuacaacuaccuguuccgccuguuccgcaagagcaaccucaagcccuucgagcgggacaucuccaccgagaucuaccaggccggcagcacccccugcaacgggguggagggcuucaacugcuacuucccccugcaguccuacggguuccagccgaccaacggcgugggguaccagcccuaccggguggucgugcugagcuucgagcuccugcacgcccccgccacggugugcggccccaagaaguccaccaaccuggucaagaacaagugcgugaacuucaacuucaacggccucaccgggaccggcgugcugaccgagagcaacaagaaguuccugccguuccagcaguucgggcgcgacaucgccgacacgaccgacgcgguccgcgacccccagacccuggagauccucgacaucacccccugcagcuucggcgggguguccgugaucacgccgggcaccaacaccagcaaccaggucgccgugcuguaccagggcgugaacugcaccgagguccccguggccauccacgccgaccagcugacgcccaccuggcggguguacuccaccggcagcaacgucuuccagacccgcgccgggugccucaucggcgcggagcacgugaacaacuccuacgagugcgacauccccaucggggccggcaucugcgccagcuaccagacgcagaccaacuccccgcggcgcgcccggagcguggcgucccagagcgugaucgccuacaccaugucccugggcgccgagaacagcgucgccuacuccaacaacagcaucgccauccccaccaacuucacgaucuccgugaccaccgagauccugcccgugagcaugaccaagacgagcgucgacugcaccauguacaucugcggggacuccaccgagugcagcaaccuccugcugcaguacggcuccuucugcacccagcucaaccgcgcgcugacggggaucgccguggagcaggacaagaacacccaggagguguucgcccaggucaagcagaucuacaagacgcccccgaucaaggacuucggcggguucaacuucagccagauccugcccgaccccuccaagcccagcaagcgguccuucaucgaggaccuccuguucaacaaggugacccuggccgacgccggcuucaucaagcaguacggcgacugccucggggacaucgcggcccgcgaccugaucugcgcccagaaguucaacggccugaccgugcucccgccccugcugaccgacgagaugaucgcccaguacaccagcgcccuccuggcggggaccaucacguccggcuggaccuucggggccggcgccgcccugcagauccccuucgcgaugcagauggccuaccgguucaacggcaucggggucacccagaacgugcucuacgagaaccagaagcugaucgccaaccaguucaacagcgccaucggcaagauccaggacucccugagcuccaccgccagcgcgcucgggaagcugcaggacguggucaaccagaacgcccaggcccugaacacgcucgugaagcagcuguccagcaacuucggcgccaucuccagcgugcugaacgacauccucucccgccuggacccgcccgaggccgaggugcagaucgaccggcugaucaccgggcgccuccagagccugcagaccuacgugacccagcagcugauccgggcggccgagauccgcgccagcgccaaccucgccgcgaccaagauguccgagugcguccugggccagagcaagcggguggacuucugcggcaagggguaccaccugauguccuucccccagagcgccccgcacggcguggucuuccuccacgugacguacguccccgcccaggagaagaacuucaccaccgcccccgcgaucugccacgacgggaaggcccacuucccccgcgagggcguguucguguccaacgggacccacugguucgucacgcagcggaacuucuacgagccgcagaucaucaccaccgacaacaccuucgugagcggcaacugcgacguggucaucggcaucgugaacaacacgguguacgacccccugcagcccgagcuggacuccuucaaggaggagcucgacaaguacuucaagaaccacaccagccccgacgucgaccugggggacaucuccggcaucaacgccagcguggugaacauccagaaggagaucgaccgccugaacgaggucgccaagaaccucaacgagucccugaucgaccugcaggagcucgggaaguacgagcaguacaucaaguggccgugguacaucuggcugggcuucaucgccggccugaucgcgaucgugaucgugaccaucaugcucugcugcaugaccagcugcugcuccugccugaaggggugcugcagcugcggcuccugcugcaaguucgacgaggacgacagcgagcccguccugaagggggugaagcuccacuacacgugaggacuaguuauaagacugacuagcccgaugggccucccaacgggcccuccuccccuccuugcaccgagagaucuaaaaaaaaaaaaaaaaaaaaaaaaaaaaaaaaaaaaaaaaaaaaaaaaaaaaaaaaaaaaaaaaaaaaaaaaaaaaaaaaaaaaaaaaaaaaaaaaaaaa

SEQ ID NO: 25949 - RNA, 4002 nt, Artificial Sequence
  SARS-CoV-2/Wuhan/WIV05/2019__EPI_ISL_402128 spike protein mRNA gc (1-1273)(K986P_V987P_K986P_V987P_H69del_V70del_Y144del_N501Y_A570 D_D614G_P681H_T716I_S982A_D1118H)
aggagaaagcuuaccauguucguguuccugguccuccugccccuggugagcucccagugcgugaaccucaccacccgcacgcagcugccgcccgccuacaccaacagcuucacccggggcgucuacuaccccgacaagguguuccgcuccagcgugcugcacuccacccaggaccucuuccugcccuucuucagcaacgucacgugguuccacgccaucuccgggaccaacggcaccaagcgguucgacaacccggugcugcccuucaacgacggggucuacuucgcgagcaccgagaaguccaacaucauccgcggcuggaucuucgggacgacccucgacagcaagacccagucccugcugaucgugaacaacgccaccaacguggucaucaaggugugcgaguuccaguucugcaacgaccccuuccucggcguguaccacaagaacaacaagagcuggauggaguccgaguuccgggucuacagcuccgccaacaacugcacguucgaguacgugagccagcccuuccugauggaccuggagggcaagcaggggaacuucaagaaccuccgcgaguucguguucaagaacaucgacggcuacuucaagaucuacuccaagcacaccccgaucaaccugguccgggaccugccccagggguucagcgcccucgagccccugguggaccugcccaucggcaucaacaucacccgcuuccagacccuccuggcccugcaccgguccuaccucacgccgggggacagcagcuccggcuggaccgcgggcgccgccgccuacuacgugggguaccugcagccccgcaccuuccugcucaaguacaacgagaacggcaccaucacggacgcggucgacugcgcccuggacccccugagcgagaccaagugcacccucaaguccuucaccguggagaaggggaucuaccagacgagcaacuuccgggugcagcccaccgaguccaucguccgcuucccgaacaucaccaaccugugccccuucggcgagguguucaacgccacccgguucgccagcgucuacgccuggaaccgcaagcggaucuccaacugcguggcggacuacagcgugcuguacaacuccgccagcuucuccacguucaagugcuacggcgucagccccaccaagcucaacgaccugugcuucaccaacguguacgccgacuccuucgugauccgcggggacgagguccggcagaucgcccccggccagaccgggaagaucgccgacuacaacuacaagcugccggacgacuucacgggcugcgugaucgcguggaacagcaacaaccucgacuccaaggucgggggcaacuacaacuaccuguaccgccuguuccgcaagagcaaccucaagcccuucgagcgggacaucuccaccgagaucuaccaggccggcagcacccccugcaacgggguggagggcuucaacugcuacuucccccugcaguccuacggguuccagccgaccuacggcgugggguaccagcccuaccggguggucgugcugagcuucgagcuccugcacgcccccgccacggugugcggccccaagaaguccaccaaccuggucaagaacaagugcgugaacuucaacuucaacggccucaccgggaccggcgugcugaccgagagcaacaagaaguuccugccguuccagcaguucgggcgcgacaucgacgacacgaccgacgcgguccgcgacccccagacccuggagauccucgacaucacccccugcagcuucggcgggguguccgugaucacgccgggcaccaacaccagcaaccaggucgccgugcuguaccagggcgugaacugcaccgagguccccguggccauccacgccgaccagcugacgcccaccuggcggguguacuccaccggcagcaacgucuuccagacccgcgccgggugccucaucggcgcggagcacgugaacaacuccuacgagugcgacauccccaucggggccggcaucugcgccagcuaccagacgcagaccaacucccaccggcgcgcccggagcguggcgucccagagcaucaucgccuacaccaugucccugggcgccgagaacagcgucgccuacuccaacaacagcaucgccauccccaucaacuucacgaucuccgugaccaccgagauccugcccgugagcaugaccaagacgagcgucgacugcaccauguacaucugcggggacuccaccgagugcagcaaccuccugcugcaguacggcuccuucugcacccagcucaaccgcgcgcugacggggaucgccguggagcaggacaagaacacccaggagguguucgcccaggucaagcagaucuacaagacgcccccgaucaaggacuucggcggguucaacuucagccagauccugcccgaccccuccaagcccagcaagcgguccuucaucgaggaccuccuguucaacaaggugacccuggccgacgccggcuucaucaagcaguacggcgacugccucggggacaucgcggcccgcgaccugaucugcgcccagaaguucaacggccugaccgugcucccgccccugcugaccgacgagaugaucgcccaguacaccagcgcccuccuggcggggaccaucacguccggcuggaccuucggggccggcgccgcccugcagauccccuucgcgaugcagauggccuaccgguucaacggcaucggggucacccagaacgugcucuacgagaaccagaagcugaucgccaaccaguucaacagcgccaucggcaagauccaggacucccugagcuccaccgccagcgcgcucgggaagcugcaggacguggucaaccagaacgcccaggcccugaacacgcucgugaagcagcuguccagcaacuucggcgccaucuccagcgugcugaacgacauccucgcccgccuggacccgcccgaggccgaggugcagaucgaccggcugaucaccgggcgccuccagagccugcagaccuacgugacccagcagcugauccgggcggccgagauccgcgccagcgccaaccucgccgcgaccaagauguccgagugcguccugggccagagcaagcggguggacuucugcggcaagggguaccaccugauguccuucccccagagcgccccgcacggcguggucuuccuccacgugacguacguccccgcccaggagaagaacuucaccaccgcccccgcgaucugccacgacgggaaggcccacuucccccgcgagggcguguucguguccaacgggacccacugguucgucacgcagcggaacuucuacgagccgcagaucaucaccacccacaacaccuucgugagcggcaacugcgacguggucaucggcaucgugaacaacacgguguacgacccccugcagcccgagcuggacuccuucaaggaggagcucgacaaguacuucaagaaccacaccagccccgacgucgaccugggggacaucuccggcaucaacgccagcguggugaacauccagaaggagaucgaccgccugaacgaggucgccaagaaccucaacgagucccugaucgaccugcaggagcucgggaaguacgagcaguacaucaaguggccgugguacaucuggcugggcuucaucgccggccugaucgcgaucgugauggugaccaucaugcucugcugcaugaccagcugcugcuccugccugaaggggugcugcagcugcggcuccugcugcaaguucgacgaggacgacagcgagcccguccugaagggggugaagcuccacuacacgugaggacuaguuauaagacugacuagcccgaugggccucccaacgggcccuccuccccuccuugcaccgagagaucuaaaaaaaaaaaaaaaaaaaaaaaaaaaaaaaaaaaaaaaaaaaaaaaaaaaaaaaaaaaaaaaaaaaaaaaaaaaaaaaaaaaaaaaaaaaaaaaaaaaa

SEQ ID NO: 25950 - RNA, 4011 nt, Artificial Sequence
  SARS-CoV-2/Wuhan/WIV05/2019__EPI_ISL_402128 spike protein mRNA gc (1-1273)(K986P_V987P_K986P_V987P_K417N_E484K_N501Y_D614G)
aggagaaagcuuaccauguucguguuccugguccuccugccccuggugagcucccagugcgugaaccucaccacccgcacgcagcugccgcccgccuacaccaacagcuucacccggggcgucuacuaccccgacaagguguuccgcuccagcgugcugcacuccacccaggaccucuuccugcccuucuucagcaacgucacgugguuccacgccauccacguguccgggaccaacggcaccaagcgguucgacaacccggugcugcccuucaacgacggggucuacuucgcgagcaccgagaaguccaacaucauccgcggcuggaucuucgggacgacccucgacagcaagacccagucccugcugaucgugaacaacgccaccaacguggucaucaaggugugcgaguuccaguucugcaacgaccccuuccucggcguguacuaccacaagaacaacaagagcuggauggaguccgaguuccgggucuacagcuccgccaacaacugcacguucgaguacgugagccagcccuuccugauggaccuggagggcaagcaggggaacuucaagaaccuccgcgaguucguguucaagaacaucgacggcuacuucaagaucuacuccaagcacaccccgaucaaccugguccgggaccugccccagggguucagcgcccucgagccccugguggaccugcccaucggcaucaacaucacccgcuuccagacccuccuggcccugcaccgguccuaccucacgccgggggacagcagcuccggcuggaccgcgggcgccgccgccuacuacgugggguaccugcagccccgcaccuuccugcucaaguacaacgagaacggcaccaucacggacgcggucgacugcgcccuggacccccugagcgagaccaagugcacccucaaguccuucaccguggagaaggggaucuaccagacgagcaacuuccgggugcagcccaccgaguccaucguccgcuucccgaacaucaccaaccugugccccuucggcgagguguucaacgccacccgguucgccagcgucuacgccuggaaccgcaagcggaucuccaacugcguggcggacuacagcgugcuguacaacuccgccagcuucuccacguucaagugcuacggcgucagccccaccaagcucaacgaccugugcuucaccaacguguacgccgacuccuucgugauccgcggggacgagguccggcagaucgcccccggccagaccgggaacaucgccgacuacaacuacaagcugccggacgacuucacgggcugcgugaucgcguggaacagcaacaaccucgacuccaaggucgggggcaacuacaacuaccuguaccgccuguuccgcaagagcaaccucaagcccuucgagcgggacaucuccaccgagaucuaccaggccggcagcacccccugcaacggggugaagggcuucaacugcuacuucccccugcaguccuacggguuccagccgaccuacggcgugggguaccagcccuaccggguggucgugcugagcuucgagcuccugcacgcccccgccacggugugcggccccaagaaguccaccaaccuggucaagaacaagugcgugaacuucaacuucaacggccucaccgggaccggcgugcugaccgagagcaacaagaaguuccugccguuccagcaguucgggcgcgacaucgccgacacgaccgacgcgguccgcgacccccagacccuggagauccucgacaucacccccugcagcuucggcgggguguccgugaucacgccgggcaccaacaccagcaaccaggucgccgugcuguaccagggcgugaacugcaccgagguccccguggccauccacgccgaccagcugacgcccaccuggcggguguacuccaccggcagcaacgucuuccagacccgcgccgggugccucaucggcgcggagcacgugaacaacuccuacgagugcgacauccccaucggggccggcaucugcgccagcuaccagacgcagaccaacuccccgcggcgcgcccggagcguggcgucccagagcaucaucgccuacaccaugucccugggcgccgagaacagcgucgccuacuccaacaacagcaucgccauccccaccaacuucacgaucuccgugaccaccgagauccugcccgugagcaugaccaagacgagcgucgacugcaccauguacaucugcggggacuccaccgagugcagcaaccuccugcugcaguacggcuccuucugcacccagcucaaccgcgcgcugacggggaucgccguggagcaggacaagaacacccaggagguguucgcccaggucaagcagaucuacaagacgcccccgaucaaggacuucggcggguucaacuucagccagauccugcccgaccccuccaagcccagcaagcgguccuucaucgaggaccuccuguucaacaaggugacccuggccgacgccggcuucaucaagcaguacggcgacugccucggggacaucgcggcccgcgaccugaucugcgcccagaaguucaacggccugaccgugcucccgccccugcugaccgacgagaugaucgcccaguacaccagcgcccuccuggcggggaccaucacguccggcuggaccuucggggccggcgccgcccugcagauccccuucgcgaugcagauggccuaccgguucaacggcaucggggucacccagaacgugcucuacgagaaccagaagcugaucgccaaccaguucaacagcgccaucggcaagauccaggacucccugagcuccaccgccagcgcgcucgggaagcugcaggacguggucaaccagaacgcccaggcccugaacacgcucgugaagcagcuguccagcaacuucggcgccaucuccagcgugcugaacgacauccucucccgccuggacccgcccgaggccgaggugcagaucgaccggcugaucaccgggcgccuccagagccugcagaccuacgugacccagcagcugauccgggcggccgagauccgcgccagcgccaaccucgccgcgaccaagauguccgagugcguccugggccagagcaagcggguggacuucugcggcaagggguaccaccugauguccuucccccagagcgccccgcacggcguggucuuccuccacgugacguacguccccgcccaggagaagaacuucaccaccgcccccgcgaucugccacgacgggaaggcccacuucccccgcgagggcguguucguguccaacgggacccacugguucgucacgcagcggaacuucuacgagccgcagaucaucaccaccgacaacaccuucgugagcggcaacugcgacguggucaucggcaucgugaacaacacgguguacgacccccugcagcccgagcuggacuccuucaaggaggagcucgacaaguacuucaagaaccacaccagccccgacgucgaccugggggacaucuccggcaucaacgccagcguggugaacauccagaaggagaucgaccgccugaacgaggucgccaagaaccucaacgagucccugaucgaccugcaggagcucgggaaguacgagcaguacaucaaguggccgugguacaucuggcugggcuucaucgccggccugaucgcgaucgugauggugaccaucaugcucugcugcaugaccagcugcugcuccugccugaaggggugcugcagcugcggcuccugcugcaaguucgacgaggacgacagcgagcccguccugaagggggugaagcuccacuacacgugaggacuaguuauaagacugacuagcccgaugggccucccaacgggcccuccuccccuccuugcaccgagagaucuaaaaaaaaaaaaaaaaaaaaaaaaaaaaaaaaaaaaaaaaaaaaaaaaaaaaaaaaaaaaaaaaaaaaaaaaaaaaaaaaaaaaaaaaaaaaaaaaaaaa

SEQ ID NO: 25951 - RNA, 4002 nt, Artificial Sequence
  SARS-CoV-2/Wuhan/WIV05/2019__EPI_ISL_402128 spike protein mRNA gc (1-1273)(K986P_V987P_K986P_V987P_L18F_D80A_D215G_L242del_A243del_ L244del_R246I_K417N_E484K_N501Y_D614G_A701V)
aggagaaagcuuaccauguucguguuccugguccuccugccccuggugagcucccagugcgugaacuucaccacccgcacgcagcugccgcccgccuacaccaacagcuucacccggggcgucuacuaccccgacaagguguuccgcuccagcgugcugcacuccacccaggaccucuuccugcccuucuucagcaacgucacgugguuccacgccauccacguguccgggaccaacggcaccaagcgguucgccaacccggugcugcccuucaacgacggggucuacuucgcgagcaccgagaaguccaacaucauccgcggcuggaucuucgggacgacccucgacagcaagacccagucccugcugaucgugaacaacgccaccaacguggucaucaaggugugcgaguuccaguucugcaacgaccccuuccucggcguguacuaccacaagaacaacaagagcuggauggaguccgaguuccgggucuacagcuccgccaacaacugcacguucgaguacgugagccagcccuuccugauggaccuggagggcaagcaggggaacuucaagaaccuccgcgaguucguguucaagaacaucgacggcuacuucaagaucuacuccaagcacaccccgaucaaccugguccggggccugccccagggguucagcgcccucgagccccugguggaccugcccaucggcaucaacaucacccgcuuccagacccuccacaucuccuaccucacgccgggggacagcagcuccggcuggaccgcgggcgccgccgccuacuacgugggguaccugcagccccgcaccuuccugcucaaguacaacgagaacggcaccaucacggacgcggucgacugcgcccuggacccccugagcgagaccaagugcacccucaaguccuucaccguggagaaggggaucuaccagacgagcaacuuccgggugcagcccaccgaguccaucguccgcuucccgaacaucaccaaccugugccccuucggcgagguguucaacgccacccgguucgccagcgucuacgccuggaaccgcaagcggaucuccaacugcguggcggacuacagcgugcuguacaacuccgccagcuucuccacguucaagugcuacggcgucagccccaccaagcucaacgaccugugcuucaccaacguguacgccgacuccuucgugauccgcggggacgagguccggcagaucgcccccggccagaccgggaacaucgccgacuacaacuacaagcugccggacgacuucacgggcugcgugaucgcguggaacagcaacaaccucgacuccaaggucgggggcaacuacaacuaccuguaccgccuguuccgcaagagcaaccucaagcccuucgagcgggacaucuccaccgagaucuaccaggccggcagcacccccugcaacggggugaagggcuucaacugcuacuucccccugcaguccuacggguuccagccgaccuacggcgugggguaccagcccuaccggguggucgugcugagcuucgagcuccugcacgcccccgccacggugugcggccccaagaaguccaccaaccuggucaagaacaagugcgugaacuucaacuucaacggccucaccgggaccggcgugcugaccgagagcaacaagaaguuccugccguuccagcaguucgggcgcgacaucgccgacacgaccgacgcgguccgcgacccccagacccuggagauccucgacaucacccccugcagcuucggcgggguguccgugaucacgccgggcaccaacaccagcaaccaggucgccgugcuguaccagggcgugaacugcaccgagguccccguggccauccacgccgaccagcugacgcccaccuggcggguguacuccaccggcagcaacgucuuccagacccgcgccgggugccucaucggcgcggagcacgugaacaacuccuacgagugcgacauccccaucggggccggcaucugcgccagcuaccagacgcagaccaacuccccgcggcgcgcccggagcguggcgucccagagcaucaucgccuacaccaugucccugggcguggagaacagcgucgccuacuccaacaacagcaucgccauccccaccaacuucacgaucuccgugaccaccgagauccugcccgugagcaugaccaagacgagcgucgacugcaccauguacaucugcggggacuccaccgagugcagcaaccuccugcugcaguacggcuccuucugcacccagcucaaccgcgcgcugacggggaucgccguggagcaggacaagaacacccaggagguguucgcccaggucaagcagaucuacaagacgcccccgaucaaggacuucggcggguucaacuucagccagauccugcccgaccccuccaagcccagcaagcgguccuucaucgaggaccuccuguucaacaaggugacccuggccgacgccggcuucaucaagcaguacggcgacugccucggggacaucgcggcccgcgaccugaucugcgcccagaaguucaacggccugaccgugcucccgccccugcugaccgacgagaugaucgcccaguacaccagcgcccuccuggcggggaccaucacguccggcuggaccuucggggccggcgccgcccugcagauccccuucgcgaugcagauggccuaccgguucaacggcaucggggucacccagaacgugcucuacgagaaccagaagcugaucgccaaccaguucaacagcgccaucggcaagauccaggacucccugagcuccaccgccagcgcgcucgggaagcugcaggacguggucaaccagaacgcccaggcccugaacacgcucgugaagcagcuguccagcaacuucggcgccaucuccagcgugcugaacgacauccucucccgccuggacccgcccgaggccgaggugcagaucgaccggcugaucaccgggcgccuccagagccugcagaccuacgugacccagcagcugauccgggcggccgagauccgcgccagcgccaaccucgccgcgaccaagauguccgagugcguccugggccagagcaagcggguggacuucugcggcaagggguaccaccugauguccuucccccagagcgccccgcacggcguggucuuccuccacgugacguacguccccgcccaggagaagaacuucaccaccgcccccgcgaucugccacgacgggaaggcccacuucccccgcgagggcguguucguguccaacgggacccacugguucgucacgcagcggaacuucuacgagccgcagaucaucaccaccgacaacaccuucgugagcggcaacugcgacguggucaucggcaucgugaacaacacgguguacgacccccugcagcccgagcuggacuccuucaaggaggagcucgacaaguacuucaagaaccacaccagccccgacgucgaccugggggacaucuccggcaucaacgccagcguggugaacauccagaaggagaucgaccgccugaacgaggucgccaagaaccucaacgagucccugaucgaccugcaggagcucgggaaguacgagcaguacaucaaguggccgugguacaucuggcugggcuucaucgccggccugaucgcgaucgugauggugaccaucaugcucugcugcaugaccagcugcugcuccugccugaaggggugcugcagcugcggcuccugcugcaaguucgacgaggacgacagcgagcccguccugaagggggugaagcuccacuacacgugaggacuaguuauaagacugacuagcccgaugggccucccaacgggcccuccuccccuccuugcaccgagagaucuaaaaaaaaaaaaaaaaaaaaaaaaaaaaaaaaaaaaaaaaaaaaaaaaaaaaaaaaaaaaaaaaaaaaaaaaaaaaaaaaaaaaaaaaaaaaaaaaaaaa

SEQ ID NO: 25952 - RNA, 4011 nt, Artificial Sequence
  SARS-CoV-2/Wuhan/WIV05/2019__EPI_ISL_402128 spike protein mRNA gc (1-1273)(K986P_V987P_K986P_V987P_E484K_D614G)
aggagaaagcuuaccauguucguguuccugguccuccugccccuggugagcucccagugcgugaaccucaccacccgcacgcagcugccgcccgccuacaccaacagcuucacccggggcgucuacuaccccgacaagguguuccgcuccagcgugcugcacuccacccaggaccucuuccugcccuucuucagcaacgucacgugguuccacgccauccacguguccgggaccaacggcaccaagcgguucgacaacccggugcugcccuucaacgacggggucuacuucgcgagcaccgagaaguccaacaucauccgcggcuggaucuucgggacgacccucgacagcaagacccagucccugcugaucgugaacaacgccaccaacguggucaucaaggugugcgaguuccaguucugcaacgaccccuuccucggcguguacuaccacaagaacaacaagagcuggauggaguccgaguuccgggucuacagcuccgccaacaacugcacguucgaguacgugagccagcccuuccugauggaccuggagggcaagcaggggaacuucaagaaccuccgcgaguucguguucaagaacaucgacggcuacuucaagaucuacuccaagcacaccccgaucaaccugguccgggaccugccccagggguucagcgcccucgagccccugguggaccugcccaucggcaucaacaucacccgcuuccagacccuccuggcccugcaccgguccuaccucacgccgggggacagcagcuccggcuggaccgcgggcgccgccgccuacuacgugggguaccugcagccccgcaccuuccugcucaaguacaacgagaacggcaccaucacggacgcggucgacugcgcccuggacccccugagcgagaccaagugcacccucaaguccuucaccguggagaaggggaucuaccagacgagcaacuuccgggugcagcccaccgaguccaucguccgcuucccgaacaucaccaaccugugccccuucggcgagguguucaacgccacccgguucgccagcgucuacgccuggaaccgcaagcggaucuccaacugcguggcggacuacagcgugcuguacaacuccgccagcuucuccacguucaagugcuacggcgucagccccaccaagcucaacgaccugugcuucaccaacguguacgccgacuccuucgugauccgcggggacgagguccggcagaucgcccccggccagaccgggaagaucgccgacuacaacuacaagcugccggacgacuucacgggcugcgugaucgcguggaacagcaacaaccucgacuccaaggucgggggcaacuacaacuaccuguaccgccuguuccgcaagagcaaccucaagcccuucgagcgggacaucuccaccgagaucuaccaggccggcagcacccccugcaacggggugaagggcuucaacugcuacuucccccugcaguccuacggguuccagccgaccaacggcgugggguaccagcccuaccggguggucgugcugagcuucgagcuccugcacgcccccgccacggugugcggccccaagaaguccaccaaccuggucaagaacaagugcgugaacuucaacuucaacggccucaccgggaccggcgugcugaccgagagcaacaagaaguuccugccguuccagcaguucgggcgcgacaucgccgacacgaccgacgcgguccgcgacccccagacccuggagauccucgacaucacccccugcagcuucggcgggguguccgugaucacgccgggcaccaacaccagcaaccaggucgccgugcuguaccagggcgugaacugcaccgagguccccguggccauccacgccgaccagcugacgcccaccuggcggguguacuccaccggcagcaacgucuuccagacccgcgccgggugccucaucggcgcggagcacgugaacaacuccuacgagugcgacauccccaucggggccggcaucugcgccagcuaccagacgcagaccaacuccccgcggcgcgcccggagcguggcgucccagagcaucaucgccuacaccaugucccugggcgccgagaacagcgucgccuacuccaacaacagcaucgccauccccaccaacuucacgaucuccgugaccaccgagauccugcccgugagcaugaccaagacgagcgucgacugcaccauguacaucugcggggacuccaccgagugcagcaaccuccugcugcaguacggcuccuucugcacccagcucaaccgcgcgcugacggggaucgccguggagcaggacaagaacacccaggagguguucgcccaggucaagcagaucuacaagacgcccccgaucaaggacuucggcggguucaacuucagccagauccugcccgaccccuccaagcccagcaagcgguccuucaucgaggaccuccuguucaacaaggugacccuggccgacgccggcuucaucaagcaguacggcgacugccucggggacaucgcggcccgcgaccugaucugcgcccagaaguucaacggccugaccgugcucccgccccugcugaccgacgagaugaucgcccaguacaccagcgcccuccuggcggggaccaucacguccggcuggaccuucggggccggcgccgcccugcagauccccuucgcgaugcagauggccuaccgguucaacggcaucggggucacccagaacgugcucuacgagaaccagaagcugaucgccaaccaguucaacagcgccaucggcaagauccaggacucccugagcuccaccgccagcgcgcucgggaagcugcaggacguggucaaccagaacgcccaggcccugaacacgcucgugaagcagcuguccagcaacuucggcgccaucuccagcgugcugaacgacauccucucccgccuggacccgcccgaggccgaggugcagaucgaccggcugaucaccgggcgccuccagagccugcagaccuacgugacccagcagcugauccgggcggccgagauccgcgccagcgccaaccucgccgcgaccaagauguccgagugcguccugggccagagcaagcggguggacuucugcggcaagggguaccaccugauguccuucccccagagcgccccgcacggcguggucuuccuccacgugacguacguccccgcccaggagaagaacuucaccaccgcccccgcgaucugccacgacgggaaggcccacuucccccgcgagggcguguucguguccaacgggacccacugguucgucacgcagcggaacuucuacgagccgcagaucaucaccaccgacaacaccuucgugagcggcaacugcgacguggucaucggcaucgugaacaacacgguguacgacccccugcagcccgagcuggacuccuucaaggaggagcucgacaaguacuucaagaaccacaccagccccgacgucgaccugggggacaucuccggcaucaacgccagcguggugaacauccagaaggagaucgaccgccugaacgaggucgccaagaaccucaacgagucccugaucgaccugcaggagcucgggaaguacgagcaguacaucaaguggccgugguacaucuggcugggcuucaucgccggccugaucgcgaucgugauggugaccaucaugcucugcugcaugaccagcugcugcuccugccugaaggggugcugcagcugcggcuccugcugcaaguucgacgaggacgacagcgagcccguccugaagggggugaagcuccacuacacgugaggacuaguuauaagacugacuagcccgaugggccucccaacgggcccuccuccccuccuugcaccgagagaucuaaaaaaaaaaaaaaaaaaaaaaaaaaaaaaaaaaaaaaaaaaaaaaaaaaaaaaaaaaaaaaaaaaaaaaaaaaaaaaaaaaaaaaaaaaaaaaaaaaaa

SEQ ID NO: 25953 - RNA, 4011 nt, Artificial Sequence
  SARS-CoV-2/Wuhan/WIV05/2019__EPI_ISL_402128 spike protein mRNA gc (1-1273)(K986P_V987P_K986P_V987P_L18F_T20N_P26S_D138Y_R190S_K417T _E484K_N501Y_D614G_H655Y_T1027I)
aggagaaagcuuaccauguucguguuccugguccuccugccccuggugagcucccagugcgugaacuucaccaaccgcacgcagcugccgagcgccuacaccaacagcuucacccggggcgucuacuaccccgacaagguguuccgcuccagcgugcugcacuccacccaggaccucuuccugcccuucuucagcaacgucacgugguuccacgccauccacguguccgggaccaacggcaccaagcgguucgacaacccggugcugcccuucaacgacggggucuacuucgcgagcaccgagaaguccaacaucauccgcggcuggaucuucgggacgacccucgacagcaagacccagucccugcugaucgugaacaacgccaccaacguggucaucaaggugugcgaguuccaguucugcaacuaccccuuccucggcguguacuaccacaagaacaacaagagcuggauggaguccgaguuccgggucuacagcuccgccaacaacugcacguucgaguacgugagccagcccuuccugauggaccuggagggcaagcaggggaacuucaagaaccucagcgaguucguguucaagaacaucgacggcuacuucaagaucuacuccaagcacaccccgaucaaccugguccgggaccugccccagggguucagcgcccucgagccccugguggaccugcccaucggcaucaacaucacccgcuuccagacccuccuggcccugcaccgguccuaccucacgccgggggacagcagcuccggcuggaccgcgggcgccgccgccuacuacgugggguaccugcagccccgcaccuuccugcucaaguacaacgagaacggcaccaucacggacgcggucgacugcgcccuggacccccugagcgagaccaagugcacccucaaguccuucaccguggagaaggggaucuaccagacgagcaacuuccgggugcagcccaccgaguccaucguccgcuucccgaacaucaccaaccugugccccuucggcgagguguucaacgccacccgguucgccagcgucuacgccuggaaccgcaagcggaucuccaacugcguggcggacuacagcgugcuguacaacuccgccagcuucuccacguucaagugcuacggcgucagccccaccaagcucaacgaccugugcuucaccaacguguacgccgacuccuucgugauccgcggggacgagguccggcagaucgcccccggccagaccgggaccaucgccgacuacaacuacaagcugccggacgacuucacgggcugcgugaucgcguggaacagcaacaaccucgacuccaaggucgggggcaacuacaacuaccuguaccgccuguuccgcaagagcaaccucaagcccuucgagcgggacaucuccaccgagaucuaccaggccggcagcacccccugcaacggggugaagggcuucaacugcuacuucccccugcaguccuacggguuccagccgaccuacggcgugggguaccagcccuaccggguggucgugcugagcuucgagcuccugcacgcccccgccacggugugcggccccaagaaguccaccaaccuggucaagaacaagugcgugaacuucaacuucaacggccucaccgggaccggcgugcugaccgagagcaacaagaaguuccugccguuccagcaguucgggcgcgacaucgccgacacgaccgacgcgguccgcgacccccagacccuggagauccucgacaucacccccugcagcuucggcgggguguccgugaucacgccgggcaccaacaccagcaaccaggucgccgugcuguaccagggcgugaacugcaccgagguccccguggccauccacgccgaccagcugacgcccaccuggcggguguacuccaccggcagcaacgucuuccagacccgcgccgggugccucaucggcgcggaguacgugaacaacuccuacgagugcgacauccccaucggggccggcaucugcgccagcuaccagacgcagaccaacuccccgcggcgcgcccggagcguggcgucccagagcaucaucgccuacaccaugucccugggcgccgagaacagcgucgccuacuccaacaacagcaucgccauccccaccaacuucacgaucuccgugaccaccgagauccugcccgugagcaugaccaagacgagcgucgacugcaccauguacaucugcggggacuccaccgagugcagcaaccuccugcugcaguacggcuccuucugcacccagcucaaccgcgcgcugacggggaucgccguggagcaggacaagaacacccaggagguguucgcccaggucaagcagaucuacaagacgcccccgaucaaggacuucggcggguucaacuucagccagauccugcccgaccccuccaagcccagcaagcgguccuucaucgaggaccuccuguucaacaaggugacccuggccgacgccggcuucaucaagcaguacggcgacugccucggggacaucgcggcccgcgaccugaucugcgcccagaaguucaacggccugaccgugcucccgccccugcugaccgacgagaugaucgcccaguacaccagcgcccuccuggcggggaccaucacguccggcuggaccuucggggccggcgccgcccugcagauccccuucgcgaugcagauggccuaccgguucaacggcaucggggucacccagaacgugcucuacgagaaccagaagcugaucgccaaccaguucaacagcgccaucggcaagauccaggacucccugagcuccaccgccagcgcgcucgggaagcugcaggacguggucaaccagaacgcccaggcccugaacacgcucgugaagcagcuguccagcaacuucggcgccaucuccagcgugcugaacgacauccucucccgccuggacccgcccgaggccgaggugcagaucgaccggcugaucaccgggcgccuccagagccugcagaccuacgugacccagcagcugauccgggcggccgagauccgcgccagcgccaaccucgccgcgaucaagauguccgagugcguccugggccagagcaagcggguggacuucugcggcaagggguaccaccugauguccuucccccagagcgccccgcacggcguggucuuccuccacgugacguacguccccgcccaggagaagaacuucaccaccgcccccgcgaucugccacgacgggaaggcccacuucccccgcgagggcguguucguguccaacgggacccacugguucgucacgcagcggaacuucuacgagccgcagaucaucaccaccgacaacaccuucgugagcggcaacugcgacguggucaucggcaucgugaacaacacgguguacgacccccugcagcccgagcuggacuccuucaaggaggagcucgacaaguacuucaagaaccacaccagccccgacgucgaccugggggacaucuccggcaucaacgccagcguggugaacauccagaaggagaucgaccgccugaacgaggucgccaagaaccucaacgagucccugaucgaccugcaggagcucgggaaguacgagcaguacaucaaguggccgugguacaucuggcugggcuucaucgccggccugaucgcgaucgugauggugaccaucaugcucugcugcaugaccagcugcugcuccugccugaaggggugcugcagcugcggcuccugcugcaaguucgacgaggacgacagcgagcccguccugaagggggugaagcuccacuacacgugaggacuaguuauaagacugacuagcccgaugggccucccaacgggcccuccuccccuccuugcaccgagagaucuaaaaaaaaaaaaaaaaaaaaaaaaaaaaaaaaaaaaaaaaaaaaaaaaaaaaaaaaaaaaaaaaaaaaaaaaaaaaaaaaaaaaaaaaaaaaaaaaaaaa

SEQ ID NO: 25954 - RNA, 4011 nt, Artificial Sequence
  SARS-CoV-2/Wuhan/WIV05/2019__EPI_ISL_402128 spike protein mRNA gc (1-1273)(K986P_V987P_K986P_V987P_S13I_W152C_L452R_D614G)
aggagaaagcuuaccauguucguguuccugguccuccugccccuggugagcauccagugcgugaaccucaccacccgcacgcagcugccgcccgccuacaccaacagcuucacccggggcgucuacuaccccgacaagguguuccgcuccagcgugcugcacuccacccaggaccucuuccugcccuucuucagcaacgucacgugguuccacgccauccacguguccgggaccaacggcaccaagcgguucgacaacccggugcugcccuucaacgacggggucuacuucgcgagcaccgagaaguccaacaucauccgcggcuggaucuucgggacgacccucgacagcaagacccagucccugcugaucgugaacaacgccaccaacguggucaucaaggugugcgaguuccaguucugcaacgaccccuuccucggcguguacuaccacaagaacaacaagagcugcauggaguccgaguuccgggucuacagcuccgccaacaacugcacguucgaguacgugagccagcccuuccugauggaccuggagggcaagcaggggaacuucaagaaccuccgcgaguucguguucaagaacaucgacggcuacuucaagaucuacuccaagcacaccccgaucaaccugguccgggaccugccccagggguucagcgcccucgagccccugguggaccugcccaucggcaucaacaucacccgcuuccagacccuccuggcccugcaccgguccuaccucacgccgggggacagcagcuccggcuggaccgcgggcgccgccgccuacuacgugggguaccugcagccccgcaccuuccugcucaaguacaacgagaacggcaccaucacggacgcggucgacugcgcccuggacccccugagcgagaccaagugcacccucaaguccuucaccguggagaaggggaucuaccagacgagcaacuuccgggugcagcccaccgaguccaucguccgcuucccgaacaucaccaaccugugccccuucggcgagguguucaacgccacccgguucgccagcgucuacgccuggaaccgcaagcggaucuccaacugcguggcggacuacagcgugcuguacaacuccgccagcuucuccacguucaagugcuacggcgucagccccaccaagcucaacgaccugugcuucaccaacguguacgccgacuccuucgugauccgcggggacgagguccggcagaucgcccccggccagaccgggaagaucgccgacuacaacuacaagcugccggacgacuucacgggcugcgugaucgcguggaacagcaacaaccucgacuccaaggucgggggcaacuacaacuaccgcuaccgccuguuccgcaagagcaaccucaagcccuucgagcgggacaucuccaccgagaucuaccaggccggcagcacccccugcaacgggguggagggcuucaacugcuacuucccccugcaguccuacggguuccagccgaccaacggcgugggguaccagcccuaccggguggucgugcugagcuucgagcuccugcacgcccccgccacggugugcggccccaagaaguccaccaaccuggucaagaacaagugcgugaacuucaacuucaacggccucaccgggaccggcgugcugaccgagagcaacaagaaguuccugccguuccagcaguucgggcgcgacaucgccgacacgaccgacgcgguccgcgacccccagacccuggagauccucgacaucacccccugcagcuucggcgggguguccgugaucacgccgggcaccaacaccagcaaccaggucgccgugcuguaccagggcgugaacugcaccgagguccccguggccauccacgccgaccagcugacgcccaccuggcggguguacuccaccggcagcaacgucuuccagacccgcgccgggugccucaucggcgcggagcacgugaacaacuccuacgagugcgacauccccaucggggccggcaucugcgccagcuaccagacgcagaccaacuccccgcggcgcgcccggagcguggcgucccagagcaucaucgccuacaccaugucccugggcgccgagaacagcgucgccuacuccaacaacagcaucgccauccccaccaacuucacgaucuccgugaccaccgagauccugcccgugagcaugaccaagacgagcgucgacugcaccauguacaucugcggggacuccaccgagugcagcaaccuccugcugcaguacggcuccuucugcacccagcucaaccgcgcgcugacggggaucgccguggagcaggacaagaacacccaggagguguucgcccaggucaagcagaucuacaagacgcccccgaucaaggacuucggcggguucaacuucagccagauccugcccgaccccuccaagcccagcaagcgguccuucaucgaggaccuccuguucaacaaggugacccuggccgacgccggcuucaucaagcaguacggcgacugccucggggacaucgcggcccgcgaccugaucugcgcccagaaguucaacggccugaccgugcucccgccccugcugaccgacgagaugaucgcccaguacaccagcgcccuccuggcggggaccaucacguccggcuggaccuucggggccggcgccgcccugcagauccccuucgcgaugcagauggccuaccgguucaacggcaucggggucacccagaacgugcucuacgagaaccagaagcugaucgccaaccaguucaacagcgccaucggcaagauccaggacucccugagcuccaccgccagcgcgcucgggaagcugcaggacguggucaaccagaacgcccaggcccugaacacgcucgugaagcagcuguccagcaacuucggcgccaucuccagcgugcugaacgacauccucucccgccuggacccgcccgaggccgaggugcagaucgaccggcugaucaccgggcgccuccagagccugcagaccuacgugacccagcagcugauccgggcggccgagauccgcgccagcgccaaccucgccgcgaccaagauguccgagugcguccugggccagagcaagcggguggacuucugcggcaagggguaccaccugauguccuucccccagagcgccccgcacggcguggucuuccuccacgugacguacguccccgcccaggagaagaacuucaccaccgcccccgcgaucugccacgacgggaaggcccacuucccccgcgagggcguguucguguccaacgggacccacugguucgucacgcagcggaacuucuacgagccgcagaucaucaccaccgacaacaccuucgugagcggcaacugcgacguggucaucggcaucgugaacaacacgguguacgacccccugcagcccgagcuggacuccuucaaggaggagcucgacaaguacuucaagaaccacaccagccccgacgucgaccugggggacaucuccggcaucaacgccagcguggugaacauccagaaggagaucgaccgccugaacgaggucgccaagaaccucaacgagucccugaucgaccugcaggagcucgggaaguacgagcaguacaucaaguggccgugguacaucuggcugggcuucaucgccggccugaucgcgaucgugauggugaccaucaugcucugcugcaugaccagcugcugcuccugccugaaggggugcugcagcugcggcuccugcugcaaguucgacgaggacgacagcgagcccguccugaagggggugaagcuccacuacacgugaggacuaguuauaagacugacuagcccgaugggccucccaacgggcccuccuccccuccuugcaccgagagaucuaaaaaaaaaaaaaaaaaaaaaaaaaaaaaaaaaaaaaaaaaaaaaaaaaaaaaaaaaaaaaaaaaaaaaaaaaaaaaaaaaaaaaaaaaaaaaaaaaaaa

SEQ ID NO: 25955 - RNA, 4011 nt, Artificial Sequence
  SARS-CoV-2/Wuhan/WIV05/2019__EPI_ISL_402128 spike protein mRNA gc (1-1273)(K986P_V987P)
aggagaaagcuuaccauguucguguuccugguccuccugccccuggugagcucccagugcgugaaccucaccacccgcacgcagcugccgcccgccuacaccaacagcuucacccggggcgucuacuaccccgacaagguguuccgcuccagcgugcugcacuccacccaggaccucuuccugcccuucuucagcaacgucacgugguuccacgccauccacguguccgggaccaacggcaccaagcgguucgacaacccggugcugcccuucaacgacggggucuacuucgcgagcaccgagaaguccaacaucauccgcggcuggaucuucgggacgacccucgacagcaagacccagucccugcugaucgugaacaacgccaccaacguggucaucaaggugugcgaguuccaguucugcaacgaccccuuccucggcguguacuaccacaagaacaacaagagcuggauggaguccgaguuccgggucuacagcuccgccaacaacugcacguucgaguacgugagccagcccuuccugauggaccuggagggcaagcaggggaacuucaagaaccuccgcgaguucguguucaagaacaucgacggcuacuucaagaucuacuccaagcacaccccgaucaaccugguccgggaccugccccagggguucagcgcccucgagccccugguggaccugcccaucggcaucaacaucacccgcuuccagacccuccuggcccugcaccgguccuaccucacgccgggggacagcagcuccggcuggaccgcgggcgccgccgccuacuacgugggguaccugcagccccgcaccuuccugcucaaguacaacgagaacggcaccaucacggacgcggucgacugcgcccuggacccccugagcgagaccaagugcacccucaaguccuucaccguggagaaggggaucuaccagacgagcaacuuccgggugcagcccaccgaguccaucguccgcuucccgaacaucaccaaccugugccccuucggcgagguguucaacgccacccgguucgccagcgucuacgccuggaaccgcaagcggaucuccaacugcguggcggacuacagcgugcuguacaacuccgccagcuucuccacguucaagugcuacggcgucagccccaccaagcucaacgaccugugcuucaccaacguguacgccgacuccuucgugauccgcggggacgagguccggcagaucgcccccggccagaccgggaagaucgccgacuacaacuacaagcugccggacgacuucacgggcugcgugaucgcguggaacagcaacaaccucgacuccaaggucgggggcaacuacaacuaccuguaccgccuguuccgcaagagcaaccucaagcccuucgagcgggacaucuccaccgagaucuaccaggccggcagcacccccugcaacgggguggagggcuucaacugcuacuucccccugcaguccuacggguuccagccgaccaacggcgugggguaccagcccuaccggguggucgugcugagcuucgagcuccugcacgcccccgccacggugugcggccccaagaaguccaccaaccuggucaagaacaagugcgugaacuucaacuucaacggccucaccgggaccggcgugcugaccgagagcaacaagaaguuccugccguuccagcaguucgggcgcgacaucgccgacacgaccgacgcgguccgcgacccccagacccuggagauccucgacaucacccccugcagcuucggcgggguguccgugaucacgccgggcaccaacaccagcaaccaggucgccgugcuguaccaggacgugaacugcaccgagguccccguggccauccacgccgaccagcugacgcccaccuggcggguguacuccaccggcagcaacgucuuccagacccgcgccgggugccucaucggcgcggagcacgugaacaacuccuacgagugcgacauccccaucggggccggcaucugcgccagcuaccagacgcagaccaacuccccgcggcgcgcccggagcguggcgucccagagcaucaucgccuacaccaugucccugggcgccgagaacagcgucgccuacuccaacaacagcaucgccauccccaccaacuucacgaucuccgugaccaccgagauccugcccgugagcaugaccaagacgagcgucgacugcaccauguacaucugcggggacuccaccgagugcagcaaccuccugcugcaguacggcuccuucugcacccagcucaaccgcgcgcugacggggaucgccguggagcaggacaagaacacccaggagguguucgcccaggucaagcagaucuacaagacgcccccgaucaaggacuucggcggguucaacuucagccagauccugcccgaccccuccaagcccagcaagcgguccuucaucgaggaccuccuguucaacaaggugacccuggccgacgccggcuucaucaagcaguacggcgacugccucggggacaucgcggcccgcgaccugaucugcgcccagaaguucaacggccugaccgugcucccgccccugcugaccgacgagaugaucgcccaguacaccagcgcccuccuggcggggaccaucacguccggcuggaccuucggggccggcgccgcccugcagauccccuucgcgaugcagauggccuaccgguucaacggcaucggggucacccagaacgugcucuacgagaaccagaagcugaucgccaaccaguucaacagcgccaucggcaagauccaggacucccugagcuccaccgccagcgcgcucgggaagcugcaggacguggucaaccagaacgcccaggcccugaacacgcucgugaagcagcuguccagcaacuucggcgccaucuccagcgugcugaacgacauccucucccgccuggacccgcccgaggccgagguccagaucgaccggcugaucaccgggcgccuccagagccugcagaccuacgugacccagcagcugauccgggcggccgagauccgcgccagcgccaaccucgccgcgaccaagauguccgagugcgugcugggccagagcaagcgggucgacuucugcggcaagggguaccaccugauguccuucccccagagcgcgccccacggcgugguguuccuccacgucacguacgugcccgcccaggagaagaacuucaccaccgccccggccaucugccacgacgggaaggcccacuucccccgcgagggcgucuucguguccaacgggacccacugguucgugacgcagcggaacuucuacgagccccagaucaucaccaccgacaacaccuucgucagcggcaacugcgacguggugaucggcaucgucaacaacacgguguacgacccccugcagccggagcuggacuccuucaaggaggagcucgacaaguacuucaagaaccacaccagccccgacguggaccugggggacaucuccggcaucaacgccagcgucgugaacauccagaaggagaucgaccgccugaacgagguggccaagaaccucaacgagucccugaucgaccugcaggagcucgggaaguacgagcaguacaucaaguggcccugguacaucuggcugggcuucaucgccggccugaucgcgaucgucauggugaccaucaugcucugcugcaugaccagcugcugcuccugccugaaggggugcugcagcugcggcuccugcugcaaguucgacgaggacgacagcgagccggugcugaagggggucaagcuccacuacacgugaggacuaguuauaagacugacuagcccgaugggccucccaacgggcccuccuccccuccuugcaccgagagaucuaaaaaaaaaaaaaaaaaaaaaaaaaaaaaaaaaaaaaaaaaaaaaaaaaaaaaaaaaaaaaaaaaaaaaaaaaaaaaaaaaaaaaaaaaaaaaaaaaaaa

SEQ ID NO: 25956 - RNA, 4011 nt, Artificial Sequence
  SARS-CoV-2/Wuhan/WIV05/2019__EPI_ISL_402128 spike protein mRNA gc (1-1273)(K986P_V987P_ D614G)
aggagaaagcuuaccauguucguguuccugguccuccugccccuggugagcucccagugcgugaaccucaccacccgcacgcagcugccgcccgccuacaccaacagcuucacccggggcgucuacuaccccgacaagguguuccgcuccagcgugcugcacuccacccaggaccucuuccugcccuucuucagcaacgucacgugguuccacgccauccacguguccgggaccaacggcaccaagcgguucgacaacccggugcugcccuucaacgacggggucuacuucgcgagcaccgagaaguccaacaucauccgcggcuggaucuucgggacgacccucgacagcaagacccagucccugcugaucgugaacaacgccaccaacguggucaucaaggugugcgaguuccaguucugcaacgaccccuuccucggcguguacuaccacaagaacaacaagagcuggauggaguccgaguuccgggucuacagcuccgccaacaacugcacguucgaguacgugagccagcccuuccugauggaccuggagggcaagcaggggaacuucaagaaccuccgcgaguucguguucaagaacaucgacggcuacuucaagaucuacuccaagcacaccccgaucaaccugguccgggaccugccccagggguucagcgcccucgagccccugguggaccugcccaucggcaucaacaucacccgcuuccagacccuccuggcccugcaccgguccuaccucacgccgggggacagcagcuccggcuggaccgcgggcgccgccgccuacuacgugggguaccugcagccccgcaccuuccugcucaaguacaacgagaacggcaccaucacggacgcggucgacugcgcccuggacccccugagcgagaccaagugcacccucaaguccuucaccguggagaaggggaucuaccagacgagcaacuuccgggugcagcccaccgaguccaucguccgcuucccgaacaucaccaaccugugccccuucggcgagguguucaacgccacccgguucgccagcgucuacgccuggaaccgcaagcggaucuccaacugcguggcggacuacagcgugcuguacaacuccgccagcuucuccacguucaagugcuacggcgucagccccaccaagcucaacgaccugugcuucaccaacguguacgccgacuccuucgugauccgcggggacgagguccggcagaucgcccccggccagaccgggaagaucgccgacuacaacuacaagcugccggacgacuucacgggcugcgugaucgcguggaacagcaacaaccucgacuccaaggucgggggcaacuacaacuaccuguaccgccuguuccgcaagagcaaccucaagcccuucgagcgggacaucuccaccgagaucuaccaggccggcagcacccccugcaacgggguggagggcuucaacugcuacuucccccugcaguccuacggguuccagccgaccaacggcgugggguaccagcccuaccggguggucgugcugagcuucgagcuccugcacgcccccgccacggugugcggccccaagaaguccaccaaccuggucaagaacaagugcgugaacuucaacuucaacggccucaccgggaccggcgugcugaccgagagcaacaagaaguuccugccguuccagcaguucgggcgcgacaucgccgacacgaccgacgcgguccgcgacccccagacccuggagauccucgacaucacccccugcagcuucggcgggguguccgugaucacgccgggcaccaacaccagcaaccaggucgccgugcuguaccagggcgugaacugcaccgagguccccguggccauccacgccgaccagcugacgcccaccuggcggguguacuccaccgggagcaacgucuuccagacccgcgccggcugccucaucggggcggagcacgugaacaacuccuacgagugcgacauccccaucggcgccggcaucugcgccagcuaccagacgcagaccaacuccccgcggcgcgcccggagcguggcgucccagagcaucaucgccuacaccaugucccugggggccgagaacagcgucgccuacuccaacaacagcaucgccauccccaccaacuucacgaucuccgugaccaccgagauccugcccgugagcaugaccaagacgagcgucgacugcaccauguacaucugcggcgacuccaccgagugcagcaaccuccugcugcaguacggguccuucugcacccagcucaaccgcgcgcugacgggcaucgccguggagcaggacaagaacacccaggagguguucgcccaggucaagcagaucuacaagacgcccccgaucaaggacuucgggggcuucaacuucagccagauccugcccgaccccuccaagcccagcaagcgguccuucaucgaggaccuccuguucaacaaggugacccuggccgacgccggcuucaucaagcaguacggggacugccucggcgacaucgcggcccgcgaccugaucugcgcccagaaguucaacgggcugaccgugcucccgccccugcugaccgacgagaugaucgcccaguacaccagcgcccuccuggcgggcaccaucacguccggguggaccuucggcgccggcgccgcccugcagauccccuucgcgaugcagauggccuaccgguucaacgggaucggcgucacccagaacgugcucuacgagaaccagaagcugaucgccaaccaguucaacagcgccaucgggaagauccaggacucccugagcuccaccgccagcgcgcucggcaagcugcaggacguggucaaccagaacgcccaggcccugaacacgcucgugaagcagcuguccagcaacuucggggccaucuccagcgugcugaacgacauccucucccgccuggacccgcccgaggccgagguccagaucgaccggcugaucaccggccgccuccagagccugcagaccuacgugacccagcagcugauccgggcggccgagauccgcgccagcgccaaccucgccgcgaccaagauguccgagugcgugcugggccagagcaagcgggucgacuucugcgggaagggcuaccaccugauguccuucccccagagcgcgccccacggggugguguuccuccacgucacguacgugcccgcccaggagaagaacuucaccaccgccccggccaucugccacgacggcaaggcccacuucccccgcgagggggucuucguguccaacggcacccacugguucgugacgcagcggaacuucuacgagccccagaucaucaccaccgacaacaccuucgucagcggcaacugcgacguggugaucgggaucgucaacaacacgguguacgacccccugcagccggagcuggacuccuucaaggaggagcucgacaaguacuucaagaaccacaccagccccgacguggaccugggcgacaucuccgggaucaacgccagcgucgugaacauccagaaggagaucgaccgccugaacgagguggccaagaaccucaacgagucccugaucgaccugcaggagcucggcaaguacgagcaguacaucaaguggcccugguacaucuggcugggcuucaucgccgggcugaucgcgaucgucauggugaccaucaugcucugcugcaugaccagcugcugcuccugccugaagggcugcugcagcugcggguccugcugcaaguucgacgaggacgacagcgagccggugcugaagggcgucaagcuccacuacacgugaggacuaguuauaagacugacuagcccgaugggccucccaacgggcccuccuccccuccuugcaccgagagaucuaaaaaaaaaaaaaaaaaaaaaaaaaaaaaaaaaaaaaaaaaaaaaaaaaaaaaaaaaaaaaaaaaaaaaaaaaaaaaaaaaaaaaaaaaaaaaaaaaaaa

SEQ ID NO: 25957 - RNA, 4011 nt, Artificial Sequence
  SARS-CoV-2/Wuhan/WIV05/2019__EPI_ISL_402128 spike protein mRNA gc (1-1273)(K986P_V987P_A222V_D614G)
aggagaaagcuuaccauguucguguuccugguccuccugccccuggugagcucccagugcgugaaccucaccacccgcacgcagcugccgcccgccuacaccaacagcuucacccggggcgucuacuaccccgacaagguguuccgcuccagcgugcugcacuccacccaggaccucuuccugcccuucuucagcaacgucacgugguuccacgccauccacguguccgggaccaacggcaccaagcgguucgacaacccggugcugcccuucaacgacggggucuacuucgcgagcaccgagaaguccaacaucauccgcggcuggaucuucgggacgacccucgacagcaagacccagucccugcugaucgugaacaacgccaccaacguggucaucaaggugugcgaguuccaguucugcaacgaccccuuccucggcguguacuaccacaagaacaacaagagcuggauggaguccgaguuccgggucuacagcuccgccaacaacugcacguucgaguacgugagccagcccuuccugauggaccuggagggcaagcaggggaacuucaagaaccuccgcgaguucguguucaagaacaucgacggcuacuucaagaucuacuccaagcacaccccgaucaaccugguccgggaccugccccagggguucagcgugcucgagccccugguggaccugcccaucggcaucaacaucacccgcuuccagacccuccuggcccugcaccgguccuaccucacgccgggggacagcagcuccggcuggaccgccggcgcggccgccuacuacgucggguaccugcagccccgcaccuuccugcucaaguacaacgagaacggcaccaucacggacgccguggacugcgcgcuggacccccugagcgagaccaagugcacccucaaguccuucaccguggagaaggggaucuaccagacgagcaacuuccggguccagcccaccgaguccaucgugcgcuucccgaacaucaccaaccugugccccuucggcgaggucuucaacgccacccgguucgccagcguguacgccuggaaccgcaagcggaucuccaacugcguggccgacuacagcguccuguacaacuccgcgagcuucuccacguucaagugcuacggcgugagccccaccaagcucaacgaccugugcuucaccaacguguacgccgacuccuucgucauccgcggggacgaggugcggcagaucgcccccggccagaccgggaagaucgccgacuacaacuacaagcugccggacgacuucacgggcugcgugaucgccuggaacagcaacaaccucgacuccaaggucgggggcaacuacaacuaccuguaccgccuguuccgcaagagcaaccucaagcccuucgagcgggacaucuccaccgagaucuaccaggcgggcagcacccccugcaacgggguggagggcuucaacugcuacuucccccugcaguccuacggguuccagccgaccaacggcgugggguaccagcccuaccgggucguggugcugagcuucgagcuccugcacgcccccgccacggucugcggccccaagaaguccaccaaccuggugaagaacaagugcgugaacuucaacuucaacggccucaccgggaccggcguccugaccgagagcaacaagaaguuccugccguuccagcaguucgggcgcgacaucgccgacacgaccgacgccgugcgcgacccccagacccuggagauccucgacaucacccccugcagcuucggcgggguguccgucaucacgccgggcaccaacaccagcaaccagguggcggugcuguaccagggcgucaacugcaccgaggugcccguggccauccacgccgaccagcugacgcccaccuggcgggucuacuccaccgggagcaacguguuccagacccgcgccggcugccucaucggggccgagcacgugaacaacuccuacgagugcgacauccccaucggcgcgggcaucugcgccagcuaccagacgcagaccaacuccccgcggcgcgcccggagcgucgccucccagagcaucaucgcguacaccaugucccugggggccgagaacagcguggccuacuccaacaacagcaucgccauccccaccaacuucacgaucuccgugaccaccgagauccugcccgucagcaugaccaagacgagcguggacugcaccauguacaucugcggcgacuccaccgagugcagcaaccuccugcugcaguacggguccuucugcacccagcucaaccgcgcccugacgggcaucgcgguggagcaggacaagaacacccaggaggucuucgcccaggugaagcagaucuacaagacgcccccgaucaaggacuucgggggcuucaacuucagccagauccugcccgaccccuccaagcccagcaagcgguccuucaucgaggaccuccuguucaacaaggugacccuggccgacgccggcuucaucaagcaguacggggacugccucggcgacaucgccgcgcgcgaccugaucugcgcccagaaguucaacgggcugaccguccucccgccccugcugaccgacgagaugaucgcccaguacaccagcgcccuccuggccggcaccaucacguccggguggaccuucggcgcgggcgccgcccugcagauccccuucgccaugcagauggcguaccgguucaacgggaucggcgugacccagaacgugcucuacgagaaccagaagcugaucgccaaccaguucaacagcgccaucgggaagauccaggacucccugagcuccaccgccagcgcccucggcaagcugcaggacgucgugaaccagaacgcgcaggcccugaacacgcucgugaagcagcuguccagcaacuucggggccaucuccagcguccugaacgacauccucucccgccuggacccgcccgaggccgaggugcagaucgaccggcugaucaccggccgccuccagagccugcagaccuacgugacccagcagcugauccgggccgcggagauccgcgccagcgccaaccucgccgccaccaagauguccgagugcguccugggccagagcaagcggguggacuucugcgggaagggcuaccaccugauguccuucccccagagcgcgccccacgggguggucuuccuccacgugacguacguccccgcccaggagaagaacuucaccaccgccccggccaucugccacgacggcaaggcgcacuucccccgcgaggggguguucguguccaacggcacccacugguucgucacgcagcggaacuucuacgagccccagaucaucaccaccgacaacaccuucgugagcggcaacugcgacguggucaucgggaucgugaacaacacgguguacgacccccugcagccggagcuggacuccuucaaggaggagcucgacaaguacuucaagaaccacaccagccccgacgucgaccugggcgacaucuccgggaucaacgccagcguggugaacauccagaaggagaucgaccgccugaacgaggucgccaagaaccucaacgagucccugaucgaccugcaggagcucggcaaguacgagcaguacaucaaguggcccugguacaucuggcugggcuucaucgccgggcugaucgccaucgugauggugaccaucaugcucugcugcaugaccagcugcugcuccugccugaagggcugcugcagcugcggguccugcugcaaguucgacgaggacgacagcgagccgguccugaagggcgugaagcuccacuacacgugaggacuaguuauaagacugacuagcccgaugggccucccaacgggcccuccuccccuccuugcaccgagagaucuaaaaaaaaaaaaaaaaaaaaaaaaaaaaaaaaaaaaaaaaaaaaaaaaaaaaaaaaaaaaaaaaaaaaaaaaaaaaaaaaaaaaaaaaaaaaaaaaaaaa

SEQ ID NO: 25958 - RNA, 4011 nt, Artificial Sequence
  SARS-CoV-2/Wuhan/WIV05/2019__EPI_ISL_402128 spike protein mRNA gc (1-1273)(K986P_V987P_N439K_D614G)
aggagaaagcuuaccauguucguguuccugguccuccugccccuggugagcucccagugcgugaaccucaccacccgcacgcagcugccgcccgccuacaccaacagcuucacccggggcgucuacuaccccgacaagguguuccgcuccagcgugcugcacuccacccaggaccucuuccugcccuucuucagcaacgucacgugguuccacgccauccacguguccgggaccaacggcaccaagcgguucgacaacccggugcugcccuucaacgacggggucuacuucgcgagcaccgagaaguccaacaucauccgcggcuggaucuucgggacgacccucgacagcaagacccagucccugcugaucgugaacaacgccaccaacguggucaucaaggugugcgaguuccaguucugcaacgaccccuuccucggcguguacuaccacaagaacaacaagagcuggauggaguccgaguuccgggucuacagcuccgccaacaacugcacguucgaguacgugagccagcccuuccugauggaccuggagggcaagcaggggaacuucaagaaccuccgcgaguucguguucaagaacaucgacggcuacuucaagaucuacuccaagcacaccccgaucaaccugguccgggaccugccccagggguucagcgcccucgagccccugguggaccugcccaucggcaucaacaucacccgcuuccagacccuccuggcccugcaccgguccuaccucacgccgggggacagcagcuccggcuggaccgcgggcgccgccgccuacuacgugggguaccugcagccccgcaccuuccugcucaaguacaacgagaacggcaccaucacggacgcggucgacugcgcccuggacccccugagcgagaccaagugcacccucaaguccuucaccguggagaaggggaucuaccagacgagcaacuuccgggugcagcccaccgaguccaucguccgcuucccgaacaucaccaaccugugccccuucggcgagguguucaacgccacccgguucgccagcgucuacgccuggaaccgcaagcggaucuccaacugcguggcggacuacagcgugcuguacaacuccgccagcuucuccacguucaagugcuacggcgucagccccaccaagcucaacgaccugugcuucaccaacguguacgccgacuccuucgugauccgcggggacgagguccggcagaucgcccccggccagaccgggaagaucgccgacuacaacuacaagcugccggacgacuucacgggcugcgugaucgcguggaacagcaagaaccucgacuccaaggucgggggcaacuacaacuaccuguaccgccuguuccgcaagagcaaccucaagcccuucgagcgggacaucuccaccgagaucuaccaggccggcagcacccccugcaacgggguggagggcuucaacugcuacuucccccugcaguccuacggguuccagccgaccaacggcgugggguaccagcccuaccggguggucgugcugagcuucgagcuccugcacgcccccgccacggugugcggccccaagaaguccaccaaccuggucaagaacaagugcgugaacuucaacuucaacggccucaccgggaccggcgugcugaccgagagcaacaagaaguuccugccguuccagcaguucgggcgcgacaucgccgacacgaccgacgcgguccgcgacccccagacccuggagauccucgacaucacccccugcagcuucggcgggguguccgugaucacgccgggcaccaacaccagcaaccaggucgccgugcuguaccagggcgugaacugcaccgagguccccguggccauccacgccgaccagcugacgcccaccuggcggguguacuccaccgggagcaacgucuuccagacccgcgccggcugccucaucggggcggagcacgugaacaacuccuacgagugcgacauccccaucggcgccggcaucugcgccagcuaccagacgcagaccaacuccccgcggcgcgcccggagcguggcgucccagagcaucaucgccuacaccaugucccugggggccgagaacagcgucgccuacuccaacaacagcaucgccauccccaccaacuucacgaucuccgugaccaccgagauccugcccgugagcaugaccaagacgagcgucgacugcaccauguacaucugcggcgacuccaccgagugcagcaaccuccugcugcaguacggguccuucugcacccagcucaaccgcgcgcugacgggcaucgccguggagcaggacaagaacacccaggagguguucgcccaggucaagcagaucuacaagacgcccccgaucaaggacuucgggggcuucaacuucagccagauccugcccgaccccuccaagcccagcaagcgguccuucaucgaggaccuccuguucaacaaggugacccuggccgacgccggcuucaucaagcaguacggggacugccucggcgacaucgcggcccgcgaccugaucugcgcccagaaguucaacgggcugaccgugcucccgccccugcugaccgacgagaugaucgcccaguacaccagcgcccuccuggcgggcaccaucacguccggguggaccuucggcgccggcgccgcccugcagauccccuucgcgaugcagauggccuaccgguucaacgggaucggcgucacccagaacgugcucuacgagaaccagaagcugaucgccaaccaguucaacagcgccaucgggaagauccaggacucccugagcuccaccgccagcgcgcucggcaagcugcaggacguggucaaccagaacgcccaggcccugaacacgcucgugaagcagcuguccagcaacuucggggccaucuccagcgugcugaacgacauccucucccgccuggacccgcccgaggccgagguccagaucgaccggcugaucaccggccgccuccagagccugcagaccuacgugacccagcagcugauccgggcggccgagauccgcgccagcgccaaccucgccgcgaccaagauguccgagugcgugcugggccagagcaagcgggucgacuucugcgggaagggcuaccaccugauguccuucccccagagcgcgccccacggggugguguuccuccacgucacguacgugcccgcccaggagaagaacuucaccaccgccccggccaucugccacgacggcaaggcccacuucccccgcgagggggucuucguguccaacggcacccacugguucgugacgcagcggaacuucuacgagccccagaucaucaccaccgacaacaccuucgucagcggcaacugcgacguggugaucgggaucgucaacaacacgguguacgacccccugcagccggagcuggacuccuucaaggaggagcucgacaaguacuucaagaaccacaccagccccgacguggaccugggcgacaucuccgggaucaacgccagcgucgugaacauccagaaggagaucgaccgccugaacgagguggccaagaaccucaacgagucccugaucgaccugcaggagcucggcaaguacgagcaguacaucaaguggcccugguacaucuggcugggcuucaucgccgggcugaucgcgaucgucauggugaccaucaugcucugcugcaugaccagcugcugcuccugccugaagggcugcugcagcugcggguccugcugcaaguucgacgaggacgacagcgagccggugcugaagggcgucaagcuccacuacacgugaggacuaguuauaagacugacuagcccgaugggccucccaacgggcccuccuccccuccuugcaccgagagaucuaaaaaaaaaaaaaaaaaaaaaaaaaaaaaaaaaaaaaaaaaaaaaaaaaaaaaaaaaaaaaaaaaaaaaaaaaaaaaaaaaaaaaaaaaaaaaaaaaaaa

SEQ ID NO: 25959 - RNA, 4011 nt, Artificial Sequence
  SARS-CoV-2/Wuhan/WIV05/2019__EPI_ISL_402128 spike protein mRNA gc (1-1273)(K986P_V987P_S477N_D614G)
aggagaaagcuuaccauguucguguuccugguccuccugccccuggugagcucccagugcgugaaccucaccacccgcacgcagcugccgcccgccuacaccaacagcuucacccggggcgucuacuaccccgacaagguguuccgcuccagcgugcugcacuccacccaggaccucuuccugcccuucuucagcaacgucacgugguuccacgccauccacguguccgggaccaacggcaccaagcgguucgacaacccggugcugcccuucaacgacggggucuacuucgcgagcaccgagaaguccaacaucauccgcggcuggaucuucgggacgacccucgacagcaagacccagucccugcugaucgugaacaacgccaccaacguggucaucaaggugugcgaguuccaguucugcaacgaccccuuccucggcguguacuaccacaagaacaacaagagcuggauggaguccgaguuccgggucuacagcuccgccaacaacugcacguucgaguacgugagccagcccuuccugauggaccuggagggcaagcaggggaacuucaagaaccuccgcgaguucguguucaagaacaucgacggcuacuucaagaucuacuccaagcacaccccgaucaaccugguccgggaccugccccagggguucagcgcccucgagccccugguggaccugcccaucggcaucaacaucacccgcuuccagacccuccuggcccugcaccgguccuaccucacgccgggggacagcagcuccggcuggaccgcgggcgccgccgccuacuacgugggguaccugcagccccgcaccuuccugcucaaguacaacgagaacggcaccaucacggacgcggucgacugcgcccuggacccccugagcgagaccaagugcacccucaaguccuucaccguggagaaggggaucuaccagacgagcaacuuccgggugcagcccaccgaguccaucguccgcuucccgaacaucaccaaccugugccccuucggcgagguguucaacgccacccgguucgccagcgucuacgccuggaaccgcaagcggaucuccaacugcguggcggacuacagcgugcuguacaacuccgccagcuucuccacguucaagugcuacggcgucagccccaccaagcucaacgaccugugcuucaccaacguguacgccgacuccuucgugauccgcggggacgagguccggcagaucgcccccggccagaccgggaagaucgccgacuacaacuacaagcugccggacgacuucacgggcugcgugaucgcguggaacagcaacaaccucgacuccaaggucgggggcaacuacaacuaccuguaccgccuguuccgcaagagcaaccucaagcccuucgagcgggacaucuccaccgagaucuaccaggccggcaacacccccugcaacgggguggagggcuucaacugcuacuucccccugcagagcuacggguuccagccgaccaacggcgugggguaccagcccuaccggguggucgugcuguccuucgagcuccugcacgcccccgccacggugugcggccccaagaaguccaccaaccuggucaagaacaagugcgugaacuucaacuucaacggccucaccgggaccggcgugcugaccgagagcaacaagaaguuccugccguuccagcaguucgggcgcgacaucgccgacacgaccgacgcgguccgcgacccccagacccuggagauccucgacaucacccccugcagcuucggcggggugagcgugaucacgccgggcaccaacaccuccaaccaggucgccgugcuguaccagggcgugaacugcaccgagguccccguggccauccacgccgaccagcugacgcccaccuggcggguguacagcaccggguccaacgucuuccagacccgcgccggcugccucaucggggcggagcacgugaacaacagcuacgagugcgacauccccaucggcgccggcaucugcgccuccuaccagacgcagaccaacagcccgcggcgcgcccgguccguggcgagccaguccaucaucgccuacaccaugagccugggggccgagaacuccgucgccuacagcaacaacuccaucgccauccccaccaacuucacgaucagcgugaccaccgagauccugcccguguccaugaccaagacgagcgucgacugcaccauguacaucugcggcgacagcaccgagugcuccaaccuccugcugcaguacgggagcuucugcacccagcucaaccgcgcgcugacgggcaucgccguggagcaggacaagaacacccaggagguguucgcccaggucaagcagaucuacaagacgcccccgaucaaggacuucgggggcuucaacuucucccagauccugcccgaccccagcaagcccuccaagcggagcuucaucgaggaccuccuguucaacaaggugacccuggccgacgccggcuucaucaagcaguacggggacugccucggcgacaucgcggcccgcgaccugaucugcgcccagaaguucaacgggcugaccgugcucccgccccugcugaccgacgagaugaucgcccaguacaccuccgcccuccuggcgggcaccaucacgagcggguggaccuucggcgccggcgccgcccugcagauccccuucgcgaugcagauggccuaccgguucaacgggaucggcgucacccagaacgugcucuacgagaaccagaagcugaucgccaaccaguucaacuccgccaucgggaagauccaggacagccuguccagcaccgccuccgcgcucggcaagcugcaggacguggucaaccagaacgcccaggcccugaacacgcucgugaagcagcugagcuccaacuucggggccaucagcuccgugcugaacgacauccucagccgccuggacccgcccgaggccgagguccagaucgaccggcugaucaccggccgccuccagucccugcagaccuacgugacccagcagcugauccgggcggccgagauccgcgccagcgccaaccucgccgcgaccaagaugagcgagugcgugcugggccaguccaagcgggucgacuucugcgggaagggcuaccaccugaugagcuucccccaguccgcgccccacggggugguguuccuccacgucacguacgugcccgcccaggagaagaacuucaccaccgccccggccaucugccacgacggcaaggcccacuucccccgcgagggggucuucgugagcaacggcacccacugguucgugacgcagcggaacuucuacgagccccagaucaucaccaccgacaacaccuucgucuccggcaacugcgacguggugaucgggaucgucaacaacacgguguacgacccccugcagccggagcuggacagcuucaaggaggagcucgacaaguacuucaagaaccacaccucccccgacguggaccugggcgacaucagcgggaucaacgccuccgucgugaacauccagaaggagaucgaccgccugaacgagguggccaagaaccucaacgagagccugaucgaccugcaggagcucggcaaguacgagcaguacaucaaguggcccugguacaucuggcugggcuucaucgccgggcugaucgcgaucgucauggugaccaucaugcucugcugcaugaccuccugcugcagcugccugaagggcugcugcuccugcgggagcugcugcaaguucgacgaggacgacuccgagccggugcugaagggcgucaagcuccacuacacgugaggacuaguuauaagacugacuagcccgaugggccucccaacgggcccuccuccccuccuugcaccgagagaucuaaaaaaaaaaaaaaaaaaaaaaaaaaaaaaaaaaaaaaaaaaaaaaaaaaaaaaaaaaaaaaaaaaaaaaaaaaaaaaaaaaaaaaaaaaaaaaaaaaaa

SEQ ID NO: 25960 - RNA, 4011 nt, Artificial Sequence
  SARS-CoV-2/Wuhan/WIV05/2019__EPI_ISL_402128 spike protein mRNA gc (1-1273)(K986P_V987P_N501Y_D614G)
aggagaaagcuuaccauguucguguuccugguccuccugccccuggugagcucccagugcgugaaccucaccacccgcacgcagcugccgcccgccuacaccaacagcuucacccggggcgucuacuaccccgacaagguguuccgcuccagcgugcugcacuccacccaggaccucuuccugcccuucuucagcaacgucacgugguuccacgccauccacguguccgggaccaacggcaccaagcgguucgacaacccggugcugcccuucaacgacggggucuacuucgcgagcaccgagaaguccaacaucauccgcggcuggaucuucgggacgacccucgacagcaagacccagucccugcugaucgugaacaacgccaccaacguggucaucaaggugugcgaguuccaguucugcaacgaccccuuccucggcguguacuaccacaagaacaacaagagcuggauggaguccgaguuccgggucuacagcuccgccaacaacugcacguucgaguacgugagccagcccuuccugauggaccuggagggcaagcaggggaacuucaagaaccuccgcgaguucguguucaagaacaucgacggcuacuucaagaucuacuccaagcacaccccgaucaaccugguccgggaccugccccagggguucagcgcccucgagccccugguggaccugcccaucggcaucaacaucacccgcuuccagacccuccuggcccugcaccgguccuaccucacgccgggggacagcagcuccggcuggaccgcgggcgccgccgccuacuacgugggguaccugcagccccgcaccuuccugcucaaguacaacgagaacggcaccaucacggacgcggucgacugcgcccuggacccccugagcgagaccaagugcacccucaaguccuucaccguggagaaggggaucuaccagacgagcaacuuccgggugcagcccaccgaguccaucguccgcuucccgaacaucaccaaccugugccccuucggcgagguguucaacgccacccgguucgccagcgucuacgccuggaaccgcaagcggaucuccaacugcguggcggacuacagcgugcuguacaacuccgccagcuucuccacguucaagugcuacggcgucagccccaccaagcucaacgaccugugcuucaccaacguguacgccgacuccuucgugauccgcggggacgagguccggcagaucgcccccggccagaccgggaagaucgccgacuacaacuacaagcugccggacgacuucacgggcugcgugaucgcguggaacagcaacaaccucgacuccaaggucgggggcaacuacaacuaccuguaccgccuguuccgcaagagcaaccucaagcccuucgagcgggacaucuccaccgagaucuaccaggccggcagcacccccugcaacgggguggagggcuucaacugcuacuucccccugcaguccuacggguuccagccgaccuacggcgugggguaccagcccuaccggguggucgugcugagcuucgagcuccugcacgcccccgccacggugugcggccccaagaaguccaccaaccuggucaagaacaagugcgugaacuucaacuucaacggccucaccgggaccggcgugcugaccgagagcaacaagaaguuccugccguuccagcaguucgggcgcgacaucgccgacacgaccgacgcgguccgcgacccccagacccuggagauccucgacaucacccccugcagcuucggcgggguguccgugaucacgccgggcaccaacaccagcaaccaggucgccgugcuguaccagggcgugaacugcaccgagguccccguggccauccacgccgaccagcugacgcccaccuggcggguguacuccaccgggagcaacgucuuccagacccgcgccggcugccucaucggggcggagcacgugaacaacuccuacgagugcgacauccccaucggcgccggcaucugcgccagcuaccagacgcagaccaacuccccgcggcgcgcccggagcguggcgucccagagcaucaucgccuacaccaugucccugggggccgagaacagcgucgccuacuccaacaacagcaucgccauccccaccaacuucacgaucuccgugaccaccgagauccugcccgugagcaugaccaagacgagcgucgacugcaccauguacaucugcggcgacuccaccgagugcagcaaccuccugcugcaguacggguccuucugcacccagcucaaccgcgcgcugacgggcaucgccguggagcaggacaagaacacccaggagguguucgcccaggucaagcagaucuacaagacgcccccgaucaaggacuucgggggcuucaacuucagccagauccugcccgaccccuccaagcccagcaagcgguccuucaucgaggaccuccuguucaacaaggugacccuggccgacgccggcuucaucaagcaguacggggacugccucggcgacaucgcggcccgcgaccugaucugcgcccagaaguucaacgggcugaccgugcucccgccccugcugaccgacgagaugaucgcccaguacaccagcgcccuccuggcgggcaccaucacguccggguggaccuucggcgccggcgccgcccugcagauccccuucgcgaugcagauggccuaccgguucaacgggaucggcgucacccagaacgugcucuacgagaaccagaagcugaucgccaaccaguucaacagcgccaucgggaagauccaggacucccugagcuccaccgccagcgcgcucggcaagcugcaggacguggucaaccagaacgcccaggcccugaacacgcucgugaagcagcuguccagcaacuucggggccaucuccagcgugcugaacgacauccucucccgccuggacccgcccgaggccgagguccagaucgaccggcugaucaccggccgccuccagagccugcagaccuacgugacccagcagcugauccgggcggccgagauccgcgccagcgccaaccucgccgcgaccaagauguccgagugcgugcugggccagagcaagcgggucgacuucugcgggaagggcuaccaccugauguccuucccccagagcgcgccccacggggugguguuccuccacgucacguacgugcccgcccaggagaagaacuucaccaccgccccggccaucugccacgacggcaaggcccacuucccccgcgagggggucuucguguccaacggcacccacugguucgugacgcagcggaacuucuacgagccccagaucaucaccaccgacaacaccuucgucagcggcaacugcgacguggugaucgggaucgucaacaacacgguguacgacccccugcagccggagcuggacuccuucaaggaggagcucgacaaguacuucaagaaccacaccagccccgacguggaccugggcgacaucuccgggaucaacgccagcgucgugaacauccagaaggagaucgaccgccugaacgagguggccaagaaccucaacgagucccugaucgaccugcaggagcucggcaaguacgagcaguacaucaaguggcccugguacaucuggcugggcuucaucgccgggcugaucgcgaucgucauggugaccaucaugcucugcugcaugaccagcugcugcuccugccugaagggcugcugcagcugcggguccugcugcaaguucgacgaggacgacagcgagccggugcugaagggcgucaagcuccacuacacgugaggacuaguuauaagacugacuagcccgaugggccucccaacgggcccuccuccccuccuugcaccgagagaucuaaaaaaaaaaaaaaaaaaaaaaaaaaaaaaaaaaaaaaaaaaaaaaaaaaaaaaaaaaaaaaaaaaaaaaaaaaaaaaaaaaaaaaaaaaaaaaaaaaaa

SEQ ID NO: 25961 - RNA, 4005 nt, Artificial Sequence
  SARS-CoV-2/Wuhan/WIV05/2019__EPI_ISL_402128 spike protein mRNA gc (1-1273)(K986P_V987P_H69del_V70del_D614G)
aggagaaagcuuaccauguucguguuccugguccuccugccccuggugagcucccagugcgugaaccucaccacccgcacgcagcugccgcccgccuacaccaacagcuucacccggggcgucuacuaccccgacaagguguuccgcuccagcgugcugcacuccacccaggaccucuuccugcccuucuucagcaacgucacgugguuccacgccaucuccgggaccaacggcaccaagcgguucgacaacccggugcugcccuucaacgacgggguguacuucgcgagcaccgagaaguccaacaucauccgcggcuggaucuucgggacgacccucgacagcaagacccagucccugcugaucgucaacaacgccaccaacguggugaucaaggucugcgaguuccaguucugcaacgaccccuuccucggcguguacuaccacaagaacaacaagagcuggauggaguccgaguuccggguguacagcuccgccaacaacugcacguucgaguacgucagccagcccuuccugauggaccuggagggcaagcaggggaacuucaagaaccuccgcgaguucguguucaagaacaucgacggcuacuucaagaucuacuccaagcacaccccgaucaaccuggugcgggaccugccccagggguucagcgcccucgagccccuggucgaccugcccaucggcaucaacaucacccgcuuccagacccuccuggcccugcaccgguccuaccucacgccgggggacagcagcuccggcuggaccgcgggcgccgccgccuacuacgugggguaccugcagccccgcaccuuccugcucaaguacaacgagaacggcaccaucacggacgcgguggacugcgcccuggacccccugagcgagaccaagugcacccucaaguccuucaccgucgagaaggggaucuaccagacgagcaacuuccgggugcagcccaccgaguccaucgugcgcuucccgaacaucaccaaccugugccccuucggcgaggucuucaacgccacccgguucgccagcguguacgccuggaaccgcaagcggaucuccaacugcgucgcggacuacagcgugcuguacaacuccgccagcuucuccacguucaagugcuacggcgugagccccaccaagcucaacgaccugugcuucaccaacgucuacgccgacuccuucgugauccgcggggacgaggugcggcagaucgcccccggccagaccgggaagaucgccgacuacaacuacaagcugccggacgacuucacgggcugcgucaucgcguggaacagcaacaaccucgacuccaaggucgggggcaacuacaacuaccuguaccgccuguuccgcaagagcaaccucaagcccuucgagcgggacaucuccaccgagaucuaccaggccggcagcacccccugcaacgggguggagggcuucaacugcuacuucccccugcaguccuacggguuccagccgaccaacggcgugggguaccagcccuaccggguggugguccugagcuucgagcuccugcacgcccccgccacggugugcggccccaagaaguccaccaaccuggugaagaacaagugcgucaacuucaacuucaacggccucaccgggaccggcgugcugaccgagagcaacaagaaguuccugccguuccagcaguucgggcgcgacaucgccgacacgaccgacgcggugcgcgacccccagacccuggagauccucgacaucacccccugcagcuucggcggggucuccgugaucacgccgggcaccaacaccagcaaccagguggccguccuguaccagggcgugaacugcaccgaggugcccgucgccauccacgccgaccagcugacgcccaccuggcggguguacuccaccgggagcaacguguuccagacccgcgccggcugccucaucggggcggagcacgucaacaacuccuacgagugcgacauccccaucggcgccggcaucugcgccagcuaccagacgcagaccaacuccccgcggcgcgcccggagcguggcgucccagagcaucaucgccuacaccaugucccugggggccgagaacagcguggccuacuccaacaacagcaucgccauccccaccaacuucacgaucuccgucaccaccgagauccugcccgugagcaugaccaagacgagcguggacugcaccauguacaucugcggcgacuccaccgagugcagcaaccuccugcugcaguacggguccuucugcacccagcucaaccgcgcgcugacgggcaucgccgucgagcaggacaagaacacccaggagguguucgcccaggugaagcagaucuacaagacgcccccgaucaaggacuucgggggcuucaacuucagccagauccugcccgaccccuccaagcccagcaagcgguccuucaucgaggaccuccuguucaacaaggucacccuggccgacgccggcuucaucaagcaguacggggacugccucggcgacaucgcggcccgcgaccugaucugcgcccagaaguucaacgggcugaccgugcucccgccccugcugaccgacgagaugaucgcccaguacaccagcgcccuccuggcgggcaccaucacguccggguggaccuucggcgccggcgccgcccugcagauccccuucgcgaugcagauggccuaccgguucaacgggaucggcgugacccagaacguccucuacgagaaccagaagcugaucgccaaccaguucaacagcgccaucgggaagauccaggacucccugagcuccaccgccagcgcgcucggcaagcugcaggacguggugaaccagaacgcccaggcccugaacacgcucgucaagcagcuguccagcaacuucggggccaucuccagcgugcugaacgacauccucucccgccuggacccgcccgaggccgaggugcagaucgaccggcugaucaccggccgccuccagagccugcagaccuacgucacccagcagcugauccgggcggccgagauccgcgccagcgccaaccucgccgcgaccaagauguccgagugcgugcugggccagagcaagcggguggacuucugcgggaagggcuaccaccugauguccuucccccagagcgcgccccacggggucguguuccuccacgugacguacguccccgcccaggagaagaacuucaccaccgccccggccaucugccacgacggcaaggcccacuucccccgcgaggggguguucgucuccaacggcacccacugguucgugacgcagcggaacuucuacgagccccagaucaucaccaccgacaacaccuucgugagcggcaacugcgacgucgugaucgggaucgugaacaacacggucuacgacccccugcagccggagcuggacuccuucaaggaggagcucgacaaguacuucaagaaccacaccagccccgacguggaccugggcgacaucuccgggaucaacgccagcguggucaacauccagaaggagaucgaccgccugaacgagguggccaagaaccucaacgagucccugaucgaccugcaggagcucggcaaguacgagcaguacaucaaguggcccugguacaucuggcugggcuucaucgccgggcugaucgcgaucgugauggucaccaucaugcucugcugcaugaccagcugcugcuccugccugaagggcugcugcagcugcggguccugcugcaaguucgacgaggacgacagcgagccggugcugaagggcgugaagcuccacuacacgugaggacuaguuauaagacugacuagcccgaugggccucccaacgggcccuccuccccuccuugcaccgagagaucuaaaaaaaaaaaaaaaaaaaaaaaaaaaaaaaaaaaaaaaaaaaaaaaaaaaaaaaaaaaaaaaaaaaaaaaaaaaaaaaaaaaaaaaaaaaaaaaaaaaa

SEQ ID NO: 25962 - RNA, 4011 nt, Artificial Sequence
  SARS-CoV-2/Wuhan/WIV05/2019__EPI_ISL_402128 spike protein mRNA gc (1-1273)(K986P_V987P_Y453F_D614G)
aggagaaagcuuaccauguucguguuccugguccuccugccccuggugagcucccagugcgugaaccucaccacccgcacgcagcugccgcccgccuacaccaacagcuucacccggggcgucuacuaccccgacaagguguuccgcuccagcgugcugcacuccacccaggaccucuuccugcccuucuucagcaacgucacgugguuccacgccauccacguguccgggaccaacggcaccaagcgguucgacaacccggugcugcccuucaacgacggggucuacuucgcgagcaccgagaaguccaacaucauccgcggcuggaucuucgggacgacccucgacagcaagacccagucccugcugaucgugaacaacgccaccaacguggucaucaaggugugcgaguuccaguucugcaacgaccccuuccucggcguguacuaccacaagaacaacaagagcuggauggaguccgaguuccgggucuacagcuccgccaacaacugcacguucgaguacgugagccagcccuuccugauggaccuggagggcaagcaggggaacuucaagaaccuccgcgaguucguguucaagaacaucgacggcuacuucaagaucuacuccaagcacaccccgaucaaccugguccgggaccugccccagggguucagcgcccucgagccccugguggaccugcccaucggcaucaacaucacccgcuuccagacccuccuggcccugcaccgguccuaccucacgccgggggacagcagcuccggcuggaccgcgggcgccgccgccuacuacgugggguaccugcagccccgcaccuuccugcucaaguacaacgagaacggcaccaucacggacgcggucgacugcgcccuggacccccugagcgagaccaagugcacccucaaguccuucaccguggagaaggggaucuaccagacgagcaacuuccgggugcagcccaccgaguccaucguccgcuucccgaacaucaccaaccugugccccuucggcgagguguucaacgccacccgguucgccagcgucuacgccuggaaccgcaagcggaucuccaacugcguggcggacuacagcgugcuguacaacuccgccagcuucuccacguucaagugcuacggcgucagccccaccaagcucaacgaccugugcuucaccaacguguacgccgacuccuucgugauccgcggggacgagguccggcagaucgcccccggccagaccgggaagaucgccgacuacaacuacaagcugccggacgacuucacgggcugcgugaucgcguggaacagcaacaaccucgacuccaaggucgggggcaacuacaacuaccuguuccgccuguuccgcaagagcaaccucaagcccuucgagcgggacaucuccaccgagaucuaccaggccggcagcacccccugcaacgggguggagggcuucaacugcuacuucccccugcaguccuacggguuccagccgaccaacggcgugggguaccagcccuaccggguggucgugcugagcuucgagcuccugcacgcccccgccacggugugcggccccaagaaguccaccaaccuggucaagaacaagugcgugaacuucaacuucaacggccucaccgggaccggcgugcugaccgagagcaacaagaaguuccugccguuccagcaguucgggcgcgacaucgccgacacgaccgacgcgguccgcgacccccagacccuggagauccucgacaucacccccugcagcuucggcgggguguccgugaucacgccgggcaccaacaccagcaaccaggucgccgugcuguaccagggcgugaacugcaccgagguccccguggccauccacgccgaccagcugacgcccaccuggcggguguacuccaccgggagcaacgucuuccagacccgcgccggcugccucaucggggcggagcacgugaacaacuccuacgagugcgacauccccaucggcgccggcaucugcgccagcuaccagacgcagaccaacuccccgcggcgcgcccggagcguggcgucccagagcaucaucgccuacaccaugucccugggggccgagaacagcgucgccuacuccaacaacagcaucgccauccccaccaacuucacgaucuccgugaccaccgagauccugcccgugagcaugaccaagacgagcgucgacugcaccauguacaucugcggcgacuccaccgagugcagcaaccuccugcugcaguacggguccuucugcacccagcucaaccgcgcgcugacgggcaucgccguggagcaggacaagaacacccaggagguguucgcccaggucaagcagaucuacaagacgcccccgaucaaggacuucgggggcuucaacuucagccagauccugcccgaccccuccaagcccagcaagcgguccuucaucgaggaccuccuguucaacaaggugacccuggccgacgccggcuucaucaagcaguacggggacugccucggcgacaucgcggcccgcgaccugaucugcgcccagaaguucaacgggcugaccgugcucccgccccugcugaccgacgagaugaucgcccaguacaccagcgcccuccuggcgggcaccaucacguccggguggaccuucggcgccggcgccgcccugcagauccccuucgcgaugcagauggccuaccgguucaacgggaucggcgucacccagaacgugcucuacgagaaccagaagcugaucgccaaccaguucaacagcgccaucgggaagauccaggacucccugagcuccaccgccagcgcgcucggcaagcugcaggacguggucaaccagaacgcccaggcccugaacacgcucgugaagcagcuguccagcaacuucggggccaucuccagcgugcugaacgacauccucucccgccuggacccgcccgaggccgagguccagaucgaccggcugaucaccggccgccuccagagccugcagaccuacgugacccagcagcugauccgggcggccgagauccgcgccagcgccaaccucgccgcgaccaagauguccgagugcgugcugggccagagcaagcgggucgacuucugcgggaagggcuaccaccugauguccuucccccagagcgcgccccacggggugguguuccuccacgucacguacgugcccgcccaggagaagaacuucaccaccgccccggccaucugccacgacggcaaggcccacuucccccgcgagggggucuucguguccaacggcacccacugguucgugacgcagcggaacuucuacgagccccagaucaucaccaccgacaacaccuucgucagcggcaacugcgacguggugaucgggaucgucaacaacacgguguacgacccccugcagccggagcuggacuccuucaaggaggagcucgacaaguacuucaagaaccacaccagccccgacguggaccugggcgacaucuccgggaucaacgccagcgucgugaacauccagaaggagaucgaccgccugaacgagguggccaagaaccucaacgagucccugaucgaccugcaggagcucggcaaguacgagcaguacaucaaguggcccugguacaucuggcugggcuucaucgccgggcugaucgcgaucgucauggugaccaucaugcucugcugcaugaccagcugcugcuccugccugaagggcugcugcagcugcggguccugcugcaaguucgacgaggacgacagcgagccggugcugaagggcgucaagcuccacuacacgugaggacuaguuauaagacugacuagcccgaugggccucccaacgggcccuccuccccuccuugcaccgagagaucuaaaaaaaaaaaaaaaaaaaaaaaaaaaaaaaaaaaaaaaaaaaaaaaaaaaaaaaaaaaaaaaaaaaaaaaaaaaaaaaaaaaaaaaaaaaaaaaaaaaa

SEQ ID NO: 25963 - RNA, 4011 nt, Artificial Sequence
  SARS-CoV-2/Wuhan/WIV05/2019__EPI_ISL_402128 spike protein mRNA gc (1-1273)(K986P_V987P_D614G_I692V)
aggagaaagcuuaccauguucguguuccugguccuccugccccuggugagcucccagugcgugaaccucaccacccgcacgcagcugccgcccgccuacaccaacagcuucacccggggcgucuacuaccccgacaagguguuccgcuccagcgugcugcacuccacccaggaccucuuccugcccuucuucagcaacgucacgugguuccacgccauccacguguccgggaccaacggcaccaagcgguucgacaacccggugcugcccuucaacgacggggucuacuucgcgagcaccgagaaguccaacaucauccgcggcuggaucuucgggacgacccucgacagcaagacccagucccugcugaucgugaacaacgccaccaacguggucaucaaggugugcgaguuccaguucugcaacgaccccuuccucggcguguacuaccacaagaacaacaagagcuggauggaguccgaguuccgggucuacagcuccgccaacaacugcacguucgaguacgugagccagcccuuccugauggaccuggagggcaagcaggggaacuucaagaaccuccgcgaguucguguucaagaacaucgacggcuacuucaagaucuacuccaagcacaccccgaucaaccugguccgggaccugccccagggguucagcgcccucgagccccugguggaccugcccaucggcaucaacaucacccgcuuccagacccuccuggcccugcaccgguccuaccucacgccgggggacagcagcuccggcuggaccgcgggcgccgccgccuacuacgugggguaccugcagccccgcaccuuccugcucaaguacaacgagaacggcaccaucacggacgcggucgacugcgcccuggacccccugagcgagaccaagugcacccucaaguccuucaccguggagaaggggaucuaccagacgagcaacuuccgggugcagcccaccgaguccaucguccgcuucccgaacaucaccaaccugugccccuucggcgagguguucaacgccacccgguucgccagcgucuacgccuggaaccgcaagcggaucuccaacugcguggcggacuacagcgugcuguacaacuccgccagcuucuccacguucaagugcuacggcgucagccccaccaagcucaacgaccugugcuucaccaacguguacgccgacuccuucgugauccgcggggacgagguccggcagaucgcccccggccagaccgggaagaucgccgacuacaacuacaagcugccggacgacuucacgggcugcgugaucgcguggaacagcaacaaccucgacuccaaggucgggggcaacuacaacuaccuguaccgccuguuccgcaagagcaaccucaagcccuucgagcgggacaucuccaccgagaucuaccaggccggcagcacccccugcaacgggguggagggcuucaacugcuacuucccccugcaguccuacggguuccagccgaccaacggcgugggguaccagcccuaccggguggucgugcugagcuucgagcuccugcacgcccccgccacggugugcggccccaagaaguccaccaaccuggucaagaacaagugcgugaacuucaacuucaacggccucaccgggaccggcgugcugaccgagagcaacaagaaguuccugccguuccagcaguucgggcgcgacaucgccgacacgaccgacgcgguccgcgacccccagacccuggagauccucgacaucacccccugcagcuucggcgggguguccgugaucacgccgggcaccaacaccagcaaccaggucgccgugcuguaccagggcgugaacugcaccgagguccccguggccauccacgccgaccagcugacgcccaccuggcggguguacuccaccgggagcaacgucuuccagacccgcgccggcugccucaucggggcggagcacgugaacaacuccuacgagugcgacauccccaucggcgccggcaucugcgccagcuaccagacgcagaccaacuccccgcggcgcgcccggagcguggcgucccagagcgucaucgccuacaccaugucccugggggccgagaacagcguggccuacuccaacaacagcaucgccauccccaccaacuucacgaucuccgugaccaccgagauccugcccgucagcaugaccaagacgagcguggacugcaccauguacaucugcggcgacuccaccgagugcagcaaccuccugcugcaguacggguccuucugcacccagcucaaccgcgcgcugacgggcaucgccguggagcaggacaagaacacccaggaggucuucgcccaggugaagcagaucuacaagacgcccccgaucaaggacuucgggggcuucaacuucagccagauccugcccgaccccuccaagcccagcaagcgguccuucaucgaggaccuccuguucaacaaggugacccuggccgacgccggcuucaucaagcaguacggggacugccucggcgacaucgcggcccgcgaccugaucugcgcccagaaguucaacgggcugaccguccucccgccccugcugaccgacgagaugaucgcccaguacaccagcgcccuccuggcgggcaccaucacguccggguggaccuucggcgccggcgccgcccugcagauccccuucgcgaugcagauggccuaccgguucaacgggaucggcgugacccagaacgugcucuacgagaaccagaagcugaucgccaaccaguucaacagcgccaucgggaagauccaggacucccugagcuccaccgccagcgcgcucggcaagcugcaggacgucgugaaccagaacgcccaggcccugaacacgcucgugaagcagcuguccagcaacuucggggccaucuccagcguccugaacgacauccucucccgccuggacccgcccgaggccgaggugcagaucgaccggcugaucaccggccgccuccagagccugcagaccuacgugacccagcagcugauccgggcggccgagauccgcgccagcgccaaccucgccgcgaccaagauguccgagugcguccugggccagagcaagcggguggacuucugcgggaagggcuaccaccugauguccuucccccagagcgcgccccacgggguggucuuccuccacgugacguacguccccgcccaggagaagaacuucaccaccgccccggccaucugccacgacggcaaggcccacuucccccgcgaggggguguucguguccaacggcacccacugguucgucacgcagcggaacuucuacgagccccagaucaucaccaccgacaacaccuucgugagcggcaacugcgacguggucaucgggaucgugaacaacacgguguacgacccccugcagccggagcuggacuccuucaaggaggagcucgacaaguacuucaagaaccacaccagccccgacgucgaccugggcgacaucuccgggaucaacgccagcguggugaacauccagaaggagaucgaccgccugaacgaggucgccaagaaccucaacgagucccugaucgaccugcaggagcucggcaaguacgagcaguacaucaaguggcccugguacaucuggcugggcuucaucgccgggcugaucgcgaucgugauggugaccaucaugcucugcugcaugaccagcugcugcuccugccugaagggcugcugcagcugcggguccugcugcaaguucgacgaggacgacagcgagccgguccugaagggcgugaagcuccacuacacgugaggacuaguuauaagacugacuagcccgaugggccucccaacgggcccuccuccccuccuugcaccgagagaucuaaaaaaaaaaaaaaaaaaaaaaaaaaaaaaaaaaaaaaaaaaaaaaaaaaaaaaaaaaaaaaaaaaaaaaaaaaaaaaaaaaaaaaaaaaaaaaaaaaaa

SEQ ID NO: 25964 - RNA, 4011 nt, Artificial Sequence
  SARS-CoV-2/Wuhan/WIV05/2019__EPI_ISL_402128 spike protein mRNA gc (1-1273)(K986P_V987P_D614G_M1229I)
aggagaaagcuuaccauguucguguuccugguccuccugccccuggugagcucccagugcgugaaccucaccacccgcacgcagcugccgcccgccuacaccaacagcuucacccggggcgucuacuaccccgacaagguguuccgcuccagcgugcugcacuccacccaggaccucuuccugcccuucuucagcaacgucacgugguuccacgccauccacguguccgggaccaacggcaccaagcgguucgacaacccggugcugcccuucaacgacggggucuacuucgcgagcaccgagaaguccaacaucauccgcggcuggaucuucgggacgacccucgacagcaagacccagucccugcugaucgugaacaacgccaccaacguggucaucaaggugugcgaguuccaguucugcaacgaccccuuccucggcguguacuaccacaagaacaacaagagcuggauggaguccgaguuccgggucuacagcuccgccaacaacugcacguucgaguacgugagccagcccuuccugauggaccuggagggcaagcaggggaacuucaagaaccuccgcgaguucguguucaagaacaucgacggcuacuucaagaucuacuccaagcacaccccgaucaaccugguccgggaccugccccagggguucagcgcccucgagccccugguggaccugcccaucggcaucaacaucacccgcuuccagacccuccuggcccugcaccgguccuaccucacgccgggggacagcagcuccggcuggaccgcgggcgccgccgccuacuacgugggguaccugcagccccgcaccuuccugcucaaguacaacgagaacggcaccaucacggacgcggucgacugcgcccuggacccccugagcgagaccaagugcacccucaaguccuucaccguggagaaggggaucuaccagacgagcaacuuccgggugcagcccaccgaguccaucguccgcuucccgaacaucaccaaccugugccccuucggcgagguguucaacgccacccgguucgccagcgucuacgccuggaaccgcaagcggaucuccaacugcguggcggacuacagcgugcuguacaacuccgccagcuucuccacguucaagugcuacggcgucagccccaccaagcucaacgaccugugcuucaccaacguguacgccgacuccuucgugauccgcggggacgagguccggcagaucgcccccggccagaccgggaagaucgccgacuacaacuacaagcugccggacgacuucacgggcugcgugaucgcguggaacagcaacaaccucgacuccaaggucgggggcaacuacaacuaccuguaccgccuguuccgcaagagcaaccucaagcccuucgagcgggacaucuccaccgagaucuaccaggccggcagcacccccugcaacgggguggagggcuucaacugcuacuucccccugcaguccuacggguuccagccgaccaacggcgugggguaccagcccuaccggguggucgugcugagcuucgagcuccugcacgcccccgccacggugugcggccccaagaaguccaccaaccuggucaagaacaagugcgugaacuucaacuucaacggccucaccgggaccggcgugcugaccgagagcaacaagaaguuccugccguuccagcaguucgggcgcgacaucgccgacacgaccgacgcgguccgcgacccccagacccuggagauccucgacaucacccccugcagcuucggcgggguguccgugaucacgccgggcaccaacaccagcaaccaggucgccgugcuguaccagggcgugaacugcaccgagguccccguggccauccacgccgaccagcugacgcccaccuggcggguguacuccaccgggagcaacgucuuccagacccgcgccggcugccucaucggggcggagcacgugaacaacuccuacgagugcgacauccccaucggcgccggcaucugcgccagcuaccagacgcagaccaacuccccgcggcgcgcccggagcguggcgucccagagcaucaucgccuacaccaugucccugggggccgagaacagcgucgccuacuccaacaacagcaucgccauccccaccaacuucacgaucuccgugaccaccgagauccugcccgugagcaugaccaagacgagcgucgacugcaccauguacaucugcggcgacuccaccgagugcagcaaccuccugcugcaguacggguccuucugcacccagcucaaccgcgcgcugacgggcaucgccguggagcaggacaagaacacccaggagguguucgcccaggucaagcagaucuacaagacgcccccgaucaaggacuucgggggcuucaacuucagccagauccugcccgaccccuccaagcccagcaagcgguccuucaucgaggaccuccuguucaacaaggugacccuggccgacgccggcuucaucaagcaguacggggacugccucggcgacaucgcggcccgcgaccugaucugcgcccagaaguucaacgggcugaccgugcucccgccccugcugaccgacgagaugaucgcccaguacaccagcgcccuccuggcgggcaccaucacguccggguggaccuucggcgccggcgccgcccugcagauccccuucgcgaugcagauggccuaccgguucaacgggaucggcgucacccagaacgugcucuacgagaaccagaagcugaucgccaaccaguucaacagcgccaucgggaagauccaggacucccugagcuccaccgccagcgcgcucggcaagcugcaggacguggucaaccagaacgcccaggcccugaacacgcucgugaagcagcuguccagcaacuucggggccaucuccagcgugcugaacgacauccucucccgccuggacccgcccgaggccgagguccagaucgaccggcugaucaccggccgccuccagagccugcagaccuacgugacccagcagcugauccgggcggccgagauccgcgccagcgccaaccucgccgcgaccaagauguccgagugcgugcugggccagagcaagcgggucgacuucugcgggaagggcuaccaccugauguccuucccccagagcgcgccccacggggugguguuccuccacgucacguacgugcccgcccaggagaagaacuucaccaccgccccggccaucugccacgacggcaaggcccacuucccccgcgagggggucuucguguccaacggcacccacugguucgugacgcagcggaacuucuacgagccccagaucaucaccaccgacaacaccuucgucagcggcaacugcgacguggugaucgggaucgucaacaacacgguguacgacccccugcagccggagcuggacuccuucaaggaggagcucgacaaguacuucaagaaccacaccagccccgacguggaccugggcgacaucuccgggaucaacgccagcgucgugaacauccagaaggagaucgaccgccugaacgagguggccaagaaccucaacgagucccugaucgaccugcaggagcucggcaaguacgagcaguacaucaaguggcccugguacaucuggcugggcuucaucgccgggcugaucgcgaucgucaucgugaccaucaugcucugcugcaugaccagcugcugcuccugccugaagggcugcugcagcugcggguccugcugcaaguucgacgaggacgacagcgagccggugcugaagggcgucaagcuccacuacacgugaggacuaguuauaagacugacuagcccgaugggccucccaacgggcccuccuccccuccuugcaccgagagaucuaaaaaaaaaaaaaaaaaaaaaaaaaaaaaaaaaaaaaaaaaaaaaaaaaaaaaaaaaaaaaaaaaaaaaaaaaaaaaaaaaaaaaaaaaaaaaaaaaaaa

SEQ ID NO: 25965 - RNA, 4005 nt, Artificial Sequence
  SARS-CoV-2/Wuhan/WIV05/2019__EPI_ISL_402128 spike protein mRNA gc (1-1273)(K986P_V987P_H69del_V70del_A222V_Y453F_S477N_D614G_I692V)
aggagaaagcuuaccauguucguguuccugguccuccugccccuggugagcucccagugcgugaaccucaccacccgcacgcagcugccgcccgccuacaccaacagcuucacccggggcgucuacuaccccgacaagguguuccgcuccagcgugcugcacuccacccaggaccucuuccugcccuucuucagcaacgucacgugguuccacgccaucuccgggaccaacggcaccaagcgguucgacaacccggugcugcccuucaacgacgggguguacuucgcgagcaccgagaaguccaacaucauccgcggcuggaucuucgggacgacccucgacagcaagacccagucccugcugaucgucaacaacgccaccaacguggugaucaaggucugcgaguuccaguucugcaacgaccccuuccucggcguguacuaccacaagaacaacaagagcuggauggaguccgaguuccggguguacagcuccgccaacaacugcacguucgaguacgucagccagcccuuccugauggaccuggagggcaagcaggggaacuucaagaaccuccgcgaguucguguucaagaacaucgacggcuacuucaagaucuacuccaagcacaccccgaucaaccuggugcgggaccugccccagggguucagcguccucgagccccugguggaccugcccaucggcaucaacaucacccgcuuccagacccuccuggcccugcaccgguccuaccucacgccgggggacagcagcuccggcuggaccgccggcgcggccgccuacuacgugggguaccugcagccccgcaccuuccugcucaaguacaacgagaacggcaccaucacggacgccgucgacugcgcgcuggacccccugagcgagaccaagugcacccucaaguccuucaccguggagaaggggaucuaccagacgagcaacuuccgggugcagcccaccgaguccaucguccgcuucccgaacaucaccaaccugugccccuucggcgagguguucaacgccacccgguucgccagcgucuacgccuggaaccgcaagcggaucuccaacugcguggccgacuacagcgugcuguacaacuccgcgagcuucuccacguucaagugcuacggcgucagccccaccaagcucaacgaccugugcuucaccaacguguacgccgacuccuucgugauccgcggggacgagguccggcagaucgcccccggccagaccgggaagaucgccgacuacaacuacaagcugccggacgacuucacgggcugcgugaucgccuggaacagcaacaaccucgacuccaaggucgggggcaacuacaacuaccuguuccgccuguuccgcaagagcaaccucaagcccuucgagcgggacaucuccaccgagaucuaccaggcgggcaacacccccugcaacgggguggagggcuucaacugcuacuucccccugcagagcuacggguuccagccgaccaacggcgugggguaccagcccuaccggguggucgugcuguccuucgagcuccugcacgcccccgccacggugugcggccccaagaaguccaccaaccuggucaagaacaagugcgugaacuucaacuucaacggccucaccgggaccggcgugcugaccgagagcaacaagaaguuccugccguuccagcaguucgggcgcgacaucgccgacacgaccgacgccguccgcgacccccagacccuggagauccucgacaucacccccugcagcuucggcggggugagcgugaucacgccgggcaccaacaccuccaaccaggucgcggugcuguaccagggcgugaacugcaccgagguccccguggccauccacgccgaccagcugacgcccaccuggcggguguacagcaccggguccaacgucuuccagacccgcgccggcugccucaucggggccgagcacgugaacaacagcuacgagugcgacauccccaucggcgcgggcaucugcgccuccuaccagacgcagaccaacagcccgcggcgcgcccgguccguggccagccaguccgucaucgcguacaccaugagccugggggccgagaacuccguggccuacagcaacaacuccaucgccauccccaccaacuucacgaucagcgugaccaccgagauccugcccgucuccaugaccaagacgagcguggacugcaccauguacaucugcggcgacagcaccgagugcuccaaccuccugcugcaguacgggagcuucugcacccagcucaaccgcgcccugacgggcaucgcgguggagcaggacaagaacacccaggaggucuucgcccaggugaagcagaucuacaagacgcccccgaucaaggacuucgggggcuucaacuucucccagauccugcccgaccccagcaagcccuccaagcggagcuucaucgaggaccuccuguucaacaaggugacccuggccgacgccggcuucaucaagcaguacggggacugccucggcgacaucgccgcgcgcgaccugaucugcgcccagaaguucaacgggcugaccguccucccgccccugcugaccgacgagaugaucgcccaguacaccuccgcccuccuggccggcaccaucacgagcggguggaccuucggcgcgggcgccgcccugcagauccccuucgccaugcagauggcguaccgguucaacgggaucggcgugacccagaacgugcucuacgagaaccagaagcugaucgccaaccaguucaacuccgccaucgggaagauccaggacagccuguccagcaccgccuccgcccucggcaagcugcaggacgucgugaaccagaacgcgcaggcccugaacacgcucgugaagcagcugagcuccaacuucggggccaucagcuccguccugaacgacauccucagccgccuggacccgcccgaggccgaggugcagaucgaccggcugaucaccggccgccuccagucccugcagaccuacgugacccagcagcugauccgggccgcggagauccgcgccagcgccaaccucgccgccaccaagaugagcgagugcguccugggccaguccaagcggguggacuucugcgggaagggcuaccaccugaugagcuucccccaguccgcgccccacgggguggucuuccuccacgugacguacguccccgcccaggagaagaacuucaccaccgccccggccaucugccacgacggcaaggcgcacuucccccgcgaggggguguucgugagcaacggcacccacugguucgucacgcagcggaacuucuacgagccccagaucaucaccaccgacaacaccuucguguccggcaacugcgacguggucaucgggaucgugaacaacacgguguacgacccccugcagccggagcuggacagcuucaaggaggagcucgacaaguacuucaagaaccacaccucccccgacgucgaccugggcgacaucagcgggaucaacgccuccguggugaacauccagaaggagaucgaccgccugaacgaggucgccaagaaccucaacgagagccugaucgaccugcaggagcucggcaaguacgagcaguacaucaaguggcccugguacaucuggcugggcuucaucgccgggcugaucgccaucgugauggugaccaucaugcucugcugcaugaccuccugcugcagcugccugaagggcugcugcuccugcgggagcugcugcaaguucgacgaggacgacuccgagccgguccugaagggcgugaagcuccacuacacgugaggacuaguuauaagacugacuagcccgaugggccucccaacgggcccuccuccccuccuugcaccgagagaucuaaaaaaaaaaaaaaaaaaaaaaaaaaaaaaaaaaaaaaaaaaaaaaaaaaaaaaaaaaaaaaaaaaaaaaaaaaaaaaaaaaaaaaaaaaaaaaaaaaaa

SEQ ID NO: 25966 - RNA, 4005 nt, Artificial Sequence
  SARS-CoV-2/Wuhan/WIV05/2019__EPI_ISL_402128 spike protein mRNA gc (1-1273)(K986P_V987P_H69del_V70del_Y453F_D614G_I692V_M1229I)
aggagaaagcuuaccauguucguguuccugguccuccugccccuggugagcucccagugcgugaaccucaccacccgcacgcagcugccgcccgccuacaccaacagcuucacccggggcgucuacuaccccgacaagguguuccgcuccagcgugcugcacuccacccaggaccucuuccugcccuucuucagcaacgucacgugguuccacgccaucuccgggaccaacggcaccaagcgguucgacaacccggugcugcccuucaacgacgggguguacuucgcgagcaccgagaaguccaacaucauccgcggcuggaucuucgggacgacccucgacagcaagacccagucccugcugaucgucaacaacgccaccaacguggugaucaaggucugcgaguuccaguucugcaacgaccccuuccucggcguguacuaccacaagaacaacaagagcuggauggaguccgaguuccggguguacagcuccgccaacaacugcacguucgaguacgucagccagcccuuccugauggaccuggagggcaagcaggggaacuucaagaaccuccgcgaguucguguucaagaacaucgacggcuacuucaagaucuacuccaagcacaccccgaucaaccuggugcgggaccugccccagggguucagcgcccucgagccccuggucgaccugcccaucggcaucaacaucacccgcuuccagacccuccuggcccugcaccgguccuaccucacgccgggggacagcagcuccggcuggaccgcgggcgccgccgccuacuacgugggguaccugcagccccgcaccuuccugcucaaguacaacgagaacggcaccaucacggacgcgguggacugcgcccuggacccccugagcgagaccaagugcacccucaaguccuucaccgucgagaaggggaucuaccagacgagcaacuuccgggugcagcccaccgaguccaucgugcgcuucccgaacaucaccaaccugugccccuucggcgaggucuucaacgccacccgguucgccagcguguacgccuggaaccgcaagcggaucuccaacugcgucgcggacuacagcgugcuguacaacuccgccagcuucuccacguucaagugcuacggcgugagccccaccaagcucaacgaccugugcuucaccaacgucuacgccgacuccuucgugauccgcggggacgaggugcggcagaucgcccccggccagaccgggaagaucgccgacuacaacuacaagcugccggacgacuucacgggcugcgucaucgcguggaacagcaacaaccucgacuccaaggucgggggcaacuacaacuaccuguuccgccuguuccgcaagagcaaccucaagcccuucgagcgggacaucuccaccgagaucuaccaggccggcagcacccccugcaacgggguggagggcuucaacugcuacuucccccugcaguccuacggguuccagccgaccaacggcgugggguaccagcccuaccggguggugguccugagcuucgagcuccugcacgcccccgccacggugugcggccccaagaaguccaccaaccuggugaagaacaagugcgucaacuucaacuucaacggccucaccgggaccggcgugcugaccgagagcaacaagaaguuccugccguuccagcaguucgggcgcgacaucgccgacacgaccgacgcggugcgcgacccccagacccuggagauccucgacaucacccccugcagcuucggcggggucuccgugaucacgccgggcaccaacaccagcaaccagguggccguccuguaccagggcgugaacugcaccgaggugcccgucgccauccacgccgaccagcugacgcccaccuggcggguguacuccaccgggagcaacguguuccagacccgcgccggcugccucaucggggcggagcacgucaacaacuccuacgagugcgacauccccaucggcgccggcaucugcgccagcuaccagacgcagaccaacuccccgcggcgcgcccggagcguggcgucccagagcgugaucgccuacaccaugucccugggggccgagaacagcgucgccuacuccaacaacagcaucgccauccccaccaacuucacgaucuccgugaccaccgagauccugcccgugagcaugaccaagacgagcgucgacugcaccauguacaucugcggcgacuccaccgagugcagcaaccuccugcugcaguacggguccuucugcacccagcucaaccgcgcgcugacgggcaucgccguggagcaggacaagaacacccaggagguguucgcccaggucaagcagaucuacaagacgcccccgaucaaggacuucgggggcuucaacuucagccagauccugcccgaccccuccaagcccagcaagcgguccuucaucgaggaccuccuguucaacaaggugacccuggccgacgccggcuucaucaagcaguacggggacugccucggcgacaucgcggcccgcgaccugaucugcgcccagaaguucaacgggcugaccgugcucccgccccugcugaccgacgagaugaucgcccaguacaccagcgcccuccuggcgggcaccaucacguccggguggaccuucggcgccggcgccgcccugcagauccccuucgcgaugcagauggccuaccgguucaacgggaucggcgucacccagaacgugcucuacgagaaccagaagcugaucgccaaccaguucaacagcgccaucgggaagauccaggacucccugagcuccaccgccagcgcgcucggcaagcugcaggacguggucaaccagaacgcccaggcccugaacacgcucgugaagcagcuguccagcaacuucggggccaucuccagcgugcugaacgacauccucucccgccuggacccgcccgaggccgagguccagaucgaccggcugaucaccggccgccuccagagccugcagaccuacgugacccagcagcugauccgggcggccgagauccgcgccagcgccaaccucgccgcgaccaagauguccgagugcgugcugggccagagcaagcgggucgacuucugcgggaagggcuaccaccugauguccuucccccagagcgcgccccacggggugguguuccuccacgucacguacgugcccgcccaggagaagaacuucaccaccgccccggccaucugccacgacggcaaggcccacuucccccgcgagggggucuucguguccaacggcacccacugguucgugacgcagcggaacuucuacgagccccagaucaucaccaccgacaacaccuucgucagcggcaacugcgacguggugaucgggaucgucaacaacacgguguacgacccccugcagccggagcuggacuccuucaaggaggagcucgacaaguacuucaagaaccacaccagccccgacguggaccugggcgacaucuccgggaucaacgccagcgucgugaacauccagaaggagaucgaccgccugaacgagguggccaagaaccucaacgagucccugaucgaccugcaggagcucggcaaguacgagcaguacaucaaguggcccugguacaucuggcugggcuucaucgccgggcugaucgcgaucgucaucgugaccaucaugcucugcugcaugaccagcugcugcuccugccugaagggcugcugcagcugcggguccugcugcaaguucgacgaggacgacagcgagccggugcugaagggcgucaagcuccacuacacgugaggacuaguuauaagacugacuagcccgaugggccucccaacgggcccuccuccccuccuugcaccgagagaucuaaaaaaaaaaaaaaaaaaaaaaaaaaaaaaaaaaaaaaaaaaaaaaaaaaaaaaaaaaaaaaaaaaaaaaaaaaaaaaaaaaaaaaaaaaaaaaaaaaaa

SEQ ID NO: 25967 - RNA, 4002 nt, Artificial Sequence
  SARS-CoV-2/Wuhan/WIV05/2019__EPI_ISL_402128 spike protein mRNA gc (1-1273)(K986P_V987P_K986P_V987P_H69del_V70del_Y144del_N501Y_A570 D_D614G_P681H_T716I_S982A_D1118H)
aggagaaagcuuaccauguucguguuccugguccuccugccccuggugagcucccagugcgugaaccucaccacccgcacgcagcugccgcccgccuacaccaacagcuucacccggggcgucuacuaccccgacaagguguuccgcuccagcgugcugcacuccacccaggaccucuuccugcccuucuucagcaacgucacgugguuccacgccaucuccgggaccaacggcaccaagcgguucgacaacccggugcugcccuucaacgacgggguguacuucgcgagcaccgagaaguccaacaucauccgcggcuggaucuucgggacgacccucgacagcaagacccagucccugcugaucgucaacaacgccaccaacguggugaucaaggucugcgaguuccaguucugcaacgaccccuuccucggcguguaccacaagaacaacaagagcuggauggaguccgaguuccggguguacagcuccgccaacaacugcacguucgaguacgucagccagcccuuccugauggaccuggagggcaagcaggggaacuucaagaaccuccgcgaguucguguucaagaacaucgacggcuacuucaagaucuacuccaagcacaccccgaucaaccuggugcgggaccugccccagggguucagcgcccucgagccccuggucgaccugcccaucggcaucaacaucacccgcuuccagacccuccuggcccugcaccgguccuaccucacgccgggggacagcagcuccggcuggaccgcgggcgccgccgccuacuacgugggguaccugcagccccgcaccuuccugcucaaguacaacgagaacggcaccaucacggacgcgguggacugcgcccuggacccccugagcgagaccaagugcacccucaaguccuucaccgucgagaaggggaucuaccagacgagcaacuuccgggugcagcccaccgaguccaucgugcgcuucccgaacaucaccaaccugugccccuucggcgaggucuucaacgccacccgguucgccagcguguacgccuggaaccgcaagcggaucuccaacugcgucgcggacuacagcgugcuguacaacuccgccagcuucuccacguucaagugcuacggcgugagccccaccaagcucaacgaccugugcuucaccaacgucuacgccgacuccuucgugauccgcggggacgaggugcggcagaucgcccccggccagaccgggaagaucgccgacuacaacuacaagcugccggacgacuucacgggcugcgucaucgcguggaacagcaacaaccucgacuccaaggucgggggcaacuacaacuaccuguaccgccuguuccgcaagagcaaccucaagcccuucgagcgggacaucuccaccgagaucuaccaggccggcagcacccccugcaacgggguggagggcuucaacugcuacuucccccugcaguccuacggguuccagccgaccuacggcgugggguaccagcccuaccggguggugguccugagcuucgagcuccugcacgcccccgccacggugugcggccccaagaaguccaccaaccuggugaagaacaagugcgucaacuucaacuucaacggccucaccgggaccggcgugcugaccgagagcaacaagaaguuccugccguuccagcaguucgggcgcgacaucgacgacacgaccgacgccgugcgcgacccccagacccuggagauccucgacaucacccccugcagcuucggcggggucuccgugaucacgccgggcaccaacaccagcaaccagguggcgguccuguaccagggcgugaacugcaccgaggugcccgucgccauccacgccgaccagcugacgcccaccuggcggguguacuccaccgggagcaacguguuccagacccgcgccggcugccucaucggggccgagcacgucaacaacuccuacgagugcgacauccccaucggcgcgggcaucugcgccagcuaccagacgcagaccaacucccaccggcgcgcccggagcguggccucccagagcaucaucgcguacaccaugucccugggggccgagaacagcguggccuacuccaacaacagcaucgccaucccgaucaacuucaccaucuccgucacgaccgagauccugcccgugagcaugaccaagaccagcguggacugcacgauguacaucugcggcgacuccaccgagugcagcaaccuccugcugcaguacggguccuucugcacccagcucaaccgcgcccugaccggcaucgcggucgagcaggacaagaacacgcaggagguguucgcccaggugaagcagaucuacaagaccccgcccaucaaggacuucgggggcuucaacuucagccagauccugcccgaccccuccaagcccagcaagcgguccuucaucgaggaccuccuguucaacaaggucacccuggccgacgccggcuucaucaagcaguacggggacugccucggcgacaucgccgcgcgcgaccugaucugcgcccagaaguucaacgggcugaccgugcugcccccgcuccugacggacgagaugaucgcccaguacaccagcgcccuccuggccggcaccaucaccuccggguggacguucggcgcgggcgccgcccugcagauccccuucgccaugcagauggcguaccgguucaacgggaucggcgugacccagaacguccucuacgagaaccagaagcugaucgccaaccaguucaacagcgccaucgggaagauccaggacucccugagcuccaccgccagcgcccucggcaagcugcaggacguggugaaccagaacgcgcaggcccugaacacccucgucaagcagcuguccagcaacuucggggccaucuccagcgugcugaacgacauccucgcccgccuggacccgcccgaggccgaggugcagaucgaccggcugaucacgggccgccuccagucccugcagaccuacgucacccagcagcugauccgggcggccgagauccgcgccagcgccaaccucgccgcgaccaagaugagcgagugcgugcugggccaguccaagcggguggacuucugcgggaagggcuaccaccugaugagcuucccccaguccgcgccccacggggucguguuccuccacgugaccuacguccccgcccaggagaagaacuucacgaccgcccccgccaucugccacgacggcaaggcccacuucccgcgcgaggggguguucgucagcaacggcacccacugguucgugacccagcggaacuucuacgagccccagaucaucacgacccacaacaccuucguguccggcaacugcgacgucgugaucgggaucgugaacaacaccgucuacgacccccugcagcccgagcuggacagcuucaaggaggagcucgacaaguacuucaagaaccacacguccccggacguggaccugggcgacaucagcgggaucaacgccuccguggucaacauccagaaggagaucgaccgccugaacgagguggccaagaaccucaacgagagccugaucgaccugcaggagcucggcaaguacgagcaguacaucaaguggcccugguacaucuggcugggcuucaucgccgggcugaucgcgaucgugauggucaccaucaugcucugcugcaugaccuccugcugcagcugccugaagggcugcugcuccugcgggagcugcugcaaguucgacgaggacgacuccgagcccgugcugaagggcgugaagcuccacuacaccugaggacuaguuauaagacugacuagcccgaugggccucccaacgggcccuccuccccuccuugcaccgagagaucuaaaaaaaaaaaaaaaaaaaaaaaaaaaaaaaaaaaaaaaaaaaaaaaaaaaaaaaaaaaaaaaaaaaaaaaaaaaaaaaaaaaaaaaaaaaaaaaaaaaa

SEQ ID NO: 25968 - RNA, 4011 nt, Artificial Sequence
  SARS-CoV-2/Wuhan/WIV05/2019__EPI_ISL_402128 spike protein mRNA gc (1-1273)(K986P_V987P_K986P_V987P_K417N_E484K_N501Y_D614G)
aggagaaagcuuaccauguucguguuccugguccuccugccccuggugagcucccagugcgugaaccucaccacccgcacgcagcugccgcccgccuacaccaacagcuucacccggggcgucuacuaccccgacaagguguuccgcuccagcgugcugcacuccacccaggaccucuuccugcccuucuucagcaacgucacgugguuccacgccauccacguguccgggaccaacggcaccaagcgguucgacaacccggugcugcccuucaacgacggggucuacuucgcgagcaccgagaaguccaacaucauccgcggcuggaucuucgggacgacccucgacagcaagacccagucccugcugaucgugaacaacgccaccaacguggucaucaaggugugcgaguuccaguucugcaacgaccccuuccucggcguguacuaccacaagaacaacaagagcuggauggaguccgaguuccgggucuacagcuccgccaacaacugcacguucgaguacgugagccagcccuuccugauggaccuggagggcaagcaggggaacuucaagaaccuccgcgaguucguguucaagaacaucgacggcuacuucaagaucuacuccaagcacaccccgaucaaccugguccgggaccugccccagggguucagcgcccucgagccccugguggaccugcccaucggcaucaacaucacccgcuuccagacccuccuggcccugcaccgguccuaccucacgccgggggacagcagcuccggcuggaccgcgggcgccgccgccuacuacgugggguaccugcagccccgcaccuuccugcucaaguacaacgagaacggcaccaucacggacgcggucgacugcgcccuggacccccugagcgagaccaagugcacccucaaguccuucaccguggagaaggggaucuaccagacgagcaacuuccgggugcagcccaccgaguccaucguccgcuucccgaacaucaccaaccugugccccuucggcgagguguucaacgccacccgguucgccagcgucuacgccuggaaccgcaagcggaucuccaacugcguggcggacuacagcgugcuguacaacuccgccagcuucuccacguucaagugcuacggcgucagccccaccaagcucaacgaccugugcuucaccaacguguacgccgacuccuucgugauccgcggggacgagguccggcagaucgcccccggccagaccgggaacaucgccgacuacaacuacaagcugccggacgacuucacgggcugcgugaucgcguggaacagcaacaaccucgacuccaaggucgggggcaacuacaacuaccuguaccgccuguuccgcaagagcaaccucaagcccuucgagcgggacaucuccaccgagaucuaccaggccggcagcacccccugcaacggggugaagggcuucaacugcuacuucccccugcaguccuacggguuccagccgaccuacggcgugggguaccagcccuaccggguggucgugcugagcuucgagcuccugcacgcccccgccacggugugcggccccaagaaguccaccaaccuggucaagaacaagugcgugaacuucaacuucaacggccucaccgggaccggcgugcugaccgagagcaacaagaaguuccugccguuccagcaguucgggcgcgacaucgccgacacgaccgacgcgguccgcgacccccagacccuggagauccucgacaucacccccugcagcuucggcgggguguccgugaucacgccgggcaccaacaccagcaaccaggucgccgugcuguaccagggcgugaacugcaccgagguccccguggccauccacgccgaccagcugacgcccaccuggcggguguacuccaccgggagcaacgucuuccagacccgcgccggcugccucaucggggcggagcacgugaacaacuccuacgagugcgacauccccaucggcgccggcaucugcgccagcuaccagacgcagaccaacuccccgcggcgcgcccggagcguggcgucccagagcaucaucgccuacaccaugucccugggggccgagaacagcgucgccuacuccaacaacagcaucgccauccccaccaacuucacgaucuccgugaccaccgagauccugcccgugagcaugaccaagacgagcgucgacugcaccauguacaucugcggcgacuccaccgagugcagcaaccuccugcugcaguacggguccuucugcacccagcucaaccgcgcgcugacgggcaucgccguggagcaggacaagaacacccaggagguguucgcccaggucaagcagaucuacaagacgcccccgaucaaggacuucgggggcuucaacuucagccagauccugcccgaccccuccaagcccagcaagcgguccuucaucgaggaccuccuguucaacaaggugacccuggccgacgccggcuucaucaagcaguacggggacugccucggcgacaucgcggcccgcgaccugaucugcgcccagaaguucaacgggcugaccgugcucccgccccugcugaccgacgagaugaucgcccaguacaccagcgcccuccuggcgggcaccaucacguccggguggaccuucggcgccggcgccgcccugcagauccccuucgcgaugcagauggccuaccgguucaacgggaucggcgucacccagaacgugcucuacgagaaccagaagcugaucgccaaccaguucaacagcgccaucgggaagauccaggacucccugagcuccaccgccagcgcgcucggcaagcugcaggacguggucaaccagaacgcccaggcccugaacacgcucgugaagcagcuguccagcaacuucggggccaucuccagcgugcugaacgacauccucucccgccuggacccgcccgaggccgagguccagaucgaccggcugaucaccggccgccuccagagccugcagaccuacgugacccagcagcugauccgggcggccgagauccgcgccagcgccaaccucgccgcgaccaagauguccgagugcgugcugggccagagcaagcgggucgacuucugcgggaagggcuaccaccugauguccuucccccagagcgcgccccacggggugguguuccuccacgucacguacgugcccgcccaggagaagaacuucaccaccgccccggccaucugccacgacggcaaggcccacuucccccgcgagggggucuucguguccaacggcacccacugguucgugacgcagcggaacuucuacgagccccagaucaucaccaccgacaacaccuucgucagcggcaacugcgacguggugaucgggaucgucaacaacacgguguacgacccccugcagccggagcuggacuccuucaaggaggagcucgacaaguacuucaagaaccacaccagccccgacguggaccugggcgacaucuccgggaucaacgccagcgucgugaacauccagaaggagaucgaccgccugaacgagguggccaagaaccucaacgagucccugaucgaccugcaggagcucggcaaguacgagcaguacaucaaguggcccugguacaucuggcugggcuucaucgccgggcugaucgcgaucgucauggugaccaucaugcucugcugcaugaccagcugcugcuccugccugaagggcugcugcagcugcggguccugcugcaaguucgacgaggacgacagcgagccggugcugaagggcgucaagcuccacuacacgugaggacuaguuauaagacugacuagcccgaugggccucccaacgggcccuccuccccuccuugcaccgagagaucuaaaaaaaaaaaaaaaaaaaaaaaaaaaaaaaaaaaaaaaaaaaaaaaaaaaaaaaaaaaaaaaaaaaaaaaaaaaaaaaaaaaaaaaaaaaaaaaaaaaa

SEQ ID NO: 25969 - RNA, 4002 nt, Artificial Sequence
  SARS-CoV-2/Wuhan/WIV05/2019__EPI_ISL_402128 spike protein mRNA gc (1-1273)(K986P_V987P_K986P_V987P_L18F_D80A_D215G_L242del_A243del_ L244del_R246I_K417N_E484K_N501Y_D614G_A701V)
aggagaaagcuuaccauguucguguuccugguccuccugccccuggugagcucccagugcgugaacuucaccacccgcacgcagcucccgcccgccuacaccaacagcuucacccggggcgucuacuaccccgacaagguguuccgcuccagcgugcugcacuccacccaggaccuguuccuccccuucuucagcaacgucacgugguuccacgccauccacguguccgggaccaacggcaccaagcgguucgcgaacccggugcugcccuucaacgacggggucuacuucgccagcaccgagaaguccaacaucauccgcggcuggaucuucgggacgacccuggacagcaagacccagucccuccugaucgugaacaacgccaccaacguggucaucaaggugugcgaguuccaguucugcaacgaccccuuccugggcguguacuaccacaagaacaacaagagcuggauggaguccgaguuccgggucuacagcuccgccaacaacugcacguucgaguacgugagccagcccuuccucauggaccuggagggcaagcaggggaacuucaagaaccugcgcgaguucguguucaagaacaucgacggcuacuucaagaucuacuccaagcacaccccgaucaaccucguccgggggcugccccagggcuucagcgcccuggagccccucguggaccugcccaucgggaucaacaucacccgcuuccagacccugcacaucuccuaccucacgccgggcgacagcagcuccggcuggaccgcgggggccgccgccuacuacgugggcuaccugcagccccggaccuuccugcucaaguacaacgagaacgggaccaucacggacgcggucgacugcgcccuggacccccugagcgagaccaagugcacccucaaguccuucaccguggagaagggcaucuaccagacgagcaacuuccgcgugcagcccaccgaguccaucguccgguucccgaacaucaccaaccugugccccuucggcgagguguucaacgccacccgcuucgccagcgucuacgccuggaaccggaagcgcaucuccaacugcguggcggacuacagcgugcuguacaacuccgccagcuucuccacguucaagugcuacggggucagccccaccaagcucaacgaccugugcuucaccaacguguacgccgacuccuucgugauccggggcgacgagguccgccagaucgcccccgggcagaccggcaacaucgccgacuacaacuacaagcugccggacgacuucacggggugcgugaucgcguggaacagcaacaaccucgacuccaaggugggcggcaacuacaacuaccuguaccggcuguuccgcaagagcaaccucaagcccuucgagcgggacaucuccaccgagaucuaccaggccgggagcacccccugcaacggcgucaagggguucaacugcuacuucccccugcaguccuacggcuuccagccgaccuacggggugggcuaccagcccuaccgcguggucgugcugagcuucgagcuccugcacgcccccgccacggugugcggccccaagaaguccaccaaccuggucaagaacaagugcgugaacuucaacuucaacgggcucaccggcaccggggugcugaccgagagcaacaagaaguuccugccguuccagcaguucggccgggacaucgccgacacgaccgacgcgguccgcgacccccagacccucgagauccuggacaucacccccugcagcuucgggggcguguccgugaucacgccgggcaccaacaccagcaaccaggucgccgugcuguaccagggggugaacugcaccgagguccccguggccauccacgccgaccagcugacgcccaccuggcgcguguacuccaccggcagcaacgucuuccagacccgggccgggugccucaucggcgcggagcacgugaacaacuccuacgagugcgacauccccaucggcgccgggaucugcgccagcuaccagacgcagaccaacuccccgcgccgggcccgcagcguggcgucccagagcaucaucgccuacaccaugucccugggcgucgagaacagcguggccuacuccaacaacagcaucgccauccccaccaacuucacgaucuccgugaccaccgagauccugcccgucagcaugaccaagacgagcguggacugcaccauguacaucugcggggacuccaccgagugcagcaaccuccugcugcaguacggcuccuucugcacccagcucaaccgggcccugacggggaucgcgguggagcaggacaagaacacccaggaggucuucgcccaggugaagcagaucuacaagacgcccccgaucaaggacuucggcggcuucaacuucagccagauccugcccgaccccuccaagcccagcaagcgcuccuucaucgaggaccuccuguucaacaaggugacccuggccgacgccggguucaucaagcaguacggcgacugccucggggacaucgccgcgcgggaccugaucugcgcccagaaguucaacggccugaccguccucccgccccugcugaccgacgagaugaucgcccaguacaccagcgcccuccuggccgggaccaucacguccggcuggaccuucggcgcgggggccgcccugcagauccccuucgccaugcagauggcguaccgcuucaacggcaucggggugacccagaacgugcucuacgagaaccagaagcugaucgccaaccaguucaacagcgccaucggcaagauccaggacucccugagcuccaccgccagcgcccucgggaagcugcaggacgucgugaaccagaacgcgcaggcccugaacacgcucgugaagcagcuguccagcaacuucggcgccaucuccagcguccugaacgacauccucucccggcuggacccgcccgaggccgaggugcagaucgaccgccugaucaccggccggcuccagagccugcagaccuacgugacccagcagcugauccgcgccgcggagauccgggccagcgccaaccucgccgccaccaagauguccgagugcguccuggggcagagcaagcgcguggacuucugcggcaagggguaccaccugauguccuucccccagagcgcgccccacggcguggucuuccuccacgugacguacguccccgcccaggagaagaacuucaccaccgccccggccaucugccacgacgggaaggcgcacuucccccgggagggcguguucguguccaacggcacccacugguucgucacgcagcgcaacuucuacgagccccagaucaucaccaccgacaacaccuucgugagcgggaacugcgacguggucaucggcaucgugaacaacacgguguacgacccccugcagccggagcuggacuccuucaaggaggagcucgacaaguacuucaagaaccacaccagccccgacgucgaccugggggacaucuccggcaucaacgccagcguggugaacauccagaaggagaucgaccggcugaacgaggucgccaagaaccucaacgagucccugaucgaccugcaggagcucggcaaguacgagcaguacaucaaguggcccugguacaucuggcugggguucaucgccggccugaucgccaucgugauggugaccaucaugcucugcugcaugaccagcugcugcuccugccugaaggggugcugcagcugcggcuccugcugcaaguucgacgaggacgacagcgagccgguccugaagggggugaagcuccacuacacgugaggacuaguuauaagacugacuagcccgaugggccucccaacgggcccuccuccccuccuugcaccgagagaucuaaaaaaaaaaaaaaaaaaaaaaaaaaaaaaaaaaaaaaaaaaaaaaaaaaaaaaaaaaaaaaaaaaaaaaaaaaaaaaaaaaaaaaaaaaaaaaaaaaaa

SEQ ID NO: 25970 - RNA, 4011 nt, Artificial Sequence
  SARS-CoV-2/Wuhan/WIV05/2019__EPI_ISL_402128 spike protein mRNA gc (1-1273)(K986P_V987P_K986P_V987P_E484K_D614G)
aggagaaagcuuaccauguucguguuccugguccuccugccccuggugagcucccagugcgugaaccucaccacccgcacgcagcugccgcccgccuacaccaacagcuucacccggggcgucuacuaccccgacaagguguuccgcuccagcgugcugcacuccacccaggaccucuuccugcccuucuucagcaacgucacgugguuccacgccauccacguguccgggaccaacggcaccaagcgguucgacaacccggugcugcccuucaacgacggggucuacuucgcgagcaccgagaaguccaacaucauccgcggcuggaucuucgggacgacccucgacagcaagacccagucccugcugaucgugaacaacgccaccaacguggucaucaaggugugcgaguuccaguucugcaacgaccccuuccucggcguguacuaccacaagaacaacaagagcuggauggaguccgaguuccgggucuacagcuccgccaacaacugcacguucgaguacgugagccagcccuuccugauggaccuggagggcaagcaggggaacuucaagaaccuccgcgaguucguguucaagaacaucgacggcuacuucaagaucuacuccaagcacaccccgaucaaccugguccgggaccugccccagggguucagcgcccucgagccccugguggaccugcccaucggcaucaacaucacccgcuuccagacccuccuggcccugcaccgguccuaccucacgccgggggacagcagcuccggcuggaccgcgggcgccgccgccuacuacgugggguaccugcagccccgcaccuuccugcucaaguacaacgagaacggcaccaucacggacgcggucgacugcgcccuggacccccugagcgagaccaagugcacccucaaguccuucaccguggagaaggggaucuaccagacgagcaacuuccgggugcagcccaccgaguccaucguccgcuucccgaacaucaccaaccugugccccuucggcgagguguucaacgccacccgguucgccagcgucuacgccuggaaccgcaagcggaucuccaacugcguggcggacuacagcgugcuguacaacuccgccagcuucuccacguucaagugcuacggcgucagccccaccaagcucaacgaccugugcuucaccaacguguacgccgacuccuucgugauccgcggggacgagguccggcagaucgcccccggccagaccgggaagaucgccgacuacaacuacaagcugccggacgacuucacgggcugcgugaucgcguggaacagcaacaaccucgacuccaaggucgggggcaacuacaacuaccuguaccgccuguuccgcaagagcaaccucaagcccuucgagcgggacaucuccaccgagaucuaccaggccggcagcacccccugcaacggggugaagggcuucaacugcuacuucccccugcaguccuacggguuccagccgaccaacggcgugggguaccagcccuaccggguggucgugcugagcuucgagcuccugcacgcccccgccacggugugcggccccaagaaguccaccaaccuggucaagaacaagugcgugaacuucaacuucaacggccucaccgggaccggcgugcugaccgagagcaacaagaaguuccugccguuccagcaguucgggcgcgacaucgccgacacgaccgacgcgguccgcgacccccagacccuggagauccucgacaucacccccugcagcuucggcgggguguccgugaucacgccgggcaccaacaccagcaaccaggucgccgugcuguaccagggcgugaacugcaccgagguccccguggccauccacgccgaccagcugacgcccaccuggcggguguacuccaccgggagcaacgucuuccagacccgcgccggcugccucaucggggcggagcacgugaacaacuccuacgagugcgacauccccaucggcgccggcaucugcgccagcuaccagacgcagaccaacuccccgcggcgcgcccggagcguggcgucccagagcaucaucgccuacaccaugucccugggggccgagaacagcgucgccuacuccaacaacagcaucgccauccccaccaacuucacgaucuccgugaccaccgagauccugcccgugagcaugaccaagacgagcgucgacugcaccauguacaucugcggcgacuccaccgagugcagcaaccuccugcugcaguacggguccuucugcacccagcucaaccgcgcgcugacgggcaucgccguggagcaggacaagaacacccaggagguguucgcccaggucaagcagaucuacaagacgcccccgaucaaggacuucgggggcuucaacuucagccagauccugcccgaccccuccaagcccagcaagcgguccuucaucgaggaccuccuguucaacaaggugacccuggccgacgccggcuucaucaagcaguacggggacugccucggcgacaucgcggcccgcgaccugaucugcgcccagaaguucaacgggcugaccgugcucccgccccugcugaccgacgagaugaucgcccaguacaccagcgcccuccuggcgggcaccaucacguccggguggaccuucggcgccggcgccgcccugcagauccccuucgcgaugcagauggccuaccgguucaacgggaucggcgucacccagaacgugcucuacgagaaccagaagcugaucgccaaccaguucaacagcgccaucgggaagauccaggacucccugagcuccaccgccagcgcgcucggcaagcugcaggacguggucaaccagaacgcccaggcccugaacacgcucgugaagcagcuguccagcaacuucggggccaucuccagcgugcugaacgacauccucucccgccuggacccgcccgaggccgagguccagaucgaccggcugaucaccggccgccuccagagccugcagaccuacgugacccagcagcugauccgggcggccgagauccgcgccagcgccaaccucgccgcgaccaagauguccgagugcgugcugggccagagcaagcgggucgacuucugcgggaagggcuaccaccugauguccuucccccagagcgcgccccacggggugguguuccuccacgucacguacgugcccgcccaggagaagaacuucaccaccgccccggccaucugccacgacggcaaggcccacuucccccgcgagggggucuucguguccaacggcacccacugguucgugacgcagcggaacuucuacgagccccagaucaucaccaccgacaacaccuucgucagcggcaacugcgacguggugaucgggaucgucaacaacacgguguacgacccccugcagccggagcuggacuccuucaaggaggagcucgacaaguacuucaagaaccacaccagccccgacguggaccugggcgacaucuccgggaucaacgccagcgucgugaacauccagaaggagaucgaccgccugaacgagguggccaagaaccucaacgagucccugaucgaccugcaggagcucggcaaguacgagcaguacaucaaguggcccugguacaucuggcugggcuucaucgccgggcugaucgcgaucgucauggugaccaucaugcucugcugcaugaccagcugcugcuccugccugaagggcugcugcagcugcggguccugcugcaaguucgacgaggacgacagcgagccggugcugaagggcgucaagcuccacuacacgugaggacuaguuauaagacugacuagcccgaugggccucccaacgggcccuccuccccuccuugcaccgagagaucuaaaaaaaaaaaaaaaaaaaaaaaaaaaaaaaaaaaaaaaaaaaaaaaaaaaaaaaaaaaaaaaaaaaaaaaaaaaaaaaaaaaaaaaaaaaaaaaaaaaa

SEQ ID NO: 25971 - RNA, 4011 nt, Artificial Sequence
  SARS-CoV-2/Wuhan/WIV05/2019__EPI_ISL_402128 spike protein mRNA gc (1-1273)(K986P_V987P_K986P_V987P_L18F_T20N_P26S_D138Y_R190S_K417T _E484K_N501Y_D614G_H655Y_T1027I)
aggagaaagcuuaccauguucguguuccugguccuccugccccuggugagcucccagugcgugaacuucaccaaccgcacccagcucccgagcgccuacacgaacuccuucacccggggcgucuacuaccccgacaagguguuccgcagcuccgugcugcacagcacccaggaccuguuccuccccuucuucuccaacgucaccugguuccacgccauccacgugagcgggacgaacggcaccaagcgguucgacaaccccgugcugccguucaacgacggggucuacuucgcguccaccgagaaguccaacaucauccgcggcuggaucuucgggaccacgcuggacuccaagacccagagccuccugaucgugaacaacgccaccaacguggucaucaaggugugcgaguuccaguucugcaacuaccccuuccugggcguguacuaccacaagaacaacaaguccuggauggagagcgaguuccgggucuacuccagcgccaacaacugcaccuucgaguacgugucccagcccuuccucauggaccuggagggcaagcaggggaacuucaagaaccugagcgaguucguguucaagaacaucgacggcuacuucaagaucuacuccaagcacacgcccaucaaccucguccgcgaccugccgcagggguucagcgcccuggagccccucguggaccugcccaucggcaucaacaucacccgguuccagacccugcucgcccugcaccgcagcuaccugacccccggggacuccagcuccggcuggacggcgggcgccgccgccuacuacgugggguaccuccagccgcggaccuuccugcugaaguacaacgagaacggcaccaucaccgacgcggucgacugcgcccucgacccccugagcgagacgaagugcacccugaaguccuucaccguggagaaggggaucuaccagaccagcaacuuccgcgugcagcccacggaguccaucguccgguuccccaacaucaccaaccucugcccguucggcgagguguucaacgccacccgcuucgccagcgucuacgccuggaaccggaagcgcaucuccaacugcguggcggacuacagcgugcuguacaacuccgccagcuucuccaccuucaagugcuacggcgucagccccacgaagcugaacgaccucugcuucaccaacguguacgccgacuccuucgugauccgcggggacgagguccggcagaucgcccccggccagaccgggaccaucgccgacuacaacuacaagcugcccgacgacuucacgggcugcgugaucgcguggaacagcaacaaccuggacuccaaggucgggggcaacuacaacuaccucuaccggcuguuccgcaagagcaaccugaagccguucgagcgggacaucuccaccgagaucuaccaggccggcagcacccccugcaacggggugaagggcuucaacugcuacuucccccuccagagcuacggguuccagcccaccuacggcgugggguaccagccguaccgcguggucgugcuguccuucgagcugcuccacgcccccgccacggugugcggccccaagaaguccaccaaccuggucaagaacaagugcgugaacuucaacuucaacggccugaccgggaccggcgugcucaccgagagcaacaagaaguuccugcccuuccagcaguucgggcgggacaucgccgacacgaccgacgcgguccgcgacccgcagacccuggagauccuggacaucacccccugcagcuucggcgggguguccgugaucacgcccggcaccaacaccagcaaccaggucgccgugcucuaccagggcgugaacugcaccgaggucccgguggccauccacgccgaccagcugacgcccaccuggcgcguguacuccaccgggagcaacgucuuccagacccgggccggcugccugaucggggcggaguacgugaacaacuccuacgagugcgacauccccaucggcgccggcaucugcgccagcuaccagacgcagaccaacagcccccgccgggcccgcagcguggcgucccagagcaucaucgccuacaccaugucccucggggccgagaacagcgucgccuacuccaacaacagcaucgccaucccgaccaacuucacgaucagcgugaccaccgagauccugcccguguccaugaccaagacgagcgucgacugcaccauguacaucugcggcgacuccaccgagugcagcaaccugcuccugcaguacggguccuucugcacccagcugaaccgggcgcucacgggcaucgccguggagcaggacaagaacacccaggagguguucgcccaggucaagcagaucuacaagaccccgcccaucaaggacuucgggggcuucaacuucagccagauccugcccgaccccuccaagcccagcaagcgcuccuucaucgaggaccuccuguucaacaaggugacccuggccgacgccggcuucaucaagcaguacggggacugccugggcgacaucgcggcccgggaccucaucugcgcccagaaguucaacgggcugacggugcugcccccgcuccugaccgacgagaugaucgcccaguacaccagcgcccugcucgcgggcaccaucacguccggguggaccuucggcgccggcgccgcccugcagauccccuucgcgaugcagauggccuaccgcuucaacgggaucggcgucacccagaacgugcuguacgagaaccagaagcucaucgccaaccaguucaacagcgccaucgggaagauccaggacucccugagcuccaccgccagcgcgcugggcaagcuccaggacguggucaaccagaacgcccaggcccugaacacgcuggugaagcagcucuccagcaacuucggggccaucuccagcgugcugaacgacauccugagccggcucgacccgcccgaggccgagguccagaucgaccgccugaucaccggccggcugcagucccuccagaccuacgugacccagcagcugauccgcgcggccgagauccgggccagcgccaaccuggccgcgaucaagauguccgagugcgugcucggccagagcaagcgcgucgacuucugcgggaagggcuaccaccugauguccuucccccagagcgcgccccacggggugguguuccugcacgucaccuacgugcccgcccaggagaagaacuucacgaccgcccccgccaucugccacgacggcaaggcccacuucccgcgggagggggucuucguguccaacggcacccacugguucgugacccagcgcaacuucuacgagccccagaucaucacgaccgacaacaccuucgucagcggcaacugcgacguggugaucgggaucgucaacaacaccguguacgacccccuccagcccgagcuggacuccuucaaggaggagcuggacaaguacuucaagaaccacacgagcccggacguggaccucggcgacaucuccgggaucaacgccagcgucgugaacauccagaaggagaucgaccggcugaacgagguggccaagaaccugaacgagucccucaucgaccugcaggagcugggcaaguacgagcaguacaucaaguggcccugguacaucuggcucggcuucaucgccgggcugaucgcgaucgucauggugaccaucaugcugugcugcaugaccagcugcugcuccugccucaagggcugcugcagcugcggguccugcugcaaguucgacgaggacgacagcgagcccgugcugaagggcgucaagcugcacuacaccugaggacuaguuauaagacugacuagcccgaugggccucccaacgggcccuccuccccuccuugcaccgagagaucuaaaaaaaaaaaaaaaaaaaaaaaaaaaaaaaaaaaaaaaaaaaaaaaaaaaaaaaaaaaaaaaaaaaaaaaaaaaaaaaaaaaaaaaaaaaaaaaaaaaa

SEQ ID NO: 25972 - RNA, 4011 nt, Artificial Sequence
  SARS-CoV-2/Wuhan/WIV05/2019__EPI_ISL_402128 spike protein mRNA gc (1-1273)(K986P_V987P_K986P_V987P_S13I_W152C_L452R_D614G)
aggagaaagcuuaccauguucguguuccugguccuccugccccuggugagcauccagugcgugaaccucaccacccgcacgcagcugccgcccgccuacaccaacuccuucacccggggcgucuacuaccccgacaagguguuccgcagcuccgugcugcacagcacccaggaccucuuccugcccuucuucuccaacgucacgugguuccacgccauccacgugagcgggaccaacggcaccaagcgguucgacaacccggugcugcccuucaacgacggggucuacuucgcguccaccgagaaguccaacaucauccgcggcuggaucuucgggacgacccucgacagcaagacccagagccugcugaucgugaacaacgccaccaacguggucaucaaggugugcgaguuccaguucugcaacgaccccuuccucggcguguacuaccacaagaacaacaaguccugcauggagagcgaguuccgggucuacuccagcgccaacaacugcacguucgaguacgugucccagcccuuccugauggaccuggagggcaagcaggggaacuucaagaaccuccgcgaguucguguucaagaacaucgacggcuacuucaagaucuacagcaagcacaccccgaucaaccugguccgggaccugccccagggguucuccgcccucgagccccugguggaccugcccaucggcaucaacaucacccgcuuccagacccuccuggcccugcaccggagcuaccucacgccgggggacuccagcagcggcuggaccgcgggcgccgccgccuacuacgugggguaccugcagccccgcaccuuccugcucaaguacaacgagaacggcaccaucacggacgcggucgacugcgcccuggacccccuguccgagaccaagugcacccucaagagcuucaccguggagaaggggaucuaccagacguccaacuuccgggugcagcccaccgagagcaucguccgcuucccgaacaucaccaaccugugccccuucggcgagguguucaacgccacccgguucgccuccgucuacgccuggaaccgcaagcggaucagcaacugcguggcggacuacuccgugcuguacaacagcgccuccuucagcacguucaagugcuacggcgucucccccaccaagcucaacgaccugugcuucaccaacguguacgccgacagcuucgugauccgcggggacgagguccggcagaucgcccccggccagaccgggaagaucgccgacuacaacuacaagcugccggacgacuucacgggcugcgugaucgcguggaacuccaacaaccucgacagcaaggucgggggcaacuacaacuaccgcuaccggcuguuccgcaaguccaaccugaagcccuucgagcgggacaucagcaccgagaucuaccaggccggcuccacccccugcaacgggguggagggcuucaacugcuacuucccccuccagagcuacggguuccagccgaccaacggcgugggguaccagcccuaccgcguggucgugcuguccuucgagcugcuccacgcccccgccacggugugcggccccaagaaguccaccaaccuggucaagaacaagugcgugaacuucaacuucaacggccugaccgggaccggcgugcucaccgagagcaacaagaaguuccugccguuccagcaguucgggcgcgacaucgccgacacgaccgacgcgguccgggacccccagacccuggagauccuggacaucacccccugcagcuucggcggggugagcgugaucacgccgggcaccaacaccuccaaccaggucgccgugcucuaccagggcgugaacugcaccgagguccccguggccauccacgccgaccagcugacgcccaccuggcgcguguacagcaccggguccaacgucuuccagacccgggccggcugccugaucggggcggagcacgugaacaacagcuacgagugcgacauccccaucggcgccggcaucugcgccuccuaccagacgcagaccaacagcccgcgccgggcccgcuccguggcgagccaguccaucaucgccuacaccaugagccucggggccgagaacuccgucgccuacagcaacaacuccaucgccauccccaccaacuucacgaucagcgugaccaccgagauccugcccguguccaugaccaagacgagcgucgacugcaccauguacaucugcggcgacagcaccgagugcuccaaccugcuccugcaguacgggagcuucugcacccagcugaaccgggcgcucacgggcaucgccguggagcaggacaagaacacccaggagguguucgcccaggucaagcagaucuacaagacgcccccgaucaaggacuucgggggcuucaacuucucccagauccugcccgaccccagcaagcccuccaagcgcagcuucaucgaggaccuccuguucaacaaggugacccuggccgacgccggcuucaucaagcaguacggggacugccugggcgacaucgcggcccgggaccucaucugcgcccagaaguucaacgggcugaccgugcugccgccccuccugaccgacgagaugaucgcccaguacaccuccgcccugcucgcgggcaccaucacgagcggguggaccuucggcgccggcgccgcccugcagauccccuucgcgaugcagauggccuaccgcuucaacgggaucggcgucacccagaacgugcuguacgagaaccagaagcucaucgccaaccaguucaacuccgccaucgggaagauccaggacagccuguccagcaccgccuccgcgcugggcaagcuccaggacguggucaaccagaacgcccaggcccugaacacgcuggugaagcagcucagcuccaacuucggggccaucagcuccgugcugaacgacauccugagccggcucgacccgcccgaggccgagguccagaucgaccgccugaucaccggccggcugcagucccuccagaccuacgugacccagcagcugauccgcgcggccgagauccgggccagcgccaaccuggccgcgaccaagaugagcgagugcgugcucggccaguccaagcgcgucgacuucugcgggaagggcuaccaccugaugagcuucccccaguccgcgccccacggggugguguuccugcacgucacguacgugcccgcccaggagaagaacuucaccaccgccccggccaucugccacgacggcaaggcccacuucccccgggagggggucuucgugagcaacggcacccacugguucgugacgcagcgcaacuucuacgagccccagaucaucaccaccgacaacaccuucgucuccggcaacugcgacguggugaucgggaucgucaacaacacgguguacgacccccuccagccggagcuggacagcuucaaggaggagcuggacaaguacuucaagaaccacaccucccccgacguggaccucggcgacaucagcgggaucaacgccuccgucgugaacauccagaaggagaucgaccggcugaacgagguggccaagaaccugaacgagagccucaucgaccugcaggagcugggcaaguacgagcaguacaucaaguggcccugguacaucuggcucggcuucaucgccgggcugaucgcgaucgucauggugaccaucaugcugugcugcaugaccuccugcugcagcugccucaagggcugcugcuccugcgggagcugcugcaaguucgacgaggacgacuccgagccggugcugaagggcgucaagcugcacuacacgugaggacuaguuauaagacugacuagcccgaugggccucccaacgggcccuccuccccuccuugcaccgagagaucuaaaaaaaaaaaaaaaaaaaaaaaaaaaaaaaaaaaaaaaaaaaaaaaaaaaaaaaaaaaaaaaaaaaaaaaaaaaaaaaaaaaaaaaaaaaaaaaaaaaa

SEQ ID NO: 25973 - RNA, 4011 nt, Artificial Sequence
  SARS-CoV-2/Wuhan/WIV05/2019__EPI_ISL_402128 spike protein mRNA gc (1-1273)(K986P_V987P)
aggagaaagcuuaccauguucguguuccuggugcugcugccccuggugagcagccagugcgugaaccugaccacccggacccagcugccaccagccuacaccaacagcuucacccggggcgucuacuaccccgacaagguguuccggagcagcguccugcacagcacccaggaccuguuccugcccuucuucagcaacgugaccugguuccacgccauccacgugagcggcaccaacggcaccaagcgguucgacaaccccgugcugcccuucaacgacggcguguacuucgccagcaccgagaagagcaacaucauccggggcuggaucuucggcaccacccuggacagcaagacccagagccugcugaucgugaauaacgccaccaacguggugaucaaggugugcgaguuccaguucugcaacgaccccuuccugggcguguacuaccacaagaacaacaagagcuggauggagagcgaguuccggguguacagcagcgccaacaacugcaccuucgaguacgugagccagcccuuccugauggaccuggagggcaagcagggcaacuucaagaaccugcgggaguucguguucaagaacaucgacggcuacuucaagaucuacagcaagcacaccccaaucaaccuggugcgggaucugccccagggcuucucagcccuggagccccugguggaccugcccaucggcaucaacaucacccgguuccagacccugcuggcccugcaccggagcuaccugaccccaggcgacagcagcagcggguggacagcaggcgcggcugcuuacuacgugggcuaccugcagccccggaccuuccugcugaaguacaacgagaacggcaccaucaccgacgccguggacugcgcccuggacccucugagcgagaccaagugcacccugaagagcuucaccguggagaagggcaucuaccagaccagcaacuuccgggugcagcccaccgagagcaucgugcgguuccccaacaucaccaaccugugccccuucggcgagguguucaacgccacccgguucgccagcguguacgccuggaaccggaagcggaucagcaacugcguggccgacuacagcgugcuguacaacagcgccagcuucagcaccuucaagugcuacggcgugagccccaccaagcugaacgaccugugcuucaccaacguguacgccgacagcuucgugauccguggcgacgaggugcggcagaucgcacccggccagacaggcaagaucgccgacuacaacuacaagcugcccgacgacuucaccggcugcgugaucgccuggaacagcaacaaccucgacagcaaggugggcggcaacuacaacuaccuguaccggcuguuccggaagagcaaccugaagcccuucgagcgggacaucagcaccgagaucuaccaagccggcuccaccccuugcaacggcguggagggcuucaacugcuacuucccucugcagagcuacggcuuccagcccaccaacggcgugggcuaccagcccuaccgggugguggugcugagcuucgagcugcugcacgccccagccaccguguguggccccaagaagagcaccaaccuggugaagaacaagugcgugaacuucaacuucaacggccuuaccggcaccggcgugcugaccgagagcaacaagaaauuccugcccuuucagcaguucggccgggacaucgccgacaccaccgacgcugugcgggauccccagacccuggagauccuggacaucaccccuugcagcuucggcggcgugagcgugaucaccccaggcaccaacaccagcaaccagguggccgugcuguaccaggacgugaacugcaccgaggugcccguggccauccacgccgaccagcugacacccaccuggcgggucuacagcaccggcagcaacguguuccagacccgggccgguugccugaucggcgccgagcacgugaacaacagcuacgagugcgacauccccaucggcgccggcaucugugccagcuaccagacccagaccaauucaccccggagggcaaggagcguggccagccagagcaucaucgccuacaccaugagccugggcgccgagaacagcguggccuacagcaacaacagcaucgccauccccaccaacuucaccaucagcgugaccaccgagauucugcccgugagcaugaccaagaccagcguggacugcaccauguacaucugcggcgacagcaccgagugcagcaaccugcugcugcaguacggcagcuucugcacccagcugaaccgggcccugaccggcaucgccguggagcaggacaagaacacccaggagguguucgcccaggugaagcagaucuacaagaccccucccaucaaggacuucggcggcuucaacuucagccagauccugcccgaccccagcaagcccagcaagcggagcuucaucgaggaccugcuguucaacaaggugacccuagccgacgccggcuucaucaagcaguacggcgacugccucggcgacauagccgcccgggaccugaucugcgcccagaaguucaacggccugaccgugcugccuccccugcugaccgacgagaugaucgcccaguacaccagcgcccuguuagccggaaccaucaccagcggcuggacuuucggcgcuggagccgcucugcagauccccuucgccaugcagauggccuaccgguucaacggcaucggcgugacccagaacgugcuguacgagaaccagaagcugaucgccaaccaguucaacagcgccaucggcaagauccaggacagccugagcagcaccgcuagcgcccugggcaagcugcaggacguggugaaccagaacgcccaggcccugaacacccuggugaagcagcugagcagcaacuucggcgccaucagcagcgugcugaacgacauccugagccggcuggacccucccgaggccgaggugcagaucgaccggcugaucacuggccggcugcagagccugcagaccuacgugacccagcagcugauccgggccgccgagauucgggccagcgccaaccuggccgccaccaagaugagcgagugcgugcugggccagagcaagcggguggacuucugcggcaagggcuaccaccugaugagcuuuccccagagcgcaccccacggagugguguuccugcacgugaccuacgugcccgcccaggagaagaacuucaccaccgccccagccaucugccacgacggcaaggcccacuuuccccgggagggcguguucgugagcaacggcacccacugguucgugacccagcggaacuucuacgagccccagaucaucaccaccgacaacaccuucgugagcggcaacugcgacguggugaucggcaucgugaacaacaccguguacgauccccugcagcccgagcuggacagcuucaaggaggagcuggacaaguacuucaagaaucacaccagccccgacguggaccugggcgacaucagcggcaucaacgccagcguggugaacauccagaaggagaucgaucggcugaacgagguggccaagaaccugaacgagagccugaucgaccugcaggagcugggcaaguacgagcaguacaucaaguggcccugguacaucuggcugggcuucaucgccggccugaucgccaucgugauggugaccaucaugcugugcugcaugaccagcugcugcagcugccugaagggcuguugcagcugcggcagcugcugcaaguucgacgaggacgacagcgagcccgugcugaagggcgugaagcugcacuacaccugaggacuaguuauaagacugacuagcccgaugggccucccaacgggcccuccuccccuccuugcaccgagagaucuaaaaaaaaaaaaaaaaaaaaaaaaaaaaaaaaaaaaaaaaaaaaaaaaaaaaaaaaaaaaaaaaaaaaaaaaaaaaaaaaaaaaaaaaaaaaaaaaaaaa

SEQ ID NO: 25974 - RNA, 4011 nt, Artificial Sequence
  SARS-CoV-2/Wuhan/WIV05/2019__EPI_ISL_402128 spike protein mRNA gc (1-1273)(K986P_V987P_ D614G)
aggagaaagcuuaccauguucguguuccuggugcugcugccccuggugagcagccagugcgugaaccugaccacccggacccagcugccaccagccuacaccaacagcuucacccggggcgucuacuaccccgacaagguguuccggagcagcguccugcacagcacccaggaccuguuccugcccuucuucagcaacgugaccugguuccacgccauccacgugagcggcaccaacggcaccaagcgguucgacaaccccgugcugcccuucaacgacggcguguacuucgccagcaccgagaagagcaacaucauccggggcuggaucuucggcaccacccuggacagcaagacccagagccugcugaucgugaauaacgccaccaacguggugaucaaggugugcgaguuccaguucugcaacgaccccuuccugggcguguacuaccacaagaacaacaagagcuggauggagagcgaguuccggguguacagcagcgccaacaacugcaccuucgaguacgugagccagcccuuccugauggaccuggagggcaagcagggcaacuucaagaaccugcgggaguucguguucaagaacaucgacggcuacuucaagaucuacagcaagcacaccccaaucaaccuggugcgggaucugccccagggcuucucagcccuggagccccugguggaccugcccaucggcaucaacaucacccgguuccagacccugcuggcccugcaccggagcuaccugaccccaggcgacagcagcagcggguggacagcaggcgcggcugcuuacuacgugggcuaccugcagccccggaccuuccugcugaaguacaacgagaacggcaccaucaccgacgccguggacugcgcccuggacccucugagcgagaccaagugcacccugaagagcuucaccguggagaagggcaucuaccagaccagcaacuuccgggugcagcccaccgagagcaucgugcgguuccccaacaucaccaaccugugccccuucggcgagguguucaacgccacccgguucgccagcguguacgccuggaaccggaagcggaucagcaacugcguggccgacuacagcgugcuguacaacagcgccagcuucagcaccuucaagugcuacggcgugagccccaccaagcugaacgaccugugcuucaccaacguguacgccgacagcuucgugauccguggcgacgaggugcggcagaucgcacccggccagacaggcaagaucgccgacuacaacuacaagcugcccgacgacuucaccggcugcgugaucgccuggaacagcaacaaccucgacagcaaggugggcggcaacuacaacuaccuguaccggcuguuccggaagagcaaccugaagcccuucgagcgggacaucagcaccgagaucuaccaagccggcuccaccccuugcaacggcguggagggcuucaacugcuacuucccucugcagagcuacggcuuccagcccaccaacggcgugggcuaccagcccuaccgggugguggugcugagcuucgagcugcugcacgccccagccaccguguguggccccaagaagagcaccaaccuggugaagaacaagugcgugaacuucaacuucaacggccuuaccggcaccggcgugcugaccgagagcaacaagaaauuccugcccuuucagcaguucggccgggacaucgccgacaccaccgacgcugugcgggauccccagacccuggagauccuggacaucaccccuugcagcuucggcggcgugagcgugaucaccccaggcaccaacaccagcaaccagguggccgugcuguaccagggcgugaacugcaccgaggugcccguggccauccacgccgaccagcugacacccaccuggcgggucuacagcaccggcagcaacguguuccagacccgggccgguugccugaucggcgccgagcacgugaacaacagcuacgagugcgacauccccaucggcgccggcaucugugccagcuaccagacccagaccaauucaccccggagggcaaggagcguggccagccagagcaucaucgccuacaccaugagccugggcgccgagaacagcguggccuacagcaacaacagcaucgccauccccaccaacuucaccaucagcgugaccaccgagauucugcccgugagcaugaccaagaccagcguggacugcaccauguacaucugcggcgacagcaccgagugcagcaaccugcugcugcaguacggcagcuucugcacccagcugaaccgggcccugaccggcaucgccguggagcaggacaagaacacccaggagguguucgcccaggugaagcagaucuacaagaccccucccaucaaggacuucggcggcuucaacuucagccagauccugcccgaccccagcaagcccagcaagcggagcuucaucgaggaccugcuguucaacaaggugacccuagccgacgccggcuucaucaagcaguacggcgacugccucggcgacauagccgcccgggaccugaucugcgcccagaaguucaacggccugaccgugcugccuccccugcugaccgacgagaugaucgcccaguacaccagcgcccuguuagccggaaccaucaccagcggcuggacuuucggcgcuggagccgcucugcagauccccuucgccaugcagauggccuaccgguucaacggcaucggcgugacccagaacgugcuguacgagaaccagaagcugaucgccaaccaguucaacagcgccaucggcaagauccaggacagccugagcagcaccgcuagcgcccugggcaagcugcaggacguggugaaccagaacgcccaggcccugaacacccuggugaagcagcugagcagcaacuucggcgccaucagcagcgugcugaacgacauccugagccggcuggacccucccgaggccgaggugcagaucgaccggcugaucacuggccggcugcagagccugcagaccuacgugacccagcagcugauccgggccgccgagauucgggccagcgccaaccuggccgccaccaagaugagcgagugcgugcugggccagagcaagcggguggacuucugcggcaagggcuaccaccugaugagcuuuccccagagcgcaccccacggagugguguuccugcacgugaccuacgugcccgcccaggagaagaacuucaccaccgccccagccaucugccacgacggcaaggcccacuuuccccgggagggcguguucgugagcaacggcacccacugguucgugacccagcggaacuucuacgagccccagaucaucaccaccgacaacaccuucgugagcggcaacugcgacguggugaucggcaucgugaacaacaccguguacgauccccugcagcccgagcuggacagcuucaaggaggagcuggacaaguacuucaagaaucacaccagccccgacguggaccugggcgacaucagcggcaucaacgccagcguggugaacauccagaaggagaucgaucggcugaacgagguggccaagaaccugaacgagagccugaucgaccugcaggagcugggcaaguacgagcaguacaucaaguggcccugguacaucuggcugggcuucaucgccggccugaucgccaucgugauggugaccaucaugcugugcugcaugaccagcugcugcagcugccugaagggcuguugcagcugcggcagcugcugcaaguucgacgaggacgacagcgagcccgugcugaagggcgugaagcugcacuacaccugaggacuaguuauaagacugacuagcccgaugggccucccaacgggcccuccuccccuccuugcaccgagagaucuaaaaaaaaaaaaaaaaaaaaaaaaaaaaaaaaaaaaaaaaaaaaaaaaaaaaaaaaaaaaaaaaaaaaaaaaaaaaaaaaaaaaaaaaaaaaaaaaaaaa

SEQ ID NO: 25975 - RNA, 4011 nt, Artificial Sequence
  SARS-CoV-2/Wuhan/WIV05/2019__EPI_ISL_402128 spike protein mRNA gc (1-1273)(K986P_V987P_A222V_D614G)
aggagaaagcuuaccauguucguguuccuggugcugcugccccuggugagcagccagugcgugaaccugaccacccggacccagcugccaccagccuacaccaacagcuucacccggggcgucuacuaccccgacaagguguuccggagcagcguccugcacagcacccaggaccuguuccugcccuucuucagcaacgugaccugguuccacgccauccacgugagcggcaccaacggcaccaagcgguucgacaaccccgugcugcccuucaacgacggcguguacuucgccagcaccgagaagagcaacaucauccggggcuggaucuucggcaccacccuggacagcaagacccagagccugcugaucgugaauaacgccaccaacguggugaucaaggugugcgaguuccaguucugcaacgaccccuuccugggcguguacuaccacaagaacaacaagagcuggauggagagcgaguuccggguguacagcagcgccaacaacugcaccuucgaguacgugagccagcccuuccugauggaccuggagggcaagcagggcaacuucaagaaccugcgggaguucguguucaagaacaucgacggcuacuucaagaucuacagcaagcacaccccaaucaaccuggugcgggaucugccccagggcuucucagugcuggagccccugguggaccugcccaucggcaucaacaucacccgguuccagacccugcuggcccugcaccggagcuaccugaccccaggcgacagcagcagcggguggacagcaggcgcggcugcuuacuacgugggcuaccugcagccccggaccuuccugcugaaguacaacgagaacggcaccaucaccgacgccguggacugcgcccuggacccucugagcgagaccaagugcacccugaagagcuucaccguggagaagggcaucuaccagaccagcaacuuccgggugcagcccaccgagagcaucgugcgguuccccaacaucaccaaccugugccccuucggcgagguguucaacgccacccgguucgccagcguguacgccuggaaccggaagcggaucagcaacugcguggccgacuacagcgugcuguacaacagcgccagcuucagcaccuucaagugcuacggcgugagccccaccaagcugaacgaccugugcuucaccaacguguacgccgacagcuucgugauccguggcgacgaggugcggcagaucgcacccggccagacaggcaagaucgccgacuacaacuacaagcugcccgacgacuucaccggcugcgugaucgccuggaacagcaacaaccucgacagcaaggugggcggcaacuacaacuaccuguaccggcuguuccggaagagcaaccugaagcccuucgagcgggacaucagcaccgagaucuaccaagccggcuccaccccuugcaacggcguggagggcuucaacugcuacuucccucugcagagcuacggcuuccagcccaccaacggcgugggcuaccagcccuaccgggugguggugcugagcuucgagcugcugcacgccccagccaccguguguggccccaagaagagcaccaaccuggugaagaacaagugcgugaacuucaacuucaacggccuuaccggcaccggcgugcugaccgagagcaacaagaaauuccugcccuuucagcaguucggccgggacaucgccgacaccaccgacgcugugcgggauccccagacccuggagauccuggacaucaccccuugcagcuucggcggcgugagcgugaucaccccaggcaccaacaccagcaaccagguggccgugcuguaccagggcgugaacugcaccgaggugcccguggccauccacgccgaccagcugacacccaccuggcgggucuacagcaccggcagcaacguguuccagacccgggccgguugccugaucggcgccgagcacgugaacaacagcuacgagugcgacauccccaucggcgccggcaucugugccagcuaccagacccagaccaauucaccccggagggcaaggagcguggccagccagagcaucaucgccuacaccaugagccugggcgccgagaacagcguggccuacagcaacaacagcaucgccauccccaccaacuucaccaucagcgugaccaccgagauucugcccgugagcaugaccaagaccagcguggacugcaccauguacaucugcggcgacagcaccgagugcagcaaccugcugcugcaguacggcagcuucugcacccagcugaaccgggcccugaccggcaucgccguggagcaggacaagaacacccaggagguguucgcccaggugaagcagaucuacaagaccccucccaucaaggacuucggcggcuucaacuucagccagauccugcccgaccccagcaagcccagcaagcggagcuucaucgaggaccugcuguucaacaaggugacccuagccgacgccggcuucaucaagcaguacggcgacugccucggcgacauagccgcccgggaccugaucugcgcccagaaguucaacggccugaccgugcugccuccccugcugaccgacgagaugaucgcccaguacaccagcgcccuguuagccggaaccaucaccagcggcuggacuuucggcgcuggagccgcucugcagauccccuucgccaugcagauggccuaccgguucaacggcaucggcgugacccagaacgugcuguacgagaaccagaagcugaucgccaaccaguucaacagcgccaucggcaagauccaggacagccugagcagcaccgcuagcgcccugggcaagcugcaggacguggugaaccagaacgcccaggcccugaacacccuggugaagcagcugagcagcaacuucggcgccaucagcagcgugcugaacgacauccugagccggcuggacccucccgaggccgaggugcagaucgaccggcugaucacuggccggcugcagagccugcagaccuacgugacccagcagcugauccgggccgccgagauucgggccagcgccaaccuggccgccaccaagaugagcgagugcgugcugggccagagcaagcggguggacuucugcggcaagggcuaccaccugaugagcuuuccccagagcgcaccccacggagugguguuccugcacgugaccuacgugcccgcccaggagaagaacuucaccaccgccccagccaucugccacgacggcaaggcccacuuuccccgggagggcguguucgugagcaacggcacccacugguucgugacccagcggaacuucuacgagccccagaucaucaccaccgacaacaccuucgugagcggcaacugcgacguggugaucggcaucgugaacaacaccguguacgauccccugcagcccgagcuggacagcuucaaggaggagcuggacaaguacuucaagaaucacaccagccccgacguggaccugggcgacaucagcggcaucaacgccagcguggugaacauccagaaggagaucgaucggcugaacgagguggccaagaaccugaacgagagccugaucgaccugcaggagcugggcaaguacgagcaguacaucaaguggcccugguacaucuggcugggcuucaucgccggccugaucgccaucgugauggugaccaucaugcugugcugcaugaccagcugcugcagcugccugaagggcuguugcagcugcggcagcugcugcaaguucgacgaggacgacagcgagcccgugcugaagggcgugaagcugcacuacaccugaggacuaguuauaagacugacuagcccgaugggccucccaacgggcccuccuccccuccuugcaccgagagaucuaaaaaaaaaaaaaaaaaaaaaaaaaaaaaaaaaaaaaaaaaaaaaaaaaaaaaaaaaaaaaaaaaaaaaaaaaaaaaaaaaaaaaaaaaaaaaaaaaaaa

SEQ ID NO: 25976 - RNA, 4011 nt, Artificial Sequence
  SARS-CoV-2/Wuhan/WIV05/2019__EPI_ISL_402128 spike protein mRNA gc (1-1273)(K986P_V987P_N439K_D614G)
aggagaaagcuuaccauguucguguuccuggugcugcugccccuggugagcagccagugcgugaaccugaccacccggacccagcugccaccagccuacaccaacagcuucacccggggcgucuacuaccccgacaagguguuccggagcagcguccugcacagcacccaggaccuguuccugcccuucuucagcaacgugaccugguuccacgccauccacgugagcggcaccaacggcaccaagcgguucgacaaccccgugcugcccuucaacgacggcguguacuucgccagcaccgagaagagcaacaucauccggggcuggaucuucggcaccacccuggacagcaagacccagagccugcugaucgugaauaacgccaccaacguggugaucaaggugugcgaguuccaguucugcaacgaccccuuccugggcguguacuaccacaagaacaacaagagcuggauggagagcgaguuccggguguacagcagcgccaacaacugcaccuucgaguacgugagccagcccuuccugauggaccuggagggcaagcagggcaacuucaagaaccugcgggaguucguguucaagaacaucgacggcuacuucaagaucuacagcaagcacaccccaaucaaccuggugcgggaucugccccagggcuucucagcccuggagccccugguggaccugcccaucggcaucaacaucacccgguuccagacccugcuggcccugcaccggagcuaccugaccccaggcgacagcagcagcggguggacagcaggcgcggcugcuuacuacgugggcuaccugcagccccggaccuuccugcugaaguacaacgagaacggcaccaucaccgacgccguggacugcgcccuggacccucugagcgagaccaagugcacccugaagagcuucaccguggagaagggcaucuaccagaccagcaacuuccgggugcagcccaccgagagcaucgugcgguuccccaacaucaccaaccugugccccuucggcgagguguucaacgccacccgguucgccagcguguacgccuggaaccggaagcggaucagcaacugcguggccgacuacagcgugcuguacaacagcgccagcuucagcaccuucaagugcuacggcgugagccccaccaagcugaacgaccugugcuucaccaacguguacgccgacagcuucgugauccguggcgacgaggugcggcagaucgcacccggccagacaggcaagaucgccgacuacaacuacaagcugcccgacgacuucaccggcugcgugaucgccuggaacagcaagaaccucgacagcaaggugggcggcaacuacaacuaccuguaccggcuguuccggaagagcaaccugaagcccuucgagcgggacaucagcaccgagaucuaccaagccggcuccaccccuugcaacggcguggagggcuucaacugcuacuucccucugcagagcuacggcuuccagcccaccaacggcgugggcuaccagcccuaccgggugguggugcugagcuucgagcugcugcacgccccagccaccguguguggccccaagaagagcaccaaccuggugaagaacaagugcgugaacuucaacuucaacggccuuaccggcaccggcgugcugaccgagagcaacaagaaauuccugcccuuucagcaguucggccgggacaucgccgacaccaccgacgcugugcgggauccccagacccuggagauccuggacaucaccccuugcagcuucggcggcgugagcgugaucaccccaggcaccaacaccagcaaccagguggccgugcuguaccagggcgugaacugcaccgaggugcccguggccauccacgccgaccagcugacacccaccuggcgggucuacagcaccggcagcaacguguuccagacccgggccgguugccugaucggcgccgagcacgugaacaacagcuacgagugcgacauccccaucggcgccggcaucugugccagcuaccagacccagaccaauucaccccggagggcaaggagcguggccagccagagcaucaucgccuacaccaugagccugggcgccgagaacagcguggccuacagcaacaacagcaucgccauccccaccaacuucaccaucagcgugaccaccgagauucugcccgugagcaugaccaagaccagcguggacugcaccauguacaucugcggcgacagcaccgagugcagcaaccugcugcugcaguacggcagcuucugcacccagcugaaccgggcccugaccggcaucgccguggagcaggacaagaacacccaggagguguucgcccaggugaagcagaucuacaagaccccucccaucaaggacuucggcggcuucaacuucagccagauccugcccgaccccagcaagcccagcaagcggagcuucaucgaggaccugcuguucaacaaggugacccuagccgacgccggcuucaucaagcaguacggcgacugccucggcgacauagccgcccgggaccugaucugcgcccagaaguucaacggccugaccgugcugccuccccugcugaccgacgagaugaucgcccaguacaccagcgcccuguuagccggaaccaucaccagcggcuggacuuucggcgcuggagccgcucugcagauccccuucgccaugcagauggccuaccgguucaacggcaucggcgugacccagaacgugcuguacgagaaccagaagcugaucgccaaccaguucaacagcgccaucggcaagauccaggacagccugagcagcaccgcuagcgcccugggcaagcugcaggacguggugaaccagaacgcccaggcccugaacacccuggugaagcagcugagcagcaacuucggcgccaucagcagcgugcugaacgacauccugagccggcuggacccucccgaggccgaggugcagaucgaccggcugaucacuggccggcugcagagccugcagaccuacgugacccagcagcugauccgggccgccgagauucgggccagcgccaaccuggccgccaccaagaugagcgagugcgugcugggccagagcaagcggguggacuucugcggcaagggcuaccaccugaugagcuuuccccagagcgcaccccacggagugguguuccugcacgugaccuacgugcccgcccaggagaagaacuucaccaccgccccagccaucugccacgacggcaaggcccacuuuccccgggagggcguguucgugagcaacggcacccacugguucgugacccagcggaacuucuacgagccccagaucaucaccaccgacaacaccuucgugagcggcaacugcgacguggugaucggcaucgugaacaacaccguguacgauccccugcagcccgagcuggacagcuucaaggaggagcuggacaaguacuucaagaaucacaccagccccgacguggaccugggcgacaucagcggcaucaacgccagcguggugaacauccagaaggagaucgaucggcugaacgagguggccaagaaccugaacgagagccugaucgaccugcaggagcugggcaaguacgagcaguacaucaaguggcccugguacaucuggcugggcuucaucgccggccugaucgccaucgugauggugaccaucaugcugugcugcaugaccagcugcugcagcugccugaagggcuguugcagcugcggcagcugcugcaaguucgacgaggacgacagcgagcccgugcugaagggcgugaagcugcacuacaccugaggacuaguuauaagacugacuagcccgaugggccucccaacgggcccuccuccccuccuugcaccgagagaucuaaaaaaaaaaaaaaaaaaaaaaaaaaaaaaaaaaaaaaaaaaaaaaaaaaaaaaaaaaaaaaaaaaaaaaaaaaaaaaaaaaaaaaaaaaaaaaaaaaaa

SEQ ID NO: 25977 - RNA, 4011 nt, Artificial Sequence
  SARS-CoV-2/Wuhan/WIV05/2019__EPI_ISL_402128 spike protein mRNA gc (1-1273)(K986P_V987P_S477N_D614G)
aggagaaagcuuaccauguucguguuccuggugcugcugccccuggugagcagccagugcgugaaccugaccacccggacccagcugccaccagccuacaccaacagcuucacccggggcgucuacuaccccgacaagguguuccggagcagcguccugcacagcacccaggaccuguuccugcccuucuucagcaacgugaccugguuccacgccauccacgugagcggcaccaacggcaccaagcgguucgacaaccccgugcugcccuucaacgacggcguguacuucgccagcaccgagaagagcaacaucauccggggcuggaucuucggcaccacccuggacagcaagacccagagccugcugaucgugaauaacgccaccaacguggugaucaaggugugcgaguuccaguucugcaacgaccccuuccugggcguguacuaccacaagaacaacaagagcuggauggagagcgaguuccggguguacagcagcgccaacaacugcaccuucgaguacgugagccagcccuuccugauggaccuggagggcaagcagggcaacuucaagaaccugcgggaguucguguucaagaacaucgacggcuacuucaagaucuacagcaagcacaccccaaucaaccuggugcgggaucugccccagggcuucucagcccuggagccccugguggaccugcccaucggcaucaacaucacccgguuccagacccugcuggcccugcaccggagcuaccugaccccaggcgacagcagcagcggguggacagcaggcgcggcugcuuacuacgugggcuaccugcagccccggaccuuccugcugaaguacaacgagaacggcaccaucaccgacgccguggacugcgcccuggacccucugagcgagaccaagugcacccugaagagcuucaccguggagaagggcaucuaccagaccagcaacuuccgggugcagcccaccgagagcaucgugcgguuccccaacaucaccaaccugugccccuucggcgagguguucaacgccacccgguucgccagcguguacgccuggaaccggaagcggaucagcaacugcguggccgacuacagcgugcuguacaacagcgccagcuucagcaccuucaagugcuacggcgugagccccaccaagcugaacgaccugugcuucaccaacguguacgccgacagcuucgugauccguggcgacgaggugcggcagaucgcacccggccagacaggcaagaucgccgacuacaacuacaagcugcccgacgacuucaccggcugcgugaucgccuggaacagcaacaaccucgacagcaaggugggcggcaacuacaacuaccuguaccggcuguuccggaagagcaaccugaagcccuucgagcgggacaucagcaccgagaucuaccaagccggcaacaccccuugcaacggcguggagggcuucaacugcuacuucccucugcagagcuacggcuuccagcccaccaacggcgugggcuaccagcccuaccgggugguggugcugagcuucgagcugcugcacgccccagccaccguguguggccccaagaagagcaccaaccuggugaagaacaagugcgugaacuucaacuucaacggccuuaccggcaccggcgugcugaccgagagcaacaagaaauuccugcccuuucagcaguucggccgggacaucgccgacaccaccgacgcugugcgggauccccagacccuggagauccuggacaucaccccuugcagcuucggcggcgugagcgugaucaccccaggcaccaacaccagcaaccagguggccgugcuguaccagggcgugaacugcaccgaggugcccguggccauccacgccgaccagcugacacccaccuggcgggucuacagcaccggcagcaacguguuccagacccgggccgguugccugaucggcgccgagcacgugaacaacagcuacgagugcgacauccccaucggcgccggcaucugugccagcuaccagacccagaccaauucaccccggagggcaaggagcguggccagccagagcaucaucgccuacaccaugagccugggcgccgagaacagcguggccuacagcaacaacagcaucgccauccccaccaacuucaccaucagcgugaccaccgagauucugcccgugagcaugaccaagaccagcguggacugcaccauguacaucugcggcgacagcaccgagugcagcaaccugcugcugcaguacggcagcuucugcacccagcugaaccgggcccugaccggcaucgccguggagcaggacaagaacacccaggagguguucgcccaggugaagcagaucuacaagaccccucccaucaaggacuucggcggcuucaacuucagccagauccugcccgaccccagcaagcccagcaagcggagcuucaucgaggaccugcuguucaacaaggugacccuagccgacgccggcuucaucaagcaguacggcgacugccucggcgacauagccgcccgggaccugaucugcgcccagaaguucaacggccugaccgugcugccuccccugcugaccgacgagaugaucgcccaguacaccagcgcccuguuagccggaaccaucaccagcggcuggacuuucggcgcuggagccgcucugcagauccccuucgccaugcagauggccuaccgguucaacggcaucggcgugacccagaacgugcuguacgagaaccagaagcugaucgccaaccaguucaacagcgccaucggcaagauccaggacagccugagcagcaccgcuagcgcccugggcaagcugcaggacguggugaaccagaacgcccaggcccugaacacccuggugaagcagcugagcagcaacuucggcgccaucagcagcgugcugaacgacauccugagccggcuggacccucccgaggccgaggugcagaucgaccggcugaucacuggccggcugcagagccugcagaccuacgugacccagcagcugauccgggccgccgagauucgggccagcgccaaccuggccgccaccaagaugagcgagugcgugcugggccagagcaagcggguggacuucugcggcaagggcuaccaccugaugagcuuuccccagagcgcaccccacggagugguguuccugcacgugaccuacgugcccgcccaggagaagaacuucaccaccgccccagccaucugccacgacggcaaggcccacuuuccccgggagggcguguucgugagcaacggcacccacugguucgugacccagcggaacuucuacgagccccagaucaucaccaccgacaacaccuucgugagcggcaacugcgacguggugaucggcaucgugaacaacaccguguacgauccccugcagcccgagcuggacagcuucaaggaggagcuggacaaguacuucaagaaucacaccagccccgacguggaccugggcgacaucagcggcaucaacgccagcguggugaacauccagaaggagaucgaucggcugaacgagguggccaagaaccugaacgagagccugaucgaccugcaggagcugggcaaguacgagcaguacaucaaguggcccugguacaucuggcugggcuucaucgccggccugaucgccaucgugauggugaccaucaugcugugcugcaugaccagcugcugcagcugccugaagggcuguugcagcugcggcagcugcugcaaguucgacgaggacgacagcgagcccgugcugaagggcgugaagcugcacuacaccugaggacuaguuauaagacugacuagcccgaugggccucccaacgggcccuccuccccuccuugcaccgagagaucuaaaaaaaaaaaaaaaaaaaaaaaaaaaaaaaaaaaaaaaaaaaaaaaaaaaaaaaaaaaaaaaaaaaaaaaaaaaaaaaaaaaaaaaaaaaaaaaaaaaa

SEQ ID NO: 25978 - RNA, 4011 nt, Artificial Sequence
  SARS-CoV-2/Wuhan/WIV05/2019__EPI_ISL_402128 spike protein mRNA gc (1-1273)(K986P_V987P_N501Y_D614G)
aggagaaagcuuaccauguucguguuccuggugcugcugccccuggugagcagccagugcgugaaccugaccacccggacccagcugccaccagccuacaccaacagcuucacccggggcgucuacuaccccgacaagguguuccggagcagcguccugcacagcacccaggaccuguuccugcccuucuucagcaacgugaccugguuccacgccauccacgugagcggcaccaacggcaccaagcgguucgacaaccccgugcugcccuucaacgacggcguguacuucgccagcaccgagaagagcaacaucauccggggcuggaucuucggcaccacccuggacagcaagacccagagccugcugaucgugaauaacgccaccaacguggugaucaaggugugcgaguuccaguucugcaacgaccccuuccugggcguguacuaccacaagaacaacaagagcuggauggagagcgaguuccggguguacagcagcgccaacaacugcaccuucgaguacgugagccagcccuuccugauggaccuggagggcaagcagggcaacuucaagaaccugcgggaguucguguucaagaacaucgacggcuacuucaagaucuacagcaagcacaccccaaucaaccuggugcgggaucugccccagggcuucucagcccuggagccccugguggaccugcccaucggcaucaacaucacccgguuccagacccugcuggcccugcaccggagcuaccugaccccaggcgacagcagcagcggguggacagcaggcgcggcugcuuacuacgugggcuaccugcagccccggaccuuccugcugaaguacaacgagaacggcaccaucaccgacgccguggacugcgcccuggacccucugagcgagaccaagugcacccugaagagcuucaccguggagaagggcaucuaccagaccagcaacuuccgggugcagcccaccgagagcaucgugcgguuccccaacaucaccaaccugugccccuucggcgagguguucaacgccacccgguucgccagcguguacgccuggaaccggaagcggaucagcaacugcguggccgacuacagcgugcuguacaacagcgccagcuucagcaccuucaagugcuacggcgugagccccaccaagcugaacgaccugugcuucaccaacguguacgccgacagcuucgugauccguggcgacgaggugcggcagaucgcacccggccagacaggcaagaucgccgacuacaacuacaagcugcccgacgacuucaccggcugcgugaucgccuggaacagcaacaaccucgacagcaaggugggcggcaacuacaacuaccuguaccggcuguuccggaagagcaaccugaagcccuucgagcgggacaucagcaccgagaucuaccaagccggcuccaccccuugcaacggcguggagggcuucaacugcuacuucccucugcagagcuacggcuuccagcccaccuacggcgugggcuaccagcccuaccgggugguggugcugagcuucgagcugcugcacgccccagccaccguguguggccccaagaagagcaccaaccuggugaagaacaagugcgugaacuucaacuucaacggccuuaccggcaccggcgugcugaccgagagcaacaagaaauuccugcccuuucagcaguucggccgggacaucgccgacaccaccgacgcugugcgggauccccagacccuggagauccuggacaucaccccuugcagcuucggcggcgugagcgugaucaccccaggcaccaacaccagcaaccagguggccgugcuguaccagggcgugaacugcaccgaggugcccguggccauccacgccgaccagcugacacccaccuggcgggucuacagcaccggcagcaacguguuccagacccgggccgguugccugaucggcgccgagcacgugaacaacagcuacgagugcgacauccccaucggcgccggcaucugugccagcuaccagacccagaccaauucaccccggagggcaaggagcguggccagccagagcaucaucgccuacaccaugagccugggcgccgagaacagcguggccuacagcaacaacagcaucgccauccccaccaacuucaccaucagcgugaccaccgagauucugcccgugagcaugaccaagaccagcguggacugcaccauguacaucugcggcgacagcaccgagugcagcaaccugcugcugcaguacggcagcuucugcacccagcugaaccgggcccugaccggcaucgccguggagcaggacaagaacacccaggagguguucgcccaggugaagcagaucuacaagaccccucccaucaaggacuucggcggcuucaacuucagccagauccugcccgaccccagcaagcccagcaagcggagcuucaucgaggaccugcuguucaacaaggugacccuagccgacgccggcuucaucaagcaguacggcgacugccucggcgacauagccgcccgggaccugaucugcgcccagaaguucaacggccugaccgugcugccuccccugcugaccgacgagaugaucgcccaguacaccagcgcccuguuagccggaaccaucaccagcggcuggacuuucggcgcuggagccgcucugcagauccccuucgccaugcagauggccuaccgguucaacggcaucggcgugacccagaacgugcuguacgagaaccagaagcugaucgccaaccaguucaacagcgccaucggcaagauccaggacagccugagcagcaccgcuagcgcccugggcaagcugcaggacguggugaaccagaacgcccaggcccugaacacccuggugaagcagcugagcagcaacuucggcgccaucagcagcgugcugaacgacauccugagccggcuggacccucccgaggccgaggugcagaucgaccggcugaucacuggccggcugcagagccugcagaccuacgugacccagcagcugauccgggccgccgagauucgggccagcgccaaccuggccgccaccaagaugagcgagugcgugcugggccagagcaagcggguggacuucugcggcaagggcuaccaccugaugagcuuuccccagagcgcaccccacggagugguguuccugcacgugaccuacgugcccgcccaggagaagaacuucaccaccgccccagccaucugccacgacggcaaggcccacuuuccccgggagggcguguucgugagcaacggcacccacugguucgugacccagcggaacuucuacgagccccagaucaucaccaccgacaacaccuucgugagcggcaacugcgacguggugaucggcaucgugaacaacaccguguacgauccccugcagcccgagcuggacagcuucaaggaggagcuggacaaguacuucaagaaucacaccagccccgacguggaccugggcgacaucagcggcaucaacgccagcguggugaacauccagaaggagaucgaucggcugaacgagguggccaagaaccugaacgagagccugaucgaccugcaggagcugggcaaguacgagcaguacaucaaguggcccugguacaucuggcugggcuucaucgccggccugaucgccaucgugauggugaccaucaugcugugcugcaugaccagcugcugcagcugccugaagggcuguugcagcugcggcagcugcugcaaguucgacgaggacgacagcgagcccgugcugaagggcgugaagcugcacuacaccugaggacuaguuauaagacugacuagcccgaugggccucccaacgggcccuccuccccuccuugcaccgagagaucuaaaaaaaaaaaaaaaaaaaaaaaaaaaaaaaaaaaaaaaaaaaaaaaaaaaaaaaaaaaaaaaaaaaaaaaaaaaaaaaaaaaaaaaaaaaaaaaaaaaa

SEQ ID NO: 25979 - RNA, 4005 nt, Artificial Sequence
  SARS-CoV-2/Wuhan/WIV05/2019__EPI_ISL_402128 spike protein mRNA gc (1-1273)(K986P_V987P_H69del_V70del_D614G)
aggagaaagcuuaccauguucguguuccuggugcugcugccccuggugagcagccagugcgugaaccugaccacccggacccagcugccaccagccuacaccaacagcuucacccggggcgucuacuaccccgacaagguguuccggagcagcguccugcacagcacccaggaccuguuccugcccuucuucagcaacgugaccugguuccacgccaucagcggcaccaacggcaccaagcgguucgacaaccccgugcugcccuucaacgacggcguguacuucgccagcaccgagaagagcaacaucauccggggcuggaucuucggcaccacccuggacagcaagacccagagccugcugaucgugaauaacgccaccaacguggugaucaaggugugcgaguuccaguucugcaacgaccccuuccugggcguguacuaccacaagaacaacaagagcuggauggagagcgaguuccggguguacagcagcgccaacaacugcaccuucgaguacgugagccagcccuuccugauggaccuggagggcaagcagggcaacuucaagaaccugcgggaguucguguucaagaacaucgacggcuacuucaagaucuacagcaagcacaccccaaucaaccuggugcgggaucugccccagggcuucucagcccuggagccccugguggaccugcccaucggcaucaacaucacccgguuccagacccugcuggcccugcaccggagcuaccugaccccaggcgacagcagcagcggguggacagcaggcgcggcugcuuacuacgugggcuaccugcagccccggaccuuccugcugaaguacaacgagaacggcaccaucaccgacgccguggacugcgcccuggacccucugagcgagaccaagugcacccugaagagcuucaccguggagaagggcaucuaccagaccagcaacuuccgggugcagcccaccgagagcaucgugcgguuccccaacaucaccaaccugugccccuucggcgagguguucaacgccacccgguucgccagcguguacgccuggaaccggaagcggaucagcaacugcguggccgacuacagcgugcuguacaacagcgccagcuucagcaccuucaagugcuacggcgugagccccaccaagcugaacgaccugugcuucaccaacguguacgccgacagcuucgugauccguggcgacgaggugcggcagaucgcacccggccagacaggcaagaucgccgacuacaacuacaagcugcccgacgacuucaccggcugcgugaucgccuggaacagcaacaaccucgacagcaaggugggcggcaacuacaacuaccuguaccggcuguuccggaagagcaaccugaagcccuucgagcgggacaucagcaccgagaucuaccaagccggcuccaccccuugcaacggcguggagggcuucaacugcuacuucccucugcagagcuacggcuuccagcccaccaacggcgugggcuaccagcccuaccgggugguggugcugagcuucgagcugcugcacgccccagccaccguguguggccccaagaagagcaccaaccuggugaagaacaagugcgugaacuucaacuucaacggccuuaccggcaccggcgugcugaccgagagcaacaagaaauuccugcccuuucagcaguucggccgggacaucgccgacaccaccgacgcugugcgggauccccagacccuggagauccuggacaucaccccuugcagcuucggcggcgugagcgugaucaccccaggcaccaacaccagcaaccagguggccgugcuguaccagggcgugaacugcaccgaggugcccguggccauccacgccgaccagcugacacccaccuggcgggucuacagcaccggcagcaacguguuccagacccgggccgguugccugaucggcgccgagcacgugaacaacagcuacgagugcgacauccccaucggcgccggcaucugugccagcuaccagacccagaccaauucaccccggagggcaaggagcguggccagccagagcaucaucgccuacaccaugagccugggcgccgagaacagcguggccuacagcaacaacagcaucgccauccccaccaacuucaccaucagcgugaccaccgagauucugcccgugagcaugaccaagaccagcguggacugcaccauguacaucugcggcgacagcaccgagugcagcaaccugcugcugcaguacggcagcuucugcacccagcugaaccgggcccugaccggcaucgccguggagcaggacaagaacacccaggagguguucgcccaggugaagcagaucuacaagaccccucccaucaaggacuucggcggcuucaacuucagccagauccugcccgaccccagcaagcccagcaagcggagcuucaucgaggaccugcuguucaacaaggugacccuagccgacgccggcuucaucaagcaguacggcgacugccucggcgacauagccgcccgggaccugaucugcgcccagaaguucaacggccugaccgugcugccuccccugcugaccgacgagaugaucgcccaguacaccagcgcccuguuagccggaaccaucaccagcggcuggacuuucggcgcuggagccgcucugcagauccccuucgccaugcagauggccuaccgguucaacggcaucggcgugacccagaacgugcuguacgagaaccagaagcugaucgccaaccaguucaacagcgccaucggcaagauccaggacagccugagcagcaccgcuagcgcccugggcaagcugcaggacguggugaaccagaacgcccaggcccugaacacccuggugaagcagcugagcagcaacuucggcgccaucagcagcgugcugaacgacauccugagccggcuggacccucccgaggccgaggugcagaucgaccggcugaucacuggccggcugcagagccugcagaccuacgugacccagcagcugauccgggccgccgagauucgggccagcgccaaccuggccgccaccaagaugagcgagugcgugcugggccagagcaagcggguggacuucugcggcaagggcuaccaccugaugagcuuuccccagagcgcaccccacggagugguguuccugcacgugaccuacgugcccgcccaggagaagaacuucaccaccgccccagccaucugccacgacggcaaggcccacuuuccccgggagggcguguucgugagcaacggcacccacugguucgugacccagcggaacuucuacgagccccagaucaucaccaccgacaacaccuucgugagcggcaacugcgacguggugaucggcaucgugaacaacaccguguacgauccccugcagcccgagcuggacagcuucaaggaggagcuggacaaguacuucaagaaucacaccagccccgacguggaccugggcgacaucagcggcaucaacgccagcguggugaacauccagaaggagaucgaucggcugaacgagguggccaagaaccugaacgagagccugaucgaccugcaggagcugggcaaguacgagcaguacaucaaguggcccugguacaucuggcugggcuucaucgccggccugaucgccaucgugauggugaccaucaugcugugcugcaugaccagcugcugcagcugccugaagggcuguugcagcugcggcagcugcugcaaguucgacgaggacgacagcgagcccgugcugaagggcgugaagcugcacuacaccugaggacuaguuauaagacugacuagcccgaugggccucccaacgggcccuccuccccuccuugcaccgagagaucuaaaaaaaaaaaaaaaaaaaaaaaaaaaaaaaaaaaaaaaaaaaaaaaaaaaaaaaaaaaaaaaaaaaaaaaaaaaaaaaaaaaaaaaaaaaaaaaaaaaa

SEQ ID NO: 25980 - RNA, 4011 nt, Artificial Sequence
  SARS-CoV-2/Wuhan/WIV05/2019__EPI_ISL_402128 spike protein mRNA gc (1-1273)(K986P_V987P_Y453F_D614G)
aggagaaagcuuaccauguucguguuccuggugcugcugccccuggugagcagccagugcgugaaccugaccacccggacccagcugccaccagccuacaccaacagcuucacccggggcgucuacuaccccgacaagguguuccggagcagcguccugcacagcacccaggaccuguuccugcccuucuucagcaacgugaccugguuccacgccauccacgugagcggcaccaacggcaccaagcgguucgacaaccccgugcugcccuucaacgacggcguguacuucgccagcaccgagaagagcaacaucauccggggcuggaucuucggcaccacccuggacagcaagacccagagccugcugaucgugaauaacgccaccaacguggugaucaaggugugcgaguuccaguucugcaacgaccccuuccugggcguguacuaccacaagaacaacaagagcuggauggagagcgaguuccggguguacagcagcgccaacaacugcaccuucgaguacgugagccagcccuuccugauggaccuggagggcaagcagggcaacuucaagaaccugcgggaguucguguucaagaacaucgacggcuacuucaagaucuacagcaagcacaccccaaucaaccuggugcgggaucugccccagggcuucucagcccuggagccccugguggaccugcccaucggcaucaacaucacccgguuccagacccugcuggcccugcaccggagcuaccugaccccaggcgacagcagcagcggguggacagcaggcgcggcugcuuacuacgugggcuaccugcagccccggaccuuccugcugaaguacaacgagaacggcaccaucaccgacgccguggacugcgcccuggacccucugagcgagaccaagugcacccugaagagcuucaccguggagaagggcaucuaccagaccagcaacuuccgggugcagcccaccgagagcaucgugcgguuccccaacaucaccaaccugugccccuucggcgagguguucaacgccacccgguucgccagcguguacgccuggaaccggaagcggaucagcaacugcguggccgacuacagcgugcuguacaacagcgccagcuucagcaccuucaagugcuacggcgugagccccaccaagcugaacgaccugugcuucaccaacguguacgccgacagcuucgugauccguggcgacgaggugcggcagaucgcacccggccagacaggcaagaucgccgacuacaacuacaagcugcccgacgacuucaccggcugcgugaucgccuggaacagcaacaaccucgacagcaaggugggcggcaacuacaacuaccuguuccggcuguuccggaagagcaaccugaagcccuucgagcgggacaucagcaccgagaucuaccaagccggcuccaccccuugcaacggcguggagggcuucaacugcuacuucccucugcagagcuacggcuuccagcccaccaacggcgugggcuaccagcccuaccgggugguggugcugagcuucgagcugcugcacgccccagccaccguguguggccccaagaagagcaccaaccuggugaagaacaagugcgugaacuucaacuucaacggccuuaccggcaccggcgugcugaccgagagcaacaagaaauuccugcccuuucagcaguucggccgggacaucgccgacaccaccgacgcugugcgggauccccagacccuggagauccuggacaucaccccuugcagcuucggcggcgugagcgugaucaccccaggcaccaacaccagcaaccagguggccgugcuguaccagggcgugaacugcaccgaggugcccguggccauccacgccgaccagcugacacccaccuggcgggucuacagcaccggcagcaacguguuccagacccgggccgguugccugaucggcgccgagcacgugaacaacagcuacgagugcgacauccccaucggcgccggcaucugugccagcuaccagacccagaccaauucaccccggagggcaaggagcguggccagccagagcaucaucgccuacaccaugagccugggcgccgagaacagcguggccuacagcaacaacagcaucgccauccccaccaacuucaccaucagcgugaccaccgagauucugcccgugagcaugaccaagaccagcguggacugcaccauguacaucugcggcgacagcaccgagugcagcaaccugcugcugcaguacggcagcuucugcacccagcugaaccgggcccugaccggcaucgccguggagcaggacaagaacacccaggagguguucgcccaggugaagcagaucuacaagaccccucccaucaaggacuucggcggcuucaacuucagccagauccugcccgaccccagcaagcccagcaagcggagcuucaucgaggaccugcuguucaacaaggugacccuagccgacgccggcuucaucaagcaguacggcgacugccucggcgacauagccgcccgggaccugaucugcgcccagaaguucaacggccugaccgugcugccuccccugcugaccgacgagaugaucgcccaguacaccagcgcccuguuagccggaaccaucaccagcggcuggacuuucggcgcuggagccgcucugcagauccccuucgccaugcagauggccuaccgguucaacggcaucggcgugacccagaacgugcuguacgagaaccagaagcugaucgccaaccaguucaacagcgccaucggcaagauccaggacagccugagcagcaccgcuagcgcccugggcaagcugcaggacguggugaaccagaacgcccaggcccugaacacccuggugaagcagcugagcagcaacuucggcgccaucagcagcgugcugaacgacauccugagccggcuggacccucccgaggccgaggugcagaucgaccggcugaucacuggccggcugcagagccugcagaccuacgugacccagcagcugauccgggccgccgagauucgggccagcgccaaccuggccgccaccaagaugagcgagugcgugcugggccagagcaagcggguggacuucugcggcaagggcuaccaccugaugagcuuuccccagagcgcaccccacggagugguguuccugcacgugaccuacgugcccgcccaggagaagaacuucaccaccgccccagccaucugccacgacggcaaggcccacuuuccccgggagggcguguucgugagcaacggcacccacugguucgugacccagcggaacuucuacgagccccagaucaucaccaccgacaacaccuucgugagcggcaacugcgacguggugaucggcaucgugaacaacaccguguacgauccccugcagcccgagcuggacagcuucaaggaggagcuggacaaguacuucaagaaucacaccagccccgacguggaccugggcgacaucagcggcaucaacgccagcguggugaacauccagaaggagaucgaucggcugaacgagguggccaagaaccugaacgagagccugaucgaccugcaggagcugggcaaguacgagcaguacaucaaguggcccugguacaucuggcugggcuucaucgccggccugaucgccaucgugauggugaccaucaugcugugcugcaugaccagcugcugcagcugccugaagggcuguugcagcugcggcagcugcugcaaguucgacgaggacgacagcgagcccgugcugaagggcgugaagcugcacuacaccugaggacuaguuauaagacugacuagcccgaugggccucccaacgggcccuccuccccuccuugcaccgagagaucuaaaaaaaaaaaaaaaaaaaaaaaaaaaaaaaaaaaaaaaaaaaaaaaaaaaaaaaaaaaaaaaaaaaaaaaaaaaaaaaaaaaaaaaaaaaaaaaaaaaa

SEQ ID NO: 25981 - RNA, 4011 nt, Artificial Sequence
  SARS-CoV-2/Wuhan/WIV05/2019__EPI_ISL_402128 spike protein mRNA gc (1-1273)(K986P_V987P_D614G_I692V)
aggagaaagcuuaccauguucguguuccuggugcugcugccccuggugagcagccagugcgugaaccugaccacccggacccagcugccaccagccuacaccaacagcuucacccggggcgucuacuaccccgacaagguguuccggagcagcguccugcacagcacccaggaccuguuccugcccuucuucagcaacgugaccugguuccacgccauccacgugagcggcaccaacggcaccaagcgguucgacaaccccgugcugcccuucaacgacggcguguacuucgccagcaccgagaagagcaacaucauccggggcuggaucuucggcaccacccuggacagcaagacccagagccugcugaucgugaauaacgccaccaacguggugaucaaggugugcgaguuccaguucugcaacgaccccuuccugggcguguacuaccacaagaacaacaagagcuggauggagagcgaguuccggguguacagcagcgccaacaacugcaccuucgaguacgugagccagcccuuccugauggaccuggagggcaagcagggcaacuucaagaaccugcgggaguucguguucaagaacaucgacggcuacuucaagaucuacagcaagcacaccccaaucaaccuggugcgggaucugccccagggcuucucagcccuggagccccugguggaccugcccaucggcaucaacaucacccgguuccagacccugcuggcccugcaccggagcuaccugaccccaggcgacagcagcagcggguggacagcaggcgcggcugcuuacuacgugggcuaccugcagccccggaccuuccugcugaaguacaacgagaacggcaccaucaccgacgccguggacugcgcccuggacccucugagcgagaccaagugcacccugaagagcuucaccguggagaagggcaucuaccagaccagcaacuuccgggugcagcccaccgagagcaucgugcgguuccccaacaucaccaaccugugccccuucggcgagguguucaacgccacccgguucgccagcguguacgccuggaaccggaagcggaucagcaacugcguggccgacuacagcgugcuguacaacagcgccagcuucagcaccuucaagugcuacggcgugagccccaccaagcugaacgaccugugcuucaccaacguguacgccgacagcuucgugauccguggcgacgaggugcggcagaucgcacccggccagacaggcaagaucgccgacuacaacuacaagcugcccgacgacuucaccggcugcgugaucgccuggaacagcaacaaccucgacagcaaggugggcggcaacuacaacuaccuguaccggcuguuccggaagagcaaccugaagcccuucgagcgggacaucagcaccgagaucuaccaagccggcuccaccccuugcaacggcguggagggcuucaacugcuacuucccucugcagagcuacggcuuccagcccaccaacggcgugggcuaccagcccuaccgggugguggugcugagcuucgagcugcugcacgccccagccaccguguguggccccaagaagagcaccaaccuggugaagaacaagugcgugaacuucaacuucaacggccuuaccggcaccggcgugcugaccgagagcaacaagaaauuccugcccuuucagcaguucggccgggacaucgccgacaccaccgacgcugugcgggauccccagacccuggagauccuggacaucaccccuugcagcuucggcggcgugagcgugaucaccccaggcaccaacaccagcaaccagguggccgugcuguaccagggcgugaacugcaccgaggugcccguggccauccacgccgaccagcugacacccaccuggcgggucuacagcaccggcagcaacguguuccagacccgggccgguugccugaucggcgccgagcacgugaacaacagcuacgagugcgacauccccaucggcgccggcaucugugccagcuaccagacccagaccaauucaccccggagggcaaggagcguggccagccagagcgugaucgccuacaccaugagccugggcgccgagaacagcguggccuacagcaacaacagcaucgccauccccaccaacuucaccaucagcgugaccaccgagauucugcccgugagcaugaccaagaccagcguggacugcaccauguacaucugcggcgacagcaccgagugcagcaaccugcugcugcaguacggcagcuucugcacccagcugaaccgggcccugaccggcaucgccguggagcaggacaagaacacccaggagguguucgcccaggugaagcagaucuacaagaccccucccaucaaggacuucggcggcuucaacuucagccagauccugcccgaccccagcaagcccagcaagcggagcuucaucgaggaccugcuguucaacaaggugacccuagccgacgccggcuucaucaagcaguacggcgacugccucggcgacauagccgcccgggaccugaucugcgcccagaaguucaacggccugaccgugcugccuccccugcugaccgacgagaugaucgcccaguacaccagcgcccuguuagccggaaccaucaccagcggcuggacuuucggcgcuggagccgcucugcagauccccuucgccaugcagauggccuaccgguucaacggcaucggcgugacccagaacgugcuguacgagaaccagaagcugaucgccaaccaguucaacagcgccaucggcaagauccaggacagccugagcagcaccgcuagcgcccugggcaagcugcaggacguggugaaccagaacgcccaggcccugaacacccuggugaagcagcugagcagcaacuucggcgccaucagcagcgugcugaacgacauccugagccggcuggacccucccgaggccgaggugcagaucgaccggcugaucacuggccggcugcagagccugcagaccuacgugacccagcagcugauccgggccgccgagauucgggccagcgccaaccuggccgccaccaagaugagcgagugcgugcugggccagagcaagcggguggacuucugcggcaagggcuaccaccugaugagcuuuccccagagcgcaccccacggagugguguuccugcacgugaccuacgugcccgcccaggagaagaacuucaccaccgccccagccaucugccacgacggcaaggcccacuuuccccgggagggcguguucgugagcaacggcacccacugguucgugacccagcggaacuucuacgagccccagaucaucaccaccgacaacaccuucgugagcggcaacugcgacguggugaucggcaucgugaacaacaccguguacgauccccugcagcccgagcuggacagcuucaaggaggagcuggacaaguacuucaagaaucacaccagccccgacguggaccugggcgacaucagcggcaucaacgccagcguggugaacauccagaaggagaucgaucggcugaacgagguggccaagaaccugaacgagagccugaucgaccugcaggagcugggcaaguacgagcaguacaucaaguggcccugguacaucuggcugggcuucaucgccggccugaucgccaucgugauggugaccaucaugcugugcugcaugaccagcugcugcagcugccugaagggcuguugcagcugcggcagcugcugcaaguucgacgaggacgacagcgagcccgugcugaagggcgugaagcugcacuacaccugaggacuaguuauaagacugacuagcccgaugggccucccaacgggcccuccuccccuccuugcaccgagagaucuaaaaaaaaaaaaaaaaaaaaaaaaaaaaaaaaaaaaaaaaaaaaaaaaaaaaaaaaaaaaaaaaaaaaaaaaaaaaaaaaaaaaaaaaaaaaaaaaaaaa

SEQ ID NO: 25982 - RNA, 4011 nt, Artificial Sequence
  SARS-CoV-2/Wuhan/WIV05/2019__EPI_ISL_402128 spike protein mRNA gc (1-1273)(K986P_V987P_D614G_M1229I)
aggagaaagcuuaccauguucguguuccuggugcugcugccccuggugagcagccagugcgugaaccugaccacccggacccagcugccaccagccuacaccaacagcuucacccggggcgucuacuaccccgacaagguguuccggagcagcguccugcacagcacccaggaccuguuccugcccuucuucagcaacgugaccugguuccacgccauccacgugagcggcaccaacggcaccaagcgguucgacaaccccgugcugcccuucaacgacggcguguacuucgccagcaccgagaagagcaacaucauccggggcuggaucuucggcaccacccuggacagcaagacccagagccugcugaucgugaauaacgccaccaacguggugaucaaggugugcgaguuccaguucugcaacgaccccuuccugggcguguacuaccacaagaacaacaagagcuggauggagagcgaguuccggguguacagcagcgccaacaacugcaccuucgaguacgugagccagcccuuccugauggaccuggagggcaagcagggcaacuucaagaaccugcgggaguucguguucaagaacaucgacggcuacuucaagaucuacagcaagcacaccccaaucaaccuggugcgggaucugccccagggcuucucagcccuggagccccugguggaccugcccaucggcaucaacaucacccgguuccagacccugcuggcccugcaccggagcuaccugaccccaggcgacagcagcagcggguggacagcaggcgcggcugcuuacuacgugggcuaccugcagccccggaccuuccugcugaaguacaacgagaacggcaccaucaccgacgccguggacugcgcccuggacccucugagcgagaccaagugcacccugaagagcuucaccguggagaagggcaucuaccagaccagcaacuuccgggugcagcccaccgagagcaucgugcgguuccccaacaucaccaaccugugccccuucggcgagguguucaacgccacccgguucgccagcguguacgccuggaaccggaagcggaucagcaacugcguggccgacuacagcgugcuguacaacagcgccagcuucagcaccuucaagugcuacggcgugagccccaccaagcugaacgaccugugcuucaccaacguguacgccgacagcuucgugauccguggcgacgaggugcggcagaucgcacccggccagacaggcaagaucgccgacuacaacuacaagcugcccgacgacuucaccggcugcgugaucgccuggaacagcaacaaccucgacagcaaggugggcggcaacuacaacuaccuguaccggcuguuccggaagagcaaccugaagcccuucgagcgggacaucagcaccgagaucuaccaagccggcuccaccccuugcaacggcguggagggcuucaacugcuacuucccucugcagagcuacggcuuccagcccaccaacggcgugggcuaccagcccuaccgggugguggugcugagcuucgagcugcugcacgccccagccaccguguguggccccaagaagagcaccaaccuggugaagaacaagugcgugaacuucaacuucaacggccuuaccggcaccggcgugcugaccgagagcaacaagaaauuccugcccuuucagcaguucggccgggacaucgccgacaccaccgacgcugugcgggauccccagacccuggagauccuggacaucaccccuugcagcuucggcggcgugagcgugaucaccccaggcaccaacaccagcaaccagguggccgugcuguaccagggcgugaacugcaccgaggugcccguggccauccacgccgaccagcugacacccaccuggcgggucuacagcaccggcagcaacguguuccagacccgggccgguugccugaucggcgccgagcacgugaacaacagcuacgagugcgacauccccaucggcgccggcaucugugccagcuaccagacccagaccaauucaccccggagggcaaggagcguggccagccagagcaucaucgccuacaccaugagccugggcgccgagaacagcguggccuacagcaacaacagcaucgccauccccaccaacuucaccaucagcgugaccaccgagauucugcccgugagcaugaccaagaccagcguggacugcaccauguacaucugcggcgacagcaccgagugcagcaaccugcugcugcaguacggcagcuucugcacccagcugaaccgggcccugaccggcaucgccguggagcaggacaagaacacccaggagguguucgcccaggugaagcagaucuacaagaccccucccaucaaggacuucggcggcuucaacuucagccagauccugcccgaccccagcaagcccagcaagcggagcuucaucgaggaccugcuguucaacaaggugacccuagccgacgccggcuucaucaagcaguacggcgacugccucggcgacauagccgcccgggaccugaucugcgcccagaaguucaacggccugaccgugcugccuccccugcugaccgacgagaugaucgcccaguacaccagcgcccuguuagccggaaccaucaccagcggcuggacuuucggcgcuggagccgcucugcagauccccuucgccaugcagauggccuaccgguucaacggcaucggcgugacccagaacgugcuguacgagaaccagaagcugaucgccaaccaguucaacagcgccaucggcaagauccaggacagccugagcagcaccgcuagcgcccugggcaagcugcaggacguggugaaccagaacgcccaggcccugaacacccuggugaagcagcugagcagcaacuucggcgccaucagcagcgugcugaacgacauccugagccggcuggacccucccgaggccgaggugcagaucgaccggcugaucacuggccggcugcagagccugcagaccuacgugacccagcagcugauccgggccgccgagauucgggccagcgccaaccuggccgccaccaagaugagcgagugcgugcugggccagagcaagcggguggacuucugcggcaagggcuaccaccugaugagcuuuccccagagcgcaccccacggagugguguuccugcacgugaccuacgugcccgcccaggagaagaacuucaccaccgccccagccaucugccacgacggcaaggcccacuuuccccgggagggcguguucgugagcaacggcacccacugguucgugacccagcggaacuucuacgagccccagaucaucaccaccgacaacaccuucgugagcggcaacugcgacguggugaucggcaucgugaacaacaccguguacgauccccugcagcccgagcuggacagcuucaaggaggagcuggacaaguacuucaagaaucacaccagccccgacguggaccugggcgacaucagcggcaucaacgccagcguggugaacauccagaaggagaucgaucggcugaacgagguggccaagaaccugaacgagagccugaucgaccugcaggagcugggcaaguacgagcaguacaucaaguggcccugguacaucuggcugggcuucaucgccggccugaucgccaucgugaucgugaccaucaugcugugcugcaugaccagcugcugcagcugccugaagggcuguugcagcugcggcagcugcugcaaguucgacgaggacgacagcgagcccgugcugaagggcgugaagcugcacuacaccugaggacuaguuauaagacugacuagcccgaugggccucccaacgggcccuccuccccuccuugcaccgagagaucuaaaaaaaaaaaaaaaaaaaaaaaaaaaaaaaaaaaaaaaaaaaaaaaaaaaaaaaaaaaaaaaaaaaaaaaaaaaaaaaaaaaaaaaaaaaaaaaaaaaa

SEQ ID NO: 25983 - RNA, 4005 nt, Artificial Sequence
  SARS-CoV-2/Wuhan/WIV05/2019__EPI_ISL_402128 spike protein mRNA gc (1-1273)(K986P_V987P_H69del_V70del_A222V_Y453F_S477N_D614G_I692V)
aggagaaagcuuaccauguucguguuccuggugcugcugccccuggugagcagccagugcgugaaccugaccacccggacccagcugccaccagccuacaccaacagcuucacccggggcgucuacuaccccgacaagguguuccggagcagcguccugcacagcacccaggaccuguuccugcccuucuucagcaacgugaccugguuccacgccaucagcggcaccaacggcaccaagcgguucgacaaccccgugcugcccuucaacgacggcguguacuucgccagcaccgagaagagcaacaucauccggggcuggaucuucggcaccacccuggacagcaagacccagagccugcugaucgugaauaacgccaccaacguggugaucaaggugugcgaguuccaguucugcaacgaccccuuccugggcguguacuaccacaagaacaacaagagcuggauggagagcgaguuccggguguacagcagcgccaacaacugcaccuucgaguacgugagccagcccuuccugauggaccuggagggcaagcagggcaacuucaagaaccugcgggaguucguguucaagaacaucgacggcuacuucaagaucuacagcaagcacaccccaaucaaccuggugcgggaucugccccagggcuucucagugcuggagccccugguggaccugcccaucggcaucaacaucacccgguuccagacccugcuggcccugcaccggagcuaccugaccccaggcgacagcagcagcggguggacagcaggcgcggcugcuuacuacgugggcuaccugcagccccggaccuuccugcugaaguacaacgagaacggcaccaucaccgacgccguggacugcgcccuggacccucugagcgagaccaagugcacccugaagagcuucaccguggagaagggcaucuaccagaccagcaacuuccgggugcagcccaccgagagcaucgugcgguuccccaacaucaccaaccugugccccuucggcgagguguucaacgccacccgguucgccagcguguacgccuggaaccggaagcggaucagcaacugcguggccgacuacagcgugcuguacaacagcgccagcuucagcaccuucaagugcuacggcgugagccccaccaagcugaacgaccugugcuucaccaacguguacgccgacagcuucgugauccguggcgacgaggugcggcagaucgcacccggccagacaggcaagaucgccgacuacaacuacaagcugcccgacgacuucaccggcugcgugaucgccuggaacagcaacaaccucgacagcaaggugggcggcaacuacaacuaccuguuccggcuguuccggaagagcaaccugaagcccuucgagcgggacaucagcaccgagaucuaccaagccggcaacaccccuugcaacggcguggagggcuucaacugcuacuucccucugcagagcuacggcuuccagcccaccaacggcgugggcuaccagcccuaccgggugguggugcugagcuucgagcugcugcacgccccagccaccguguguggccccaagaagagcaccaaccuggugaagaacaagugcgugaacuucaacuucaacggccuuaccggcaccggcgugcugaccgagagcaacaagaaauuccugcccuuucagcaguucggccgggacaucgccgacaccaccgacgcugugcgggauccccagacccuggagauccuggacaucaccccuugcagcuucggcggcgugagcgugaucaccccaggcaccaacaccagcaaccagguggccgugcuguaccagggcgugaacugcaccgaggugcccguggccauccacgccgaccagcugacacccaccuggcgggucuacagcaccggcagcaacguguuccagacccgggccgguugccugaucggcgccgagcacgugaacaacagcuacgagugcgacauccccaucggcgccggcaucugugccagcuaccagacccagaccaauucaccccggagggcaaggagcguggccagccagagcgugaucgccuacaccaugagccugggcgccgagaacagcguggccuacagcaacaacagcaucgccauccccaccaacuucaccaucagcgugaccaccgagauucugcccgugagcaugaccaagaccagcguggacugcaccauguacaucugcggcgacagcaccgagugcagcaaccugcugcugcaguacggcagcuucugcacccagcugaaccgggcccugaccggcaucgccguggagcaggacaagaacacccaggagguguucgcccaggugaagcagaucuacaagaccccucccaucaaggacuucggcggcuucaacuucagccagauccugcccgaccccagcaagcccagcaagcggagcuucaucgaggaccugcuguucaacaaggugacccuagccgacgccggcuucaucaagcaguacggcgacugccucggcgacauagccgcccgggaccugaucugcgcccagaaguucaacggccugaccgugcugccuccccugcugaccgacgagaugaucgcccaguacaccagcgcccuguuagccggaaccaucaccagcggcuggacuuucggcgcuggagccgcucugcagauccccuucgccaugcagauggccuaccgguucaacggcaucggcgugacccagaacgugcuguacgagaaccagaagcugaucgccaaccaguucaacagcgccaucggcaagauccaggacagccugagcagcaccgcuagcgcccugggcaagcugcaggacguggugaaccagaacgcccaggcccugaacacccuggugaagcagcugagcagcaacuucggcgccaucagcagcgugcugaacgacauccugagccggcuggacccucccgaggccgaggugcagaucgaccggcugaucacuggccggcugcagagccugcagaccuacgugacccagcagcugauccgggccgccgagauucgggccagcgccaaccuggccgccaccaagaugagcgagugcgugcugggccagagcaagcggguggacuucugcggcaagggcuaccaccugaugagcuuuccccagagcgcaccccacggagugguguuccugcacgugaccuacgugcccgcccaggagaagaacuucaccaccgccccagccaucugccacgacggcaaggcccacuuuccccgggagggcguguucgugagcaacggcacccacugguucgugacccagcggaacuucuacgagccccagaucaucaccaccgacaacaccuucgugagcggcaacugcgacguggugaucggcaucgugaacaacaccguguacgauccccugcagcccgagcuggacagcuucaaggaggagcuggacaaguacuucaagaaucacaccagccccgacguggaccugggcgacaucagcggcaucaacgccagcguggugaacauccagaaggagaucgaucggcugaacgagguggccaagaaccugaacgagagccugaucgaccugcaggagcugggcaaguacgagcaguacaucaaguggcccugguacaucuggcugggcuucaucgccggccugaucgccaucgugauggugaccaucaugcugugcugcaugaccagcugcugcagcugccugaagggcuguugcagcugcggcagcugcugcaaguucgacgaggacgacagcgagcccgugcugaagggcgugaagcugcacuacaccugaggacuaguuauaagacugacuagcccgaugggccucccaacgggcccuccuccccuccuugcaccgagagaucuaaaaaaaaaaaaaaaaaaaaaaaaaaaaaaaaaaaaaaaaaaaaaaaaaaaaaaaaaaaaaaaaaaaaaaaaaaaaaaaaaaaaaaaaaaaaaaaaaaaa

SEQ ID NO: 25984 - RNA, 4005 nt, Artificial Sequence
  SARS-CoV-2/Wuhan/WIV05/2019__EPI_ISL_402128 spike protein mRNA gc (1-1273)(K986P_V987P_H69del_V70del_Y453F_D614G_I692V_M1229I)
aggagaaagcuuaccauguucguguuccuggugcugcugccccuggugagcagccagugcgugaaccugaccacccggacccagcugccaccagccuacaccaacagcuucacccggggcgucuacuaccccgacaagguguuccggagcagcguccugcacagcacccaggaccuguuccugcccuucuucagcaacgugaccugguuccacgccaucagcggcaccaacggcaccaagcgguucgacaaccccgugcugcccuucaacgacggcguguacuucgccagcaccgagaagagcaacaucauccggggcuggaucuucggcaccacccuggacagcaagacccagagccugcugaucgugaauaacgccaccaacguggugaucaaggugugcgaguuccaguucugcaacgaccccuuccugggcguguacuaccacaagaacaacaagagcuggauggagagcgaguuccggguguacagcagcgccaacaacugcaccuucgaguacgugagccagcccuuccugauggaccuggagggcaagcagggcaacuucaagaaccugcgggaguucguguucaagaacaucgacggcuacuucaagaucuacagcaagcacaccccaaucaaccuggugcgggaucugccccagggcuucucagcccuggagccccugguggaccugcccaucggcaucaacaucacccgguuccagacccugcuggcccugcaccggagcuaccugaccccaggcgacagcagcagcggguggacagcaggcgcggcugcuuacuacgugggcuaccugcagccccggaccuuccugcugaaguacaacgagaacggcaccaucaccgacgccguggacugcgcccuggacccucugagcgagaccaagugcacccugaagagcuucaccguggagaagggcaucuaccagaccagcaacuuccgggugcagcccaccgagagcaucgugcgguuccccaacaucaccaaccugugccccuucggcgagguguucaacgccacccgguucgccagcguguacgccuggaaccggaagcggaucagcaacugcguggccgacuacagcgugcuguacaacagcgccagcuucagcaccuucaagugcuacggcgugagccccaccaagcugaacgaccugugcuucaccaacguguacgccgacagcuucgugauccguggcgacgaggugcggcagaucgcacccggccagacaggcaagaucgccgacuacaacuacaagcugcccgacgacuucaccggcugcgugaucgccuggaacagcaacaaccucgacagcaaggugggcggcaacuacaacuaccuguuccggcuguuccggaagagcaaccugaagcccuucgagcgggacaucagcaccgagaucuaccaagccggcuccaccccuugcaacggcguggagggcuucaacugcuacuucccucugcagagcuacggcuuccagcccaccaacggcgugggcuaccagcccuaccgggugguggugcugagcuucgagcugcugcacgccccagccaccguguguggccccaagaagagcaccaaccuggugaagaacaagugcgugaacuucaacuucaacggccuuaccggcaccggcgugcugaccgagagcaacaagaaauuccugcccuuucagcaguucggccgggacaucgccgacaccaccgacgcugugcgggauccccagacccuggagauccuggacaucaccccuugcagcuucggcggcgugagcgugaucaccccaggcaccaacaccagcaaccagguggccgugcuguaccagggcgugaacugcaccgaggugcccguggccauccacgccgaccagcugacacccaccuggcgggucuacagcaccggcagcaacguguuccagacccgggccgguugccugaucggcgccgagcacgugaacaacagcuacgagugcgacauccccaucggcgccggcaucugugccagcuaccagacccagaccaauucaccccggagggcaaggagcguggccagccagagcgugaucgccuacaccaugagccugggcgccgagaacagcguggccuacagcaacaacagcaucgccauccccaccaacuucaccaucagcgugaccaccgagauucugcccgugagcaugaccaagaccagcguggacugcaccauguacaucugcggcgacagcaccgagugcagcaaccugcugcugcaguacggcagcuucugcacccagcugaaccgggcccugaccggcaucgccguggagcaggacaagaacacccaggagguguucgcccaggugaagcagaucuacaagaccccucccaucaaggacuucggcggcuucaacuucagccagauccugcccgaccccagcaagcccagcaagcggagcuucaucgaggaccugcuguucaacaaggugacccuagccgacgccggcuucaucaagcaguacggcgacugccucggcgacauagccgcccgggaccugaucugcgcccagaaguucaacggccugaccgugcugccuccccugcugaccgacgagaugaucgcccaguacaccagcgcccuguuagccggaaccaucaccagcggcuggacuuucggcgcuggagccgcucugcagauccccuucgccaugcagauggccuaccgguucaacggcaucggcgugacccagaacgugcuguacgagaaccagaagcugaucgccaaccaguucaacagcgccaucggcaagauccaggacagccugagcagcaccgcuagcgcccugggcaagcugcaggacguggugaaccagaacgcccaggcccugaacacccuggugaagcagcugagcagcaacuucggcgccaucagcagcgugcugaacgacauccugagccggcuggacccucccgaggccgaggugcagaucgaccggcugaucacuggccggcugcagagccugcagaccuacgugacccagcagcugauccgggccgccgagauucgggccagcgccaaccuggccgccaccaagaugagcgagugcgugcugggccagagcaagcggguggacuucugcggcaagggcuaccaccugaugagcuuuccccagagcgcaccccacggagugguguuccugcacgugaccuacgugcccgcccaggagaagaacuucaccaccgccccagccaucugccacgacggcaaggcccacuuuccccgggagggcguguucgugagcaacggcacccacugguucgugacccagcggaacuucuacgagccccagaucaucaccaccgacaacaccuucgugagcggcaacugcgacguggugaucggcaucgugaacaacaccguguacgauccccugcagcccgagcuggacagcuucaaggaggagcuggacaaguacuucaagaaucacaccagccccgacguggaccugggcgacaucagcggcaucaacgccagcguggugaacauccagaaggagaucgaucggcugaacgagguggccaagaaccugaacgagagccugaucgaccugcaggagcugggcaaguacgagcaguacaucaaguggcccugguacaucuggcugggcuucaucgccggccugaucgccaucgugaucgugaccaucaugcugugcugcaugaccagcugcugcagcugccugaagggcuguugcagcugcggcagcugcugcaaguucgacgaggacgacagcgagcccgugcugaagggcgugaagcugcacuacaccugaggacuaguuauaagacugacuagcccgaugggccucccaacgggcccuccuccccuccuugcaccgagagaucuaaaaaaaaaaaaaaaaaaaaaaaaaaaaaaaaaaaaaaaaaaaaaaaaaaaaaaaaaaaaaaaaaaaaaaaaaaaaaaaaaaaaaaaaaaaaaaaaaaaa

SEQ ID NO: 25985 - RNA, 4002 nt, Artificial Sequence
  SARS-CoV-2/Wuhan/WIV05/2019__EPI_ISL_402128 spike protein mRNA gc (1-1273)(K986P_V987P_K986P_V987P_H69del_V70del_Y144del_N501Y_A570 D_D614G_P681H_T716I_S982A_D1118H)
aggagaaagcuuaccauguucguguuccuggugcugcugccccuggugagcagccagugcgugaaccugaccacccggacccagcugccaccagccuacaccaacagcuucacccggggcgucuacuaccccgacaagguguuccggagcagcguccugcacagcacccaggaccuguuccugcccuucuucagcaacgugaccugguuccacgccaucagcggcaccaacggcaccaagcgguucgacaaccccgugcugcccuucaacgacggcguguacuucgccagcaccgagaagagcaacaucauccggggcuggaucuucggcaccacccuggacagcaagacccagagccugcugaucgugaauaacgccaccaacguggugaucaaggugugcgaguuccaguucugcaacgaccccuuccugggcguguaccacaagaacaacaagagcuggauggagagcgaguuccggguguacagcagcgccaacaacugcaccuucgaguacgugagccagcccuuccugauggaccuggagggcaagcagggcaacuucaagaaccugcgggaguucguguucaagaacaucgacggcuacuucaagaucuacagcaagcacaccccaaucaaccuggugcgggaucugccccagggcuucucagcccuggagccccugguggaccugcccaucggcaucaacaucacccgguuccagacccugcuggcccugcaccggagcuaccugaccccaggcgacagcagcagcggguggacagcaggcgcggcugcuuacuacgugggcuaccugcagccccggaccuuccugcugaaguacaacgagaacggcaccaucaccgacgccguggacugcgcccuggacccucugagcgagaccaagugcacccugaagagcuucaccguggagaagggcaucuaccagaccagcaacuuccgggugcagcccaccgagagcaucgugcgguuccccaacaucaccaaccugugccccuucggcgagguguucaacgccacccgguucgccagcguguacgccuggaaccggaagcggaucagcaacugcguggccgacuacagcgugcuguacaacagcgccagcuucagcaccuucaagugcuacggcgugagccccaccaagcugaacgaccugugcuucaccaacguguacgccgacagcuucgugauccguggcgacgaggugcggcagaucgcacccggccagacaggcaagaucgccgacuacaacuacaagcugcccgacgacuucaccggcugcgugaucgccuggaacagcaacaaccucgacagcaaggugggcggcaacuacaacuaccuguaccggcuguuccggaagagcaaccugaagcccuucgagcgggacaucagcaccgagaucuaccaagccggcuccaccccuugcaacggcguggagggcuucaacugcuacuucccucugcagagcuacggcuuccagcccaccuacggcgugggcuaccagcccuaccgggugguggugcugagcuucgagcugcugcacgccccagccaccguguguggccccaagaagagcaccaaccuggugaagaacaagugcgugaacuucaacuucaacggccuuaccggcaccggcgugcugaccgagagcaacaagaaauuccugcccuuucagcaguucggccgggacaucgacgacaccaccgacgcugugcgggauccccagacccuggagauccuggacaucaccccuugcagcuucggcggcgugagcgugaucaccccaggcaccaacaccagcaaccagguggccgugcuguaccagggcgugaacugcaccgaggugcccguggccauccacgccgaccagcugacacccaccuggcgggucuacagcaccggcagcaacguguuccagacccgggccgguugccugaucggcgccgagcacgugaacaacagcuacgagugcgacauccccaucggcgccggcaucugugccagcuaccagacccagaccaauucacaccggagggcaaggagcguggccagccagagcaucaucgccuacaccaugagccugggcgccgagaacagcguggccuacagcaacaacagcaucgccauccccaucaacuucaccaucagcgugaccaccgagauucugcccgugagcaugaccaagaccagcguggacugcaccauguacaucugcggcgacagcaccgagugcagcaaccugcugcugcaguacggcagcuucugcacccagcugaaccgggcccugaccggcaucgccguggagcaggacaagaacacccaggagguguucgcccaggugaagcagaucuacaagaccccucccaucaaggacuucggcggcuucaacuucagccagauccugcccgaccccagcaagcccagcaagcggagcuucaucgaggaccugcuguucaacaaggugacccuagccgacgccggcuucaucaagcaguacggcgacugccucggcgacauagccgcccgggaccugaucugcgcccagaaguucaacggccugaccgugcugccuccccugcugaccgacgagaugaucgcccaguacaccagcgcccuguuagccggaaccaucaccagcggcuggacuuucggcgcuggagccgcucugcagauccccuucgccaugcagauggccuaccgguucaacggcaucggcgugacccagaacgugcuguacgagaaccagaagcugaucgccaaccaguucaacagcgccaucggcaagauccaggacagccugagcagcaccgcuagcgcccugggcaagcugcaggacguggugaaccagaacgcccaggcccugaacacccuggugaagcagcugagcagcaacuucggcgccaucagcagcgugcugaacgacauccuggcccggcuggacccucccgaggccgaggugcagaucgaccggcugaucacuggccggcugcagagccugcagaccuacgugacccagcagcugauccgggccgccgagauucgggccagcgccaaccuggccgccaccaagaugagcgagugcgugcugggccagagcaagcggguggacuucugcggcaagggcuaccaccugaugagcuuuccccagagcgcaccccacggagugguguuccugcacgugaccuacgugcccgcccaggagaagaacuucaccaccgccccagccaucugccacgacggcaaggcccacuuuccccgggagggcguguucgugagcaacggcacccacugguucgugacccagcggaacuucuacgagccccagaucaucaccacccacaacaccuucgugagcggcaacugcgacguggugaucggcaucgugaacaacaccguguacgauccccugcagcccgagcuggacagcuucaaggaggagcuggacaaguacuucaagaaucacaccagccccgacguggaccugggcgacaucagcggcaucaacgccagcguggugaacauccagaaggagaucgaucggcugaacgagguggccaagaaccugaacgagagccugaucgaccugcaggagcugggcaaguacgagcaguacaucaaguggcccugguacaucuggcugggcuucaucgccggccugaucgccaucgugauggugaccaucaugcugugcugcaugaccagcugcugcagcugccugaagggcuguugcagcugcggcagcugcugcaaguucgacgaggacgacagcgagcccgugcugaagggcgugaagcugcacuacaccugaggacuaguuauaagacugacuagcccgaugggccucccaacgggcccuccuccccuccuugcaccgagagaucuaaaaaaaaaaaaaaaaaaaaaaaaaaaaaaaaaaaaaaaaaaaaaaaaaaaaaaaaaaaaaaaaaaaaaaaaaaaaaaaaaaaaaaaaaaaaaaaaaaaa

SEQ ID NO: 25986 - RNA, 4011 nt, Artificial Sequence
  SARS-CoV-2/Wuhan/WIV05/2019__EPI_ISL_402128 spike protein mRNA gc (1-1273)(K986P_V987P_K986P_V987P_K417N_E484K_N501Y_D614G)
aggagaaagcuuaccauguucguguuccuggugcugcugccccuggugagcagccagugcgugaaccugaccacccggacccagcugccaccagccuacaccaacagcuucacccggggcgucuacuaccccgacaagguguuccggagcagcguccugcacagcacccaggaccuguuccugcccuucuucagcaacgugaccugguuccacgccauccacgugagcggcaccaacggcaccaagcgguucgacaaccccgugcugcccuucaacgacggcguguacuucgccagcaccgagaagagcaacaucauccggggcuggaucuucggcaccacccuggacagcaagacccagagccugcugaucgugaauaacgccaccaacguggugaucaaggugugcgaguuccaguucugcaacgaccccuuccugggcguguacuaccacaagaacaacaagagcuggauggagagcgaguuccggguguacagcagcgccaacaacugcaccuucgaguacgugagccagcccuuccugauggaccuggagggcaagcagggcaacuucaagaaccugcgggaguucguguucaagaacaucgacggcuacuucaagaucuacagcaagcacaccccaaucaaccuggugcgggaucugccccagggcuucucagcccuggagccccugguggaccugcccaucggcaucaacaucacccgguuccagacccugcuggcccugcaccggagcuaccugaccccaggcgacagcagcagcggguggacagcaggcgcggcugcuuacuacgugggcuaccugcagccccggaccuuccugcugaaguacaacgagaacggcaccaucaccgacgccguggacugcgcccuggacccucugagcgagaccaagugcacccugaagagcuucaccguggagaagggcaucuaccagaccagcaacuuccgggugcagcccaccgagagcaucgugcgguuccccaacaucaccaaccugugccccuucggcgagguguucaacgccacccgguucgccagcguguacgccuggaaccggaagcggaucagcaacugcguggccgacuacagcgugcuguacaacagcgccagcuucagcaccuucaagugcuacggcgugagccccaccaagcugaacgaccugugcuucaccaacguguacgccgacagcuucgugauccguggcgacgaggugcggcagaucgcacccggccagacaggcaacaucgccgacuacaacuacaagcugcccgacgacuucaccggcugcgugaucgccuggaacagcaacaaccucgacagcaaggugggcggcaacuacaacuaccuguaccggcuguuccggaagagcaaccugaagcccuucgagcgggacaucagcaccgagaucuaccaagccggcuccaccccuugcaacggcgugaagggcuucaacugcuacuucccucugcagagcuacggcuuccagcccaccuacggcgugggcuaccagcccuaccgggugguggugcugagcuucgagcugcugcacgccccagccaccguguguggccccaagaagagcaccaaccuggugaagaacaagugcgugaacuucaacuucaacggccuuaccggcaccggcgugcugaccgagagcaacaagaaauuccugcccuuucagcaguucggccgggacaucgccgacaccaccgacgcugugcgggauccccagacccuggagauccuggacaucaccccuugcagcuucggcggcgugagcgugaucaccccaggcaccaacaccagcaaccagguggccgugcuguaccagggcgugaacugcaccgaggugcccguggccauccacgccgaccagcugacacccaccuggcgggucuacagcaccggcagcaacguguuccagacccgggccgguugccugaucggcgccgagcacgugaacaacagcuacgagugcgacauccccaucggcgccggcaucugugccagcuaccagacccagaccaauucaccccggagggcaaggagcguggccagccagagcaucaucgccuacaccaugagccugggcgccgagaacagcguggccuacagcaacaacagcaucgccauccccaccaacuucaccaucagcgugaccaccgagauucugcccgugagcaugaccaagaccagcguggacugcaccauguacaucugcggcgacagcaccgagugcagcaaccugcugcugcaguacggcagcuucugcacccagcugaaccgggcccugaccggcaucgccguggagcaggacaagaacacccaggagguguucgcccaggugaagcagaucuacaagaccccucccaucaaggacuucggcggcuucaacuucagccagauccugcccgaccccagcaagcccagcaagcggagcuucaucgaggaccugcuguucaacaaggugacccuagccgacgccggcuucaucaagcaguacggcgacugccucggcgacauagccgcccgggaccugaucugcgcccagaaguucaacggccugaccgugcugccuccccugcugaccgacgagaugaucgcccaguacaccagcgcccuguuagccggaaccaucaccagcggcuggacuuucggcgcuggagccgcucugcagauccccuucgccaugcagauggccuaccgguucaacggcaucggcgugacccagaacgugcuguacgagaaccagaagcugaucgccaaccaguucaacagcgccaucggcaagauccaggacagccugagcagcaccgcuagcgcccugggcaagcugcaggacguggugaaccagaacgcccaggcccugaacacccuggugaagcagcugagcagcaacuucggcgccaucagcagcgugcugaacgacauccugagccggcuggacccucccgaggccgaggugcagaucgaccggcugaucacuggccggcugcagagccugcagaccuacgugacccagcagcugauccgggccgccgagauucgggccagcgccaaccuggccgccaccaagaugagcgagugcgugcugggccagagcaagcggguggacuucugcggcaagggcuaccaccugaugagcuuuccccagagcgcaccccacggagugguguuccugcacgugaccuacgugcccgcccaggagaagaacuucaccaccgccccagccaucugccacgacggcaaggcccacuuuccccgggagggcguguucgugagcaacggcacccacugguucgugacccagcggaacuucuacgagccccagaucaucaccaccgacaacaccuucgugagcggcaacugcgacguggugaucggcaucgugaacaacaccguguacgauccccugcagcccgagcuggacagcuucaaggaggagcuggacaaguacuucaagaaucacaccagccccgacguggaccugggcgacaucagcggcaucaacgccagcguggugaacauccagaaggagaucgaucggcugaacgagguggccaagaaccugaacgagagccugaucgaccugcaggagcugggcaaguacgagcaguacaucaaguggcccugguacaucuggcugggcuucaucgccggccugaucgccaucgugauggugaccaucaugcugugcugcaugaccagcugcugcagcugccugaagggcuguugcagcugcggcagcugcugcaaguucgacgaggacgacagcgagcccgugcugaagggcgugaagcugcacuacaccugaggacuaguuauaagacugacuagcccgaugggccucccaacgggcccuccuccccuccuugcaccgagagaucuaaaaaaaaaaaaaaaaaaaaaaaaaaaaaaaaaaaaaaaaaaaaaaaaaaaaaaaaaaaaaaaaaaaaaaaaaaaaaaaaaaaaaaaaaaaaaaaaaaaa

SEQ ID NO: 25987 - RNA, 4002 nt, Artificial Sequence
  SARS-CoV-2/Wuhan/WIV05/2019__EPI_ISL_402128 spike protein mRNA gc (1-1273)(K986P_V987P_K986P_V987P_L18F_D80A_D215G_L242del_A243del_ L244del_R246I_K417N_E484K_N501Y_D614G_A701V)
aggagaaagcuuaccauguucguguuccuggugcugcugccccuggugagcagccagugcgugaacuucaccacccggacccagcugccaccagccuacaccaacagcuucacccggggcgucuacuaccccgacaagguguuccggagcagcguccugcacagcacccaggaccuguuccugcccuucuucagcaacgugaccugguuccacgccauccacgugagcggcaccaacggcaccaagcgguucgccaaccccgugcugcccuucaacgacggcguguacuucgccagcaccgagaagagcaacaucauccggggcuggaucuucggcaccacccuggacagcaagacccagagccugcugaucgugaauaacgccaccaacguggugaucaaggugugcgaguuccaguucugcaacgaccccuuccugggcguguacuaccacaagaacaacaagagcuggauggagagcgaguuccggguguacagcagcgccaacaacugcaccuucgaguacgugagccagcccuuccugauggaccuggagggcaagcagggcaacuucaagaaccugcgggaguucguguucaagaacaucgacggcuacuucaagaucuacagcaagcacaccccaaucaaccuggugcggggccugccccagggcuucucagcccuggagccccugguggaccugcccaucggcaucaacaucacccgguuccagacccugcacaucagcuaccugaccccaggcgacagcagcagcggguggacagcaggcgcggcugcuuacuacgugggcuaccugcagccccggaccuuccugcugaaguacaacgagaacggcaccaucaccgacgccguggacugcgcccuggacccucugagcgagaccaagugcacccugaagagcuucaccguggagaagggcaucuaccagaccagcaacuuccgggugcagcccaccgagagcaucgugcgguuccccaacaucaccaaccugugccccuucggcgagguguucaacgccacccgguucgccagcguguacgccuggaaccggaagcggaucagcaacugcguggccgacuacagcgugcuguacaacagcgccagcuucagcaccuucaagugcuacggcgugagccccaccaagcugaacgaccugugcuucaccaacguguacgccgacagcuucgugauccguggcgacgaggugcggcagaucgcacccggccagacaggcaacaucgccgacuacaacuacaagcugcccgacgacuucaccggcugcgugaucgccuggaacagcaacaaccucgacagcaaggugggcggcaacuacaacuaccuguaccggcuguuccggaagagcaaccugaagcccuucgagcgggacaucagcaccgagaucuaccaagccggcuccaccccuugcaacggcgugaagggcuucaacugcuacuucccucugcagagcuacggcuuccagcccaccuacggcgugggcuaccagcccuaccgggugguggugcugagcuucgagcugcugcacgccccagccaccguguguggccccaagaagagcaccaaccuggugaagaacaagugcgugaacuucaacuucaacggccuuaccggcaccggcgugcugaccgagagcaacaagaaauuccugcccuuucagcaguucggccgggacaucgccgacaccaccgacgcugugcgggauccccagacccuggagauccuggacaucaccccuugcagcuucggcggcgugagcgugaucaccccaggcaccaacaccagcaaccagguggccgugcuguaccagggcgugaacugcaccgaggugcccguggccauccacgccgaccagcugacacccaccuggcgggucuacagcaccggcagcaacguguuccagacccgggccgguugccugaucggcgccgagcacgugaacaacagcuacgagugcgacauccccaucggcgccggcaucugugccagcuaccagacccagaccaauucaccccggagggcaaggagcguggccagccagagcaucaucgccuacaccaugagccugggcguggagaacagcguggccuacagcaacaacagcaucgccauccccaccaacuucaccaucagcgugaccaccgagauucugcccgugagcaugaccaagaccagcguggacugcaccauguacaucugcggcgacagcaccgagugcagcaaccugcugcugcaguacggcagcuucugcacccagcugaaccgggcccugaccggcaucgccguggagcaggacaagaacacccaggagguguucgcccaggugaagcagaucuacaagaccccucccaucaaggacuucggcggcuucaacuucagccagauccugcccgaccccagcaagcccagcaagcggagcuucaucgaggaccugcuguucaacaaggugacccuagccgacgccggcuucaucaagcaguacggcgacugccucggcgacauagccgcccgggaccugaucugcgcccagaaguucaacggccugaccgugcugccuccccugcugaccgacgagaugaucgcccaguacaccagcgcccuguuagccggaaccaucaccagcggcuggacuuucggcgcuggagccgcucugcagauccccuucgccaugcagauggccuaccgguucaacggcaucggcgugacccagaacgugcuguacgagaaccagaagcugaucgccaaccaguucaacagcgccaucggcaagauccaggacagccugagcagcaccgcuagcgcccugggcaagcugcaggacguggugaaccagaacgcccaggcccugaacacccuggugaagcagcugagcagcaacuucggcgccaucagcagcgugcugaacgacauccugagccggcuggacccucccgaggccgaggugcagaucgaccggcugaucacuggccggcugcagagccugcagaccuacgugacccagcagcugauccgggccgccgagauucgggccagcgccaaccuggccgccaccaagaugagcgagugcgugcugggccagagcaagcggguggacuucugcggcaagggcuaccaccugaugagcuuuccccagagcgcaccccacggagugguguuccugcacgugaccuacgugcccgcccaggagaagaacuucaccaccgccccagccaucugccacgacggcaaggcccacuuuccccgggagggcguguucgugagcaacggcacccacugguucgugacccagcggaacuucuacgagccccagaucaucaccaccgacaacaccuucgugagcggcaacugcgacguggugaucggcaucgugaacaacaccguguacgauccccugcagcccgagcuggacagcuucaaggaggagcuggacaaguacuucaagaaucacaccagccccgacguggaccugggcgacaucagcggcaucaacgccagcguggugaacauccagaaggagaucgaucggcugaacgagguggccaagaaccugaacgagagccugaucgaccugcaggagcugggcaaguacgagcaguacaucaaguggcccugguacaucuggcugggcuucaucgccggccugaucgccaucgugauggugaccaucaugcugugcugcaugaccagcugcugcagcugccugaagggcuguugcagcugcggcagcugcugcaaguucgacgaggacgacagcgagcccgugcugaagggcgugaagcugcacuacaccugaggacuaguuauaagacugacuagcccgaugggccucccaacgggcccuccuccccuccuugcaccgagagaucuaaaaaaaaaaaaaaaaaaaaaaaaaaaaaaaaaaaaaaaaaaaaaaaaaaaaaaaaaaaaaaaaaaaaaaaaaaaaaaaaaaaaaaaaaaaaaaaaaaaa

SEQ ID NO: 25988 - RNA, 4011 nt, Artificial Sequence
  SARS-CoV-2/Wuhan/WIV05/2019__EPI_ISL_402128 spike protein mRNA gc (1-1273)(K986P_V987P_K986P_V987P_E484K_D614G)
aggagaaagcuuaccauguucguguuccuggugcugcugccccuggugagcagccagugcgugaaccugaccacccggacccagcugccaccagccuacaccaacagcuucacccggggcgucuacuaccccgacaagguguuccggagcagcguccugcacagcacccaggaccuguuccugcccuucuucagcaacgugaccugguuccacgccauccacgugagcggcaccaacggcaccaagcgguucgacaaccccgugcugcccuucaacgacggcguguacuucgccagcaccgagaagagcaacaucauccggggcuggaucuucggcaccacccuggacagcaagacccagagccugcugaucgugaauaacgccaccaacguggugaucaaggugugcgaguuccaguucugcaacgaccccuuccugggcguguacuaccacaagaacaacaagagcuggauggagagcgaguuccggguguacagcagcgccaacaacugcaccuucgaguacgugagccagcccuuccugauggaccuggagggcaagcagggcaacuucaagaaccugcgggaguucguguucaagaacaucgacggcuacuucaagaucuacagcaagcacaccccaaucaaccuggugcgggaucugccccagggcuucucagcccuggagccccugguggaccugcccaucggcaucaacaucacccgguuccagacccugcuggcccugcaccggagcuaccugaccccaggcgacagcagcagcggguggacagcaggcgcggcugcuuacuacgugggcuaccugcagccccggaccuuccugcugaaguacaacgagaacggcaccaucaccgacgccguggacugcgcccuggacccucugagcgagaccaagugcacccugaagagcuucaccguggagaagggcaucuaccagaccagcaacuuccgggugcagcccaccgagagcaucgugcgguuccccaacaucaccaaccugugccccuucggcgagguguucaacgccacccgguucgccagcguguacgccuggaaccggaagcggaucagcaacugcguggccgacuacagcgugcuguacaacagcgccagcuucagcaccuucaagugcuacggcgugagccccaccaagcugaacgaccugugcuucaccaacguguacgccgacagcuucgugauccguggcgacgaggugcggcagaucgcacccggccagacaggcaagaucgccgacuacaacuacaagcugcccgacgacuucaccggcugcgugaucgccuggaacagcaacaaccucgacagcaaggugggcggcaacuacaacuaccuguaccggcuguuccggaagagcaaccugaagcccuucgagcgggacaucagcaccgagaucuaccaagccggcuccaccccuugcaacggcgugaagggcuucaacugcuacuucccucugcagagcuacggcuuccagcccaccaacggcgugggcuaccagcccuaccgggugguggugcugagcuucgagcugcugcacgccccagccaccguguguggccccaagaagagcaccaaccuggugaagaacaagugcgugaacuucaacuucaacggccuuaccggcaccggcgugcugaccgagagcaacaagaaauuccugcccuuucagcaguucggccgggacaucgccgacaccaccgacgcugugcgggauccccagacccuggagauccuggacaucaccccuugcagcuucggcggcgugagcgugaucaccccaggcaccaacaccagcaaccagguggccgugcuguaccagggcgugaacugcaccgaggugcccguggccauccacgccgaccagcugacacccaccuggcgggucuacagcaccggcagcaacguguuccagacccgggccgguugccugaucggcgccgagcacgugaacaacagcuacgagugcgacauccccaucggcgccggcaucugugccagcuaccagacccagaccaauucaccccggagggcaaggagcguggccagccagagcaucaucgccuacaccaugagccugggcgccgagaacagcguggccuacagcaacaacagcaucgccauccccaccaacuucaccaucagcgugaccaccgagauucugcccgugagcaugaccaagaccagcguggacugcaccauguacaucugcggcgacagcaccgagugcagcaaccugcugcugcaguacggcagcuucugcacccagcugaaccgggcccugaccggcaucgccguggagcaggacaagaacacccaggagguguucgcccaggugaagcagaucuacaagaccccucccaucaaggacuucggcggcuucaacuucagccagauccugcccgaccccagcaagcccagcaagcggagcuucaucgaggaccugcuguucaacaaggugacccuagccgacgccggcuucaucaagcaguacggcgacugccucggcgacauagccgcccgggaccugaucugcgcccagaaguucaacggccugaccgugcugccuccccugcugaccgacgagaugaucgcccaguacaccagcgcccuguuagccggaaccaucaccagcggcuggacuuucggcgcuggagccgcucugcagauccccuucgccaugcagauggccuaccgguucaacggcaucggcgugacccagaacgugcuguacgagaaccagaagcugaucgccaaccaguucaacagcgccaucggcaagauccaggacagccugagcagcaccgcuagcgcccugggcaagcugcaggacguggugaaccagaacgcccaggcccugaacacccuggugaagcagcugagcagcaacuucggcgccaucagcagcgugcugaacgacauccugagccggcuggacccucccgaggccgaggugcagaucgaccggcugaucacuggccggcugcagagccugcagaccuacgugacccagcagcugauccgggccgccgagauucgggccagcgccaaccuggccgccaccaagaugagcgagugcgugcugggccagagcaagcggguggacuucugcggcaagggcuaccaccugaugagcuuuccccagagcgcaccccacggagugguguuccugcacgugaccuacgugcccgcccaggagaagaacuucaccaccgccccagccaucugccacgacggcaaggcccacuuuccccgggagggcguguucgugagcaacggcacccacugguucgugacccagcggaacuucuacgagccccagaucaucaccaccgacaacaccuucgugagcggcaacugcgacguggugaucggcaucgugaacaacaccguguacgauccccugcagcccgagcuggacagcuucaaggaggagcuggacaaguacuucaagaaucacaccagccccgacguggaccugggcgacaucagcggcaucaacgccagcguggugaacauccagaaggagaucgaucggcugaacgagguggccaagaaccugaacgagagccugaucgaccugcaggagcugggcaaguacgagcaguacaucaaguggcccugguacaucuggcugggcuucaucgccggccugaucgccaucgugauggugaccaucaugcugugcugcaugaccagcugcugcagcugccugaagggcuguugcagcugcggcagcugcugcaaguucgacgaggacgacagcgagcccgugcugaagggcgugaagcugcacuacaccugaggacuaguuauaagacugacuagcccgaugggccucccaacgggcccuccuccccuccuugcaccgagagaucuaaaaaaaaaaaaaaaaaaaaaaaaaaaaaaaaaaaaaaaaaaaaaaaaaaaaaaaaaaaaaaaaaaaaaaaaaaaaaaaaaaaaaaaaaaaaaaaaaaaa

SEQ ID NO: 25989 - RNA, 4011 nt, Artificial Sequence
  SARS-CoV-2/Wuhan/WIV05/2019__EPI_ISL_402128 spike protein mRNA gc (1-1273)(K986P_V987P_K986P_V987P_L18F_T20N_P26S_D138Y_R190S_K417T _E484K_N501Y_D614G_H655Y_T1027I)
aggagaaagcuuaccauguucguguuccuggugcugcugccccuggugagcagccagugcgugaacuucaccaaccggacccagcugccaagcgccuacaccaacagcuucacccggggcgucuacuaccccgacaagguguuccggagcagcguccugcacagcacccaggaccuguuccugcccuucuucagcaacgugaccugguuccacgccauccacgugagcggcaccaacggcaccaagcgguucgacaaccccgugcugcccuucaacgacggcguguacuucgccagcaccgagaagagcaacaucauccggggcuggaucuucggcaccacccuggacagcaagacccagagccugcugaucgugaauaacgccaccaacguggugaucaaggugugcgaguuccaguucugcaacuaccccuuccugggcguguacuaccacaagaacaacaagagcuggauggagagcgaguuccggguguacagcagcgccaacaacugcaccuucgaguacgugagccagcccuuccugauggaccuggagggcaagcagggcaacuucaagaaccugagcgaguucguguucaagaacaucgacggcuacuucaagaucuacagcaagcacaccccaaucaaccuggugcgggaucugccccagggcuucucagcccuggagccccugguggaccugcccaucggcaucaacaucacccgguuccagacccugcuggcccugcaccggagcuaccugaccccaggcgacagcagcagcggguggacagcaggcgcggcugcuuacuacgugggcuaccugcagccccggaccuuccugcugaaguacaacgagaacggcaccaucaccgacgccguggacugcgcccuggacccucugagcgagaccaagugcacccugaagagcuucaccguggagaagggcaucuaccagaccagcaacuuccgggugcagcccaccgagagcaucgugcgguuccccaacaucaccaaccugugccccuucggcgagguguucaacgccacccgguucgccagcguguacgccuggaaccggaagcggaucagcaacugcguggccgacuacagcgugcuguacaacagcgccagcuucagcaccuucaagugcuacggcgugagccccaccaagcugaacgaccugugcuucaccaacguguacgccgacagcuucgugauccguggcgacgaggugcggcagaucgcacccggccagacaggcaccaucgccgacuacaacuacaagcugcccgacgacuucaccggcugcgugaucgccuggaacagcaacaaccucgacagcaaggugggcggcaacuacaacuaccuguaccggcuguuccggaagagcaaccugaagcccuucgagcgggacaucagcaccgagaucuaccaagccggcuccaccccuugcaacggcgugaagggcuucaacugcuacuucccucugcagagcuacggcuuccagcccaccuacggcgugggcuaccagcccuaccgggugguggugcugagcuucgagcugcugcacgccccagccaccguguguggccccaagaagagcaccaaccuggugaagaacaagugcgugaacuucaacuucaacggccuuaccggcaccggcgugcugaccgagagcaacaagaaauuccugcccuuucagcaguucggccgggacaucgccgacaccaccgacgcugugcgggauccccagacccuggagauccuggacaucaccccuugcagcuucggcggcgugagcgugaucaccccaggcaccaacaccagcaaccagguggccgugcuguaccagggcgugaacugcaccgaggugcccguggccauccacgccgaccagcugacacccaccuggcgggucuacagcaccggcagcaacguguuccagacccgggccgguugccugaucggcgccgaguacgugaacaacagcuacgagugcgacauccccaucggcgccggcaucugugccagcuaccagacccagaccaauucaccccggagggcaaggagcguggccagccagagcaucaucgccuacaccaugagccugggcgccgagaacagcguggccuacagcaacaacagcaucgccauccccaccaacuucaccaucagcgugaccaccgagauucugcccgugagcaugaccaagaccagcguggacugcaccauguacaucugcggcgacagcaccgagugcagcaaccugcugcugcaguacggcagcuucugcacccagcugaaccgggcccugaccggcaucgccguggagcaggacaagaacacccaggagguguucgcccaggugaagcagaucuacaagaccccucccaucaaggacuucggcggcuucaacuucagccagauccugcccgaccccagcaagcccagcaagcggagcuucaucgaggaccugcuguucaacaaggugacccuagccgacgccggcuucaucaagcaguacggcgacugccucggcgacauagccgcccgggaccugaucugcgcccagaaguucaacggccugaccgugcugccuccccugcugaccgacgagaugaucgcccaguacaccagcgcccuguuagccggaaccaucaccagcggcuggacuuucggcgcuggagccgcucugcagauccccuucgccaugcagauggccuaccgguucaacggcaucggcgugacccagaacgugcuguacgagaaccagaagcugaucgccaaccaguucaacagcgccaucggcaagauccaggacagccugagcagcaccgcuagcgcccugggcaagcugcaggacguggugaaccagaacgcccaggcccugaacacccuggugaagcagcugagcagcaacuucggcgccaucagcagcgugcugaacgacauccugagccggcuggacccucccgaggccgaggugcagaucgaccggcugaucacuggccggcugcagagccugcagaccuacgugacccagcagcugauccgggccgccgagauucgggccagcgccaaccuggccgccaucaagaugagcgagugcgugcugggccagagcaagcggguggacuucugcggcaagggcuaccaccugaugagcuuuccccagagcgcaccccacggagugguguuccugcacgugaccuacgugcccgcccaggagaagaacuucaccaccgccccagccaucugccacgacggcaaggcccacuuuccccgggagggcguguucgugagcaacggcacccacugguucgugacccagcggaacuucuacgagccccagaucaucaccaccgacaacaccuucgugagcggcaacugcgacguggugaucggcaucgugaacaacaccguguacgauccccugcagcccgagcuggacagcuucaaggaggagcuggacaaguacuucaagaaucacaccagccccgacguggaccugggcgacaucagcggcaucaacgccagcguggugaacauccagaaggagaucgaucggcugaacgagguggccaagaaccugaacgagagccugaucgaccugcaggagcugggcaaguacgagcaguacaucaaguggcccugguacaucuggcugggcuucaucgccggccugaucgccaucgugauggugaccaucaugcugugcugcaugaccagcugcugcagcugccugaagggcuguugcagcugcggcagcugcugcaaguucgacgaggacgacagcgagcccgugcugaagggcgugaagcugcacuacaccugaggacuaguuauaagacugacuagcccgaugggccucccaacgggcccuccuccccuccuugcaccgagagaucuaaaaaaaaaaaaaaaaaaaaaaaaaaaaaaaaaaaaaaaaaaaaaaaaaaaaaaaaaaaaaaaaaaaaaaaaaaaaaaaaaaaaaaaaaaaaaaaaaaaa

SEQ ID NO: 25990 - RNA, 4011 nt, Artificial Sequence
  SARS-CoV-2/Wuhan/WIV05/2019__EPI_ISL_402128 spike protein mRNA gc (1-1273)(K986P_V987P_K986P_V987P_S13I_W152C_L452R_D614G)
aggagaaagcuuaccauguucguguuccuggugcugcugccccuggugagcauccagugcgugaaccugaccacccggacccagcugccaccagccuacaccaacagcuucacccggggcgucuacuaccccgacaagguguuccggagcagcguccugcacagcacccaggaccuguuccugcccuucuucagcaacgugaccugguuccacgccauccacgugagcggcaccaacggcaccaagcgguucgacaaccccgugcugcccuucaacgacggcguguacuucgccagcaccgagaagagcaacaucauccggggcuggaucuucggcaccacccuggacagcaagacccagagccugcugaucgugaauaacgccaccaacguggugaucaaggugugcgaguuccaguucugcaacgaccccuuccugggcguguacuaccacaagaacaacaagagcugcauggagagcgaguuccggguguacagcagcgccaacaacugcaccuucgaguacgugagccagcccuuccugauggaccuggagggcaagcagggcaacuucaagaaccugcgggaguucguguucaagaacaucgacggcuacuucaagaucuacagcaagcacaccccaaucaaccuggugcgggaucugccccagggcuucucagcccuggagccccugguggaccugcccaucggcaucaacaucacccgguuccagacccugcuggcccugcaccggagcuaccugaccccaggcgacagcagcagcggguggacagcaggcgcggcugcuuacuacgugggcuaccugcagccccggaccuuccugcugaaguacaacgagaacggcaccaucaccgacgccguggacugcgcccuggacccucugagcgagaccaagugcacccugaagagcuucaccguggagaagggcaucuaccagaccagcaacuuccgggugcagcccaccgagagcaucgugcgguuccccaacaucaccaaccugugccccuucggcgagguguucaacgccacccgguucgccagcguguacgccuggaaccggaagcggaucagcaacugcguggccgacuacagcgugcuguacaacagcgccagcuucagcaccuucaagugcuacggcgugagccccaccaagcugaacgaccugugcuucaccaacguguacgccgacagcuucgugauccguggcgacgaggugcggcagaucgcacccggccagacaggcaagaucgccgacuacaacuacaagcugcccgacgacuucaccggcugcgugaucgccuggaacagcaacaaccucgacagcaaggugggcggcaacuacaacuaccgcuaccggcuguuccggaagagcaaccugaagcccuucgagcgggacaucagcaccgagaucuaccaagccggcuccaccccuugcaacggcguggagggcuucaacugcuacuucccucugcagagcuacggcuuccagcccaccaacggcgugggcuaccagcccuaccgggugguggugcugagcuucgagcugcugcacgccccagccaccguguguggccccaagaagagcaccaaccuggugaagaacaagugcgugaacuucaacuucaacggccuuaccggcaccggcgugcugaccgagagcaacaagaaauuccugcccuuucagcaguucggccgggacaucgccgacaccaccgacgcugugcgggauccccagacccuggagauccuggacaucaccccuugcagcuucggcggcgugagcgugaucaccccaggcaccaacaccagcaaccagguggccgugcuguaccagggcgugaacugcaccgaggugcccguggccauccacgccgaccagcugacacccaccuggcgggucuacagcaccggcagcaacguguuccagacccgggccgguugccugaucggcgccgagcacgugaacaacagcuacgagugcgacauccccaucggcgccggcaucugugccagcuaccagacccagaccaauucaccccggagggcaaggagcguggccagccagagcaucaucgccuacaccaugagccugggcgccgagaacagcguggccuacagcaacaacagcaucgccauccccaccaacuucaccaucagcgugaccaccgagauucugcccgugagcaugaccaagaccagcguggacugcaccauguacaucugcggcgacagcaccgagugcagcaaccugcugcugcaguacggcagcuucugcacccagcugaaccgggcccugaccggcaucgccguggagcaggacaagaacacccaggagguguucgcccaggugaagcagaucuacaagaccccucccaucaaggacuucggcggcuucaacuucagccagauccugcccgaccccagcaagcccagcaagcggagcuucaucgaggaccugcuguucaacaaggugacccuagccgacgccggcuucaucaagcaguacggcgacugccucggcgacauagccgcccgggaccugaucugcgcccagaaguucaacggccugaccgugcugccuccccugcugaccgacgagaugaucgcccaguacaccagcgcccuguuagccggaaccaucaccagcggcuggacuuucggcgcuggagccgcucugcagauccccuucgccaugcagauggccuaccgguucaacggcaucggcgugacccagaacgugcuguacgagaaccagaagcugaucgccaaccaguucaacagcgccaucggcaagauccaggacagccugagcagcaccgcuagcgcccugggcaagcugcaggacguggugaaccagaacgcccaggcccugaacacccuggugaagcagcugagcagcaacuucggcgccaucagcagcgugcugaacgacauccugagccggcuggacccucccgaggccgaggugcagaucgaccggcugaucacuggccggcugcagagccugcagaccuacgugacccagcagcugauccgggccgccgagauucgggccagcgccaaccuggccgccaccaagaugagcgagugcgugcugggccagagcaagcggguggacuucugcggcaagggcuaccaccugaugagcuuuccccagagcgcaccccacggagugguguuccugcacgugaccuacgugcccgcccaggagaagaacuucaccaccgccccagccaucugccacgacggcaaggcccacuuuccccgggagggcguguucgugagcaacggcacccacugguucgugacccagcggaacuucuacgagccccagaucaucaccaccgacaacaccuucgugagcggcaacugcgacguggugaucggcaucgugaacaacaccguguacgauccccugcagcccgagcuggacagcuucaaggaggagcuggacaaguacuucaagaaucacaccagccccgacguggaccugggcgacaucagcggcaucaacgccagcguggugaacauccagaaggagaucgaucggcugaacgagguggccaagaaccugaacgagagccugaucgaccugcaggagcugggcaaguacgagcaguacaucaaguggcccugguacaucuggcugggcuucaucgccggccugaucgccaucgugauggugaccaucaugcugugcugcaugaccagcugcugcagcugccugaagggcuguugcagcugcggcagcugcugcaaguucgacgaggacgacagcgagcccgugcugaagggcgugaagcugcacuacaccugaggacuaguuauaagacugacuagcccgaugggccucccaacgggcccuccuccccuccuugcaccgagagaucuaaaaaaaaaaaaaaaaaaaaaaaaaaaaaaaaaaaaaaaaaaaaaaaaaaaaaaaaaaaaaaaaaaaaaaaaaaaaaaaaaaaaaaaaaaaaaaaaaaaa

SEQ ID NO: 25991 - RNA, 4011 nt, Artificial Sequence
  SARS-CoV-2/Wuhan/WIV05/2019__EPI_ISL_402128 spike protein mRNA gc (1-1273)(K986P_V987P)
aggagaaagcuuaccauguucguguuccuggugcugcugccccuggugagcagccagugcgugaaccugaccacccggacccagcugcccccugccuacaccaacagcuucacccggggcguguacuaccccgacaagguguuccggagcagcgugcugcacagcacccaggaccuguuccugcccuucuucagcaacgugaccugguuccacgccauccacgugagcggcaccaacggcaccaagcgguucgacaacccagugcugcccuucaacgacggcguguacuucgccagcaccgagaagucaaacaucauccggggcuggaucuucggcaccacccuggacagcaagacacagagccugcugaucgugaacaacgccaccaacguggugaucaaggugugcgaguuucaguucugcaacgaccccuuccugggcguguacuaccacaagaacaacaagagcuggauggagagcgaguuccgggucuacagcagcgcuaacaauugcaccuucgaguacgugagccagcccuuccugauggaccucgagggcaagcagggcaacuucaagaaccugcgggaguucguguucaagaacaucgauggcuacuucaagaucuacagcaagcacacccccaucaaccuggugcgggaccugccccagggauucagcgcccuggagccucugguggaccugcccaucggcaucaacaucaccagguuccagacccugcuggcccugcaccggagcuaccugacccccggcgacagcagcagcggcuggaccgccggcgccgccgcauacuacgugggcuaccugcagccacggaccuuccugcugaaguacaacgagaacggcaccaucaccgacgccguggacugcgcccuggacccccugagcgagaccaagugcacccuaaagagcuucaccguggagaagggcaucuaccagaccagcaacuuccgggugcagcccacugagagcaucgugcgguuccccaacauuaccaaccugugucccuucggcgagguguucaacgccacccgguucgccagcguguacgccuggaaccggaagcggaucagcaacugcguggccgacuacagcgugcuguacaacagcgccagcuucagcaccuucaagugcuacggcgugagcccuaccaagcugaacgaccugugcuucaccaacguguacgcugacagcuucgugauccggggcgacgaggugcggcagaucgcccccggccagaccggcaagaucgccgacuacaacuacaagcugcccgacgacuucaccggcugcgugaucgccuggaacagcaacaaccuggacagcaaggugggcggcaacuacaacuaccuguaccggcuguuccguaagagcaaccugaagccauucgagcgggacaucagcaccgagaucuaccaggccggcagcacccccugcaacgguguggagggcuuuaacugcuacuucccccugcagagcuacggcuuccagcccaccaacggcgugggcuaccagcccuaccgggugguggugcugagcuucgagcugcugcacgcccccgccaccgugugcggcccuaaaaagagcaccaaccuggugaagaacaagugcgugaacuucaauuucaacggccugaccggcaccggcgugcugaccgagagcaacaagaaguuccugcccuuccagcaguucggccgggauaucgccgacaccaccgacgcagugcgggacccccagacccuggagauccuggacaucaccccaugcagcuucggcggcgugagcgucaucacccccggcacaaacaccagcaaccagguggccgugcuguaccaggacgugaacugcaccgaggugcccguggccauccacgccgaccagcugacccccaccuggcggguguacagcaccggaagcaacguguuccagacccgggccggcugccugaucggcgccgagcacgugaacaacuccuacgagugcgacauccccaucggcgcuggcaucugcgccagcuaccagacccagaccaacagcccccggcgggcccggagcguggccagccagagcaucaucgccuacaccaugagcuuaggcgccgagaacagcguggccuacagcaacaacagcaucgcgaucccuaccaacuucaccaucagcgugaccaccgagauacugcccgugagcaugaccaagaccagcguggacuguaccauguacaucugcggcgacagcaccgagugcagcaaccugcugcugcaguacggcagcuucugcacccagcugaaccgggcccugaccggcaucgccguggagcaggacaagaacacccaagagguguucgcccaggugaagcagaucuacaagacucccccaaucaaggacuucggcggcuucaacuucagccagauccugcccgaccccagcaagcccagcaagcggagcuucaucgaggaccugcuguucaacaaggugacccuggccgacgccggcuucaucaagcaguacggcgauugccugggcgacaucgccgcucgggaccugaucugcgcccagaaguucaacgggcugaccgugcugcccccucugcugaccgacgagaugaucgcccaguacaccagcgcccugcuugccggcaccaucaccagcggcuggaccuucggcgccggcgcagcccugcagauccccuucgccaugcagauggccuaccgguucaacggcaucggcgugacccagaacgugcuguacgagaaccagaagcugaucgccaaccaguucaacagcgccaucggcaagauccaggacagccugagcagcaccgccagcgcccugggcaagcugcaggacguggugaaccagaacgcucaggcccugaacacccuggugaagcagcugagcagcaacuucggcgccaucagcucagugcugaaugacauccugagcaggcuggaucccccagaggccgaggugcagaucgaccggcugaucaccggccggcugcagagccugcagaccuacgugacccagcagcugauccgggccgccgagauccgggccagcgccaaccuggcagccaccaagaugagcgagugcgugcugggccagagcaagcggguggacuuuugcggcaagggcuaccaccugaugagcuucccccagagcgcuccccacggcgugguguuccuccacgugacauacguccccgcccaggagaagaacuucaccaccgcccccgccauuugccacgacggcaaggcccacuucccccgggagggcguguucgugagcaacggaacccacugguucgugacccagcggaacuucuacgagccucagaucaucaccaccgacaacaccuucgugagcggcaacugcgacguggugaucggcaucgugaacaacaccguguacgacccccugcagcccgagcuggacagcuucaaggaggagcuggacaaguacuucaagaaccacaccagcccagacguggaccugggcgacaucagcggcaucaacgccagcguggugaacauccagaaggagaucgaccggcugaacgagguggccaagaaccugaacgagagccugaucgaccugcaggagcugggcaaguacgagcaguacaucaaguggcccugguacaucuggcugggcuucaucgccggccugaucgccaucgugauggugaccaucaugcugugcugcaugaccagcugcuguagcugccugaagggcugcugcagcugcggcagcugcugcaaguucgacgaggacgacagcgagcccgugcugaagggcgugaagcugcacuacaccugaggacuaguuauaagacugacuagcccgaugggccucccaacgggcccuccuccccuccuugcaccgagagaucuaaaaaaaaaaaaaaaaaaaaaaaaaaaaaaaaaaaaaaaaaaaaaaaaaaaaaaaaaaaaaaaaaaaaaaaaaaaaaaaaaaaaaaaaaaaaaaaaaaaa

SEQ ID NO: 25992 - RNA, 4011 nt, Artificial Sequence
  SARS-CoV-2/Wuhan/WIV05/2019__EPI_ISL_402128 spike protein mRNA gc (1-1273)(K986P_V987P_ D614G)
aggagaaagcuuaccauguucguguuccuggugcugcugccccuggugagcagccagugcgugaaccugaccacccggacccagcugcccccugccuacaccaacagcuucacccggggcguguacuaccccgacaagguguuccggagcagcgugcugcacagcacccaggaccuguuccugcccuucuucagcaacgugaccugguuccacgccauccacgugagcggcaccaacggcaccaagcgguucgacaacccagugcugcccuucaacgacggcguguacuucgccagcaccgagaagucaaacaucauccggggcuggaucuucggcaccacccuggacagcaagacacagagccugcugaucgugaacaacgccaccaacguggugaucaaggugugcgaguuucaguucugcaacgaccccuuccugggcguguacuaccacaagaacaacaagagcuggauggagagcgaguuccgggucuacagcagcgcuaacaauugcaccuucgaguacgugagccagcccuuccugauggaccucgagggcaagcagggcaacuucaagaaccugcgggaguucguguucaagaacaucgauggcuacuucaagaucuacagcaagcacacccccaucaaccuggugcgggaccugccccagggauucagcgcccuggagccucugguggaccugcccaucggcaucaacaucaccagguuccagacccugcuggcccugcaccggagcuaccugacccccggcgacagcagcagcggcuggaccgccggcgccgccgcauacuacgugggcuaccugcagccacggaccuuccugcugaaguacaacgagaacggcaccaucaccgacgccguggacugcgcccuggacccccugagcgagaccaagugcacccuaaagagcuucaccguggagaagggcaucuaccagaccagcaacuuccgggugcagcccacugagagcaucgugcgguuccccaacauuaccaaccugugucccuucggcgagguguucaacgccacccgguucgccagcguguacgccuggaaccggaagcggaucagcaacugcguggccgacuacagcgugcuguacaacagcgccagcuucagcaccuucaagugcuacggcgugagcccuaccaagcugaacgaccugugcuucaccaacguguacgcugacagcuucgugauccggggcgacgaggugcggcagaucgcccccggccagaccggcaagaucgccgacuacaacuacaagcugcccgacgacuucaccggcugcgugaucgccuggaacagcaacaaccuggacagcaaggugggcggcaacuacaacuaccuguaccggcuguuccguaagagcaaccugaagccauucgagcgggacaucagcaccgagaucuaccaggccggcagcacccccugcaacgguguggagggcuuuaacugcuacuucccccugcagagcuacggcuuccagcccaccaacggcgugggcuaccagcccuaccgggugguggugcugagcuucgagcugcugcacgcccccgccaccgugugcggcccuaaaaagagcaccaaccuggugaagaacaagugcgugaacuucaauuucaacggccugaccggcaccggcgugcugaccgagagcaacaagaaguuccugcccuuccagcaguucggccgggauaucgccgacaccaccgacgcagugcgggacccccagacccuggagauccuggacaucaccccaugcagcuucggcggcgugagcgucaucacccccggcacaaacaccagcaaccagguggccgugcuguaccagggagugaacugcaccgaggugcccguggccauccacgccgaccagcugacccccaccuggcggguguacagcaccggcagcaacguguuccagacccgggccggcugccugaucggcgccgagcacgugaacaacuccuacgagugcgacauccccaucggcgcuggcaucugcgccagcuaccagacccagaccaacagcccccggcgggcccggagcguggccagccagagcaucaucgccuacaccaugagcuuaggcgccgagaacagcguggccuacagcaacaacagcaucgcgaucccuaccaacuucaccaucagcgugaccaccgagauacugcccgugagcaugaccaagaccagcguggacuguaccauguacaucugcggcgacagcaccgagugcagcaaccugcugcugcaguacggcagcuucugcacccagcugaaccgggcccugaccggcaucgccguggagcaggacaagaacacccaagagguguucgcccaggugaagcagaucuacaagacucccccaaucaaggacuucggcggcuucaacuucagccagauccugcccgaccccagcaagcccagcaagcggagcuucaucgaggaccugcuguucaacaaggugacccuggccgacgccggcuucaucaagcaguacggcgacugccugggggauaucgccgcucgggaccugaucugcgcccagaaguucaacggccugaccgugcugcccccucugcugaccgacgagaugaucgcccaguacaccagcgcccugcuugccggcaccaucaccagcggcuggaccuucggcgccggcgcagcccugcagauccccuucgccaugcagauggccuaccgguucaacggcaucggcgugacccagaacgugcuguacgagaaccagaagcugaucgccaaccaguucaacagcgccaucggcaagauccaggacagccugagcagcaccgccagcgcccugggcaagcugcaggacguggugaaccagaacgcucaggcccugaacacccuggugaagcagcugagcagcaacuucggcgccaucagcucagugcugaaugacauccugagcaggcuggaucccccagaggccgaggugcagaucgaccggcugaucaccggccggcugcagagccugcagaccuacgugacccagcagcugauccgggccgccgagauccgggccagcgccaaccuggcagccaccaagaugagcgagugcgugcugggccagagcaagcggguggacuuuugcggcaagggcuaccaccugaugagcuucccccagagcgcuccccacggcgugguguuccuccacgugacauacguccccgcccaggagaagaacuucaccaccgcccccgccauuugccacgacggcaaggcccacuucccccgggagggaguguucgugagcaacggcacccacugguucgugacccagcggaacuucuacgagccucagaucaucaccaccgacaacaccuucgugagcggcaacugcgacguggugaucggcaucgugaacaacaccguguacgacccccugcagcccgagcuggacagcuucaaggaggagcuggacaaguacuucaagaaccacaccagcccagacguggaccugggcgacaucagcggcaucaacgccagcguggugaacauccagaaggagaucgaccggcugaacgagguggccaagaaccugaacgagagccugaucgaccugcaggagcugggcaaguacgagcaguacaucaaguggcccugguacaucuggcugggcuucaucgccggccugaucgccaucgugauggugaccaucaugcugugcugcaugaccagcugcuguagcugccugaagggcugcugcagcugcggcagcugcugcaaguucgacgaggacgacagcgagcccgugcugaagggcgugaagcugcacuacaccugaggacuaguuauaagacugacuagcccgaugggccucccaacgggcccuccuccccuccuugcaccgagagaucuaaaaaaaaaaaaaaaaaaaaaaaaaaaaaaaaaaaaaaaaaaaaaaaaaaaaaaaaaaaaaaaaaaaaaaaaaaaaaaaaaaaaaaaaaaaaaaaaaaaa

SEQ ID NO: 25993 - RNA, 4011 nt, Artificial Sequence
  SARS-CoV-2/Wuhan/WIV05/2019__EPI_ISL_402128 spike protein mRNA gc (1-1273)(K986P_V987P_A222V_D614G)
aggagaaagcuuaccauguucguguuccuggugcugcugccccuggugagcagccagugcgugaaccugaccacccggacccagcugcccccugccuacaccaacagcuucacccggggcguguacuaccccgacaagguguuccggagcagcgugcugcacagcacccaggaccuguuccugcccuucuucagcaacgugaccugguuccacgccauccacgugagcggcaccaacggcaccaagcgguucgacaacccagugcugcccuucaacgacggcguguacuucgccagcaccgagaagucaaacaucauccggggcuggaucuucggcaccacccuggacagcaagacacagagccugcugaucgugaacaacgccaccaacguggugaucaaggugugcgaguuucaguucugcaacgaccccuuccugggcguguacuaccacaagaacaacaagagcuggauggagagcgaguuccgggucuacagcagcgcuaacaauugcaccuucgaguacgugagccagcccuuccugauggaccucgagggcaagcagggcaacuucaagaaccugcgggaguucguguucaagaacaucgauggcuacuucaagaucuacagcaagcacacccccaucaaccuggugcgggaccugccccagggauucagcgugcuggagccucugguggaccugcccaucggcaucaacaucaccagguuccagacccugcuggcccugcaccggagcuaccugacccccggcgacagcagcagcggcuggaccgccggcgccgccgccuacuacgugggcuaccugcagccacggaccuuccugcugaaguacaacgagaacggcaccaucaccgacgcaguggacugcgcccuggacccccugagcgagaccaagugcacccuaaagagcuucaccguggagaagggcaucuaccagaccagcaacuuccgggugcagcccacugagagcaucgugcgguuccccaacauuaccaaccugugucccuucggcgagguguucaacgccacccgguucgccagcguguacgccuggaaccggaagcggaucagcaacugcguggccgacuacagcgugcuguacaacagcgccagcuucagcaccuucaagugcuacggcgugagcccuaccaagcugaacgaccugugcuucaccaacguguacgccgacagcuucgugauccggggcgacgaggugcggcagaucgcucccggccagaccggcaagaucgccgacuacaacuacaagcugcccgacgacuucaccggcugcgugaucgccuggaacagcaacaaccuggacagcaaggugggcggcaacuacaacuaccuguaccggcuguuccguaagagcaaccugaagccauucgagcgggacaucagcaccgagaucuaccaggccggcagcacccccugcaacgguguggagggcuuuaacugcuacuucccccugcagagcuacggcuuccagcccaccaacggcgugggcuaccagcccuaccgggugguggugcugagcuucgagcugcugcacgcccccgccaccgugugcggcccuaaaaagagcaccaaccuggugaagaacaagugcgugaacuucaauuucaacggccugaccggcaccggcgugcugaccgagagcaacaagaaguuccugcccuuccagcaguucggccgggauaucgccgacaccaccgacgccgugcgggacccccagacccuggagauccuggacaucaccccaugcagcuucggcggcgucagcgugaucacccccggcacaaacaccagcaaccagguggcagugcuguaccagggagugaacugcaccgaggugcccguggccauccacgccgaccagcugacccccaccuggcggguguacagcaccggcagcaacguguuccagacccgggccggcugccugaucggcgccgagcacgugaacaacuccuacgagugcgacauccccaucggcgccggcaucugcgcuagcuaccagacccagaccaacagcccccggcgggcccggagcguggccagccagagcaucaucgccuacaccaugagcuuaggcgccgagaacagcguggccuacagcaacaacagcaucgccaucccuaccaacuucaccaucagcgugaccaccgagauacugcccgugagcaugaccaagaccagcguggacuguaccauguacaucugcggcgacagcaccgagugcagcaaccugcugcugcaguacggcagcuucugcacccagcugaaccgggcgcugaccggcaucgccguggagcaggacaagaacacccaagagguguucgcccaggugaagcagaucuacaagacucccccaaucaaggacuucggcggcuucaacuucagccagauccugcccgaccccagcaagcccagcaagcggagcuucaucgaggaccugcuguucaacaaggugacccuggccgacgccggcuucaucaagcaguacggcgacugccugggggauaucgccgcccgggaccugaucugcgcucagaaguucaacggccugaccgugcugcccccucugcugaccgacgagaugaucgcccaguacaccagcgcccugcuugccggcaccaucaccagcggcuggaccuucggcgccggcgccgcacugcagauccccuucgccaugcagauggccuaccgguucaacggcaucggcgugacccagaacgugcuguacgagaaccagaagcugaucgccaaccaguucaacagcgccaucggcaagauccaggacagccugagcagcaccgccagcgcccugggcaagcugcaggacguggugaaccagaacgcccaggcucugaacacccuggugaagcagcugagcagcaacuucggcgccaucagcucagugcugaaugacauccugagcaggcuggaucccccagaggccgaggugcagaucgaccggcugaucaccggccggcugcagagccugcagaccuacgugacccagcagcugauccgggccgccgagauccgggccagcgccaaccuggccgcaaccaagaugagcgagugcgugcugggccagagcaagcggguggacuuuugcggcaagggcuaccaccugaugagcuucccccagagcgcuccccacggcgugguguuccuccacgucacauacgugcccgcccaggagaagaacuucaccaccgcccccgccauuugccacgacggcaaggcccacuucccccgggagggaguguucgugagcaacggcacccacugguucgugacccagcggaacuucuacgagccucagaucaucaccaccgacaacaccuucgugagcggcaacugcgacguggugaucggcaucgugaacaacaccguguacgacccccugcagcccgagcuggacagcuucaaggaggagcuggacaaguacuucaagaaccacaccagcccagacguggaccugggcgacaucagcggcaucaacgccagcguggugaacauccagaaggagaucgaccggcugaacgagguggccaagaaccugaacgagagccugaucgaccugcaggagcugggcaaguacgagcaguacaucaaguggcccugguacaucuggcugggcuucaucgccggccugaucgccaucgugauggugaccaucaugcugugcugcaugaccagcugcuguagcugccugaagggcugcugcagcugcggcagcugcugcaaguucgacgaggacgacagcgagcccgugcugaagggcgugaagcugcacuacaccugaggacuaguuauaagacugacuagcccgaugggccucccaacgggcccuccuccccuccuugcaccgagagaucuaaaaaaaaaaaaaaaaaaaaaaaaaaaaaaaaaaaaaaaaaaaaaaaaaaaaaaaaaaaaaaaaaaaaaaaaaaaaaaaaaaaaaaaaaaaaaaaaaaaa

SEQ ID NO: 25994 - RNA, 4011 nt, Artificial Sequence
  SARS-CoV-2/Wuhan/WIV05/2019__EPI_ISL_402128 spike protein mRNA gc (1-1273)(K986P_V987P_N439K_D614G)
aggagaaagcuuaccauguucguguuccuggugcugcugccccuggugagcagccagugcgugaaccugaccacccggacccagcugcccccugccuacaccaacagcuucacccggggcguguacuaccccgacaagguguuccggagcagcgugcugcacagcacccaggaccuguuccugcccuucuucagcaacgugaccugguuccacgccauccacgugagcggcaccaacggcaccaagcgguucgacaacccagugcugcccuucaacgacggcguguacuucgccagcaccgagaagucaaacaucauccggggcuggaucuucggcaccacccuggacagcaagacacagagccugcugaucgugaacaacgccaccaacguggugaucaaggugugcgaguuucaguucugcaacgaccccuuccugggcguguacuaccacaagaacaacaagagcuggauggagagcgaguuccgggucuacagcagcgcuaacaauugcaccuucgaguacgugagccagcccuuccugauggaccucgagggcaagcagggcaacuucaagaaccugcgggaguucguguucaagaacaucgauggcuacuucaagaucuacagcaagcacacccccaucaaccuggugcgggaccugccccagggauucagcgcccuggagccucugguggaccugcccaucggcaucaacaucaccagguuccagacccugcuggcccugcaccggagcuaccugacccccggcgacagcagcagcggcuggaccgccggcgccgccgcauacuacgugggcuaccugcagccacggaccuuccugcugaaguacaacgagaacggcaccaucaccgacgccguggacugcgcccuggacccccugagcgagaccaagugcacccuaaagagcuucaccguggagaagggcaucuaccagaccagcaacuuccgggugcagcccacugagagcaucgugcgguuccccaacauuaccaaccugugucccuucggcgagguguucaacgccacccgguucgccagcguguacgccuggaaccggaagcggaucagcaacugcguggccgacuacagcgugcuguacaacagcgccagcuucagcaccuucaagugcuacggcgugagcccuaccaagcugaacgaccugugcuucaccaacguguacgcugacagcuucgugauccggggcgacgaggugcggcagaucgcccccggccagaccggcaagaucgccgacuacaacuacaagcugcccgacgacuucaccggcugcgugaucgccuggaacagcaagaaccuggacagcaaggugggcggcaacuacaacuaccuguaccggcuguuccguaagagcaaccugaagccauucgagcgggacaucagcaccgagaucuaccaggccggcagcacccccugcaacgguguggagggcuuuaacugcuacuucccccugcagagcuacggcuuccagcccaccaacggcgugggcuaccagcccuaccgggugguggugcugagcuucgagcugcugcacgcccccgccaccgugugcggcccuaaaaagagcaccaaccuggugaagaacaagugcgugaacuucaacuucaauggccugaccggcaccggcgugcugaccgagagcaacaagaaguuccugcccuuccagcaguucggccgggauaucgccgacaccaccgacgcagugcgggacccccagacccuggagauccuggacaucaccccaugcagcuucggcggcgugagcgucaucacccccggcacaaacaccagcaaccagguggccgugcuguaccagggagugaacugcaccgaggugcccguggccauccacgccgaccagcugacccccaccuggcggguguacagcaccggcagcaacguguuccagacccgggccggcugccugaucggcgccgagcacgugaacaacuccuacgagugcgacauccccaucggcgcuggcaucugcgccagcuaccagacccagaccaacagcccccggcgggcccggagcguggccagccagagcaucaucgccuacaccaugagcuuaggcgccgagaacagcguggccuacagcaacaacagcaucgcgaucccuaccaacuucaccaucagcgugaccaccgagauacugcccgugagcaugaccaagaccagcguggacuguaccauguacaucugcggcgacagcaccgagugcagcaaccugcugcugcaguacggcagcuucugcacccagcugaaccgggcccugaccggcaucgccguggagcaggacaagaacacccaagagguguucgcccaggugaagcagaucuacaagacucccccaaucaaggacuucggcggcuucaacuucagccagauccugcccgaccccagcaagcccagcaagcggagcuucaucgaggaccugcuguucaacaaggugacccuggccgacgccggcuucaucaagcaguacggcgacugccugggggauaucgccgcucgggaccugaucugcgcccagaaguucaacggccugaccgugcugcccccucugcugaccgacgagaugaucgcccaguacaccagcgcccugcuugccggcaccaucaccagcggcuggaccuucggcgccggcgcagcccugcagauccccuucgccaugcagauggccuaccgguucaacggcaucggcgugacccagaacgugcuguacgagaaccagaagcugaucgccaaccaguucaacagcgccaucggcaagauccaggacagccugagcagcaccgccagcgcccugggcaagcugcaggacguggugaaccagaacgcucaggcccugaacacccuggugaagcagcugagcagcaacuucggcgccaucagcucagugcugaacgacauccugagcaggcuggaucccccagaggccgaggugcagaucgaccggcugaucaccggccggcugcagagccugcagaccuacgugacccagcagcugauccgggccgccgagauccgggccagcgccaaucuggcagccaccaagaugagcgagugcgugcugggccagagcaagcggguggacuuuugcggcaagggcuaccaccugaugagcuucccccagagcgcuccccacggcgugguguuccuccacgugacauacguccccgcccaggagaagaacuucaccaccgcccccgccauuugccacgacggcaaggcccacuucccccgggagggaguguucgugagcaacggcacccacugguucgugacccagcggaacuucuacgagccucagaucaucaccaccgacaacaccuucgugagcggcaacugcgacguggugaucggcaucgugaacaacaccguguacgacccccugcagcccgagcuggacagcuucaaggaggagcuggacaaguacuucaagaaccacaccagcccagacguggaccugggcgacaucagcggcaucaacgccagcguggugaacauccagaaggagaucgaccggcugaacgagguggccaagaaccugaacgagagccugaucgaccugcaggagcugggcaaguacgagcaguacaucaaguggcccugguacaucuggcugggcuucaucgccggccugaucgccaucgugauggugaccaucaugcugugcugcaugaccagcugcuguagcugccugaagggcugcugcagcugcggcagcugcugcaaguucgacgaggacgacagcgagcccgugcugaagggcgugaagcugcacuacaccugaggacuaguuauaagacugacuagcccgaugggccucccaacgggcccuccuccccuccuugcaccgagagaucuaaaaaaaaaaaaaaaaaaaaaaaaaaaaaaaaaaaaaaaaaaaaaaaaaaaaaaaaaaaaaaaaaaaaaaaaaaaaaaaaaaaaaaaaaaaaaaaaaaaa

SEQ ID NO: 25995 - RNA, 4011 nt, Artificial Sequence
  SARS-CoV-2/Wuhan/WIV05/2019__EPI_ISL_402128 spike protein mRNA gc (1-1273)(K986P_V987P_S477N_D614G)
aggagaaagcuuaccauguucguguuccuggugcugcugccccuggugagcagccagugcgugaaccugaccacccggacccagcugcccccugccuacaccaacagcuucacccggggcguguacuaccccgacaagguguuccggagcagcgugcugcacagcacccaggaccuguuccugcccuucuucagcaacgugaccugguuccacgccauccacgugagcggcaccaacggcaccaagcgguucgacaacccagugcugcccuucaacgacggcguguacuucgccagcaccgagaagucaaacaucauccggggcuggaucuucggcaccacccuggacagcaagacacagagccugcugaucgugaacaacgccaccaacguggugaucaaggugugcgaguuucaguucugcaacgaccccuuccugggcguguacuaccacaagaacaacaagagcuggauggagagcgaguuccgggucuacagcagcgcuaacaauugcaccuucgaguacgugagccagcccuuccugauggaccucgagggcaagcagggcaacuucaagaaccugcgggaguucguguucaagaacaucgauggcuacuucaagaucuacagcaagcacacccccaucaaccuggugcgggaccugccccagggauucagcgcccuggagccucugguggaccugcccaucggcaucaacaucaccagguuccagacccugcuggcccugcaccggagcuaccugacccccggcgacagcagcagcggcuggaccgccggcgccgccgcauacuacgugggcuaccugcagccacggaccuuccugcugaaguacaacgagaacggcaccaucaccgacgccguggacugcgcccuggacccccugagcgagaccaagugcacccuaaagagcuucaccguggagaagggcaucuaccagaccagcaacuuccgggugcagcccacugagagcaucgugcgguuccccaacauuaccaaccugugucccuucggcgagguguucaacgccacccgguucgccagcguguacgccuggaaccggaagcggaucagcaacugcguggccgacuacagcgugcuguacaacagcgccagcuucagcaccuucaagugcuacggcgugagcccuaccaagcugaacgaccugugcuucaccaacguguacgcugacagcuucgugauccggggcgacgaggugcggcagaucgcccccggccagaccggcaagaucgccgacuacaacuacaagcugcccgacgacuucaccggcugcgugaucgccuggaacagcaacaaccuggacagcaaggugggcggcaacuacaacuaccuguaccggcuguuccguaagagcaaccugaagccauucgagcgggacaucagcaccgagaucuaccaggccggcaacacccccugcaacgguguggagggcuuuaacugcuacuucccccugcagagcuacggcuuccagcccaccaacggcgugggcuaccagcccuaccgggugguggugcugagcuucgagcugcugcacgcccccgccaccgugugcggcccuaaaaagagcaccaaccuggugaagaacaagugcgugaauuucaacuucaacggccugaccggcaccggcgugcugaccgagagcaacaagaaguuccugcccuuccagcaguucggccgggauaucgccgacaccaccgacgcagugcgggacccccagacccuggagauccuggacaucaccccaugcagcuucggcggcgugagcgucaucacccccggcacaaacaccagcaaccagguggccgugcuguaccagggagugaacugcaccgaggugcccguggccauccacgccgaccagcugacccccaccuggcggguguacagcaccggcagcaacguguuccagacccgggccggcugccugaucggcgccgagcacgugaacaacagcuacgagugcgacauccccaucggcgcuggcaucugcgccuccuaccagacccagaccaacagcccccggcgggcccggagcguggccagccagagcaucaucgccuacaccaugagcuuaggcgccgagaacagcguggccuacagcaacaacagcaucgcgaucccuaccaacuucaccaucagcgugaccaccgagauacugcccgugagcaugaccaagaccagcguggacuguaccauguacaucugcggcgacagcaccgagugcagcaaccugcugcugcaguacggcagcuucugcacccagcugaaccgggcccugaccggcaucgccguggagcaggacaagaacacccaagagguguucgcccaggugaagcagaucuacaagacucccccaaucaaggacuucggcggcuucaacuucagccagauccugcccgaccccagcaagcccagcaagcggagcuucaucgaggaccugcuguucaacaaggugacccuggccgacgccggcuucaucaagcaguacggcgacugccugggggauaucgccgcucgggaccugaucugcgcccagaaguucaacggccugaccgugcugcccccucugcugaccgacgagaugaucgcccaguacaccagcgcccugcuugccggcaccaucaccagcggcuggaccuucggcgccggcgcagcccugcagauccccuucgccaugcagauggccuaccgguucaacggcaucggcgugacccagaacgugcuguacgagaaccagaagcugaucgccaaccaguucaacagcgccaucggcaagauccaggacagccugagcagcaccgccagcgcccugggcaagcugcaggacguggugaaccagaacgcucaggcccugaacacccuggugaagcagcugagcagcaauuucggcgccaucagcagcgugcugaacgacauccugucaaggcuggaucccccagaggccgaggugcagaucgaccggcugaucaccggccggcugcagagccugcagaccuacgugacccagcagcugauccgggccgccgagauccgggccagcgccaaccuggcagccaccaagaugagcgagugcgugcugggccagagcaagcggguggacuuuugcggcaagggcuaccaccugaugagcuucccccagagcgcuccccacggcgugguguuccuccacgugacauacguccccgcccaggagaagaacuucaccaccgcccccgccauuugccacgacggcaaggcccacuucccccgggagggaguguucgugagcaacggcacccacugguucgugacccagcggaacuucuacgagccucagaucaucaccaccgacaacaccuucgugagcggcaacugcgacguggugaucggcaucgugaacaacaccguguacgacccccugcagcccgagcuggacagcuucaaggaggagcuggacaaguacuucaagaaccacaccagcccagacguggaccugggcgacaucagcggcaucaacgccagcguggugaacauccagaaggagaucgaccggcugaacgagguggccaagaaccugaacgagagccugaucgaccugcaggagcugggcaaguacgagcaguacaucaaguggcccugguacaucuggcugggcuucaucgccggccugaucgccaucgugauggugaccaucaugcugugcugcaugaccagcugcuguagcugccugaagggcugcugcagcugcggcagcugcugcaaguucgacgaggacgacagcgagcccgugcugaagggcgugaagcugcacuacaccugaggacuaguuauaagacugacuagcccgaugggccucccaacgggcccuccuccccuccuugcaccgagagaucuaaaaaaaaaaaaaaaaaaaaaaaaaaaaaaaaaaaaaaaaaaaaaaaaaaaaaaaaaaaaaaaaaaaaaaaaaaaaaaaaaaaaaaaaaaaaaaaaaaaa

SEQ ID NO: 25996 - RNA, 4011 nt, Artificial Sequence
  SARS-CoV-2/Wuhan/WIV05/2019__EPI_ISL_402128 spike protein mRNA gc (1-1273)(K986P_V987P_N501Y_D614G)
aggagaaagcuuaccauguucguguuccuggugcugcugccccuggugagcagccagugcgugaaccugaccacccggacccagcugcccccugccuacaccaacagcuucacccggggcguguacuaccccgacaagguguuccggagcagcgugcugcacagcacccaggaccuguuccugcccuucuucagcaacgugaccugguuccacgccauccacgugagcggcaccaacggcaccaagcgguucgacaacccagugcugcccuucaacgacggcguguacuucgccagcaccgagaagucaaacaucauccggggcuggaucuucggcaccacccuggacagcaagacacagagccugcugaucgugaacaacgccaccaacguggugaucaaggugugcgaguuucaguucugcaacgaccccuuccugggcguguacuaccacaagaacaacaagagcuggauggagagcgaguuccgggucuacagcagcgcuaacaauugcaccuucgaguacgugagccagcccuuccugauggaccucgagggcaagcagggcaacuucaagaaccugcgggaguucguguucaagaacaucgauggcuacuucaagaucuacagcaagcacacccccaucaaccuggugcgggaccugccccagggauucagcgcccuggagccucugguggaccugcccaucggcaucaacaucaccagguuccagacccugcuggcccugcaccggagcuaccugacccccggcgacagcagcagcggcuggaccgccggcgccgccgcauacuacgugggcuaccugcagccacggaccuuccugcugaaguacaacgagaacggcaccaucaccgacgccguggacugcgcccuggacccccugagcgagaccaagugcacccuaaagagcuucaccguggagaagggcaucuaccagaccagcaacuuccgggugcagcccacugagagcaucgugcgguuccccaacauuaccaaccugugucccuucggcgagguguucaacgccacccgguucgccagcguguacgccuggaaccggaagcggaucagcaacugcguggccgacuacagcgugcuguacaacagcgccagcuucagcaccuucaagugcuacggcgugagcccuaccaagcugaacgaccugugcuucaccaacguguacgcugacagcuucgugauccggggcgacgaggugcggcagaucgcccccggccagaccggcaagaucgccgacuacaacuacaagcugcccgacgacuucaccggcugcgugaucgccuggaacagcaacaaccuggacagcaaggugggcggcaacuacaacuaccuguaccggcuguuccguaagagcaaccugaagccauucgagcgggacaucagcaccgagaucuaccaggccggcagcacccccugcaacgguguggagggcuuuaacugcuacuucccccugcagagcuacggcuuccagcccaccuacggcgugggcuaccagcccuaccgggugguggugcugagcuucgagcugcugcacgcccccgccaccgugugcggcccuaaaaagagcaccaaccuggugaagaacaagugcgugaacuucaacuucaauggccugaccggcaccggcgugcugaccgagagcaacaagaaguuccugcccuuccagcaguucggccgggauaucgccgacaccaccgacgcagugcgggacccccagacccuggagauccuggacaucaccccaugcagcuucggcggcgugagcgucaucacccccggcacaaacaccagcaaccagguggccgugcuguaccagggagugaacugcaccgaggugcccguggccauccacgccgaccagcugacccccaccuggcggguguacagcaccggcagcaacguguuccagacccgggccggcugccugaucggcgccgagcacgugaacaacuccuacgagugcgacauccccaucggcgcuggcaucugcgccagcuaccagacccagaccaacagcccccggcgggcccggagcguggccagccagagcaucaucgccuacaccaugagcuuaggcgccgagaacagcguggccuacagcaacaacagcaucgcgaucccuaccaacuucaccaucagcgugaccaccgagauacugcccgugagcaugaccaagaccagcguggacuguaccauguacaucugcggcgacagcaccgagugcagcaaccugcugcugcaguacggcagcuucugcacccagcugaaccgggcccugaccggcaucgccguggagcaggacaagaacacccaagagguguucgcccaggugaagcagaucuacaagacucccccaaucaaggacuucggcggcuucaacuucagccagauccugcccgaccccagcaagcccagcaagcggagcuucaucgaggaccugcuguucaacaaggugacccuggccgacgccggcuucaucaagcaguacggcgacugccugggggauaucgccgcucgggaccugaucugcgcccagaaguucaacggccugaccgugcugcccccucugcugaccgacgagaugaucgcccaguacaccagcgcccugcuugccggcaccaucaccagcggcuggaccuucggcgccggcgcagcccugcagauccccuucgccaugcagauggccuaccgguucaacggcaucggcgugacccagaacgugcuguacgagaaccagaagcugaucgccaaccaguucaacagcgccaucggcaagauccaggacagccugagcagcaccgccagcgcccugggcaagcugcaggacguggugaaccagaacgcucaggcccugaacacccuggugaagcagcugagcagcaacuucggcgccaucagcucagugcugaacgacauccugagcaggcuggaucccccagaggccgaggugcagaucgaccggcugaucaccggccggcugcagagccugcagaccuacgugacccagcagcugauccgggccgccgagauccgggccagcgccaaucuggcagccaccaagaugagcgagugcgugcugggccagagcaagcggguggacuuuugcggcaagggcuaccaccugaugagcuucccccagagcgcuccccacggcgugguguuccuccacgugacauacguccccgcccaggagaagaacuucaccaccgcccccgccauuugccacgacggcaaggcccacuucccccgggagggaguguucgugagcaacggcacccacugguucgugacccagcggaacuucuacgagccucagaucaucaccaccgacaacaccuucgugagcggcaacugcgacguggugaucggcaucgugaacaacaccguguacgacccccugcagcccgagcuggacagcuucaaggaggagcuggacaaguacuucaagaaccacaccagcccagacguggaccugggcgacaucagcggcaucaacgccagcguggugaacauccagaaggagaucgaccggcugaacgagguggccaagaaccugaacgagagccugaucgaccugcaggagcugggcaaguacgagcaguacaucaaguggcccugguacaucuggcugggcuucaucgccggccugaucgccaucgugauggugaccaucaugcugugcugcaugaccagcugcuguagcugccugaagggcugcugcagcugcggcagcugcugcaaguucgacgaggacgacagcgagcccgugcugaagggcgugaagcugcacuacaccugaggacuaguuauaagacugacuagcccgaugggccucccaacgggcccuccuccccuccuugcaccgagagaucuaaaaaaaaaaaaaaaaaaaaaaaaaaaaaaaaaaaaaaaaaaaaaaaaaaaaaaaaaaaaaaaaaaaaaaaaaaaaaaaaaaaaaaaaaaaaaaaaaaaa

SEQ ID NO: 25997 - RNA, 4005 nt, Artificial Sequence
  SARS-CoV-2/Wuhan/WIV05/2019__EPI_ISL_402128 spike protein mRNA gc (1-1273)(K986P_V987P_H69del_V70del_D614G)
aggagaaagcuuaccauguucguguuccuggugcugcugccccuggugagcagccagugcgugaaccugaccacccggacccagcugcccccugccuacaccaacagcuucacccggggcguguacuaccccgacaagguguuccggagcagcgugcugcacagcacccaggaccuguuccugcccuucuucagcaacgugaccugguuccacgccaucagcggcaccaacggcaccaagcgguucgacaacccagugcugcccuucaacgacggcguguacuucgccagcaccgagaagucaaacaucauccggggcuggaucuucggcaccacccuggacagcaagacacagagccugcugaucgugaacaacgccaccaacguggugaucaaggugugcgaguuucaguucugcaacgaccccuuccugggcguguacuaccacaagaacaacaagagcuggauggagagcgaguuccggguguacagcagcgcuaacaauugcaccuucgaguacgucagccagcccuuccugauggaccucgagggcaagcagggcaacuucaagaaccugcgggaguucguguucaagaacaucgauggcuacuucaagaucuacagcaagcacacccccaucaaccuggugcgggaccugccccagggauucagcgcccuggagccucugguggaccugcccaucggcaucaacaucaccagguuccagacccugcuggcccugcaccggagcuaccugacccccggcgacagcagcagcggcuggaccgccggcgccgccgcauacuacgugggcuaccugcagccacggaccuuccugcugaaguacaacgagaacggcaccaucaccgacgccguggacugcgcccuggacccccugagcgagaccaagugcacccuaaagagcuucaccguggagaagggcaucuaccagaccagcaacuuccgggugcagcccacugagagcaucgugcgguuccccaacauuaccaaccugugucccuucggcgagguguucaacgccacccgguucgccagcguguacgccuggaaccggaagcggaucagcaacugcguggccgacuacagcgugcuguacaacagcgccagcuucagcaccuucaagugcuacggcgugagcccuaccaagcugaacgaccugugcuucaccaacguguacgcugacagcuucgugauccggggcgacgaggugcggcagaucgcccccggccagaccggcaagaucgccgacuacaacuacaagcugcccgacgacuucaccggcugcgugaucgccuggaacagcaacaaccuggacagcaaggugggcggcaacuacaacuaccuguaccggcuguuccguaagagcaaccugaagccauucgagcgggacaucagcaccgagaucuaccaggccggcagcacccccugcaacgguguggagggcuuuaacugcuacuucccccugcagagcuacggcuuccagcccaccaacggcgugggcuaccagcccuaccgggugguggugcugagcuucgagcugcugcacgcccccgccaccgugugcggcccuaaaaagagcaccaaccuggugaagaacaagugcgugaacuucaauuucaacggccugaccggcaccggcgugcugaccgagagcaacaagaaguuccugcccuuccagcaguucggccgggauaucgccgacaccaccgacgcagugcgggacccccagacccuggagauccuggacaucaccccaugcagcuucggcggcgugagcgugaucacccccggcacaaacaccagcaaccaggucgccgugcuguaccagggagugaacugcaccgaggugcccguggccauccacgccgaccagcugacccccaccuggcggguguacagcaccggcagcaacguguuccagacccgggccggcugccugaucggcgccgagcacgugaacaacuccuacgagugcgacauccccaucggcgcuggcaucugcgccagcuaccagacccagaccaacagcccccggcgggcccggagcguggccagccagagcaucaucgccuacaccaugagcuuaggcgccgagaacagcguggccuacagcaacaacagcaucgcgaucccuaccaacuucaccaucagcgugaccaccgagauacugcccgugagcaugaccaagaccagcguggacuguaccauguacaucugcggcgacagcaccgagugcagcaaccugcugcugcaguacggcagcuucugcacccagcugaaccgggcccugaccggcaucgccguggagcaggacaagaacacccaagagguguucgcccaggugaagcagaucuacaagacucccccaaucaaggacuucggcggcuucaacuucagccagauccugcccgaccccagcaagcccagcaagcggagcuucaucgaggaccugcuguucaacaaggugacccuggccgacgccggcuucaucaagcaguacggcgacugccugggggauaucgccgcucgggaccugaucugcgcccagaaguucaacggccugaccgugcugcccccucugcugaccgacgagaugaucgcccaguacaccagcgcccugcuugccggcaccaucaccagcggcuggaccuucggcgccggcgcagcccugcagauccccuucgccaugcagauggccuaccgguucaacggcaucggcgugacccagaacgugcuguacgagaaccagaagcugaucgccaaccaguucaacagcgccaucggcaagauccaggacagccugagcagcaccgccagcgcccugggcaagcugcaggacguggugaaccagaacgcucaggcccugaacacccuggugaagcagcugagcagcaacuucggcgccaucagcucagugcugaaugacauccugagcaggcuggaucccccagaggccgaggugcagaucgaccggcugaucaccggccggcugcagagccugcagaccuacgugacccagcagcugauccgggccgccgagauccgggccagcgccaaccuggcagccaccaagaugagcgagugcgugcugggccagagcaagcggguggacuuuugcggcaagggcuaccaccugaugagcuucccccagagcgcuccccacggcgugguguuccuccacgugacauacgugcccgcccaggagaagaacuucaccaccgcccccgccauuugccacgacggcaaggcccacuucccccgggagggagucuucgugagcaacggcacccacugguucgugacccagcggaacuucuacgagccucagaucaucaccaccgacaacaccuucgugagcggcaacugcgacguggugaucggcaucgugaacaacaccguguacgacccccugcagcccgagcuggacagcuucaaggaggagcuggacaaguacuucaagaaccacaccagcccagacguggaccugggcgacaucagcggcaucaacgccagcguggugaacauccagaaggagaucgaccggcugaacgagguggccaagaaccugaacgagagccugaucgaccugcaggagcugggcaaguacgagcaguacaucaaguggcccugguacaucuggcugggcuucaucgccggccugaucgccaucgugauggugaccaucaugcugugcugcaugaccagcugcuguagcugccugaagggcugcugcagcugcggcagcugcugcaaguucgacgaggacgacagcgagcccgugcugaagggcgugaagcugcacuacaccugaggacuaguuauaagacugacuagcccgaugggccucccaacgggcccuccuccccuccuugcaccgagagaucuaaaaaaaaaaaaaaaaaaaaaaaaaaaaaaaaaaaaaaaaaaaaaaaaaaaaaaaaaaaaaaaaaaaaaaaaaaaaaaaaaaaaaaaaaaaaaaaaaaaa

SEQ ID NO: 25998 - RNA, 4011 nt, Artificial Sequence
  SARS-CoV-2/Wuhan/WIV05/2019__EPI_ISL_402128 spike protein mRNA gc (1-1273)(K986P_V987P_Y453F_D614G)
aggagaaagcuuaccauguucguguuccuggugcugcugccccuggugagcagccagugcgugaaccugaccacccggacccagcugcccccugccuacaccaacagcuucacccggggcguguacuaccccgacaagguguuccggagcagcgugcugcacagcacccaggaccuguuccugcccuucuucagcaacgugaccugguuccacgccauccacgugagcggcaccaacggcaccaagcgguucgacaacccagugcugcccuucaacgacggcguguacuucgccagcaccgagaagucaaacaucauccggggcuggaucuucggcaccacccuggacagcaagacacagagccugcugaucgugaacaacgccaccaacguggugaucaaggugugcgaguuucaguucugcaacgaccccuuccugggcguguacuaccacaagaacaacaagagcuggauggagagcgaguuccgggucuacagcagcgcuaacaauugcaccuucgaguacgugagccagcccuuccugauggaccucgagggcaagcagggcaacuucaagaaccugcgggaguucguguucaagaacaucgauggcuacuucaagaucuacagcaagcacacccccaucaaccuggugcgggaccugccccagggauucagcgcccuggagccucugguggaccugcccaucggcaucaacaucaccagguuccagacccugcuggcccugcaccggagcuaccugacccccggcgacagcagcagcggcuggaccgccggcgccgccgcauacuacgugggcuaccugcagccacggaccuuccugcugaaguacaacgagaacggcaccaucaccgacgccguggacugcgcccuggacccccugagcgagaccaagugcacccuaaagagcuucaccguggagaagggcaucuaccagaccagcaacuuccgggugcagcccacugagagcaucgugcgguuccccaacauuaccaaccugugucccuucggcgagguguucaacgccacccgguucgccagcguguacgccuggaaccggaagcggaucagcaacugcguggccgacuacagcgugcuguacaacagcgccagcuucagcaccuucaagugcuacggcgugagcccuaccaagcugaacgaccugugcuucaccaacguguacgcugacagcuucgugauccggggcgacgaggugcggcagaucgcccccggccagaccggcaagaucgccgacuacaacuacaagcugcccgacgacuucaccggcugcgugaucgccuggaacagcaacaaccuggacagcaaggugggcggcaacuacaacuaccuguuccggcuguuccguaagagcaaccugaagccauuugagcgggacaucagcaccgagaucuaccaggccggcagcacccccugcaacgguguggagggcuucaacugcuacuucccccugcagagcuacggcuuccagcccaccaacggcgugggcuaccagcccuaccgggugguggugcugagcuucgagcugcugcacgcccccgccaccgugugcggcccuaaaaagagcaccaaccuggugaagaacaagugcgugaacuucaauuucaacggccugaccggcaccggcgugcugaccgagagcaacaagaaguuccugcccuuccagcaguucggccgggauaucgccgacaccaccgacgcagugcgggacccccagacccuggagauccuggacaucaccccaugcagcuucggcggcgugagcgucaucacccccggcacaaacaccagcaaccagguggccgugcuguaccagggagugaacugcaccgaggugcccguggccauccacgccgaccagcugacccccaccuggcggguguacagcaccggcagcaacguguuccagacccgggccggcugccugaucggcgccgagcacgugaacaacuccuacgagugcgacauccccaucggcgcuggcaucugcgccagcuaccagacccagaccaacagcccccggcgggcccggagcguggccagccagagcaucaucgccuacaccaugagcuuaggcgccgagaacagcguggccuacagcaacaacagcaucgcgaucccuaccaacuucaccaucagcgugaccaccgagauacugcccgugagcaugaccaagaccagcguggacuguaccauguacaucugcggcgacagcaccgagugcagcaaccugcugcugcaguacggcagcuucugcacccagcugaaccgggcccugaccggcaucgccguggagcaggacaagaacacccaagagguguucgcccaggugaagcagaucuacaagacucccccaaucaaggacuucggcggcuucaacuucagccagauccugcccgaccccagcaagcccagcaagcggagcuucaucgaggaccugcuguucaacaaggugacccuggccgacgccggcuucaucaagcaguacggcgacugccugggggauaucgccgcucgggaccugaucugcgcccagaaguucaacggccugaccgugcugcccccucugcugaccgacgagaugaucgcccaguacaccagcgcccugcuugccggcaccaucaccagcggcuggaccuucggcgccggcgcagcccugcagauccccuucgccaugcagauggccuaccgguucaacggcaucggcgugacccagaacgugcuguacgagaaccagaagcugaucgccaaccaguucaacagcgccaucggcaagauccaggacagccugagcagcaccgccagcgcccugggcaagcugcaggacguggugaaccagaacgcucaggcccugaacacccuggugaagcagcugagcagcaacuuuggcgccaucagcucagugcugaaugacauccugagcaggcuggaucccccagaggccgaggugcagaucgaccggcugaucaccggccggcugcagagccugcagaccuacgugacccagcagcugauccgggccgccgagauccgggccagcgccaaccuggcagccaccaagaugagcgagugcgugcugggccagagcaagcggguggacuucugcggcaagggcuaccaccugaugagcuucccccagagcgcuccccacggcgugguguuccuccacgugacauacguccccgcccaggagaagaacuucaccaccgcccccgccauuugccacgacggcaaggcccacuucccccgggagggaguguucgugagcaacggcacccacugguucgugacccagcggaacuucuacgagccucagaucaucaccaccgacaacaccuucgugagcggcaacugcgacguggugaucggcaucgugaacaacaccguguacgacccccugcagcccgagcuggacagcuucaaggaggagcuggacaaguacuucaagaaccacaccagcccagacguggaccugggcgacaucagcggcaucaacgccagcguggugaacauccagaaggagaucgaccggcugaacgagguggccaagaaccugaacgagagccugaucgaccugcaggagcugggcaaguacgagcaguacaucaaguggcccugguacaucuggcugggcuucaucgccggccugaucgccaucgugauggugaccaucaugcugugcugcaugaccagcugcuguagcugccugaagggcugcugcagcugcggcagcugcugcaaguucgacgaggacgacagcgagcccgugcugaagggcgugaagcugcacuacaccugaggacuaguuauaagacugacuagcccgaugggccucccaacgggcccuccuccccuccuugcaccgagagaucuaaaaaaaaaaaaaaaaaaaaaaaaaaaaaaaaaaaaaaaaaaaaaaaaaaaaaaaaaaaaaaaaaaaaaaaaaaaaaaaaaaaaaaaaaaaaaaaaaaaa

SEQ ID NO: 25999 - RNA, 4011 nt, Artificial Sequence
  SARS-CoV-2/Wuhan/WIV05/2019__EPI_ISL_402128 spike protein mRNA gc (1-1273)(K986P_V987P_D614G_I692V)
aggagaaagcuuaccauguucguguuccuggugcugcugccccuggugagcagccagugcgugaaccugaccacccggacccagcugcccccugccuacaccaacagcuucacccggggcguguacuaccccgacaagguguuccggagcagcgugcugcacagcacccaggaccuguuccugcccuucuucagcaacgugaccugguuccacgccauccacgugagcggcaccaacggcaccaagcgguucgacaacccagugcugcccuucaacgacggcguguacuucgccagcaccgagaagucaaacaucauccggggcuggaucuucggcaccacccuggacagcaagacacagagccugcugaucgugaacaacgccaccaacguggugaucaaggugugcgaguuucaguucugcaacgaccccuuccugggcguguacuaccacaagaacaacaagagcuggauggagagcgaguuccgggucuacagcagcgcuaacaauugcaccuucgaguacgugagccagcccuuccugauggaccucgagggcaagcagggcaacuucaagaaccugcgggaguucguguucaagaacaucgauggcuacuucaagaucuacagcaagcacacccccaucaaccuggugcgggaccugccccagggauucagcgcccuggagccucugguggaccugcccaucggcaucaacaucaccagguuccagacccugcuggcccugcaccggagcuaccugacccccggcgacagcagcagcggcuggaccgccggcgccgccgcauacuacgugggcuaccugcagccacggaccuuccugcugaaguacaacgagaacggcaccaucaccgacgccguggacugcgcccuggacccccugagcgagaccaagugcacccuaaagagcuucaccguggagaagggcaucuaccagaccagcaacuuccgggugcagcccacugagagcaucgugcgguuccccaacauuaccaaccugugucccuucggcgagguguucaacgccacccgguucgccagcguguacgccuggaaccggaagcggaucagcaacugcguggccgacuacagcgugcuguacaacagcgccagcuucagcaccuucaagugcuacggcgugagcccuaccaagcugaacgaccugugcuucaccaacguguacgcugacagcuucgugauccggggcgacgaggugcggcagaucgcccccggccagaccggcaagaucgccgacuacaacuacaagcugcccgacgacuucaccggcugcgugaucgccuggaacagcaacaaccuggacagcaaggugggcggcaacuacaacuaccuguaccggcuguuccguaagagcaaccugaagccauucgagcgggacaucagcaccgagaucuaccaggccggcagcacccccugcaacgguguggagggcuuuaacugcuacuucccccugcagagcuacggcuuccagcccaccaacggcgugggcuaccagcccuaccgggugguggugcugagcuucgagcugcugcacgcccccgccaccgugugcggcccuaaaaagagcaccaaccuggugaagaacaagugcgugaacuucaauuucaacggccugaccggcaccggcgugcugaccgagagcaacaagaaguuccugcccuuccagcaguucggccgggauaucgccgacaccaccgacgcagugcgggacccccagacccuggagauccuggacaucaccccaugcagcuucggcggcgugagcgucaucacccccggcacaaacaccagcaaccagguggccgugcuguaccagggagugaacugcaccgaggugcccguggccauccacgccgaccagcugacccccaccuggcggguguacagcaccggcagcaacguguuccagacccgggccggcugccugaucggcgccgagcacgugaacaacuccuacgagugcgacauccccaucggcgcuggcaucugcgccagcuaccagacccagaccaacagcccccggcgggcccggagcguggccagccagagcgugaucgccuacaccaugagcuuaggcgccgagaacagcguggccuacagcaacaacagcaucgcgaucccuaccaacuucaccaucagcgugaccaccgagauccugcccgugagcaugaccaagaccagcguggacuguaccauguacauaugcggcgacagcaccgagugcagcaaccugcugcugcaguacggcagcuucugcacccagcugaaccgggcccugaccggcaucgccguggagcaggacaagaacacccaagagguguucgcccaggugaagcagaucuacaagacucccccaaucaaggacuucggcggcuucaacuucagccagauccugcccgaccccagcaagcccagcaagcggagcuucaucgaggaccugcuguucaacaaggugacccuggccgacgccggcuucaucaagcaguacggcgacugccugggggauaucgccgcucgggaccugaucugcgcccagaaguucaacggccugaccgugcugcccccucugcugaccgacgagaugaucgcccaguacaccagcgcccugcuugccggcaccaucaccagcggcuggaccuucggcgccggcgcagcccugcagauccccuucgccaugcagauggccuaccgguucaacggcaucggcgugacccagaacgugcuguacgagaaccagaagcugaucgccaaccaguucaacagcgccaucggcaagauccaggacagccugagcagcaccgccagcgcccugggcaagcugcaggacguggugaaccagaacgcucaggcccugaacacccuggugaagcagcugagcagcaacuucggcgccaucagcucagugcugaaugacauccugagcaggcuggaucccccagaggccgaggugcagaucgaccggcugaucaccggccggcugcagagccugcagaccuacgugacccagcagcugauccgggccgccgagauccgggccagcgccaaccuggcagccaccaagaugagcgagugcgugcugggccagagcaagcggguggacuuuugcggcaagggcuaccaccugaugagcuucccccagagcgcuccccacggcgugguguuccuccacgucacauacgugcccgcccaggagaagaacuucaccaccgcccccgccaucugccacgacggcaaggcccacuucccccgggagggaguguucgugagcaacggcacccacugguucgugacccagcggaacuucuacgagccucagauuaucaccaccgacaacaccuucgugagcggcaacugcgacguggugaucggcaucgugaacaacaccguguacgacccccugcagcccgagcuggacagcuucaaggaggagcuggacaaguacuucaagaaccacaccagcccagacguggaccugggcgacaucagcggcaucaacgccagcguggugaacauccagaaggagaucgaccggcugaacgagguggccaagaaccugaacgagagccugaucgaccugcaggagcugggcaaguacgagcaguacaucaaguggcccugguacaucuggcugggcuucaucgccggccugaucgccaucgugauggugaccaucaugcugugcugcaugaccagcugcuguagcugccugaagggcugcugcagcugcggcagcugcugcaaguucgacgaggacgacagcgagcccgugcugaagggcgugaagcugcacuacaccugaggacuaguuauaagacugacuagcccgaugggccucccaacgggcccuccuccccuccuugcaccgagagaucuaaaaaaaaaaaaaaaaaaaaaaaaaaaaaaaaaaaaaaaaaaaaaaaaaaaaaaaaaaaaaaaaaaaaaaaaaaaaaaaaaaaaaaaaaaaaaaaaaaaa

SEQ ID NO: 26000 - RNA, 4011 nt, Artificial Sequence
  SARS-CoV-2/Wuhan/WIV05/2019__EPI_ISL_402128 spike protein mRNA gc (1-1273)(K986P_V987P_D614G_M1229I)
aggagaaagcuuaccauguucguguuccuggugcugcugccccuggugagcagccagugcgugaaccugaccacccggacccagcugcccccugccuacaccaacagcuucacccggggcguguacuaccccgacaagguguuccggagcagcgugcugcacagcacccaggaccuguuccugcccuucuucagcaacgugaccugguuccacgccauccacgugagcggcaccaacggcaccaagcgguucgacaacccagugcugcccuucaacgacggcguguacuucgccagcaccgagaagucaaacaucauccggggcuggaucuucggcaccacccuggacagcaagacacagagccugcugaucgugaacaacgccaccaacguggugaucaaggugugcgaguuucaguucugcaacgaccccuuccugggcguguacuaccacaagaacaacaagagcuggauggagagcgaguuccgggucuacagcagcgcuaacaauugcaccuucgaguacgugagccagcccuuccugauggaccucgagggcaagcagggcaacuucaagaaccugcgggaguucguguucaagaacaucgauggcuacuucaagaucuacagcaagcacacccccaucaaccuggugcgggaccugccccagggauucagcgcccuggagccucugguggaccugcccaucggcaucaacaucaccagguuccagacccugcuggcccugcaccggagcuaccugacccccggcgacagcagcagcggcuggaccgccggcgccgccgcauacuacgugggcuaccugcagccacggaccuuccugcugaaguacaacgagaacggcaccaucaccgacgccguggacugcgcccuggacccccugagcgagaccaagugcacccuaaagagcuucaccguggagaagggcaucuaccagaccagcaacuuccgggugcagcccacugagagcaucgugcgguuccccaacauuaccaaccugugucccuucggcgagguguucaacgccacccgguucgccagcguguacgccuggaaccggaagcggaucagcaacugcguggccgacuacagcgugcuguacaacagcgccagcuucagcaccuucaagugcuacggcgugagcccuaccaagcugaacgaccugugcuucaccaacguguacgcugacagcuucgugauccggggcgacgaggugcggcagaucgcccccggccagaccggcaagaucgccgacuacaacuacaagcugcccgacgacuucaccggcugcgugaucgccuggaacagcaacaaccuggacagcaaggugggcggcaacuacaacuaccuguaccggcuguuccguaagagcaaccugaagccauucgagcgggacaucagcaccgagaucuaccaggccggcagcacccccugcaacgguguggagggcuuuaacugcuacuucccccugcagagcuacggcuuccagcccaccaacggcgugggcuaccagcccuaccgggugguggugcugagcuucgagcugcugcacgcccccgccaccgugugcggcccuaaaaagagcaccaaccuggugaagaacaagugcgugaacuucaauuucaacggccugaccggcaccggcgugcugaccgagagcaacaagaaguuccugcccuuccagcaguucggccgggauaucgccgacaccaccgacgcagugcgggacccccagacccuggagauccuggacaucaccccaugcagcuucggcggcgugagcgucaucacccccggcacaaacaccagcaaccagguggccgugcuguaccagggagugaacugcaccgaggugcccguggccauccacgccgaccagcugacccccaccuggcggguguacagcaccggcagcaacguguuccagacccgggccggcugccugaucggcgccgagcacgugaacaacuccuacgagugcgacauccccaucggcgcuggcaucugcgccagcuaccagacccagaccaacagcccccggcgggcccggagcguggccagccagagcaucaucgccuacaccaugagcuuaggcgccgagaacagcguggccuacagcaacaacagcaucgcgaucccuaccaacuucaccaucagcgugaccaccgagauacugcccgugagcaugaccaagaccagcguggacuguaccauguacaucugcggcgacagcaccgagugcagcaaccugcugcugcaguacggcagcuucugcacccagcugaaccgggcccugaccggcaucgccguggagcaggacaagaacacccaagagguguucgcccaggugaagcagaucuacaagacucccccaaucaaggacuucggcggcuucaacuucagccagauccugcccgaccccagcaagcccagcaagcggagcuucaucgaggaccugcuguucaacaaggugacccuggccgacgccggcuucaucaagcaguacggcgacugccugggggauaucgccgcucgggaccugaucugcgcccagaaguucaacggccugaccgugcugcccccucugcugaccgacgagaugaucgcccaguacaccagcgcccugcuugccggcaccaucaccagcggcuggaccuucggcgccggcgcagcccugcagauccccuucgccaugcagauggccuaccgguucaacggcaucggcgugacccagaacgugcuguacgagaaccagaagcugaucgccaaccaguucaacagcgccaucggcaagauccaggacagccugagcagcaccgccagcgcccugggcaagcugcaggacguggugaaccagaacgcucaggcccugaacacccuggugaagcagcugagcagcaacuucggcgccaucagcucagugcugaaugacauccugagcaggcuggaucccccagaggccgaggugcagaucgaccggcugaucaccggccggcugcagagccugcagaccuacgugacccagcagcugauccgggccgccgagauccgggccagcgccaaccuggcagccaccaagaugagcgagugcgugcugggccagagcaagcggguggacuuuugcggcaagggcuaccaccugaugagcuucccccagagcgcuccccacggcgugguguuccuccacgugacauacguccccgcccaggagaagaacuucaccaccgcccccgccauuugccacgacggcaaggcccacuucccccgggagggaguguucgugagcaacggcacccacugguucgugacccagcggaacuucuacgagccucagaucaucaccaccgacaacaccuucgugagcggcaacugcgacguggugaucggcaucgugaacaacaccguguacgacccccugcagcccgagcuggacagcuucaaggaggagcuggacaaguacuucaagaaccacaccagcccagacguggaccugggcgacaucagcggcaucaacgccagcguggugaacauccagaaggagaucgaccggcugaacgagguggccaagaaccugaacgagagccugaucgaccugcaggagcugggcaaguacgagcaguacaucaaguggcccugguacaucuggcugggcuucaucgccggccugaucgccaucgugaucgugaccaucaugcugugcugcaugaccagcugcuguagcugccugaagggcugcugcagcugcggcagcugcugcaaguucgacgaggacgacagcgagcccgugcugaagggcgugaagcugcacuacaccugaggacuaguuauaagacugacuagcccgaugggccucccaacgggcccuccuccccuccuugcaccgagagaucuaaaaaaaaaaaaaaaaaaaaaaaaaaaaaaaaaaaaaaaaaaaaaaaaaaaaaaaaaaaaaaaaaaaaaaaaaaaaaaaaaaaaaaaaaaaaaaaaaaaa

SEQ ID NO: 26001 - RNA, 4005 nt, Artificial Sequence
  SARS-CoV-2/Wuhan/WIV05/2019__EPI_ISL_402128 spike protein mRNA gc (1-1273)(K986P_V987P_H69del_V70del_A222V_Y453F_S477N_D614G_I692V)
aggagaaagcuuaccauguucguguuccuggugcugcugccccuggugagcagccagugcgugaaccugaccacccggacccagcugcccccugccuacaccaacagcuucacccggggcguguacuaccccgacaagguguuccggagcagcgugcugcacagcacccaggaccuguuccugcccuucuucagcaacgugaccugguuccacgccaucagcggcaccaacggcaccaagcgguucgacaacccagugcugcccuucaacgacggcguguacuucgccagcaccgagaagucaaacaucauccggggcuggaucuucggcaccacccuggacagcaagacacagagccugcugaucgugaacaacgccaccaacguggugaucaaggugugcgaguuucaguucugcaacgaccccuuccugggcguguacuaccacaagaacaacaagagcuggauggagagcgaguuccggguguacagcagcgcuaacaauugcaccuucgaguacgucagccagcccuuccugauggaccucgagggcaagcagggcaacuucaagaaccugcgggaguucguguucaagaacaucgauggcuacuucaagaucuacagcaagcacacccccaucaaccuggugcgggaccugccccagggauucagcgugcuggagccucugguggaccugcccaucggcaucaacaucaccagguuccagacccugcuggcccugcaccggagcuaccugacccccggcgacagcagcagcggcuggaccgccggcgccgccgccuacuacgugggcuaccugcagccacggaccuuccugcugaaguacaacgagaacggcaccaucaccgacgcaguggacugcgcccuggacccccugagcgagaccaagugcacccuaaagagcuucaccguggagaagggcaucuaccagaccagcaacuuccgggugcagcccacugagagcaucgugcgguuccccaacauuaccaaccugugucccuucggcgagguguucaacgccacccgguucgccagcguguacgccuggaaccggaagcggaucagcaacugcguggccgacuacagcgugcuguacaacagcgccagcuucagcaccuucaagugcuacggcgugagcccuaccaagcugaacgaccugugcuucaccaacguguacgccgacagcuucgugauccggggcgacgaggugcggcagaucgcucccggccagaccggcaagaucgccgacuacaacuacaagcugcccgacgacuucaccggcugcgugaucgccuggaacagcaacaaccuggacagcaaggugggcggcaacuacaacuaccuguuccggcuguuccguaagagcaaccugaagccauuugagcgggacaucagcaccgagaucuaccaggccggcaacacccccugcaacgguguggagggcuucaacugcuacuucccccugcagagcuacggcuuccagcccaccaacggcgugggcuaccagcccuaccgggugguggugcugagcuucgagcugcugcacgcccccgccaccgugugcggcccuaaaaagagcaccaaccuggugaagaacaagugcgugaauuucaacuucaacggccugaccggcaccggcgugcugaccgagagcaacaagaaguuccugcccuuccagcaguucggccgggauaucgccgacaccaccgacgccgugcgggacccccagacccuggagauccuggacaucaccccaugcagcuucggcggcgugagcgucaucacccccggcacaaacaccagcaaccagguggcagugcuguaccagggagugaacugcaccgaggugcccguggccauccacgccgaccagcugacccccaccuggcggguguacagcaccggcagcaacguguuccagacccgggccggcugccugaucggcgccgagcacgugaacaacagcuacgagugcgacauccccaucggcgccggcaucugcgcuuccuaccagacccagaccaacagcccccggcgggcccggagcguggccagccagagcgugaucgccuacaccaugagcuuaggcgccgagaacagcguggccuacagcaacaacagcaucgccaucccuaccaacuucaccaucagcgugaccaccgagauccugcccgugagcaugaccaagaccagcguggacuguaccauguacauaugcggcgacagcaccgagugcagcaaccugcugcugcaguacggcagcuucugcacccagcugaaccgggcgcugaccggcaucgccguggagcaggacaagaacacccaagagguguucgcccaggugaagcagaucuacaagacucccccaaucaaggacuucggcggcuucaacuucagccagauccugcccgaccccagcaagcccagcaagcggagcuucaucgaggaccugcuguucaacaaggugacccuggccgacgccggcuucaucaagcaguacggcgacugccugggggauaucgccgcccgggaccugaucugcgcucagaaguucaacggccugaccgugcugcccccucugcugaccgacgagaugaucgcccaguacaccagcgcccugcuugccggcaccaucaccagcggcuggaccuucggcgccggcgccgcacugcagauccccuucgccaugcagauggccuaccgguucaacggcaucggcgugacccagaacgugcuguacgagaaccagaagcugaucgccaaccaguucaacagcgccaucggcaagauccaggacagccugagcagcaccgccagcgcccugggcaagcugcaggacguggugaaccagaacgcccaggcucugaacacccuggugaagcagcugagcagcaauuuuggcgccaucagcagcgugcugaacgacauccugucaaggcuggaucccccagaggccgaggugcagaucgaccggcugaucaccggccggcugcagagccugcagaccuacgugacccagcagcugauccgggccgccgagauccgggccagcgccaaccuggccgcaaccaagaugagcgagugcgugcugggccagagcaagcggguggacuucugcggcaagggcuaccaccugaugagcuucccccagagcgcuccccacggcgugguguuccuccacgucacauacgugcccgcccaggagaagaacuucaccaccgcccccgccaucugccacgacggcaaggcccacuucccccgggagggaguguucgugagcaacggcacccacugguucgugacccagcggaacuucuacgagccucagauuaucaccaccgacaacaccuucgugagcggcaacugcgacguggugaucggcaucgugaacaacaccguguacgacccccugcagcccgagcuggacagcuucaaggaggagcuggacaaguacuucaagaaccacaccagcccagacguggaccugggcgacaucagcggcaucaacgccagcguggugaacauccagaaggagaucgaccggcugaacgagguggccaagaaccugaacgagagccugaucgaccugcaggagcugggcaaguacgagcaguacaucaaguggcccugguacaucuggcugggcuucaucgccggccugaucgccaucgugauggugaccaucaugcugugcugcaugaccagcugcuguagcugccugaagggcugcugcagcugcggcagcugcugcaaguucgacgaggacgacagcgagcccgugcugaagggcgugaagcugcacuacaccugaggacuaguuauaagacugacuagcccgaugggccucccaacgggcccuccuccccuccuugcaccgagagaucuaaaaaaaaaaaaaaaaaaaaaaaaaaaaaaaaaaaaaaaaaaaaaaaaaaaaaaaaaaaaaaaaaaaaaaaaaaaaaaaaaaaaaaaaaaaaaaaaaaaa

SEQ ID NO: 26002 - RNA, 4005 nt, Artificial Sequence
  SARS-CoV-2/Wuhan/WIV05/2019__EPI_ISL_402128 spike protein mRNA gc (1-1273)(K986P_V987P_H69del_V70del_Y453F_D614G_I692V_M1229I)
aggagaaagcuuaccauguucguguuccuggugcugcugccccuggugagcagccagugcgugaaccugaccacccggacccagcugcccccugccuacaccaacagcuucacccggggcguguacuaccccgacaagguguuccggagcagcgugcugcacagcacccaggaccuguuccugcccuucuucagcaacgugaccugguuccacgccaucagcggcaccaacggcaccaagcgguucgacaacccagugcugcccuucaacgacggcguguacuucgccagcaccgagaagucaaacaucauccggggcuggaucuucggcaccacccuggacagcaagacacagagccugcugaucgugaacaacgccaccaacguggugaucaaggugugcgaguuucaguucugcaacgaccccuuccugggcguguacuaccacaagaacaacaagagcuggauggagagcgaguuccggguguacagcagcgcuaacaauugcaccuucgaguacgucagccagcccuuccugauggaccucgagggcaagcagggcaacuucaagaaccugcgggaguucguguucaagaacaucgauggcuacuucaagaucuacagcaagcacacccccaucaaccuggugcgggaccugccccagggauucagcgcccuggagccucugguggaccugcccaucggcaucaacaucaccagguuccagacccugcuggcccugcaccggagcuaccugacccccggcgacagcagcagcggcuggaccgccggcgccgccgcauacuacgugggcuaccugcagccacggaccuuccugcugaaguacaacgagaacggcaccaucaccgacgccguggacugcgcccuggacccccugagcgagaccaagugcacccuaaagagcuucaccguggagaagggcaucuaccagaccagcaacuuccgggugcagcccacugagagcaucgugcgguuccccaacauuaccaaccugugucccuucggcgagguguucaacgccacccgguucgccagcguguacgccuggaaccggaagcggaucagcaacugcguggccgacuacagcgugcuguacaacagcgccagcuucagcaccuucaagugcuacggcgugagcccuaccaagcugaacgaccugugcuucaccaacguguacgcugacagcuucgugauccggggcgacgaggugcggcagaucgcccccggccagaccggcaagaucgccgacuacaacuacaagcugcccgacgacuucaccggcugcgugaucgccuggaacagcaacaaccuggacagcaaggugggcggcaacuacaacuaccuguuccggcuguuccguaagagcaaccugaagccauuugagcgggacaucagcaccgagaucuaccaggccggcagcacccccugcaacgguguggagggcuucaacugcuacuucccccugcagagcuacggcuuccagcccaccaacggcgugggcuaccagcccuaccgggugguggugcugagcuucgagcugcugcacgcccccgccaccgugugcggcccuaaaaagagcaccaaccuggugaagaacaagugcgugaacuucaauuucaacggccugaccggcaccggcgugcugaccgagagcaacaagaaguuccugcccuuccagcaguucggccgggauaucgccgacaccaccgacgcagugcgggacccccagacccuggagauccuggacaucaccccaugcagcuucggcggcgugagcgugaucacccccggcacaaacaccagcaaccaggucgccgugcuguaccagggagugaacugcaccgaggugcccguggccauccacgccgaccagcugacccccaccuggcggguguacagcaccggcagcaacguguuccagacccgggccggcugccugaucggcgccgagcacgugaacaacuccuacgagugcgacauccccaucggcgcuggcaucugcgccagcuaccagacccagaccaacagcccccggcgggcccggagcguggccagccagagcgugaucgccuacaccaugagcuuaggcgccgagaacagcguggccuacagcaacaacagcaucgcgaucccuaccaacuucaccaucagcgugaccaccgagauccugcccgugagcaugaccaagaccagcguggacuguaccauguacauaugcggcgacagcaccgagugcagcaaccugcugcugcaguacggcagcuucugcacccagcugaaccgggcccugaccggcaucgccguggagcaggacaagaacacccaagagguguucgcccaggugaagcagaucuacaagacucccccaaucaaggacuucggcggcuucaacuucagccagauccugcccgaccccagcaagcccagcaagcggagcuucaucgaggaccugcuguucaacaaggugacccuggccgacgccggcuucaucaagcaguacggcgacugccugggggauaucgccgcucgggaccugaucugcgcccagaaguucaacggccugaccgugcugcccccucugcugaccgacgagaugaucgcccaguacaccagcgcccugcuugccggcaccaucaccagcggcuggaccuucggcgccggcgcagcccugcagauccccuucgccaugcagauggccuaccgguucaacggcaucggcgugacccagaacgugcuguacgagaaccagaagcugaucgccaaccaguucaacagcgccaucggcaagauccaggacagccugagcagcaccgccagcgcccugggcaagcugcaggacguggugaaccagaacgcucaggcccugaacacccuggugaagcagcugagcagcaacuuuggcgccaucagcucagugcugaaugacauccugagcaggcuggaucccccagaggccgaggugcagaucgaccggcugaucaccggccggcugcagagccugcagaccuacgugacccagcagcugauccgggccgccgagauccgggccagcgccaaccuggcagccaccaagaugagcgagugcgugcugggccagagcaagcggguggacuucugcggcaagggcuaccaccugaugagcuucccccagagcgcuccccacggcgugguguuccuccacgugacauacguccccgcccaggagaagaacuucaccaccgcccccgccaucugccacgacggcaaggcccacuucccccgggagggaguguucgugagcaacggcacccacugguucgugacccagcggaacuucuacgagccucagauuaucaccaccgacaacaccuucgugagcggcaacugcgacguggugaucggcaucgugaacaacaccguguacgacccccugcagcccgagcuggacagcuucaaggaggagcuggacaaguacuucaagaaccacaccagcccagacguggaccugggcgacaucagcggcaucaacgccagcguggugaacauccagaaggagaucgaccggcugaacgagguggccaagaaccugaacgagagccugaucgaccugcaggagcugggcaaguacgagcaguacaucaaguggcccugguacaucuggcugggcuucaucgccggccugaucgccaucgugaucgugaccaucaugcugugcugcaugaccagcugcuguagcugccugaagggcugcugcagcugcggcagcugcugcaaguucgacgaggacgacagcgagcccgugcugaagggcgugaagcugcacuacaccugaggacuaguuauaagacugacuagcccgaugggccucccaacgggcccuccuccccuccuugcaccgagagaucuaaaaaaaaaaaaaaaaaaaaaaaaaaaaaaaaaaaaaaaaaaaaaaaaaaaaaaaaaaaaaaaaaaaaaaaaaaaaaaaaaaaaaaaaaaaaaaaaaaaa

SEQ ID NO: 26003 - RNA, 4002 nt, Artificial Sequence
  SARS-CoV-2/Wuhan/WIV05/2019__EPI_ISL_402128 spike protein mRNA gc (1-1273)(K986P_V987P_K986P_V987P_H69del_V70del_Y144del_N501Y_A570 D_D614G_P681H_T716I_S982A_D1118H)
aggagaaagcuuaccauguucguguuccuggugcugcugccccuggugagcagccagugcgugaaccugaccacccggacccagcugcccccugccuacaccaacagcuucacccggggcguguacuaccccgacaagguguuccggagcagcgugcugcacagcacccaggaccuguuccugcccuucuucagcaacgugaccugguuccacgccaucagcggcaccaacggcaccaagcgguucgacaacccagugcugcccuucaacgacggcguguacuucgccagcaccgagaagucaaacaucauccggggcuggaucuucggcaccacccuggacagcaagacacagagccugcugaucgugaacaacgccaccaacguggugaucaaggugugcgaguuucaguucugcaacgaccccuuccugggcguguaccacaagaacaacaagagcuggauggagagcgaguuccggguguacagcagcgcuaacaauugcaccuucgaguacgucagccagcccuuccugauggaccucgagggcaagcagggcaacuucaagaaccugcgggaguucguguucaagaacaucgauggcuacuucaagaucuacagcaagcacacccccaucaaccuggugcgggaccugccccagggauucagcgcccuggagccucugguggaccugcccaucggcaucaacaucaccagguuccagacccugcuggcccugcaccggagcuaccugacccccggcgacagcagcagcggcuggaccgccggcgccgccgcauacuacgugggcuaccugcagccacggaccuuccugcugaaguacaacgagaacggcaccaucaccgacgccguggacugcgcccuggacccccugagcgagaccaagugcacccuaaagagcuucaccguggagaagggcaucuaccagaccagcaacuuccgggugcagcccacugagagcaucgugcgguuccccaacauuaccaaccugugucccuucggcgagguguucaacgccacccgguucgccagcguguacgccuggaaccggaagcggaucagcaacugcguggccgacuacagcgugcuguacaacagcgccagcuucagcaccuucaagugcuacggcgugagcccuaccaagcugaacgaccugugcuucaccaacguguacgcugacagcuucgugauccggggcgacgaggugcggcagaucgcccccggccagaccggcaagaucgccgacuacaacuacaagcugcccgacgacuucaccggcugcgugaucgccuggaacagcaacaaccuggacagcaaggugggcggcaacuacaacuaccuguaccggcuguuccguaagagcaaccugaagccauucgagcgggacaucagcaccgagaucuaccaggccggcagcacccccugcaacgguguggagggcuuuaacugcuacuucccccugcagagcuacggcuuccagcccaccuacggcgugggcuaccagcccuaccgggugguggugcugagcuucgagcugcugcacgcccccgccaccgugugcggcccuaaaaagagcaccaaccuggugaagaacaagugcgugaacuucaacuucaauggccugaccggcaccggcgugcugaccgagagcaacaagaaguuccugcccuuccagcaguucggccgggauaucgacgacaccaccgacgccgugcgggacccccagacccuggagauccuggacaucaccccaugcagcuucggcggcgugagcgugaucacccccggcacaaacaccagcaaccaggucgcagugcuguaccagggagugaacugcaccgaggugcccguggccauccacgccgaccagcugacccccaccuggcggguguacagcaccggcagcaacguguuccagacccgggccggcugccugaucggcgccgagcacgugaacaacuccuacgagugcgacauccccaucggcgccggcaucugcgcuagcuaccagacccagaccaacagccaccggcgggcccggagcguggccagccagagcaucaucgccuacaccaugagcuuaggcgccgagaacagcguggccuacagcaacaacagcaucgccauccccaucaacuucaccauaagcgugaccaccgagauccugccugugagcaugaccaagaccagcguggacuguaccauguacaucugcggcgacagcaccgagugcagcaaccugcugcugcaguacggcagcuucugcacccagcugaaccgggcgcugaccggcaucgccguggagcaggacaagaacacccaagagguguucgcccaggugaagcagaucuacaagaccccacccaucaaggacuucggcggcuucaacuucagccagauccugcccgaccccagcaagcccagcaagcggagcuucaucgaggaccugcuguucaacaaggugacucuggccgacgccggcuucaucaagcaguacggcgauugccugggggacaucgccgcccgggaccugaucugcgcucagaaguucaacggccugaccgugcugccuccccugcugaccgacgagaugaucgcccaguacaccagcgcccugcuugccggcaccaucaccagcggcuggaccuucggcgccggcgccgcacugcagauccccuucgccaugcagauggccuaccgguucaacggcaucggcgugacccagaacgugcuguacgagaaccagaagcugaucgccaaccaguucaacagcgccaucggcaagauccaggacagccugagcagcaccgccagcgcccugggcaagcugcaggacguggugaaccagaacgcccaggcucugaacacccuggugaagcagcugagcagcaacuucggcgccaucagcucagugcugaacgacauccuggccaggcuggacccacccgaggccgaggugcagaucgaccggcugaucaccggccggcugcagagccugcagaccuacgugacccagcagcugauccgggccgccgagauucgggccagcgccaaucuggcagccaccaagaugagcgagugcgugcugggccagagcaagcggguggacuuuugcggcaagggcuaccaccugaugagcuucccccagagcgcuccccacggcgugguguuccuccacgugaccuacgugcccgcccaggagaagaacuucacaaccgcccccgccaucugccacgacggcaaggcccacuucccccgggagggagucuucgugagcaacggcacccacugguucgugacccagcggaacuucuacgagccccagaucaucaccacccacaacaccuucgugagcggcaacugcgacguggugaucggcaucgugaacaacaccguguacgacccucugcagcccgagcuggacagcuucaaggaggagcuggacaaguacuucaagaaccacaccagccccgacguggaucugggcgacaucagcggcaucaacgccagcguggugaacauccagaaggagaucgaccggcugaacgagguggccaagaaccugaacgagagccugaucgaccugcaggagcugggcaaguacgagcaguacaucaaguggccaugguacaucuggcugggcuucaucgccggccugaucgccaucgugauggugaccaucaugcugugcugcaugaccagcugcuguagcugccugaagggcugcugcagcugcggcagcugcugcaaguucgacgaggacgacagcgagcccgugcugaagggcgugaagcugcacuacaccugaggacuaguuauaagacugacuagcccgaugggccucccaacgggcccuccuccccuccuugcaccgagagaucuaaaaaaaaaaaaaaaaaaaaaaaaaaaaaaaaaaaaaaaaaaaaaaaaaaaaaaaaaaaaaaaaaaaaaaaaaaaaaaaaaaaaaaaaaaaaaaaaaaaa

SEQ ID NO: 26004 - RNA, 4011 nt, Artificial Sequence
  SARS-CoV-2/Wuhan/WIV05/2019__EPI_ISL_402128 spike protein mRNA gc (1-1273)(K986P_V987P_K986P_V987P_K417N_E484K_N501Y_D614G)
aggagaaagcuuaccauguucguguuccuggugcugcugccccuggugagcagccagugcgugaaccugaccacccggacccagcugcccccugccuacaccaacagcuucacccggggcguguacuaccccgacaagguguuccggagcagcgugcugcacagcacccaggaccuguuccugcccuucuucagcaacgugaccugguuccacgccauccacgugagcggcaccaacggcaccaagcgguucgacaacccagugcugcccuucaacgacggcguguacuucgccagcaccgagaagucaaacaucauccggggcuggaucuucggcaccacccuggacagcaagacacagagccugcugaucgugaacaacgccaccaacguggugaucaaggugugcgaguuucaguucugcaacgaccccuuccugggcguguacuaccacaagaacaacaagagcuggauggagagcgaguuccgggucuacagcagcgcuaacaauugcaccuucgaguacgugagccagcccuuccugauggaccucgagggcaagcagggcaacuucaagaaccugcgggaguucguguucaagaacaucgauggcuacuucaagaucuacagcaagcacacccccaucaaccuggugcgggaccugccccagggauucagcgcccuggagccucugguggaccugcccaucggcaucaacaucaccagguuccagacccugcuggcccugcaccggagcuaccugacccccggcgacagcagcagcggcuggaccgccggcgccgccgcauacuacgugggcuaccugcagccacggaccuuccugcugaaguacaacgagaacggcaccaucaccgacgccguggacugcgcccuggacccccugagcgagaccaagugcacccuaaagagcuucaccguggagaagggcaucuaccagaccagcaacuuccgggugcagcccacugagagcaucgugcgguuccccaacauuaccaaccugugucccuucggcgagguguucaacgccacccgguucgccagcguguacgccuggaaccggaagcggaucagcaacugcguggccgacuacagcgugcuguacaacagcgccagcuucagcaccuucaagugcuacggcgugagcccuaccaagcugaacgaccugugcuucaccaacguguacgcugacagcuucgugauccggggcgacgaggugcggcagaucgcccccggccagaccggcaacaucgccgacuacaacuacaagcugcccgacgacuucaccggcugcgugaucgccuggaacagcaacaaccuggacagcaaggugggcggcaacuacaacuaccuguaccggcuguuccguaagagcaaccugaagccauucgagcgggacaucagcaccgagaucuaccaggccggcagcacccccugcaacggugugaagggcuuuaacugcuacuucccccugcagagcuacggcuuccagcccaccuacggcgugggcuaccagcccuaccgggugguggugcugagcuucgagcugcugcacgcccccgccaccgugugcggcccuaaaaagagcaccaaccuggugaagaacaagugcgugaacuucaauuucaacggccugaccggcaccggcgugcugaccgagagcaacaagaaguuccugcccuuccagcaguucggccgggauaucgccgacaccaccgacgcagugcgggacccccagacccuggagauccuggacaucaccccaugcagcuucggcggcgugagcgucaucacccccggcacaaacaccagcaaccagguggccgugcuguaccagggagugaacugcaccgaggugcccguggccauccacgccgaccagcugacccccaccuggcggguguacagcaccggcagcaacguguuccagacccgggccggcugccugaucggcgccgagcacgugaacaacuccuacgagugcgacauccccaucggcgcuggcaucugcgccagcuaccagacccagaccaacagcccccggcgggcccggagcguggccagccagagcaucaucgccuacaccaugagcuuaggcgccgagaacagcguggccuacagcaacaacagcaucgcgaucccuaccaacuucaccaucagcgugaccaccgagauacugcccgugagcaugaccaagaccagcguggacuguaccauguacaucugcggcgacagcaccgagugcagcaaccugcugcugcaguacggcagcuucugcacccagcugaaccgggcccugaccggcaucgccguggagcaggacaagaacacccaagagguguucgcccaggugaagcagaucuacaagacucccccaaucaaggacuucggcggcuucaacuucagccagauccugcccgaccccagcaagcccagcaagcggagcuucaucgaggaccugcuguucaacaaggugacccuggccgacgccggcuucaucaagcaguacggcgacugccugggggauaucgccgcucgggaccugaucugcgcccagaaguucaacggccugaccgugcugcccccucugcugaccgacgagaugaucgcccaguacaccagcgcccugcuugccggcaccaucaccagcggcuggaccuucggcgccggcgcagcccugcagauccccuucgccaugcagauggccuaccgguucaacggcaucggcgugacccagaacgugcuguacgagaaccagaagcugaucgccaaccaguucaacagcgccaucggcaagauccaggacagccugagcagcaccgccagcgcccugggcaagcugcaggacguggugaaccagaacgcucaggcccugaacacccuggugaagcagcugagcagcaacuucggcgccaucagcucagugcugaaugacauccugagcaggcuggaucccccagaggccgaggugcagaucgaccggcugaucaccggccggcugcagagccugcagaccuacgugacccagcagcugauccgggccgccgagauccgggccagcgccaaccuggcagccaccaagaugagcgagugcgugcugggccagagcaagcggguggacuuuugcggcaagggcuaccaccugaugagcuucccccagagcgcuccccacggcgugguguuccuccacgugacauacguccccgcccaggagaagaacuucaccaccgcccccgccauuugccacgacggcaaggcccacuucccccgggagggaguguucgugagcaacggcacccacugguucgugacccagcggaacuucuacgagccucagaucaucaccaccgacaacaccuucgugagcggcaacugcgacguggugaucggcaucgugaacaacaccguguacgacccccugcagcccgagcuggacagcuucaaggaggagcuggacaaguacuucaagaaccacaccagcccagacguggaccugggcgacaucagcggcaucaacgccagcguggugaacauccagaaggagaucgaccggcugaacgagguggccaagaaccugaacgagagccugaucgaccugcaggagcugggcaaguacgagcaguacaucaaguggcccugguacaucuggcugggcuucaucgccggccugaucgccaucgugauggugaccaucaugcugugcugcaugaccagcugcuguagcugccugaagggcugcugcagcugcggcagcugcugcaaguucgacgaggacgacagcgagcccgugcugaagggcgugaagcugcacuacaccugaggacuaguuauaagacugacuagcccgaugggccucccaacgggcccuccuccccuccuugcaccgagagaucuaaaaaaaaaaaaaaaaaaaaaaaaaaaaaaaaaaaaaaaaaaaaaaaaaaaaaaaaaaaaaaaaaaaaaaaaaaaaaaaaaaaaaaaaaaaaaaaaaaaa

SEQ ID NO: 26005 - RNA, 4002 nt, Artificial Sequence
  SARS-CoV-2/Wuhan/WIV05/2019__EPI_ISL_402128 spike protein mRNA gc (1-1273)(K986P_V987P_K986P_V987P_L18F_D80A_D215G_L242del_A243del_ L244del_R246I_K417N_E484K_N501Y_D614G_A701V)
aggagaaagcuuaccauguucguguuccuggugcugcugccccuggugagcagccagugcgugaacuucaccacccggacccagcugcccccugccuacaccaacagcuucacccggggcguguacuaccccgacaagguguuccggagcagcgugcugcacagcacccaggaccuguuccugcccuucuucagcaacgugaccugguuccacgccauccacgugagcggcaccaacggcaccaagcgguucgccaacccagugcugcccuucaacgacggcguguacuucgccagcaccgagaagucaaacaucauccggggcuggaucuuuggcaccacccuggacagcaagacacagagccugcugaucgugaacaacgcuaccaacguggugaucaaggugugcgaguuccaguucugcaacgaccccuuccugggcguguacuaccacaagaacaacaagagcuggauggagagcgaguuccgggucuacagcagcgccaacaauugcaccuucgaguacgugagccagcccuuccugauggaccuggagggcaagcagggcaacuucaagaaccuccgggaguucguguucaagaacaucgacggcuacuucaagaucuacagcaagcacacccccaucaaccuggugcggggacugccccagggcuucagcgcccuggagccucugguggaucugcccaucggcaucaacaucaccagguuccagacccugcacaucagcuaccugacccccggcgacagcagcagcggcuggaccgccggcgccgccgcauacuacgugggcuaccugcagccacggaccuuccugcugaaguacaacgagaacggcaccaucaccgacgccguggacugcgcccuggacccccugagcgagaccaagugcacccuuaagagcuucaccguggagaagggcaucuaccagaccagcaacuuccgggugcagcccacugagagcauugugcgguuccccaacaucaccaaccugugucccuucggcgagguguucaacgccacccgguucgccagcguguacgccuggaaccggaagcggaucagcaacugcguggccgacuacagcgugcuguacaacagcgccagcuucagcaccuucaagugcuacggcgugagcccuaccaagcugaacgaccugugcuucaccaacguguacgcugacagcuucgugauccggggcgacgaggugcggcagaucgcccccggccagaccggcaacaucgccgacuacaacuacaagcugcccgacgacuucaccggcugcgugaucgccuggaacagcaacaaccuggacagcaaggugggcggcaacuacaacuaccuguaccggcuauuccguaagagcaaccugaagccauuugagcgggacaucagcaccgagaucuaccaggccgguagcacccccugcaacggcgugaagggcuucaacugcuacuucccccugcagagcuacggcuuccagcccaccuacggcgugggcuaccagcccuaccgggugguggugcugagcuucgagcugcugcacgcccccgccaccgugugcggcccuaaaaagagcaccaaccuggugaagaacaagugcgugaacuucaauuucaacggccugaccggcaccggcgugcugaccgagagcaacaagaaguuccugcccuuccagcaguucggccgggacaucgccgacaccaccgaugcagugcgggacccccagacccuggagauccuggacaucaccccaugcagcuucggcggcgugagcgucaucacccccggaacaaacaccagcaaccagguggccgugcuguaccagggcgugaacugcaccgaggugcccguggccauccacgccgaccagcugacccccaccuggcggguguacagcaccggcagcaacguguuccagacccgggccggcugccugaucggcgccgagcacgugaacaacuccuacgagugcgacauccccaucggcgcuggcaucugcgccagcuaccagacccagaccaacagcccccggcgggcccggagcguggccagccagagcaucaucgccuacaccaugagccugggcguggagaacagcguggccuacagcaacaacagcaucgccaucccuaccaacuucaccauaagcgugaccaccgagauccugcccgugagcaugaccaagaccagcguggacuguaccauguacaucugcggcgacagcaccgagugcagcaaccuguuacugcaguacggcagcuucugcacccagcugaaccgggcgcugaccggcaucgccguggagcaggacaagaacacccaagagguguucgcccaggugaagcagaucuacaagacucccccaaucaaggacuucggcggcuucaacuucagccagauccugcccgaccccagcaagcccagcaagcggagcuucaucgaggaccugcuguucaacaaggugacccuggccgacgccggcuucaucaagcaguacggggacugccugggcgacaucgccgcccgggaccugaucugcgcucagaaguucaacggccugaccgugcugcccccucugcugaccgaugagaugaucgcccaguacaccagcgcccugcuggccggcaccaucaccagcggcuggaccuucggcgccggcgccgcacugcagauccccuucgccaugcagauggccuaccgguucaacggcaucggcgugacccagaacgugcuguacgagaaccagaagcugaucgccaaccaguucaacagcgccaucggcaagauccaggacagccugagcagcaccgccagcgcccugggcaagcugcaggacguggugaaccagaacgcccaggcucugaacacccuggugaagcagcugagcagcaacuuuggcgccaucagcucagugcugaaugacauccugagccggcuggaucccccagaggccgaggugcagaucgacaggcugaucaccggccggcugcagagccugcagaccuacgugacccagcagcugauccgggccgccgagauucgggccagcgccaaccuggccgcaaccaagaugagcgagugcgugcugggccagagcaagcggguggacuucugcggcaagggcuaccaccugaugagcuucccccagagcgcuccccacggcgugguguuccugcacgucacauacgugcccgcccaggagaagaacuucaccaccgcccccgccaucugccacgacggaaaggcccacuucccccgggagggcguguucgugagcaacggcacccacugguucgugacccagcggaacuucuacgagccucagaucaucaccaccgacaacaccuucgugagcggcaacugcgacguggugaucggcaucgugaacaacaccguguacgacccccugcagcccgagcuggacagcuucaaggaggagcucgacaaguacuucaagaaccacaccagcccagacguggaccugggcgacaucagcggcaucaacgccagcguggugaacauccagaaggagaucgaccggcugaacgagguggccaagaaccugaacgagagccugaucgaccugcaggagcugggcaaguacgagcaguacaucaaguggcccugguacaucuggcugggcuucaucgccggccugaucgccaucgugauggugaccaucaugcugugcugcaugaccagcugcuguagcugccugaagggcugcugcagcugcggcagcugcugcaaguucgacgaggacgacagcgagcccgugcugaagggcgugaagcugcacuacaccugaggacuaguuauaagacugacuagcccgaugggccucccaacgggcccuccuccccuccuugcaccgagagaucuaaaaaaaaaaaaaaaaaaaaaaaaaaaaaaaaaaaaaaaaaaaaaaaaaaaaaaaaaaaaaaaaaaaaaaaaaaaaaaaaaaaaaaaaaaaaaaaaaaaa

SEQ ID NO: 26006 - RNA, 4011 nt, Artificial Sequence
  SARS-CoV-2/Wuhan/WIV05/2019__EPI_ISL_402128 spike protein mRNA gc (1-1273)(K986P_V987P_K986P_V987P_E484K_D614G)
aggagaaagcuuaccauguucguguuccuggugcugcugccccuggugagcagccagugcgugaaccugaccacccggacccagcugcccccugccuacaccaacagcuucacccggggcguguacuaccccgacaagguguuccggagcagcgugcugcacagcacccaggaccuguuccugcccuucuucagcaacgugaccugguuccacgccauccacgugagcggcaccaacggcaccaagcgguucgacaacccagugcugcccuucaacgacggcguguacuucgccagcaccgagaagucaaacaucauccggggcuggaucuucggcaccacccuggacagcaagacacagagccugcugaucgugaacaacgccaccaacguggugaucaaggugugcgaguuucaguucugcaacgaccccuuccugggcguguacuaccacaagaacaacaagagcuggauggagagcgaguuccgggucuacagcagcgcuaacaauugcaccuucgaguacgugagccagcccuuccugauggaccucgagggcaagcagggcaacuucaagaaccugcgggaguucguguucaagaacaucgauggcuacuucaagaucuacagcaagcacacccccaucaaccuggugcgggaccugccccagggauucagcgcccuggagccucugguggaccugcccaucggcaucaacaucaccagguuccagacccugcuggcccugcaccggagcuaccugacccccggcgacagcagcagcggcuggaccgccggcgccgccgcauacuacgugggcuaccugcagccacggaccuuccugcugaaguacaacgagaacggcaccaucaccgacgccguggacugcgcccuggacccccugagcgagaccaagugcacccuaaagagcuucaccguggagaagggcaucuaccagaccagcaacuuccgggugcagcccacugagagcaucgugcgguuccccaacauuaccaaccugugucccuucggcgagguguucaacgccacccgguucgccagcguguacgccuggaaccggaagcggaucagcaacugcguggccgacuacagcgugcuguacaacagcgccagcuucagcaccuucaagugcuacggcgugagcccuaccaagcugaacgaccugugcuucaccaacguguacgcugacagcuucgugauccggggcgacgaggugcggcagaucgcccccggccagaccggcaagaucgccgacuacaacuacaagcugcccgacgacuucaccggcugcgugaucgccuggaacagcaacaaccuggacagcaaggugggcggcaacuacaacuaccuguaccggcuguuccguaagagcaaccugaagccauucgagcgggacaucagcaccgagaucuaccaggccggcagcacccccugcaacggugugaagggcuuuaacugcuacuucccccugcagagcuacggcuuccagcccaccaacggcgugggcuaccagcccuaccgggugguggugcugagcuucgagcugcugcacgcccccgccaccgugugcggcccuaaaaagagcaccaaccuggugaagaacaagugcgugaacuucaauuucaacggccugaccggcaccggcgugcugaccgagagcaacaagaaguuccugcccuuccagcaguucggccgggauaucgccgacaccaccgacgcagugcgggacccccagacccuggagauccuggacaucaccccaugcagcuucggcggcgugagcgucaucacccccggcacaaacaccagcaaccagguggccgugcuguaccagggagugaacugcaccgaggugcccguggccauccacgccgaccagcugacccccaccuggcggguguacagcaccggcagcaacguguuccagacccgggccggcugccugaucggcgccgagcacgugaacaacuccuacgagugcgacauccccaucggcgcuggcaucugcgccagcuaccagacccagaccaacagcccccggcgggcccggagcguggccagccagagcaucaucgccuacaccaugagcuuaggcgccgagaacagcguggccuacagcaacaacagcaucgcgaucccuaccaacuucaccaucagcgugaccaccgagauacugcccgugagcaugaccaagaccagcguggacuguaccauguacaucugcggcgacagcaccgagugcagcaaccugcugcugcaguacggcagcuucugcacccagcugaaccgggcccugaccggcaucgccguggagcaggacaagaacacccaagagguguucgcccaggugaagcagaucuacaagacucccccaaucaaggacuucggcggcuucaacuucagccagauccugcccgaccccagcaagcccagcaagcggagcuucaucgaggaccugcuguucaacaaggugacccuggccgacgccggcuucaucaagcaguacggcgacugccugggggauaucgccgcucgggaccugaucugcgcccagaaguucaacggccugaccgugcugcccccucugcugaccgacgagaugaucgcccaguacaccagcgcccugcuugccggcaccaucaccagcggcuggaccuucggcgccggcgcagcccugcagauccccuucgccaugcagauggccuaccgguucaacggcaucggcgugacccagaacgugcuguacgagaaccagaagcugaucgccaaccaguucaacagcgccaucggcaagauccaggacagccugagcagcaccgccagcgcccugggcaagcugcaggacguggugaaccagaacgcucaggcccugaacacccuggugaagcagcugagcagcaacuucggcgccaucagcucagugcugaaugacauccugagcaggcuggaucccccagaggccgaggugcagaucgaccggcugaucaccggccggcugcagagccugcagaccuacgugacccagcagcugauccgggccgccgagauccgggccagcgccaaccuggcagccaccaagaugagcgagugcgugcugggccagagcaagcggguggacuuuugcggcaagggcuaccaccugaugagcuucccccagagcgcuccccacggcgugguguuccuccacgugacauacguccccgcccaggagaagaacuucaccaccgcccccgccauuugccacgacggcaaggcccacuucccccgggagggaguguucgugagcaacggcacccacugguucgugacccagcggaacuucuacgagccucagaucaucaccaccgacaacaccuucgugagcggcaacugcgacguggugaucggcaucgugaacaacaccguguacgacccccugcagcccgagcuggacagcuucaaggaggagcuggacaaguacuucaagaaccacaccagcccagacguggaccugggcgacaucagcggcaucaacgccagcguggugaacauccagaaggagaucgaccggcugaacgagguggccaagaaccugaacgagagccugaucgaccugcaggagcugggcaaguacgagcaguacaucaaguggcccugguacaucuggcugggcuucaucgccggccugaucgccaucgugauggugaccaucaugcugugcugcaugaccagcugcuguagcugccugaagggcugcugcagcugcggcagcugcugcaaguucgacgaggacgacagcgagcccgugcugaagggcgugaagcugcacuacaccugaggacuaguuauaagacugacuagcccgaugggccucccaacgggcccuccuccccuccuugcaccgagagaucuaaaaaaaaaaaaaaaaaaaaaaaaaaaaaaaaaaaaaaaaaaaaaaaaaaaaaaaaaaaaaaaaaaaaaaaaaaaaaaaaaaaaaaaaaaaaaaaaaaaa

SEQ ID NO: 26007 - RNA, 4011 nt, Artificial Sequence
  SARS-CoV-2/Wuhan/WIV05/2019__EPI_ISL_402128 spike protein mRNA gc (1-1273)(K986P_V987P_K986P_V987P_L18F_T20N_P26S_D138Y_R190S_K417T _E484K_N501Y_D614G_H655Y_T1027I)
aggagaaagcuuaccauguucguguuccuggugcugcugccccuggugagcagccagugcgugaacuucaccaaccggacccagcugcccagcgccuacaccaacagcuucacccggggcguguacuacccugacaagguguuccggagcagcgugcugcacagcacccaggaccuguuccugcccuucuucagcaacgugaccugguuccacgccauccacgugagcggcaccaacggcaccaagcgguucgacaaccccgugcugccauucaacgacggcguguacuucgccagcaccgagaagucaaacaucauccggggcuggaucuuuggcaccacccuggacagcaagacccagagccugcugaucgugaacaacgccacaaacguggugaucaaggugugcgaguuccaguucugcaacuaccccuuccugggcguguacuaccacaagaacaacaagagcuggauggagagcgaguuccgggucuacagcagcgcuaauaacugcaccuucgaguacgugagccagcccuuccugauggaccuggagggcaagcagggcaacuucaagaaccucagcgaguucguguucaagaacaucgacggcuacuucaagaucuacagcaagcacacccccaucaaccuggugcgggaucugccccagggauucagcgcccuggagccccugguggaccugccuaucggcaucaacaucacccgguuccagacccugcuggcccugcacaggagcuaccugacccccggcgacagcagcagcggcuggaccgccggcgccgccgcauacuacgugggcuaccugcagccccggaccuuccugcugaaguacaacgagaacggcaccaucaccgacgccguggacugcgcccuggacccacugagcgagaccaagugcacccuaaagagcuucaccguggagaagggcaucuaccagaccagcaacuuccgggugcagcccaccgagagcaucgugcgguuccccaacauuacuaaccugugucccuucggcgagguguucaacgccacccgguucgccagcguguacgccuggaaccggaagcggaucagcaacugcguggccgacuacagcgugcuguacaacagcgccagcuucagcaccuucaagugcuacggcgugagccccaccaagcugaacgaccugugcuucaccaacguguacgcugacagcuucgugauccggggcgacgaggugcggcagaucgccccuggccagaccggcaccaucgccgacuacaacuacaagcugcccgacgacuucaccggcugcgugaucgccuggaacagcaacaaccuggacagcaaggugggcggcaacuacaacuaccuguaccggcuguuccguaagagcaaccugaagcccuuugagcgggacaucagcaccgagaucuaccaggccggcagcaccccaugcaacggugugaagggcuucaacugcuacuucccccugcagagcuacggcuuccagcccaccuacggcgugggcuaccagcccuaccgggugguggugcugagcuucgagcugcugcacgcccccgccaccgugugcggccccaaaaagagcaccaaccuggugaagaacaagugcgugaacuucaauuucaacggccugaccggcaccggcgugcugaccgagagcaacaagaaguuccugccuuuccagcaguucggccgggacaucgccgauaccaccgacgcagugcgggacccccagacccuggagauccuggacaucacccccugcagcuucggcggcgugagcgucaucaccccaggcacaaacaccagcaaccagguggccgugcuguaccagggagugaacugcaccgaggugcccguggccauccacgccgaccagcugacccccaccuggcggguguacuccaccggcagcaacguguuccagacccgggccggcugccugaucggcgccgaguacgugaacaacagcuacgagugcgacauccccaucggcgcuggcaucugcgccagcuaccagacccagaccaacagcccccggcgggcccggagcguggccagccagagcaucaucgccuacaccaugagccugggcgccgagaacagcguggccuacagcaacaacagcaucgcgauccccaccaacuucaccaucagcgugaccaccgagauauuaccugugagcaugaccaagaccagcguggacuguaccauguacaucugcggcgacagcaccgagugcagcaaccugcugcugcaguacggcagcuucugcacccagcugaaccgggcccugaccggcaucgccguggagcaggacaagaacacccaagagguguucgcccaggugaagcagaucuacaagacuccacccaucaaggacuucggcggcuucaacuucagccagauccugcccgaccccagcaagcccagcaagcggagcuucaucgaggaccugcuguucaacaaggugacccuggccgacgccggcuucaucaagcaguacggcgacugccugggggacaucgccgcucgggaucugaucugcgcccagaaguucaacggccugaccgugcugccuccccugcugaccgacgagaugaucgcccaguacaccagcgcccugcuggccggcaccaucaccagcggcuggaccuucggcgccggcgcagcccuucagauccccuucgccaugcagauggccuaccgguucaacggcaucggcgugacccagaacgugcuguacgagaaccagaagcugaucgccaaccaguucaacagcgccaucggcaagauccaggacagccugagcagcaccgccagcgcccugggcaagcugcaggacguggugaaccagaacgcucaggcccugaacacccuggugaagcagcugagcucaaacuuuggcgccaucagcagcgugcugaaugacauccugagccggcuggacccacccgaggccgaggugcagaucgacaggcugaucaccggccggcugcagagccugcagaccuacgugacccagcagcugauccgggccgccgagauccgggccagcgccaaccuggcagccauuaagaugagcgagugcgugcugggccagagcaagcggguggacuucugcggcaagggcuaccaccugaugagcuucccccagagcgcuccccacggcgugguguuccugcacgugaccuacguccccgcccaggagaagaacuucacaaccgcccccgccaucugccacgacggcaaggcccacuucccccgggagggaguguucgugagcaacggcacccacugguucgugacccagcggaacuucuacgagccccagaucaucaccaccgacaacaccuucgugagcggcaacugcgacguggugaucggcaucgugaacaacaccguguacgacccucuccagcccgagcuggacagcuucaaggaggagcuggacaaguacuucaagaaccacaccagccccgacguggaccugggcgauaucagcggcaucaacgccagcguggugaacauccagaaggagaucgaccggcugaacgagguggccaagaaccugaacgagagccugaucgaccugcaggagcugggcaaguacgagcaguacaucaaguggccaugguacaucuggcugggcuucaucgccggccugaucgccaucgugauggugaccaucaugcugugcugcaugaccagcugcuguagcugccugaagggcugcugcagcugcggcagcugcugcaaguucgacgaggacgacagcgagcccgugcugaagggcgugaagcugcacuacaccugaggacuaguuauaagacugacuagcccgaugggccucccaacgggcccuccuccccuccuugcaccgagagaucuaaaaaaaaaaaaaaaaaaaaaaaaaaaaaaaaaaaaaaaaaaaaaaaaaaaaaaaaaaaaaaaaaaaaaaaaaaaaaaaaaaaaaaaaaaaaaaaaaaaa

SEQ ID NO: 26008 - RNA, 4011 nt, Artificial Sequence
  SARS-CoV-2/Wuhan/WIV05/2019__EPI_ISL_402128 spike protein mRNA gc (1-1273)(K986P_V987P_K986P_V987P_S13I_W152C_L452R_D614G)
aggagaaagcuuaccauguucguguuccuggugcugcugccccuggugagcauccagugcgugaaccugaccacccggacccagcugcccccugccuacaccaacagcuucacccggggcguguacuaccccgacaagguguuccggagcagcgugcugcacagcacccaggaccuguuccugcccuucuucagcaacgugaccugguuccacgccauccacgugagcggcaccaacggcaccaagcgguucgacaacccagugcugcccuucaacgacggcguguacuucgccagcaccgagaagucaaacaucauccggggcuggaucuucggcaccacccuggacagcaagacacagagccugcugaucgugaacaacgccaccaacguggugaucaaggugugcgaguuucaguucugcaacgaccccuuccugggcguguacuaccacaagaacaacaagagcugcauggagagcgaguuccgggucuacagcagcgcuaacaauugcaccuucgaguacgugagccagcccuuccugauggaccucgagggcaagcagggcaacuucaagaaccugcgggaguucguguucaagaacaucgauggcuacuucaagaucuacagcaagcacacccccaucaaccuggugcgggaccugccccagggauucagcgcccuggagccucugguggaccugcccaucggcaucaacaucaccagguuccagacccugcuggcccugcaccggagcuaccugacccccggcgacagcagcagcggcuggaccgccggcgccgccgcauacuacgugggcuaccugcagccacggaccuuccugcugaaguacaacgagaacggcaccaucaccgacgccguggacugcgcccuggacccccugagcgagaccaaguguacccuaaagagcuucaccguggagaagggcaucuaccagaccagcaacuuccgggugcagcccacugagagcauugugcgguuccccaacaucaccaaccugugccccuucggcgagguguucaacgccacccgguucgccagcguguacgccuggaaccggaagcggaucagcaacugcguggccgacuacagcgugcuguacaacagcgccagcuucagcaccuucaagugcuacggcgugagcccuaccaagcugaacgaccugugcuucaccaacguguacgcugacagcuucgugauccggggcgacgaggugcggcagaucgcccccggccagaccggcaagaucgccgacuacaacuacaagcugcccgacgacuucaccggcugcgugaucgccuggaacagcaacaaccuggacagcaaggugggcggcaacuacaacuaccgguaccggcuguuccguaagagcaaccugaagccauucgagcgggacaucagcaccgagaucuaccaggccggcagcacccccugcaacgguguggagggcuuuaacugcuacuucccccugcagagcuacggcuuccagcccaccaacggcgugggcuaccagcccuaccgggugguggugcugagcuucgagcugcugcacgcccccgccaccgugugcggcccuaaaaagagcaccaaccuggugaagaacaagugcgugaacuucaauuucaacggccugaccggcaccggcgugcugaccgagagcaacaagaaguuccugcccuuccagcaguucggccgggauaucgccgacaccaccgacgcagugcgggacccccagacccuggagauccuggacaucaccccaugcagcuucggcggcgugagcgucaucacccccggcacaaacaccagcaaccagguggccgugcuguaccagggagugaacugcaccgaggugcccguggccauccacgccgaccagcugacccccaccuggcggguguacagcaccggcagcaacguguuccagacccgggccggcugccugaucggcgccgagcacgugaacaacagcuacgagugcgacauccccaucggcgcuggcaucugugccuccuaccagacccagaccaacagcccccggcgggcccggagcguggccagccagagcaucaucgccuacaccaugagccugggcgccgagaacagcguggccuacagcaacaacagcaucgcgaucccuaccaacuucaccauaagcgugaccaccgagaucuuacccgugagcaugaccaagaccagcguggacugcaccauguacaucugcggcgacagcaccgagugcagcaaccugcugcugcaguacggcagcuucugcacccagcugaaccgggcccugaccggcaucgccguggagcaggacaagaacacccaagagguguucgcccaggugaagcagaucuacaagacucccccaaucaaggacuucggcggcuucaacuucagccagauccugcccgaccccagcaagcccagcaagcggagcuucaucgaggaccugcuguucaacaaggugacccuggccgacgccggcuucaucaagcaguacggcgacugccugggggauaucgccgcucgggaccugaucugcgcccagaaguucaacggccugaccgugcugcccccucugcugaccgacgagaugaucgcccaguacaccagcgcccugcuggccggcaccaucaccagcggcuggaccuucggcgccggcgcagcccuucagauccccuucgccaugcagauggccuacagguucaacggcaucggcgugacccagaacgugcuguacgagaaccagaagcugaucgccaaccaguucaacagcgccaucggcaagauccaggacagccugagcagcaccgccagcgcccugggcaagcugcaggacguggugaaccagaacgcucaggcccugaacacccuggugaagcagcugagcagcaacuucggcgccaucagcagcgugcugaaugacauccugucacggcuggaucccccagaggccgaggugcagaucgaccggcugaucaccggccggcugcagagccugcagaccuacgugacccagcagcugauccgggccgccgagauucgggccagcgccaaccuggcagccaccaagaugagcgagugcgugcugggccagagcaagcggguggacuuuugcggcaagggcuaccaccugaugagcuucccccagagcgcuccccacggcgugguguuccugcacgugacauacguccccgcccaggagaagaacuucaccaccgcccccgccaucugccacgacggcaaggcccacuucccccgggagggaguguucgugagcaacggcacccacugguucgugacccagcggaacuucuacgagccucagaucaucaccaccgacaacaccuucgugagcggcaacugcgacguggugaucggcaucgugaacaacaccguguacgacccccuccagcccgagcuggacagcuucaaggaggagcuggacaaguacuucaagaaccacaccagcccagacguggaccugggcgacaucagcggcaucaacgccagcguggugaacauccagaaggagaucgaccggcugaacgagguggccaagaaccugaacgagagccugaucgaccugcaggagcugggcaaguacgagcaguacaucaaguggcccugguacaucuggcugggcuucaucgccggccugaucgccaucgugauggugaccaucaugcugugcugcaugaccagcuguugcagcugccugaagggcugcugcagcugcggcagcugcugcaaguucgacgaggacgacagcgagcccgugcugaagggcgugaagcugcacuacaccugaggacuaguuauaagacugacuagcccgaugggccucccaacgggcccuccuccccuccuugcaccgagagaucuaaaaaaaaaaaaaaaaaaaaaaaaaaaaaaaaaaaaaaaaaaaaaaaaaaaaaaaaaaaaaaaaaaaaaaaaaaaaaaaaaaaaaaaaaaaaaaaaaaaa

SEQ ID NO: 26009 - RNA, 4011 nt, Artificial Sequence
  SARS-CoV-2/Wuhan/WIV05/2019__EPI_ISL_402128 spike protein mRNA gc mod (1-1273)(K986P_V987P)
aggagaaagcuuaccauguucguguuucuggugcugcugccccugguguccagccagugugugaaccugaccaccagaacacagcugccuccagccuacaccaacagcuucaccagaggcguguacuaccccgacaagguguucagauccagcgugcugcacucuacccaggaccuguuccugccuuucuucagcaacgugaccugguuccacgccauccacguguccggcaccaauggcaccaagagauucgacaaccccgugcugcccuucaacgacgggguguacuuugccagcaccgagaaguccaacaucaucagaggcuggaucuucggcaccacacuggacagcaagacccagagccugcugaucgugaacaacgccaccaacguggucaucaaagugugcgaguuccaguucugcaacgaccccuuccugggcgucuacuaccacaagaacaacaagagcuggauggaaagcgaguuccggguguacagcagcgccaacaacugcaccuucgaguacgugucccagccuuuccugauggaccuggaaggcaagcagggcaacuucaagaaccugcgcgaguucguguucaagaacaucgacggcuacuucaaaaucuacagcaagcacaccccuaucaaccucgugcgggaucugccucagggcuucucugcucuggaaccccugguggaucugcccaucggcaucaacaucacccgguuucagacacugcuggcccugcacagaagcuaccugacaccuggcgauagcagcagcggauggacagcuggugccgccgcuuacuaugugggcuaccugcagccuagaaccuuccugcugaaguacaacgagaacggcaccaucaccgacgccguggauugugcucuggauccucugagcgagacaaagugcacccugaaguccuucaccguggaaaagggcaucuaccagaccagcaacuuccgggugcagcccaccgaauccaucgugcgguuccccaauaucaccaaucugugccccuucggcgagguguucaaugccaccagauucgccucuguguacgccuggaaccggaagcggaucagcaauugcguggccgacuacuccgugcuguacaacuccgccagcuucagcaccuucaagugcuacggcguguccccuaccaagcugaacgaccugugcuucacaaacguguacgccgacagcuucgugauccggggagaugaagugcggcagauugccccuggacagacaggcaagaucgccgacuacaacuacaagcugcccgacgacuucaccggcugugugauugccuggaacagcaacaaccuggacuccaaagucggcggcaacuacaauuaccuguaccggcuguuccggaaguccaaucugaagcccuucgagcgggacaucagcaccgaaaucuaucaggccggcagcaccccuugcaacggcguggaaggcuucaacugcuacuucccacugcaguccuacggcuuucagcccacaaauggcgugggcuaucagcccuacagagugguggugcugagcuucgaacugcugcaugcuccugccacagugugcggcccuaagaaaagcaccaaucucgugaagaacaaaugcgugaacuucaacuucaacggccugaccggcaccggcgugcugacagagagcaacaagaaguuccugccauuccagcaguuuggccgggauaucgccgauaccacagacgccguuagagauccccagacacuggaaauccuggacaucaccccaugcagcuucggcggagugucugugaucaccccuggcaccaacaccagcaaucagguggcagugcuguaccaggacgugaacuguaccgaagugcccguggccauucacgccgaucagcugacaccuacauggcggguguacuccaccggcagcaauguguuucagaccagagccggcugucugaucggagccgagcacgugaacaauagcuacgagugcgacauccccaucggcgcuggcaucugugccagcuaccagacacagacaaacagccccagacgggcuagaagcguggccagccagagcaucauugccuacacaaugucucugggcgccgagaacagcguggccuacuccaacaacucuaucgcuauccccaccaacuucaccaucagcgugaccaccgagauccugccuguguccaugaccaagaccagcguggacugcaccauguacaucugcggcgauuccaccgagugcuccaaccugcugcugcaguacggcagcuucugcacccagcugaauagagcccugacagggaucgccguggaacaggacaagaacacccaagagguguucgcccaagugaagcaaaucuacaagaccccuccuaucaaggacuucggcggcuucaauuucagccagauucugcccgauccuagcaagcccagcaagcggagcuucaucgaggaccugcuguucaacaaagugacacuggccgacgccggcuucaucaagcaguauggcgauugucugggcgacauugccgccagggaucugauuugcgcccagaaguuuaacggacugacagugcugccuccucugcugaccgaugagaugaucgcccaguacacaucugcccugcuggccggcacaaucacaagcggcuggacauuuggagcuggcgccgcucugcagauccccuuugcuaugcagauggccuaccgguucaacggcaucggagugacccagaaugugcuguacgagaaccagaagcugaucgccaaccaguucaacagcgccaucggcaagauccaggacagccugagcagcacagcaagcgcccugggaaagcugcaggacguggucaaccagaaugcccaggcacugaacacccuggucaagcagcuguccuccaacuucggcgccaucagcucugugcugaacgauauccugagcagacuggacccuccugaggccgaggugcagaucgacagacugaucacaggcagacugcagagccuccagacauacgugacccagcagcugaucagagccgccgagauuagagccucugccaaucuggccgccaccaagaugucugagugugugcugggccagagcaagagaguggacuuuugcggcaagggcuaccaccugaugagcuucccucagucugccccucacggcgugguguuucugcacgugacauaugugcccgcucaagagaagaauuucaccaccgcuccagccaucugccacgacggcaaagcccacuuuccuagagaaggcguguucguguccaacggcacccauugguucgugacacagcggaacuucuacgagccccagaucaucaccaccgacaacaccuucgugucuggcaacugcgacguugugaucggcauugugaacaauaccguguacgacccucugcagcccgagcuggacagcuucaaagaggaacuggacaaguacuuuaagaaccacacaagccccgacguggaccugggcgauaucagcggaaucaaugccagcgucgugaacauccagaaagagaucgaccggcugaacgagguggccaagaaucugaacgagagccugaucgaccugcaagaacuggggaaguacgagcaguacaucaaguggcccugguacaucuggcugggcuuuaucgccggacugauugccaucgugauggucacaaucaugcuguguugcaugaccagcugcuguagcugccugaagggcuguuguagcuguggcagcugcugcaaguucgacgaggacgauucugagcccgugcugaagggcgugaaacugcacuacaccugaggacuaguuauaagacugacuagcccgaugggccucccaacgggcccuccuccccuccuugcaccgagagaucuaaaaaaaaaaaaaaaaaaaaaaaaaaaaaaaaaaaaaaaaaaaaaaaaaaaaaaaaaaaaaaaaaaaaaaaaaaaaaaaaaaaaaaaaaaaaaaaaaaaa

SEQ ID NO: 26010 - RNA, 4011 nt, Artificial Sequence
  SARS-CoV-2/Wuhan/WIV05/2019__EPI_ISL_402128 spike protein mRNA gc mod (1-1273)(K986P_V987P_ D614G)
aggagaaagcuuaccauguucguguuucuggugcugcugccccugguguccagccagugugugaaccugaccaccagaacacagcugccuccagccuacaccaacagcuucaccagaggcguguacuaccccgacaagguguucagauccagcgugcugcacucuacccaggaccuguuccugccuuucuucagcaacgugaccugguuccacgccauccacguguccggcaccaauggcaccaagagauucgacaaccccgugcugcccuucaacgacgggguguacuuugccagcaccgagaaguccaacaucaucagaggcuggaucuucggcaccacacuggacagcaagacccagagccugcugaucgugaacaacgccaccaacguggucaucaaagugugcgaguuccaguucugcaacgaccccuuccugggcgucuacuaccacaagaacaacaagagcuggauggaaagcgaguuccggguguacagcagcgccaacaacugcaccuucgaguacgugucccagccuuuccugauggaccuggaaggcaagcagggcaacuucaagaaccugcgcgaguucguguucaagaacaucgacggcuacuucaaaaucuacagcaagcacaccccuaucaaccucgugcgggaucugccucagggcuucucugcucuggaaccccugguggaucugcccaucggcaucaacaucacccgguuucagacacugcuggcccugcacagaagcuaccugacaccuggcgauagcagcagcggauggacagcuggugccgccgcuuacuaugugggcuaccugcagccuagaaccuuccugcugaaguacaacgagaacggcaccaucaccgacgccguggauugugcucuggauccucugagcgagacaaagugcacccugaaguccuucaccguggaaaagggcaucuaccagaccagcaacuuccgggugcagcccaccgaauccaucgugcgguuccccaauaucaccaaucugugccccuucggcgagguguucaaugccaccagauucgccucuguguacgccuggaaccggaagcggaucagcaauugcguggccgacuacuccgugcuguacaacuccgccagcuucagcaccuucaagugcuacggcguguccccuaccaagcugaacgaccugugcuucacaaacguguacgccgacagcuucgugauccggggagaugaagugcggcagauugccccuggacagacaggcaagaucgccgacuacaacuacaagcugcccgacgacuucaccggcugugugauugccuggaacagcaacaaccuggacuccaaagucggcggcaacuacaauuaccuguaccggcuguuccggaaguccaaucugaagcccuucgagcgggacaucagcaccgaaaucuaucaggccggcagcaccccuugcaacggcguggaaggcuucaacugcuacuucccacugcaguccuacggcuuucagcccacaaauggcgugggcuaucagcccuacagagugguggugcugagcuucgaacugcugcaugcuccugccacagugugcggcccuaagaaaagcaccaaucucgugaagaacaaaugcgugaacuucaacuucaacggccugaccggcaccggcgugcugacagagagcaacaagaaguuccugccauuccagcaguuuggccgggauaucgccgauaccacagacgccguuagagauccccagacacuggaaauccuggacaucaccccaugcagcuucggcggagugucugugaucaccccuggcaccaacaccagcaaucagguggcagugcuguaccagggcgugaacuguaccgaagugcccguggccauucacgccgaucagcugacaccuacauggcggguguacuccaccggcagcaauguguuucagaccagagccggcugucugaucggagccgagcacgugaacaauagcuacgagugcgacauccccaucggcgcuggcaucugugccagcuaccagacacagacaaacagccccagacgggcuagaagcguggccagccagagcaucauugccuacacaaugucucugggcgccgagaacagcguggccuacuccaacaacucuaucgcuauccccaccaacuucaccaucagcgugaccaccgagauccugccuguguccaugaccaagaccagcguggacugcaccauguacaucugcggcgauuccaccgagugcuccaaccugcugcugcaguacggcagcuucugcacccagcugaauagagcccugacagggaucgccguggaacaggacaagaacacccaagagguguucgcccaagugaagcaaaucuacaagaccccuccuaucaaggacuucggcggcuucaauuucagccagauucugcccgauccuagcaagcccagcaagcggagcuucaucgaggaccugcuguucaacaaagugacacuggccgacgccggcuucaucaagcaguauggcgauugucugggcgacauugccgccagggaucugauuugcgcccagaaguuuaacggacugacagugcugccuccucugcugaccgaugagaugaucgcccaguacacaucugcccugcuggccggcacaaucacaagcggcuggacauuuggagcuggcgccgcucugcagauccccuuugcuaugcagauggccuaccgguucaacggcaucggagugacccagaaugugcuguacgagaaccagaagcugaucgccaaccaguucaacagcgccaucggcaagauccaggacagccugagcagcacagcaagcgcccugggaaagcugcaggacguggucaaccagaaugcccaggcacugaacacccuggucaagcagcuguccuccaacuucggcgccaucagcucugugcugaacgauauccugagcagacuggacccuccugaggccgaggugcagaucgacagacugaucacaggcagacugcagagccuccagacauacgugacccagcagcugaucagagccgccgagauuagagccucugccaaucuggccgccaccaagaugucugagugugugcugggccagagcaagagaguggacuuuugcggcaagggcuaccaccugaugagcuucccucagucugccccucacggcgugguguuucugcacgugacauaugugcccgcucaagagaagaauuucaccaccgcuccagccaucugccacgacggcaaagcccacuuuccuagagaaggcguguucguguccaacggcacccauugguucgugacacagcggaacuucuacgagccccagaucaucaccaccgacaacaccuucgugucuggcaacugcgacguugugaucggcauugugaacaauaccguguacgacccucugcagcccgagcuggacagcuucaaagaggaacuggacaaguacuuuaagaaccacacaagccccgacguggaccugggcgauaucagcggaaucaaugccagcgucgugaacauccagaaagagaucgaccggcugaacgagguggccaagaaucugaacgagagccugaucgaccugcaagaacuggggaaguacgagcaguacaucaaguggcccugguacaucuggcugggcuuuaucgccggacugauugccaucgugauggucacaaucaugcuguguugcaugaccagcugcuguagcugccugaagggcuguuguagcuguggcagcugcugcaaguucgacgaggacgauucugagcccgugcugaagggcgugaaacugcacuacaccugaggacuaguuauaagacugacuagcccgaugggccucccaacgggcccuccuccccuccuugcaccgagagaucuaaaaaaaaaaaaaaaaaaaaaaaaaaaaaaaaaaaaaaaaaaaaaaaaaaaaaaaaaaaaaaaaaaaaaaaaaaaaaaaaaaaaaaaaaaaaaaaaaaaa

SEQ ID NO: 26011 - RNA, 4011 nt, Artificial Sequence
  SARS-CoV-2/Wuhan/WIV05/2019__EPI_ISL_402128 spike protein mRNA gc mod (1-1273)(K986P_V987P_A222V_D614G)
aggagaaagcuuaccauguucguguuucuggugcugcugccccugguguccagccagugugugaaccugaccaccagaacacagcugccuccagccuacaccaacagcuucaccagaggcguguacuaccccgacaagguguucagauccagcgugcugcacucuacccaggaccuguuccugccuuucuucagcaacgugaccugguuccacgccauccacguguccggcaccaauggcaccaagagauucgacaaccccgugcugcccuucaacgacgggguguacuuugccagcaccgagaaguccaacaucaucagaggcuggaucuucggcaccacacuggacagcaagacccagagccugcugaucgugaacaacgccaccaacguggucaucaaagugugcgaguuccaguucugcaacgaccccuuccugggcgucuacuaccacaagaacaacaagagcuggauggaaagcgaguuccggguguacagcagcgccaacaacugcaccuucgaguacgugucccagccuuuccugauggaccuggaaggcaagcagggcaacuucaagaaccugcgcgaguucguguucaagaacaucgacggcuacuucaaaaucuacagcaagcacaccccuaucaaccucgugcgggaucugccucagggcuucucugugcuggaaccccugguggaucugcccaucggcaucaacaucacccgguuucagacacugcuggcccugcacagaagcuaccugacaccuggcgauagcagcagcggauggacagcuggugccgccgcuuacuaugugggcuaccugcagccuagaaccuuccugcugaaguacaacgagaacggcaccaucaccgacgccguggauugugcucuggauccucugagcgagacaaagugcacccugaaguccuucaccguggaaaagggcaucuaccagaccagcaacuuccgggugcagcccaccgaauccaucgugcgguuccccaauaucaccaaucugugccccuucggcgagguguucaaugccaccagauucgccucuguguacgccuggaaccggaagcggaucagcaauugcguggccgacuacuccgugcuguacaacuccgccagcuucagcaccuucaagugcuacggcguguccccuaccaagcugaacgaccugugcuucacaaacguguacgccgacagcuucgugauccggggagaugaagugcggcagauugccccuggacagacaggcaagaucgccgacuacaacuacaagcugcccgacgacuucaccggcugugugauugccuggaacagcaacaaccuggacuccaaagucggcggcaacuacaauuaccuguaccggcuguuccggaaguccaaucugaagcccuucgagcgggacaucagcaccgaaaucuaucaggccggcagcaccccuugcaacggcguggaaggcuucaacugcuacuucccacugcaguccuacggcuuucagcccacaaauggcgugggcuaucagcccuacagagugguggugcugagcuucgaacugcugcaugcuccugccacagugugcggcccuaagaaaagcaccaaucucgugaagaacaaaugcgugaacuucaacuucaacggccugaccggcaccggcgugcugacagagagcaacaagaaguuccugccauuccagcaguuuggccgggauaucgccgauaccacagacgccguuagagauccccagacacuggaaauccuggacaucaccccaugcagcuucggcggagugucugugaucaccccuggcaccaacaccagcaaucagguggcagugcuguaccagggcgugaacuguaccgaagugcccguggccauucacgccgaucagcugacaccuacauggcggguguacuccaccggcagcaauguguuucagaccagagccggcugucugaucggagccgagcacgugaacaauagcuacgagugcgacauccccaucggcgcuggcaucugugccagcuaccagacacagacaaacagccccagacgggcuagaagcguggccagccagagcaucauugccuacacaaugucucugggcgccgagaacagcguggccuacuccaacaacucuaucgcuauccccaccaacuucaccaucagcgugaccaccgagauccugccuguguccaugaccaagaccagcguggacugcaccauguacaucugcggcgauuccaccgagugcuccaaccugcugcugcaguacggcagcuucugcacccagcugaauagagcccugacagggaucgccguggaacaggacaagaacacccaagagguguucgcccaagugaagcaaaucuacaagaccccuccuaucaaggacuucggcggcuucaauuucagccagauucugcccgauccuagcaagcccagcaagcggagcuucaucgaggaccugcuguucaacaaagugacacuggccgacgccggcuucaucaagcaguauggcgauugucugggcgacauugccgccagggaucugauuugcgcccagaaguuuaacggacugacagugcugccuccucugcugaccgaugagaugaucgcccaguacacaucugcccugcuggccggcacaaucacaagcggcuggacauuuggagcuggcgccgcucugcagauccccuuugcuaugcagauggccuaccgguucaacggcaucggagugacccagaaugugcuguacgagaaccagaagcugaucgccaaccaguucaacagcgccaucggcaagauccaggacagccugagcagcacagcaagcgcccugggaaagcugcaggacguggucaaccagaaugcccaggcacugaacacccuggucaagcagcuguccuccaacuucggcgccaucagcucugugcugaacgauauccugagcagacuggacccuccugaggccgaggugcagaucgacagacugaucacaggcagacugcagagccuccagacauacgugacccagcagcugaucagagccgccgagauuagagccucugccaaucuggccgccaccaagaugucugagugugugcugggccagagcaagagaguggacuuuugcggcaagggcuaccaccugaugagcuucccucagucugccccucacggcgugguguuucugcacgugacauaugugcccgcucaagagaagaauuucaccaccgcuccagccaucugccacgacggcaaagcccacuuuccuagagaaggcguguucguguccaacggcacccauugguucgugacacagcggaacuucuacgagccccagaucaucaccaccgacaacaccuucgugucuggcaacugcgacguugugaucggcauugugaacaauaccguguacgacccucugcagcccgagcuggacagcuucaaagaggaacuggacaaguacuuuaagaaccacacaagccccgacguggaccugggcgauaucagcggaaucaaugccagcgucgugaacauccagaaagagaucgaccggcugaacgagguggccaagaaucugaacgagagccugaucgaccugcaagaacuggggaaguacgagcaguacaucaaguggcccugguacaucuggcugggcuuuaucgccggacugauugccaucgugauggucacaaucaugcuguguugcaugaccagcugcuguagcugccugaagggcuguuguagcuguggcagcugcugcaaguucgacgaggacgauucugagcccgugcugaagggcgugaaacugcacuacaccugaggacuaguuauaagacugacuagcccgaugggccucccaacgggcccuccuccccuccuugcaccgagagaucuaaaaaaaaaaaaaaaaaaaaaaaaaaaaaaaaaaaaaaaaaaaaaaaaaaaaaaaaaaaaaaaaaaaaaaaaaaaaaaaaaaaaaaaaaaaaaaaaaaaa

SEQ ID NO: 26012 - RNA, 4011 nt, Artificial Sequence
  SARS-CoV-2/Wuhan/WIV05/2019__EPI_ISL_402128 spike protein mRNA gc mod (1-1273)(K986P_V987P_N439K_D614G)
aggagaaagcuuaccauguucguguuucuggugcugcugccccugguguccagccagugugugaaccugaccaccagaacacagcugccuccagccuacaccaacagcuucaccagaggcguguacuaccccgacaagguguucagauccagcgugcugcacucuacccaggaccuguuccugccuuucuucagcaacgugaccugguuccacgccauccacguguccggcaccaauggcaccaagagauucgacaaccccgugcugcccuucaacgacgggguguacuuugccagcaccgagaaguccaacaucaucagaggcuggaucuucggcaccacacuggacagcaagacccagagccugcugaucgugaacaacgccaccaacguggucaucaaagugugcgaguuccaguucugcaacgaccccuuccugggcgucuacuaccacaagaacaacaagagcuggauggaaagcgaguuccggguguacagcagcgccaacaacugcaccuucgaguacgugucccagccuuuccugauggaccuggaaggcaagcagggcaacuucaagaaccugcgcgaguucguguucaagaacaucgacggcuacuucaaaaucuacagcaagcacaccccuaucaaccucgugcgggaucugccucagggcuucucugcucuggaaccccugguggaucugcccaucggcaucaacaucacccgguuucagacacugcuggcccugcacagaagcuaccugacaccuggcgauagcagcagcggauggacagcuggugccgccgcuuacuaugugggcuaccugcagccuagaaccuuccugcugaaguacaacgagaacggcaccaucaccgacgccguggauugugcucuggauccucugagcgagacaaagugcacccugaaguccuucaccguggaaaagggcaucuaccagaccagcaacuuccgggugcagcccaccgaauccaucgugcgguuccccaauaucaccaaucugugccccuucggcgagguguucaaugccaccagauucgccucuguguacgccuggaaccggaagcggaucagcaauugcguggccgacuacuccgugcuguacaacuccgccagcuucagcaccuucaagugcuacggcguguccccuaccaagcugaacgaccugugcuucacaaacguguacgccgacagcuucgugauccggggagaugaagugcggcagauugccccuggacagacaggcaagaucgccgacuacaacuacaagcugcccgacgacuucaccggcugugugauugccuggaacagcaagaaccuggacuccaaagucggcggcaacuacaauuaccuguaccggcuguuccggaaguccaaucugaagcccuucgagcgggacaucagcaccgaaaucuaucaggccggcagcaccccuugcaacggcguggaaggcuucaacugcuacuucccacugcaguccuacggcuuucagcccacaaauggcgugggcuaucagcccuacagagugguggugcugagcuucgaacugcugcaugcuccugccacagugugcggcccuaagaaaagcaccaaucucgugaagaacaaaugcgugaacuucaacuucaacggccugaccggcaccggcgugcugacagagagcaacaagaaguuccugccauuccagcaguuuggccgggauaucgccgauaccacagacgccguuagagauccccagacacuggaaauccuggacaucaccccaugcagcuucggcggagugucugugaucaccccuggcaccaacaccagcaaucagguggcagugcuguaccagggcgugaacuguaccgaagugcccguggccauucacgccgaucagcugacaccuacauggcggguguacuccaccggcagcaauguguuucagaccagagccggcugucugaucggagccgagcacgugaacaauagcuacgagugcgacauccccaucggcgcuggcaucugugccagcuaccagacacagacaaacagccccagacgggcuagaagcguggccagccagagcaucauugccuacacaaugucucugggcgccgagaacagcguggccuacuccaacaacucuaucgcuauccccaccaacuucaccaucagcgugaccaccgagauccugccuguguccaugaccaagaccagcguggacugcaccauguacaucugcggcgauuccaccgagugcuccaaccugcugcugcaguacggcagcuucugcacccagcugaauagagcccugacagggaucgccguggaacaggacaagaacacccaagagguguucgcccaagugaagcaaaucuacaagaccccuccuaucaaggacuucggcggcuucaauuucagccagauucugcccgauccuagcaagcccagcaagcggagcuucaucgaggaccugcuguucaacaaagugacacuggccgacgccggcuucaucaagcaguauggcgauugucugggcgacauugccgccagggaucugauuugcgcccagaaguuuaacggacugacagugcugccuccucugcugaccgaugagaugaucgcccaguacacaucugcccugcuggccggcacaaucacaagcggcuggacauuuggagcuggcgccgcucugcagauccccuuugcuaugcagauggccuaccgguucaacggcaucggagugacccagaaugugcuguacgagaaccagaagcugaucgccaaccaguucaacagcgccaucggcaagauccaggacagccugagcagcacagcaagcgcccugggaaagcugcaggacguggucaaccagaaugcccaggcacugaacacccuggucaagcagcuguccuccaacuucggcgccaucagcucugugcugaacgauauccugagcagacuggacccuccugaggccgaggugcagaucgacagacugaucacaggcagacugcagagccuccagacauacgugacccagcagcugaucagagccgccgagauuagagccucugccaaucuggccgccaccaagaugucugagugugugcugggccagagcaagagaguggacuuuugcggcaagggcuaccaccugaugagcuucccucagucugccccucacggcgugguguuucugcacgugacauaugugcccgcucaagagaagaauuucaccaccgcuccagccaucugccacgacggcaaagcccacuuuccuagagaaggcguguucguguccaacggcacccauugguucgugacacagcggaacuucuacgagccccagaucaucaccaccgacaacaccuucgugucuggcaacugcgacguugugaucggcauugugaacaauaccguguacgacccucugcagcccgagcuggacagcuucaaagaggaacuggacaaguacuuuaagaaccacacaagccccgacguggaccugggcgauaucagcggaaucaaugccagcgucgugaacauccagaaagagaucgaccggcugaacgagguggccaagaaucugaacgagagccugaucgaccugcaagaacuggggaaguacgagcaguacaucaaguggcccugguacaucuggcugggcuuuaucgccggacugauugccaucgugauggucacaaucaugcuguguugcaugaccagcugcuguagcugccugaagggcuguuguagcuguggcagcugcugcaaguucgacgaggacgauucugagcccgugcugaagggcgugaaacugcacuacaccugaggacuaguuauaagacugacuagcccgaugggccucccaacgggcccuccuccccuccuugcaccgagagaucuaaaaaaaaaaaaaaaaaaaaaaaaaaaaaaaaaaaaaaaaaaaaaaaaaaaaaaaaaaaaaaaaaaaaaaaaaaaaaaaaaaaaaaaaaaaaaaaaaaaa

SEQ ID NO: 26013 - RNA, 4011 nt, Artificial Sequence
  SARS-CoV-2/Wuhan/WIV05/2019__EPI_ISL_402128 spike protein mRNA gc mod (1-1273)(K986P_V987P_S477N_D614G)
aggagaaagcuuaccauguucguguuucuggugcugcugccccugguguccagccagugugugaaccugaccaccagaacacagcugccuccagccuacaccaacagcuucaccagaggcguguacuaccccgacaagguguucagauccagcgugcugcacucuacccaggaccuguuccugccuuucuucagcaacgugaccugguuccacgccauccacguguccggcaccaauggcaccaagagauucgacaaccccgugcugcccuucaacgacgggguguacuuugccagcaccgagaaguccaacaucaucagaggcuggaucuucggcaccacacuggacagcaagacccagagccugcugaucgugaacaacgccaccaacguggucaucaaagugugcgaguuccaguucugcaacgaccccuuccugggcgucuacuaccacaagaacaacaagagcuggauggaaagcgaguuccggguguacagcagcgccaacaacugcaccuucgaguacgugucccagccuuuccugauggaccuggaaggcaagcagggcaacuucaagaaccugcgcgaguucguguucaagaacaucgacggcuacuucaaaaucuacagcaagcacaccccuaucaaccucgugcgggaucugccucagggcuucucugcucuggaaccccugguggaucugcccaucggcaucaacaucacccgguuucagacacugcuggcccugcacagaagcuaccugacaccuggcgauagcagcagcggauggacagcuggugccgccgcuuacuaugugggcuaccugcagccuagaaccuuccugcugaaguacaacgagaacggcaccaucaccgacgccguggauugugcucuggauccucugagcgagacaaagugcacccugaaguccuucaccguggaaaagggcaucuaccagaccagcaacuuccgggugcagcccaccgaauccaucgugcgguuccccaauaucaccaaucugugccccuucggcgagguguucaaugccaccagauucgccucuguguacgccuggaaccggaagcggaucagcaauugcguggccgacuacuccgugcuguacaacuccgccagcuucagcaccuucaagugcuacggcguguccccuaccaagcugaacgaccugugcuucacaaacguguacgccgacagcuucgugauccggggagaugaagugcggcagauugccccuggacagacaggcaagaucgccgacuacaacuacaagcugcccgacgacuucaccggcugugugauugccuggaacagcaacaaccuggacuccaaagucggcggcaacuacaauuaccuguaccggcuguuccggaaguccaaucugaagcccuucgagcgggacaucagcaccgaaaucuaucaggccggcaacaccccuugcaacggcguggaaggcuucaacugcuacuucccacugcaguccuacggcuuucagcccacaaauggcgugggcuaucagcccuacagagugguggugcugagcuucgaacugcugcaugcuccugccacagugugcggcccuaagaaaagcaccaaucucgugaagaacaaaugcgugaacuucaacuucaacggccugaccggcaccggcgugcugacagagagcaacaagaaguuccugccauuccagcaguuuggccgggauaucgccgauaccacagacgccguuagagauccccagacacuggaaauccuggacaucaccccaugcagcuucggcggagugucugugaucaccccuggcaccaacaccagcaaucagguggcagugcuguaccagggcgugaacuguaccgaagugcccguggccauucacgccgaucagcugacaccuacauggcggguguacuccaccggcagcaauguguuucagaccagagccggcugucugaucggagccgagcacgugaacaauagcuacgagugcgacauccccaucggcgcuggcaucugugccagcuaccagacacagacaaacagccccagacgggcuagaagcguggccagccagagcaucauugccuacacaaugucucugggcgccgagaacagcguggccuacuccaacaacucuaucgcuauccccaccaacuucaccaucagcgugaccaccgagauccugccuguguccaugaccaagaccagcguggacugcaccauguacaucugcggcgauuccaccgagugcuccaaccugcugcugcaguacggcagcuucugcacccagcugaauagagcccugacagggaucgccguggaacaggacaagaacacccaagagguguucgcccaagugaagcaaaucuacaagaccccuccuaucaaggacuucggcggcuucaauuucagccagauucugcccgauccuagcaagcccagcaagcggagcuucaucgaggaccugcuguucaacaaagugacacuggccgacgccggcuucaucaagcaguauggcgauugucugggcgacauugccgccagggaucugauuugcgcccagaaguuuaacggacugacagugcugccuccucugcugaccgaugagaugaucgcccaguacacaucugcccugcuggccggcacaaucacaagcggcuggacauuuggagcuggcgccgcucugcagauccccuuugcuaugcagauggccuaccgguucaacggcaucggagugacccagaaugugcuguacgagaaccagaagcugaucgccaaccaguucaacagcgccaucggcaagauccaggacagccugagcagcacagcaagcgcccugggaaagcugcaggacguggucaaccagaaugcccaggcacugaacacccuggucaagcagcuguccuccaacuucggcgccaucagcucugugcugaacgauauccugagcagacuggacccuccugaggccgaggugcagaucgacagacugaucacaggcagacugcagagccuccagacauacgugacccagcagcugaucagagccgccgagauuagagccucugccaaucuggccgccaccaagaugucugagugugugcugggccagagcaagagaguggacuuuugcggcaagggcuaccaccugaugagcuucccucagucugccccucacggcgugguguuucugcacgugacauaugugcccgcucaagagaagaauuucaccaccgcuccagccaucugccacgacggcaaagcccacuuuccuagagaaggcguguucguguccaacggcacccauugguucgugacacagcggaacuucuacgagccccagaucaucaccaccgacaacaccuucgugucuggcaacugcgacguugugaucggcauugugaacaauaccguguacgacccucugcagcccgagcuggacagcuucaaagaggaacuggacaaguacuuuaagaaccacacaagccccgacguggaccugggcgauaucagcggaaucaaugccagcgucgugaacauccagaaagagaucgaccggcugaacgagguggccaagaaucugaacgagagccugaucgaccugcaagaacuggggaaguacgagcaguacaucaaguggcccugguacaucuggcugggcuuuaucgccggacugauugccaucgugauggucacaaucaugcuguguugcaugaccagcugcuguagcugccugaagggcuguuguagcuguggcagcugcugcaaguucgacgaggacgauucugagcccgugcugaagggcgugaaacugcacuacaccugaggacuaguuauaagacugacuagcccgaugggccucccaacgggcccuccuccccuccuugcaccgagagaucuaaaaaaaaaaaaaaaaaaaaaaaaaaaaaaaaaaaaaaaaaaaaaaaaaaaaaaaaaaaaaaaaaaaaaaaaaaaaaaaaaaaaaaaaaaaaaaaaaaaa

SEQ ID NO: 26014 - RNA, 4011 nt, Artificial Sequence
  SARS-CoV-2/Wuhan/WIV05/2019__EPI_ISL_402128 spike protein mRNA gc mod (1-1273)(K986P_V987P_N501Y_D614G)
aggagaaagcuuaccauguucguguuucuggugcugcugccccugguguccagccagugugugaaccugaccaccagaacacagcugccuccagccuacaccaacagcuucaccagaggcguguacuaccccgacaagguguucagauccagcgugcugcacucuacccaggaccuguuccugccuuucuucagcaacgugaccugguuccacgccauccacguguccggcaccaauggcaccaagagauucgacaaccccgugcugcccuucaacgacgggguguacuuugccagcaccgagaaguccaacaucaucagaggcuggaucuucggcaccacacuggacagcaagacccagagccugcugaucgugaacaacgccaccaacguggucaucaaagugugcgaguuccaguucugcaacgaccccuuccugggcgucuacuaccacaagaacaacaagagcuggauggaaagcgaguuccggguguacagcagcgccaacaacugcaccuucgaguacgugucccagccuuuccugauggaccuggaaggcaagcagggcaacuucaagaaccugcgcgaguucguguucaagaacaucgacggcuacuucaaaaucuacagcaagcacaccccuaucaaccucgugcgggaucugccucagggcuucucugcucuggaaccccugguggaucugcccaucggcaucaacaucacccgguuucagacacugcuggcccugcacagaagcuaccugacaccuggcgauagcagcagcggauggacagcuggugccgccgcuuacuaugugggcuaccugcagccuagaaccuuccugcugaaguacaacgagaacggcaccaucaccgacgccguggauugugcucuggauccucugagcgagacaaagugcacccugaaguccuucaccguggaaaagggcaucuaccagaccagcaacuuccgggugcagcccaccgaauccaucgugcgguuccccaauaucaccaaucugugccccuucggcgagguguucaaugccaccagauucgccucuguguacgccuggaaccggaagcggaucagcaauugcguggccgacuacuccgugcuguacaacuccgccagcuucagcaccuucaagugcuacggcguguccccuaccaagcugaacgaccugugcuucacaaacguguacgccgacagcuucgugauccggggagaugaagugcggcagauugccccuggacagacaggcaagaucgccgacuacaacuacaagcugcccgacgacuucaccggcugugugauugccuggaacagcaacaaccuggacuccaaagucggcggcaacuacaauuaccuguaccggcuguuccggaaguccaaucugaagcccuucgagcgggacaucagcaccgaaaucuaucaggccggcagcaccccuugcaacggcguggaaggcuucaacugcuacuucccacugcaguccuacggcuuucagcccacauacggcgugggcuaucagcccuacagagugguggugcugagcuucgaacugcugcaugcuccugccacagugugcggcccuaagaaaagcaccaaucucgugaagaacaaaugcgugaacuucaacuucaacggccugaccggcaccggcgugcugacagagagcaacaagaaguuccugccauuccagcaguuuggccgggauaucgccgauaccacagacgccguuagagauccccagacacuggaaauccuggacaucaccccaugcagcuucggcggagugucugugaucaccccuggcaccaacaccagcaaucagguggcagugcuguaccagggcgugaacuguaccgaagugcccguggccauucacgccgaucagcugacaccuacauggcggguguacuccaccggcagcaauguguuucagaccagagccggcugucugaucggagccgagcacgugaacaauagcuacgagugcgacauccccaucggcgcuggcaucugugccagcuaccagacacagacaaacagccccagacgggcuagaagcguggccagccagagcaucauugccuacacaaugucucugggcgccgagaacagcguggccuacuccaacaacucuaucgcuauccccaccaacuucaccaucagcgugaccaccgagauccugccuguguccaugaccaagaccagcguggacugcaccauguacaucugcggcgauuccaccgagugcuccaaccugcugcugcaguacggcagcuucugcacccagcugaauagagcccugacagggaucgccguggaacaggacaagaacacccaagagguguucgcccaagugaagcaaaucuacaagaccccuccuaucaaggacuucggcggcuucaauuucagccagauucugcccgauccuagcaagcccagcaagcggagcuucaucgaggaccugcuguucaacaaagugacacuggccgacgccggcuucaucaagcaguauggcgauugucugggcgacauugccgccagggaucugauuugcgcccagaaguuuaacggacugacagugcugccuccucugcugaccgaugagaugaucgcccaguacacaucugcccugcuggccggcacaaucacaagcggcuggacauuuggagcuggcgccgcucugcagauccccuuugcuaugcagauggccuaccgguucaacggcaucggagugacccagaaugugcuguacgagaaccagaagcugaucgccaaccaguucaacagcgccaucggcaagauccaggacagccugagcagcacagcaagcgcccugggaaagcugcaggacguggucaaccagaaugcccaggcacugaacacccuggucaagcagcuguccuccaacuucggcgccaucagcucugugcugaacgauauccugagcagacuggacccuccugaggccgaggugcagaucgacagacugaucacaggcagacugcagagccuccagacauacgugacccagcagcugaucagagccgccgagauuagagccucugccaaucuggccgccaccaagaugucugagugugugcugggccagagcaagagaguggacuuuugcggcaagggcuaccaccugaugagcuucccucagucugccccucacggcgugguguuucugcacgugacauaugugcccgcucaagagaagaauuucaccaccgcuccagccaucugccacgacggcaaagcccacuuuccuagagaaggcguguucguguccaacggcacccauugguucgugacacagcggaacuucuacgagccccagaucaucaccaccgacaacaccuucgugucuggcaacugcgacguugugaucggcauugugaacaauaccguguacgacccucugcagcccgagcuggacagcuucaaagaggaacuggacaaguacuuuaagaaccacacaagccccgacguggaccugggcgauaucagcggaaucaaugccagcgucgugaacauccagaaagagaucgaccggcugaacgagguggccaagaaucugaacgagagccugaucgaccugcaagaacuggggaaguacgagcaguacaucaaguggcccugguacaucuggcugggcuuuaucgccggacugauugccaucgugauggucacaaucaugcuguguugcaugaccagcugcuguagcugccugaagggcuguuguagcuguggcagcugcugcaaguucgacgaggacgauucugagcccgugcugaagggcgugaaacugcacuacaccugaggacuaguuauaagacugacuagcccgaugggccucccaacgggcccuccuccccuccuugcaccgagagaucuaaaaaaaaaaaaaaaaaaaaaaaaaaaaaaaaaaaaaaaaaaaaaaaaaaaaaaaaaaaaaaaaaaaaaaaaaaaaaaaaaaaaaaaaaaaaaaaaaaaa

SEQ ID NO: 26015 - RNA, 4005 nt, Artificial Sequence
  SARS-CoV-2/Wuhan/WIV05/2019__EPI_ISL_402128 spike protein mRNA gc mod (1-1273)(K986P_V987P_H69del_V70del_D614G)
aggagaaagcuuaccauguucguguuucuggugcugcugccccugguguccagccagugugugaaccugaccaccagaacacagcugccuccagccuacaccaacagcuucaccagaggcguguacuaccccgacaagguguucagauccagcgugcugcacucuacccaggaccuguuccugccuuucuucagcaacgugaccugguuccacgccaucuccggcaccaauggcaccaagagauucgacaaccccgugcugcccuucaacgacgggguguacuuugccagcaccgagaaguccaacaucaucagaggcuggaucuucggcaccacacuggacagcaagacccagagccugcugaucgugaacaacgccaccaacguggucaucaaagugugcgaguuccaguucugcaacgaccccuuccugggcgucuacuaccacaagaacaacaagagcuggauggaaagcgaguuccggguguacagcagcgccaacaacugcaccuucgaguacgugucccagccuuuccugauggaccuggaaggcaagcagggcaacuucaagaaccugcgcgaguucguguucaagaacaucgacggcuacuucaaaaucuacagcaagcacaccccuaucaaccucgugcgggaucugccucagggcuucucugcucuggaaccccugguggaucugcccaucggcaucaacaucacccgguuucagacacugcuggcccugcacagaagcuaccugacaccuggcgauagcagcagcggauggacagcuggugccgccgcuuacuaugugggcuaccugcagccuagaaccuuccugcugaaguacaacgagaacggcaccaucaccgacgccguggauugugcucuggauccucugagcgagacaaagugcacccugaaguccuucaccguggaaaagggcaucuaccagaccagcaacuuccgggugcagcccaccgaauccaucgugcgguuccccaauaucaccaaucugugccccuucggcgagguguucaaugccaccagauucgccucuguguacgccuggaaccggaagcggaucagcaauugcguggccgacuacuccgugcuguacaacuccgccagcuucagcaccuucaagugcuacggcguguccccuaccaagcugaacgaccugugcuucacaaacguguacgccgacagcuucgugauccggggagaugaagugcggcagauugccccuggacagacaggcaagaucgccgacuacaacuacaagcugcccgacgacuucaccggcugugugauugccuggaacagcaacaaccuggacuccaaagucggcggcaacuacaauuaccuguaccggcuguuccggaaguccaaucugaagcccuucgagcgggacaucagcaccgaaaucuaucaggccggcagcaccccuugcaacggcguggaaggcuucaacugcuacuucccacugcaguccuacggcuuucagcccacaaauggcgugggcuaucagcccuacagagugguggugcugagcuucgaacugcugcaugcuccugccacagugugcggcccuaagaaaagcaccaaucucgugaagaacaaaugcgugaacuucaacuucaacggccugaccggcaccggcgugcugacagagagcaacaagaaguuccugccauuccagcaguuuggccgggauaucgccgauaccacagacgccguuagagauccccagacacuggaaauccuggacaucaccccaugcagcuucggcggagugucugugaucaccccuggcaccaacaccagcaaucagguggcagugcuguaccagggcgugaacuguaccgaagugcccguggccauucacgccgaucagcugacaccuacauggcggguguacuccaccggcagcaauguguuucagaccagagccggcugucugaucggagccgagcacgugaacaauagcuacgagugcgacauccccaucggcgcuggcaucugugccagcuaccagacacagacaaacagccccagacgggcuagaagcguggccagccagagcaucauugccuacacaaugucucugggcgccgagaacagcguggccuacuccaacaacucuaucgcuauccccaccaacuucaccaucagcgugaccaccgagauccugccuguguccaugaccaagaccagcguggacugcaccauguacaucugcggcgauuccaccgagugcuccaaccugcugcugcaguacggcagcuucugcacccagcugaauagagcccugacagggaucgccguggaacaggacaagaacacccaagagguguucgcccaagugaagcaaaucuacaagaccccuccuaucaaggacuucggcggcuucaauuucagccagauucugcccgauccuagcaagcccagcaagcggagcuucaucgaggaccugcuguucaacaaagugacacuggccgacgccggcuucaucaagcaguauggcgauugucugggcgacauugccgccagggaucugauuugcgcccagaaguuuaacggacugacagugcugccuccucugcugaccgaugagaugaucgcccaguacacaucugcccugcuggccggcacaaucacaagcggcuggacauuuggagcuggcgccgcucugcagauccccuuugcuaugcagauggccuaccgguucaacggcaucggagugacccagaaugugcuguacgagaaccagaagcugaucgccaaccaguucaacagcgccaucggcaagauccaggacagccugagcagcacagcaagcgcccugggaaagcugcaggacguggucaaccagaaugcccaggcacugaacacccuggucaagcagcuguccuccaacuucggcgccaucagcucugugcugaacgauauccugagcagacuggacccuccugaggccgaggugcagaucgacagacugaucacaggcagacugcagagccuccagacauacgugacccagcagcugaucagagccgccgagauuagagccucugccaaucuggccgccaccaagaugucugagugugugcugggccagagcaagagaguggacuuuugcggcaagggcuaccaccugaugagcuucccucagucugccccucacggcgugguguuucugcacgugacauaugugcccgcucaagagaagaauuucaccaccgcuccagccaucugccacgacggcaaagcccacuuuccuagagaaggcguguucguguccaacggcacccauugguucgugacacagcggaacuucuacgagccccagaucaucaccaccgacaacaccuucgugucuggcaacugcgacguugugaucggcauugugaacaauaccguguacgacccucugcagcccgagcuggacagcuucaaagaggaacuggacaaguacuuuaagaaccacacaagccccgacguggaccugggcgauaucagcggaaucaaugccagcgucgugaacauccagaaagagaucgaccggcugaacgagguggccaagaaucugaacgagagccugaucgaccugcaagaacuggggaaguacgagcaguacaucaaguggcccugguacaucuggcugggcuuuaucgccggacugauugccaucgugauggucacaaucaugcuguguugcaugaccagcugcuguagcugccugaagggcuguuguagcuguggcagcugcugcaaguucgacgaggacgauucugagcccgugcugaagggcgugaaacugcacuacaccugaggacuaguuauaagacugacuagcccgaugggccucccaacgggcccuccuccccuccuugcaccgagagaucuaaaaaaaaaaaaaaaaaaaaaaaaaaaaaaaaaaaaaaaaaaaaaaaaaaaaaaaaaaaaaaaaaaaaaaaaaaaaaaaaaaaaaaaaaaaaaaaaaaaa

SEQ ID NO: 26016 - RNA, 4011 nt, Artificial Sequence
  SARS-CoV-2/Wuhan/WIV05/2019__EPI_ISL_402128 spike protein mRNA gc mod (1-1273)(K986P_V987P_Y453F_D614G)
aggagaaagcuuaccauguucguguuucuggugcugcugccccugguguccagccagugugugaaccugaccaccagaacacagcugccuccagccuacaccaacagcuucaccagaggcguguacuaccccgacaagguguucagauccagcgugcugcacucuacccaggaccuguuccugccuuucuucagcaacgugaccugguuccacgccauccacguguccggcaccaauggcaccaagagauucgacaaccccgugcugcccuucaacgacgggguguacuuugccagcaccgagaaguccaacaucaucagaggcuggaucuucggcaccacacuggacagcaagacccagagccugcugaucgugaacaacgccaccaacguggucaucaaagugugcgaguuccaguucugcaacgaccccuuccugggcgucuacuaccacaagaacaacaagagcuggauggaaagcgaguuccggguguacagcagcgccaacaacugcaccuucgaguacgugucccagccuuuccugauggaccuggaaggcaagcagggcaacuucaagaaccugcgcgaguucguguucaagaacaucgacggcuacuucaaaaucuacagcaagcacaccccuaucaaccucgugcgggaucugccucagggcuucucugcucuggaaccccugguggaucugcccaucggcaucaacaucacccgguuucagacacugcuggcccugcacagaagcuaccugacaccuggcgauagcagcagcggauggacagcuggugccgccgcuuacuaugugggcuaccugcagccuagaaccuuccugcugaaguacaacgagaacggcaccaucaccgacgccguggauugugcucuggauccucugagcgagacaaagugcacccugaaguccuucaccguggaaaagggcaucuaccagaccagcaacuuccgggugcagcccaccgaauccaucgugcgguuccccaauaucaccaaucugugccccuucggcgagguguucaaugccaccagauucgccucuguguacgccuggaaccggaagcggaucagcaauugcguggccgacuacuccgugcuguacaacuccgccagcuucagcaccuucaagugcuacggcguguccccuaccaagcugaacgaccugugcuucacaaacguguacgccgacagcuucgugauccggggagaugaagugcggcagauugccccuggacagacaggcaagaucgccgacuacaacuacaagcugcccgacgacuucaccggcugugugauugccuggaacagcaacaaccuggacuccaaagucggcggcaacuacaauuaccuguuccggcuguuccggaaguccaaucugaagcccuucgagcgggacaucagcaccgaaaucuaucaggccggcagcaccccuugcaacggcguggaaggcuucaacugcuacuucccacugcaguccuacggcuuucagcccacaaauggcgugggcuaucagcccuacagagugguggugcugagcuucgaacugcugcaugcuccugccacagugugcggcccuaagaaaagcaccaaucucgugaagaacaaaugcgugaacuucaacuucaacggccugaccggcaccggcgugcugacagagagcaacaagaaguuccugccauuccagcaguuuggccgggauaucgccgauaccacagacgccguuagagauccccagacacuggaaauccuggacaucaccccaugcagcuucggcggagugucugugaucaccccuggcaccaacaccagcaaucagguggcagugcuguaccagggcgugaacuguaccgaagugcccguggccauucacgccgaucagcugacaccuacauggcggguguacuccaccggcagcaauguguuucagaccagagccggcugucugaucggagccgagcacgugaacaauagcuacgagugcgacauccccaucggcgcuggcaucugugccagcuaccagacacagacaaacagccccagacgggcuagaagcguggccagccagagcaucauugccuacacaaugucucugggcgccgagaacagcguggccuacuccaacaacucuaucgcuauccccaccaacuucaccaucagcgugaccaccgagauccugccuguguccaugaccaagaccagcguggacugcaccauguacaucugcggcgauuccaccgagugcuccaaccugcugcugcaguacggcagcuucugcacccagcugaauagagcccugacagggaucgccguggaacaggacaagaacacccaagagguguucgcccaagugaagcaaaucuacaagaccccuccuaucaaggacuucggcggcuucaauuucagccagauucugcccgauccuagcaagcccagcaagcggagcuucaucgaggaccugcuguucaacaaagugacacuggccgacgccggcuucaucaagcaguauggcgauugucugggcgacauugccgccagggaucugauuugcgcccagaaguuuaacggacugacagugcugccuccucugcugaccgaugagaugaucgcccaguacacaucugcccugcuggccggcacaaucacaagcggcuggacauuuggagcuggcgccgcucugcagauccccuuugcuaugcagauggccuaccgguucaacggcaucggagugacccagaaugugcuguacgagaaccagaagcugaucgccaaccaguucaacagcgccaucggcaagauccaggacagccugagcagcacagcaagcgcccugggaaagcugcaggacguggucaaccagaaugcccaggcacugaacacccuggucaagcagcuguccuccaacuucggcgccaucagcucugugcugaacgauauccugagcagacuggacccuccugaggccgaggugcagaucgacagacugaucacaggcagacugcagagccuccagacauacgugacccagcagcugaucagagccgccgagauuagagccucugccaaucuggccgccaccaagaugucugagugugugcugggccagagcaagagaguggacuuuugcggcaagggcuaccaccugaugagcuucccucagucugccccucacggcgugguguuucugcacgugacauaugugcccgcucaagagaagaauuucaccaccgcuccagccaucugccacgacggcaaagcccacuuuccuagagaaggcguguucguguccaacggcacccauugguucgugacacagcggaacuucuacgagccccagaucaucaccaccgacaacaccuucgugucuggcaacugcgacguugugaucggcauugugaacaauaccguguacgacccucugcagcccgagcuggacagcuucaaagaggaacuggacaaguacuuuaagaaccacacaagccccgacguggaccugggcgauaucagcggaaucaaugccagcgucgugaacauccagaaagagaucgaccggcugaacgagguggccaagaaucugaacgagagccugaucgaccugcaagaacuggggaaguacgagcaguacaucaaguggcccugguacaucuggcugggcuuuaucgccggacugauugccaucgugauggucacaaucaugcuguguugcaugaccagcugcuguagcugccugaagggcuguuguagcuguggcagcugcugcaaguucgacgaggacgauucugagcccgugcugaagggcgugaaacugcacuacaccugaggacuaguuauaagacugacuagcccgaugggccucccaacgggcccuccuccccuccuugcaccgagagaucuaaaaaaaaaaaaaaaaaaaaaaaaaaaaaaaaaaaaaaaaaaaaaaaaaaaaaaaaaaaaaaaaaaaaaaaaaaaaaaaaaaaaaaaaaaaaaaaaaaaa

SEQ ID NO: 26017 - RNA, 4011 nt, Artificial Sequence
  SARS-CoV-2/Wuhan/WIV05/2019__EPI_ISL_402128 spike protein mRNA gc mod (1-1273)(K986P_V987P_D614G_I692V)
aggagaaagcuuaccauguucguguuucuggugcugcugccccugguguccagccagugugugaaccugaccaccagaacacagcugccuccagccuacaccaacagcuucaccagaggcguguacuaccccgacaagguguucagauccagcgugcugcacucuacccaggaccuguuccugccuuucuucagcaacgugaccugguuccacgccauccacguguccggcaccaauggcaccaagagauucgacaaccccgugcugcccuucaacgacgggguguacuuugccagcaccgagaaguccaacaucaucagaggcuggaucuucggcaccacacuggacagcaagacccagagccugcugaucgugaacaacgccaccaacguggucaucaaagugugcgaguuccaguucugcaacgaccccuuccugggcgucuacuaccacaagaacaacaagagcuggauggaaagcgaguuccggguguacagcagcgccaacaacugcaccuucgaguacgugucccagccuuuccugauggaccuggaaggcaagcagggcaacuucaagaaccugcgcgaguucguguucaagaacaucgacggcuacuucaaaaucuacagcaagcacaccccuaucaaccucgugcgggaucugccucagggcuucucugcucuggaaccccugguggaucugcccaucggcaucaacaucacccgguuucagacacugcuggcccugcacagaagcuaccugacaccuggcgauagcagcagcggauggacagcuggugccgccgcuuacuaugugggcuaccugcagccuagaaccuuccugcugaaguacaacgagaacggcaccaucaccgacgccguggauugugcucuggauccucugagcgagacaaagugcacccugaaguccuucaccguggaaaagggcaucuaccagaccagcaacuuccgggugcagcccaccgaauccaucgugcgguuccccaauaucaccaaucugugccccuucggcgagguguucaaugccaccagauucgccucuguguacgccuggaaccggaagcggaucagcaauugcguggccgacuacuccgugcuguacaacuccgccagcuucagcaccuucaagugcuacggcguguccccuaccaagcugaacgaccugugcuucacaaacguguacgccgacagcuucgugauccggggagaugaagugcggcagauugccccuggacagacaggcaagaucgccgacuacaacuacaagcugcccgacgacuucaccggcugugugauugccuggaacagcaacaaccuggacuccaaagucggcggcaacuacaauuaccuguaccggcuguuccggaaguccaaucugaagcccuucgagcgggacaucagcaccgaaaucuaucaggccggcagcaccccuugcaacggcguggaaggcuucaacugcuacuucccacugcaguccuacggcuuucagcccacaaauggcgugggcuaucagcccuacagagugguggugcugagcuucgaacugcugcaugcuccugccacagugugcggcccuaagaaaagcaccaaucucgugaagaacaaaugcgugaacuucaacuucaacggccugaccggcaccggcgugcugacagagagcaacaagaaguuccugccauuccagcaguuuggccgggauaucgccgauaccacagacgccguuagagauccccagacacuggaaauccuggacaucaccccaugcagcuucggcggagugucugugaucaccccuggcaccaacaccagcaaucagguggcagugcuguaccagggcgugaacuguaccgaagugcccguggccauucacgccgaucagcugacaccuacauggcggguguacuccaccggcagcaauguguuucagaccagagccggcugucugaucggagccgagcacgugaacaauagcuacgagugcgacauccccaucggcgcuggcaucugugccagcuaccagacacagacaaacagccccagacgggcuagaagcguggccagccagagcgugauugccuacacaaugucucugggcgccgagaacagcguggccuacuccaacaacucuaucgcuauccccaccaacuucaccaucagcgugaccaccgagauccugccuguguccaugaccaagaccagcguggacugcaccauguacaucugcggcgauuccaccgagugcuccaaccugcugcugcaguacggcagcuucugcacccagcugaauagagcccugacagggaucgccguggaacaggacaagaacacccaagagguguucgcccaagugaagcaaaucuacaagaccccuccuaucaaggacuucggcggcuucaauuucagccagauucugcccgauccuagcaagcccagcaagcggagcuucaucgaggaccugcuguucaacaaagugacacuggccgacgccggcuucaucaagcaguauggcgauugucugggcgacauugccgccagggaucugauuugcgcccagaaguuuaacggacugacagugcugccuccucugcugaccgaugagaugaucgcccaguacacaucugcccugcuggccggcacaaucacaagcggcuggacauuuggagcuggcgccgcucugcagauccccuuugcuaugcagauggccuaccgguucaacggcaucggagugacccagaaugugcuguacgagaaccagaagcugaucgccaaccaguucaacagcgccaucggcaagauccaggacagccugagcagcacagcaagcgcccugggaaagcugcaggacguggucaaccagaaugcccaggcacugaacacccuggucaagcagcuguccuccaacuucggcgccaucagcucugugcugaacgauauccugagcagacuggacccuccugaggccgaggugcagaucgacagacugaucacaggcagacugcagagccuccagacauacgugacccagcagcugaucagagccgccgagauuagagccucugccaaucuggccgccaccaagaugucugagugugugcugggccagagcaagagaguggacuuuugcggcaagggcuaccaccugaugagcuucccucagucugccccucacggcgugguguuucugcacgugacauaugugcccgcucaagagaagaauuucaccaccgcuccagccaucugccacgacggcaaagcccacuuuccuagagaaggcguguucguguccaacggcacccauugguucgugacacagcggaacuucuacgagccccagaucaucaccaccgacaacaccuucgugucuggcaacugcgacguugugaucggcauugugaacaauaccguguacgacccucugcagcccgagcuggacagcuucaaagaggaacuggacaaguacuuuaagaaccacacaagccccgacguggaccugggcgauaucagcggaaucaaugccagcgucgugaacauccagaaagagaucgaccggcugaacgagguggccaagaaucugaacgagagccugaucgaccugcaagaacuggggaaguacgagcaguacaucaaguggcccugguacaucuggcugggcuuuaucgccggacugauugccaucgugauggucacaaucaugcuguguugcaugaccagcugcuguagcugccugaagggcuguuguagcuguggcagcugcugcaaguucgacgaggacgauucugagcccgugcugaagggcgugaaacugcacuacaccugaggacuaguuauaagacugacuagcccgaugggccucccaacgggcccuccuccccuccuugcaccgagagaucuaaaaaaaaaaaaaaaaaaaaaaaaaaaaaaaaaaaaaaaaaaaaaaaaaaaaaaaaaaaaaaaaaaaaaaaaaaaaaaaaaaaaaaaaaaaaaaaaaaaa

SEQ ID NO: 26018 - RNA, 4011 nt, Artificial Sequence
  SARS-CoV-2/Wuhan/WIV05/2019__EPI_ISL_402128 spike protein mRNA gc mod (1-1273)(K986P_V987P_D614G_M1229I)
aggagaaagcuuaccauguucguguuucuggugcugcugccccugguguccagccagugugugaaccugaccaccagaacacagcugccuccagccuacaccaacagcuucaccagaggcguguacuaccccgacaagguguucagauccagcgugcugcacucuacccaggaccuguuccugccuuucuucagcaacgugaccugguuccacgccauccacguguccggcaccaauggcaccaagagauucgacaaccccgugcugcccuucaacgacgggguguacuuugccagcaccgagaaguccaacaucaucagaggcuggaucuucggcaccacacuggacagcaagacccagagccugcugaucgugaacaacgccaccaacguggucaucaaagugugcgaguuccaguucugcaacgaccccuuccugggcgucuacuaccacaagaacaacaagagcuggauggaaagcgaguuccggguguacagcagcgccaacaacugcaccuucgaguacgugucccagccuuuccugauggaccuggaaggcaagcagggcaacuucaagaaccugcgcgaguucguguucaagaacaucgacggcuacuucaaaaucuacagcaagcacaccccuaucaaccucgugcgggaucugccucagggcuucucugcucuggaaccccugguggaucugcccaucggcaucaacaucacccgguuucagacacugcuggcccugcacagaagcuaccugacaccuggcgauagcagcagcggauggacagcuggugccgccgcuuacuaugugggcuaccugcagccuagaaccuuccugcugaaguacaacgagaacggcaccaucaccgacgccguggauugugcucuggauccucugagcgagacaaagugcacccugaaguccuucaccguggaaaagggcaucuaccagaccagcaacuuccgggugcagcccaccgaauccaucgugcgguuccccaauaucaccaaucugugccccuucggcgagguguucaaugccaccagauucgccucuguguacgccuggaaccggaagcggaucagcaauugcguggccgacuacuccgugcuguacaacuccgccagcuucagcaccuucaagugcuacggcguguccccuaccaagcugaacgaccugugcuucacaaacguguacgccgacagcuucgugauccggggagaugaagugcggcagauugccccuggacagacaggcaagaucgccgacuacaacuacaagcugcccgacgacuucaccggcugugugauugccuggaacagcaacaaccuggacuccaaagucggcggcaacuacaauuaccuguaccggcuguuccggaaguccaaucugaagcccuucgagcgggacaucagcaccgaaaucuaucaggccggcagcaccccuugcaacggcguggaaggcuucaacugcuacuucccacugcaguccuacggcuuucagcccacaaauggcgugggcuaucagcccuacagagugguggugcugagcuucgaacugcugcaugcuccugccacagugugcggcccuaagaaaagcaccaaucucgugaagaacaaaugcgugaacuucaacuucaacggccugaccggcaccggcgugcugacagagagcaacaagaaguuccugccauuccagcaguuuggccgggauaucgccgauaccacagacgccguuagagauccccagacacuggaaauccuggacaucaccccaugcagcuucggcggagugucugugaucaccccuggcaccaacaccagcaaucagguggcagugcuguaccagggcgugaacuguaccgaagugcccguggccauucacgccgaucagcugacaccuacauggcggguguacuccaccggcagcaauguguuucagaccagagccggcugucugaucggagccgagcacgugaacaauagcuacgagugcgacauccccaucggcgcuggcaucugugccagcuaccagacacagacaaacagccccagacgggcuagaagcguggccagccagagcaucauugccuacacaaugucucugggcgccgagaacagcguggccuacuccaacaacucuaucgcuauccccaccaacuucaccaucagcgugaccaccgagauccugccuguguccaugaccaagaccagcguggacugcaccauguacaucugcggcgauuccaccgagugcuccaaccugcugcugcaguacggcagcuucugcacccagcugaauagagcccugacagggaucgccguggaacaggacaagaacacccaagagguguucgcccaagugaagcaaaucuacaagaccccuccuaucaaggacuucggcggcuucaauuucagccagauucugcccgauccuagcaagcccagcaagcggagcuucaucgaggaccugcuguucaacaaagugacacuggccgacgccggcuucaucaagcaguauggcgauugucugggcgacauugccgccagggaucugauuugcgcccagaaguuuaacggacugacagugcugccuccucugcugaccgaugagaugaucgcccaguacacaucugcccugcuggccggcacaaucacaagcggcuggacauuuggagcuggcgccgcucugcagauccccuuugcuaugcagauggccuaccgguucaacggcaucggagugacccagaaugugcuguacgagaaccagaagcugaucgccaaccaguucaacagcgccaucggcaagauccaggacagccugagcagcacagcaagcgcccugggaaagcugcaggacguggucaaccagaaugcccaggcacugaacacccuggucaagcagcuguccuccaacuucggcgccaucagcucugugcugaacgauauccugagcagacuggacccuccugaggccgaggugcagaucgacagacugaucacaggcagacugcagagccuccagacauacgugacccagcagcugaucagagccgccgagauuagagccucugccaaucuggccgccaccaagaugucugagugugugcugggccagagcaagagaguggacuuuugcggcaagggcuaccaccugaugagcuucccucagucugccccucacggcgugguguuucugcacgugacauaugugcccgcucaagagaagaauuucaccaccgcuccagccaucugccacgacggcaaagcccacuuuccuagagaaggcguguucguguccaacggcacccauugguucgugacacagcggaacuucuacgagccccagaucaucaccaccgacaacaccuucgugucuggcaacugcgacguugugaucggcauugugaacaauaccguguacgacccucugcagcccgagcuggacagcuucaaagaggaacuggacaaguacuuuaagaaccacacaagccccgacguggaccugggcgauaucagcggaaucaaugccagcgucgugaacauccagaaagagaucgaccggcugaacgagguggccaagaaucugaacgagagccugaucgaccugcaagaacuggggaaguacgagcaguacaucaaguggcccugguacaucuggcugggcuuuaucgccggacugauugccaucgugaucgucacaaucaugcuguguugcaugaccagcugcuguagcugccugaagggcuguuguagcuguggcagcugcugcaaguucgacgaggacgauucugagcccgugcugaagggcgugaaacugcacuacaccugaggacuaguuauaagacugacuagcccgaugggccucccaacgggcccuccuccccuccuugcaccgagagaucuaaaaaaaaaaaaaaaaaaaaaaaaaaaaaaaaaaaaaaaaaaaaaaaaaaaaaaaaaaaaaaaaaaaaaaaaaaaaaaaaaaaaaaaaaaaaaaaaaaaa

SEQ ID NO: 26019 - RNA, 4005 nt, Artificial Sequence
  SARS-CoV-2/Wuhan/WIV05/2019__EPI_ISL_402128 spike protein mRNA gc mod (1-1273)(K986P_V987P_H69del_V70del_A222V_Y453F_S477N_D614G_I692V)
aggagaaagcuuaccauguucguguuucuggugcugcugccccugguguccagccagugugugaaccugaccaccagaacacagcugccuccagccuacaccaacagcuucaccagaggcguguacuaccccgacaagguguucagauccagcgugcugcacucuacccaggaccuguuccugccuuucuucagcaacgugaccugguuccacgccaucuccggcaccaauggcaccaagagauucgacaaccccgugcugcccuucaacgacgggguguacuuugccagcaccgagaaguccaacaucaucagaggcuggaucuucggcaccacacuggacagcaagacccagagccugcugaucgugaacaacgccaccaacguggucaucaaagugugcgaguuccaguucugcaacgaccccuuccugggcgucuacuaccacaagaacaacaagagcuggauggaaagcgaguuccggguguacagcagcgccaacaacugcaccuucgaguacgugucccagccuuuccugauggaccuggaaggcaagcagggcaacuucaagaaccugcgcgaguucguguucaagaacaucgacggcuacuucaaaaucuacagcaagcacaccccuaucaaccucgugcgggaucugccucagggcuucucugugcuggaaccccugguggaucugcccaucggcaucaacaucacccgguuucagacacugcuggcccugcacagaagcuaccugacaccuggcgauagcagcagcggauggacagcuggugccgccgcuuacuaugugggcuaccugcagccuagaaccuuccugcugaaguacaacgagaacggcaccaucaccgacgccguggauugugcucuggauccucugagcgagacaaagugcacccugaaguccuucaccguggaaaagggcaucuaccagaccagcaacuuccgggugcagcccaccgaauccaucgugcgguuccccaauaucaccaaucugugccccuucggcgagguguucaaugccaccagauucgccucuguguacgccuggaaccggaagcggaucagcaauugcguggccgacuacuccgugcuguacaacuccgccagcuucagcaccuucaagugcuacggcguguccccuaccaagcugaacgaccugugcuucacaaacguguacgccgacagcuucgugauccggggagaugaagugcggcagauugccccuggacagacaggcaagaucgccgacuacaacuacaagcugcccgacgacuucaccggcugugugauugccuggaacagcaacaaccuggacuccaaagucggcggcaacuacaauuaccuguuccggcuguuccggaaguccaaucugaagcccuucgagcgggacaucagcaccgaaaucuaucaggccggcaacaccccuugcaacggcguggaaggcuucaacugcuacuucccacugcaguccuacggcuuucagcccacaaauggcgugggcuaucagcccuacagagugguggugcugagcuucgaacugcugcaugcuccugccacagugugcggcccuaagaaaagcaccaaucucgugaagaacaaaugcgugaacuucaacuucaacggccugaccggcaccggcgugcugacagagagcaacaagaaguuccugccauuccagcaguuuggccgggauaucgccgauaccacagacgccguuagagauccccagacacuggaaauccuggacaucaccccaugcagcuucggcggagugucugugaucaccccuggcaccaacaccagcaaucagguggcagugcuguaccagggcgugaacuguaccgaagugcccguggccauucacgccgaucagcugacaccuacauggcggguguacuccaccggcagcaauguguuucagaccagagccggcugucugaucggagccgagcacgugaacaauagcuacgagugcgacauccccaucggcgcuggcaucugugccagcuaccagacacagacaaacagccccagacgggcuagaagcguggccagccagagcgugauugccuacacaaugucucugggcgccgagaacagcguggccuacuccaacaacucuaucgcuauccccaccaacuucaccaucagcgugaccaccgagauccugccuguguccaugaccaagaccagcguggacugcaccauguacaucugcggcgauuccaccgagugcuccaaccugcugcugcaguacggcagcuucugcacccagcugaauagagcccugacagggaucgccguggaacaggacaagaacacccaagagguguucgcccaagugaagcaaaucuacaagaccccuccuaucaaggacuucggcggcuucaauuucagccagauucugcccgauccuagcaagcccagcaagcggagcuucaucgaggaccugcuguucaacaaagugacacuggccgacgccggcuucaucaagcaguauggcgauugucugggcgacauugccgccagggaucugauuugcgcccagaaguuuaacggacugacagugcugccuccucugcugaccgaugagaugaucgcccaguacacaucugcccugcuggccggcacaaucacaagcggcuggacauuuggagcuggcgccgcucugcagauccccuuugcuaugcagauggccuaccgguucaacggcaucggagugacccagaaugugcuguacgagaaccagaagcugaucgccaaccaguucaacagcgccaucggcaagauccaggacagccugagcagcacagcaagcgcccugggaaagcugcaggacguggucaaccagaaugcccaggcacugaacacccuggucaagcagcuguccuccaacuucggcgccaucagcucugugcugaacgauauccugagcagacuggacccuccugaggccgaggugcagaucgacagacugaucacaggcagacugcagagccuccagacauacgugacccagcagcugaucagagccgccgagauuagagccucugccaaucuggccgccaccaagaugucugagugugugcugggccagagcaagagaguggacuuuugcggcaagggcuaccaccugaugagcuucccucagucugccccucacggcgugguguuucugcacgugacauaugugcccgcucaagagaagaauuucaccaccgcuccagccaucugccacgacggcaaagcccacuuuccuagagaaggcguguucguguccaacggcacccauugguucgugacacagcggaacuucuacgagccccagaucaucaccaccgacaacaccuucgugucuggcaacugcgacguugugaucggcauugugaacaauaccguguacgacccucugcagcccgagcuggacagcuucaaagaggaacuggacaaguacuuuaagaaccacacaagccccgacguggaccugggcgauaucagcggaaucaaugccagcgucgugaacauccagaaagagaucgaccggcugaacgagguggccaagaaucugaacgagagccugaucgaccugcaagaacuggggaaguacgagcaguacaucaaguggcccugguacaucuggcugggcuuuaucgccggacugauugccaucgugauggucacaaucaugcuguguugcaugaccagcugcuguagcugccugaagggcuguuguagcuguggcagcugcugcaaguucgacgaggacgauucugagcccgugcugaagggcgugaaacugcacuacaccugaggacuaguuauaagacugacuagcccgaugggccucccaacgggcccuccuccccuccuugcaccgagagaucuaaaaaaaaaaaaaaaaaaaaaaaaaaaaaaaaaaaaaaaaaaaaaaaaaaaaaaaaaaaaaaaaaaaaaaaaaaaaaaaaaaaaaaaaaaaaaaaaaaaa

SEQ ID NO: 26020 - RNA, 4005 nt, Artificial Sequence
  SARS-CoV-2/Wuhan/WIV05/2019__EPI_ISL_402128 spike protein mRNA gc mod (1-1273)(K986P_V987P_H69del_V70del_Y453F_D614G_I692V_M1229I)
aggagaaagcuuaccauguucguguuucuggugcugcugccccugguguccagccagugugugaaccugaccaccagaacacagcugccuccagccuacaccaacagcuucaccagaggcguguacuaccccgacaagguguucagauccagcgugcugcacucuacccaggaccuguuccugccuuucuucagcaacgugaccugguuccacgccaucuccggcaccaauggcaccaagagauucgacaaccccgugcugcccuucaacgacgggguguacuuugccagcaccgagaaguccaacaucaucagaggcuggaucuucggcaccacacuggacagcaagacccagagccugcugaucgugaacaacgccaccaacguggucaucaaagugugcgaguuccaguucugcaacgaccccuuccugggcgucuacuaccacaagaacaacaagagcuggauggaaagcgaguuccggguguacagcagcgccaacaacugcaccuucgaguacgugucccagccuuuccugauggaccuggaaggcaagcagggcaacuucaagaaccugcgcgaguucguguucaagaacaucgacggcuacuucaaaaucuacagcaagcacaccccuaucaaccucgugcgggaucugccucagggcuucucugcucuggaaccccugguggaucugcccaucggcaucaacaucacccgguuucagacacugcuggcccugcacagaagcuaccugacaccuggcgauagcagcagcggauggacagcuggugccgccgcuuacuaugugggcuaccugcagccuagaaccuuccugcugaaguacaacgagaacggcaccaucaccgacgccguggauugugcucuggauccucugagcgagacaaagugcacccugaaguccuucaccguggaaaagggcaucuaccagaccagcaacuuccgggugcagcccaccgaauccaucgugcgguuccccaauaucaccaaucugugccccuucggcgagguguucaaugccaccagauucgccucuguguacgccuggaaccggaagcggaucagcaauugcguggccgacuacuccgugcuguacaacuccgccagcuucagcaccuucaagugcuacggcguguccccuaccaagcugaacgaccugugcuucacaaacguguacgccgacagcuucgugauccggggagaugaagugcggcagauugccccuggacagacaggcaagaucgccgacuacaacuacaagcugcccgacgacuucaccggcugugugauugccuggaacagcaacaaccuggacuccaaagucggcggcaacuacaauuaccuguuccggcuguuccggaaguccaaucugaagcccuucgagcgggacaucagcaccgaaaucuaucaggccggcagcaccccuugcaacggcguggaaggcuucaacugcuacuucccacugcaguccuacggcuuucagcccacaaauggcgugggcuaucagcccuacagagugguggugcugagcuucgaacugcugcaugcuccugccacagugugcggcccuaagaaaagcaccaaucucgugaagaacaaaugcgugaacuucaacuucaacggccugaccggcaccggcgugcugacagagagcaacaagaaguuccugccauuccagcaguuuggccgggauaucgccgauaccacagacgccguuagagauccccagacacuggaaauccuggacaucaccccaugcagcuucggcggagugucugugaucaccccuggcaccaacaccagcaaucagguggcagugcuguaccagggcgugaacuguaccgaagugcccguggccauucacgccgaucagcugacaccuacauggcggguguacuccaccggcagcaauguguuucagaccagagccggcugucugaucggagccgagcacgugaacaauagcuacgagugcgacauccccaucggcgcuggcaucugugccagcuaccagacacagacaaacagccccagacgggcuagaagcguggccagccagagcgugauugccuacacaaugucucugggcgccgagaacagcguggccuacuccaacaacucuaucgcuauccccaccaacuucaccaucagcgugaccaccgagauccugccuguguccaugaccaagaccagcguggacugcaccauguacaucugcggcgauuccaccgagugcuccaaccugcugcugcaguacggcagcuucugcacccagcugaauagagcccugacagggaucgccguggaacaggacaagaacacccaagagguguucgcccaagugaagcaaaucuacaagaccccuccuaucaaggacuucggcggcuucaauuucagccagauucugcccgauccuagcaagcccagcaagcggagcuucaucgaggaccugcuguucaacaaagugacacuggccgacgccggcuucaucaagcaguauggcgauugucugggcgacauugccgccagggaucugauuugcgcccagaaguuuaacggacugacagugcugccuccucugcugaccgaugagaugaucgcccaguacacaucugcccugcuggccggcacaaucacaagcggcuggacauuuggagcuggcgccgcucugcagauccccuuugcuaugcagauggccuaccgguucaacggcaucggagugacccagaaugugcuguacgagaaccagaagcugaucgccaaccaguucaacagcgccaucggcaagauccaggacagccugagcagcacagcaagcgcccugggaaagcugcaggacguggucaaccagaaugcccaggcacugaacacccuggucaagcagcuguccuccaacuucggcgccaucagcucugugcugaacgauauccugagcagacuggacccuccugaggccgaggugcagaucgacagacugaucacaggcagacugcagagccuccagacauacgugacccagcagcugaucagagccgccgagauuagagccucugccaaucuggccgccaccaagaugucugagugugugcugggccagagcaagagaguggacuuuugcggcaagggcuaccaccugaugagcuucccucagucugccccucacggcgugguguuucugcacgugacauaugugcccgcucaagagaagaauuucaccaccgcuccagccaucugccacgacggcaaagcccacuuuccuagagaaggcguguucguguccaacggcacccauugguucgugacacagcggaacuucuacgagccccagaucaucaccaccgacaacaccuucgugucuggcaacugcgacguugugaucggcauugugaacaauaccguguacgacccucugcagcccgagcuggacagcuucaaagaggaacuggacaaguacuuuaagaaccacacaagccccgacguggaccugggcgauaucagcggaaucaaugccagcgucgugaacauccagaaagagaucgaccggcugaacgagguggccaagaaucugaacgagagccugaucgaccugcaagaacuggggaaguacgagcaguacaucaaguggcccugguacaucuggcugggcuuuaucgccggacugauugccaucgugaucgucacaaucaugcuguguugcaugaccagcugcuguagcugccugaagggcuguuguagcuguggcagcugcugcaaguucgacgaggacgauucugagcccgugcugaagggcgugaaacugcacuacaccugaggacuaguuauaagacugacuagcccgaugggccucccaacgggcccuccuccccuccuugcaccgagagaucuaaaaaaaaaaaaaaaaaaaaaaaaaaaaaaaaaaaaaaaaaaaaaaaaaaaaaaaaaaaaaaaaaaaaaaaaaaaaaaaaaaaaaaaaaaaaaaaaaaaa

SEQ ID NO: 26021 - RNA, 4002 nt, Artificial Sequence
  SARS-CoV-2/Wuhan/WIV05/2019__EPI_ISL_402128 spike protein mRNA gc mod (1-1273)(K986P_V987P_K986P_V987P_H69del_V70del_Y144del_N501Y_A570 D_D614G_P681H_T716I_S982A_D1118H)
aggagaaagcuuaccauguucguguuucuggugcugcugccccugguguccagccagugugugaaccugaccaccagaacacagcugccuccagccuacaccaacagcuucaccagaggcguguacuaccccgacaagguguucagauccagcgugcugcacucuacccaggaccuguuccugccuuucuucagcaacgugaccugguuccacgccaucuccggcaccaauggcaccaagagauucgacaaccccgugcugcccuucaacgacgggguguacuuugccagcaccgagaaguccaacaucaucagaggcuggaucuucggcaccacacuggacagcaagacccagagccugcugaucgugaacaacgccaccaacguggucaucaaagugugcgaguuccaguucugcaacgaccccuuccugggcgucuaccacaagaacaacaagagcuggauggaaagcgaguuccggguguacagcagcgccaacaacugcaccuucgaguacgugucccagccuuuccugauggaccuggaaggcaagcagggcaacuucaagaaccugcgcgaguucguguucaagaacaucgacggcuacuucaaaaucuacagcaagcacaccccuaucaaccucgugcgggaucugccucagggcuucucugcucuggaaccccugguggaucugcccaucggcaucaacaucacccgguuucagacacugcuggcccugcacagaagcuaccugacaccuggcgauagcagcagcggauggacagcuggugccgccgcuuacuaugugggcuaccugcagccuagaaccuuccugcugaaguacaacgagaacggcaccaucaccgacgccguggauugugcucuggauccucugagcgagacaaagugcacccugaaguccuucaccguggaaaagggcaucuaccagaccagcaacuuccgggugcagcccaccgaauccaucgugcgguuccccaauaucaccaaucugugccccuucggcgagguguucaaugccaccagauucgccucuguguacgccuggaaccggaagcggaucagcaauugcguggccgacuacuccgugcuguacaacuccgccagcuucagcaccuucaagugcuacggcguguccccuaccaagcugaacgaccugugcuucacaaacguguacgccgacagcuucgugauccggggagaugaagugcggcagauugccccuggacagacaggcaagaucgccgacuacaacuacaagcugcccgacgacuucaccggcugugugauugccuggaacagcaacaaccuggacuccaaagucggcggcaacuacaauuaccuguaccggcuguuccggaaguccaaucugaagcccuucgagcgggacaucagcaccgaaaucuaucaggccggcagcaccccuugcaacggcguggaaggcuucaacugcuacuucccacugcaguccuacggcuuucagcccacauacggcgugggcuaucagcccuacagagugguggugcugagcuucgaacugcugcaugcuccugccacagugugcggcccuaagaaaagcaccaaucucgugaagaacaaaugcgugaacuucaacuucaacggccugaccggcaccggcgugcugacagagagcaacaagaaguuccugccauuccagcaguuuggccgggauaucgacgauaccacagacgccguuagagauccccagacacuggaaauccuggacaucaccccaugcagcuucggcggagugucugugaucaccccuggcaccaacaccagcaaucagguggcagugcuguaccagggcgugaacuguaccgaagugcccguggccauucacgccgaucagcugacaccuacauggcggguguacuccaccggcagcaauguguuucagaccagagccggcugucugaucggagccgagcacgugaacaauagcuacgagugcgacauccccaucggcgcuggcaucugugccagcuaccagacacagacaaacagccacagacgggcuagaagcguggccagccagagcaucauugccuacacaaugucucugggcgccgagaacagcguggccuacuccaacaacucuaucgcuauccccaucaacuucaccaucagcgugaccaccgagauccugccuguguccaugaccaagaccagcguggacugcaccauguacaucugcggcgauuccaccgagugcuccaaccugcugcugcaguacggcagcuucugcacccagcugaauagagcccugacagggaucgccguggaacaggacaagaacacccaagagguguucgcccaagugaagcaaaucuacaagaccccuccuaucaaggacuucggcggcuucaauuucagccagauucugcccgauccuagcaagcccagcaagcggagcuucaucgaggaccugcuguucaacaaagugacacuggccgacgccggcuucaucaagcaguauggcgauugucugggcgacauugccgccagggaucugauuugcgcccagaaguuuaacggacugacagugcugccuccucugcugaccgaugagaugaucgcccaguacacaucugcccugcuggccggcacaaucacaagcggcuggacauuuggagcuggcgccgcucugcagauccccuuugcuaugcagauggccuaccgguucaacggcaucggagugacccagaaugugcuguacgagaaccagaagcugaucgccaaccaguucaacagcgccaucggcaagauccaggacagccugagcagcacagcaagcgcccugggaaagcugcaggacguggucaaccagaaugcccaggcacugaacacccuggucaagcagcuguccuccaacuucggcgccaucagcucugugcugaacgauauccuggccagacuggacccuccugaggccgaggugcagaucgacagacugaucacaggcagacugcagagccuccagacauacgugacccagcagcugaucagagccgccgagauuagagccucugccaaucuggccgccaccaagaugucugagugugugcugggccagagcaagagaguggacuuuugcggcaagggcuaccaccugaugagcuucccucagucugccccucacggcgugguguuucugcacgugacauaugugcccgcucaagagaagaauuucaccaccgcuccagccaucugccacgacggcaaagcccacuuuccuagagaaggcguguucguguccaacggcacccauugguucgugacacagcggaacuucuacgagccccagaucaucaccacccacaacaccuucgugucuggcaacugcgacguugugaucggcauugugaacaauaccguguacgacccucugcagcccgagcuggacagcuucaaagaggaacuggacaaguacuuuaagaaccacacaagccccgacguggaccugggcgauaucagcggaaucaaugccagcgucgugaacauccagaaagagaucgaccggcugaacgagguggccaagaaucugaacgagagccugaucgaccugcaagaacuggggaaguacgagcaguacaucaaguggcccugguacaucuggcugggcuuuaucgccggacugauugccaucgugauggucacaaucaugcuguguugcaugaccagcugcuguagcugccugaagggcuguuguagcuguggcagcugcugcaaguucgacgaggacgauucugagcccgugcugaagggcgugaaacugcacuacaccugaggacuaguuauaagacugacuagcccgaugggccucccaacgggcccuccuccccuccuugcaccgagagaucuaaaaaaaaaaaaaaaaaaaaaaaaaaaaaaaaaaaaaaaaaaaaaaaaaaaaaaaaaaaaaaaaaaaaaaaaaaaaaaaaaaaaaaaaaaaaaaaaaaaa

SEQ ID NO: 26022 - RNA, 4011 nt, Artificial Sequence
  SARS-CoV-2/Wuhan/WIV05/2019__EPI_ISL_402128 spike protein mRNA gc mod (1-1273)(K986P_V987P_K986P_V987P_K417N_E484K_N501Y_D614G)
aggagaaagcuuaccauguucguguuucuggugcugcugccccugguguccagccagugugugaaccugaccaccagaacacagcugccuccagccuacaccaacagcuucaccagaggcguguacuaccccgacaagguguucagauccagcgugcugcacucuacccaggaccuguuccugccuuucuucagcaacgugaccugguuccacgccauccacguguccggcaccaauggcaccaagagauucgacaaccccgugcugcccuucaacgacgggguguacuuugccagcaccgagaaguccaacaucaucagaggcuggaucuucggcaccacacuggacagcaagacccagagccugcugaucgugaacaacgccaccaacguggucaucaaagugugcgaguuccaguucugcaacgaccccuuccugggcgucuacuaccacaagaacaacaagagcuggauggaaagcgaguuccggguguacagcagcgccaacaacugcaccuucgaguacgugucccagccuuuccugauggaccuggaaggcaagcagggcaacuucaagaaccugcgcgaguucguguucaagaacaucgacggcuacuucaaaaucuacagcaagcacaccccuaucaaccucgugcgggaucugccucagggcuucucugcucuggaaccccugguggaucugcccaucggcaucaacaucacccgguuucagacacugcuggcccugcacagaagcuaccugacaccuggcgauagcagcagcggauggacagcuggugccgccgcuuacuaugugggcuaccugcagccuagaaccuuccugcugaaguacaacgagaacggcaccaucaccgacgccguggauugugcucuggauccucugagcgagacaaagugcacccugaaguccuucaccguggaaaagggcaucuaccagaccagcaacuuccgggugcagcccaccgaauccaucgugcgguuccccaauaucaccaaucugugccccuucggcgagguguucaaugccaccagauucgccucuguguacgccuggaaccggaagcggaucagcaauugcguggccgacuacuccgugcuguacaacuccgccagcuucagcaccuucaagugcuacggcguguccccuaccaagcugaacgaccugugcuucacaaacguguacgccgacagcuucgugauccggggagaugaagugcggcagauugccccuggacagacaggcaacaucgccgacuacaacuacaagcugcccgacgacuucaccggcugugugauugccuggaacagcaacaaccuggacuccaaagucggcggcaacuacaauuaccuguaccggcuguuccggaaguccaaucugaagcccuucgagcgggacaucagcaccgaaaucuaucaggccggcagcaccccuugcaacggcgugaagggcuucaacugcuacuucccacugcaguccuacggcuuucagcccacauacggcgugggcuaucagcccuacagagugguggugcugagcuucgaacugcugcaugcuccugccacagugugcggcccuaagaaaagcaccaaucucgugaagaacaaaugcgugaacuucaacuucaacggccugaccggcaccggcgugcugacagagagcaacaagaaguuccugccauuccagcaguuuggccgggauaucgccgauaccacagacgccguuagagauccccagacacuggaaauccuggacaucaccccaugcagcuucggcggagugucugugaucaccccuggcaccaacaccagcaaucagguggcagugcuguaccagggcgugaacuguaccgaagugcccguggccauucacgccgaucagcugacaccuacauggcggguguacuccaccggcagcaauguguuucagaccagagccggcugucugaucggagccgagcacgugaacaauagcuacgagugcgacauccccaucggcgcuggcaucugugccagcuaccagacacagacaaacagccccagacgggcuagaagcguggccagccagagcaucauugccuacacaaugucucugggcgccgagaacagcguggccuacuccaacaacucuaucgcuauccccaccaacuucaccaucagcgugaccaccgagauccugccuguguccaugaccaagaccagcguggacugcaccauguacaucugcggcgauuccaccgagugcuccaaccugcugcugcaguacggcagcuucugcacccagcugaauagagcccugacagggaucgccguggaacaggacaagaacacccaagagguguucgcccaagugaagcaaaucuacaagaccccuccuaucaaggacuucggcggcuucaauuucagccagauucugcccgauccuagcaagcccagcaagcggagcuucaucgaggaccugcuguucaacaaagugacacuggccgacgccggcuucaucaagcaguauggcgauugucugggcgacauugccgccagggaucugauuugcgcccagaaguuuaacggacugacagugcugccuccucugcugaccgaugagaugaucgcccaguacacaucugcccugcuggccggcacaaucacaagcggcuggacauuuggagcuggcgccgcucugcagauccccuuugcuaugcagauggccuaccgguucaacggcaucggagugacccagaaugugcuguacgagaaccagaagcugaucgccaaccaguucaacagcgccaucggcaagauccaggacagccugagcagcacagcaagcgcccugggaaagcugcaggacguggucaaccagaaugcccaggcacugaacacccuggucaagcagcuguccuccaacuucggcgccaucagcucugugcugaacgauauccugagcagacuggacccuccugaggccgaggugcagaucgacagacugaucacaggcagacugcagagccuccagacauacgugacccagcagcugaucagagccgccgagauuagagccucugccaaucuggccgccaccaagaugucugagugugugcugggccagagcaagagaguggacuuuugcggcaagggcuaccaccugaugagcuucccucagucugccccucacggcgugguguuucugcacgugacauaugugcccgcucaagagaagaauuucaccaccgcuccagccaucugccacgacggcaaagcccacuuuccuagagaaggcguguucguguccaacggcacccauugguucgugacacagcggaacuucuacgagccccagaucaucaccaccgacaacaccuucgugucuggcaacugcgacguugugaucggcauugugaacaauaccguguacgacccucugcagcccgagcuggacagcuucaaagaggaacuggacaaguacuuuaagaaccacacaagccccgacguggaccugggcgauaucagcggaaucaaugccagcgucgugaacauccagaaagagaucgaccggcugaacgagguggccaagaaucugaacgagagccugaucgaccugcaagaacuggggaaguacgagcaguacaucaaguggcccugguacaucuggcugggcuuuaucgccggacugauugccaucgugauggucacaaucaugcuguguugcaugaccagcugcuguagcugccugaagggcuguuguagcuguggcagcugcugcaaguucgacgaggacgauucugagcccgugcugaagggcgugaaacugcacuacaccugaggacuaguuauaagacugacuagcccgaugggccucccaacgggcccuccuccccuccuugcaccgagagaucuaaaaaaaaaaaaaaaaaaaaaaaaaaaaaaaaaaaaaaaaaaaaaaaaaaaaaaaaaaaaaaaaaaaaaaaaaaaaaaaaaaaaaaaaaaaaaaaaaaaa

SEQ ID NO: 26023 - RNA, 4002 nt, Artificial Sequence
  SARS-CoV-2/Wuhan/WIV05/2019__EPI_ISL_402128 spike protein mRNA gc mod (1-1273)(K986P_V987P_K986P_V987P_L18F_D80A_D215G_L242del_A243del_ L244del_R246I_K417N_E484K_N501Y_D614G_A701V)
aggagaaagcuuaccauguucguguuucuggugcugcugccccugguguccagccagugugugaacuucaccaccagaacacagcugccuccagccuacaccaacagcuucaccagaggcguguacuaccccgacaagguguucagauccagcgugcugcacucuacccaggaccuguuccugccuuucuucagcaacgugaccugguuccacgccauccacguguccggcaccaauggcaccaagagauucgccaaccccgugcugcccuucaacgacgggguguacuuugccagcaccgagaaguccaacaucaucagaggcuggaucuucggcaccacacuggacagcaagacccagagccugcugaucgugaacaacgccaccaacguggucaucaaagugugcgaguuccaguucugcaacgaccccuuccugggcgucuacuaccacaagaacaacaagagcuggauggaaagcgaguuccggguguacagcagcgccaacaacugcaccuucgaguacgugucccagccuuuccugauggaccuggaaggcaagcagggcaacuucaagaaccugcgcgaguucguguucaagaacaucgacggcuacuucaaaaucuacagcaagcacaccccuaucaaccucgugcggggccugccucagggcuucucugcucuggaaccccugguggaucugcccaucggcaucaacaucacccgguuucagacacugcacaucagcuaccugacaccuggcgauagcagcagcggauggacagcuggugccgccgcuuacuaugugggcuaccugcagccuagaaccuuccugcugaaguacaacgagaacggcaccaucaccgacgccguggauugugcucuggauccucugagcgagacaaagugcacccugaaguccuucaccguggaaaagggcaucuaccagaccagcaacuuccgggugcagcccaccgaauccaucgugcgguuccccaauaucaccaaucugugccccuucggcgagguguucaaugccaccagauucgccucuguguacgccuggaaccggaagcggaucagcaauugcguggccgacuacuccgugcuguacaacuccgccagcuucagcaccuucaagugcuacggcguguccccuaccaagcugaacgaccugugcuucacaaacguguacgccgacagcuucgugauccggggagaugaagugcggcagauugccccuggacagacaggcaacaucgccgacuacaacuacaagcugcccgacgacuucaccggcugugugauugccuggaacagcaacaaccuggacuccaaagucggcggcaacuacaauuaccuguaccggcuguuccggaaguccaaucugaagcccuucgagcgggacaucagcaccgaaaucuaucaggccggcagcaccccuugcaacggcgugaagggcuucaacugcuacuucccacugcaguccuacggcuuucagcccacauacggcgugggcuaucagcccuacagagugguggugcugagcuucgaacugcugcaugcuccugccacagugugcggcccuaagaaaagcaccaaucucgugaagaacaaaugcgugaacuucaacuucaacggccugaccggcaccggcgugcugacagagagcaacaagaaguuccugccauuccagcaguuuggccgggauaucgccgauaccacagacgccguuagagauccccagacacuggaaauccuggacaucaccccaugcagcuucggcggagugucugugaucaccccuggcaccaacaccagcaaucagguggcagugcuguaccagggcgugaacuguaccgaagugcccguggccauucacgccgaucagcugacaccuacauggcggguguacuccaccggcagcaauguguuucagaccagagccggcugucugaucggagccgagcacgugaacaauagcuacgagugcgacauccccaucggcgcuggcaucugugccagcuaccagacacagacaaacagccccagacgggcuagaagcguggccagccagagcaucauugccuacacaaugucucugggcguggagaacagcguggccuacuccaacaacucuaucgcuauccccaccaacuucaccaucagcgugaccaccgagauccugccuguguccaugaccaagaccagcguggacugcaccauguacaucugcggcgauuccaccgagugcuccaaccugcugcugcaguacggcagcuucugcacccagcugaauagagcccugacagggaucgccguggaacaggacaagaacacccaagagguguucgcccaagugaagcaaaucuacaagaccccuccuaucaaggacuucggcggcuucaauuucagccagauucugcccgauccuagcaagcccagcaagcggagcuucaucgaggaccugcuguucaacaaagugacacuggccgacgccggcuucaucaagcaguauggcgauugucugggcgacauugccgccagggaucugauuugcgcccagaaguuuaacggacugacagugcugccuccucugcugaccgaugagaugaucgcccaguacacaucugcccugcuggccggcacaaucacaagcggcuggacauuuggagcuggcgccgcucugcagauccccuuugcuaugcagauggccuaccgguucaacggcaucggagugacccagaaugugcuguacgagaaccagaagcugaucgccaaccaguucaacagcgccaucggcaagauccaggacagccugagcagcacagcaagcgcccugggaaagcugcaggacguggucaaccagaaugcccaggcacugaacacccuggucaagcagcuguccuccaacuucggcgccaucagcucugugcugaacgauauccugagcagacuggacccuccugaggccgaggugcagaucgacagacugaucacaggcagacugcagagccuccagacauacgugacccagcagcugaucagagccgccgagauuagagccucugccaaucuggccgccaccaagaugucugagugugugcugggccagagcaagagaguggacuuuugcggcaagggcuaccaccugaugagcuucccucagucugccccucacggcgugguguuucugcacgugacauaugugcccgcucaagagaagaauuucaccaccgcuccagccaucugccacgacggcaaagcccacuuuccuagagaaggcguguucguguccaacggcacccauugguucgugacacagcggaacuucuacgagccccagaucaucaccaccgacaacaccuucgugucuggcaacugcgacguugugaucggcauugugaacaauaccguguacgacccucugcagcccgagcuggacagcuucaaagaggaacuggacaaguacuuuaagaaccacacaagccccgacguggaccugggcgauaucagcggaaucaaugccagcgucgugaacauccagaaagagaucgaccggcugaacgagguggccaagaaucugaacgagagccugaucgaccugcaagaacuggggaaguacgagcaguacaucaaguggcccugguacaucuggcugggcuuuaucgccggacugauugccaucgugauggucacaaucaugcuguguugcaugaccagcugcuguagcugccugaagggcuguuguagcuguggcagcugcugcaaguucgacgaggacgauucugagcccgugcugaagggcgugaaacugcacuacaccugaggacuaguuauaagacugacuagcccgaugggccucccaacgggcccuccuccccuccuugcaccgagagaucuaaaaaaaaaaaaaaaaaaaaaaaaaaaaaaaaaaaaaaaaaaaaaaaaaaaaaaaaaaaaaaaaaaaaaaaaaaaaaaaaaaaaaaaaaaaaaaaaaaaa

SEQ ID NO: 26024 - RNA, 4011 nt, Artificial Sequence
  SARS-CoV-2/Wuhan/WIV05/2019__EPI_ISL_402128 spike protein mRNA gc mod (1-1273)(K986P_V987P_K986P_V987P_E484K_D614G)
aggagaaagcuuaccauguucguguuucuggugcugcugccccugguguccagccagugugugaaccugaccaccagaacacagcugccuccagccuacaccaacagcuucaccagaggcguguacuaccccgacaagguguucagauccagcgugcugcacucuacccaggaccuguuccugccuuucuucagcaacgugaccugguuccacgccauccacguguccggcaccaauggcaccaagagauucgacaaccccgugcugcccuucaacgacgggguguacuuugccagcaccgagaaguccaacaucaucagaggcuggaucuucggcaccacacuggacagcaagacccagagccugcugaucgugaacaacgccaccaacguggucaucaaagugugcgaguuccaguucugcaacgaccccuuccugggcgucuacuaccacaagaacaacaagagcuggauggaaagcgaguuccggguguacagcagcgccaacaacugcaccuucgaguacgugucccagccuuuccugauggaccuggaaggcaagcagggcaacuucaagaaccugcgcgaguucguguucaagaacaucgacggcuacuucaaaaucuacagcaagcacaccccuaucaaccucgugcgggaucugccucagggcuucucugcucuggaaccccugguggaucugcccaucggcaucaacaucacccgguuucagacacugcuggcccugcacagaagcuaccugacaccuggcgauagcagcagcggauggacagcuggugccgccgcuuacuaugugggcuaccugcagccuagaaccuuccugcugaaguacaacgagaacggcaccaucaccgacgccguggauugugcucuggauccucugagcgagacaaagugcacccugaaguccuucaccguggaaaagggcaucuaccagaccagcaacuuccgggugcagcccaccgaauccaucgugcgguuccccaauaucaccaaucugugccccuucggcgagguguucaaugccaccagauucgccucuguguacgccuggaaccggaagcggaucagcaauugcguggccgacuacuccgugcuguacaacuccgccagcuucagcaccuucaagugcuacggcguguccccuaccaagcugaacgaccugugcuucacaaacguguacgccgacagcuucgugauccggggagaugaagugcggcagauugccccuggacagacaggcaagaucgccgacuacaacuacaagcugcccgacgacuucaccggcugugugauugccuggaacagcaacaaccuggacuccaaagucggcggcaacuacaauuaccuguaccggcuguuccggaaguccaaucugaagcccuucgagcgggacaucagcaccgaaaucuaucaggccggcagcaccccuugcaacggcgugaagggcuucaacugcuacuucccacugcaguccuacggcuuucagcccacaaauggcgugggcuaucagcccuacagagugguggugcugagcuucgaacugcugcaugcuccugccacagugugcggcccuaagaaaagcaccaaucucgugaagaacaaaugcgugaacuucaacuucaacggccugaccggcaccggcgugcugacagagagcaacaagaaguuccugccauuccagcaguuuggccgggauaucgccgauaccacagacgccguuagagauccccagacacuggaaauccuggacaucaccccaugcagcuucggcggagugucugugaucaccccuggcaccaacaccagcaaucagguggcagugcuguaccagggcgugaacuguaccgaagugcccguggccauucacgccgaucagcugacaccuacauggcggguguacuccaccggcagcaauguguuucagaccagagccggcugucugaucggagccgagcacgugaacaauagcuacgagugcgacauccccaucggcgcuggcaucugugccagcuaccagacacagacaaacagccccagacgggcuagaagcguggccagccagagcaucauugccuacacaaugucucugggcgccgagaacagcguggccuacuccaacaacucuaucgcuauccccaccaacuucaccaucagcgugaccaccgagauccugccuguguccaugaccaagaccagcguggacugcaccauguacaucugcggcgauuccaccgagugcuccaaccugcugcugcaguacggcagcuucugcacccagcugaauagagcccugacagggaucgccguggaacaggacaagaacacccaagagguguucgcccaagugaagcaaaucuacaagaccccuccuaucaaggacuucggcggcuucaauuucagccagauucugcccgauccuagcaagcccagcaagcggagcuucaucgaggaccugcuguucaacaaagugacacuggccgacgccggcuucaucaagcaguauggcgauugucugggcgacauugccgccagggaucugauuugcgcccagaaguuuaacggacugacagugcugccuccucugcugaccgaugagaugaucgcccaguacacaucugcccugcuggccggcacaaucacaagcggcuggacauuuggagcuggcgccgcucugcagauccccuuugcuaugcagauggccuaccgguucaacggcaucggagugacccagaaugugcuguacgagaaccagaagcugaucgccaaccaguucaacagcgccaucggcaagauccaggacagccugagcagcacagcaagcgcccugggaaagcugcaggacguggucaaccagaaugcccaggcacugaacacccuggucaagcagcuguccuccaacuucggcgccaucagcucugugcugaacgauauccugagcagacuggacccuccugaggccgaggugcagaucgacagacugaucacaggcagacugcagagccuccagacauacgugacccagcagcugaucagagccgccgagauuagagccucugccaaucuggccgccaccaagaugucugagugugugcugggccagagcaagagaguggacuuuugcggcaagggcuaccaccugaugagcuucccucagucugccccucacggcgugguguuucugcacgugacauaugugcccgcucaagagaagaauuucaccaccgcuccagccaucugccacgacggcaaagcccacuuuccuagagaaggcguguucguguccaacggcacccauugguucgugacacagcggaacuucuacgagccccagaucaucaccaccgacaacaccuucgugucuggcaacugcgacguugugaucggcauugugaacaauaccguguacgacccucugcagcccgagcuggacagcuucaaagaggaacuggacaaguacuuuaagaaccacacaagccccgacguggaccugggcgauaucagcggaaucaaugccagcgucgugaacauccagaaagagaucgaccggcugaacgagguggccaagaaucugaacgagagccugaucgaccugcaagaacuggggaaguacgagcaguacaucaaguggcccugguacaucuggcugggcuuuaucgccggacugauugccaucgugauggucacaaucaugcuguguugcaugaccagcugcuguagcugccugaagggcuguuguagcuguggcagcugcugcaaguucgacgaggacgauucugagcccgugcugaagggcgugaaacugcacuacaccugaggacuaguuauaagacugacuagcccgaugggccucccaacgggcccuccuccccuccuugcaccgagagaucuaaaaaaaaaaaaaaaaaaaaaaaaaaaaaaaaaaaaaaaaaaaaaaaaaaaaaaaaaaaaaaaaaaaaaaaaaaaaaaaaaaaaaaaaaaaaaaaaaaaa

SEQ ID NO: 26025 - RNA, 4011 nt, Artificial Sequence
  SARS-CoV-2/Wuhan/WIV05/2019__EPI_ISL_402128 spike protein mRNA gc mod (1-1273)(K986P_V987P_K986P_V987P_L18F_T20N_P26S_D138Y_R190S_K417T _E484K_N501Y_D614G_H655Y_T1027I)
aggagaaagcuuaccauguucguguuucuggugcugcugccccugguguccagccagugugugaacuucaccaacagaacacagcugccuagcgccuacaccaacagcuucaccagaggcguguacuaccccgacaagguguucagauccagcgugcugcacucuacccaggaccuguuccugccuuucuucagcaacgugaccugguuccacgccauccacguguccggcaccaauggcaccaagagauucgacaaccccgugcugcccuucaacgacgggguguacuuugccagcaccgagaaguccaacaucaucagaggcuggaucuucggcaccacacuggacagcaagacccagagccugcugaucgugaacaacgccaccaacguggucaucaaagugugcgaguuccaguucugcaacuaccccuuccugggcgucuacuaccacaagaacaacaagagcuggauggaaagcgaguuccggguguacagcagcgccaacaacugcaccuucgaguacgugucccagccuuuccugauggaccuggaaggcaagcagggcaacuucaagaaccugagcgaguucguguucaagaacaucgacggcuacuucaaaaucuacagcaagcacaccccuaucaaccucgugcgggaucugccucagggcuucucugcucuggaaccccugguggaucugcccaucggcaucaacaucacccgguuucagacacugcuggcccugcacagaagcuaccugacaccuggcgauagcagcagcggauggacagcuggugccgccgcuuacuaugugggcuaccugcagccuagaaccuuccugcugaaguacaacgagaacggcaccaucaccgacgccguggauugugcucuggauccucugagcgagacaaagugcacccugaaguccuucaccguggaaaagggcaucuaccagaccagcaacuuccgggugcagcccaccgaauccaucgugcgguuccccaauaucaccaaucugugccccuucggcgagguguucaaugccaccagauucgccucuguguacgccuggaaccggaagcggaucagcaauugcguggccgacuacuccgugcuguacaacuccgccagcuucagcaccuucaagugcuacggcguguccccuaccaagcugaacgaccugugcuucacaaacguguacgccgacagcuucgugauccggggagaugaagugcggcagauugccccuggacagacaggcaccaucgccgacuacaacuacaagcugcccgacgacuucaccggcugugugauugccuggaacagcaacaaccuggacuccaaagucggcggcaacuacaauuaccuguaccggcuguuccggaaguccaaucugaagcccuucgagcgggacaucagcaccgaaaucuaucaggccggcagcaccccuugcaacggcgugaagggcuucaacugcuacuucccacugcaguccuacggcuuucagcccacauacggcgugggcuaucagcccuacagagugguggugcugagcuucgaacugcugcaugcuccugccacagugugcggcccuaagaaaagcaccaaucucgugaagaacaaaugcgugaacuucaacuucaacggccugaccggcaccggcgugcugacagagagcaacaagaaguuccugccauuccagcaguuuggccgggauaucgccgauaccacagacgccguuagagauccccagacacuggaaauccuggacaucaccccaugcagcuucggcggagugucugugaucaccccuggcaccaacaccagcaaucagguggcagugcuguaccagggcgugaacuguaccgaagugcccguggccauucacgccgaucagcugacaccuacauggcggguguacuccaccggcagcaauguguuucagaccagagccggcugucugaucggagccgaguacgugaacaauagcuacgagugcgacauccccaucggcgcuggcaucugugccagcuaccagacacagacaaacagccccagacgggcuagaagcguggccagccagagcaucauugccuacacaaugucucugggcgccgagaacagcguggccuacuccaacaacucuaucgcuauccccaccaacuucaccaucagcgugaccaccgagauccugccuguguccaugaccaagaccagcguggacugcaccauguacaucugcggcgauuccaccgagugcuccaaccugcugcugcaguacggcagcuucugcacccagcugaauagagcccugacagggaucgccguggaacaggacaagaacacccaagagguguucgcccaagugaagcaaaucuacaagaccccuccuaucaaggacuucggcggcuucaauuucagccagauucugcccgauccuagcaagcccagcaagcggagcuucaucgaggaccugcuguucaacaaagugacacuggccgacgccggcuucaucaagcaguauggcgauugucugggcgacauugccgccagggaucugauuugcgcccagaaguuuaacggacugacagugcugccuccucugcugaccgaugagaugaucgcccaguacacaucugcccugcuggccggcacaaucacaagcggcuggacauuuggagcuggcgccgcucugcagauccccuuugcuaugcagauggccuaccgguucaacggcaucggagugacccagaaugugcuguacgagaaccagaagcugaucgccaaccaguucaacagcgccaucggcaagauccaggacagccugagcagcacagcaagcgcccugggaaagcugcaggacguggucaaccagaaugcccaggcacugaacacccuggucaagcagcuguccuccaacuucggcgccaucagcucugugcugaacgauauccugagcagacuggacccuccugaggccgaggugcagaucgacagacugaucacaggcagacugcagagccuccagacauacgugacccagcagcugaucagagccgccgagauuagagccucugccaaucuggccgccaucaagaugucugagugugugcugggccagagcaagagaguggacuuuugcggcaagggcuaccaccugaugagcuucccucagucugccccucacggcgugguguuucugcacgugacauaugugcccgcucaagagaagaauuucaccaccgcuccagccaucugccacgacggcaaagcccacuuuccuagagaaggcguguucguguccaacggcacccauugguucgugacacagcggaacuucuacgagccccagaucaucaccaccgacaacaccuucgugucuggcaacugcgacguugugaucggcauugugaacaauaccguguacgacccucugcagcccgagcuggacagcuucaaagaggaacuggacaaguacuuuaagaaccacacaagccccgacguggaccugggcgauaucagcggaaucaaugccagcgucgugaacauccagaaagagaucgaccggcugaacgagguggccaagaaucugaacgagagccugaucgaccugcaagaacuggggaaguacgagcaguacaucaaguggcccugguacaucuggcugggcuuuaucgccggacugauugccaucgugauggucacaaucaugcuguguugcaugaccagcugcuguagcugccugaagggcuguuguagcuguggcagcugcugcaaguucgacgaggacgauucugagcccgugcugaagggcgugaaacugcacuacaccugaggacuaguuauaagacugacuagcccgaugggccucccaacgggcccuccuccccuccuugcaccgagagaucuaaaaaaaaaaaaaaaaaaaaaaaaaaaaaaaaaaaaaaaaaaaaaaaaaaaaaaaaaaaaaaaaaaaaaaaaaaaaaaaaaaaaaaaaaaaaaaaaaaaa

SEQ ID NO: 26026 - RNA, 4011 nt, Artificial Sequence
  SARS-CoV-2/Wuhan/WIV05/2019__EPI_ISL_402128 spike protein mRNA gc mod (1-1273)(K986P_V987P_K986P_V987P_S13I_W152C_L452R_D614G)
aggagaaagcuuaccauguucguguuucuggugcugcugccccugguguccauccagugugugaaccugaccaccagaacacagcugccuccagccuacaccaacagcuucaccagaggcguguacuaccccgacaagguguucagauccagcgugcugcacucuacccaggaccuguuccugccuuucuucagcaacgugaccugguuccacgccauccacguguccggcaccaauggcaccaagagauucgacaaccccgugcugcccuucaacgacgggguguacuuugccagcaccgagaaguccaacaucaucagaggcuggaucuucggcaccacacuggacagcaagacccagagccugcugaucgugaacaacgccaccaacguggucaucaaagugugcgaguuccaguucugcaacgaccccuuccugggcgucuacuaccacaagaacaacaagagcugcauggaaagcgaguuccggguguacagcagcgccaacaacugcaccuucgaguacgugucccagccuuuccugauggaccuggaaggcaagcagggcaacuucaagaaccugcgcgaguucguguucaagaacaucgacggcuacuucaaaaucuacagcaagcacaccccuaucaaccucgugcgggaucugccucagggcuucucugcucuggaaccccugguggaucugcccaucggcaucaacaucacccgguuucagacacugcuggcccugcacagaagcuaccugacaccuggcgauagcagcagcggauggacagcuggugccgccgcuuacuaugugggcuaccugcagccuagaaccuuccugcugaaguacaacgagaacggcaccaucaccgacgccguggauugugcucuggauccucugagcgagacaaagugcacccugaaguccuucaccguggaaaagggcaucuaccagaccagcaacuuccgggugcagcccaccgaauccaucgugcgguuccccaauaucaccaaucugugccccuucggcgagguguucaaugccaccagauucgccucuguguacgccuggaaccggaagcggaucagcaauugcguggccgacuacuccgugcuguacaacuccgccagcuucagcaccuucaagugcuacggcguguccccuaccaagcugaacgaccugugcuucacaaacguguacgccgacagcuucgugauccggggagaugaagugcggcagauugccccuggacagacaggcaagaucgccgacuacaacuacaagcugcccgacgacuucaccggcugugugauugccuggaacagcaacaaccuggacuccaaagucggcggcaacuacaauuaccgcuaccggcuguuccggaaguccaaucugaagcccuucgagcgggacaucagcaccgaaaucuaucaggccggcagcaccccuugcaacggcguggaaggcuucaacugcuacuucccacugcaguccuacggcuuucagcccacaaauggcgugggcuaucagcccuacagagugguggugcugagcuucgaacugcugcaugcuccugccacagugugcggcccuaagaaaagcaccaaucucgugaagaacaaaugcgugaacuucaacuucaacggccugaccggcaccggcgugcugacagagagcaacaagaaguuccugccauuccagcaguuuggccgggauaucgccgauaccacagacgccguuagagauccccagacacuggaaauccuggacaucaccccaugcagcuucggcggagugucugugaucaccccuggcaccaacaccagcaaucagguggcagugcuguaccagggcgugaacuguaccgaagugcccguggccauucacgccgaucagcugacaccuacauggcggguguacuccaccggcagcaauguguuucagaccagagccggcugucugaucggagccgagcacgugaacaauagcuacgagugcgacauccccaucggcgcuggcaucugugccagcuaccagacacagacaaacagccccagacgggcuagaagcguggccagccagagcaucauugccuacacaaugucucugggcgccgagaacagcguggccuacuccaacaacucuaucgcuauccccaccaacuucaccaucagcgugaccaccgagauccugccuguguccaugaccaagaccagcguggacugcaccauguacaucugcggcgauuccaccgagugcuccaaccugcugcugcaguacggcagcuucugcacccagcugaauagagcccugacagggaucgccguggaacaggacaagaacacccaagagguguucgcccaagugaagcaaaucuacaagaccccuccuaucaaggacuucggcggcuucaauuucagccagauucugcccgauccuagcaagcccagcaagcggagcuucaucgaggaccugcuguucaacaaagugacacuggccgacgccggcuucaucaagcaguauggcgauugucugggcgacauugccgccagggaucugauuugcgcccagaaguuuaacggacugacagugcugccuccucugcugaccgaugagaugaucgcccaguacacaucugcccugcuggccggcacaaucacaagcggcuggacauuuggagcuggcgccgcucugcagauccccuuugcuaugcagauggccuaccgguucaacggcaucggagugacccagaaugugcuguacgagaaccagaagcugaucgccaaccaguucaacagcgccaucggcaagauccaggacagccugagcagcacagcaagcgcccugggaaagcugcaggacguggucaaccagaaugcccaggcacugaacacccuggucaagcagcuguccuccaacuucggcgccaucagcucugugcugaacgauauccugagcagacuggacccuccugaggccgaggugcagaucgacagacugaucacaggcagacugcagagccuccagacauacgugacccagcagcugaucagagccgccgagauuagagccucugccaaucuggccgccaccaagaugucugagugugugcugggccagagcaagagaguggacuuuugcggcaagggcuaccaccugaugagcuucccucagucugccccucacggcgugguguuucugcacgugacauaugugcccgcucaagagaagaauuucaccaccgcuccagccaucugccacgacggcaaagcccacuuuccuagagaaggcguguucguguccaacggcacccauugguucgugacacagcggaacuucuacgagccccagaucaucaccaccgacaacaccuucgugucuggcaacugcgacguugugaucggcauugugaacaauaccguguacgacccucugcagcccgagcuggacagcuucaaagaggaacuggacaaguacuuuaagaaccacacaagccccgacguggaccugggcgauaucagcggaaucaaugccagcgucgugaacauccagaaagagaucgaccggcugaacgagguggccaagaaucugaacgagagccugaucgaccugcaagaacuggggaaguacgagcaguacaucaaguggcccugguacaucuggcugggcuuuaucgccggacugauugccaucgugauggucacaaucaugcuguguugcaugaccagcugcuguagcugccugaagggcuguuguagcuguggcagcugcugcaaguucgacgaggacgauucugagcccgugcugaagggcgugaaacugcacuacaccugaggacuaguuauaagacugacuagcccgaugggccucccaacgggcccuccuccccuccuugcaccgagagaucuaaaaaaaaaaaaaaaaaaaaaaaaaaaaaaaaaaaaaaaaaaaaaaaaaaaaaaaaaaaaaaaaaaaaaaaaaaaaaaaaaaaaaaaaaaaaaaaaaaaa

SEQ ID NO: 26027 - RNA, 4011 nt, Artificial Sequence
  SARS-CoV-2/Wuhan/WIV05/2019__EPI_ISL_402128 spike protein mRNA gc mod (1-1273)(K986P_V987P)
aggagaaagcuuaccauguucguguuccuggugcugcugccucugguguccagccagugugugaaccugaccaccagaacacagcugccuccagccuacaccaacagcuuuaccagaggcguguacuaccccgacaagguguucagauccagcgugcugcacucuacccaggaccuguuccugccuuucuucagcaacgugaccugguuccacgccauccacguguccggcaccaauggcaccaagagauucgacaaccccgugcugcccuucaacgacgggguguacuuugccagcaccgagaaguccaacaucaucagaggcuggaucuucggcaccacacuggacagcaagacccagagccugcugaucgugaacaacgccaccaacguggucaucaaagugugcgaguuccaguucugcaacgaccccuuccugggcgucuacuaccacaagaacaacaagagcuggauggaaagcgaguuccggguguacagcagcgccaacaacugcaccuucgaguacgugucccagccuuuccugauggaccuggaaggcaagcagggcaacuucaagaaccugcgcgaguucguguuuaagaacaucgacggcuacuucaagaucuacagcaagcacaccccuaucaaccucgugcgggaucugccucagggcuucucugcucuggaaccccugguggaucugcccaucggcaucaacaucacccgguuucagacacugcuggcccugcacagaagcuaccugacaccuggcgauagcagcagcggauggacagcuggugccgccgcuuacuaugugggcuaccugcagccuagaaccuuccugcugaaguacaacgagaacggcaccaucaccgacgccguggauugugcucuggauccucugagcgagacaaagugcacccugaaguccuucaccguggaaaagggcaucuaccagaccagcaacuuccgggugcagcccaccgaauccaucgugcgguuccccaauaucaccaaucugugccccuucggcgagguguucaaugccaccagauucgccucuguguacgccuggaaccggaagcggaucagcaauugcguggccgacuacuccgugcuguacaacuccgccagcuucagcaccuucaagugcuacggcguguccccuaccaagcugaacgaccugugcuucacaaacguguacgccgacagcuucgugauccggggagaugaagugcggcagauugccccuggacagacaggcaagaucgccgacuacaacuacaagcugcccgacgacuucaccggcugugugauugccuggaacagcaacaaccuggacuccaaagucggcggcaacuacaauuaccuguaccggcuguuccggaaguccaaucugaagcccuucgagcgggacaucuccaccgagaucuaucaggccggcagcaccccuuguaacggcguggaaggcuucaacugcuacuucccacugcaguccuacggcuuucagcccacaaauggcgugggcuaucagcccuacagagugguggugcugagcuucgaacugcugcaugccccugccacagugugcggcccuaagaaaagcaccaaucucgugaagaacaaaugcgugaacuucaacuucaacggccugaccggcaccggcgugcugacagagagcaacaagaaguuccugccauuccagcaguuuggccgggauaucgccgauaccacagacgccguuagagauccccagacacuggaaauccuggacaucaccccuugcagcuucggcggagugucugugaucaccccuggcaccaacaccagcaaucagguggcagugcuguaccaggacgugaacuguaccgaagugcccguggccauucacgccgaucagcugacaccuacauggcggguguacuccaccggcagcaauguguuucagaccagagccggcugucugaucggagccgagcacgugaacaauagcuacgagugcgacauccccaucggcgcuggaaucugcgccagcuaccagacacagacaaacagcccucggagagccagaagcguggccagccagagcaucauugccuacacaaugucucugggcgccgagaacagcguggccuacuccaacaacucuaucgcuauccccaccaacuucaccaucagcgugaccacagagauccugccuguguccaugaccaagaccagcguggacugcaccauguacaucugcggcgauuccaccgagugcuccaaccugcugcugcaguacggcagcuucugcacccagcugaauagagcccugacagggaucgccguggaacaggacaagaacacccaagagguguucgcccaagugaagcagaucuacaagaccccuccuaucaaggacuucggcggcuucaauuucagccagauucugcccgauccuagcaagcccagcaagcggagcuucaucgaggaccugcuguucaacaaagugacacuggccgacgccggcuucaucaagcaguauggcgauugucugggcgacauugccgccagggaucugauuugcgcccagaaguuuaacggacugacagugcugccuccucugcugaccgaugagaugaucgcccaguacacaucugcccugcuggccggcacaaucacaagcggcuggacauuuggagcaggcgccgcucugcagauccccuuugcuaugcagauggccuaccgguucaacggcaucggagugacccagaaugugcuguacgagaaccagaagcugaucgccaaccaguucaacagcgccaucggcaagauccaggacagccugagcagcacagcaagcgcccugggaaagcugcaggacguggucaaccagaaugcccaggcacugaacacccuggucaagcagcuguccuccaacuucggcgccaucagcucugugcugaacgauauccugagcagacuggacccuccugaggccgaggugcagaucgacagacugaucacaggcagacugcagagccuccagacauacgugacccagcagcugaucagagccgccgagauuagagccucugccaaucuggccgccaccaagaugucugagugugugcugggccagagcaagagaguggacuuuugcggcaagggcuaccaccugaugagcuucccucagucugccccucacggcgugguguuucugcacgugacauaugugcccgcucaagagaagaauuucaccaccgcuccagccaucugccacgacggcaaagcccacuuuccuagagaaggcguguucguguccaacggcacccauugguucgugacacagcggaacuucuacgagccccagaucaucaccaccgacaacaccuucgugucuggcaacugcgacgucgugaucggcauugugaacaauaccguguacgacccucugcagcccgagcuggacagcuucaaagaggaacuggacaaguacuuuaagaaccacacaagccccgacguggaccugggcgauaucagcggaaucaaugccagcgucgugaacauccagaaagagaucgaccggcugaacgagguggccaagaaucugaacgagagccugaucgaccugcaagaacuggggaaguacgagcaguacaucaaguggcccugguacaucuggcugggcuuuaucgccggacugauugccaucgugauggucacaaucaugcuguguugcaugaccagcugcuguagcugccugaagggcuguuguagcuguggcagcugcugcaaguucgacgaggacgauucugagcccgugcugaagggcgugaaacugcacuacacaugaggacuaguuauaagacugacuagcccgaugggccucccaacgggcccuccuccccuccuugcaccgagagaucuaaaaaaaaaaaaaaaaaaaaaaaaaaaaaaaaaaaaaaaaaaaaaaaaaaaaaaaaaaaaaaaaaaaaaaaaaaaaaaaaaaaaaaaaaaaaaaaaaaaa

SEQ ID NO: 26028 - RNA, 4011 nt, Artificial Sequence
  SARS-CoV-2/Wuhan/WIV05/2019__EPI_ISL_402128 spike protein mRNA gc mod (1-1273)(K986P_V987P_ D614G)
aggagaaagcuuaccauguucguguuccuggugcugcugccucugguguccagccagugugugaaccugaccaccagaacacagcugccuccagccuacaccaacagcuuuaccagaggcguguacuaccccgacaagguguucagauccagcgugcugcacucuacccaggaccuguuccugccuuucuucagcaacgugaccugguuccacgccauccacguguccggcaccaauggcaccaagagauucgacaaccccgugcugcccuucaacgacgggguguacuuugccagcaccgagaaguccaacaucaucagaggcuggaucuucggcaccacacuggacagcaagacccagagccugcugaucgugaacaacgccaccaacguggucaucaaagugugcgaguuccaguucugcaacgaccccuuccugggcgucuacuaccacaagaacaacaagagcuggauggaaagcgaguuccggguguacagcagcgccaacaacugcaccuucgaguacgugucccagccuuuccugauggaccuggaaggcaagcagggcaacuucaagaaccugcgcgaguucguguuuaagaacaucgacggcuacuucaagaucuacagcaagcacaccccuaucaaccucgugcgggaucugccucagggcuucucugcucuggaaccccugguggaucugcccaucggcaucaacaucacccgguuucagacacugcuggcccugcacagaagcuaccugacaccuggcgauagcagcagcggauggacagcuggugccgccgcuuacuaugugggcuaccugcagccuagaaccuuccugcugaaguacaacgagaacggcaccaucaccgacgccguggauugugcucuggauccucugagcgagacaaagugcacccugaaguccuucaccguggaaaagggcaucuaccagaccagcaacuuccgggugcagcccaccgaauccaucgugcgguuccccaauaucaccaaucugugccccuucggcgagguguucaaugccaccagauucgccucuguguacgccuggaaccggaagcggaucagcaauugcguggccgacuacuccgugcuguacaacuccgccagcuucagcaccuucaagugcuacggcguguccccuaccaagcugaacgaccugugcuucacaaacguguacgccgacagcuucgugauccggggagaugaagugcggcagauugccccuggacagacaggcaagaucgccgacuacaacuacaagcugcccgacgacuucaccggcugugugauugccuggaacagcaacaaccuggacuccaaagucggcggcaacuacaauuaccuguaccggcuguuccggaaguccaaucugaagcccuucgagcgggacaucuccaccgagaucuaucaggccggcagcaccccuuguaacggcguggaaggcuucaacugcuacuucccacugcaguccuacggcuuucagcccacaaauggcgugggcuaucagcccuacagagugguggugcugagcuucgaacugcugcaugccccugccacagugugcggcccuaagaaaagcaccaaucucgugaagaacaaaugcgugaacuucaacuucaacggccugaccggcaccggcgugcugacagagagcaacaagaaguuccugccauuccagcaguuuggccgggauaucgccgauaccacagacgccguuagagauccccagacacuggaaauccuggacaucaccccuugcagcuucggcggagugucugugaucaccccuggcaccaacaccagcaaucagguggcagugcuguaccagggcgugaacuguaccgaagugcccguggccauucacgccgaucagcugacaccuacauggcggguguacuccaccggcagcaauguguuucagaccagagccggcugucugaucggagccgagcacgugaacaauagcuacgagugcgacauccccaucggcgcuggaaucugcgccagcuaccagacacagacaaacagcccucggagagccagaagcguggccagccagagcaucauugccuacacaaugucucugggcgccgagaacagcguggccuacuccaacaacucuaucgcuauccccaccaacuucaccaucagcgugaccacagagauccugccuguguccaugaccaagaccagcguggacugcaccauguacaucugcggcgauuccaccgagugcuccaaccugcugcugcaguacggcagcuucugcacccagcugaauagagcccugacagggaucgccguggaacaggacaagaacacccaagagguguucgcccaagugaagcagaucuacaagaccccuccuaucaaggacuucggcggcuucaauuucagccagauucugcccgauccuagcaagcccagcaagcggagcuucaucgaggaccugcuguucaacaaagugacacuggccgacgccggcuucaucaagcaguauggcgauugucugggcgacauugccgccagggaucugauuugcgcccagaaguuuaacggacugacagugcugccuccucugcugaccgaugagaugaucgcccaguacacaucugcccugcuggccggcacaaucacaagcggcuggacauuuggagcaggcgccgcucugcagauccccuuugcuaugcagauggccuaccgguucaacggcaucggagugacccagaaugugcuguacgagaaccagaagcugaucgccaaccaguucaacagcgccaucggcaagauccaggacagccugagcagcacagcaagcgcccugggaaagcugcaggacguggucaaccagaaugcccaggcacugaacacccuggucaagcagcuguccuccaacuucggcgccaucagcucugugcugaacgauauccugagcagacuggacccuccugaggccgaggugcagaucgacagacugaucacaggcagacugcagagccuccagacauacgugacccagcagcugaucagagccgccgagauuagagccucugccaaucuggccgccaccaagaugucugagugugugcugggccagagcaagagaguggacuuuugcggcaagggcuaccaccugaugagcuucccucagucugccccucacggcgugguguuucugcacgugacauaugugcccgcucaagagaagaauuucaccaccgcuccagccaucugccacgacggcaaagcccacuuuccuagagaaggcguguucguguccaacggcacccauugguucgugacacagcggaacuucuacgagccccagaucaucaccaccgacaacaccuucgugucuggcaacugcgacgucgugaucggcauugugaacaauaccguguacgacccucugcagcccgagcuggacagcuucaaagaggaacuggacaaguacuuuaagaaccacacaagccccgacguggaccugggcgauaucagcggaaucaaugccagcgucgugaacauccagaaagagaucgaccggcugaacgagguggccaagaaucugaacgagagccugaucgaccugcaagaacuggggaaguacgagcaguacaucaaguggcccugguacaucuggcugggcuuuaucgccggacugauugccaucgugauggucacaaucaugcuguguugcaugaccagcugcuguagcugccugaagggcuguuguagcuguggcagcugcugcaaguucgacgaggacgauucugagcccgugcugaagggcgugaaacugcacuacacaugaggacuaguuauaagacugacuagcccgaugggccucccaacgggcccuccuccccuccuugcaccgagagaucuaaaaaaaaaaaaaaaaaaaaaaaaaaaaaaaaaaaaaaaaaaaaaaaaaaaaaaaaaaaaaaaaaaaaaaaaaaaaaaaaaaaaaaaaaaaaaaaaaaaa

SEQ ID NO: 26029 - RNA, 4011 nt, Artificial Sequence
  SARS-CoV-2/Wuhan/WIV05/2019__EPI_ISL_402128 spike protein mRNA gc mod (1-1273)(K986P_V987P_A222V_D614G)
aggagaaagcuuaccauguucguguuccuggugcugcugccucugguguccagccagugugugaaccugaccaccagaacacagcugccuccagccuacaccaacagcuuuaccagaggcguguacuaccccgacaagguguucagauccagcgugcugcacucuacccaggaccuguuccugccuuucuucagcaacgugaccugguuccacgccauccacguguccggcaccaauggcaccaagagauucgacaaccccgugcugcccuucaacgacgggguguacuuugccagcaccgagaaguccaacaucaucagaggcuggaucuucggcaccacacuggacagcaagacccagagccugcugaucgugaacaacgccaccaacguggucaucaaagugugcgaguuccaguucugcaacgaccccuuccugggcgucuacuaccacaagaacaacaagagcuggauggaaagcgaguuccggguguacagcagcgccaacaacugcaccuucgaguacgugucccagccuuuccugauggaccuggaaggcaagcagggcaacuucaagaaccugcgcgaguucguguuuaagaacaucgacggcuacuucaagaucuacagcaagcacaccccuaucaaccucgugcgggaucugccucagggcuucucugugcuggaaccccugguggaucugcccaucggcaucaacaucacccgguuucagacacugcuggcccugcacagaagcuaccugacaccuggcgauagcagcagcggauggacagcuggugccgccgcuuacuaugugggcuaccugcagccuagaaccuuccugcugaaguacaacgagaacggcaccaucaccgacgccguggauugugcucuggauccucugagcgagacaaagugcacccugaaguccuucaccguggaaaagggcaucuaccagaccagcaacuuccgggugcagcccaccgaauccaucgugcgguuccccaauaucaccaaucugugccccuucggcgagguguucaaugccaccagauucgccucuguguacgccuggaaccggaagcggaucagcaauugcguggccgacuacuccgugcuguacaacuccgccagcuucagcaccuucaagugcuacggcguguccccuaccaagcugaacgaccugugcuucacaaacguguacgccgacagcuucgugauccggggagaugaagugcggcagauugccccuggacagacaggcaagaucgccgacuacaacuacaagcugcccgacgacuucaccggcugugugauugccuggaacagcaacaaccuggacuccaaagucggcggcaacuacaauuaccuguaccggcuguuccggaaguccaaucugaagcccuucgagcgggacaucuccaccgagaucuaucaggccggcagcaccccuuguaacggcguggaaggcuucaacugcuacuucccacugcaguccuacggcuuucagcccacaaauggcgugggcuaucagcccuacagagugguggugcugagcuucgaacugcugcaugccccugccacagugugcggcccuaagaaaagcaccaaucucgugaagaacaaaugcgugaacuucaacuucaacggccugaccggcaccggcgugcugacagagagcaacaagaaguuccugccauuccagcaguuuggccgggauaucgccgauaccacagacgccguuagagauccccagacacuggaaauccuggacaucaccccuugcagcuucggcggagugucugugaucaccccuggcaccaacaccagcaaucagguggcagugcuguaccagggcgugaacuguaccgaagugcccguggccauucacgccgaucagcugacaccuacauggcggguguacuccaccggcagcaauguguuucagaccagagccggcugucugaucggagccgagcacgugaacaauagcuacgagugcgacauccccaucggcgcuggaaucugcgccagcuaccagacacagacaaacagcccucggagagccagaagcguggccagccagagcaucauugccuacacaaugucucugggcgccgagaacagcguggccuacuccaacaacucuaucgcuauccccaccaacuucaccaucagcgugaccacagagauccugccuguguccaugaccaagaccagcguggacugcaccauguacaucugcggcgauuccaccgagugcuccaaccugcugcugcaguacggcagcuucugcacccagcugaauagagcccugacagggaucgccguggaacaggacaagaacacccaagagguguucgcccaagugaagcagaucuacaagaccccuccuaucaaggacuucggcggcuucaauuucagccagauucugcccgauccuagcaagcccagcaagcggagcuucaucgaggaccugcuguucaacaaagugacacuggccgacgccggcuucaucaagcaguauggcgauugucugggcgacauugccgccagggaucugauuugcgcccagaaguuuaacggacugacagugcugccuccucugcugaccgaugagaugaucgcccaguacacaucugcccugcuggccggcacaaucacaagcggcuggacauuuggagcaggcgccgcucugcagauccccuuugcuaugcagauggccuaccgguucaacggcaucggagugacccagaaugugcuguacgagaaccagaagcugaucgccaaccaguucaacagcgccaucggcaagauccaggacagccugagcagcacagcaagcgcccugggaaagcugcaggacguggucaaccagaaugcccaggcacugaacacccuggucaagcagcuguccuccaacuucggcgccaucagcucugugcugaacgauauccugagcagacuggacccuccugaggccgaggugcagaucgacagacugaucacaggcagacugcagagccuccagacauacgugacccagcagcugaucagagccgccgagauuagagccucugccaaucuggccgccaccaagaugucugagugugugcugggccagagcaagagaguggacuuuugcggcaagggcuaccaccugaugagcuucccucagucugccccucacggcgugguguuucugcacgugacauaugugcccgcucaagagaagaauuucaccaccgcuccagccaucugccacgacggcaaagcccacuuuccuagagaaggcguguucguguccaacggcacccauugguucgugacacagcggaacuucuacgagccccagaucaucaccaccgacaacaccuucgugucuggcaacugcgacgucgugaucggcauugugaacaauaccguguacgacccucugcagcccgagcuggacagcuucaaagaggaacuggacaaguacuuuaagaaccacacaagccccgacguggaccugggcgauaucagcggaaucaaugccagcgucgugaacauccagaaagagaucgaccggcugaacgagguggccaagaaucugaacgagagccugaucgaccugcaagaacuggggaaguacgagcaguacaucaaguggcccugguacaucuggcugggcuuuaucgccggacugauugccaucgugauggucacaaucaugcuguguugcaugaccagcugcuguagcugccugaagggcuguuguagcuguggcagcugcugcaaguucgacgaggacgauucugagcccgugcugaagggcgugaaacugcacuacacaugaggacuaguuauaagacugacuagcccgaugggccucccaacgggcccuccuccccuccuugcaccgagagaucuaaaaaaaaaaaaaaaaaaaaaaaaaaaaaaaaaaaaaaaaaaaaaaaaaaaaaaaaaaaaaaaaaaaaaaaaaaaaaaaaaaaaaaaaaaaaaaaaaaaa

SEQ ID NO: 26030 - RNA, 4011 nt, Artificial Sequence
  SARS-CoV-2/Wuhan/WIV05/2019__EPI_ISL_402128 spike protein mRNA gc mod (1-1273)(K986P_V987P_N439K_D614G)
aggagaaagcuuaccauguucguguuccuggugcugcugccucugguguccagccagugugugaaccugaccaccagaacacagcugccuccagccuacaccaacagcuuuaccagaggcguguacuaccccgacaagguguucagauccagcgugcugcacucuacccaggaccuguuccugccuuucuucagcaacgugaccugguuccacgccauccacguguccggcaccaauggcaccaagagauucgacaaccccgugcugcccuucaacgacgggguguacuuugccagcaccgagaaguccaacaucaucagaggcuggaucuucggcaccacacuggacagcaagacccagagccugcugaucgugaacaacgccaccaacguggucaucaaagugugcgaguuccaguucugcaacgaccccuuccugggcgucuacuaccacaagaacaacaagagcuggauggaaagcgaguuccggguguacagcagcgccaacaacugcaccuucgaguacgugucccagccuuuccugauggaccuggaaggcaagcagggcaacuucaagaaccugcgcgaguucguguuuaagaacaucgacggcuacuucaagaucuacagcaagcacaccccuaucaaccucgugcgggaucugccucagggcuucucugcucuggaaccccugguggaucugcccaucggcaucaacaucacccgguuucagacacugcuggcccugcacagaagcuaccugacaccuggcgauagcagcagcggauggacagcuggugccgccgcuuacuaugugggcuaccugcagccuagaaccuuccugcugaaguacaacgagaacggcaccaucaccgacgccguggauugugcucuggauccucugagcgagacaaagugcacccugaaguccuucaccguggaaaagggcaucuaccagaccagcaacuuccgggugcagcccaccgaauccaucgugcgguuccccaauaucaccaaucugugccccuucggcgagguguucaaugccaccagauucgccucuguguacgccuggaaccggaagcggaucagcaauugcguggccgacuacuccgugcuguacaacuccgccagcuucagcaccuucaagugcuacggcguguccccuaccaagcugaacgaccugugcuucacaaacguguacgccgacagcuucgugauccggggagaugaagugcggcagauugccccuggacagacaggcaagaucgccgacuacaacuacaagcugcccgacgacuucaccggcugugugauugccuggaacagcaagaaccuggacuccaaagucggcggcaacuacaauuaccuguaccggcuguuccggaaguccaaucugaagcccuucgagcgggacaucuccaccgagaucuaucaggccggcagcaccccuuguaacggcguggaaggcuucaacugcuacuucccacugcaguccuacggcuuucagcccacaaauggcgugggcuaucagcccuacagagugguggugcugagcuucgaacugcugcaugccccugccacagugugcggcccuaagaaaagcaccaaucucgugaagaacaaaugcgugaacuucaacuucaacggccugaccggcaccggcgugcugacagagagcaacaagaaguuccugccauuccagcaguuuggccgggauaucgccgauaccacagacgccguuagagauccccagacacuggaaauccuggacaucaccccuugcagcuucggcggagugucugugaucaccccuggcaccaacaccagcaaucagguggcagugcuguaccagggcgugaacuguaccgaagugcccguggccauucacgccgaucagcugacaccuacauggcggguguacuccaccggcagcaauguguuucagaccagagccggcugucugaucggagccgagcacgugaacaauagcuacgagugcgacauccccaucggcgcuggaaucugcgccagcuaccagacacagacaaacagcccucggagagccagaagcguggccagccagagcaucauugccuacacaaugucucugggcgccgagaacagcguggccuacuccaacaacucuaucgcuauccccaccaacuucaccaucagcgugaccacagagauccugccuguguccaugaccaagaccagcguggacugcaccauguacaucugcggcgauuccaccgagugcuccaaccugcugcugcaguacggcagcuucugcacccagcugaauagagcccugacagggaucgccguggaacaggacaagaacacccaagagguguucgcccaagugaagcagaucuacaagaccccuccuaucaaggacuucggcggcuucaauuucagccagauucugcccgauccuagcaagcccagcaagcggagcuucaucgaggaccugcuguucaacaaagugacacuggccgacgccggcuucaucaagcaguauggcgauugucugggcgacauugccgccagggaucugauuugcgcccagaaguuuaacggacugacagugcugccuccucugcugaccgaugagaugaucgcccaguacacaucugcccugcuggccggcacaaucacaagcggcuggacauuuggagcaggcgccgcucugcagauccccuuugcuaugcagauggccuaccgguucaacggcaucggagugacccagaaugugcuguacgagaaccagaagcugaucgccaaccaguucaacagcgccaucggcaagauccaggacagccugagcagcacagcaagcgcccugggaaagcugcaggacguggucaaccagaaugcccaggcacugaacacccuggucaagcagcuguccuccaacuucggcgccaucagcucugugcugaacgauauccugagcagacuggacccuccugaggccgaggugcagaucgacagacugaucacaggcagacugcagagccuccagacauacgugacccagcagcugaucagagccgccgagauuagagccucugccaaucuggccgccaccaagaugucugagugugugcugggccagagcaagagaguggacuuuugcggcaagggcuaccaccugaugagcuucccucagucugccccucacggcgugguguuucugcacgugacauaugugcccgcucaagagaagaauuucaccaccgcuccagccaucugccacgacggcaaagcccacuuuccuagagaaggcguguucguguccaacggcacccauugguucgugacacagcggaacuucuacgagccccagaucaucaccaccgacaacaccuucgugucuggcaacugcgacgucgugaucggcauugugaacaauaccguguacgacccucugcagcccgagcuggacagcuucaaagaggaacuggacaaguacuuuaagaaccacacaagccccgacguggaccugggcgauaucagcggaaucaaugccagcgucgugaacauccagaaagagaucgaccggcugaacgagguggccaagaaucugaacgagagccugaucgaccugcaagaacuggggaaguacgagcaguacaucaaguggcccugguacaucuggcugggcuuuaucgccggacugauugccaucgugauggucacaaucaugcuguguugcaugaccagcugcuguagcugccugaagggcuguuguagcuguggcagcugcugcaaguucgacgaggacgauucugagcccgugcugaagggcgugaaacugcacuacacaugaggacuaguuauaagacugacuagcccgaugggccucccaacgggcccuccuccccuccuugcaccgagagaucuaaaaaaaaaaaaaaaaaaaaaaaaaaaaaaaaaaaaaaaaaaaaaaaaaaaaaaaaaaaaaaaaaaaaaaaaaaaaaaaaaaaaaaaaaaaaaaaaaaaa

SEQ ID NO: 26031 - RNA, 4011 nt, Artificial Sequence
  SARS-CoV-2/Wuhan/WIV05/2019__EPI_ISL_402128 spike protein mRNA gc mod (1-1273)(K986P_V987P_S477N_D614G)
aggagaaagcuuaccauguucguguuccuggugcugcugccucugguguccagccagugugugaaccugaccaccagaacacagcugccuccagccuacaccaacagcuuuaccagaggcguguacuaccccgacaagguguucagauccagcgugcugcacucuacccaggaccuguuccugccuuucuucagcaacgugaccugguuccacgccauccacguguccggcaccaauggcaccaagagauucgacaaccccgugcugcccuucaacgacgggguguacuuugccagcaccgagaaguccaacaucaucagaggcuggaucuucggcaccacacuggacagcaagacccagagccugcugaucgugaacaacgccaccaacguggucaucaaagugugcgaguuccaguucugcaacgaccccuuccugggcgucuacuaccacaagaacaacaagagcuggauggaaagcgaguuccggguguacagcagcgccaacaacugcaccuucgaguacgugucccagccuuuccugauggaccuggaaggcaagcagggcaacuucaagaaccugcgcgaguucguguuuaagaacaucgacggcuacuucaagaucuacagcaagcacaccccuaucaaccucgugcgggaucugccucagggcuucucugcucuggaaccccugguggaucugcccaucggcaucaacaucacccgguuucagacacugcuggcccugcacagaagcuaccugacaccuggcgauagcagcagcggauggacagcuggugccgccgcuuacuaugugggcuaccugcagccuagaaccuuccugcugaaguacaacgagaacggcaccaucaccgacgccguggauugugcucuggauccucugagcgagacaaagugcacccugaaguccuucaccguggaaaagggcaucuaccagaccagcaacuuccgggugcagcccaccgaauccaucgugcgguuccccaauaucaccaaucugugccccuucggcgagguguucaaugccaccagauucgccucuguguacgccuggaaccggaagcggaucagcaauugcguggccgacuacuccgugcuguacaacuccgccagcuucagcaccuucaagugcuacggcguguccccuaccaagcugaacgaccugugcuucacaaacguguacgccgacagcuucgugauccggggagaugaagugcggcagauugccccuggacagacaggcaagaucgccgacuacaacuacaagcugcccgacgacuucaccggcugugugauugccuggaacagcaacaaccuggacuccaaagucggcggcaacuacaauuaccuguaccggcuguuccggaaguccaaucugaagcccuucgagcgggacaucuccaccgagaucuaucaggccggcaacaccccuuguaacggcguggaaggcuucaacugcuacuucccacugcaguccuacggcuuucagcccacaaauggcgugggcuaucagcccuacagagugguggugcugagcuucgaacugcugcaugccccugccacagugugcggcccuaagaaaagcaccaaucucgugaagaacaaaugcgugaacuucaacuucaacggccugaccggcaccggcgugcugacagagagcaacaagaaguuccugccauuccagcaguuuggccgggauaucgccgauaccacagacgccguuagagauccccagacacuggaaauccuggacaucaccccuugcagcuucggcggagugucugugaucaccccuggcaccaacaccagcaaucagguggcagugcuguaccagggcgugaacuguaccgaagugcccguggccauucacgccgaucagcugacaccuacauggcggguguacuccaccggcagcaauguguuucagaccagagccggcugucugaucggagccgagcacgugaacaauagcuacgagugcgacauccccaucggcgcuggaaucugcgccagcuaccagacacagacaaacagcccucggagagccagaagcguggccagccagagcaucauugccuacacaaugucucugggcgccgagaacagcguggccuacuccaacaacucuaucgcuauccccaccaacuucaccaucagcgugaccacagagauccugccuguguccaugaccaagaccagcguggacugcaccauguacaucugcggcgauuccaccgagugcuccaaccugcugcugcaguacggcagcuucugcacccagcugaauagagcccugacagggaucgccguggaacaggacaagaacacccaagagguguucgcccaagugaagcagaucuacaagaccccuccuaucaaggacuucggcggcuucaauuucagccagauucugcccgauccuagcaagcccagcaagcggagcuucaucgaggaccugcuguucaacaaagugacacuggccgacgccggcuucaucaagcaguauggcgauugucugggcgacauugccgccagggaucugauuugcgcccagaaguuuaacggacugacagugcugccuccucugcugaccgaugagaugaucgcccaguacacaucugcccugcuggccggcacaaucacaagcggcuggacauuuggagcaggcgccgcucugcagauccccuuugcuaugcagauggccuaccgguucaacggcaucggagugacccagaaugugcuguacgagaaccagaagcugaucgccaaccaguucaacagcgccaucggcaagauccaggacagccugagcagcacagcaagcgcccugggaaagcugcaggacguggucaaccagaaugcccaggcacugaacacccuggucaagcagcuguccuccaacuucggcgccaucagcucugugcugaacgauauccugagcagacuggacccuccugaggccgaggugcagaucgacagacugaucacaggcagacugcagagccuccagacauacgugacccagcagcugaucagagccgccgagauuagagccucugccaaucuggccgccaccaagaugucugagugugugcugggccagagcaagagaguggacuuuugcggcaagggcuaccaccugaugagcuucccucagucugccccucacggcgugguguuucugcacgugacauaugugcccgcucaagagaagaauuucaccaccgcuccagccaucugccacgacggcaaagcccacuuuccuagagaaggcguguucguguccaacggcacccauugguucgugacacagcggaacuucuacgagccccagaucaucaccaccgacaacaccuucgugucuggcaacugcgacgucgugaucggcauugugaacaauaccguguacgacccucugcagcccgagcuggacagcuucaaagaggaacuggacaaguacuuuaagaaccacacaagccccgacguggaccugggcgauaucagcggaaucaaugccagcgucgugaacauccagaaagagaucgaccggcugaacgagguggccaagaaucugaacgagagccugaucgaccugcaagaacuggggaaguacgagcaguacaucaaguggcccugguacaucuggcugggcuuuaucgccggacugauugccaucgugauggucacaaucaugcuguguugcaugaccagcugcuguagcugccugaagggcuguuguagcuguggcagcugcugcaaguucgacgaggacgauucugagcccgugcugaagggcgugaaacugcacuacacaugaggacuaguuauaagacugacuagcccgaugggccucccaacgggcccuccuccccuccuugcaccgagagaucuaaaaaaaaaaaaaaaaaaaaaaaaaaaaaaaaaaaaaaaaaaaaaaaaaaaaaaaaaaaaaaaaaaaaaaaaaaaaaaaaaaaaaaaaaaaaaaaaaaaa

SEQ ID NO: 26032 - RNA, 4011 nt, Artificial Sequence
  SARS-CoV-2/Wuhan/WIV05/2019__EPI_ISL_402128 spike protein mRNA gc mod (1-1273)(K986P_V987P_N501Y_D614G)
aggagaaagcuuaccauguucguguuccuggugcugcugccucugguguccagccagugugugaaccugaccaccagaacacagcugccuccagccuacaccaacagcuuuaccagaggcguguacuaccccgacaagguguucagauccagcgugcugcacucuacccaggaccuguuccugccuuucuucagcaacgugaccugguuccacgccauccacguguccggcaccaauggcaccaagagauucgacaaccccgugcugcccuucaacgacgggguguacuuugccagcaccgagaaguccaacaucaucagaggcuggaucuucggcaccacacuggacagcaagacccagagccugcugaucgugaacaacgccaccaacguggucaucaaagugugcgaguuccaguucugcaacgaccccuuccugggcgucuacuaccacaagaacaacaagagcuggauggaaagcgaguuccggguguacagcagcgccaacaacugcaccuucgaguacgugucccagccuuuccugauggaccuggaaggcaagcagggcaacuucaagaaccugcgcgaguucguguuuaagaacaucgacggcuacuucaagaucuacagcaagcacaccccuaucaaccucgugcgggaucugccucagggcuucucugcucuggaaccccugguggaucugcccaucggcaucaacaucacccgguuucagacacugcuggcccugcacagaagcuaccugacaccuggcgauagcagcagcggauggacagcuggugccgccgcuuacuaugugggcuaccugcagccuagaaccuuccugcugaaguacaacgagaacggcaccaucaccgacgccguggauugugcucuggauccucugagcgagacaaagugcacccugaaguccuucaccguggaaaagggcaucuaccagaccagcaacuuccgggugcagcccaccgaauccaucgugcgguuccccaauaucaccaaucugugccccuucggcgagguguucaaugccaccagauucgccucuguguacgccuggaaccggaagcggaucagcaauugcguggccgacuacuccgugcuguacaacuccgccagcuucagcaccuucaagugcuacggcguguccccuaccaagcugaacgaccugugcuucacaaacguguacgccgacagcuucgugauccggggagaugaagugcggcagauugccccuggacagacaggcaagaucgccgacuacaacuacaagcugcccgacgacuucaccggcugugugauugccuggaacagcaacaaccuggacuccaaagucggcggcaacuacaauuaccuguaccggcuguuccggaaguccaaucugaagcccuucgagcgggacaucuccaccgagaucuaucaggccggcagcaccccuuguaacggcguggaaggcuucaacugcuacuucccacugcaguccuacggcuuucagcccacauacggcgugggcuaucagcccuacagagugguggugcugagcuucgaacugcugcaugccccugccacagugugcggcccuaagaaaagcaccaaucucgugaagaacaaaugcgugaacuucaacuucaacggccugaccggcaccggcgugcugacagagagcaacaagaaguuccugccauuccagcaguuuggccgggauaucgccgauaccacagacgccguuagagauccccagacacuggaaauccuggacaucaccccuugcagcuucggcggagugucugugaucaccccuggcaccaacaccagcaaucagguggcagugcuguaccagggcgugaacuguaccgaagugcccguggccauucacgccgaucagcugacaccuacauggcggguguacuccaccggcagcaauguguuucagaccagagccggcugucugaucggagccgagcacgugaacaauagcuacgagugcgacauccccaucggcgcuggaaucugcgccagcuaccagacacagacaaacagcccucggagagccagaagcguggccagccagagcaucauugccuacacaaugucucugggcgccgagaacagcguggccuacuccaacaacucuaucgcuauccccaccaacuucaccaucagcgugaccacagagauccugccuguguccaugaccaagaccagcguggacugcaccauguacaucugcggcgauuccaccgagugcuccaaccugcugcugcaguacggcagcuucugcacccagcugaauagagcccugacagggaucgccguggaacaggacaagaacacccaagagguguucgcccaagugaagcagaucuacaagaccccuccuaucaaggacuucggcggcuucaauuucagccagauucugcccgauccuagcaagcccagcaagcggagcuucaucgaggaccugcuguucaacaaagugacacuggccgacgccggcuucaucaagcaguauggcgauugucugggcgacauugccgccagggaucugauuugcgcccagaaguuuaacggacugacagugcugccuccucugcugaccgaugagaugaucgcccaguacacaucugcccugcuggccggcacaaucacaagcggcuggacauuuggagcaggcgccgcucugcagauccccuuugcuaugcagauggccuaccgguucaacggcaucggagugacccagaaugugcuguacgagaaccagaagcugaucgccaaccaguucaacagcgccaucggcaagauccaggacagccugagcagcacagcaagcgcccugggaaagcugcaggacguggucaaccagaaugcccaggcacugaacacccuggucaagcagcuguccuccaacuucggcgccaucagcucugugcugaacgauauccugagcagacuggacccuccugaggccgaggugcagaucgacagacugaucacaggcagacugcagagccuccagacauacgugacccagcagcugaucagagccgccgagauuagagccucugccaaucuggccgccaccaagaugucugagugugugcugggccagagcaagagaguggacuuuugcggcaagggcuaccaccugaugagcuucccucagucugccccucacggcgugguguuucugcacgugacauaugugcccgcucaagagaagaauuucaccaccgcuccagccaucugccacgacggcaaagcccacuuuccuagagaaggcguguucguguccaacggcacccauugguucgugacacagcggaacuucuacgagccccagaucaucaccaccgacaacaccuucgugucuggcaacugcgacgucgugaucggcauugugaacaauaccguguacgacccucugcagcccgagcuggacagcuucaaagaggaacuggacaaguacuuuaagaaccacacaagccccgacguggaccugggcgauaucagcggaaucaaugccagcgucgugaacauccagaaagagaucgaccggcugaacgagguggccaagaaucugaacgagagccugaucgaccugcaagaacuggggaaguacgagcaguacaucaaguggcccugguacaucuggcugggcuuuaucgccggacugauugccaucgugauggucacaaucaugcuguguugcaugaccagcugcuguagcugccugaagggcuguuguagcuguggcagcugcugcaaguucgacgaggacgauucugagcccgugcugaagggcgugaaacugcacuacacaugaggacuaguuauaagacugacuagcccgaugggccucccaacgggcccuccuccccuccuugcaccgagagaucuaaaaaaaaaaaaaaaaaaaaaaaaaaaaaaaaaaaaaaaaaaaaaaaaaaaaaaaaaaaaaaaaaaaaaaaaaaaaaaaaaaaaaaaaaaaaaaaaaaaa

SEQ ID NO: 26033 - RNA, 4005 nt, Artificial Sequence
  SARS-CoV-2/Wuhan/WIV05/2019__EPI_ISL_402128 spike protein mRNA gc mod (1-1273)(K986P_V987P_H69del_V70del_D614G)
aggagaaagcuuaccauguucguguuccuggugcugcugccucugguguccagccagugugugaaccugaccaccagaacacagcugccuccagccuacaccaacagcuuuaccagaggcguguacuaccccgacaagguguucagauccagcgugcugcacucuacccaggaccuguuccugccuuucuucagcaacgugaccugguuccacgccaucuccggcaccaauggcaccaagagauucgacaaccccgugcugcccuucaacgacgggguguacuuugccagcaccgagaaguccaacaucaucagaggcuggaucuucggcaccacacuggacagcaagacccagagccugcugaucgugaacaacgccaccaacguggucaucaaagugugcgaguuccaguucugcaacgaccccuuccugggcgucuacuaccacaagaacaacaagagcuggauggaaagcgaguuccggguguacagcagcgccaacaacugcaccuucgaguacgugucccagccuuuccugauggaccuggaaggcaagcagggcaacuucaagaaccugcgcgaguucguguuuaagaacaucgacggcuacuucaagaucuacagcaagcacaccccuaucaaccucgugcgggaucugccucagggcuucucugcucuggaaccccugguggaucugcccaucggcaucaacaucacccgguuucagacacugcuggcccugcacagaagcuaccugacaccuggcgauagcagcagcggauggacagcuggugccgccgcuuacuaugugggcuaccugcagccuagaaccuuccugcugaaguacaacgagaacggcaccaucaccgacgccguggauugugcucuggauccucugagcgagacaaagugcacccugaaguccuucaccguggaaaagggcaucuaccagaccagcaacuuccgggugcagcccaccgaauccaucgugcgguuccccaauaucaccaaucugugccccuucggcgagguguucaaugccaccagauucgccucuguguacgccuggaaccggaagcggaucagcaauugcguggccgacuacuccgugcuguacaacuccgccagcuucagcaccuucaagugcuacggcguguccccuaccaagcugaacgaccugugcuucacaaacguguacgccgacagcuucgugauccggggagaugaagugcggcagauugccccuggacagacaggcaagaucgccgacuacaacuacaagcugcccgacgacuucaccggcugugugauugccuggaacagcaacaaccuggacuccaaagucggcggcaacuacaauuaccuguaccggcuguuccggaaguccaaucugaagcccuucgagcgggacaucuccaccgagaucuaucaggccggcagcaccccuuguaacggcguggaaggcuucaacugcuacuucccacugcaguccuacggcuuucagcccacaaauggcgugggcuaucagcccuacagagugguggugcugagcuucgaacugcugcaugccccugccacagugugcggcccuaagaaaagcaccaaucucgugaagaacaaaugcgugaacuucaacuucaacggccugaccggcaccggcgugcugacagagagcaacaagaaguuccugccauuccagcaguuuggccgggauaucgccgauaccacagacgccguuagagauccccagacacuggaaauccuggacaucaccccuugcagcuucggcggagugucugugaucaccccuggcaccaacaccagcaaucagguggcagugcuguaccagggcgugaacuguaccgaagugcccguggccauucacgccgaucagcugacaccuacauggcggguguacuccaccggcagcaauguguuucagaccagagccggcugucugaucggagccgagcacgugaacaauagcuacgagugcgacauccccaucggcgcuggaaucugcgccagcuaccagacacagacaaacagcccucggagagccagaagcguggccagccagagcaucauugccuacacaaugucucugggcgccgagaacagcguggccuacuccaacaacucuaucgcuauccccaccaacuucaccaucagcgugaccacagagauccugccuguguccaugaccaagaccagcguggacugcaccauguacaucugcggcgauuccaccgagugcuccaaccugcugcugcaguacggcagcuucugcacccagcugaauagagcccugacagggaucgccguggaacaggacaagaacacccaagagguguucgcccaagugaagcagaucuacaagaccccuccuaucaaggacuucggcggcuucaauuucagccagauucugcccgauccuagcaagcccagcaagcggagcuucaucgaggaccugcuguucaacaaagugacacuggccgacgccggcuucaucaagcaguauggcgauugucugggcgacauugccgccagggaucugauuugcgcccagaaguuuaacggacugacagugcugccuccucugcugaccgaugagaugaucgcccaguacacaucugcccugcuggccggcacaaucacaagcggcuggacauuuggagcaggcgccgcucugcagauccccuuugcuaugcagauggccuaccgguucaacggcaucggagugacccagaaugugcuguacgagaaccagaagcugaucgccaaccaguucaacagcgccaucggcaagauccaggacagccugagcagcacagcaagcgcccugggaaagcugcaggacguggucaaccagaaugcccaggcacugaacacccuggucaagcagcuguccuccaacuucggcgccaucagcucugugcugaacgauauccugagcagacuggacccuccugaggccgaggugcagaucgacagacugaucacaggcagacugcagagccuccagacauacgugacccagcagcugaucagagccgccgagauuagagccucugccaaucuggccgccaccaagaugucugagugugugcugggccagagcaagagaguggacuuuugcggcaagggcuaccaccugaugagcuucccucagucugccccucacggcgugguguuucugcacgugacauaugugcccgcucaagagaagaauuucaccaccgcuccagccaucugccacgacggcaaagcccacuuuccuagagaaggcguguucguguccaacggcacccauugguucgugacacagcggaacuucuacgagccccagaucaucaccaccgacaacaccuucgugucuggcaacugcgacgucgugaucggcauugugaacaauaccguguacgacccucugcagcccgagcuggacagcuucaaagaggaacuggacaaguacuuuaagaaccacacaagccccgacguggaccugggcgauaucagcggaaucaaugccagcgucgugaacauccagaaagagaucgaccggcugaacgagguggccaagaaucugaacgagagccugaucgaccugcaagaacuggggaaguacgagcaguacaucaaguggcccugguacaucuggcugggcuuuaucgccggacugauugccaucgugauggucacaaucaugcuguguugcaugaccagcugcuguagcugccugaagggcuguuguagcuguggcagcugcugcaaguucgacgaggacgauucugagcccgugcugaagggcgugaaacugcacuacacaugaggacuaguuauaagacugacuagcccgaugggccucccaacgggcccuccuccccuccuugcaccgagagaucuaaaaaaaaaaaaaaaaaaaaaaaaaaaaaaaaaaaaaaaaaaaaaaaaaaaaaaaaaaaaaaaaaaaaaaaaaaaaaaaaaaaaaaaaaaaaaaaaaaaa

SEQ ID NO: 26034 - RNA, 4011 nt, Artificial Sequence
  SARS-CoV-2/Wuhan/WIV05/2019__EPI_ISL_402128 spike protein mRNA gc mod (1-1273)(K986P_V987P_Y453F_D614G)
aggagaaagcuuaccauguucguguuccuggugcugcugccucugguguccagccagugugugaaccugaccaccagaacacagcugccuccagccuacaccaacagcuuuaccagaggcguguacuaccccgacaagguguucagauccagcgugcugcacucuacccaggaccuguuccugccuuucuucagcaacgugaccugguuccacgccauccacguguccggcaccaauggcaccaagagauucgacaaccccgugcugcccuucaacgacgggguguacuuugccagcaccgagaaguccaacaucaucagaggcuggaucuucggcaccacacuggacagcaagacccagagccugcugaucgugaacaacgccaccaacguggucaucaaagugugcgaguuccaguucugcaacgaccccuuccugggcgucuacuaccacaagaacaacaagagcuggauggaaagcgaguuccggguguacagcagcgccaacaacugcaccuucgaguacgugucccagccuuuccugauggaccuggaaggcaagcagggcaacuucaagaaccugcgcgaguucguguuuaagaacaucgacggcuacuucaagaucuacagcaagcacaccccuaucaaccucgugcgggaucugccucagggcuucucugcucuggaaccccugguggaucugcccaucggcaucaacaucacccgguuucagacacugcuggcccugcacagaagcuaccugacaccuggcgauagcagcagcggauggacagcuggugccgccgcuuacuaugugggcuaccugcagccuagaaccuuccugcugaaguacaacgagaacggcaccaucaccgacgccguggauugugcucuggauccucugagcgagacaaagugcacccugaaguccuucaccguggaaaagggcaucuaccagaccagcaacuuccgggugcagcccaccgaauccaucgugcgguuccccaauaucaccaaucugugccccuucggcgagguguucaaugccaccagauucgccucuguguacgccuggaaccggaagcggaucagcaauugcguggccgacuacuccgugcuguacaacuccgccagcuucagcaccuucaagugcuacggcguguccccuaccaagcugaacgaccugugcuucacaaacguguacgccgacagcuucgugauccggggagaugaagugcggcagauugccccuggacagacaggcaagaucgccgacuacaacuacaagcugcccgacgacuucaccggcugugugauugccuggaacagcaacaaccuggacuccaaagucggcggcaacuacaauuaccuguuccggcuguuccggaaguccaaucugaagcccuucgagcgggacaucuccaccgagaucuaucaggccggcagcaccccuuguaacggcguggaaggcuucaacugcuacuucccacugcaguccuacggcuuucagcccacaaauggcgugggcuaucagcccuacagagugguggugcugagcuucgaacugcugcaugccccugccacagugugcggcccuaagaaaagcaccaaucucgugaagaacaaaugcgugaacuucaacuucaacggccugaccggcaccggcgugcugacagagagcaacaagaaguuccugccauuccagcaguuuggccgggauaucgccgauaccacagacgccguuagagauccccagacacuggaaauccuggacaucaccccuugcagcuucggcggagugucugugaucaccccuggcaccaacaccagcaaucagguggcagugcuguaccagggcgugaacuguaccgaagugcccguggccauucacgccgaucagcugacaccuacauggcggguguacuccaccggcagcaauguguuucagaccagagccggcugucugaucggagccgagcacgugaacaauagcuacgagugcgacauccccaucggcgcuggaaucugcgccagcuaccagacacagacaaacagcccucggagagccagaagcguggccagccagagcaucauugccuacacaaugucucugggcgccgagaacagcguggccuacuccaacaacucuaucgcuauccccaccaacuucaccaucagcgugaccacagagauccugccuguguccaugaccaagaccagcguggacugcaccauguacaucugcggcgauuccaccgagugcuccaaccugcugcugcaguacggcagcuucugcacccagcugaauagagcccugacagggaucgccguggaacaggacaagaacacccaagagguguucgcccaagugaagcagaucuacaagaccccuccuaucaaggacuucggcggcuucaauuucagccagauucugcccgauccuagcaagcccagcaagcggagcuucaucgaggaccugcuguucaacaaagugacacuggccgacgccggcuucaucaagcaguauggcgauugucugggcgacauugccgccagggaucugauuugcgcccagaaguuuaacggacugacagugcugccuccucugcugaccgaugagaugaucgcccaguacacaucugcccugcuggccggcacaaucacaagcggcuggacauuuggagcaggcgccgcucugcagauccccuuugcuaugcagauggccuaccgguucaacggcaucggagugacccagaaugugcuguacgagaaccagaagcugaucgccaaccaguucaacagcgccaucggcaagauccaggacagccugagcagcacagcaagcgcccugggaaagcugcaggacguggucaaccagaaugcccaggcacugaacacccuggucaagcagcuguccuccaacuucggcgccaucagcucugugcugaacgauauccugagcagacuggacccuccugaggccgaggugcagaucgacagacugaucacaggcagacugcagagccuccagacauacgugacccagcagcugaucagagccgccgagauuagagccucugccaaucuggccgccaccaagaugucugagugugugcugggccagagcaagagaguggacuuuugcggcaagggcuaccaccugaugagcuucccucagucugccccucacggcgugguguuucugcacgugacauaugugcccgcucaagagaagaauuucaccaccgcuccagccaucugccacgacggcaaagcccacuuuccuagagaaggcguguucguguccaacggcacccauugguucgugacacagcggaacuucuacgagccccagaucaucaccaccgacaacaccuucgugucuggcaacugcgacgucgugaucggcauugugaacaauaccguguacgacccucugcagcccgagcuggacagcuucaaagaggaacuggacaaguacuuuaagaaccacacaagccccgacguggaccugggcgauaucagcggaaucaaugccagcgucgugaacauccagaaagagaucgaccggcugaacgagguggccaagaaucugaacgagagccugaucgaccugcaagaacuggggaaguacgagcaguacaucaaguggcccugguacaucuggcugggcuuuaucgccggacugauugccaucgugauggucacaaucaugcuguguugcaugaccagcugcuguagcugccugaagggcuguuguagcuguggcagcugcugcaaguucgacgaggacgauucugagcccgugcugaagggcgugaaacugcacuacacaugaggacuaguuauaagacugacuagcccgaugggccucccaacgggcccuccuccccuccuugcaccgagagaucuaaaaaaaaaaaaaaaaaaaaaaaaaaaaaaaaaaaaaaaaaaaaaaaaaaaaaaaaaaaaaaaaaaaaaaaaaaaaaaaaaaaaaaaaaaaaaaaaaaaa

SEQ ID NO: 26035 - RNA, 4011 nt, Artificial Sequence
  SARS-CoV-2/Wuhan/WIV05/2019__EPI_ISL_402128 spike protein mRNA gc mod (1-1273)(K986P_V987P_D614G_I692V)
aggagaaagcuuaccauguucguguuccuggugcugcugccucugguguccagccagugugugaaccugaccaccagaacacagcugccuccagccuacaccaacagcuuuaccagaggcguguacuaccccgacaagguguucagauccagcgugcugcacucuacccaggaccuguuccugccuuucuucagcaacgugaccugguuccacgccauccacguguccggcaccaauggcaccaagagauucgacaaccccgugcugcccuucaacgacgggguguacuuugccagcaccgagaaguccaacaucaucagaggcuggaucuucggcaccacacuggacagcaagacccagagccugcugaucgugaacaacgccaccaacguggucaucaaagugugcgaguuccaguucugcaacgaccccuuccugggcgucuacuaccacaagaacaacaagagcuggauggaaagcgaguuccggguguacagcagcgccaacaacugcaccuucgaguacgugucccagccuuuccugauggaccuggaaggcaagcagggcaacuucaagaaccugcgcgaguucguguuuaagaacaucgacggcuacuucaagaucuacagcaagcacaccccuaucaaccucgugcgggaucugccucagggcuucucugcucuggaaccccugguggaucugcccaucggcaucaacaucacccgguuucagacacugcuggcccugcacagaagcuaccugacaccuggcgauagcagcagcggauggacagcuggugccgccgcuuacuaugugggcuaccugcagccuagaaccuuccugcugaaguacaacgagaacggcaccaucaccgacgccguggauugugcucuggauccucugagcgagacaaagugcacccugaaguccuucaccguggaaaagggcaucuaccagaccagcaacuuccgggugcagcccaccgaauccaucgugcgguuccccaauaucaccaaucugugccccuucggcgagguguucaaugccaccagauucgccucuguguacgccuggaaccggaagcggaucagcaauugcguggccgacuacuccgugcuguacaacuccgccagcuucagcaccuucaagugcuacggcguguccccuaccaagcugaacgaccugugcuucacaaacguguacgccgacagcuucgugauccggggagaugaagugcggcagauugccccuggacagacaggcaagaucgccgacuacaacuacaagcugcccgacgacuucaccggcugugugauugccuggaacagcaacaaccuggacuccaaagucggcggcaacuacaauuaccuguaccggcuguuccggaaguccaaucugaagcccuucgagcgggacaucuccaccgagaucuaucaggccggcagcaccccuuguaacggcguggaaggcuucaacugcuacuucccacugcaguccuacggcuuucagcccacaaauggcgugggcuaucagcccuacagagugguggugcugagcuucgaacugcugcaugccccugccacagugugcggcccuaagaaaagcaccaaucucgugaagaacaaaugcgugaacuucaacuucaacggccugaccggcaccggcgugcugacagagagcaacaagaaguuccugccauuccagcaguuuggccgggauaucgccgauaccacagacgccguuagagauccccagacacuggaaauccuggacaucaccccuugcagcuucggcggagugucugugaucaccccuggcaccaacaccagcaaucagguggcagugcuguaccagggcgugaacuguaccgaagugcccguggccauucacgccgaucagcugacaccuacauggcggguguacuccaccggcagcaauguguuucagaccagagccggcugucugaucggagccgagcacgugaacaauagcuacgagugcgacauccccaucggcgcuggaaucugcgccagcuaccagacacagacaaacagcccucggagagccagaagcguggccagccagagcgugauugccuacacaaugucucugggcgccgagaacagcguggccuacuccaacaacucuaucgcuauccccaccaacuucaccaucagcgugaccacagagauccugccuguguccaugaccaagaccagcguggacugcaccauguacaucugcggcgauuccaccgagugcuccaaccugcugcugcaguacggcagcuucugcacccagcugaauagagcccugacagggaucgccguggaacaggacaagaacacccaagagguguucgcccaagugaagcagaucuacaagaccccuccuaucaaggacuucggcggcuucaauuucagccagauucugcccgauccuagcaagcccagcaagcggagcuucaucgaggaccugcuguucaacaaagugacacuggccgacgccggcuucaucaagcaguauggcgauugucugggcgacauugccgccagggaucugauuugcgcccagaaguuuaacggacugacagugcugccuccucugcugaccgaugagaugaucgcccaguacacaucugcccugcuggccggcacaaucacaagcggcuggacauuuggagcaggcgccgcucugcagauccccuuugcuaugcagauggccuaccgguucaacggcaucggagugacccagaaugugcuguacgagaaccagaagcugaucgccaaccaguucaacagcgccaucggcaagauccaggacagccugagcagcacagcaagcgcccugggaaagcugcaggacguggucaaccagaaugcccaggcacugaacacccuggucaagcagcuguccuccaacuucggcgccaucagcucugugcugaacgauauccugagcagacuggacccuccugaggccgaggugcagaucgacagacugaucacaggcagacugcagagccuccagacauacgugacccagcagcugaucagagccgccgagauuagagccucugccaaucuggccgccaccaagaugucugagugugugcugggccagagcaagagaguggacuuuugcggcaagggcuaccaccugaugagcuucccucagucugccccucacggcgugguguuucugcacgugacauaugugcccgcucaagagaagaauuucaccaccgcuccagccaucugccacgacggcaaagcccacuuuccuagagaaggcguguucguguccaacggcacccauugguucgugacacagcggaacuucuacgagccccagaucaucaccaccgacaacaccuucgugucuggcaacugcgacgucgugaucggcauugugaacaauaccguguacgacccucugcagcccgagcuggacagcuucaaagaggaacuggacaaguacuuuaagaaccacacaagccccgacguggaccugggcgauaucagcggaaucaaugccagcgucgugaacauccagaaagagaucgaccggcugaacgagguggccaagaaucugaacgagagccugaucgaccugcaagaacuggggaaguacgagcaguacaucaaguggcccugguacaucuggcugggcuuuaucgccggacugauugccaucgugauggucacaaucaugcuguguugcaugaccagcugcuguagcugccugaagggcuguuguagcuguggcagcugcugcaaguucgacgaggacgauucugagcccgugcugaagggcgugaaacugcacuacacaugaggacuaguuauaagacugacuagcccgaugggccucccaacgggcccuccuccccuccuugcaccgagagaucuaaaaaaaaaaaaaaaaaaaaaaaaaaaaaaaaaaaaaaaaaaaaaaaaaaaaaaaaaaaaaaaaaaaaaaaaaaaaaaaaaaaaaaaaaaaaaaaaaaaa

SEQ ID NO: 26036 - RNA, 4011 nt, Artificial Sequence
  SARS-CoV-2/Wuhan/WIV05/2019__EPI_ISL_402128 spike protein mRNA gc mod (1-1273)(K986P_V987P_D614G_M1229I)
aggagaaagcuuaccauguucguguuccuggugcugcugccucugguguccagccagugugugaaccugaccaccagaacacagcugccuccagccuacaccaacagcuuuaccagaggcguguacuaccccgacaagguguucagauccagcgugcugcacucuacccaggaccuguuccugccuuucuucagcaacgugaccugguuccacgccauccacguguccggcaccaauggcaccaagagauucgacaaccccgugcugcccuucaacgacgggguguacuuugccagcaccgagaaguccaacaucaucagaggcuggaucuucggcaccacacuggacagcaagacccagagccugcugaucgugaacaacgccaccaacguggucaucaaagugugcgaguuccaguucugcaacgaccccuuccugggcgucuacuaccacaagaacaacaagagcuggauggaaagcgaguuccggguguacagcagcgccaacaacugcaccuucgaguacgugucccagccuuuccugauggaccuggaaggcaagcagggcaacuucaagaaccugcgcgaguucguguuuaagaacaucgacggcuacuucaagaucuacagcaagcacaccccuaucaaccucgugcgggaucugccucagggcuucucugcucuggaaccccugguggaucugcccaucggcaucaacaucacccgguuucagacacugcuggcccugcacagaagcuaccugacaccuggcgauagcagcagcggauggacagcuggugccgccgcuuacuaugugggcuaccugcagccuagaaccuuccugcugaaguacaacgagaacggcaccaucaccgacgccguggauugugcucuggauccucugagcgagacaaagugcacccugaaguccuucaccguggaaaagggcaucuaccagaccagcaacuuccgggugcagcccaccgaauccaucgugcgguuccccaauaucaccaaucugugccccuucggcgagguguucaaugccaccagauucgccucuguguacgccuggaaccggaagcggaucagcaauugcguggccgacuacuccgugcuguacaacuccgccagcuucagcaccuucaagugcuacggcguguccccuaccaagcugaacgaccugugcuucacaaacguguacgccgacagcuucgugauccggggagaugaagugcggcagauugccccuggacagacaggcaagaucgccgacuacaacuacaagcugcccgacgacuucaccggcugugugauugccuggaacagcaacaaccuggacuccaaagucggcggcaacuacaauuaccuguaccggcuguuccggaaguccaaucugaagcccuucgagcgggacaucuccaccgagaucuaucaggccggcagcaccccuuguaacggcguggaaggcuucaacugcuacuucccacugcaguccuacggcuuucagcccacaaauggcgugggcuaucagcccuacagagugguggugcugagcuucgaacugcugcaugccccugccacagugugcggcccuaagaaaagcaccaaucucgugaagaacaaaugcgugaacuucaacuucaacggccugaccggcaccggcgugcugacagagagcaacaagaaguuccugccauuccagcaguuuggccgggauaucgccgauaccacagacgccguuagagauccccagacacuggaaauccuggacaucaccccuugcagcuucggcggagugucugugaucaccccuggcaccaacaccagcaaucagguggcagugcuguaccagggcgugaacuguaccgaagugcccguggccauucacgccgaucagcugacaccuacauggcggguguacuccaccggcagcaauguguuucagaccagagccggcugucugaucggagccgagcacgugaacaauagcuacgagugcgacauccccaucggcgcuggaaucugcgccagcuaccagacacagacaaacagcccucggagagccagaagcguggccagccagagcaucauugccuacacaaugucucugggcgccgagaacagcguggccuacuccaacaacucuaucgcuauccccaccaacuucaccaucagcgugaccacagagauccugccuguguccaugaccaagaccagcguggacugcaccauguacaucugcggcgauuccaccgagugcuccaaccugcugcugcaguacggcagcuucugcacccagcugaauagagcccugacagggaucgccguggaacaggacaagaacacccaagagguguucgcccaagugaagcagaucuacaagaccccuccuaucaaggacuucggcggcuucaauuucagccagauucugcccgauccuagcaagcccagcaagcggagcuucaucgaggaccugcuguucaacaaagugacacuggccgacgccggcuucaucaagcaguauggcgauugucugggcgacauugccgccagggaucugauuugcgcccagaaguuuaacggacugacagugcugccuccucugcugaccgaugagaugaucgcccaguacacaucugcccugcuggccggcacaaucacaagcggcuggacauuuggagcaggcgccgcucugcagauccccuuugcuaugcagauggccuaccgguucaacggcaucggagugacccagaaugugcuguacgagaaccagaagcugaucgccaaccaguucaacagcgccaucggcaagauccaggacagccugagcagcacagcaagcgcccugggaaagcugcaggacguggucaaccagaaugcccaggcacugaacacccuggucaagcagcuguccuccaacuucggcgccaucagcucugugcugaacgauauccugagcagacuggacccuccugaggccgaggugcagaucgacagacugaucacaggcagacugcagagccuccagacauacgugacccagcagcugaucagagccgccgagauuagagccucugccaaucuggccgccaccaagaugucugagugugugcugggccagagcaagagaguggacuuuugcggcaagggcuaccaccugaugagcuucccucagucugccccucacggcgugguguuucugcacgugacauaugugcccgcucaagagaagaauuucaccaccgcuccagccaucugccacgacggcaaagcccacuuuccuagagaaggcguguucguguccaacggcacccauugguucgugacacagcggaacuucuacgagccccagaucaucaccaccgacaacaccuucgugucuggcaacugcgacgucgugaucggcauugugaacaauaccguguacgacccucugcagcccgagcuggacagcuucaaagaggaacuggacaaguacuuuaagaaccacacaagccccgacguggaccugggcgauaucagcggaaucaaugccagcgucgugaacauccagaaagagaucgaccggcugaacgagguggccaagaaucugaacgagagccugaucgaccugcaagaacuggggaaguacgagcaguacaucaaguggcccugguacaucuggcugggcuuuaucgccggacugauugccaucgugaucgucacaaucaugcuguguugcaugaccagcugcuguagcugccugaagggcuguuguagcuguggcagcugcugcaaguucgacgaggacgauucugagcccgugcugaagggcgugaaacugcacuacacaugaggacuaguuauaagacugacuagcccgaugggccucccaacgggcccuccuccccuccuugcaccgagagaucuaaaaaaaaaaaaaaaaaaaaaaaaaaaaaaaaaaaaaaaaaaaaaaaaaaaaaaaaaaaaaaaaaaaaaaaaaaaaaaaaaaaaaaaaaaaaaaaaaaaa

SEQ ID NO: 26037 - RNA, 4005 nt, Artificial Sequence
  SARS-CoV-2/Wuhan/WIV05/2019__EPI_ISL_402128 spike protein mRNA gc mod (1-1273)(K986P_V987P_H69del_V70del_A222V_Y453F_S477N_D614G_I692V)
aggagaaagcuuaccauguucguguuccuggugcugcugccucugguguccagccagugugugaaccugaccaccagaacacagcugccuccagccuacaccaacagcuuuaccagaggcguguacuaccccgacaagguguucagauccagcgugcugcacucuacccaggaccuguuccugccuuucuucagcaacgugaccugguuccacgccaucuccggcaccaauggcaccaagagauucgacaaccccgugcugcccuucaacgacgggguguacuuugccagcaccgagaaguccaacaucaucagaggcuggaucuucggcaccacacuggacagcaagacccagagccugcugaucgugaacaacgccaccaacguggucaucaaagugugcgaguuccaguucugcaacgaccccuuccugggcgucuacuaccacaagaacaacaagagcuggauggaaagcgaguuccggguguacagcagcgccaacaacugcaccuucgaguacgugucccagccuuuccugauggaccuggaaggcaagcagggcaacuucaagaaccugcgcgaguucguguuuaagaacaucgacggcuacuucaagaucuacagcaagcacaccccuaucaaccucgugcgggaucugccucagggcuucucugugcuggaaccccugguggaucugcccaucggcaucaacaucacccgguuucagacacugcuggcccugcacagaagcuaccugacaccuggcgauagcagcagcggauggacagcuggugccgccgcuuacuaugugggcuaccugcagccuagaaccuuccugcugaaguacaacgagaacggcaccaucaccgacgccguggauugugcucuggauccucugagcgagacaaagugcacccugaaguccuucaccguggaaaagggcaucuaccagaccagcaacuuccgggugcagcccaccgaauccaucgugcgguuccccaauaucaccaaucugugccccuucggcgagguguucaaugccaccagauucgccucuguguacgccuggaaccggaagcggaucagcaauugcguggccgacuacuccgugcuguacaacuccgccagcuucagcaccuucaagugcuacggcguguccccuaccaagcugaacgaccugugcuucacaaacguguacgccgacagcuucgugauccggggagaugaagugcggcagauugccccuggacagacaggcaagaucgccgacuacaacuacaagcugcccgacgacuucaccggcugugugauugccuggaacagcaacaaccuggacuccaaagucggcggcaacuacaauuaccuguuccggcuguuccggaaguccaaucugaagcccuucgagcgggacaucuccaccgagaucuaucaggccggcaacaccccuuguaacggcguggaaggcuucaacugcuacuucccacugcaguccuacggcuuucagcccacaaauggcgugggcuaucagcccuacagagugguggugcugagcuucgaacugcugcaugccccugccacagugugcggcccuaagaaaagcaccaaucucgugaagaacaaaugcgugaacuucaacuucaacggccugaccggcaccggcgugcugacagagagcaacaagaaguuccugccauuccagcaguuuggccgggauaucgccgauaccacagacgccguuagagauccccagacacuggaaauccuggacaucaccccuugcagcuucggcggagugucugugaucaccccuggcaccaacaccagcaaucagguggcagugcuguaccagggcgugaacuguaccgaagugcccguggccauucacgccgaucagcugacaccuacauggcggguguacuccaccggcagcaauguguuucagaccagagccggcugucugaucggagccgagcacgugaacaauagcuacgagugcgacauccccaucggcgcuggaaucugcgccagcuaccagacacagacaaacagcccucggagagccagaagcguggccagccagagcgugauugccuacacaaugucucugggcgccgagaacagcguggccuacuccaacaacucuaucgcuauccccaccaacuucaccaucagcgugaccacagagauccugccuguguccaugaccaagaccagcguggacugcaccauguacaucugcggcgauuccaccgagugcuccaaccugcugcugcaguacggcagcuucugcacccagcugaauagagcccugacagggaucgccguggaacaggacaagaacacccaagagguguucgcccaagugaagcagaucuacaagaccccuccuaucaaggacuucggcggcuucaauuucagccagauucugcccgauccuagcaagcccagcaagcggagcuucaucgaggaccugcuguucaacaaagugacacuggccgacgccggcuucaucaagcaguauggcgauugucugggcgacauugccgccagggaucugauuugcgcccagaaguuuaacggacugacagugcugccuccucugcugaccgaugagaugaucgcccaguacacaucugcccugcuggccggcacaaucacaagcggcuggacauuuggagcaggcgccgcucugcagauccccuuugcuaugcagauggccuaccgguucaacggcaucggagugacccagaaugugcuguacgagaaccagaagcugaucgccaaccaguucaacagcgccaucggcaagauccaggacagccugagcagcacagcaagcgcccugggaaagcugcaggacguggucaaccagaaugcccaggcacugaacacccuggucaagcagcuguccuccaacuucggcgccaucagcucugugcugaacgauauccugagcagacuggacccuccugaggccgaggugcagaucgacagacugaucacaggcagacugcagagccuccagacauacgugacccagcagcugaucagagccgccgagauuagagccucugccaaucuggccgccaccaagaugucugagugugugcugggccagagcaagagaguggacuuuugcggcaagggcuaccaccugaugagcuucccucagucugccccucacggcgugguguuucugcacgugacauaugugcccgcucaagagaagaauuucaccaccgcuccagccaucugccacgacggcaaagcccacuuuccuagagaaggcguguucguguccaacggcacccauugguucgugacacagcggaacuucuacgagccccagaucaucaccaccgacaacaccuucgugucuggcaacugcgacgucgugaucggcauugugaacaauaccguguacgacccucugcagcccgagcuggacagcuucaaagaggaacuggacaaguacuuuaagaaccacacaagccccgacguggaccugggcgauaucagcggaaucaaugccagcgucgugaacauccagaaagagaucgaccggcugaacgagguggccaagaaucugaacgagagccugaucgaccugcaagaacuggggaaguacgagcaguacaucaaguggcccugguacaucuggcugggcuuuaucgccggacugauugccaucgugauggucacaaucaugcuguguugcaugaccagcugcuguagcugccugaagggcuguuguagcuguggcagcugcugcaaguucgacgaggacgauucugagcccgugcugaagggcgugaaacugcacuacacaugaggacuaguuauaagacugacuagcccgaugggccucccaacgggcccuccuccccuccuugcaccgagagaucuaaaaaaaaaaaaaaaaaaaaaaaaaaaaaaaaaaaaaaaaaaaaaaaaaaaaaaaaaaaaaaaaaaaaaaaaaaaaaaaaaaaaaaaaaaaaaaaaaaaa

SEQ ID NO: 26038 - RNA, 4005 nt, Artificial Sequence
  SARS-CoV-2/Wuhan/WIV05/2019__EPI_ISL_402128 spike protein mRNA gc mod (1-1273)(K986P_V987P_H69del_V70del_Y453F_D614G_I692V_M1229I)
aggagaaagcuuaccauguucguguuccuggugcugcugccucugguguccagccagugugugaaccugaccaccagaacacagcugccuccagccuacaccaacagcuuuaccagaggcguguacuaccccgacaagguguucagauccagcgugcugcacucuacccaggaccuguuccugccuuucuucagcaacgugaccugguuccacgccaucuccggcaccaauggcaccaagagauucgacaaccccgugcugcccuucaacgacgggguguacuuugccagcaccgagaaguccaacaucaucagaggcuggaucuucggcaccacacuggacagcaagacccagagccugcugaucgugaacaacgccaccaacguggucaucaaagugugcgaguuccaguucugcaacgaccccuuccugggcgucuacuaccacaagaacaacaagagcuggauggaaagcgaguuccggguguacagcagcgccaacaacugcaccuucgaguacgugucccagccuuuccugauggaccuggaaggcaagcagggcaacuucaagaaccugcgcgaguucguguuuaagaacaucgacggcuacuucaagaucuacagcaagcacaccccuaucaaccucgugcgggaucugccucagggcuucucugcucuggaaccccugguggaucugcccaucggcaucaacaucacccgguuucagacacugcuggcccugcacagaagcuaccugacaccuggcgauagcagcagcggauggacagcuggugccgccgcuuacuaugugggcuaccugcagccuagaaccuuccugcugaaguacaacgagaacggcaccaucaccgacgccguggauugugcucuggauccucugagcgagacaaagugcacccugaaguccuucaccguggaaaagggcaucuaccagaccagcaacuuccgggugcagcccaccgaauccaucgugcgguuccccaauaucaccaaucugugccccuucggcgagguguucaaugccaccagauucgccucuguguacgccuggaaccggaagcggaucagcaauugcguggccgacuacuccgugcuguacaacuccgccagcuucagcaccuucaagugcuacggcguguccccuaccaagcugaacgaccugugcuucacaaacguguacgccgacagcuucgugauccggggagaugaagugcggcagauugccccuggacagacaggcaagaucgccgacuacaacuacaagcugcccgacgacuucaccggcugugugauugccuggaacagcaacaaccuggacuccaaagucggcggcaacuacaauuaccuguuccggcuguuccggaaguccaaucugaagcccuucgagcgggacaucuccaccgagaucuaucaggccggcagcaccccuuguaacggcguggaaggcuucaacugcuacuucccacugcaguccuacggcuuucagcccacaaauggcgugggcuaucagcccuacagagugguggugcugagcuucgaacugcugcaugccccugccacagugugcggcccuaagaaaagcaccaaucucgugaagaacaaaugcgugaacuucaacuucaacggccugaccggcaccggcgugcugacagagagcaacaagaaguuccugccauuccagcaguuuggccgggauaucgccgauaccacagacgccguuagagauccccagacacuggaaauccuggacaucaccccuugcagcuucggcggagugucugugaucaccccuggcaccaacaccagcaaucagguggcagugcuguaccagggcgugaacuguaccgaagugcccguggccauucacgccgaucagcugacaccuacauggcggguguacuccaccggcagcaauguguuucagaccagagccggcugucugaucggagccgagcacgugaacaauagcuacgagugcgacauccccaucggcgcuggaaucugcgccagcuaccagacacagacaaacagcccucggagagccagaagcguggccagccagagcgugauugccuacacaaugucucugggcgccgagaacagcguggccuacuccaacaacucuaucgcuauccccaccaacuucaccaucagcgugaccacagagauccugccuguguccaugaccaagaccagcguggacugcaccauguacaucugcggcgauuccaccgagugcuccaaccugcugcugcaguacggcagcuucugcacccagcugaauagagcccugacagggaucgccguggaacaggacaagaacacccaagagguguucgcccaagugaagcagaucuacaagaccccuccuaucaaggacuucggcggcuucaauuucagccagauucugcccgauccuagcaagcccagcaagcggagcuucaucgaggaccugcuguucaacaaagugacacuggccgacgccggcuucaucaagcaguauggcgauugucugggcgacauugccgccagggaucugauuugcgcccagaaguuuaacggacugacagugcugccuccucugcugaccgaugagaugaucgcccaguacacaucugcccugcuggccggcacaaucacaagcggcuggacauuuggagcaggcgccgcucugcagauccccuuugcuaugcagauggccuaccgguucaacggcaucggagugacccagaaugugcuguacgagaaccagaagcugaucgccaaccaguucaacagcgccaucggcaagauccaggacagccugagcagcacagcaagcgcccugggaaagcugcaggacguggucaaccagaaugcccaggcacugaacacccuggucaagcagcuguccuccaacuucggcgccaucagcucugugcugaacgauauccugagcagacuggacccuccugaggccgaggugcagaucgacagacugaucacaggcagacugcagagccuccagacauacgugacccagcagcugaucagagccgccgagauuagagccucugccaaucuggccgccaccaagaugucugagugugugcugggccagagcaagagaguggacuuuugcggcaagggcuaccaccugaugagcuucccucagucugccccucacggcgugguguuucugcacgugacauaugugcccgcucaagagaagaauuucaccaccgcuccagccaucugccacgacggcaaagcccacuuuccuagagaaggcguguucguguccaacggcacccauugguucgugacacagcggaacuucuacgagccccagaucaucaccaccgacaacaccuucgugucuggcaacugcgacgucgugaucggcauugugaacaauaccguguacgacccucugcagcccgagcuggacagcuucaaagaggaacuggacaaguacuuuaagaaccacacaagccccgacguggaccugggcgauaucagcggaaucaaugccagcgucgugaacauccagaaagagaucgaccggcugaacgagguggccaagaaucugaacgagagccugaucgaccugcaagaacuggggaaguacgagcaguacaucaaguggcccugguacaucuggcugggcuuuaucgccggacugauugccaucgugaucgucacaaucaugcuguguugcaugaccagcugcuguagcugccugaagggcuguuguagcuguggcagcugcugcaaguucgacgaggacgauucugagcccgugcugaagggcgugaaacugcacuacacaugaggacuaguuauaagacugacuagcccgaugggccucccaacgggcccuccuccccuccuugcaccgagagaucuaaaaaaaaaaaaaaaaaaaaaaaaaaaaaaaaaaaaaaaaaaaaaaaaaaaaaaaaaaaaaaaaaaaaaaaaaaaaaaaaaaaaaaaaaaaaaaaaaaaa

SEQ ID NO: 26039 - RNA, 4002 nt, Artificial Sequence
  SARS-CoV-2/Wuhan/WIV05/2019__EPI_ISL_402128 spike protein mRNA gc mod (1-1273)(K986P_V987P_K986P_V987P_H69del_V70del_Y144del_N501Y_A570 D_D614G_P681H_T716I_S982A_D1118H)
aggagaaagcuuaccauguucguguuccuggugcugcugccucugguguccagccagugugugaaccugaccaccagaacacagcugccuccagccuacaccaacagcuuuaccagaggcguguacuaccccgacaagguguucagauccagcgugcugcacucuacccaggaccuguuccugccuuucuucagcaacgugaccugguuccacgccaucuccggcaccaauggcaccaagagauucgacaaccccgugcugcccuucaacgacgggguguacuuugccagcaccgagaaguccaacaucaucagaggcuggaucuucggcaccacacuggacagcaagacccagagccugcugaucgugaacaacgccaccaacguggucaucaaagugugcgaguuccaguucugcaacgaccccuuccugggcgucuaccacaagaacaacaagagcuggauggaaagcgaguuccggguguacagcagcgccaacaacugcaccuucgaguacgugucccagccuuuccugauggaccuggaaggcaagcagggcaacuucaagaaccugcgcgaguucguguuuaagaacaucgacggcuacuucaagaucuacagcaagcacaccccuaucaaccucgugcgggaucugccucagggcuucucugcucuggaaccccugguggaucugcccaucggcaucaacaucacccgguuucagacacugcuggcccugcacagaagcuaccugacaccuggcgauagcagcagcggauggacagcuggugccgccgcuuacuaugugggcuaccugcagccuagaaccuuccugcugaaguacaacgagaacggcaccaucaccgacgccguggauugugcucuggauccucugagcgagacaaagugcacccugaaguccuucaccguggaaaagggcaucuaccagaccagcaacuuccgggugcagcccaccgaauccaucgugcgguuccccaauaucaccaaucugugccccuucggcgagguguucaaugccaccagauucgccucuguguacgccuggaaccggaagcggaucagcaauugcguggccgacuacuccgugcuguacaacuccgccagcuucagcaccuucaagugcuacggcguguccccuaccaagcugaacgaccugugcuucacaaacguguacgccgacagcuucgugauccggggagaugaagugcggcagauugccccuggacagacaggcaagaucgccgacuacaacuacaagcugcccgacgacuucaccggcugugugauugccuggaacagcaacaaccuggacuccaaagucggcggcaacuacaauuaccuguaccggcuguuccggaaguccaaucugaagcccuucgagcgggacaucuccaccgagaucuaucaggccggcagcaccccuuguaacggcguggaaggcuucaacugcuacuucccacugcaguccuacggcuuucagcccacauacggcgugggcuaucagcccuacagagugguggugcugagcuucgaacugcugcaugccccugccacagugugcggcccuaagaaaagcaccaaucucgugaagaacaaaugcgugaacuucaacuucaacggccugaccggcaccggcgugcugacagagagcaacaagaaguuccugccauuccagcaguuuggccgggauaucgacgauaccacagacgccguuagagauccccagacacuggaaauccuggacaucaccccuugcagcuucggcggagugucugugaucaccccuggcaccaacaccagcaaucagguggcagugcuguaccagggcgugaacuguaccgaagugcccguggccauucacgccgaucagcugacaccuacauggcggguguacuccaccggcagcaauguguuucagaccagagccggcugucugaucggagccgagcacgugaacaauagcuacgagugcgacauccccaucggcgcuggaaucugcgccagcuaccagacacagacaaacagccaccggagagccagaagcguggccagccagagcaucauugccuacacaaugucucugggcgccgagaacagcguggccuacuccaacaacucuaucgcuauccccaucaacuucaccaucagcgugaccacagagauccugccuguguccaugaccaagaccagcguggacugcaccauguacaucugcggcgauuccaccgagugcuccaaccugcugcugcaguacggcagcuucugcacccagcugaauagagcccugacagggaucgccguggaacaggacaagaacacccaagagguguucgcccaagugaagcagaucuacaagaccccuccuaucaaggacuucggcggcuucaauuucagccagauucugcccgauccuagcaagcccagcaagcggagcuucaucgaggaccugcuguucaacaaagugacacuggccgacgccggcuucaucaagcaguauggcgauugucugggcgacauugccgccagggaucugauuugcgcccagaaguuuaacggacugacagugcugccuccucugcugaccgaugagaugaucgcccaguacacaucugcccugcuggccggcacaaucacaagcggcuggacauuuggagcaggcgccgcucugcagauccccuuugcuaugcagauggccuaccgguucaacggcaucggagugacccagaaugugcuguacgagaaccagaagcugaucgccaaccaguucaacagcgccaucggcaagauccaggacagccugagcagcacagcaagcgcccugggaaagcugcaggacguggucaaccagaaugcccaggcacugaacacccuggucaagcagcuguccuccaacuucggcgccaucagcucugugcugaacgauauccuggccagacuggacccuccugaggccgaggugcagaucgacagacugaucacaggcagacugcagagccuccagacauacgugacccagcagcugaucagagccgccgagauuagagccucugccaaucuggccgccaccaagaugucugagugugugcugggccagagcaagagaguggacuuuugcggcaagggcuaccaccugaugagcuucccucagucugccccucacggcgugguguuucugcacgugacauaugugcccgcucaagagaagaauuucaccaccgcuccagccaucugccacgacggcaaagcccacuuuccuagagaaggcguguucguguccaacggcacccauugguucgugacacagcggaacuucuacgagccccagaucaucaccacccacaacaccuucgugucuggcaacugcgacgucgugaucggcauugugaacaauaccguguacgacccucugcagcccgagcuggacagcuucaaagaggaacuggacaaguacuuuaagaaccacacaagccccgacguggaccugggcgauaucagcggaaucaaugccagcgucgugaacauccagaaagagaucgaccggcugaacgagguggccaagaaucugaacgagagccugaucgaccugcaagaacuggggaaguacgagcaguacaucaaguggcccugguacaucuggcugggcuuuaucgccggacugauugccaucgugauggucacaaucaugcuguguugcaugaccagcugcuguagcugccugaagggcuguuguagcuguggcagcugcugcaaguucgacgaggacgauucugagcccgugcugaagggcgugaaacugcacuacacaugaggacuaguuauaagacugacuagcccgaugggccucccaacgggcccuccuccccuccuugcaccgagagaucuaaaaaaaaaaaaaaaaaaaaaaaaaaaaaaaaaaaaaaaaaaaaaaaaaaaaaaaaaaaaaaaaaaaaaaaaaaaaaaaaaaaaaaaaaaaaaaaaaaaa

SEQ ID NO: 26040 - RNA, 4011 nt, Artificial Sequence
  SARS-CoV-2/Wuhan/WIV05/2019__EPI_ISL_402128 spike protein mRNA gc mod (1-1273)(K986P_V987P_K986P_V987P_K417N_E484K_N501Y_D614G)
aggagaaagcuuaccauguucguguuccuggugcugcugccucugguguccagccagugugugaaccugaccaccagaacacagcugccuccagccuacaccaacagcuuuaccagaggcguguacuaccccgacaagguguucagauccagcgugcugcacucuacccaggaccuguuccugccuuucuucagcaacgugaccugguuccacgccauccacguguccggcaccaauggcaccaagagauucgacaaccccgugcugcccuucaacgacgggguguacuuugccagcaccgagaaguccaacaucaucagaggcuggaucuucggcaccacacuggacagcaagacccagagccugcugaucgugaacaacgccaccaacguggucaucaaagugugcgaguuccaguucugcaacgaccccuuccugggcgucuacuaccacaagaacaacaagagcuggauggaaagcgaguuccggguguacagcagcgccaacaacugcaccuucgaguacgugucccagccuuuccugauggaccuggaaggcaagcagggcaacuucaagaaccugcgcgaguucguguuuaagaacaucgacggcuacuucaagaucuacagcaagcacaccccuaucaaccucgugcgggaucugccucagggcuucucugcucuggaaccccugguggaucugcccaucggcaucaacaucacccgguuucagacacugcuggcccugcacagaagcuaccugacaccuggcgauagcagcagcggauggacagcuggugccgccgcuuacuaugugggcuaccugcagccuagaaccuuccugcugaaguacaacgagaacggcaccaucaccgacgccguggauugugcucuggauccucugagcgagacaaagugcacccugaaguccuucaccguggaaaagggcaucuaccagaccagcaacuuccgggugcagcccaccgaauccaucgugcgguuccccaauaucaccaaucugugccccuucggcgagguguucaaugccaccagauucgccucuguguacgccuggaaccggaagcggaucagcaauugcguggccgacuacuccgugcuguacaacuccgccagcuucagcaccuucaagugcuacggcguguccccuaccaagcugaacgaccugugcuucacaaacguguacgccgacagcuucgugauccggggagaugaagugcggcagauugccccuggacagacaggcaacaucgccgacuacaacuacaagcugcccgacgacuucaccggcugugugauugccuggaacagcaacaaccuggacuccaaagucggcggcaacuacaauuaccuguaccggcuguuccggaaguccaaucugaagcccuucgagcgggacaucuccaccgagaucuaucaggccggcagcaccccuuguaacggcgugaagggcuucaacugcuacuucccacugcaguccuacggcuuucagcccacauacggcgugggcuaucagcccuacagagugguggugcugagcuucgaacugcugcaugccccugccacagugugcggcccuaagaaaagcaccaaucucgugaagaacaaaugcgugaacuucaacuucaacggccugaccggcaccggcgugcugacagagagcaacaagaaguuccugccauuccagcaguuuggccgggauaucgccgauaccacagacgccguuagagauccccagacacuggaaauccuggacaucaccccuugcagcuucggcggagugucugugaucaccccuggcaccaacaccagcaaucagguggcagugcuguaccagggcgugaacuguaccgaagugcccguggccauucacgccgaucagcugacaccuacauggcggguguacuccaccggcagcaauguguuucagaccagagccggcugucugaucggagccgagcacgugaacaauagcuacgagugcgacauccccaucggcgcuggaaucugcgccagcuaccagacacagacaaacagcccucggagagccagaagcguggccagccagagcaucauugccuacacaaugucucugggcgccgagaacagcguggccuacuccaacaacucuaucgcuauccccaccaacuucaccaucagcgugaccacagagauccugccuguguccaugaccaagaccagcguggacugcaccauguacaucugcggcgauuccaccgagugcuccaaccugcugcugcaguacggcagcuucugcacccagcugaauagagcccugacagggaucgccguggaacaggacaagaacacccaagagguguucgcccaagugaagcagaucuacaagaccccuccuaucaaggacuucggcggcuucaauuucagccagauucugcccgauccuagcaagcccagcaagcggagcuucaucgaggaccugcuguucaacaaagugacacuggccgacgccggcuucaucaagcaguauggcgauugucugggcgacauugccgccagggaucugauuugcgcccagaaguuuaacggacugacagugcugccuccucugcugaccgaugagaugaucgcccaguacacaucugcccugcuggccggcacaaucacaagcggcuggacauuuggagcaggcgccgcucugcagauccccuuugcuaugcagauggccuaccgguucaacggcaucggagugacccagaaugugcuguacgagaaccagaagcugaucgccaaccaguucaacagcgccaucggcaagauccaggacagccugagcagcacagcaagcgcccugggaaagcugcaggacguggucaaccagaaugcccaggcacugaacacccuggucaagcagcuguccuccaacuucggcgccaucagcucugugcugaacgauauccugagcagacuggacccuccugaggccgaggugcagaucgacagacugaucacaggcagacugcagagccuccagacauacgugacccagcagcugaucagagccgccgagauuagagccucugccaaucuggccgccaccaagaugucugagugugugcugggccagagcaagagaguggacuuuugcggcaagggcuaccaccugaugagcuucccucagucugccccucacggcgugguguuucugcacgugacauaugugcccgcucaagagaagaauuucaccaccgcuccagccaucugccacgacggcaaagcccacuuuccuagagaaggcguguucguguccaacggcacccauugguucgugacacagcggaacuucuacgagccccagaucaucaccaccgacaacaccuucgugucuggcaacugcgacgucgugaucggcauugugaacaauaccguguacgacccucugcagcccgagcuggacagcuucaaagaggaacuggacaaguacuuuaagaaccacacaagccccgacguggaccugggcgauaucagcggaaucaaugccagcgucgugaacauccagaaagagaucgaccggcugaacgagguggccaagaaucugaacgagagccugaucgaccugcaagaacuggggaaguacgagcaguacaucaaguggcccugguacaucuggcugggcuuuaucgccggacugauugccaucgugauggucacaaucaugcuguguugcaugaccagcugcuguagcugccugaagggcuguuguagcuguggcagcugcugcaaguucgacgaggacgauucugagcccgugcugaagggcgugaaacugcacuacacaugaggacuaguuauaagacugacuagcccgaugggccucccaacgggcccuccuccccuccuugcaccgagagaucuaaaaaaaaaaaaaaaaaaaaaaaaaaaaaaaaaaaaaaaaaaaaaaaaaaaaaaaaaaaaaaaaaaaaaaaaaaaaaaaaaaaaaaaaaaaaaaaaaaaa

SEQ ID NO: 26041 - RNA, 4002 nt, Artificial Sequence
  SARS-CoV-2/Wuhan/WIV05/2019__EPI_ISL_402128 spike protein mRNA gc mod (1-1273)(K986P_V987P_K986P_V987P_L18F_D80A_D215G_L242del_A243del_ L244del_R246I_K417N_E484K_N501Y_D614G_A701V)
aggagaaagcuuaccauguucguguuccuggugcugcugccucugguguccagccagugugugaacuucaccaccagaacacagcugccuccagccuacaccaacagcuuuaccagaggcguguacuaccccgacaagguguucagauccagcgugcugcacucuacccaggaccuguuccugccuuucuucagcaacgugaccugguuccacgccauccacguguccggcaccaauggcaccaagagauucgccaaccccgugcugcccuucaacgacgggguguacuuugccagcaccgagaaguccaacaucaucagaggcuggaucuucggcaccacacuggacagcaagacccagagccugcugaucgugaacaacgccaccaacguggucaucaaagugugcgaguuccaguucugcaacgaccccuuccugggcgucuacuaccacaagaacaacaagagcuggauggaaagcgaguuccggguguacagcagcgccaacaacugcaccuucgaguacgugucccagccuuuccugauggaccuggaaggcaagcagggcaacuucaagaaccugcgcgaguucguguuuaagaacaucgacggcuacuucaagaucuacagcaagcacaccccuaucaaccucgugcggggccugccucagggcuucucugcucuggaaccccugguggaucugcccaucggcaucaacaucacccgguuucagacacugcacaucagcuaccugacaccuggcgauagcagcagcggauggacagcuggugccgccgcuuacuaugugggcuaccugcagccuagaaccuuccugcugaaguacaacgagaacggcaccaucaccgacgccguggauugugcucuggauccucugagcgagacaaagugcacccugaaguccuucaccguggaaaagggcaucuaccagaccagcaacuuccgggugcagcccaccgaauccaucgugcgguuccccaauaucaccaaucugugccccuucggcgagguguucaaugccaccagauucgccucuguguacgccuggaaccggaagcggaucagcaauugcguggccgacuacuccgugcuguacaacuccgccagcuucagcaccuucaagugcuacggcguguccccuaccaagcugaacgaccugugcuucacaaacguguacgccgacagcuucgugauccggggagaugaagugcggcagauugccccuggacagacaggcaacaucgccgacuacaacuacaagcugcccgacgacuucaccggcugugugauugccuggaacagcaacaaccuggacuccaaagucggcggcaacuacaauuaccuguaccggcuguuccggaaguccaaucugaagcccuucgagcgggacaucuccaccgagaucuaucaggccggcagcaccccuuguaacggcgugaagggcuucaacugcuacuucccacugcaguccuacggcuuucagcccacauacggcgugggcuaucagcccuacagagugguggugcugagcuucgaacugcugcaugccccugccacagugugcggcccuaagaaaagcaccaaucucgugaagaacaaaugcgugaacuucaacuucaacggccugaccggcaccggcgugcugacagagagcaacaagaaguuccugccauuccagcaguuuggccgggauaucgccgauaccacagacgccguuagagauccccagacacuggaaauccuggacaucaccccuugcagcuucggcggagugucugugaucaccccuggcaccaacaccagcaaucagguggcagugcuguaccagggcgugaacuguaccgaagugcccguggccauucacgccgaucagcugacaccuacauggcggguguacuccaccggcagcaauguguuucagaccagagccggcugucugaucggagccgagcacgugaacaauagcuacgagugcgacauccccaucggcgcuggaaucugcgccagcuaccagacacagacaaacagcccucggagagccagaagcguggccagccagagcaucauugccuacacaaugucucugggcguggagaacagcguggccuacuccaacaacucuaucgcuauccccaccaacuucaccaucagcgugaccacagagauccugccuguguccaugaccaagaccagcguggacugcaccauguacaucugcggcgauuccaccgagugcuccaaccugcugcugcaguacggcagcuucugcacccagcugaauagagcccugacagggaucgccguggaacaggacaagaacacccaagagguguucgcccaagugaagcagaucuacaagaccccuccuaucaaggacuucggcggcuucaauuucagccagauucugcccgauccuagcaagcccagcaagcggagcuucaucgaggaccugcuguucaacaaagugacacuggccgacgccggcuucaucaagcaguauggcgauugucugggcgacauugccgccagggaucugauuugcgcccagaaguuuaacggacugacagugcugccuccucugcugaccgaugagaugaucgcccaguacacaucugcccugcuggccggcacaaucacaagcggcuggacauuuggagcaggcgccgcucugcagauccccuuugcuaugcagauggccuaccgguucaacggcaucggagugacccagaaugugcuguacgagaaccagaagcugaucgccaaccaguucaacagcgccaucggcaagauccaggacagccugagcagcacagcaagcgcccugggaaagcugcaggacguggucaaccagaaugcccaggcacugaacacccuggucaagcagcuguccuccaacuucggcgccaucagcucugugcugaacgauauccugagcagacuggacccuccugaggccgaggugcagaucgacagacugaucacaggcagacugcagagccuccagacauacgugacccagcagcugaucagagccgccgagauuagagccucugccaaucuggccgccaccaagaugucugagugugugcugggccagagcaagagaguggacuuuugcggcaagggcuaccaccugaugagcuucccucagucugccccucacggcgugguguuucugcacgugacauaugugcccgcucaagagaagaauuucaccaccgcuccagccaucugccacgacggcaaagcccacuuuccuagagaaggcguguucguguccaacggcacccauugguucgugacacagcggaacuucuacgagccccagaucaucaccaccgacaacaccuucgugucuggcaacugcgacgucgugaucggcauugugaacaauaccguguacgacccucugcagcccgagcuggacagcuucaaagaggaacuggacaaguacuuuaagaaccacacaagccccgacguggaccugggcgauaucagcggaaucaaugccagcgucgugaacauccagaaagagaucgaccggcugaacgagguggccaagaaucugaacgagagccugaucgaccugcaagaacuggggaaguacgagcaguacaucaaguggcccugguacaucuggcugggcuuuaucgccggacugauugccaucgugauggucacaaucaugcuguguugcaugaccagcugcuguagcugccugaagggcuguuguagcuguggcagcugcugcaaguucgacgaggacgauucugagcccgugcugaagggcgugaaacugcacuacacaugaggacuaguuauaagacugacuagcccgaugggccucccaacgggcccuccuccccuccuugcaccgagagaucuaaaaaaaaaaaaaaaaaaaaaaaaaaaaaaaaaaaaaaaaaaaaaaaaaaaaaaaaaaaaaaaaaaaaaaaaaaaaaaaaaaaaaaaaaaaaaaaaaaaa

SEQ ID NO: 26042 - RNA, 4011 nt, Artificial Sequence
  SARS-CoV-2/Wuhan/WIV05/2019__EPI_ISL_402128 spike protein mRNA gc mod (1-1273)(K986P_V987P_K986P_V987P_E484K_D614G)
aggagaaagcuuaccauguucguguuccuggugcugcugccucugguguccagccagugugugaaccugaccaccagaacacagcugccuccagccuacaccaacagcuuuaccagaggcguguacuaccccgacaagguguucagauccagcgugcugcacucuacccaggaccuguuccugccuuucuucagcaacgugaccugguuccacgccauccacguguccggcaccaauggcaccaagagauucgacaaccccgugcugcccuucaacgacgggguguacuuugccagcaccgagaaguccaacaucaucagaggcuggaucuucggcaccacacuggacagcaagacccagagccugcugaucgugaacaacgccaccaacguggucaucaaagugugcgaguuccaguucugcaacgaccccuuccugggcgucuacuaccacaagaacaacaagagcuggauggaaagcgaguuccggguguacagcagcgccaacaacugcaccuucgaguacgugucccagccuuuccugauggaccuggaaggcaagcagggcaacuucaagaaccugcgcgaguucguguuuaagaacaucgacggcuacuucaagaucuacagcaagcacaccccuaucaaccucgugcgggaucugccucagggcuucucugcucuggaaccccugguggaucugcccaucggcaucaacaucacccgguuucagacacugcuggcccugcacagaagcuaccugacaccuggcgauagcagcagcggauggacagcuggugccgccgcuuacuaugugggcuaccugcagccuagaaccuuccugcugaaguacaacgagaacggcaccaucaccgacgccguggauugugcucuggauccucugagcgagacaaagugcacccugaaguccuucaccguggaaaagggcaucuaccagaccagcaacuuccgggugcagcccaccgaauccaucgugcgguuccccaauaucaccaaucugugccccuucggcgagguguucaaugccaccagauucgccucuguguacgccuggaaccggaagcggaucagcaauugcguggccgacuacuccgugcuguacaacuccgccagcuucagcaccuucaagugcuacggcguguccccuaccaagcugaacgaccugugcuucacaaacguguacgccgacagcuucgugauccggggagaugaagugcggcagauugccccuggacagacaggcaagaucgccgacuacaacuacaagcugcccgacgacuucaccggcugugugauugccuggaacagcaacaaccuggacuccaaagucggcggcaacuacaauuaccuguaccggcuguuccggaaguccaaucugaagcccuucgagcgggacaucuccaccgagaucuaucaggccggcagcaccccuuguaacggcgugaagggcuucaacugcuacuucccacugcaguccuacggcuuucagcccacaaauggcgugggcuaucagcccuacagagugguggugcugagcuucgaacugcugcaugccccugccacagugugcggcccuaagaaaagcaccaaucucgugaagaacaaaugcgugaacuucaacuucaacggccugaccggcaccggcgugcugacagagagcaacaagaaguuccugccauuccagcaguuuggccgggauaucgccgauaccacagacgccguuagagauccccagacacuggaaauccuggacaucaccccuugcagcuucggcggagugucugugaucaccccuggcaccaacaccagcaaucagguggcagugcuguaccagggcgugaacuguaccgaagugcccguggccauucacgccgaucagcugacaccuacauggcggguguacuccaccggcagcaauguguuucagaccagagccggcugucugaucggagccgagcacgugaacaauagcuacgagugcgacauccccaucggcgcuggaaucugcgccagcuaccagacacagacaaacagcccucggagagccagaagcguggccagccagagcaucauugccuacacaaugucucugggcgccgagaacagcguggccuacuccaacaacucuaucgcuauccccaccaacuucaccaucagcgugaccacagagauccugccuguguccaugaccaagaccagcguggacugcaccauguacaucugcggcgauuccaccgagugcuccaaccugcugcugcaguacggcagcuucugcacccagcugaauagagcccugacagggaucgccguggaacaggacaagaacacccaagagguguucgcccaagugaagcagaucuacaagaccccuccuaucaaggacuucggcggcuucaauuucagccagauucugcccgauccuagcaagcccagcaagcggagcuucaucgaggaccugcuguucaacaaagugacacuggccgacgccggcuucaucaagcaguauggcgauugucugggcgacauugccgccagggaucugauuugcgcccagaaguuuaacggacugacagugcugccuccucugcugaccgaugagaugaucgcccaguacacaucugcccugcuggccggcacaaucacaagcggcuggacauuuggagcaggcgccgcucugcagauccccuuugcuaugcagauggccuaccgguucaacggcaucggagugacccagaaugugcuguacgagaaccagaagcugaucgccaaccaguucaacagcgccaucggcaagauccaggacagccugagcagcacagcaagcgcccugggaaagcugcaggacguggucaaccagaaugcccaggcacugaacacccuggucaagcagcuguccuccaacuucggcgccaucagcucugugcugaacgauauccugagcagacuggacccuccugaggccgaggugcagaucgacagacugaucacaggcagacugcagagccuccagacauacgugacccagcagcugaucagagccgccgagauuagagccucugccaaucuggccgccaccaagaugucugagugugugcugggccagagcaagagaguggacuuuugcggcaagggcuaccaccugaugagcuucccucagucugccccucacggcgugguguuucugcacgugacauaugugcccgcucaagagaagaauuucaccaccgcuccagccaucugccacgacggcaaagcccacuuuccuagagaaggcguguucguguccaacggcacccauugguucgugacacagcggaacuucuacgagccccagaucaucaccaccgacaacaccuucgugucuggcaacugcgacgucgugaucggcauugugaacaauaccguguacgacccucugcagcccgagcuggacagcuucaaagaggaacuggacaaguacuuuaagaaccacacaagccccgacguggaccugggcgauaucagcggaaucaaugccagcgucgugaacauccagaaagagaucgaccggcugaacgagguggccaagaaucugaacgagagccugaucgaccugcaagaacuggggaaguacgagcaguacaucaaguggcccugguacaucuggcugggcuuuaucgccggacugauugccaucgugauggucacaaucaugcuguguugcaugaccagcugcuguagcugccugaagggcuguuguagcuguggcagcugcugcaaguucgacgaggacgauucugagcccgugcugaagggcgugaaacugcacuacacaugaggacuaguuauaagacugacuagcccgaugggccucccaacgggcccuccuccccuccuugcaccgagagaucuaaaaaaaaaaaaaaaaaaaaaaaaaaaaaaaaaaaaaaaaaaaaaaaaaaaaaaaaaaaaaaaaaaaaaaaaaaaaaaaaaaaaaaaaaaaaaaaaaaaa

SEQ ID NO: 26043 - RNA, 4011 nt, Artificial Sequence
  SARS-CoV-2/Wuhan/WIV05/2019__EPI_ISL_402128 spike protein mRNA gc mod (1-1273)(K986P_V987P_K986P_V987P_L18F_T20N_P26S_D138Y_R190S_K417T _E484K_N501Y_D614G_H655Y_T1027I)
aggagaaagcuuaccauguucguguuccuggugcugcugccucugguguccagccagugugugaacuucaccaacagaacacagcugccuagcgccuacaccaacagcuuuaccagaggcguguacuaccccgacaagguguucagauccagcgugcugcacucuacccaggaccuguuccugccuuucuucagcaacgugaccugguuccacgccauccacguguccggcaccaauggcaccaagagauucgacaaccccgugcugcccuucaacgacgggguguacuuugccagcaccgagaaguccaacaucaucagaggcuggaucuucggcaccacacuggacagcaagacccagagccugcugaucgugaacaacgccaccaacguggucaucaaagugugcgaguuccaguucugcaacuaccccuuccugggcgucuacuaccacaagaacaacaagagcuggauggaaagcgaguuccggguguacagcagcgccaacaacugcaccuucgaguacgugucccagccuuuccugauggaccuggaaggcaagcagggcaacuucaagaaccugagcgaguucguguuuaagaacaucgacggcuacuucaagaucuacagcaagcacaccccuaucaaccucgugcgggaucugccucagggcuucucugcucuggaaccccugguggaucugcccaucggcaucaacaucacccgguuucagacacugcuggcccugcacagaagcuaccugacaccuggcgauagcagcagcggauggacagcuggugccgccgcuuacuaugugggcuaccugcagccuagaaccuuccugcugaaguacaacgagaacggcaccaucaccgacgccguggauugugcucuggauccucugagcgagacaaagugcacccugaaguccuucaccguggaaaagggcaucuaccagaccagcaacuuccgggugcagcccaccgaauccaucgugcgguuccccaauaucaccaaucugugccccuucggcgagguguucaaugccaccagauucgccucuguguacgccuggaaccggaagcggaucagcaauugcguggccgacuacuccgugcuguacaacuccgccagcuucagcaccuucaagugcuacggcguguccccuaccaagcugaacgaccugugcuucacaaacguguacgccgacagcuucgugauccggggagaugaagugcggcagauugccccuggacagacaggcaccaucgccgacuacaacuacaagcugcccgacgacuucaccggcugugugauugccuggaacagcaacaaccuggacuccaaagucggcggcaacuacaauuaccuguaccggcuguuccggaaguccaaucugaagcccuucgagcgggacaucuccaccgagaucuaucaggccggcagcaccccuuguaacggcgugaagggcuucaacugcuacuucccacugcaguccuacggcuuucagcccacauacggcgugggcuaucagcccuacagagugguggugcugagcuucgaacugcugcaugccccugccacagugugcggcccuaagaaaagcaccaaucucgugaagaacaaaugcgugaacuucaacuucaacggccugaccggcaccggcgugcugacagagagcaacaagaaguuccugccauuccagcaguuuggccgggauaucgccgauaccacagacgccguuagagauccccagacacuggaaauccuggacaucaccccuugcagcuucggcggagugucugugaucaccccuggcaccaacaccagcaaucagguggcagugcuguaccagggcgugaacuguaccgaagugcccguggccauucacgccgaucagcugacaccuacauggcggguguacuccaccggcagcaauguguuucagaccagagccggcugucugaucggagccgaguacgugaacaauagcuacgagugcgacauccccaucggcgcuggaaucugcgccagcuaccagacacagacaaacagcccucggagagccagaagcguggccagccagagcaucauugccuacacaaugucucugggcgccgagaacagcguggccuacuccaacaacucuaucgcuauccccaccaacuucaccaucagcgugaccacagagauccugccuguguccaugaccaagaccagcguggacugcaccauguacaucugcggcgauuccaccgagugcuccaaccugcugcugcaguacggcagcuucugcacccagcugaauagagcccugacagggaucgccguggaacaggacaagaacacccaagagguguucgcccaagugaagcagaucuacaagaccccuccuaucaaggacuucggcggcuucaauuucagccagauucugcccgauccuagcaagcccagcaagcggagcuucaucgaggaccugcuguucaacaaagugacacuggccgacgccggcuucaucaagcaguauggcgauugucugggcgacauugccgccagggaucugauuugcgcccagaaguuuaacggacugacagugcugccuccucugcugaccgaugagaugaucgcccaguacacaucugcccugcuggccggcacaaucacaagcggcuggacauuuggagcaggcgccgcucugcagauccccuuugcuaugcagauggccuaccgguucaacggcaucggagugacccagaaugugcuguacgagaaccagaagcugaucgccaaccaguucaacagcgccaucggcaagauccaggacagccugagcagcacagcaagcgcccugggaaagcugcaggacguggucaaccagaaugcccaggcacugaacacccuggucaagcagcuguccuccaacuucggcgccaucagcucugugcugaacgauauccugagcagacuggacccuccugaggccgaggugcagaucgacagacugaucacaggcagacugcagagccuccagacauacgugacccagcagcugaucagagccgccgagauuagagccucugccaaucuggccgccaucaagaugucugagugugugcugggccagagcaagagaguggacuuuugcggcaagggcuaccaccugaugagcuucccucagucugccccucacggcgugguguuucugcacgugacauaugugcccgcucaagagaagaauuucaccaccgcuccagccaucugccacgacggcaaagcccacuuuccuagagaaggcguguucguguccaacggcacccauugguucgugacacagcggaacuucuacgagccccagaucaucaccaccgacaacaccuucgugucuggcaacugcgacgucgugaucggcauugugaacaauaccguguacgacccucugcagcccgagcuggacagcuucaaagaggaacuggacaaguacuuuaagaaccacacaagccccgacguggaccugggcgauaucagcggaaucaaugccagcgucgugaacauccagaaagagaucgaccggcugaacgagguggccaagaaucugaacgagagccugaucgaccugcaagaacuggggaaguacgagcaguacaucaaguggcccugguacaucuggcugggcuuuaucgccggacugauugccaucgugauggucacaaucaugcuguguugcaugaccagcugcuguagcugccugaagggcuguuguagcuguggcagcugcugcaaguucgacgaggacgauucugagcccgugcugaagggcgugaaacugcacuacacaugaggacuaguuauaagacugacuagcccgaugggccucccaacgggcccuccuccccuccuugcaccgagagaucuaaaaaaaaaaaaaaaaaaaaaaaaaaaaaaaaaaaaaaaaaaaaaaaaaaaaaaaaaaaaaaaaaaaaaaaaaaaaaaaaaaaaaaaaaaaaaaaaaaaa

SEQ ID NO: 26044 - RNA, 4011 nt, Artificial Sequence
  SARS-CoV-2/Wuhan/WIV05/2019__EPI_ISL_402128 spike protein mRNA gc mod (1-1273)(K986P_V987P_K986P_V987P_S13I_W152C_L452R_D614G)
aggagaaagcuuaccauguucguguuccuggugcugcugccucugguguccauccagugugugaaccugaccaccagaacacagcugccuccagccuacaccaacagcuuuaccagaggcguguacuaccccgacaagguguucagauccagcgugcugcacucuacccaggaccuguuccugccuuucuucagcaacgugaccugguuccacgccauccacguguccggcaccaauggcaccaagagauucgacaaccccgugcugcccuucaacgacgggguguacuuugccagcaccgagaaguccaacaucaucagaggcuggaucuucggcaccacacuggacagcaagacccagagccugcugaucgugaacaacgccaccaacguggucaucaaagugugcgaguuccaguucugcaacgaccccuuccugggcgucuacuaccacaagaacaacaagagcugcauggaaagcgaguuccggguguacagcagcgccaacaacugcaccuucgaguacgugucccagccuuuccugauggaccuggaaggcaagcagggcaacuucaagaaccugcgcgaguucguguuuaagaacaucgacggcuacuucaagaucuacagcaagcacaccccuaucaaccucgugcgggaucugccucagggcuucucugcucuggaaccccugguggaucugcccaucggcaucaacaucacccgguuucagacacugcuggcccugcacagaagcuaccugacaccuggcgauagcagcagcggauggacagcuggugccgccgcuuacuaugugggcuaccugcagccuagaaccuuccugcugaaguacaacgagaacggcaccaucaccgacgccguggauugugcucuggauccucugagcgagacaaagugcacccugaaguccuucaccguggaaaagggcaucuaccagaccagcaacuuccgggugcagcccaccgaauccaucgugcgguuccccaauaucaccaaucugugccccuucggcgagguguucaaugccaccagauucgccucuguguacgccuggaaccggaagcggaucagcaauugcguggccgacuacuccgugcuguacaacuccgccagcuucagcaccuucaagugcuacggcguguccccuaccaagcugaacgaccugugcuucacaaacguguacgccgacagcuucgugauccggggagaugaagugcggcagauugccccuggacagacaggcaagaucgccgacuacaacuacaagcugcccgacgacuucaccggcugugugauugccuggaacagcaacaaccuggacuccaaagucggcggcaacuacaauuaccgcuaccggcuguuccggaaguccaaucugaagcccuucgagcgggacaucuccaccgagaucuaucaggccggcagcaccccuuguaacggcguggaaggcuucaacugcuacuucccacugcaguccuacggcuuucagcccacaaauggcgugggcuaucagcccuacagagugguggugcugagcuucgaacugcugcaugccccugccacagugugcggcccuaagaaaagcaccaaucucgugaagaacaaaugcgugaacuucaacuucaacggccugaccggcaccggcgugcugacagagagcaacaagaaguuccugccauuccagcaguuuggccgggauaucgccgauaccacagacgccguuagagauccccagacacuggaaauccuggacaucaccccuugcagcuucggcggagugucugugaucaccccuggcaccaacaccagcaaucagguggcagugcuguaccagggcgugaacuguaccgaagugcccguggccauucacgccgaucagcugacaccuacauggcggguguacuccaccggcagcaauguguuucagaccagagccggcugucugaucggagccgagcacgugaacaauagcuacgagugcgacauccccaucggcgcuggaaucugcgccagcuaccagacacagacaaacagcccucggagagccagaagcguggccagccagagcaucauugccuacacaaugucucugggcgccgagaacagcguggccuacuccaacaacucuaucgcuauccccaccaacuucaccaucagcgugaccacagagauccugccuguguccaugaccaagaccagcguggacugcaccauguacaucugcggcgauuccaccgagugcuccaaccugcugcugcaguacggcagcuucugcacccagcugaauagagcccugacagggaucgccguggaacaggacaagaacacccaagagguguucgcccaagugaagcagaucuacaagaccccuccuaucaaggacuucggcggcuucaauuucagccagauucugcccgauccuagcaagcccagcaagcggagcuucaucgaggaccugcuguucaacaaagugacacuggccgacgccggcuucaucaagcaguauggcgauugucugggcgacauugccgccagggaucugauuugcgcccagaaguuuaacggacugacagugcugccuccucugcugaccgaugagaugaucgcccaguacacaucugcccugcuggccggcacaaucacaagcggcuggacauuuggagcaggcgccgcucugcagauccccuuugcuaugcagauggccuaccgguucaacggcaucggagugacccagaaugugcuguacgagaaccagaagcugaucgccaaccaguucaacagcgccaucggcaagauccaggacagccugagcagcacagcaagcgcccugggaaagcugcaggacguggucaaccagaaugcccaggcacugaacacccuggucaagcagcuguccuccaacuucggcgccaucagcucugugcugaacgauauccugagcagacuggacccuccugaggccgaggugcagaucgacagacugaucacaggcagacugcagagccuccagacauacgugacccagcagcugaucagagccgccgagauuagagccucugccaaucuggccgccaccaagaugucugagugugugcugggccagagcaagagaguggacuuuugcggcaagggcuaccaccugaugagcuucccucagucugccccucacggcgugguguuucugcacgugacauaugugcccgcucaagagaagaauuucaccaccgcuccagccaucugccacgacggcaaagcccacuuuccuagagaaggcguguucguguccaacggcacccauugguucgugacacagcggaacuucuacgagccccagaucaucaccaccgacaacaccuucgugucuggcaacugcgacgucgugaucggcauugugaacaauaccguguacgacccucugcagcccgagcuggacagcuucaaagaggaacuggacaaguacuuuaagaaccacacaagccccgacguggaccugggcgauaucagcggaaucaaugccagcgucgugaacauccagaaagagaucgaccggcugaacgagguggccaagaaucugaacgagagccugaucgaccugcaagaacuggggaaguacgagcaguacaucaaguggcccugguacaucuggcugggcuuuaucgccggacugauugccaucgugauggucacaaucaugcuguguugcaugaccagcugcuguagcugccugaagggcuguuguagcuguggcagcugcugcaaguucgacgaggacgauucugagcccgugcugaagggcgugaaacugcacuacacaugaggacuaguuauaagacugacuagcccgaugggccucccaacgggcccuccuccccuccuugcaccgagagaucuaaaaaaaaaaaaaaaaaaaaaaaaaaaaaaaaaaaaaaaaaaaaaaaaaaaaaaaaaaaaaaaaaaaaaaaaaaaaaaaaaaaaaaaaaaaaaaaaaaaa

SEQ ID NO: 26045 - RNA, 1425 nt, Artificial Sequence
  SARS-CoV-2/Wuhan/WIV05/2019__EPI_ISL_402128 spike protein mRNA gc (1-15,334-528) Ferritin construct
gggaaauaagagagaaaagaagaguaagaagaaauauaagaccccggcgccgccaccauguucguguuccugguccuccugccccuggugagcucccagugcaaccugugccccuucggcgagguguucaacgccacccgguucgccagcgucuacgccuggaaccgcaagcggaucuccaacugcguggcggacuacagcgugcuguacaacuccgccagcuucuccacguucaagugcuacggcgucagccccaccaagcucaacgaccugugcuucaccaacguguacgccgacuccuucgugauccgcggggacgagguccggcagaucgcccccggccagaccgggaagaucgccgacuacaacuacaagcugccggacgacuucacgggcugcgugaucgcguggaacagcaacaaccucgacuccaaggucgggggcaacuacaacuaccuguaccgccuguuccgcaagagcaaccucaagcccuucgagcgggacaucuccaccgagaucuaccaggccggcagcacccccugcaacgggguggagggcuucaacugcuacuucccccugcaguccuacggguuccagccgaccaacggcgugggguaccagcccuaccggguggucgugcugagcuucgagcuccugcacgcccccgccacggugugcggccccaagggcggggguggaagcggcggggguggaagugacaucaucaagcuccugaacgagcaggucaacaaggagaugcaguccagcaaccuguacauguccaugagcuccuggugcuacacccacagccucgacggcgccgggcuguuccuguucgaccacgccgcggaggaguacgagcacgccaagaagcucaucaucuuccugaacgagaacaacgugcccgugcagcugaccuccaucagcgccccggagcacaaguucgagggccucacgcagaucuuccagaaggccuacgagcacgagcagcacaucuccgagagcaucaacaacaucguggaccacgccaucaaguccaaggaccacgcgaccuucaacuuccugcagugguacgucgccgagcagcacgaggaggaggugcuguucaaggacauccucgacaagaucgagcugaucgggaacgagaaccacggccuguaccucgccgaccaguacgugaaggggaucgccaagagccgcaaguccugauaauaggcuggagccucgguggccuagcuucuugccccuugggccuccccccagccccuccuccccuuccugcacccguacccccguggucuuugaauaaagucugagugggcggcaaaaaaaaaaaaaaaaaaaaaaaaaaaaaaaaaaaaaaaaaaaaaaaaaaaaaaaaaaaaaaaaaaaaaaaaaaaaaaaaaaaaaaaaaaaaaaaaaaaa

SEQ ID NO: 26046 - RNA, 1023 nt, Artificial Sequence
  SARS-CoV-2/Wuhan/WIV05/2019__EPI_ISL_402128 spike protein mRNA gc (334-528) Foldon construct
gggaaauaagagagaaaagaagaguaagaagaaauauaagaccccggcgccgccaccaugcccaugggcagccugcagccgcucgccacccuguaccugcucgggaugcugguggccuccguccuggcgaaccugugccccuucggcgagguguucaacgccacccgguucgccagcgucuacgccuggaaccgcaagcggaucuccaacugcguggcggacuacagcgugcuguacaacuccgccagcuucuccacguucaagugcuacggcgucagccccaccaagcucaacgaccugugcuucaccaacguguacgccgacuccuucgugauccgcggggacgagguccggcagaucgcccccggccagaccgggaagaucgccgacuacaacuacaagcugccggacgacuucacgggcugcgugaucgcguggaacagcaacaaccucgacuccaaggucgggggcaacuacaacuaccuguaccgccuguuccgcaagagcaaccucaagcccuucgagcgggacaucuccaccgagaucuaccaggccggcagcacccccugcaacgggguggagggcuucaacugcuacuucccccugcaguccuacggguuccagccgaccaacggcgugggguaccagcccuaccggguggucgugcugagcuucgagcuccugcacgcccccgccacggugugcggccccaagggcagcggcggguacauccccgaggccccgcgcgacggccaggccuacgugcggaaggacggcgaguggguccugcugagcaccuuccucugauaauaggcuggagccucgguggccuagcuucuugccccuugggccuccccccagccccuccuccccuuccugcacccguacccccguggucuuugaauaaagucugagugggcggcaaaaaaaaaaaaaaaaaaaaaaaaaaaaaaaaaaaaaaaaaaaaaaaaaaaaaaaaaaaaaaaaaaaaaaaaaaaaaaaaaaaaaaaaaaaaaaaaaaaa

SEQ ID NO: 26047 - RNA, 1401 nt, Artificial Sequence
  SARS-CoV-2/Wuhan/WIV05/2019__EPI_ISL_402128 spike protein mRNA gc (1-15,334-528) LumSynth construct
gggaaauaagagagaaaagaagaguaagaagaaauauaagaccccggcgccgccaccauguucguguuccugguccuccugccccuggugagcucccagugcaaccugugccccuucggcgagguguucaacgccacccgguucgccagcgucuacgccuggaaccgcaagcggaucuccaacugcguggcggacuacagcgugcuguacaacuccgccagcuucuccacguucaagugcuacggcgucagccccaccaagcucaacgaccugugcuucaccaacguguacgccgacuccuucgugauccgcggggacgagguccggcagaucgcccccggccagaccgggaagaucgccgacuacaacuacaagcugccggacgacuucacgggcugcgugaucgcguggaacagcaacaaccucgacuccaaggucgggggcaacuacaacuaccuguaccgccuguuccgcaagagcaaccucaagcccuucgagcgggacaucuccaccgagaucuaccaggccggcagcacccccugcaacgggguggagggcuucaacugcuacuucccccugcaguccuacggguuccagccgaccaacggcgugggguaccagcccuaccggguggucgugcugagcuucgagcuccugcacgcccccgccacggugugcggccccaagggcggcggcggcuccggaggcggagguagcgggggacagaucuacgagggcaagcugaccgccgaggggcuccgcuucggcaucguggccagccgguucaaccacgcgcuggucgaccgccugguggagggggccaucgacgccaucgugcggcacggcgggcgcgaggaggacaucacccucguccgggugcccggcuccugggagaucccgguggccgccggcgagcuggcccgcaaggaggacaucgacgcggucaucgccaucggggugcugauccggggcgccacgccccacuucgacuacaucgccagcgagguguccaaggggcucgcggaccugagccuggagcuccgcaagcccaucaccuucggcgucaucaccgccgacacccuggagcaggccaucgagcgggccgggacgaagcacggcaacaagggcugggaggccgcgcuguccgccaucgagauggccaaccucuucaagagccugcgcugauaauaggcuggagccucgguggccuagcuucuugccccuugggccuccccccagccccuccuccccuuccugcacccguacccccguggucuuugaauaaagucugagugggcggcaaaaaaaaaaaaaaaaaaaaaaaaaaaaaaaaaaaaaaaaaaaaaaaaaaaaaaaaaaaaaaaaaaaaaaaaaaaaaaaaaaaaaaaaaaaaaaaaaaaa

SEQ ID NO: 26048 - RNA, 1362 nt, Artificial Sequence
  SARS-CoV-2/Wuhan/WIV05/2019__EPI_ISL_402128 spike protein mRNA gc (334-528) LumSynth construct
gggaaauaagagagaaaagaagaguaagaagaaauauaagaccccggcgccgccaccaugcagaucuacgagggcaagcugaccgccgaggggcuccgcuucggcaucguggccagccgguucaaccacgcgcuggucgaccgccugguggagggggccaucgacgccaucgugcggcacggcgggcgcgaggaggacaucacccucguccgggugcccggcuccugggagaucccgguggccgccggcgagcuggcccgcaaggaggacaucgacgcggucaucgccaucggggugcugauccggggcgccacgccccacuucgacuacaucgccagcgagguguccaaggggcucgcggaccugagccuggagcuccgcaagcccaucaccuucggcgucaucaccgccgacacccuggagcaggccaucgagcgggccgggacgaagcacggcaacaagggcugggaggccgcgcuguccgccaucgagauggccaaccucuucaagagccugcgcggcgggggcgggagcggcgggggcggcuccgggggcgggaaccugugccccuucggcgagguguucaacgccacccgguucgccagcgucuacgccuggaaccgcaagcggaucuccaacugcguggcggacuacagcgugcuguacaacuccgccagcuucuccacguucaagugcuacggcgucagccccaccaagcucaacgaccugugcuucaccaacguguacgccgacuccuucgugauccgcggggacgagguccggcagaucgcccccggccagaccgggaagaucgccgacuacaacuacaagcugccggacgacuucacgggcugcgugaucgcguggaacagcaacaaccucgacuccaaggucgggggcaacuacaacuaccuguaccgccuguuccgcaagagcaaccucaagcccuucgagcgggacaucuccaccgagaucuaccaggccggcagcacccccugcaacgggguggagggcuucaacugcuacuucccccugcaguccuacggguuccagccgaccaacggcgugggguaccagcccuaccggguggucgugcugagcuucgagcuccugcacgcccccgccacggugugcggccccaagugauaauaggcuggagccucgguggccuagcuucuugccccuugggccuccccccagccccuccuccccuuccugcacccguacccccguggucuuugaauaaagucugagugggcggcaaaaaaaaaaaaaaaaaaaaaaaaaaaaaaaaaaaaaaaaaaaaaaaaaaaaaaaaaaaaaaaaaaaaaaaaaaaaaaaaaaaaaaaaaaaaaaaaaaaa

SEQ ID NO: 26049 - RNA, 4095 nt, Artificial Sequence
  SARS-CoV-2/Wuhan/WIV05/2019__EPI_ISL_402128 spike protein mRNA gc (1-1273)
gggaaauaagagagaaaagaagaguaagaagaaauauaagaccccggcgccgccaccauguucguguuccugguccuccugccccuggugagcucccagugcgugaaccucaccacccgcacgcagcugccgcccgccuacaccaacagcuucacccggggcgucuacuaccccgacaagguguuccgcuccagcgugcugcacuccacccaggaccucuuccugcccuucuucagcaacgucacgugguuccacgccauccacguguccgggaccaacggcaccaagcgguucgacaacccggugcugcccuucaacgacggggucuacuucgcgagcaccgagaaguccaacaucauccgcggcuggaucuucgggacgacccucgacagcaagacccagucccugcugaucgugaacaacgccaccaacguggucaucaaggugugcgaguuccaguucugcaacgaccccuuccucggcguguacuaccacaagaacaacaagagcuggauggaguccgaguuccgggucuacagcuccgccaacaacugcacguucgaguacgugagccagcccuuccugauggaccuggagggcaagcaggggaacuucaagaaccuccgcgaguucguguucaagaacaucgacggcuacuucaagaucuacuccaagcacaccccgaucaaccugguccgggaccugccccagggguucagcgcccucgagccccugguggaccugcccaucggcaucaacaucacccgcuuccagacccuccuggcccugcaccgguccuaccucacgccgggggacagcagcuccggcuggaccgcgggcgccgccgccuacuacgugggguaccugcagccccgcaccuuccugcucaaguacaacgagaacggcaccaucacggacgcggucgacugcgcccuggacccccugagcgagaccaagugcacccucaaguccuucaccguggagaaggggaucuaccagacgagcaacuuccgggugcagcccaccgaguccaucguccgcuucccgaacaucaccaaccugugccccuucggcgagguguucaacgccacccgguucgccagcgucuacgccuggaaccgcaagcggaucuccaacugcguggcggacuacagcgugcuguacaacuccgccagcuucuccacguucaagugcuacggcgucagccccaccaagcucaacgaccugugcuucaccaacguguacgccgacuccuucgugauccgcggggacgagguccggcagaucgcccccggccagaccgggaagaucgccgacuacaacuacaagcugccggacgacuucacgggcugcgugaucgcguggaacagcaacaaccucgacuccaaggucgggggcaacuacaacuaccuguaccgccuguuccgcaagagcaaccucaagcccuucgagcgggacaucuccaccgagaucuaccaggccggcagcacccccugcaacgggguggagggcuucaacugcuacuucccccugcaguccuacggguuccagccgaccaacggcgugggguaccagcccuaccggguggucgugcugagcuucgagcuccugcacgcccccgccacggugugcggccccaagaaguccaccaaccuggucaagaacaagugcgugaacuucaacuucaacggccucaccgggaccggcgugcugaccgagagcaacaagaaguuccugccguuccagcaguucgggcgcgacaucgccgacacgaccgacgcgguccgcgacccccagacccuggagauccucgacaucacccccugcagcuucggcgggguguccgugaucacgccgggcaccaacaccagcaaccaggucgccgugcuguaccaggacgugaacugcaccgagguccccguggccauccacgccgaccagcugacgcccaccuggcggguguacuccaccggcagcaacgucuuccagacccgcgccgggugccucaucggcgcggagcacgugaacaacuccuacgagugcgacauccccaucggggccggcaucugcgccagcuaccagacgcagaccaacuccccgcggcgcgcccggagcguggcgucccagagcaucaucgccuacaccaugucccugggcgccgagaacagcgucgccuacuccaacaacagcaucgccauccccaccaacuucacgaucuccgugaccaccgagauccugcccgugagcaugaccaagacgagcgucgacugcaccauguacaucugcggggacuccaccgagugcagcaaccuccugcugcaguacggcuccuucugcacccagcucaaccgcgcgcugacggggaucgccguggagcaggacaagaacacccaggagguguucgcccaggucaagcagaucuacaagacgcccccgaucaaggacuucggcggguucaacuucagccagauccugcccgaccccuccaagcccagcaagcgguccuucaucgaggaccuccuguucaacaaggugacccuggccgacgccggcuucaucaagcaguacggcgacugccucggggacaucgcggcccgcgaccugaucugcgcccagaaguucaacggccugaccgugcucccgccccugcugaccgacgagaugaucgcccaguacaccagcgcccuccuggcggggaccaucacguccggcuggaccuucggggccggcgccgcccugcagauccccuucgcgaugcagauggccuaccgguucaacggcaucggggucacccagaacgugcucuacgagaaccagaagcugaucgccaaccaguucaacagcgccaucggcaagauccaggacucccugagcuccaccgccagcgcgcucgggaagcugcaggacguggucaaccagaacgcccaggcccugaacacgcucgugaagcagcuguccagcaacuucggcgccaucuccagcgugcugaacgacauccucucccgccuggacaaggucgaggccgaggugcagaucgaccggcugaucaccgggcgccuccagagccugcagaccuacgugacccagcagcugauccgggcggccgagauccgcgccagcgccaaccucgccgcgaccaagauguccgagugcguccugggccagagcaagcggguggacuucugcggcaagggguaccaccugauguccuucccccagagcgccccgcacggcguggucuuccuccacgugacguacguccccgcccaggagaagaacuucaccaccgcccccgcgaucugccacgacgggaaggcccacuucccccgcgagggcguguucguguccaacgggacccacugguucgucacgcagcggaacuucuacgagccgcagaucaucaccaccgacaacaccuucgugagcggcaacugcgacguggucaucggcaucgugaacaacacgguguacgacccccugcagcccgagcuggacuccuucaaggaggagcucgacaaguacuucaagaaccacaccagccccgacgucgaccugggggacaucuccggcaucaacgccagcguggugaacauccagaaggagaucgaccgccugaacgaggucgccaagaaccucaacgagucccugaucgaccugcaggagcucgggaaguacgagcaguacaucaaguggccgugguacaucuggcugggcuucaucgccggccugaucgcgaucgugauggugaccaucaugcucugcugcaugaccagcugcugcuccugccugaaggggugcugcagcugcggcuccugcugcaaguucgacgaggacgacagcgagcccguccugaagggggugaagcuccacuacacgugauaauaggcuggagccucgguggccuagcuucuugccccuugggccuccccccagccccuccuccccuuccugcacccguacccccguggucuuugaauaaagucugagugggcggcaaaaaaaaaaaaaaaaaaaaaaaaaaaaaaaaaaaaaaaaaaaaaaaaaaaaaaaaaaaaaaaaaaaaaaaaaaaaaaaaaaaaaaaaaaaaaaaaaaaa

SEQ ID NO: 26050 - RNA, 4095 nt, Artificial Sequence
  SARS-CoV-2/Wuhan/WIV05/2019__EPI_ISL_402128 spike protein mRNA gc (1-1273)(D614G)
gggaaauaagagagaaaagaagaguaagaagaaauauaagaccccggcgccgccaccauguucguguuccugguccuccugccccuggugagcucccagugcgugaaccucaccacccgcacgcagcugccgcccgccuacaccaacagcuucacccggggcgucuacuaccccgacaagguguuccgcuccagcgugcugcacuccacccaggaccucuuccugcccuucuucagcaacgucacgugguuccacgccauccacguguccgggaccaacggcaccaagcgguucgacaacccggugcugcccuucaacgacggggucuacuucgcgagcaccgagaaguccaacaucauccgcggcuggaucuucgggacgacccucgacagcaagacccagucccugcugaucgugaacaacgccaccaacguggucaucaaggugugcgaguuccaguucugcaacgaccccuuccucggcguguacuaccacaagaacaacaagagcuggauggaguccgaguuccgggucuacagcuccgccaacaacugcacguucgaguacgugagccagcccuuccugauggaccuggagggcaagcaggggaacuucaagaaccuccgcgaguucguguucaagaacaucgacggcuacuucaagaucuacuccaagcacaccccgaucaaccugguccgggaccugccccagggguucagcgcccucgagccccugguggaccugcccaucggcaucaacaucacccgcuuccagacccuccuggcccugcaccgguccuaccucacgccgggggacagcagcuccggcuggaccgcgggcgccgccgccuacuacgugggguaccugcagccccgcaccuuccugcucaaguacaacgagaacggcaccaucacggacgcggucgacugcgcccuggacccccugagcgagaccaagugcacccucaaguccuucaccguggagaaggggaucuaccagacgagcaacuuccgggugcagcccaccgaguccaucguccgcuucccgaacaucaccaaccugugccccuucggcgagguguucaacgccacccgguucgccagcgucuacgccuggaaccgcaagcggaucuccaacugcguggcggacuacagcgugcuguacaacuccgccagcuucuccacguucaagugcuacggcgucagccccaccaagcucaacgaccugugcuucaccaacguguacgccgacuccuucgugauccgcggggacgagguccggcagaucgcccccggccagaccgggaagaucgccgacuacaacuacaagcugccggacgacuucacgggcugcgugaucgcguggaacagcaacaaccucgacuccaaggucgggggcaacuacaacuaccuguaccgccuguuccgcaagagcaaccucaagcccuucgagcgggacaucuccaccgagaucuaccaggccggcagcacccccugcaacgggguggagggcuucaacugcuacuucccccugcaguccuacggguuccagccgaccaacggcgugggguaccagcccuaccggguggucgugcugagcuucgagcuccugcacgcccccgccacggugugcggccccaagaaguccaccaaccuggucaagaacaagugcgugaacuucaacuucaacggccucaccgggaccggcgugcugaccgagagcaacaagaaguuccugccguuccagcaguucgggcgcgacaucgccgacacgaccgacgcgguccgcgacccccagacccuggagauccucgacaucacccccugcagcuucggcgggguguccgugaucacgccgggcaccaacaccagcaaccaggucgccgugcuguaccagggcgugaacugcaccgagguccccguggccauccacgccgaccagcugacgcccaccuggcggguguacuccaccggcagcaacgucuuccagacccgcgccgggugccucaucggcgcggagcacgugaacaacuccuacgagugcgacauccccaucggggccggcaucugcgccagcuaccagacgcagaccaacuccccgcggcgcgcccggagcguggcgucccagagcaucaucgccuacaccaugucccugggcgccgagaacagcgucgccuacuccaacaacagcaucgccauccccaccaacuucacgaucuccgugaccaccgagauccugcccgugagcaugaccaagacgagcgucgacugcaccauguacaucugcggggacuccaccgagugcagcaaccuccugcugcaguacggcuccuucugcacccagcucaaccgcgcgcugacggggaucgccguggagcaggacaagaacacccaggagguguucgcccaggucaagcagaucuacaagacgcccccgaucaaggacuucggcggguucaacuucagccagauccugcccgaccccuccaagcccagcaagcgguccuucaucgaggaccuccuguucaacaaggugacccuggccgacgccggcuucaucaagcaguacggcgacugccucggggacaucgcggcccgcgaccugaucugcgcccagaaguucaacggccugaccgugcucccgccccugcugaccgacgagaugaucgcccaguacaccagcgcccuccuggcggggaccaucacguccggcuggaccuucggggccggcgccgcccugcagauccccuucgcgaugcagauggccuaccgguucaacggcaucggggucacccagaacgugcucuacgagaaccagaagcugaucgccaaccaguucaacagcgccaucggcaagauccaggacucccugagcuccaccgccagcgcgcucgggaagcugcaggacguggucaaccagaacgcccaggcccugaacacgcucgugaagcagcuguccagcaacuucggcgccaucuccagcgugcugaacgacauccucucccgccuggacaaggucgaggccgaggugcagaucgaccggcugaucaccgggcgccuccagagccugcagaccuacgugacccagcagcugauccgggcggccgagauccgcgccagcgccaaccucgccgcgaccaagauguccgagugcguccugggccagagcaagcggguggacuucugcggcaagggguaccaccugauguccuucccccagagcgccccgcacggcguggucuuccuccacgugacguacguccccgcccaggagaagaacuucaccaccgcccccgcgaucugccacgacgggaaggcccacuucccccgcgagggcguguucguguccaacgggacccacugguucgucacgcagcggaacuucuacgagccgcagaucaucaccaccgacaacaccuucgugagcggcaacugcgacguggucaucggcaucgugaacaacacgguguacgacccccugcagcccgagcuggacuccuucaaggaggagcucgacaaguacuucaagaaccacaccagccccgacgucgaccugggggacaucuccggcaucaacgccagcguggugaacauccagaaggagaucgaccgccugaacgaggucgccaagaaccucaacgagucccugaucgaccugcaggagcucgggaaguacgagcaguacaucaaguggccgugguacaucuggcugggcuucaucgccggccugaucgcgaucgugauggugaccaucaugcucugcugcaugaccagcugcugcuccugccugaaggggugcugcagcugcggcuccugcugcaaguucgacgaggacgacagcgagcccguccugaagggggugaagcuccacuacacgugauaauaggcuggagccucgguggccuagcuucuugccccuugggccuccccccagccccuccuccccuuccugcacccguacccccguggucuuugaauaaagucugagugggcggcaaaaaaaaaaaaaaaaaaaaaaaaaaaaaaaaaaaaaaaaaaaaaaaaaaaaaaaaaaaaaaaaaaaaaaaaaaaaaaaaaaaaaaaaaaaaaaaaaaaa

SEQ ID NO: 26051 - RNA, 4095 nt, Artificial Sequence
  SARS-CoV-2/Wuhan/WIV05/2019__EPI_ISL_402128 spike protein mRNA gc (1-1273)(A222V_D614G)
gggaaauaagagagaaaagaagaguaagaagaaauauaagaccccggcgccgccaccauguucguguuccugguccuccugccccuggugagcucccagugcgugaaccucaccacccgcacgcagcugccgcccgccuacaccaacagcuucacccggggcgucuacuaccccgacaagguguuccgcuccagcgugcugcacuccacccaggaccucuuccugcccuucuucagcaacgucacgugguuccacgccauccacguguccgggaccaacggcaccaagcgguucgacaacccggugcugcccuucaacgacggggucuacuucgcgagcaccgagaaguccaacaucauccgcggcuggaucuucgggacgacccucgacagcaagacccagucccugcugaucgugaacaacgccaccaacguggucaucaaggugugcgaguuccaguucugcaacgaccccuuccucggcguguacuaccacaagaacaacaagagcuggauggaguccgaguuccgggucuacagcuccgccaacaacugcacguucgaguacgugagccagcccuuccugauggaccuggagggcaagcaggggaacuucaagaaccuccgcgaguucguguucaagaacaucgacggcuacuucaagaucuacuccaagcacaccccgaucaaccugguccgggaccugccccagggguucagcguccucgagccccugguggaccugcccaucggcaucaacaucacccgcuuccagacccuccuggcccugcaccgguccuaccucacgccgggggacagcagcuccggcuggaccgcgggcgccgccgccuacuacgugggguaccugcagccccgcaccuuccugcucaaguacaacgagaacggcaccaucacggacgcggucgacugcgcccuggacccccugagcgagaccaagugcacccucaaguccuucaccguggagaaggggaucuaccagacgagcaacuuccgggugcagcccaccgaguccaucguccgcuucccgaacaucaccaaccugugccccuucggcgagguguucaacgccacccgguucgccagcgucuacgccuggaaccgcaagcggaucuccaacugcguggcggacuacagcgugcuguacaacuccgccagcuucuccacguucaagugcuacggcgucagccccaccaagcucaacgaccugugcuucaccaacguguacgccgacuccuucgugauccgcggggacgagguccggcagaucgcccccggccagaccgggaagaucgccgacuacaacuacaagcugccggacgacuucacgggcugcgugaucgcguggaacagcaacaaccucgacuccaaggucgggggcaacuacaacuaccuguaccgccuguuccgcaagagcaaccucaagcccuucgagcgggacaucuccaccgagaucuaccaggccggcagcacccccugcaacgggguggagggcuucaacugcuacuucccccugcaguccuacggguuccagccgaccaacggcgugggguaccagcccuaccggguggucgugcugagcuucgagcuccugcacgcccccgccacggugugcggccccaagaaguccaccaaccuggucaagaacaagugcgugaacuucaacuucaacggccucaccgggaccggcgugcugaccgagagcaacaagaaguuccugccguuccagcaguucgggcgcgacaucgccgacacgaccgacgcgguccgcgacccccagacccuggagauccucgacaucacccccugcagcuucggcgggguguccgugaucacgccgggcaccaacaccagcaaccaggucgccgugcuguaccagggcgugaacugcaccgagguccccguggccauccacgccgaccagcugacgcccaccuggcggguguacuccaccggcagcaacgucuuccagacccgcgccgggugccucaucggcgcggagcacgugaacaacuccuacgagugcgacauccccaucggggccggcaucugcgccagcuaccagacgcagaccaacuccccgcggcgcgcccggagcguggcgucccagagcaucaucgccuacaccaugucccugggcgccgagaacagcgucgccuacuccaacaacagcaucgccauccccaccaacuucacgaucuccgugaccaccgagauccugcccgugagcaugaccaagacgagcgucgacugcaccauguacaucugcggggacuccaccgagugcagcaaccuccugcugcaguacggcuccuucugcacccagcucaaccgcgcgcugacggggaucgccguggagcaggacaagaacacccaggagguguucgcccaggucaagcagaucuacaagacgcccccgaucaaggacuucggcggguucaacuucagccagauccugcccgaccccuccaagcccagcaagcgguccuucaucgaggaccuccuguucaacaaggugacccuggccgacgccggcuucaucaagcaguacggcgacugccucggggacaucgcggcccgcgaccugaucugcgcccagaaguucaacggccugaccgugcucccgccccugcugaccgacgagaugaucgcccaguacaccagcgcccuccuggcggggaccaucacguccggcuggaccuucggggccggcgccgcccugcagauccccuucgcgaugcagauggccuaccgguucaacggcaucggggucacccagaacgugcucuacgagaaccagaagcugaucgccaaccaguucaacagcgccaucggcaagauccaggacucccugagcuccaccgccagcgcgcucgggaagcugcaggacguggucaaccagaacgcccaggcccugaacacgcucgugaagcagcuguccagcaacuucggcgccaucuccagcgugcugaacgacauccucucccgccuggacaaggucgaggccgaggugcagaucgaccggcugaucaccgggcgccuccagagccugcagaccuacgugacccagcagcugauccgggcggccgagauccgcgccagcgccaaccucgccgcgaccaagauguccgagugcguccugggccagagcaagcggguggacuucugcggcaagggguaccaccugauguccuucccccagagcgccccgcacggcguggucuuccuccacgugacguacguccccgcccaggagaagaacuucaccaccgcccccgcgaucugccacgacgggaaggcccacuucccccgcgagggcguguucguguccaacgggacccacugguucgucacgcagcggaacuucuacgagccgcagaucaucaccaccgacaacaccuucgugagcggcaacugcgacguggucaucggcaucgugaacaacacgguguacgacccccugcagcccgagcuggacuccuucaaggaggagcucgacaaguacuucaagaaccacaccagccccgacgucgaccugggggacaucuccggcaucaacgccagcguggugaacauccagaaggagaucgaccgccugaacgaggucgccaagaaccucaacgagucccugaucgaccugcaggagcucgggaaguacgagcaguacaucaaguggccgugguacaucuggcugggcuucaucgccggccugaucgcgaucgugauggugaccaucaugcucugcugcaugaccagcugcugcuccugccugaaggggugcugcagcugcggcuccugcugcaaguucgacgaggacgacagcgagcccguccugaagggggugaagcuccacuacacgugauaauaggcuggagccucgguggccuagcuucuugccccuugggccuccccccagccccuccuccccuuccugcacccguacccccguggucuuugaauaaagucugagugggcggcaaaaaaaaaaaaaaaaaaaaaaaaaaaaaaaaaaaaaaaaaaaaaaaaaaaaaaaaaaaaaaaaaaaaaaaaaaaaaaaaaaaaaaaaaaaaaaaaaaaa

SEQ ID NO: 26052 - RNA, 4095 nt, Artificial Sequence
  SARS-CoV-2/Wuhan/WIV05/2019__EPI_ISL_402128 spike protein mRNA gc (1-1273)(N439K_D614G)
gggaaauaagagagaaaagaagaguaagaagaaauauaagaccccggcgccgccaccauguucguguuccugguccuccugccccuggugagcucccagugcgugaaccucaccacccgcacgcagcugccgcccgccuacaccaacagcuucacccggggcgucuacuaccccgacaagguguuccgcuccagcgugcugcacuccacccaggaccucuuccugcccuucuucagcaacgucacgugguuccacgccauccacguguccgggaccaacggcaccaagcgguucgacaacccggugcugcccuucaacgacggggucuacuucgcgagcaccgagaaguccaacaucauccgcggcuggaucuucgggacgacccucgacagcaagacccagucccugcugaucgugaacaacgccaccaacguggucaucaaggugugcgaguuccaguucugcaacgaccccuuccucggcguguacuaccacaagaacaacaagagcuggauggaguccgaguuccgggucuacagcuccgccaacaacugcacguucgaguacgugagccagcccuuccugauggaccuggagggcaagcaggggaacuucaagaaccuccgcgaguucguguucaagaacaucgacggcuacuucaagaucuacuccaagcacaccccgaucaaccugguccgggaccugccccagggguucagcgcccucgagccccugguggaccugcccaucggcaucaacaucacccgcuuccagacccuccuggcccugcaccgguccuaccucacgccgggggacagcagcuccggcuggaccgcgggcgccgccgccuacuacgugggguaccugcagccccgcaccuuccugcucaaguacaacgagaacggcaccaucacggacgcggucgacugcgcccuggacccccugagcgagaccaagugcacccucaaguccuucaccguggagaaggggaucuaccagacgagcaacuuccgggugcagcccaccgaguccaucguccgcuucccgaacaucaccaaccugugccccuucggcgagguguucaacgccacccgguucgccagcgucuacgccuggaaccgcaagcggaucuccaacugcguggcggacuacagcgugcuguacaacuccgccagcuucuccacguucaagugcuacggcgucagccccaccaagcucaacgaccugugcuucaccaacguguacgccgacuccuucgugauccgcggggacgagguccggcagaucgcccccggccagaccgggaagaucgccgacuacaacuacaagcugccggacgacuucacgggcugcgugaucgcguggaacagcaagaaccucgacuccaaggucgggggcaacuacaacuaccuguaccgccuguuccgcaagagcaaccucaagcccuucgagcgggacaucuccaccgagaucuaccaggccggcagcacccccugcaacgggguggagggcuucaacugcuacuucccccugcaguccuacggguuccagccgaccaacggcgugggguaccagcccuaccggguggucgugcugagcuucgagcuccugcacgcccccgccacggugugcggccccaagaaguccaccaaccuggucaagaacaagugcgugaacuucaacuucaacggccucaccgggaccggcgugcugaccgagagcaacaagaaguuccugccguuccagcaguucgggcgcgacaucgccgacacgaccgacgcgguccgcgacccccagacccuggagauccucgacaucacccccugcagcuucggcgggguguccgugaucacgccgggcaccaacaccagcaaccaggucgccgugcuguaccagggcgugaacugcaccgagguccccguggccauccacgccgaccagcugacgcccaccuggcggguguacuccaccggcagcaacgucuuccagacccgcgccgggugccucaucggcgcggagcacgugaacaacuccuacgagugcgacauccccaucggggccggcaucugcgccagcuaccagacgcagaccaacuccccgcggcgcgcccggagcguggcgucccagagcaucaucgccuacaccaugucccugggcgccgagaacagcgucgccuacuccaacaacagcaucgccauccccaccaacuucacgaucuccgugaccaccgagauccugcccgugagcaugaccaagacgagcgucgacugcaccauguacaucugcggggacuccaccgagugcagcaaccuccugcugcaguacggcuccuucugcacccagcucaaccgcgcgcugacggggaucgccguggagcaggacaagaacacccaggagguguucgcccaggucaagcagaucuacaagacgcccccgaucaaggacuucggcggguucaacuucagccagauccugcccgaccccuccaagcccagcaagcgguccuucaucgaggaccuccuguucaacaaggugacccuggccgacgccggcuucaucaagcaguacggcgacugccucggggacaucgcggcccgcgaccugaucugcgcccagaaguucaacggccugaccgugcucccgccccugcugaccgacgagaugaucgcccaguacaccagcgcccuccuggcggggaccaucacguccggcuggaccuucggggccggcgccgcccugcagauccccuucgcgaugcagauggccuaccgguucaacggcaucggggucacccagaacgugcucuacgagaaccagaagcugaucgccaaccaguucaacagcgccaucggcaagauccaggacucccugagcuccaccgccagcgcgcucgggaagcugcaggacguggucaaccagaacgcccaggcccugaacacgcucgugaagcagcuguccagcaacuucggcgccaucuccagcgugcugaacgacauccucucccgccuggacaaggucgaggccgaggugcagaucgaccggcugaucaccgggcgccuccagagccugcagaccuacgugacccagcagcugauccgggcggccgagauccgcgccagcgccaaccucgccgcgaccaagauguccgagugcguccugggccagagcaagcggguggacuucugcggcaagggguaccaccugauguccuucccccagagcgccccgcacggcguggucuuccuccacgugacguacguccccgcccaggagaagaacuucaccaccgcccccgcgaucugccacgacgggaaggcccacuucccccgcgagggcguguucguguccaacgggacccacugguucgucacgcagcggaacuucuacgagccgcagaucaucaccaccgacaacaccuucgugagcggcaacugcgacguggucaucggcaucgugaacaacacgguguacgacccccugcagcccgagcuggacuccuucaaggaggagcucgacaaguacuucaagaaccacaccagccccgacgucgaccugggggacaucuccggcaucaacgccagcguggugaacauccagaaggagaucgaccgccugaacgaggucgccaagaaccucaacgagucccugaucgaccugcaggagcucgggaaguacgagcaguacaucaaguggccgugguacaucuggcugggcuucaucgccggccugaucgcgaucgugauggugaccaucaugcucugcugcaugaccagcugcugcuccugccugaaggggugcugcagcugcggcuccugcugcaaguucgacgaggacgacagcgagcccguccugaagggggugaagcuccacuacacgugauaauaggcuggagccucgguggccuagcuucuugccccuugggccuccccccagccccuccuccccuuccugcacccguacccccguggucuuugaauaaagucugagugggcggcaaaaaaaaaaaaaaaaaaaaaaaaaaaaaaaaaaaaaaaaaaaaaaaaaaaaaaaaaaaaaaaaaaaaaaaaaaaaaaaaaaaaaaaaaaaaaaaaaaaa

SEQ ID NO: 26053 - RNA, 4095 nt, Artificial Sequence
  SARS-CoV-2/Wuhan/WIV05/2019__EPI_ISL_402128 spike protein mRNA gc (1-1273)(S477N_D614G)
gggaaauaagagagaaaagaagaguaagaagaaauauaagaccccggcgccgccaccauguucguguuccugguccuccugccccuggugagcucccagugcgugaaccucaccacccgcacgcagcugccgcccgccuacaccaacagcuucacccggggcgucuacuaccccgacaagguguuccgcuccagcgugcugcacuccacccaggaccucuuccugcccuucuucagcaacgucacgugguuccacgccauccacguguccgggaccaacggcaccaagcgguucgacaacccggugcugcccuucaacgacggggucuacuucgcgagcaccgagaaguccaacaucauccgcggcuggaucuucgggacgacccucgacagcaagacccagucccugcugaucgugaacaacgccaccaacguggucaucaaggugugcgaguuccaguucugcaacgaccccuuccucggcguguacuaccacaagaacaacaagagcuggauggaguccgaguuccgggucuacagcuccgccaacaacugcacguucgaguacgugagccagcccuuccugauggaccuggagggcaagcaggggaacuucaagaaccuccgcgaguucguguucaagaacaucgacggcuacuucaagaucuacuccaagcacaccccgaucaaccugguccgggaccugccccagggguucagcgcccucgagccccugguggaccugcccaucggcaucaacaucacccgcuuccagacccuccuggcccugcaccgguccuaccucacgccgggggacagcagcuccggcuggaccgcgggcgccgccgccuacuacgugggguaccugcagccccgcaccuuccugcucaaguacaacgagaacggcaccaucacggacgcggucgacugcgcccuggacccccugagcgagaccaagugcacccucaaguccuucaccguggagaaggggaucuaccagacgagcaacuuccgggugcagcccaccgaguccaucguccgcuucccgaacaucaccaaccugugccccuucggcgagguguucaacgccacccgguucgccagcgucuacgccuggaaccgcaagcggaucuccaacugcguggcggacuacagcgugcuguacaacuccgccagcuucuccacguucaagugcuacggcgucagccccaccaagcucaacgaccugugcuucaccaacguguacgccgacuccuucgugauccgcggggacgagguccggcagaucgcccccggccagaccgggaagaucgccgacuacaacuacaagcugccggacgacuucacgggcugcgugaucgcguggaacagcaacaaccucgacuccaaggucgggggcaacuacaacuaccuguaccgccuguuccgcaagagcaaccucaagcccuucgagcgggacaucuccaccgagaucuaccaggccggcaacacccccugcaacgggguggagggcuucaacugcuacuucccccugcaguccuacggguuccagccgaccaacggcgugggguaccagcccuaccggguggucgugcugagcuucgagcuccugcacgcccccgccacggugugcggccccaagaaguccaccaaccuggucaagaacaagugcgugaacuucaacuucaacggccucaccgggaccggcgugcugaccgagagcaacaagaaguuccugccguuccagcaguucgggcgcgacaucgccgacacgaccgacgcgguccgcgacccccagacccuggagauccucgacaucacccccugcagcuucggcgggguguccgugaucacgccgggcaccaacaccagcaaccaggucgccgugcuguaccagggcgugaacugcaccgagguccccguggccauccacgccgaccagcugacgcccaccuggcggguguacuccaccggcagcaacgucuuccagacccgcgccgggugccucaucggcgcggagcacgugaacaacuccuacgagugcgacauccccaucggggccggcaucugcgccagcuaccagacgcagaccaacuccccgcggcgcgcccggagcguggcgucccagagcaucaucgccuacaccaugucccugggcgccgagaacagcgucgccuacuccaacaacagcaucgccauccccaccaacuucacgaucuccgugaccaccgagauccugcccgugagcaugaccaagacgagcgucgacugcaccauguacaucugcggggacuccaccgagugcagcaaccuccugcugcaguacggcuccuucugcacccagcucaaccgcgcgcugacggggaucgccguggagcaggacaagaacacccaggagguguucgcccaggucaagcagaucuacaagacgcccccgaucaaggacuucggcggguucaacuucagccagauccugcccgaccccuccaagcccagcaagcgguccuucaucgaggaccuccuguucaacaaggugacccuggccgacgccggcuucaucaagcaguacggcgacugccucggggacaucgcggcccgcgaccugaucugcgcccagaaguucaacggccugaccgugcucccgccccugcugaccgacgagaugaucgcccaguacaccagcgcccuccuggcggggaccaucacguccggcuggaccuucggggccggcgccgcccugcagauccccuucgcgaugcagauggccuaccgguucaacggcaucggggucacccagaacgugcucuacgagaaccagaagcugaucgccaaccaguucaacagcgccaucggcaagauccaggacucccugagcuccaccgccagcgcgcucgggaagcugcaggacguggucaaccagaacgcccaggcccugaacacgcucgugaagcagcuguccagcaacuucggcgccaucuccagcgugcugaacgacauccucucccgccuggacaaggucgaggccgaggugcagaucgaccggcugaucaccgggcgccuccagagccugcagaccuacgugacccagcagcugauccgggcggccgagauccgcgccagcgccaaccucgccgcgaccaagauguccgagugcguccugggccagagcaagcggguggacuucugcggcaagggguaccaccugauguccuucccccagagcgccccgcacggcguggucuuccuccacgugacguacguccccgcccaggagaagaacuucaccaccgcccccgcgaucugccacgacgggaaggcccacuucccccgcgagggcguguucguguccaacgggacccacugguucgucacgcagcggaacuucuacgagccgcagaucaucaccaccgacaacaccuucgugagcggcaacugcgacguggucaucggcaucgugaacaacacgguguacgacccccugcagcccgagcuggacuccuucaaggaggagcucgacaaguacuucaagaaccacaccagccccgacgucgaccugggggacaucuccggcaucaacgccagcguggugaacauccagaaggagaucgaccgccugaacgaggucgccaagaaccucaacgagucccugaucgaccugcaggagcucgggaaguacgagcaguacaucaaguggccgugguacaucuggcugggcuucaucgccggccugaucgcgaucgugauggugaccaucaugcucugcugcaugaccagcugcugcuccugccugaaggggugcugcagcugcggcuccugcugcaaguucgacgaggacgacagcgagcccguccugaagggggugaagcuccacuacacgugauaauaggcuggagccucgguggccuagcuucuugccccuugggccuccccccagccccuccuccccuuccugcacccguacccccguggucuuugaauaaagucugagugggcggcaaaaaaaaaaaaaaaaaaaaaaaaaaaaaaaaaaaaaaaaaaaaaaaaaaaaaaaaaaaaaaaaaaaaaaaaaaaaaaaaaaaaaaaaaaaaaaaaaaaa

SEQ ID NO: 26054 - RNA, 4095 nt, Artificial Sequence
  SARS-CoV-2/Wuhan/WIV05/2019__EPI_ISL_402128 spike protein mRNA gc (1-1273)(N501Y_D614G)
gggaaauaagagagaaaagaagaguaagaagaaauauaagaccccggcgccgccaccauguucguguuccugguccuccugccccuggugagcucccagugcgugaaccucaccacccgcacgcagcugccgcccgccuacaccaacagcuucacccggggcgucuacuaccccgacaagguguuccgcuccagcgugcugcacuccacccaggaccucuuccugcccuucuucagcaacgucacgugguuccacgccauccacguguccgggaccaacggcaccaagcgguucgacaacccggugcugcccuucaacgacggggucuacuucgcgagcaccgagaaguccaacaucauccgcggcuggaucuucgggacgacccucgacagcaagacccagucccugcugaucgugaacaacgccaccaacguggucaucaaggugugcgaguuccaguucugcaacgaccccuuccucggcguguacuaccacaagaacaacaagagcuggauggaguccgaguuccgggucuacagcuccgccaacaacugcacguucgaguacgugagccagcccuuccugauggaccuggagggcaagcaggggaacuucaagaaccuccgcgaguucguguucaagaacaucgacggcuacuucaagaucuacuccaagcacaccccgaucaaccugguccgggaccugccccagggguucagcgcccucgagccccugguggaccugcccaucggcaucaacaucacccgcuuccagacccuccuggcccugcaccgguccuaccucacgccgggggacagcagcuccggcuggaccgcgggcgccgccgccuacuacgugggguaccugcagccccgcaccuuccugcucaaguacaacgagaacggcaccaucacggacgcggucgacugcgcccuggacccccugagcgagaccaagugcacccucaaguccuucaccguggagaaggggaucuaccagacgagcaacuuccgggugcagcccaccgaguccaucguccgcuucccgaacaucaccaaccugugccccuucggcgagguguucaacgccacccgguucgccagcgucuacgccuggaaccgcaagcggaucuccaacugcguggcggacuacagcgugcuguacaacuccgccagcuucuccacguucaagugcuacggcgucagccccaccaagcucaacgaccugugcuucaccaacguguacgccgacuccuucgugauccgcggggacgagguccggcagaucgcccccggccagaccgggaagaucgccgacuacaacuacaagcugccggacgacuucacgggcugcgugaucgcguggaacagcaacaaccucgacuccaaggucgggggcaacuacaacuaccuguaccgccuguuccgcaagagcaaccucaagcccuucgagcgggacaucuccaccgagaucuaccaggccggcagcacccccugcaacgggguggagggcuucaacugcuacuucccccugcaguccuacggguuccagccgaccuacggcgugggguaccagcccuaccggguggucgugcugagcuucgagcuccugcacgcccccgccacggugugcggccccaagaaguccaccaaccuggucaagaacaagugcgugaacuucaacuucaacggccucaccgggaccggcgugcugaccgagagcaacaagaaguuccugccguuccagcaguucgggcgcgacaucgccgacacgaccgacgcgguccgcgacccccagacccuggagauccucgacaucacccccugcagcuucggcgggguguccgugaucacgccgggcaccaacaccagcaaccaggucgccgugcuguaccagggcgugaacugcaccgagguccccguggccauccacgccgaccagcugacgcccaccuggcggguguacuccaccggcagcaacgucuuccagacccgcgccgggugccucaucggcgcggagcacgugaacaacuccuacgagugcgacauccccaucggggccggcaucugcgccagcuaccagacgcagaccaacuccccgcggcgcgcccggagcguggcgucccagagcaucaucgccuacaccaugucccugggcgccgagaacagcgucgccuacuccaacaacagcaucgccauccccaccaacuucacgaucuccgugaccaccgagauccugcccgugagcaugaccaagacgagcgucgacugcaccauguacaucugcggggacuccaccgagugcagcaaccuccugcugcaguacggcuccuucugcacccagcucaaccgcgcgcugacggggaucgccguggagcaggacaagaacacccaggagguguucgcccaggucaagcagaucuacaagacgcccccgaucaaggacuucggcggguucaacuucagccagauccugcccgaccccuccaagcccagcaagcgguccuucaucgaggaccuccuguucaacaaggugacccuggccgacgccggcuucaucaagcaguacggcgacugccucggggacaucgcggcccgcgaccugaucugcgcccagaaguucaacggccugaccgugcucccgccccugcugaccgacgagaugaucgcccaguacaccagcgcccuccuggcggggaccaucacguccggcuggaccuucggggccggcgccgcccugcagauccccuucgcgaugcagauggccuaccgguucaacggcaucggggucacccagaacgugcucuacgagaaccagaagcugaucgccaaccaguucaacagcgccaucggcaagauccaggacucccugagcuccaccgccagcgcgcucgggaagcugcaggacguggucaaccagaacgcccaggcccugaacacgcucgugaagcagcuguccagcaacuucggcgccaucuccagcgugcugaacgacauccucucccgccuggacaaggucgaggccgaggugcagaucgaccggcugaucaccgggcgccuccagagccugcagaccuacgugacccagcagcugauccgggcggccgagauccgcgccagcgccaaccucgccgcgaccaagauguccgagugcguccugggccagagcaagcggguggacuucugcggcaagggguaccaccugauguccuucccccagagcgccccgcacggcguggucuuccuccacgugacguacguccccgcccaggagaagaacuucaccaccgcccccgcgaucugccacgacgggaaggcccacuucccccgcgagggcguguucguguccaacgggacccacugguucgucacgcagcggaacuucuacgagccgcagaucaucaccaccgacaacaccuucgugagcggcaacugcgacguggucaucggcaucgugaacaacacgguguacgacccccugcagcccgagcuggacuccuucaaggaggagcucgacaaguacuucaagaaccacaccagccccgacgucgaccugggggacaucuccggcaucaacgccagcguggugaacauccagaaggagaucgaccgccugaacgaggucgccaagaaccucaacgagucccugaucgaccugcaggagcucgggaaguacgagcaguacaucaaguggccgugguacaucuggcugggcuucaucgccggccugaucgcgaucgugauggugaccaucaugcucugcugcaugaccagcugcugcuccugccugaaggggugcugcagcugcggcuccugcugcaaguucgacgaggacgacagcgagcccguccugaagggggugaagcuccacuacacgugauaauaggcuggagccucgguggccuagcuucuugccccuugggccuccccccagccccuccuccccuuccugcacccguacccccguggucuuugaauaaagucugagugggcggcaaaaaaaaaaaaaaaaaaaaaaaaaaaaaaaaaaaaaaaaaaaaaaaaaaaaaaaaaaaaaaaaaaaaaaaaaaaaaaaaaaaaaaaaaaaaaaaaaaaa

SEQ ID NO: 26055 - RNA, 4089 nt, Artificial Sequence
  SARS-CoV-2/Wuhan/WIV05/2019__EPI_ISL_402128 spike protein mRNA gc (1-1273)(H69del_V70del_D614G)
gggaaauaagagagaaaagaagaguaagaagaaauauaagaccccggcgccgccaccauguucguguuccugguccuccugccccuggugagcucccagugcgugaaccucaccacccgcacgcagcugccgcccgccuacaccaacagcuucacccggggcgucuacuaccccgacaagguguuccgcuccagcgugcugcacuccacccaggaccucuuccugcccuucuucagcaacgucacgugguuccacgccaucuccgggaccaacggcaccaagcgguucgacaacccggugcugcccuucaacgacggggucuacuucgcgagcaccgagaaguccaacaucauccgcggcuggaucuucgggacgacccucgacagcaagacccagucccugcugaucgugaacaacgccaccaacguggucaucaaggugugcgaguuccaguucugcaacgaccccuuccucggcguguacuaccacaagaacaacaagagcuggauggaguccgaguuccgggucuacagcuccgccaacaacugcacguucgaguacgugagccagcccuuccugauggaccuggagggcaagcaggggaacuucaagaaccuccgcgaguucguguucaagaacaucgacggcuacuucaagaucuacuccaagcacaccccgaucaaccugguccgggaccugccccagggguucagcgcccucgagccccugguggaccugcccaucggcaucaacaucacccgcuuccagacccuccuggcccugcaccgguccuaccucacgccgggggacagcagcuccggcuggaccgcgggcgccgccgccuacuacgugggguaccugcagccccgcaccuuccugcucaaguacaacgagaacggcaccaucacggacgcggucgacugcgcccuggacccccugagcgagaccaagugcacccucaaguccuucaccguggagaaggggaucuaccagacgagcaacuuccgggugcagcccaccgaguccaucguccgcuucccgaacaucaccaaccugugccccuucggcgagguguucaacgccacccgguucgccagcgucuacgccuggaaccgcaagcggaucuccaacugcguggcggacuacagcgugcuguacaacuccgccagcuucuccacguucaagugcuacggcgucagccccaccaagcucaacgaccugugcuucaccaacguguacgccgacuccuucgugauccgcggggacgagguccggcagaucgcccccggccagaccgggaagaucgccgacuacaacuacaagcugccggacgacuucacgggcugcgugaucgcguggaacagcaacaaccucgacuccaaggucgggggcaacuacaacuaccuguaccgccuguuccgcaagagcaaccucaagcccuucgagcgggacaucuccaccgagaucuaccaggccggcagcacccccugcaacgggguggagggcuucaacugcuacuucccccugcaguccuacggguuccagccgaccaacggcgugggguaccagcccuaccggguggucgugcugagcuucgagcuccugcacgcccccgccacggugugcggccccaagaaguccaccaaccuggucaagaacaagugcgugaacuucaacuucaacggccucaccgggaccggcgugcugaccgagagcaacaagaaguuccugccguuccagcaguucgggcgcgacaucgccgacacgaccgacgcgguccgcgacccccagacccuggagauccucgacaucacccccugcagcuucggcgggguguccgugaucacgccgggcaccaacaccagcaaccaggucgccgugcuguaccagggcgugaacugcaccgagguccccguggccauccacgccgaccagcugacgcccaccuggcggguguacuccaccggcagcaacgucuuccagacccgcgccgggugccucaucggcgcggagcacgugaacaacuccuacgagugcgacauccccaucggggccggcaucugcgccagcuaccagacgcagaccaacuccccgcggcgcgcccggagcguggcgucccagagcaucaucgccuacaccaugucccugggcgccgagaacagcgucgccuacuccaacaacagcaucgccauccccaccaacuucacgaucuccgugaccaccgagauccugcccgugagcaugaccaagacgagcgucgacugcaccauguacaucugcggggacuccaccgagugcagcaaccuccugcugcaguacggcuccuucugcacccagcucaaccgcgcgcugacggggaucgccguggagcaggacaagaacacccaggagguguucgcccaggucaagcagaucuacaagacgcccccgaucaaggacuucggcggguucaacuucagccagauccugcccgaccccuccaagcccagcaagcgguccuucaucgaggaccuccuguucaacaaggugacccuggccgacgccggcuucaucaagcaguacggcgacugccucggggacaucgcggcccgcgaccugaucugcgcccagaaguucaacggccugaccgugcucccgccccugcugaccgacgagaugaucgcccaguacaccagcgcccuccuggcggggaccaucacguccggcuggaccuucggggccggcgccgcccugcagauccccuucgcgaugcagauggccuaccgguucaacggcaucggggucacccagaacgugcucuacgagaaccagaagcugaucgccaaccaguucaacagcgccaucggcaagauccaggacucccugagcuccaccgccagcgcgcucgggaagcugcaggacguggucaaccagaacgcccaggcccugaacacgcucgugaagcagcuguccagcaacuucggcgccaucuccagcgugcugaacgacauccucucccgccuggacaaggucgaggccgaggugcagaucgaccggcugaucaccgggcgccuccagagccugcagaccuacgugacccagcagcugauccgggcggccgagauccgcgccagcgccaaccucgccgcgaccaagauguccgagugcguccugggccagagcaagcggguggacuucugcggcaagggguaccaccugauguccuucccccagagcgccccgcacggcguggucuuccuccacgugacguacguccccgcccaggagaagaacuucaccaccgcccccgcgaucugccacgacgggaaggcccacuucccccgcgagggcguguucguguccaacgggacccacugguucgucacgcagcggaacuucuacgagccgcagaucaucaccaccgacaacaccuucgugagcggcaacugcgacguggucaucggcaucgugaacaacacgguguacgacccccugcagcccgagcuggacuccuucaaggaggagcucgacaaguacuucaagaaccacaccagccccgacgucgaccugggggacaucuccggcaucaacgccagcguggugaacauccagaaggagaucgaccgccugaacgaggucgccaagaaccucaacgagucccugaucgaccugcaggagcucgggaaguacgagcaguacaucaaguggccgugguacaucuggcugggcuucaucgccggccugaucgcgaucgugauggugaccaucaugcucugcugcaugaccagcugcugcuccugccugaaggggugcugcagcugcggcuccugcugcaaguucgacgaggacgacagcgagcccguccugaagggggugaagcuccacuacacgugauaauaggcuggagccucgguggccuagcuucuugccccuugggccuccccccagccccuccuccccuuccugcacccguacccccguggucuuugaauaaagucugagugggcggcaaaaaaaaaaaaaaaaaaaaaaaaaaaaaaaaaaaaaaaaaaaaaaaaaaaaaaaaaaaaaaaaaaaaaaaaaaaaaaaaaaaaaaaaaaaaaaaaaaaa

SEQ ID NO: 26056 - RNA, 4095 nt, Artificial Sequence
  SARS-CoV-2/Wuhan/WIV05/2019__EPI_ISL_402128 spike protein mRNA gc (1-1273)(Y453F_D614G)
gggaaauaagagagaaaagaagaguaagaagaaauauaagaccccggcgccgccaccauguucguguuccugguccuccugccccuggugagcucccagugcgugaaccucaccacccgcacgcagcugccgcccgccuacaccaacagcuucacccggggcgucuacuaccccgacaagguguuccgcuccagcgugcugcacuccacccaggaccucuuccugcccuucuucagcaacgucacgugguuccacgccauccacguguccgggaccaacggcaccaagcgguucgacaacccggugcugcccuucaacgacggggucuacuucgcgagcaccgagaaguccaacaucauccgcggcuggaucuucgggacgacccucgacagcaagacccagucccugcugaucgugaacaacgccaccaacguggucaucaaggugugcgaguuccaguucugcaacgaccccuuccucggcguguacuaccacaagaacaacaagagcuggauggaguccgaguuccgggucuacagcuccgccaacaacugcacguucgaguacgugagccagcccuuccugauggaccuggagggcaagcaggggaacuucaagaaccuccgcgaguucguguucaagaacaucgacggcuacuucaagaucuacuccaagcacaccccgaucaaccugguccgggaccugccccagggguucagcgcccucgagccccugguggaccugcccaucggcaucaacaucacccgcuuccagacccuccuggcccugcaccgguccuaccucacgccgggggacagcagcuccggcuggaccgcgggcgccgccgccuacuacgugggguaccugcagccccgcaccuuccugcucaaguacaacgagaacggcaccaucacggacgcggucgacugcgcccuggacccccugagcgagaccaagugcacccucaaguccuucaccguggagaaggggaucuaccagacgagcaacuuccgggugcagcccaccgaguccaucguccgcuucccgaacaucaccaaccugugccccuucggcgagguguucaacgccacccgguucgccagcgucuacgccuggaaccgcaagcggaucuccaacugcguggcggacuacagcgugcuguacaacuccgccagcuucuccacguucaagugcuacggcgucagccccaccaagcucaacgaccugugcuucaccaacguguacgccgacuccuucgugauccgcggggacgagguccggcagaucgcccccggccagaccgggaagaucgccgacuacaacuacaagcugccggacgacuucacgggcugcgugaucgcguggaacagcaacaaccucgacuccaaggucgggggcaacuacaacuaccuguuccgccuguuccgcaagagcaaccucaagcccuucgagcgggacaucuccaccgagaucuaccaggccggcagcacccccugcaacgggguggagggcuucaacugcuacuucccccugcaguccuacggguuccagccgaccaacggcgugggguaccagcccuaccggguggucgugcugagcuucgagcuccugcacgcccccgccacggugugcggccccaagaaguccaccaaccuggucaagaacaagugcgugaacuucaacuucaacggccucaccgggaccggcgugcugaccgagagcaacaagaaguuccugccguuccagcaguucgggcgcgacaucgccgacacgaccgacgcgguccgcgacccccagacccuggagauccucgacaucacccccugcagcuucggcgggguguccgugaucacgccgggcaccaacaccagcaaccaggucgccgugcuguaccagggcgugaacugcaccgagguccccguggccauccacgccgaccagcugacgcccaccuggcggguguacuccaccggcagcaacgucuuccagacccgcgccgggugccucaucggcgcggagcacgugaacaacuccuacgagugcgacauccccaucggggccggcaucugcgccagcuaccagacgcagaccaacuccccgcggcgcgcccggagcguggcgucccagagcaucaucgccuacaccaugucccugggcgccgagaacagcgucgccuacuccaacaacagcaucgccauccccaccaacuucacgaucuccgugaccaccgagauccugcccgugagcaugaccaagacgagcgucgacugcaccauguacaucugcggggacuccaccgagugcagcaaccuccugcugcaguacggcuccuucugcacccagcucaaccgcgcgcugacggggaucgccguggagcaggacaagaacacccaggagguguucgcccaggucaagcagaucuacaagacgcccccgaucaaggacuucggcggguucaacuucagccagauccugcccgaccccuccaagcccagcaagcgguccuucaucgaggaccuccuguucaacaaggugacccuggccgacgccggcuucaucaagcaguacggcgacugccucggggacaucgcggcccgcgaccugaucugcgcccagaaguucaacggccugaccgugcucccgccccugcugaccgacgagaugaucgcccaguacaccagcgcccuccuggcggggaccaucacguccggcuggaccuucggggccggcgccgcccugcagauccccuucgcgaugcagauggccuaccgguucaacggcaucggggucacccagaacgugcucuacgagaaccagaagcugaucgccaaccaguucaacagcgccaucggcaagauccaggacucccugagcuccaccgccagcgcgcucgggaagcugcaggacguggucaaccagaacgcccaggcccugaacacgcucgugaagcagcuguccagcaacuucggcgccaucuccagcgugcugaacgacauccucucccgccuggacaaggucgaggccgaggugcagaucgaccggcugaucaccgggcgccuccagagccugcagaccuacgugacccagcagcugauccgggcggccgagauccgcgccagcgccaaccucgccgcgaccaagauguccgagugcguccugggccagagcaagcggguggacuucugcggcaagggguaccaccugauguccuucccccagagcgccccgcacggcguggucuuccuccacgugacguacguccccgcccaggagaagaacuucaccaccgcccccgcgaucugccacgacgggaaggcccacuucccccgcgagggcguguucguguccaacgggacccacugguucgucacgcagcggaacuucuacgagccgcagaucaucaccaccgacaacaccuucgugagcggcaacugcgacguggucaucggcaucgugaacaacacgguguacgacccccugcagcccgagcuggacuccuucaaggaggagcucgacaaguacuucaagaaccacaccagccccgacgucgaccugggggacaucuccggcaucaacgccagcguggugaacauccagaaggagaucgaccgccugaacgaggucgccaagaaccucaacgagucccugaucgaccugcaggagcucgggaaguacgagcaguacaucaaguggccgugguacaucuggcugggcuucaucgccggccugaucgcgaucgugauggugaccaucaugcucugcugcaugaccagcugcugcuccugccugaaggggugcugcagcugcggcuccugcugcaaguucgacgaggacgacagcgagcccguccugaagggggugaagcuccacuacacgugauaauaggcuggagccucgguggccuagcuucuugccccuugggccuccccccagccccuccuccccuuccugcacccguacccccguggucuuugaauaaagucugagugggcggcaaaaaaaaaaaaaaaaaaaaaaaaaaaaaaaaaaaaaaaaaaaaaaaaaaaaaaaaaaaaaaaaaaaaaaaaaaaaaaaaaaaaaaaaaaaaaaaaaaaa

SEQ ID NO: 26057 - RNA, 4095 nt, Artificial Sequence
  SARS-CoV-2/Wuhan/WIV05/2019__EPI_ISL_402128 spike protein mRNA gc (1-1273)(D614G_I692V)
gggaaauaagagagaaaagaagaguaagaagaaauauaagaccccggcgccgccaccauguucguguuccugguccuccugccccuggugagcucccagugcgugaaccucaccacccgcacgcagcugccgcccgccuacaccaacagcuucacccggggcgucuacuaccccgacaagguguuccgcuccagcgugcugcacuccacccaggaccucuuccugcccuucuucagcaacgucacgugguuccacgccauccacguguccgggaccaacggcaccaagcgguucgacaacccggugcugcccuucaacgacggggucuacuucgcgagcaccgagaaguccaacaucauccgcggcuggaucuucgggacgacccucgacagcaagacccagucccugcugaucgugaacaacgccaccaacguggucaucaaggugugcgaguuccaguucugcaacgaccccuuccucggcguguacuaccacaagaacaacaagagcuggauggaguccgaguuccgggucuacagcuccgccaacaacugcacguucgaguacgugagccagcccuuccugauggaccuggagggcaagcaggggaacuucaagaaccuccgcgaguucguguucaagaacaucgacggcuacuucaagaucuacuccaagcacaccccgaucaaccugguccgggaccugccccagggguucagcgcccucgagccccugguggaccugcccaucggcaucaacaucacccgcuuccagacccuccuggcccugcaccgguccuaccucacgccgggggacagcagcuccggcuggaccgcgggcgccgccgccuacuacgugggguaccugcagccccgcaccuuccugcucaaguacaacgagaacggcaccaucacggacgcggucgacugcgcccuggacccccugagcgagaccaagugcacccucaaguccuucaccguggagaaggggaucuaccagacgagcaacuuccgggugcagcccaccgaguccaucguccgcuucccgaacaucaccaaccugugccccuucggcgagguguucaacgccacccgguucgccagcgucuacgccuggaaccgcaagcggaucuccaacugcguggcggacuacagcgugcuguacaacuccgccagcuucuccacguucaagugcuacggcgucagccccaccaagcucaacgaccugugcuucaccaacguguacgccgacuccuucgugauccgcggggacgagguccggcagaucgcccccggccagaccgggaagaucgccgacuacaacuacaagcugccggacgacuucacgggcugcgugaucgcguggaacagcaacaaccucgacuccaaggucgggggcaacuacaacuaccuguaccgccuguuccgcaagagcaaccucaagcccuucgagcgggacaucuccaccgagaucuaccaggccggcagcacccccugcaacgggguggagggcuucaacugcuacuucccccugcaguccuacggguuccagccgaccaacggcgugggguaccagcccuaccggguggucgugcugagcuucgagcuccugcacgcccccgccacggugugcggccccaagaaguccaccaaccuggucaagaacaagugcgugaacuucaacuucaacggccucaccgggaccggcgugcugaccgagagcaacaagaaguuccugccguuccagcaguucgggcgcgacaucgccgacacgaccgacgcgguccgcgacccccagacccuggagauccucgacaucacccccugcagcuucggcgggguguccgugaucacgccgggcaccaacaccagcaaccaggucgccgugcuguaccagggcgugaacugcaccgagguccccguggccauccacgccgaccagcugacgcccaccuggcggguguacuccaccggcagcaacgucuuccagacccgcgccgggugccucaucggcgcggagcacgugaacaacuccuacgagugcgacauccccaucggggccggcaucugcgccagcuaccagacgcagaccaacuccccgcggcgcgcccggagcguggcgucccagagcgucaucgccuacaccaugucccugggcgccgagaacagcgucgccuacuccaacaacagcaucgccauccccaccaacuucacgaucuccgugaccaccgagauccugcccgugagcaugaccaagacgagcgucgacugcaccauguacaucugcggggacuccaccgagugcagcaaccuccugcugcaguacggcuccuucugcacccagcucaaccgcgcgcugacggggaucgccguggagcaggacaagaacacccaggagguguucgcccaggucaagcagaucuacaagacgcccccgaucaaggacuucggcggguucaacuucagccagauccugcccgaccccuccaagcccagcaagcgguccuucaucgaggaccuccuguucaacaaggugacccuggccgacgccggcuucaucaagcaguacggcgacugccucggggacaucgcggcccgcgaccugaucugcgcccagaaguucaacggccugaccgugcucccgccccugcugaccgacgagaugaucgcccaguacaccagcgcccuccuggcggggaccaucacguccggcuggaccuucggggccggcgccgcccugcagauccccuucgcgaugcagauggccuaccgguucaacggcaucggggucacccagaacgugcucuacgagaaccagaagcugaucgccaaccaguucaacagcgccaucggcaagauccaggacucccugagcuccaccgccagcgcgcucgggaagcugcaggacguggucaaccagaacgcccaggcccugaacacgcucgugaagcagcuguccagcaacuucggcgccaucuccagcgugcugaacgacauccucucccgccuggacaaggucgaggccgaggugcagaucgaccggcugaucaccgggcgccuccagagccugcagaccuacgugacccagcagcugauccgggcggccgagauccgcgccagcgccaaccucgccgcgaccaagauguccgagugcguccugggccagagcaagcggguggacuucugcggcaagggguaccaccugauguccuucccccagagcgccccgcacggcguggucuuccuccacgugacguacguccccgcccaggagaagaacuucaccaccgcccccgcgaucugccacgacgggaaggcccacuucccccgcgagggcguguucguguccaacgggacccacugguucgucacgcagcggaacuucuacgagccgcagaucaucaccaccgacaacaccuucgugagcggcaacugcgacguggucaucggcaucgugaacaacacgguguacgacccccugcagcccgagcuggacuccuucaaggaggagcucgacaaguacuucaagaaccacaccagccccgacgucgaccugggggacaucuccggcaucaacgccagcguggugaacauccagaaggagaucgaccgccugaacgaggucgccaagaaccucaacgagucccugaucgaccugcaggagcucgggaaguacgagcaguacaucaaguggccgugguacaucuggcugggcuucaucgccggccugaucgcgaucgugauggugaccaucaugcucugcugcaugaccagcugcugcuccugccugaaggggugcugcagcugcggcuccugcugcaaguucgacgaggacgacagcgagcccguccugaagggggugaagcuccacuacacgugauaauaggcuggagccucgguggccuagcuucuugccccuugggccuccccccagccccuccuccccuuccugcacccguacccccguggucuuugaauaaagucugagugggcggcaaaaaaaaaaaaaaaaaaaaaaaaaaaaaaaaaaaaaaaaaaaaaaaaaaaaaaaaaaaaaaaaaaaaaaaaaaaaaaaaaaaaaaaaaaaaaaaaaaaa

SEQ ID NO: 26058 - RNA, 4095 nt, Artificial Sequence
  SARS-CoV-2/Wuhan/WIV05/2019__EPI_ISL_402128 spike protein mRNA gc (1-1273)(D614G_M1229I)
gggaaauaagagagaaaagaagaguaagaagaaauauaagaccccggcgccgccaccauguucguguuccugguccuccugccccuggugagcucccagugcgugaaccucaccacccgcacgcagcugccgcccgccuacaccaacagcuucacccggggcgucuacuaccccgacaagguguuccgcuccagcgugcugcacuccacccaggaccucuuccugcccuucuucagcaacgucacgugguuccacgccauccacguguccgggaccaacggcaccaagcgguucgacaacccggugcugcccuucaacgacggggucuacuucgcgagcaccgagaaguccaacaucauccgcggcuggaucuucgggacgacccucgacagcaagacccagucccugcugaucgugaacaacgccaccaacguggucaucaaggugugcgaguuccaguucugcaacgaccccuuccucggcguguacuaccacaagaacaacaagagcuggauggaguccgaguuccgggucuacagcuccgccaacaacugcacguucgaguacgugagccagcccuuccugauggaccuggagggcaagcaggggaacuucaagaaccuccgcgaguucguguucaagaacaucgacggcuacuucaagaucuacuccaagcacaccccgaucaaccugguccgggaccugccccagggguucagcgcccucgagccccugguggaccugcccaucggcaucaacaucacccgcuuccagacccuccuggcccugcaccgguccuaccucacgccgggggacagcagcuccggcuggaccgcgggcgccgccgccuacuacgugggguaccugcagccccgcaccuuccugcucaaguacaacgagaacggcaccaucacggacgcggucgacugcgcccuggacccccugagcgagaccaagugcacccucaaguccuucaccguggagaaggggaucuaccagacgagcaacuuccgggugcagcccaccgaguccaucguccgcuucccgaacaucaccaaccugugccccuucggcgagguguucaacgccacccgguucgccagcgucuacgccuggaaccgcaagcggaucuccaacugcguggcggacuacagcgugcuguacaacuccgccagcuucuccacguucaagugcuacggcgucagccccaccaagcucaacgaccugugcuucaccaacguguacgccgacuccuucgugauccgcggggacgagguccggcagaucgcccccggccagaccgggaagaucgccgacuacaacuacaagcugccggacgacuucacgggcugcgugaucgcguggaacagcaacaaccucgacuccaaggucgggggcaacuacaacuaccuguaccgccuguuccgcaagagcaaccucaagcccuucgagcgggacaucuccaccgagaucuaccaggccggcagcacccccugcaacgggguggagggcuucaacugcuacuucccccugcaguccuacggguuccagccgaccaacggcgugggguaccagcccuaccggguggucgugcugagcuucgagcuccugcacgcccccgccacggugugcggccccaagaaguccaccaaccuggucaagaacaagugcgugaacuucaacuucaacggccucaccgggaccggcgugcugaccgagagcaacaagaaguuccugccguuccagcaguucgggcgcgacaucgccgacacgaccgacgcgguccgcgacccccagacccuggagauccucgacaucacccccugcagcuucggcgggguguccgugaucacgccgggcaccaacaccagcaaccaggucgccgugcuguaccagggcgugaacugcaccgagguccccguggccauccacgccgaccagcugacgcccaccuggcggguguacuccaccggcagcaacgucuuccagacccgcgccgggugccucaucggcgcggagcacgugaacaacuccuacgagugcgacauccccaucggggccggcaucugcgccagcuaccagacgcagaccaacuccccgcggcgcgcccggagcguggcgucccagagcaucaucgccuacaccaugucccugggcgccgagaacagcgucgccuacuccaacaacagcaucgccauccccaccaacuucacgaucuccgugaccaccgagauccugcccgugagcaugaccaagacgagcgucgacugcaccauguacaucugcggggacuccaccgagugcagcaaccuccugcugcaguacggcuccuucugcacccagcucaaccgcgcgcugacggggaucgccguggagcaggacaagaacacccaggagguguucgcccaggucaagcagaucuacaagacgcccccgaucaaggacuucggcggguucaacuucagccagauccugcccgaccccuccaagcccagcaagcgguccuucaucgaggaccuccuguucaacaaggugacccuggccgacgccggcuucaucaagcaguacggcgacugccucggggacaucgcggcccgcgaccugaucugcgcccagaaguucaacggccugaccgugcucccgccccugcugaccgacgagaugaucgcccaguacaccagcgcccuccuggcggggaccaucacguccggcuggaccuucggggccggcgccgcccugcagauccccuucgcgaugcagauggccuaccgguucaacggcaucggggucacccagaacgugcucuacgagaaccagaagcugaucgccaaccaguucaacagcgccaucggcaagauccaggacucccugagcuccaccgccagcgcgcucgggaagcugcaggacguggucaaccagaacgcccaggcccugaacacgcucgugaagcagcuguccagcaacuucggcgccaucuccagcgugcugaacgacauccucucccgccuggacaaggucgaggccgaggugcagaucgaccggcugaucaccgggcgccuccagagccugcagaccuacgugacccagcagcugauccgggcggccgagauccgcgccagcgccaaccucgccgcgaccaagauguccgagugcguccugggccagagcaagcggguggacuucugcggcaagggguaccaccugauguccuucccccagagcgccccgcacggcguggucuuccuccacgugacguacguccccgcccaggagaagaacuucaccaccgcccccgcgaucugccacgacgggaaggcccacuucccccgcgagggcguguucguguccaacgggacccacugguucgucacgcagcggaacuucuacgagccgcagaucaucaccaccgacaacaccuucgugagcggcaacugcgacguggucaucggcaucgugaacaacacgguguacgacccccugcagcccgagcuggacuccuucaaggaggagcucgacaaguacuucaagaaccacaccagccccgacgucgaccugggggacaucuccggcaucaacgccagcguggugaacauccagaaggagaucgaccgccugaacgaggucgccaagaaccucaacgagucccugaucgaccugcaggagcucgggaaguacgagcaguacaucaaguggccgugguacaucuggcugggcuucaucgccggccugaucgcgaucgugaucgugaccaucaugcucugcugcaugaccagcugcugcuccugccugaaggggugcugcagcugcggcuccugcugcaaguucgacgaggacgacagcgagcccguccugaagggggugaagcuccacuacacgugauaauaggcuggagccucgguggccuagcuucuugccccuugggccuccccccagccccuccuccccuuccugcacccguacccccguggucuuugaauaaagucugagugggcggcaaaaaaaaaaaaaaaaaaaaaaaaaaaaaaaaaaaaaaaaaaaaaaaaaaaaaaaaaaaaaaaaaaaaaaaaaaaaaaaaaaaaaaaaaaaaaaaaaaaa

SEQ ID NO: 26059 - RNA, 4089 nt, Artificial Sequence
  SARS-CoV-2/Wuhan/WIV05/2019__EPI_ISL_402128 spike protein mRNA gc (1-1273)(H69del_V70del_A222V_Y453F_S477N_D614G_I692V)
gggaaauaagagagaaaagaagaguaagaagaaauauaagaccccggcgccgccaccauguucguguuccugguccuccugccccuggugagcucccagugcgugaaccucaccacccgcacgcagcugccgcccgccuacaccaacagcuucacccggggcgucuacuaccccgacaagguguuccgcuccagcgugcugcacuccacccaggaccucuuccugcccuucuucagcaacgucacgugguuccacgccaucuccgggaccaacggcaccaagcgguucgacaacccggugcugcccuucaacgacggggucuacuucgcgagcaccgagaaguccaacaucauccgcggcuggaucuucgggacgacccucgacagcaagacccagucccugcugaucgugaacaacgccaccaacguggucaucaaggugugcgaguuccaguucugcaacgaccccuuccucggcguguacuaccacaagaacaacaagagcuggauggaguccgaguuccgggucuacagcuccgccaacaacugcacguucgaguacgugagccagcccuuccugauggaccuggagggcaagcaggggaacuucaagaaccuccgcgaguucguguucaagaacaucgacggcuacuucaagaucuacuccaagcacaccccgaucaaccugguccgggaccugccccagggguucagcguccucgagccccugguggaccugcccaucggcaucaacaucacccgcuuccagacccuccuggcccugcaccgguccuaccucacgccgggggacagcagcuccggcuggaccgcgggcgccgccgccuacuacgugggguaccugcagccccgcaccuuccugcucaaguacaacgagaacggcaccaucacggacgcggucgacugcgcccuggacccccugagcgagaccaagugcacccucaaguccuucaccguggagaaggggaucuaccagacgagcaacuuccgggugcagcccaccgaguccaucguccgcuucccgaacaucaccaaccugugccccuucggcgagguguucaacgccacccgguucgccagcgucuacgccuggaaccgcaagcggaucuccaacugcguggcggacuacagcgugcuguacaacuccgccagcuucuccacguucaagugcuacggcgucagccccaccaagcucaacgaccugugcuucaccaacguguacgccgacuccuucgugauccgcggggacgagguccggcagaucgcccccggccagaccgggaagaucgccgacuacaacuacaagcugccggacgacuucacgggcugcgugaucgcguggaacagcaacaaccucgacuccaaggucgggggcaacuacaacuaccuguuccgccuguuccgcaagagcaaccucaagcccuucgagcgggacaucuccaccgagaucuaccaggccggcaacacccccugcaacgggguggagggcuucaacugcuacuucccccugcaguccuacggguuccagccgaccaacggcgugggguaccagcccuaccggguggucgugcugagcuucgagcuccugcacgcccccgccacggugugcggccccaagaaguccaccaaccuggucaagaacaagugcgugaacuucaacuucaacggccucaccgggaccggcgugcugaccgagagcaacaagaaguuccugccguuccagcaguucgggcgcgacaucgccgacacgaccgacgcgguccgcgacccccagacccuggagauccucgacaucacccccugcagcuucggcgggguguccgugaucacgccgggcaccaacaccagcaaccaggucgccgugcuguaccagggcgugaacugcaccgagguccccguggccauccacgccgaccagcugacgcccaccuggcggguguacuccaccggcagcaacgucuuccagacccgcgccgggugccucaucggcgcggagcacgugaacaacuccuacgagugcgacauccccaucggggccggcaucugcgccagcuaccagacgcagaccaacuccccgcggcgcgcccggagcguggcgucccagagcgucaucgccuacaccaugucccugggcgccgagaacagcgucgccuacuccaacaacagcaucgccauccccaccaacuucacgaucuccgugaccaccgagauccugcccgugagcaugaccaagacgagcgucgacugcaccauguacaucugcggggacuccaccgagugcagcaaccuccugcugcaguacggcuccuucugcacccagcucaaccgcgcgcugacggggaucgccguggagcaggacaagaacacccaggagguguucgcccaggucaagcagaucuacaagacgcccccgaucaaggacuucggcggguucaacuucagccagauccugcccgaccccuccaagcccagcaagcgguccuucaucgaggaccuccuguucaacaaggugacccuggccgacgccggcuucaucaagcaguacggcgacugccucggggacaucgcggcccgcgaccugaucugcgcccagaaguucaacggccugaccgugcucccgccccugcugaccgacgagaugaucgcccaguacaccagcgcccuccuggcggggaccaucacguccggcuggaccuucggggccggcgccgcccugcagauccccuucgcgaugcagauggccuaccgguucaacggcaucggggucacccagaacgugcucuacgagaaccagaagcugaucgccaaccaguucaacagcgccaucggcaagauccaggacucccugagcuccaccgccagcgcgcucgggaagcugcaggacguggucaaccagaacgcccaggcccugaacacgcucgugaagcagcuguccagcaacuucggcgccaucuccagcgugcugaacgacauccucucccgccuggacaaggucgaggccgaggugcagaucgaccggcugaucaccgggcgccuccagagccugcagaccuacgugacccagcagcugauccgggcggccgagauccgcgccagcgccaaccucgccgcgaccaagauguccgagugcguccugggccagagcaagcggguggacuucugcggcaagggguaccaccugauguccuucccccagagcgccccgcacggcguggucuuccuccacgugacguacguccccgcccaggagaagaacuucaccaccgcccccgcgaucugccacgacgggaaggcccacuucccccgcgagggcguguucguguccaacgggacccacugguucgucacgcagcggaacuucuacgagccgcagaucaucaccaccgacaacaccuucgugagcggcaacugcgacguggucaucggcaucgugaacaacacgguguacgacccccugcagcccgagcuggacuccuucaaggaggagcucgacaaguacuucaagaaccacaccagccccgacgucgaccugggggacaucuccggcaucaacgccagcguggugaacauccagaaggagaucgaccgccugaacgaggucgccaagaaccucaacgagucccugaucgaccugcaggagcucgggaaguacgagcaguacaucaaguggccgugguacaucuggcugggcuucaucgccggccugaucgcgaucgugauggugaccaucaugcucugcugcaugaccagcugcugcuccugccugaaggggugcugcagcugcggcuccugcugcaaguucgacgaggacgacagcgagcccguccugaagggggugaagcuccacuacacgugauaauaggcuggagccucgguggccuagcuucuugccccuugggccuccccccagccccuccuccccuuccugcacccguacccccguggucuuugaauaaagucugagugggcggcaaaaaaaaaaaaaaaaaaaaaaaaaaaaaaaaaaaaaaaaaaaaaaaaaaaaaaaaaaaaaaaaaaaaaaaaaaaaaaaaaaaaaaaaaaaaaaaaaaaa

SEQ ID NO: 26060 - RNA, 4089 nt, Artificial Sequence
  SARS-CoV-2/Wuhan/WIV05/2019__EPI_ISL_402128 spike protein mRNA gc (1-1273)(H69del_V70del_Y453F_D614G_I692V_M1229I)
gggaaauaagagagaaaagaagaguaagaagaaauauaagaccccggcgccgccaccauguucguguuccugguccuccugccccuggugagcucccagugcgugaaccucaccacccgcacgcagcugccgcccgccuacaccaacagcuucacccggggcgucuacuaccccgacaagguguuccgcuccagcgugcugcacuccacccaggaccucuuccugcccuucuucagcaacgucacgugguuccacgccaucuccgggaccaacggcaccaagcgguucgacaacccggugcugcccuucaacgacggggucuacuucgcgagcaccgagaaguccaacaucauccgcggcuggaucuucgggacgacccucgacagcaagacccagucccugcugaucgugaacaacgccaccaacguggucaucaaggugugcgaguuccaguucugcaacgaccccuuccucggcguguacuaccacaagaacaacaagagcuggauggaguccgaguuccgggucuacagcuccgccaacaacugcacguucgaguacgugagccagcccuuccugauggaccuggagggcaagcaggggaacuucaagaaccuccgcgaguucguguucaagaacaucgacggcuacuucaagaucuacuccaagcacaccccgaucaaccugguccgggaccugccccagggguucagcgcccucgagccccugguggaccugcccaucggcaucaacaucacccgcuuccagacccuccuggcccugcaccgguccuaccucacgccgggggacagcagcuccggcuggaccgcgggcgccgccgccuacuacgugggguaccugcagccccgcaccuuccugcucaaguacaacgagaacggcaccaucacggacgcggucgacugcgcccuggacccccugagcgagaccaagugcacccucaaguccuucaccguggagaaggggaucuaccagacgagcaacuuccgggugcagcccaccgaguccaucguccgcuucccgaacaucaccaaccugugccccuucggcgagguguucaacgccacccgguucgccagcgucuacgccuggaaccgcaagcggaucuccaacugcguggcggacuacagcgugcuguacaacuccgccagcuucuccacguucaagugcuacggcgucagccccaccaagcucaacgaccugugcuucaccaacguguacgccgacuccuucgugauccgcggggacgagguccggcagaucgcccccggccagaccgggaagaucgccgacuacaacuacaagcugccggacgacuucacgggcugcgugaucgcguggaacagcaacaaccucgacuccaaggucgggggcaacuacaacuaccuguuccgccuguuccgcaagagcaaccucaagcccuucgagcgggacaucuccaccgagaucuaccaggccggcagcacccccugcaacgggguggagggcuucaacugcuacuucccccugcaguccuacggguuccagccgaccaacggcgugggguaccagcccuaccggguggucgugcugagcuucgagcuccugcacgcccccgccacggugugcggccccaagaaguccaccaaccuggucaagaacaagugcgugaacuucaacuucaacggccucaccgggaccggcgugcugaccgagagcaacaagaaguuccugccguuccagcaguucgggcgcgacaucgccgacacgaccgacgcgguccgcgacccccagacccuggagauccucgacaucacccccugcagcuucggcgggguguccgugaucacgccgggcaccaacaccagcaaccaggucgccgugcuguaccagggcgugaacugcaccgagguccccguggccauccacgccgaccagcugacgcccaccuggcggguguacuccaccggcagcaacgucuuccagacccgcgccgggugccucaucggcgcggagcacgugaacaacuccuacgagugcgacauccccaucggggccggcaucugcgccagcuaccagacgcagaccaacuccccgcggcgcgcccggagcguggcgucccagagcgugaucgccuacaccaugucccugggcgccgagaacagcgucgccuacuccaacaacagcaucgccauccccaccaacuucacgaucuccgugaccaccgagauccugcccgugagcaugaccaagacgagcgucgacugcaccauguacaucugcggggacuccaccgagugcagcaaccuccugcugcaguacggcuccuucugcacccagcucaaccgcgcgcugacggggaucgccguggagcaggacaagaacacccaggagguguucgcccaggucaagcagaucuacaagacgcccccgaucaaggacuucggcggguucaacuucagccagauccugcccgaccccuccaagcccagcaagcgguccuucaucgaggaccuccuguucaacaaggugacccuggccgacgccggcuucaucaagcaguacggcgacugccucggggacaucgcggcccgcgaccugaucugcgcccagaaguucaacggccugaccgugcucccgccccugcugaccgacgagaugaucgcccaguacaccagcgcccuccuggcggggaccaucacguccggcuggaccuucggggccggcgccgcccugcagauccccuucgcgaugcagauggccuaccgguucaacggcaucggggucacccagaacgugcucuacgagaaccagaagcugaucgccaaccaguucaacagcgccaucggcaagauccaggacucccugagcuccaccgccagcgcgcucgggaagcugcaggacguggucaaccagaacgcccaggcccugaacacgcucgugaagcagcuguccagcaacuucggcgccaucuccagcgugcugaacgacauccucucccgccuggacaaggucgaggccgaggugcagaucgaccggcugaucaccgggcgccuccagagccugcagaccuacgugacccagcagcugauccgggcggccgagauccgcgccagcgccaaccucgccgcgaccaagauguccgagugcguccugggccagagcaagcggguggacuucugcggcaagggguaccaccugauguccuucccccagagcgccccgcacggcguggucuuccuccacgugacguacguccccgcccaggagaagaacuucaccaccgcccccgcgaucugccacgacgggaaggcccacuucccccgcgagggcguguucguguccaacgggacccacugguucgucacgcagcggaacuucuacgagccgcagaucaucaccaccgacaacaccuucgugagcggcaacugcgacguggucaucggcaucgugaacaacacgguguacgacccccugcagcccgagcuggacuccuucaaggaggagcucgacaaguacuucaagaaccacaccagccccgacgucgaccugggggacaucuccggcaucaacgccagcguggugaacauccagaaggagaucgaccgccugaacgaggucgccaagaaccucaacgagucccugaucgaccugcaggagcucgggaaguacgagcaguacaucaaguggccgugguacaucuggcugggcuucaucgccggccugaucgcgaucgugaucgugaccaucaugcucugcugcaugaccagcugcugcuccugccugaaggggugcugcagcugcggcuccugcugcaaguucgacgaggacgacagcgagcccguccugaagggggugaagcuccacuacacgugauaauaggcuggagccucgguggccuagcuucuugccccuugggccuccccccagccccuccuccccuuccugcacccguacccccguggucuuugaauaaagucugagugggcggcaaaaaaaaaaaaaaaaaaaaaaaaaaaaaaaaaaaaaaaaaaaaaaaaaaaaaaaaaaaaaaaaaaaaaaaaaaaaaaaaaaaaaaaaaaaaaaaaaaaa

SEQ ID NO: 26061 - RNA, 4086 nt, Artificial Sequence
  SARS-CoV-2/Wuhan/WIV05/2019__EPI_ISL_402128 spike protein mRNA gc (1-1273)(H69del_V70del_Y144del_N501Y_A570D_D614G_P681H_T716I_S982 A_D1118H)
gggaaauaagagagaaaagaagaguaagaagaaauauaagaccccggcgccgccaccauguucguguuccugguccuccugccccuggugagcucccagugcgugaaccucaccacccgcacgcagcugccgcccgccuacaccaacagcuucacccggggcgucuacuaccccgacaagguguuccgcuccagcgugcugcacuccacccaggaccucuuccugcccuucuucagcaacgucacgugguuccacgccaucuccgggaccaacggcaccaagcgguucgacaacccggugcugcccuucaacgacggggucuacuucgcgagcaccgagaaguccaacaucauccgcggcuggaucuucgggacgacccucgacagcaagacccagucccugcugaucgugaacaacgccaccaacguggucaucaaggugugcgaguuccaguucugcaacgaccccuuccucggcguguaccacaagaacaacaagagcuggauggaguccgaguuccgggucuacagcuccgccaacaacugcacguucgaguacgugagccagcccuuccugauggaccuggagggcaagcaggggaacuucaagaaccuccgcgaguucguguucaagaacaucgacggcuacuucaagaucuacuccaagcacaccccgaucaaccugguccgggaccugccccagggguucagcgcccucgagccccugguggaccugcccaucggcaucaacaucacccgcuuccagacccuccuggcccugcaccgguccuaccucacgccgggggacagcagcuccggcuggaccgcgggcgccgccgccuacuacgugggguaccugcagccccgcaccuuccugcucaaguacaacgagaacggcaccaucacggacgcggucgacugcgcccuggacccccugagcgagaccaagugcacccucaaguccuucaccguggagaaggggaucuaccagacgagcaacuuccgggugcagcccaccgaguccaucguccgcuucccgaacaucaccaaccugugccccuucggcgagguguucaacgccacccgguucgccagcgucuacgccuggaaccgcaagcggaucuccaacugcguggcggacuacagcgugcuguacaacuccgccagcuucuccacguucaagugcuacggcgucagccccaccaagcucaacgaccugugcuucaccaacguguacgccgacuccuucgugauccgcggggacgagguccggcagaucgcccccggccagaccgggaagaucgccgacuacaacuacaagcugccggacgacuucacgggcugcgugaucgcguggaacagcaacaaccucgacuccaaggucgggggcaacuacaacuaccuguaccgccuguuccgcaagagcaaccucaagcccuucgagcgggacaucuccaccgagaucuaccaggccggcagcacccccugcaacgggguggagggcuucaacugcuacuucccccugcaguccuacggguuccagccgaccuacggcgugggguaccagcccuaccggguggucgugcugagcuucgagcuccugcacgcccccgccacggugugcggccccaagaaguccaccaaccuggucaagaacaagugcgugaacuucaacuucaacggccucaccgggaccggcgugcugaccgagagcaacaagaaguuccugccguuccagcaguucgggcgcgacaucgacgacacgaccgacgcgguccgcgacccccagacccuggagauccucgacaucacccccugcagcuucggcgggguguccgugaucacgccgggcaccaacaccagcaaccaggucgccgugcuguaccagggcgugaacugcaccgagguccccguggccauccacgccgaccagcugacgcccaccuggcggguguacuccaccggcagcaacgucuuccagacccgcgccgggugccucaucggcgcggagcacgugaacaacuccuacgagugcgacauccccaucggggccggcaucugcgccagcuaccagacgcagaccaacucccaccggcgcgcccggagcguggcgucccagagcaucaucgccuacaccaugucccugggcgccgagaacagcgucgccuacuccaacaacagcaucgccauccccaucaacuucacgaucuccgugaccaccgagauccugcccgugagcaugaccaagacgagcgucgacugcaccauguacaucugcggggacuccaccgagugcagcaaccuccugcugcaguacggcuccuucugcacccagcucaaccgcgcgcugacggggaucgccguggagcaggacaagaacacccaggagguguucgcccaggucaagcagaucuacaagacgcccccgaucaaggacuucggcggguucaacuucagccagauccugcccgaccccuccaagcccagcaagcgguccuucaucgaggaccuccuguucaacaaggugacccuggccgacgccggcuucaucaagcaguacggcgacugccucggggacaucgcggcccgcgaccugaucugcgcccagaaguucaacggccugaccgugcucccgccccugcugaccgacgagaugaucgcccaguacaccagcgcccuccuggcggggaccaucacguccggcuggaccuucggggccggcgccgcccugcagauccccuucgcgaugcagauggccuaccgguucaacggcaucggggucacccagaacgugcucuacgagaaccagaagcugaucgccaaccaguucaacagcgccaucggcaagauccaggacucccugagcuccaccgccagcgcgcucgggaagcugcaggacguggucaaccagaacgcccaggcccugaacacgcucgugaagcagcuguccagcaacuucggcgccaucuccagcgugcugaacgacauccucgcccgccuggacaaggucgaggccgaggugcagaucgaccggcugaucaccgggcgccuccagagccugcagaccuacgugacccagcagcugauccgggcggccgagauccgcgccagcgccaaccucgccgcgaccaagauguccgagugcguccugggccagagcaagcggguggacuucugcggcaagggguaccaccugauguccuucccccagagcgccccgcacggcguggucuuccuccacgugacguacguccccgcccaggagaagaacuucaccaccgcccccgcgaucugccacgacgggaaggcccacuucccccgcgagggcguguucguguccaacgggacccacugguucgucacgcagcggaacuucuacgagccgcagaucaucaccacccacaacaccuucgugagcggcaacugcgacguggucaucggcaucgugaacaacacgguguacgacccccugcagcccgagcuggacuccuucaaggaggagcucgacaaguacuucaagaaccacaccagccccgacgucgaccugggggacaucuccggcaucaacgccagcguggugaacauccagaaggagaucgaccgccugaacgaggucgccaagaaccucaacgagucccugaucgaccugcaggagcucgggaaguacgagcaguacaucaaguggccgugguacaucuggcugggcuucaucgccggccugaucgcgaucgugauggugaccaucaugcucugcugcaugaccagcugcugcuccugccugaaggggugcugcagcugcggcuccugcugcaaguucgacgaggacgacagcgagcccguccugaagggggugaagcuccacuacacgugauaauaggcuggagccucgguggccuagcuucuugccccuugggccuccccccagccccuccuccccuuccugcacccguacccccguggucuuugaauaaagucugagugggcggcaaaaaaaaaaaaaaaaaaaaaaaaaaaaaaaaaaaaaaaaaaaaaaaaaaaaaaaaaaaaaaaaaaaaaaaaaaaaaaaaaaaaaaaaaaaaaaaaaaaa

SEQ ID NO: 26062 - RNA, 4095 nt, Artificial Sequence
  SARS-CoV-2/Wuhan/WIV05/2019__EPI_ISL_402128 spike protein mRNA gc (1-1273)(K417N_E484K_N501Y_D614G)
gggaaauaagagagaaaagaagaguaagaagaaauauaagaccccggcgccgccaccauguucguguuccugguccuccugccccuggugagcucccagugcgugaaccucaccacccgcacgcagcugccgcccgccuacaccaacagcuucacccggggcgucuacuaccccgacaagguguuccgcuccagcgugcugcacuccacccaggaccucuuccugcccuucuucagcaacgucacgugguuccacgccauccacguguccgggaccaacggcaccaagcgguucgacaacccggugcugcccuucaacgacggggucuacuucgcgagcaccgagaaguccaacaucauccgcggcuggaucuucgggacgacccucgacagcaagacccagucccugcugaucgugaacaacgccaccaacguggucaucaaggugugcgaguuccaguucugcaacgaccccuuccucggcguguacuaccacaagaacaacaagagcuggauggaguccgaguuccgggucuacagcuccgccaacaacugcacguucgaguacgugagccagcccuuccugauggaccuggagggcaagcaggggaacuucaagaaccuccgcgaguucguguucaagaacaucgacggcuacuucaagaucuacuccaagcacaccccgaucaaccugguccgggaccugccccagggguucagcgcccucgagccccugguggaccugcccaucggcaucaacaucacccgcuuccagacccuccuggcccugcaccgguccuaccucacgccgggggacagcagcuccggcuggaccgcgggcgccgccgccuacuacgugggguaccugcagccccgcaccuuccugcucaaguacaacgagaacggcaccaucacggacgcggucgacugcgcccuggacccccugagcgagaccaagugcacccucaaguccuucaccguggagaaggggaucuaccagacgagcaacuuccgggugcagcccaccgaguccaucguccgcuucccgaacaucaccaaccugugccccuucggcgagguguucaacgccacccgguucgccagcgucuacgccuggaaccgcaagcggaucuccaacugcguggcggacuacagcgugcuguacaacuccgccagcuucuccacguucaagugcuacggcgucagccccaccaagcucaacgaccugugcuucaccaacguguacgccgacuccuucgugauccgcggggacgagguccggcagaucgcccccggccagaccgggaacaucgccgacuacaacuacaagcugccggacgacuucacgggcugcgugaucgcguggaacagcaacaaccucgacuccaaggucgggggcaacuacaacuaccuguaccgccuguuccgcaagagcaaccucaagcccuucgagcgggacaucuccaccgagaucuaccaggccggcagcacccccugcaacggggugaagggcuucaacugcuacuucccccugcaguccuacggguuccagccgaccuacggcgugggguaccagcccuaccggguggucgugcugagcuucgagcuccugcacgcccccgccacggugugcggccccaagaaguccaccaaccuggucaagaacaagugcgugaacuucaacuucaacggccucaccgggaccggcgugcugaccgagagcaacaagaaguuccugccguuccagcaguucgggcgcgacaucgccgacacgaccgacgcgguccgcgacccccagacccuggagauccucgacaucacccccugcagcuucggcgggguguccgugaucacgccgggcaccaacaccagcaaccaggucgccgugcuguaccagggcgugaacugcaccgagguccccguggccauccacgccgaccagcugacgcccaccuggcggguguacuccaccggcagcaacgucuuccagacccgcgccgggugccucaucggcgcggagcacgugaacaacuccuacgagugcgacauccccaucggggccggcaucugcgccagcuaccagacgcagaccaacuccccgcggcgcgcccggagcguggcgucccagagcaucaucgccuacaccaugucccugggcgccgagaacagcgucgccuacuccaacaacagcaucgccauccccaccaacuucacgaucuccgugaccaccgagauccugcccgugagcaugaccaagacgagcgucgacugcaccauguacaucugcggggacuccaccgagugcagcaaccuccugcugcaguacggcuccuucugcacccagcucaaccgcgcgcugacggggaucgccguggagcaggacaagaacacccaggagguguucgcccaggucaagcagaucuacaagacgcccccgaucaaggacuucggcggguucaacuucagccagauccugcccgaccccuccaagcccagcaagcgguccuucaucgaggaccuccuguucaacaaggugacccuggccgacgccggcuucaucaagcaguacggcgacugccucggggacaucgcggcccgcgaccugaucugcgcccagaaguucaacggccugaccgugcucccgccccugcugaccgacgagaugaucgcccaguacaccagcgcccuccuggcggggaccaucacguccggcuggaccuucggggccggcgccgcccugcagauccccuucgcgaugcagauggccuaccgguucaacggcaucggggucacccagaacgugcucuacgagaaccagaagcugaucgccaaccaguucaacagcgccaucggcaagauccaggacucccugagcuccaccgccagcgcgcucgggaagcugcaggacguggucaaccagaacgcccaggcccugaacacgcucgugaagcagcuguccagcaacuucggcgccaucuccagcgugcugaacgacauccucucccgccuggacaaggucgaggccgaggugcagaucgaccggcugaucaccgggcgccuccagagccugcagaccuacgugacccagcagcugauccgggcggccgagauccgcgccagcgccaaccucgccgcgaccaagauguccgagugcguccugggccagagcaagcggguggacuucugcggcaagggguaccaccugauguccuucccccagagcgccccgcacggcguggucuuccuccacgugacguacguccccgcccaggagaagaacuucaccaccgcccccgcgaucugccacgacgggaaggcccacuucccccgcgagggcguguucguguccaacgggacccacugguucgucacgcagcggaacuucuacgagccgcagaucaucaccaccgacaacaccuucgugagcggcaacugcgacguggucaucggcaucgugaacaacacgguguacgacccccugcagcccgagcuggacuccuucaaggaggagcucgacaaguacuucaagaaccacaccagccccgacgucgaccugggggacaucuccggcaucaacgccagcguggugaacauccagaaggagaucgaccgccugaacgaggucgccaagaaccucaacgagucccugaucgaccugcaggagcucgggaaguacgagcaguacaucaaguggccgugguacaucuggcugggcuucaucgccggccugaucgcgaucgugauggugaccaucaugcucugcugcaugaccagcugcugcuccugccugaaggggugcugcagcugcggcuccugcugcaaguucgacgaggacgacagcgagcccguccugaagggggugaagcuccacuacacgugauaauaggcuggagccucgguggccuagcuucuugccccuugggccuccccccagccccuccuccccuuccugcacccguacccccguggucuuugaauaaagucugagugggcggcaaaaaaaaaaaaaaaaaaaaaaaaaaaaaaaaaaaaaaaaaaaaaaaaaaaaaaaaaaaaaaaaaaaaaaaaaaaaaaaaaaaaaaaaaaaaaaaaaaaa

SEQ ID NO: 26063 - RNA, 4086 nt, Artificial Sequence
  SARS-CoV-2/Wuhan/WIV05/2019__EPI_ISL_402128 spike protein mRNA gc (1-1273)(L18F_D80A_D215G_L242del_A243del_L244del_R246I_K417N_E484 K_N501Y_D614G_A701V)
gggaaauaagagagaaaagaagaguaagaagaaauauaagaccccggcgccgccaccauguucguguuccugguccuccugccccuggugagcucccagugcgugaacuucaccacccgcacgcagcugccgcccgccuacaccaacagcuucacccggggcgucuacuaccccgacaagguguuccgcuccagcgugcugcacuccacccaggaccucuuccugcccuucuucagcaacgucacgugguuccacgccauccacguguccgggaccaacggcaccaagcgguucgccaacccggugcugcccuucaacgacggggucuacuucgcgagcaccgagaaguccaacaucauccgcggcuggaucuucgggacgacccucgacagcaagacccagucccugcugaucgugaacaacgccaccaacguggucaucaaggugugcgaguuccaguucugcaacgaccccuuccucggcguguacuaccacaagaacaacaagagcuggauggaguccgaguuccgggucuacagcuccgccaacaacugcacguucgaguacgugagccagcccuuccugauggaccuggagggcaagcaggggaacuucaagaaccuccgcgaguucguguucaagaacaucgacggcuacuucaagaucuacuccaagcacaccccgaucaaccugguccggggccugccccagggguucagcgcccucgagccccugguggaccugcccaucggcaucaacaucacccgcuuccagacccuccacaucuccuaccucacgccgggggacagcagcuccggcuggaccgcgggcgccgccgccuacuacgugggguaccugcagccccgcaccuuccugcucaaguacaacgagaacggcaccaucacggacgcggucgacugcgcccuggacccccugagcgagaccaagugcacccucaaguccuucaccguggagaaggggaucuaccagacgagcaacuuccgggugcagcccaccgaguccaucguccgcuucccgaacaucaccaaccugugccccuucggcgagguguucaacgccacccgguucgccagcgucuacgccuggaaccgcaagcggaucuccaacugcguggcggacuacagcgugcuguacaacuccgccagcuucuccacguucaagugcuacggcgucagccccaccaagcucaacgaccugugcuucaccaacguguacgccgacuccuucgugauccgcggggacgagguccggcagaucgcccccggccagaccgggaacaucgccgacuacaacuacaagcugccggacgacuucacgggcugcgugaucgcguggaacagcaacaaccucgacuccaaggucgggggcaacuacaacuaccuguaccgccuguuccgcaagagcaaccucaagcccuucgagcgggacaucuccaccgagaucuaccaggccggcagcacccccugcaacggggugaagggcuucaacugcuacuucccccugcaguccuacggguuccagccgaccuacggcgugggguaccagcccuaccggguggucgugcugagcuucgagcuccugcacgcccccgccacggugugcggccccaagaaguccaccaaccuggucaagaacaagugcgugaacuucaacuucaacggccucaccgggaccggcgugcugaccgagagcaacaagaaguuccugccguuccagcaguucgggcgcgacaucgccgacacgaccgacgcgguccgcgacccccagacccuggagauccucgacaucacccccugcagcuucggcgggguguccgugaucacgccgggcaccaacaccagcaaccaggucgccgugcuguaccagggcgugaacugcaccgagguccccguggccauccacgccgaccagcugacgcccaccuggcggguguacuccaccggcagcaacgucuuccagacccgcgccgggugccucaucggcgcggagcacgugaacaacuccuacgagugcgacauccccaucggggccggcaucugcgccagcuaccagacgcagaccaacuccccgcggcgcgcccggagcguggcgucccagagcaucaucgccuacaccaugucccugggcguggagaacagcgucgccuacuccaacaacagcaucgccauccccaccaacuucacgaucuccgugaccaccgagauccugcccgugagcaugaccaagacgagcgucgacugcaccauguacaucugcggggacuccaccgagugcagcaaccuccugcugcaguacggcuccuucugcacccagcucaaccgcgcgcugacggggaucgccguggagcaggacaagaacacccaggagguguucgcccaggucaagcagaucuacaagacgcccccgaucaaggacuucggcggguucaacuucagccagauccugcccgaccccuccaagcccagcaagcgguccuucaucgaggaccuccuguucaacaaggugacccuggccgacgccggcuucaucaagcaguacggcgacugccucggggacaucgcggcccgcgaccugaucugcgcccagaaguucaacggccugaccgugcucccgccccugcugaccgacgagaugaucgcccaguacaccagcgcccuccuggcggggaccaucacguccggcuggaccuucggggccggcgccgcccugcagauccccuucgcgaugcagauggccuaccgguucaacggcaucggggucacccagaacgugcucuacgagaaccagaagcugaucgccaaccaguucaacagcgccaucggcaagauccaggacucccugagcuccaccgccagcgcgcucgggaagcugcaggacguggucaaccagaacgcccaggcccugaacacgcucgugaagcagcuguccagcaacuucggcgccaucuccagcgugcugaacgacauccucucccgccuggacaaggucgaggccgaggugcagaucgaccggcugaucaccgggcgccuccagagccugcagaccuacgugacccagcagcugauccgggcggccgagauccgcgccagcgccaaccucgccgcgaccaagauguccgagugcguccugggccagagcaagcggguggacuucugcggcaagggguaccaccugauguccuucccccagagcgccccgcacggcguggucuuccuccacgugacguacguccccgcccaggagaagaacuucaccaccgcccccgcgaucugccacgacgggaaggcccacuucccccgcgagggcguguucguguccaacgggacccacugguucgucacgcagcggaacuucuacgagccgcagaucaucaccaccgacaacaccuucgugagcggcaacugcgacguggucaucggcaucgugaacaacacgguguacgacccccugcagcccgagcuggacuccuucaaggaggagcucgacaaguacuucaagaaccacaccagccccgacgucgaccugggggacaucuccggcaucaacgccagcguggugaacauccagaaggagaucgaccgccugaacgaggucgccaagaaccucaacgagucccugaucgaccugcaggagcucgggaaguacgagcaguacaucaaguggccgugguacaucuggcugggcuucaucgccggccugaucgcgaucgugauggugaccaucaugcucugcugcaugaccagcugcugcuccugccugaaggggugcugcagcugcggcuccugcugcaaguucgacgaggacgacagcgagcccguccugaagggggugaagcuccacuacacgugauaauaggcuggagccucgguggccuagcuucuugccccuugggccuccccccagccccuccuccccuuccugcacccguacccccguggucuuugaauaaagucugagugggcggcaaaaaaaaaaaaaaaaaaaaaaaaaaaaaaaaaaaaaaaaaaaaaaaaaaaaaaaaaaaaaaaaaaaaaaaaaaaaaaaaaaaaaaaaaaaaaaaaaaaa

SEQ ID NO: 26064 - RNA, 4095 nt, Artificial Sequence
  SARS-CoV-2/Wuhan/WIV05/2019__EPI_ISL_402128 spike protein mRNA gc (1-1273)(E484K_D614G)
gggaaauaagagagaaaagaagaguaagaagaaauauaagaccccggcgccgccaccauguucguguuccugguccuccugccccuggugagcucccagugcgugaaccucaccacccgcacgcagcugccgcccgccuacaccaacagcuucacccggggcgucuacuaccccgacaagguguuccgcuccagcgugcugcacuccacccaggaccucuuccugcccuucuucagcaacgucacgugguuccacgccauccacguguccgggaccaacggcaccaagcgguucgacaacccggugcugcccuucaacgacggggucuacuucgcgagcaccgagaaguccaacaucauccgcggcuggaucuucgggacgacccucgacagcaagacccagucccugcugaucgugaacaacgccaccaacguggucaucaaggugugcgaguuccaguucugcaacgaccccuuccucggcguguacuaccacaagaacaacaagagcuggauggaguccgaguuccgggucuacagcuccgccaacaacugcacguucgaguacgugagccagcccuuccugauggaccuggagggcaagcaggggaacuucaagaaccuccgcgaguucguguucaagaacaucgacggcuacuucaagaucuacuccaagcacaccccgaucaaccugguccgggaccugccccagggguucagcgcccucgagccccugguggaccugcccaucggcaucaacaucacccgcuuccagacccuccuggcccugcaccgguccuaccucacgccgggggacagcagcuccggcuggaccgcgggcgccgccgccuacuacgugggguaccugcagccccgcaccuuccugcucaaguacaacgagaacggcaccaucacggacgcggucgacugcgcccuggacccccugagcgagaccaagugcacccucaaguccuucaccguggagaaggggaucuaccagacgagcaacuuccgggugcagcccaccgaguccaucguccgcuucccgaacaucaccaaccugugccccuucggcgagguguucaacgccacccgguucgccagcgucuacgccuggaaccgcaagcggaucuccaacugcguggcggacuacagcgugcuguacaacuccgccagcuucuccacguucaagugcuacggcgucagccccaccaagcucaacgaccugugcuucaccaacguguacgccgacuccuucgugauccgcggggacgagguccggcagaucgcccccggccagaccgggaagaucgccgacuacaacuacaagcugccggacgacuucacgggcugcgugaucgcguggaacagcaacaaccucgacuccaaggucgggggcaacuacaacuaccuguaccgccuguuccgcaagagcaaccucaagcccuucgagcgggacaucuccaccgagaucuaccaggccggcagcacccccugcaacggggugaagggcuucaacugcuacuucccccugcaguccuacggguuccagccgaccaacggcgugggguaccagcccuaccggguggucgugcugagcuucgagcuccugcacgcccccgccacggugugcggccccaagaaguccaccaaccuggucaagaacaagugcgugaacuucaacuucaacggccucaccgggaccggcgugcugaccgagagcaacaagaaguuccugccguuccagcaguucgggcgcgacaucgccgacacgaccgacgcgguccgcgacccccagacccuggagauccucgacaucacccccugcagcuucggcgggguguccgugaucacgccgggcaccaacaccagcaaccaggucgccgugcuguaccagggcgugaacugcaccgagguccccguggccauccacgccgaccagcugacgcccaccuggcggguguacuccaccggcagcaacgucuuccagacccgcgccgggugccucaucggcgcggagcacgugaacaacuccuacgagugcgacauccccaucggggccggcaucugcgccagcuaccagacgcagaccaacuccccgcggcgcgcccggagcguggcgucccagagcaucaucgccuacaccaugucccugggcgccgagaacagcgucgccuacuccaacaacagcaucgccauccccaccaacuucacgaucuccgugaccaccgagauccugcccgugagcaugaccaagacgagcgucgacugcaccauguacaucugcggggacuccaccgagugcagcaaccuccugcugcaguacggcuccuucugcacccagcucaaccgcgcgcugacggggaucgccguggagcaggacaagaacacccaggagguguucgcccaggucaagcagaucuacaagacgcccccgaucaaggacuucggcggguucaacuucagccagauccugcccgaccccuccaagcccagcaagcgguccuucaucgaggaccuccuguucaacaaggugacccuggccgacgccggcuucaucaagcaguacggcgacugccucggggacaucgcggcccgcgaccugaucugcgcccagaaguucaacggccugaccgugcucccgccccugcugaccgacgagaugaucgcccaguacaccagcgcccuccuggcggggaccaucacguccggcuggaccuucggggccggcgccgcccugcagauccccuucgcgaugcagauggccuaccgguucaacggcaucggggucacccagaacgugcucuacgagaaccagaagcugaucgccaaccaguucaacagcgccaucggcaagauccaggacucccugagcuccaccgccagcgcgcucgggaagcugcaggacguggucaaccagaacgcccaggcccugaacacgcucgugaagcagcuguccagcaacuucggcgccaucuccagcgugcugaacgacauccucucccgccuggacaaggucgaggccgaggugcagaucgaccggcugaucaccgggcgccuccagagccugcagaccuacgugacccagcagcugauccgggcggccgagauccgcgccagcgccaaccucgccgcgaccaagauguccgagugcguccugggccagagcaagcggguggacuucugcggcaagggguaccaccugauguccuucccccagagcgccccgcacggcguggucuuccuccacgugacguacguccccgcccaggagaagaacuucaccaccgcccccgcgaucugccacgacgggaaggcccacuucccccgcgagggcguguucguguccaacgggacccacugguucgucacgcagcggaacuucuacgagccgcagaucaucaccaccgacaacaccuucgugagcggcaacugcgacguggucaucggcaucgugaacaacacgguguacgacccccugcagcccgagcuggacuccuucaaggaggagcucgacaaguacuucaagaaccacaccagccccgacgucgaccugggggacaucuccggcaucaacgccagcguggugaacauccagaaggagaucgaccgccugaacgaggucgccaagaaccucaacgagucccugaucgaccugcaggagcucgggaaguacgagcaguacaucaaguggccgugguacaucuggcugggcuucaucgccggccugaucgcgaucgugauggugaccaucaugcucugcugcaugaccagcugcugcuccugccugaaggggugcugcagcugcggcuccugcugcaaguucgacgaggacgacagcgagcccguccugaagggggugaagcuccacuacacgugauaauaggcuggagccucgguggccuagcuucuugccccuugggccuccccccagccccuccuccccuuccugcacccguacccccguggucuuugaauaaagucugagugggcggcaaaaaaaaaaaaaaaaaaaaaaaaaaaaaaaaaaaaaaaaaaaaaaaaaaaaaaaaaaaaaaaaaaaaaaaaaaaaaaaaaaaaaaaaaaaaaaaaaaaa

SEQ ID NO: 26065 - RNA, 4095 nt, Artificial Sequence
  SARS-CoV-2/Wuhan/WIV05/2019__EPI_ISL_402128 spike protein mRNA gc (1-1273)(L18F_T20N_P26S_D138Y_R190S_K417T_E484K_N501Y_D614G_H655Y _T1027I)
gggaaauaagagagaaaagaagaguaagaagaaauauaagaccccggcgccgccaccauguucguguuccugguccuccugccccuggugagcucccagugcgugaacuucaccaaccgcacgcagcugccgagcgccuacaccaacagcuucacccggggcgucuacuaccccgacaagguguuccgcuccagcgugcugcacuccacccaggaccucuuccugcccuucuucagcaacgucacgugguuccacgccauccacguguccgggaccaacggcaccaagcgguucgacaacccggugcugcccuucaacgacggggucuacuucgcgagcaccgagaaguccaacaucauccgcggcuggaucuucgggacgacccucgacagcaagacccagucccugcugaucgugaacaacgccaccaacguggucaucaaggugugcgaguuccaguucugcaacuaccccuuccucggcguguacuaccacaagaacaacaagagcuggauggaguccgaguuccgggucuacagcuccgccaacaacugcacguucgaguacgugagccagcccuuccugauggaccuggagggcaagcaggggaacuucaagaaccucagcgaguucguguucaagaacaucgacggcuacuucaagaucuacuccaagcacaccccgaucaaccugguccgggaccugccccagggguucagcgcccucgagccccugguggaccugcccaucggcaucaacaucacccgcuuccagacccuccuggcccugcaccgguccuaccucacgccgggggacagcagcuccggcuggaccgcgggcgccgccgccuacuacgugggguaccugcagccccgcaccuuccugcucaaguacaacgagaacggcaccaucacggacgcggucgacugcgcccuggacccccugagcgagaccaagugcacccucaaguccuucaccguggagaaggggaucuaccagacgagcaacuuccgggugcagcccaccgaguccaucguccgcuucccgaacaucaccaaccugugccccuucggcgagguguucaacgccacccgguucgccagcgucuacgccuggaaccgcaagcggaucuccaacugcguggcggacuacagcgugcuguacaacuccgccagcuucuccacguucaagugcuacggcgucagccccaccaagcucaacgaccugugcuucaccaacguguacgccgacuccuucgugauccgcggggacgagguccggcagaucgcccccggccagaccgggaccaucgccgacuacaacuacaagcugccggacgacuucacgggcugcgugaucgcguggaacagcaacaaccucgacuccaaggucgggggcaacuacaacuaccuguaccgccuguuccgcaagagcaaccucaagcccuucgagcgggacaucuccaccgagaucuaccaggccggcagcacccccugcaacggggugaagggcuucaacugcuacuucccccugcaguccuacggguuccagccgaccuacggcgugggguaccagcccuaccggguggucgugcugagcuucgagcuccugcacgcccccgccacggugugcggccccaagaaguccaccaaccuggucaagaacaagugcgugaacuucaacuucaacggccucaccgggaccggcgugcugaccgagagcaacaagaaguuccugccguuccagcaguucgggcgcgacaucgccgacacgaccgacgcgguccgcgacccccagacccuggagauccucgacaucacccccugcagcuucggcgggguguccgugaucacgccgggcaccaacaccagcaaccaggucgccgugcuguaccagggcgugaacugcaccgagguccccguggccauccacgccgaccagcugacgcccaccuggcggguguacuccaccggcagcaacgucuuccagacccgcgccgggugccucaucggcgcggaguacgugaacaacuccuacgagugcgacauccccaucggggccggcaucugcgccagcuaccagacgcagaccaacuccccgcggcgcgcccggagcguggcgucccagagcaucaucgccuacaccaugucccugggcgccgagaacagcgucgccuacuccaacaacagcaucgccauccccaccaacuucacgaucuccgugaccaccgagauccugcccgugagcaugaccaagacgagcgucgacugcaccauguacaucugcggggacuccaccgagugcagcaaccuccugcugcaguacggcuccuucugcacccagcucaaccgcgcgcugacggggaucgccguggagcaggacaagaacacccaggagguguucgcccaggucaagcagaucuacaagacgcccccgaucaaggacuucggcggguucaacuucagccagauccugcccgaccccuccaagcccagcaagcgguccuucaucgaggaccuccuguucaacaaggugacccuggccgacgccggcuucaucaagcaguacggcgacugccucggggacaucgcggcccgcgaccugaucugcgcccagaaguucaacggccugaccgugcucccgccccugcugaccgacgagaugaucgcccaguacaccagcgcccuccuggcggggaccaucacguccggcuggaccuucggggccggcgccgcccugcagauccccuucgcgaugcagauggccuaccgguucaacggcaucggggucacccagaacgugcucuacgagaaccagaagcugaucgccaaccaguucaacagcgccaucggcaagauccaggacucccugagcuccaccgccagcgcgcucgggaagcugcaggacguggucaaccagaacgcccaggcccugaacacgcucgugaagcagcuguccagcaacuucggcgccaucuccagcgugcugaacgacauccucucccgccuggacaaggucgaggccgaggugcagaucgaccggcugaucaccgggcgccuccagagccugcagaccuacgugacccagcagcugauccgggcggccgagauccgcgccagcgccaaccucgccgcgaucaagauguccgagugcguccugggccagagcaagcggguggacuucugcggcaagggguaccaccugauguccuucccccagagcgccccgcacggcguggucuuccuccacgugacguacguccccgcccaggagaagaacuucaccaccgcccccgcgaucugccacgacgggaaggcccacuucccccgcgagggcguguucguguccaacgggacccacugguucgucacgcagcggaacuucuacgagccgcagaucaucaccaccgacaacaccuucgugagcggcaacugcgacguggucaucggcaucgugaacaacacgguguacgacccccugcagcccgagcuggacuccuucaaggaggagcucgacaaguacuucaagaaccacaccagccccgacgucgaccugggggacaucuccggcaucaacgccagcguggugaacauccagaaggagaucgaccgccugaacgaggucgccaagaaccucaacgagucccugaucgaccugcaggagcucgggaaguacgagcaguacaucaaguggccgugguacaucuggcugggcuucaucgccggccugaucgcgaucgugauggugaccaucaugcucugcugcaugaccagcugcugcuccugccugaaggggugcugcagcugcggcuccugcugcaaguucgacgaggacgacagcgagcccguccugaagggggugaagcuccacuacacgugauaauaggcuggagccucgguggccuagcuucuugccccuugggccuccccccagccccuccuccccuuccugcacccguacccccguggucuuugaauaaagucugagugggcggcaaaaaaaaaaaaaaaaaaaaaaaaaaaaaaaaaaaaaaaaaaaaaaaaaaaaaaaaaaaaaaaaaaaaaaaaaaaaaaaaaaaaaaaaaaaaaaaaaaaa

SEQ ID NO: 26066 - RNA, 4095 nt, Artificial Sequence
  SARS-CoV-2/Wuhan/WIV05/2019__EPI_ISL_402128 spike protein mRNA gc (1-1273)(S13I_W152C_L452R_D614G)
gggaaauaagagagaaaagaagaguaagaagaaauauaagaccccggcgccgccaccauguucguguuccugguccuccugccccuggugagcauccagugcgugaaccucaccacccgcacgcagcugccgcccgccuacaccaacagcuucacccggggcgucuacuaccccgacaagguguuccgcuccagcgugcugcacuccacccaggaccucuuccugcccuucuucagcaacgucacgugguuccacgccauccacguguccgggaccaacggcaccaagcgguucgacaacccggugcugcccuucaacgacggggucuacuucgcgagcaccgagaaguccaacaucauccgcggcuggaucuucgggacgacccucgacagcaagacccagucccugcugaucgugaacaacgccaccaacguggucaucaaggugugcgaguuccaguucugcaacgaccccuuccucggcguguacuaccacaagaacaacaagagcugcauggaguccgaguuccgggucuacagcuccgccaacaacugcacguucgaguacgugagccagcccuuccugauggaccuggagggcaagcaggggaacuucaagaaccuccgcgaguucguguucaagaacaucgacggcuacuucaagaucuacuccaagcacaccccgaucaaccugguccgggaccugccccagggguucagcgcccucgagccccugguggaccugcccaucggcaucaacaucacccgcuuccagacccuccuggcccugcaccgguccuaccucacgccgggggacagcagcuccggcuggaccgcgggcgccgccgccuacuacgugggguaccugcagccccgcaccuuccugcucaaguacaacgagaacggcaccaucacggacgcggucgacugcgcccuggacccccugagcgagaccaagugcacccucaaguccuucaccguggagaaggggaucuaccagacgagcaacuuccgggugcagcccaccgaguccaucguccgcuucccgaacaucaccaaccugugccccuucggcgagguguucaacgccacccgguucgccagcgucuacgccuggaaccgcaagcggaucuccaacugcguggcggacuacagcgugcuguacaacuccgccagcuucuccacguucaagugcuacggcgucagccccaccaagcucaacgaccugugcuucaccaacguguacgccgacuccuucgugauccgcggggacgagguccggcagaucgcccccggccagaccgggaagaucgccgacuacaacuacaagcugccggacgacuucacgggcugcgugaucgcguggaacagcaacaaccucgacuccaaggucgggggcaacuacaacuaccgcuaccgccuguuccgcaagagcaaccucaagcccuucgagcgggacaucuccaccgagaucuaccaggccggcagcacccccugcaacgggguggagggcuucaacugcuacuucccccugcaguccuacggguuccagccgaccaacggcgugggguaccagcccuaccggguggucgugcugagcuucgagcuccugcacgcccccgccacggugugcggccccaagaaguccaccaaccuggucaagaacaagugcgugaacuucaacuucaacggccucaccgggaccggcgugcugaccgagagcaacaagaaguuccugccguuccagcaguucgggcgcgacaucgccgacacgaccgacgcgguccgcgacccccagacccuggagauccucgacaucacccccugcagcuucggcgggguguccgugaucacgccgggcaccaacaccagcaaccaggucgccgugcuguaccagggcgugaacugcaccgagguccccguggccauccacgccgaccagcugacgcccaccuggcggguguacuccaccggcagcaacgucuuccagacccgcgccgggugccucaucggcgcggagcacgugaacaacuccuacgagugcgacauccccaucggggccggcaucugcgccagcuaccagacgcagaccaacuccccgcggcgcgcccggagcguggcgucccagagcaucaucgccuacaccaugucccugggcgccgagaacagcgucgccuacuccaacaacagcaucgccauccccaccaacuucacgaucuccgugaccaccgagauccugcccgugagcaugaccaagacgagcgucgacugcaccauguacaucugcggggacuccaccgagugcagcaaccuccugcugcaguacggcuccuucugcacccagcucaaccgcgcgcugacggggaucgccguggagcaggacaagaacacccaggagguguucgcccaggucaagcagaucuacaagacgcccccgaucaaggacuucggcggguucaacuucagccagauccugcccgaccccuccaagcccagcaagcgguccuucaucgaggaccuccuguucaacaaggugacccuggccgacgccggcuucaucaagcaguacggcgacugccucggggacaucgcggcccgcgaccugaucugcgcccagaaguucaacggccugaccgugcucccgccccugcugaccgacgagaugaucgcccaguacaccagcgcccuccuggcggggaccaucacguccggcuggaccuucggggccggcgccgcccugcagauccccuucgcgaugcagauggccuaccgguucaacggcaucggggucacccagaacgugcucuacgagaaccagaagcugaucgccaaccaguucaacagcgccaucggcaagauccaggacucccugagcuccaccgccagcgcgcucgggaagcugcaggacguggucaaccagaacgcccaggcccugaacacgcucgugaagcagcuguccagcaacuucggcgccaucuccagcgugcugaacgacauccucucccgccuggacaaggucgaggccgaggugcagaucgaccggcugaucaccgggcgccuccagagccugcagaccuacgugacccagcagcugauccgggcggccgagauccgcgccagcgccaaccucgccgcgaccaagauguccgagugcguccugggccagagcaagcggguggacuucugcggcaagggguaccaccugauguccuucccccagagcgccccgcacggcguggucuuccuccacgugacguacguccccgcccaggagaagaacuucaccaccgcccccgcgaucugccacgacgggaaggcccacuucccccgcgagggcguguucguguccaacgggacccacugguucgucacgcagcggaacuucuacgagccgcagaucaucaccaccgacaacaccuucgugagcggcaacugcgacguggucaucggcaucgugaacaacacgguguacgacccccugcagcccgagcuggacuccuucaaggaggagcucgacaaguacuucaagaaccacaccagccccgacgucgaccugggggacaucuccggcaucaacgccagcguggugaacauccagaaggagaucgaccgccugaacgaggucgccaagaaccucaacgagucccugaucgaccugcaggagcucgggaaguacgagcaguacaucaaguggccgugguacaucuggcugggcuucaucgccggccugaucgcgaucgugauggugaccaucaugcucugcugcaugaccagcugcugcuccugccugaaggggugcugcagcugcggcuccugcugcaaguucgacgaggacgacagcgagcccguccugaagggggugaagcuccacuacacgugauaauaggcuggagccucgguggccuagcuucuugccccuugggccuccccccagccccuccuccccuuccugcacccguacccccguggucuuugaauaaagucugagugggcggcaaaaaaaaaaaaaaaaaaaaaaaaaaaaaaaaaaaaaaaaaaaaaaaaaaaaaaaaaaaaaaaaaaaaaaaaaaaaaaaaaaaaaaaaaaaaaaaaaaaa

SEQ ID NO: 26067 - RNA, 4095 nt, Artificial Sequence; identical to SEQ ID NO: 26049
  SARS-CoV-2/Wuhan/WIV05/2019__EPI_ISL_402128 spike protein mRNA gc (1-1273)

SEQ ID NO: 26068 - RNA, 4095 nt, Artificial Sequence
  SARS-CoV-2/Wuhan/WIV05/2019__EPI_ISL_402128 spike protein mRNA gc (1-1273)(D614G)
gggaaauaagagagaaaagaagaguaagaagaaauauaagaccccggcgccgccaccauguucguguuccugguccuccugccccuggugagcucccagugcgugaaccucaccacccgcacgcagcugccgcccgccuacaccaacagcuucacccggggcgucuacuaccccgacaagguguuccgcuccagcgugcugcacuccacccaggaccucuuccugcccuucuucagcaacgucacgugguuccacgccauccacguguccgggaccaacggcaccaagcgguucgacaacccggugcugcccuucaacgacggggucuacuucgcgagcaccgagaaguccaacaucauccgcggcuggaucuucgggacgacccucgacagcaagacccagucccugcugaucgugaacaacgccaccaacguggucaucaaggugugcgaguuccaguucugcaacgaccccuuccucggcguguacuaccacaagaacaacaagagcuggauggaguccgaguuccgggucuacagcuccgccaacaacugcacguucgaguacgugagccagcccuuccugauggaccuggagggcaagcaggggaacuucaagaaccuccgcgaguucguguucaagaacaucgacggcuacuucaagaucuacuccaagcacaccccgaucaaccugguccgggaccugccccagggguucagcgcccucgagccccugguggaccugcccaucggcaucaacaucacccgcuuccagacccuccuggcccugcaccgguccuaccucacgccgggggacagcagcuccggcuggaccgcgggcgccgccgccuacuacgugggguaccugcagccccgcaccuuccugcucaaguacaacgagaacggcaccaucacggacgcggucgacugcgcccuggacccccugagcgagaccaagugcacccucaaguccuucaccguggagaaggggaucuaccagacgagcaacuuccgggugcagcccaccgaguccaucguccgcuucccgaacaucaccaaccugugccccuucggcgagguguucaacgccacccgguucgccagcgucuacgccuggaaccgcaagcggaucuccaacugcguggcggacuacagcgugcuguacaacuccgccagcuucuccacguucaagugcuacggcgucagccccaccaagcucaacgaccugugcuucaccaacguguacgccgacuccuucgugauccgcggggacgagguccggcagaucgcccccggccagaccgggaagaucgccgacuacaacuacaagcugccggacgacuucacgggcugcgugaucgcguggaacagcaacaaccucgacuccaaggucgggggcaacuacaacuaccuguaccgccuguuccgcaagagcaaccucaagcccuucgagcgggacaucuccaccgagaucuaccaggccggcagcacccccugcaacgggguggagggcuucaacugcuacuucccccugcaguccuacggguuccagccgaccaacggcgugggguaccagcccuaccggguggucgugcugagcuucgagcuccugcacgcccccgccacggugugcggccccaagaaguccaccaaccuggucaagaacaagugcgugaacuucaacuucaacggccucaccgggaccggcgugcugaccgagagcaacaagaaguuccugccguuccagcaguucgggcgcgacaucgccgacacgaccgacgcgguccgcgacccccagacccuggagauccucgacaucacccccugcagcuucggcgggguguccgugaucacgccgggcaccaacaccagcaaccaggucgccgugcuguaccagggcgugaacugcaccgagguccccguggccauccacgccgaccagcugacgcccaccuggcggguguacuccaccgggagcaacgucuuccagacccgcgccggcugccucaucggggcggagcacgugaacaacuccuacgagugcgacauccccaucggcgccggcaucugcgccagcuaccagacgcagaccaacuccccgcggcgcgcccggagcguggcgucccagagcaucaucgccuacaccaugucccugggggccgagaacagcgucgccuacuccaacaacagcaucgccauccccaccaacuucacgaucuccgugaccaccgagauccugcccgugagcaugaccaagacgagcgucgacugcaccauguacaucugcggcgacuccaccgagugcagcaaccuccugcugcaguacggguccuucugcacccagcucaaccgcgcgcugacgggcaucgccguggagcaggacaagaacacccaggagguguucgcccaggucaagcagaucuacaagacgcccccgaucaaggacuucgggggcuucaacuucagccagauccugcccgaccccuccaagcccagcaagcgguccuucaucgaggaccuccuguucaacaaggugacccuggccgacgccggcuucaucaagcaguacggggacugccucggcgacaucgcggcccgcgaccugaucugcgcccagaaguucaacgggcugaccgugcucccgccccugcugaccgacgagaugaucgcccaguacaccagcgcccuccuggcgggcaccaucacguccggguggaccuucggcgccggcgccgcccugcagauccccuucgcgaugcagauggccuaccgguucaacgggaucggcgucacccagaacgugcucuacgagaaccagaagcugaucgccaaccaguucaacagcgccaucgggaagauccaggacucccugagcuccaccgccagcgcgcucggcaagcugcaggacguggucaaccagaacgcccaggcccugaacacgcucgugaagcagcuguccagcaacuucggggccaucuccagcgugcugaacgacauccucucccgccuggacaaggucgaggccgaggugcagaucgaccggcugaucaccggccgccuccagagccugcagaccuacgugacccagcagcugauccgggcggccgagauccgcgccagcgccaaccucgccgcgaccaagauguccgagugcguccugggccagagcaagcggguggacuucugcgggaagggcuaccaccugauguccuucccccagagcgccccgcacgggguggucuuccuccacgugacguacguccccgcccaggagaagaacuucaccaccgcccccgcgaucugccacgacggcaaggcccacuucccccgcgaggggguguucguguccaacggcacccacugguucgucacgcagcggaacuucuacgagccgcagaucaucaccaccgacaacaccuucgugagcggcaacugcgacguggucaucgggaucgugaacaacacgguguacgacccccugcagcccgagcuggacuccuucaaggaggagcucgacaaguacuucaagaaccacaccagccccgacgucgaccugggcgacaucuccgggaucaacgccagcguggugaacauccagaaggagaucgaccgccugaacgaggucgccaagaaccucaacgagucccugaucgaccugcaggagcucggcaaguacgagcaguacaucaaguggccgugguacaucuggcugggcuucaucgccgggcugaucgcgaucgugauggugaccaucaugcucugcugcaugaccagcugcugcuccugccugaagggcugcugcagcugcggguccugcugcaaguucgacgaggacgacagcgagcccguccugaagggcgugaagcuccacuacacgugauaauaggcuggagccucgguggccuagcuucuugccccuugggccuccccccagccccuccuccccuuccugcacccguacccccguggucuuugaauaaagucugagugggcggcaaaaaaaaaaaaaaaaaaaaaaaaaaaaaaaaaaaaaaaaaaaaaaaaaaaaaaaaaaaaaaaaaaaaaaaaaaaaaaaaaaaaaaaaaaaaaaaaaaaa

SEQ ID NO: 26069 - RNA, 4095 nt, Artificial Sequence
  SARS-CoV-2/Wuhan/WIV05/2019__EPI_ISL_402128 spike protein mRNA gc (1-1273)(A222V_D614G)
gggaaauaagagagaaaagaagaguaagaagaaauauaagaccccggcgccgccaccauguucguguuccugguccuccugccccuggugagcucccagugcgugaaccucaccacccgcacgcagcugccgcccgccuacaccaacagcuucacccggggcgucuacuaccccgacaagguguuccgcuccagcgugcugcacuccacccaggaccucuuccugcccuucuucagcaacgucacgugguuccacgccauccacguguccgggaccaacggcaccaagcgguucgacaacccggugcugcccuucaacgacggggucuacuucgcgagcaccgagaaguccaacaucauccgcggcuggaucuucgggacgacccucgacagcaagacccagucccugcugaucgugaacaacgccaccaacguggucaucaaggugugcgaguuccaguucugcaacgaccccuuccucggcguguacuaccacaagaacaacaagagcuggauggaguccgaguuccgggucuacagcuccgccaacaacugcacguucgaguacgugagccagcccuuccugauggaccuggagggcaagcaggggaacuucaagaaccuccgcgaguucguguucaagaacaucgacggcuacuucaagaucuacuccaagcacaccccgaucaaccugguccgggaccugccccagggguucagcgugcucgagccccugguggaccugcccaucggcaucaacaucacccgcuuccagacccuccuggcccugcaccgguccuaccucacgccgggggacagcagcuccggcuggaccgccggcgcggccgccuacuacgucggguaccugcagccccgcaccuuccugcucaaguacaacgagaacggcaccaucacggacgccguggacugcgcgcuggacccccugagcgagaccaagugcacccucaaguccuucaccguggagaaggggaucuaccagacgagcaacuuccggguccagcccaccgaguccaucgugcgcuucccgaacaucaccaaccugugccccuucggcgaggucuucaacgccacccgguucgccagcguguacgccuggaaccgcaagcggaucuccaacugcguggccgacuacagcguccuguacaacuccgcgagcuucuccacguucaagugcuacggcgugagccccaccaagcucaacgaccugugcuucaccaacguguacgccgacuccuucgucauccgcggggacgaggugcggcagaucgcccccggccagaccgggaagaucgccgacuacaacuacaagcugccggacgacuucacgggcugcgugaucgccuggaacagcaacaaccucgacuccaaggucgggggcaacuacaacuaccuguaccgccuguuccgcaagagcaaccucaagcccuucgagcgggacaucuccaccgagaucuaccaggcgggcagcacccccugcaacgggguggagggcuucaacugcuacuucccccugcaguccuacggguuccagccgaccaacggcgugggguaccagcccuaccgggucguggugcugagcuucgagcuccugcacgcccccgccacggucugcggccccaagaaguccaccaaccuggugaagaacaagugcgugaacuucaacuucaacggccucaccgggaccggcguccugaccgagagcaacaagaaguuccugccguuccagcaguucgggcgcgacaucgccgacacgaccgacgccgugcgcgacccccagacccuggagauccucgacaucacccccugcagcuucggcgggguguccgucaucacgccgggcaccaacaccagcaaccagguggcggugcuguaccagggcgucaacugcaccgaggugcccguggccauccacgccgaccagcugacgcccaccuggcgggucuacuccaccgggagcaacguguuccagacccgcgccggcugccucaucggggccgagcacgugaacaacuccuacgagugcgacauccccaucggcgcgggcaucugcgccagcuaccagacgcagaccaacuccccgcggcgcgcccggagcgucgccucccagagcaucaucgcguacaccaugucccugggggccgagaacagcguggccuacuccaacaacagcaucgccauccccaccaacuucacgaucuccgugaccaccgagauccugcccgucagcaugaccaagacgagcguggacugcaccauguacaucugcggcgacuccaccgagugcagcaaccuccugcugcaguacggguccuucugcacccagcucaaccgcgcccugacgggcaucgcgguggagcaggacaagaacacccaggaggucuucgcccaggugaagcagaucuacaagacgcccccgaucaaggacuucgggggcuucaacuucagccagauccugcccgaccccuccaagcccagcaagcgguccuucaucgaggaccuccuguucaacaaggugacccuggccgacgccggcuucaucaagcaguacggggacugccucggcgacaucgccgcgcgcgaccugaucugcgcccagaaguucaacgggcugaccguccucccgccccugcugaccgacgagaugaucgcccaguacaccagcgcccuccuggccggcaccaucacguccggguggaccuucggcgcgggcgccgcccugcagauccccuucgccaugcagauggcguaccgguucaacgggaucggcgugacccagaacgugcucuacgagaaccagaagcugaucgccaaccaguucaacagcgccaucgggaagauccaggacucccugagcuccaccgccagcgcccucggcaagcugcaggacgucgugaaccagaacgcgcaggcccugaacacgcucgugaagcagcuguccagcaacuucggggccaucuccagcguccugaacgacauccucucccgccuggacaagguggaggccgaggugcagaucgaccggcugaucaccggccgccuccagagccugcagaccuacgucacccagcagcugauccgggccgcggagauccgcgccagcgccaaccucgccgccaccaagauguccgagugcgugcugggccagagcaagcggguggacuucugcgggaagggcuaccaccugauguccuucccccagagcgcgccgcacggggucguguuccuccacgucacguacgugcccgcccaggagaagaacuucaccaccgcccccgccaucugccacgacggcaaggcgcacuucccccgcgaggggguguucgucuccaacggcacccacugguucgugacgcagcggaacuucuacgagccgcagaucaucaccaccgacaacaccuucgugagcggcaacugcgacgucgugaucgggaucgugaacaacacggucuacgacccccugcagcccgagcuggacuccuucaaggaggagcucgacaaguacuucaagaaccacaccagccccgacguggaccugggcgacaucuccgggaucaacgccagcguggucaacauccagaaggagaucgaccgccugaacgagguggccaagaaccucaacgagucccugaucgaccugcaggagcucggcaaguacgagcaguacaucaaguggccgugguacaucuggcugggcuucaucgccgggcugaucgccaucgugauggucaccaucaugcucugcugcaugaccagcugcugcuccugccugaagggcugcugcagcugcggguccugcugcaaguucgacgaggacgacagcgagcccgugcugaagggcgugaagcuccacuacacgugauaauaggcuggagccucgguggccuagcuucuugccccuugggccuccccccagccccuccuccccuuccugcacccguacccccguggucuuugaauaaagucugagugggcggcaaaaaaaaaaaaaaaaaaaaaaaaaaaaaaaaaaaaaaaaaaaaaaaaaaaaaaaaaaaaaaaaaaaaaaaaaaaaaaaaaaaaaaaaaaaaaaaaaaaa

SEQ ID NO: 26070 - RNA, 4095 nt, Artificial Sequence
  SARS-CoV-2/Wuhan/WIV05/2019__EPI_ISL_402128 spike protein mRNA gc (1-1273)(N439K_D614G)
gggaaauaagagagaaaagaagaguaagaagaaauauaagaccccggcgccgccaccauguucguguuccugguccuccugccccuggugagcucccagugcgugaaccucaccacccgcacgcagcugccgcccgccuacaccaacagcuucacccggggcgucuacuaccccgacaagguguuccgcuccagcgugcugcacuccacccaggaccucuuccugcccuucuucagcaacgucacgugguuccacgccauccacguguccgggaccaacggcaccaagcgguucgacaacccggugcugcccuucaacgacggggucuacuucgcgagcaccgagaaguccaacaucauccgcggcuggaucuucgggacgacccucgacagcaagacccagucccugcugaucgugaacaacgccaccaacguggucaucaaggugugcgaguuccaguucugcaacgaccccuuccucggcguguacuaccacaagaacaacaagagcuggauggaguccgaguuccgggucuacagcuccgccaacaacugcacguucgaguacgugagccagcccuuccugauggaccuggagggcaagcaggggaacuucaagaaccuccgcgaguucguguucaagaacaucgacggcuacuucaagaucuacuccaagcacaccccgaucaaccugguccgggaccugccccagggguucagcgcccucgagccccugguggaccugcccaucggcaucaacaucacccgcuuccagacccuccuggcccugcaccgguccuaccucacgccgggggacagcagcuccggcuggaccgcgggcgccgccgccuacuacgugggguaccugcagccccgcaccuuccugcucaaguacaacgagaacggcaccaucacggacgcggucgacugcgcccuggacccccugagcgagaccaagugcacccucaaguccuucaccguggagaaggggaucuaccagacgagcaacuuccgggugcagcccaccgaguccaucguccgcuucccgaacaucaccaaccugugccccuucggcgagguguucaacgccacccgguucgccagcgucuacgccuggaaccgcaagcggaucuccaacugcguggcggacuacagcgugcuguacaacuccgccagcuucuccacguucaagugcuacggcgucagccccaccaagcucaacgaccugugcuucaccaacguguacgccgacuccuucgugauccgcggggacgagguccggcagaucgcccccggccagaccgggaagaucgccgacuacaacuacaagcugccggacgacuucacgggcugcgugaucgcguggaacagcaagaaccucgacuccaaggucgggggcaacuacaacuaccuguaccgccuguuccgcaagagcaaccucaagcccuucgagcgggacaucuccaccgagaucuaccaggccggcagcacccccugcaacgggguggagggcuucaacugcuacuucccccugcaguccuacggguuccagccgaccaacggcgugggguaccagcccuaccggguggucgugcugagcuucgagcuccugcacgcccccgccacggugugcggccccaagaaguccaccaaccuggucaagaacaagugcgugaacuucaacuucaacggccucaccgggaccggcgugcugaccgagagcaacaagaaguuccugccguuccagcaguucgggcgcgacaucgccgacacgaccgacgcgguccgcgacccccagacccuggagauccucgacaucacccccugcagcuucggcgggguguccgugaucacgccgggcaccaacaccagcaaccaggucgccgugcuguaccagggcgugaacugcaccgagguccccguggccauccacgccgaccagcugacgcccaccuggcggguguacuccaccgggagcaacgucuuccagacccgcgccggcugccucaucggggcggagcacgugaacaacuccuacgagugcgacauccccaucggcgccggcaucugcgccagcuaccagacgcagaccaacuccccgcggcgcgcccggagcguggcgucccagagcaucaucgccuacaccaugucccugggggccgagaacagcgucgccuacuccaacaacagcaucgccauccccaccaacuucacgaucuccgugaccaccgagauccugcccgugagcaugaccaagacgagcgucgacugcaccauguacaucugcggcgacuccaccgagugcagcaaccuccugcugcaguacggguccuucugcacccagcucaaccgcgcgcugacgggcaucgccguggagcaggacaagaacacccaggagguguucgcccaggucaagcagaucuacaagacgcccccgaucaaggacuucgggggcuucaacuucagccagauccugcccgaccccuccaagcccagcaagcgguccuucaucgaggaccuccuguucaacaaggugacccuggccgacgccggcuucaucaagcaguacggggacugccucggcgacaucgcggcccgcgaccugaucugcgcccagaaguucaacgggcugaccgugcucccgccccugcugaccgacgagaugaucgcccaguacaccagcgcccuccuggcgggcaccaucacguccggguggaccuucggcgccggcgccgcccugcagauccccuucgcgaugcagauggccuaccgguucaacgggaucggcgucacccagaacgugcucuacgagaaccagaagcugaucgccaaccaguucaacagcgccaucgggaagauccaggacucccugagcuccaccgccagcgcgcucggcaagcugcaggacguggucaaccagaacgcccaggcccugaacacgcucgugaagcagcuguccagcaacuucggggccaucuccagcgugcugaacgacauccucucccgccuggacaaggucgaggccgaggugcagaucgaccggcugaucaccggccgccuccagagccugcagaccuacgugacccagcagcugauccgggcggccgagauccgcgccagcgccaaccucgccgcgaccaagauguccgagugcguccugggccagagcaagcggguggacuucugcgggaagggcuaccaccugauguccuucccccagagcgccccgcacgggguggucuuccuccacgugacguacguccccgcccaggagaagaacuucaccaccgcccccgcgaucugccacgacggcaaggcccacuucccccgcgaggggguguucguguccaacggcacccacugguucgucacgcagcggaacuucuacgagccgcagaucaucaccaccgacaacaccuucgugagcggcaacugcgacguggucaucgggaucgugaacaacacgguguacgacccccugcagcccgagcuggacuccuucaaggaggagcucgacaaguacuucaagaaccacaccagccccgacgucgaccugggcgacaucuccgggaucaacgccagcguggugaacauccagaaggagaucgaccgccugaacgaggucgccaagaaccucaacgagucccugaucgaccugcaggagcucggcaaguacgagcaguacaucaaguggccgugguacaucuggcugggcuucaucgccgggcugaucgcgaucgugauggugaccaucaugcucugcugcaugaccagcugcugcuccugccugaagggcugcugcagcugcggguccugcugcaaguucgacgaggacgacagcgagcccguccugaagggcgugaagcuccacuacacgugauaauaggcuggagccucgguggccuagcuucuugccccuugggccuccccccagccccuccuccccuuccugcacccguacccccguggucuuugaauaaagucugagugggcggcaaaaaaaaaaaaaaaaaaaaaaaaaaaaaaaaaaaaaaaaaaaaaaaaaaaaaaaaaaaaaaaaaaaaaaaaaaaaaaaaaaaaaaaaaaaaaaaaaaaa

SEQ ID NO: 26071 - RNA, 4095 nt, Artificial Sequence
  SARS-CoV-2/Wuhan/WIV05/2019__EPI_ISL_402128 spike protein mRNA gc (1-1273)(S477N_D614G)
gggaaauaagagagaaaagaagaguaagaagaaauauaagaccccggcgccgccaccauguucguguuccugguccuccugccccuggugagcucccagugcgugaaccucaccacccgcacgcagcugccgcccgccuacaccaacagcuucacccggggcgucuacuaccccgacaagguguuccgcuccagcgugcugcacuccacccaggaccucuuccugcccuucuucagcaacgucacgugguuccacgccauccacguguccgggaccaacggcaccaagcgguucgacaacccggugcugcccuucaacgacggggucuacuucgcgagcaccgagaaguccaacaucauccgcggcuggaucuucgggacgacccucgacagcaagacccagucccugcugaucgugaacaacgccaccaacguggucaucaaggugugcgaguuccaguucugcaacgaccccuuccucggcguguacuaccacaagaacaacaagagcuggauggaguccgaguuccgggucuacagcuccgccaacaacugcacguucgaguacgugagccagcccuuccugauggaccuggagggcaagcaggggaacuucaagaaccuccgcgaguucguguucaagaacaucgacggcuacuucaagaucuacuccaagcacaccccgaucaaccugguccgggaccugccccagggguucagcgcccucgagccccugguggaccugcccaucggcaucaacaucacccgcuuccagacccuccuggcccugcaccgguccuaccucacgccgggggacagcagcuccggcuggaccgcgggcgccgccgccuacuacgugggguaccugcagccccgcaccuuccugcucaaguacaacgagaacggcaccaucacggacgcggucgacugcgcccuggacccccugagcgagaccaagugcacccucaaguccuucaccguggagaaggggaucuaccagacgagcaacuuccgggugcagcccaccgaguccaucguccgcuucccgaacaucaccaaccugugccccuucggcgagguguucaacgccacccgguucgccagcgucuacgccuggaaccgcaagcggaucuccaacugcguggcggacuacagcgugcuguacaacuccgccagcuucuccacguucaagugcuacggcgucagccccaccaagcucaacgaccugugcuucaccaacguguacgccgacuccuucgugauccgcggggacgagguccggcagaucgcccccggccagaccgggaagaucgccgacuacaacuacaagcugccggacgacuucacgggcugcgugaucgcguggaacagcaacaaccucgacuccaaggucgggggcaacuacaacuaccuguaccgccuguuccgcaagagcaaccucaagcccuucgagcgggacaucuccaccgagaucuaccaggccggcaacacccccugcaacgggguggagggcuucaacugcuacuucccccugcagagcuacggguuccagccgaccaacggcgugggguaccagcccuaccggguggucgugcuguccuucgagcuccugcacgcccccgccacggugugcggccccaagaaguccaccaaccuggucaagaacaagugcgugaacuucaacuucaacggccucaccgggaccggcgugcugaccgagagcaacaagaaguuccugccguuccagcaguucgggcgcgacaucgccgacacgaccgacgcgguccgcgacccccagacccuggagauccucgacaucacccccugcagcuucggcggggugagcgugaucacgccgggcaccaacaccuccaaccaggucgccgugcuguaccagggcgugaacugcaccgagguccccguggccauccacgccgaccagcugacgcccaccuggcggguguacagcaccggguccaacgucuuccagacccgcgccggcugccucaucggggcggagcacgugaacaacagcuacgagugcgacauccccaucggcgccggcaucugcgccuccuaccagacgcagaccaacagcccgcggcgcgcccgguccguggcgagccaguccaucaucgccuacaccaugagccugggggccgagaacuccgucgccuacagcaacaacuccaucgccauccccaccaacuucacgaucagcgugaccaccgagauccugcccguguccaugaccaagacgagcgucgacugcaccauguacaucugcggcgacagcaccgagugcuccaaccuccugcugcaguacgggagcuucugcacccagcucaaccgcgcgcugacgggcaucgccguggagcaggacaagaacacccaggagguguucgcccaggucaagcagaucuacaagacgcccccgaucaaggacuucgggggcuucaacuucucccagauccugcccgaccccagcaagcccuccaagcggagcuucaucgaggaccuccuguucaacaaggugacccuggccgacgccggcuucaucaagcaguacggggacugccucggcgacaucgcggcccgcgaccugaucugcgcccagaaguucaacgggcugaccgugcucccgccccugcugaccgacgagaugaucgcccaguacaccuccgcccuccuggcgggcaccaucacgagcggguggaccuucggcgccggcgccgcccugcagauccccuucgcgaugcagauggccuaccgguucaacgggaucggcgucacccagaacgugcucuacgagaaccagaagcugaucgccaaccaguucaacuccgccaucgggaagauccaggacagccuguccagcaccgccuccgcgcucggcaagcugcaggacguggucaaccagaacgcccaggcccugaacacgcucgugaagcagcugagcuccaacuucggggccaucagcuccgugcugaacgacauccucagccgccuggacaaggucgaggccgaggugcagaucgaccggcugaucaccggccgccuccagucccugcagaccuacgugacccagcagcugauccgggcggccgagauccgcgccagcgccaaccucgccgcgaccaagaugagcgagugcguccugggccaguccaagcggguggacuucugcgggaagggcuaccaccugaugagcuucccccaguccgccccgcacgggguggucuuccuccacgugacguacguccccgcccaggagaagaacuucaccaccgcccccgcgaucugccacgacggcaaggcccacuucccccgcgaggggguguucgugagcaacggcacccacugguucgucacgcagcggaacuucuacgagccgcagaucaucaccaccgacaacaccuucguguccggcaacugcgacguggucaucgggaucgugaacaacacgguguacgacccccugcagcccgagcuggacagcuucaaggaggagcucgacaaguacuucaagaaccacaccucccccgacgucgaccugggcgacaucagcgggaucaacgccuccguggugaacauccagaaggagaucgaccgccugaacgaggucgccaagaaccucaacgagagccugaucgaccugcaggagcucggcaaguacgagcaguacaucaaguggccgugguacaucuggcugggcuucaucgccgggcugaucgcgaucgugauggugaccaucaugcucugcugcaugaccuccugcugcagcugccugaagggcugcugcuccugcgggagcugcugcaaguucgacgaggacgacuccgagcccguccugaagggcgugaagcuccacuacacgugauaauaggcuggagccucgguggccuagcuucuugccccuugggccuccccccagccccuccuccccuuccugcacccguacccccguggucuuugaauaaagucugagugggcggcaaaaaaaaaaaaaaaaaaaaaaaaaaaaaaaaaaaaaaaaaaaaaaaaaaaaaaaaaaaaaaaaaaaaaaaaaaaaaaaaaaaaaaaaaaaaaaaaaaaa

SEQ ID NO: 26072 - RNA, 4095 nt, Artificial Sequence
  SARS-CoV-2/Wuhan/WIV05/2019__EPI_ISL_402128 spike protein mRNA gc (1-1273)(N501Y_D614G)
gggaaauaagagagaaaagaagaguaagaagaaauauaagaccccggcgccgccaccauguucguguuccugguccuccugccccuggugagcucccagugcgugaaccucaccacccgcacgcagcugccgcccgccuacaccaacagcuucacccggggcgucuacuaccccgacaagguguuccgcuccagcgugcugcacuccacccaggaccucuuccugcccuucuucagcaacgucacgugguuccacgccauccacguguccgggaccaacggcaccaagcgguucgacaacccggugcugcccuucaacgacggggucuacuucgcgagcaccgagaaguccaacaucauccgcggcuggaucuucgggacgacccucgacagcaagacccagucccugcugaucgugaacaacgccaccaacguggucaucaaggugugcgaguuccaguucugcaacgaccccuuccucggcguguacuaccacaagaacaacaagagcuggauggaguccgaguuccgggucuacagcuccgccaacaacugcacguucgaguacgugagccagcccuuccugauggaccuggagggcaagcaggggaacuucaagaaccuccgcgaguucguguucaagaacaucgacggcuacuucaagaucuacuccaagcacaccccgaucaaccugguccgggaccugccccagggguucagcgcccucgagccccugguggaccugcccaucggcaucaacaucacccgcuuccagacccuccuggcccugcaccgguccuaccucacgccgggggacagcagcuccggcuggaccgcgggcgccgccgccuacuacgugggguaccugcagccccgcaccuuccugcucaaguacaacgagaacggcaccaucacggacgcggucgacugcgcccuggacccccugagcgagaccaagugcacccucaaguccuucaccguggagaaggggaucuaccagacgagcaacuuccgggugcagcccaccgaguccaucguccgcuucccgaacaucaccaaccugugccccuucggcgagguguucaacgccacccgguucgccagcgucuacgccuggaaccgcaagcggaucuccaacugcguggcggacuacagcgugcuguacaacuccgccagcuucuccacguucaagugcuacggcgucagccccaccaagcucaacgaccugugcuucaccaacguguacgccgacuccuucgugauccgcggggacgagguccggcagaucgcccccggccagaccgggaagaucgccgacuacaacuacaagcugccggacgacuucacgggcugcgugaucgcguggaacagcaacaaccucgacuccaaggucgggggcaacuacaacuaccuguaccgccuguuccgcaagagcaaccucaagcccuucgagcgggacaucuccaccgagaucuaccaggccggcagcacccccugcaacgggguggagggcuucaacugcuacuucccccugcaguccuacggguuccagccgaccuacggcgugggguaccagcccuaccggguggucgugcugagcuucgagcuccugcacgcccccgccacggugugcggccccaagaaguccaccaaccuggucaagaacaagugcgugaacuucaacuucaacggccucaccgggaccggcgugcugaccgagagcaacaagaaguuccugccguuccagcaguucgggcgcgacaucgccgacacgaccgacgcgguccgcgacccccagacccuggagauccucgacaucacccccugcagcuucggcgggguguccgugaucacgccgggcaccaacaccagcaaccaggucgccgugcuguaccagggcgugaacugcaccgagguccccguggccauccacgccgaccagcugacgcccaccuggcggguguacuccaccgggagcaacgucuuccagacccgcgccggcugccucaucggggcggagcacgugaacaacuccuacgagugcgacauccccaucggcgccggcaucugcgccagcuaccagacgcagaccaacuccccgcggcgcgcccggagcguggcgucccagagcaucaucgccuacaccaugucccugggggccgagaacagcgucgccuacuccaacaacagcaucgccauccccaccaacuucacgaucuccgugaccaccgagauccugcccgugagcaugaccaagacgagcgucgacugcaccauguacaucugcggcgacuccaccgagugcagcaaccuccugcugcaguacggguccuucugcacccagcucaaccgcgcgcugacgggcaucgccguggagcaggacaagaacacccaggagguguucgcccaggucaagcagaucuacaagacgcccccgaucaaggacuucgggggcuucaacuucagccagauccugcccgaccccuccaagcccagcaagcgguccuucaucgaggaccuccuguucaacaaggugacccuggccgacgccggcuucaucaagcaguacggggacugccucggcgacaucgcggcccgcgaccugaucugcgcccagaaguucaacgggcugaccgugcucccgccccugcugaccgacgagaugaucgcccaguacaccagcgcccuccuggcgggcaccaucacguccggguggaccuucggcgccggcgccgcccugcagauccccuucgcgaugcagauggccuaccgguucaacgggaucggcgucacccagaacgugcucuacgagaaccagaagcugaucgccaaccaguucaacagcgccaucgggaagauccaggacucccugagcuccaccgccagcgcgcucggcaagcugcaggacguggucaaccagaacgcccaggcccugaacacgcucgugaagcagcuguccagcaacuucggggccaucuccagcgugcugaacgacauccucucccgccuggacaaggucgaggccgaggugcagaucgaccggcugaucaccggccgccuccagagccugcagaccuacgugacccagcagcugauccgggcggccgagauccgcgccagcgccaaccucgccgcgaccaagauguccgagugcguccugggccagagcaagcggguggacuucugcgggaagggcuaccaccugauguccuucccccagagcgccccgcacgggguggucuuccuccacgugacguacguccccgcccaggagaagaacuucaccaccgcccccgcgaucugccacgacggcaaggcccacuucccccgcgaggggguguucguguccaacggcacccacugguucgucacgcagcggaacuucuacgagccgcagaucaucaccaccgacaacaccuucgugagcggcaacugcgacguggucaucgggaucgugaacaacacgguguacgacccccugcagcccgagcuggacuccuucaaggaggagcucgacaaguacuucaagaaccacaccagccccgacgucgaccugggcgacaucuccgggaucaacgccagcguggugaacauccagaaggagaucgaccgccugaacgaggucgccaagaaccucaacgagucccugaucgaccugcaggagcucggcaaguacgagcaguacaucaaguggccgugguacaucuggcugggcuucaucgccgggcugaucgcgaucgugauggugaccaucaugcucugcugcaugaccagcugcugcuccugccugaagggcugcugcagcugcggguccugcugcaaguucgacgaggacgacagcgagcccguccugaagggcgugaagcuccacuacacgugauaauaggcuggagccucgguggccuagcuucuugccccuugggccuccccccagccccuccuccccuuccugcacccguacccccguggucuuugaauaaagucugagugggcggcaaaaaaaaaaaaaaaaaaaaaaaaaaaaaaaaaaaaaaaaaaaaaaaaaaaaaaaaaaaaaaaaaaaaaaaaaaaaaaaaaaaaaaaaaaaaaaaaaaaa

SEQ ID NO: 26073 - RNA, 4089 nt, Artificial Sequence
  SARS-CoV-2/Wuhan/WIV05/2019__EPI_ISL_402128 spike protein mRNA gc (1-1273)(H69del_V70del_D614G)
gggaaauaagagagaaaagaagaguaagaagaaauauaagaccccggcgccgccaccauguucguguuccugguccuccugccccuggugagcucccagugcgugaaccucaccacccgcacgcagcugccgcccgccuacaccaacagcuucacccggggcgucuacuaccccgacaagguguuccgcuccagcgugcugcacuccacccaggaccucuuccugcccuucuucagcaacgucacgugguuccacgccaucuccgggaccaacggcaccaagcgguucgacaacccggugcugcccuucaacgacgggguguacuucgcgagcaccgagaaguccaacaucauccgcggcuggaucuucgggacgacccucgacagcaagacccagucccugcugaucgucaacaacgccaccaacguggugaucaaggucugcgaguuccaguucugcaacgaccccuuccucggcguguacuaccacaagaacaacaagagcuggauggaguccgaguuccggguguacagcuccgccaacaacugcacguucgaguacgucagccagcccuuccugauggaccuggagggcaagcaggggaacuucaagaaccuccgcgaguucguguucaagaacaucgacggcuacuucaagaucuacuccaagcacaccccgaucaaccuggugcgggaccugccccagggguucagcgcccucgagccccuggucgaccugcccaucggcaucaacaucacccgcuuccagacccuccuggcccugcaccgguccuaccucacgccgggggacagcagcuccggcuggaccgcgggcgccgccgccuacuacgugggguaccugcagccccgcaccuuccugcucaaguacaacgagaacggcaccaucacggacgcgguggacugcgcccuggacccccugagcgagaccaagugcacccucaaguccuucaccgucgagaaggggaucuaccagacgagcaacuuccgggugcagcccaccgaguccaucgugcgcuucccgaacaucaccaaccugugccccuucggcgaggucuucaacgccacccgguucgccagcguguacgccuggaaccgcaagcggaucuccaacugcgucgcggacuacagcgugcuguacaacuccgccagcuucuccacguucaagugcuacggcgugagccccaccaagcucaacgaccugugcuucaccaacgucuacgccgacuccuucgugauccgcggggacgaggugcggcagaucgcccccggccagaccgggaagaucgccgacuacaacuacaagcugccggacgacuucacgggcugcgucaucgcguggaacagcaacaaccucgacuccaaggucgggggcaacuacaacuaccuguaccgccuguuccgcaagagcaaccucaagcccuucgagcgggacaucuccaccgagaucuaccaggccggcagcacccccugcaacgggguggagggcuucaacugcuacuucccccugcaguccuacggguuccagccgaccaacggcgugggguaccagcccuaccggguggugguccugagcuucgagcuccugcacgcccccgccacggugugcggccccaagaaguccaccaaccuggugaagaacaagugcgucaacuucaacuucaacggccucaccgggaccggcgugcugaccgagagcaacaagaaguuccugccguuccagcaguucgggcgcgacaucgccgacacgaccgacgcggugcgcgacccccagacccuggagauccucgacaucacccccugcagcuucggcggggucuccgugaucacgccgggcaccaacaccagcaaccagguggccguccuguaccagggcgugaacugcaccgaggugcccgucgccauccacgccgaccagcugacgcccaccuggcggguguacuccaccgggagcaacguguuccagacccgcgccggcugccucaucggggcggagcacgucaacaacuccuacgagugcgacauccccaucggcgccggcaucugcgccagcuaccagacgcagaccaacuccccgcggcgcgcccggagcguggcgucccagagcaucaucgccuacaccaugucccugggggccgagaacagcguggccuacuccaacaacagcaucgccauccccaccaacuucacgaucuccgucaccaccgagauccugcccgugagcaugaccaagacgagcguggacugcaccauguacaucugcggcgacuccaccgagugcagcaaccuccugcugcaguacggguccuucugcacccagcucaaccgcgcgcugacgggcaucgccgucgagcaggacaagaacacccaggagguguucgcccaggugaagcagaucuacaagacgcccccgaucaaggacuucgggggcuucaacuucagccagauccugcccgaccccuccaagcccagcaagcgguccuucaucgaggaccuccuguucaacaaggucacccuggccgacgccggcuucaucaagcaguacggggacugccucggcgacaucgcggcccgcgaccugaucugcgcccagaaguucaacgggcugaccgugcucccgccccugcugaccgacgagaugaucgcccaguacaccagcgcccuccuggcgggcaccaucacguccggguggaccuucggcgccggcgccgcccugcagauccccuucgcgaugcagauggccuaccgguucaacgggaucggcgugacccagaacguccucuacgagaaccagaagcugaucgccaaccaguucaacagcgccaucgggaagauccaggacucccugagcuccaccgccagcgcgcucggcaagcugcaggacguggugaaccagaacgcccaggcccugaacacgcucgucaagcagcuguccagcaacuucggggccaucuccagcgugcugaacgacauccucucccgccuggacaagguggaggccgagguccagaucgaccggcugaucaccggccgccuccagagccugcagaccuacgugacccagcagcugauccgggcggccgagauccgcgccagcgccaaccucgccgcgaccaagauguccgagugcgugcugggccagagcaagcgggucgacuucugcgggaagggcuaccaccugauguccuucccccagagcgccccgcacggggugguguuccuccacgucacguacgugcccgcccaggagaagaacuucaccaccgcccccgcgaucugccacgacggcaaggcccacuucccccgcgagggggucuucguguccaacggcacccacugguucgugacgcagcggaacuucuacgagccgcagaucaucaccaccgacaacaccuucgucagcggcaacugcgacguggugaucgggaucgucaacaacacgguguacgacccccugcagcccgagcuggacuccuucaaggaggagcucgacaaguacuucaagaaccacaccagccccgacguggaccugggcgacaucuccgggaucaacgccagcgucgugaacauccagaaggagaucgaccgccugaacgagguggccaagaaccucaacgagucccugaucgaccugcaggagcucggcaaguacgagcaguacaucaaguggccgugguacaucuggcugggcuucaucgccgggcugaucgcgaucgucauggugaccaucaugcucugcugcaugaccagcugcugcuccugccugaagggcugcugcagcugcggguccugcugcaaguucgacgaggacgacagcgagcccgugcugaagggcgucaagcuccacuacacgugauaauaggcuggagccucgguggccuagcuucuugccccuugggccuccccccagccccuccuccccuuccugcacccguacccccguggucuuugaauaaagucugagugggcggcaaaaaaaaaaaaaaaaaaaaaaaaaaaaaaaaaaaaaaaaaaaaaaaaaaaaaaaaaaaaaaaaaaaaaaaaaaaaaaaaaaaaaaaaaaaaaaaaaaaa

SEQ ID NO: 26074 - RNA, 4095 nt, Artificial Sequence
  SARS-CoV-2/Wuhan/WIV05/2019__EPI_ISL_402128 spike protein mRNA gc (1-1273)(Y453F_D614G)
gggaaauaagagagaaaagaagaguaagaagaaauauaagaccccggcgccgccaccauguucguguuccugguccuccugccccuggugagcucccagugcgugaaccucaccacccgcacgcagcugccgcccgccuacaccaacagcuucacccggggcgucuacuaccccgacaagguguuccgcuccagcgugcugcacuccacccaggaccucuuccugcccuucuucagcaacgucacgugguuccacgccauccacguguccgggaccaacggcaccaagcgguucgacaacccggugcugcccuucaacgacggggucuacuucgcgagcaccgagaaguccaacaucauccgcggcuggaucuucgggacgacccucgacagcaagacccagucccugcugaucgugaacaacgccaccaacguggucaucaaggugugcgaguuccaguucugcaacgaccccuuccucggcguguacuaccacaagaacaacaagagcuggauggaguccgaguuccgggucuacagcuccgccaacaacugcacguucgaguacgugagccagcccuuccugauggaccuggagggcaagcaggggaacuucaagaaccuccgcgaguucguguucaagaacaucgacggcuacuucaagaucuacuccaagcacaccccgaucaaccugguccgggaccugccccagggguucagcgcccucgagccccugguggaccugcccaucggcaucaacaucacccgcuuccagacccuccuggcccugcaccgguccuaccucacgccgggggacagcagcuccggcuggaccgcgggcgccgccgccuacuacgugggguaccugcagccccgcaccuuccugcucaaguacaacgagaacggcaccaucacggacgcggucgacugcgcccuggacccccugagcgagaccaagugcacccucaaguccuucaccguggagaaggggaucuaccagacgagcaacuuccgggugcagcccaccgaguccaucguccgcuucccgaacaucaccaaccugugccccuucggcgagguguucaacgccacccgguucgccagcgucuacgccuggaaccgcaagcggaucuccaacugcguggcggacuacagcgugcuguacaacuccgccagcuucuccacguucaagugcuacggcgucagccccaccaagcucaacgaccugugcuucaccaacguguacgccgacuccuucgugauccgcggggacgagguccggcagaucgcccccggccagaccgggaagaucgccgacuacaacuacaagcugccggacgacuucacgggcugcgugaucgcguggaacagcaacaaccucgacuccaaggucgggggcaacuacaacuaccuguuccgccuguuccgcaagagcaaccucaagcccuucgagcgggacaucuccaccgagaucuaccaggccggcagcacccccugcaacgggguggagggcuucaacugcuacuucccccugcaguccuacggguuccagccgaccaacggcgugggguaccagcccuaccggguggucgugcugagcuucgagcuccugcacgcccccgccacggugugcggccccaagaaguccaccaaccuggucaagaacaagugcgugaacuucaacuucaacggccucaccgggaccggcgugcugaccgagagcaacaagaaguuccugccguuccagcaguucgggcgcgacaucgccgacacgaccgacgcgguccgcgacccccagacccuggagauccucgacaucacccccugcagcuucggcgggguguccgugaucacgccgggcaccaacaccagcaaccaggucgccgugcuguaccagggcgugaacugcaccgagguccccguggccauccacgccgaccagcugacgcccaccuggcggguguacuccaccgggagcaacgucuuccagacccgcgccggcugccucaucggggcggagcacgugaacaacuccuacgagugcgacauccccaucggcgccggcaucugcgccagcuaccagacgcagaccaacuccccgcggcgcgcccggagcguggcgucccagagcaucaucgccuacaccaugucccugggggccgagaacagcgucgccuacuccaacaacagcaucgccauccccaccaacuucacgaucuccgugaccaccgagauccugcccgugagcaugaccaagacgagcgucgacugcaccauguacaucugcggcgacuccaccgagugcagcaaccuccugcugcaguacggguccuucugcacccagcucaaccgcgcgcugacgggcaucgccguggagcaggacaagaacacccaggagguguucgcccaggucaagcagaucuacaagacgcccccgaucaaggacuucgggggcuucaacuucagccagauccugcccgaccccuccaagcccagcaagcgguccuucaucgaggaccuccuguucaacaaggugacccuggccgacgccggcuucaucaagcaguacggggacugccucggcgacaucgcggcccgcgaccugaucugcgcccagaaguucaacgggcugaccgugcucccgccccugcugaccgacgagaugaucgcccaguacaccagcgcccuccuggcgggcaccaucacguccggguggaccuucggcgccggcgccgcccugcagauccccuucgcgaugcagauggccuaccgguucaacgggaucggcgucacccagaacgugcucuacgagaaccagaagcugaucgccaaccaguucaacagcgccaucgggaagauccaggacucccugagcuccaccgccagcgcgcucggcaagcugcaggacguggucaaccagaacgcccaggcccugaacacgcucgugaagcagcuguccagcaacuucggggccaucuccagcgugcugaacgacauccucucccgccuggacaaggucgaggccgaggugcagaucgaccggcugaucaccggccgccuccagagccugcagaccuacgugacccagcagcugauccgggcggccgagauccgcgccagcgccaaccucgccgcgaccaagauguccgagugcguccugggccagagcaagcggguggacuucugcgggaagggcuaccaccugauguccuucccccagagcgccccgcacgggguggucuuccuccacgugacguacguccccgcccaggagaagaacuucaccaccgcccccgcgaucugccacgacggcaaggcccacuucccccgcgaggggguguucguguccaacggcacccacugguucgucacgcagcggaacuucuacgagccgcagaucaucaccaccgacaacaccuucgugagcggcaacugcgacguggucaucgggaucgugaacaacacgguguacgacccccugcagcccgagcuggacuccuucaaggaggagcucgacaaguacuucaagaaccacaccagccccgacgucgaccugggcgacaucuccgggaucaacgccagcguggugaacauccagaaggagaucgaccgccugaacgaggucgccaagaaccucaacgagucccugaucgaccugcaggagcucggcaaguacgagcaguacaucaaguggccgugguacaucuggcugggcuucaucgccgggcugaucgcgaucgugauggugaccaucaugcucugcugcaugaccagcugcugcuccugccugaagggcugcugcagcugcggguccugcugcaaguucgacgaggacgacagcgagcccguccugaagggcgugaagcuccacuacacgugauaauaggcuggagccucgguggccuagcuucuugccccuugggccuccccccagccccuccuccccuuccugcacccguacccccguggucuuugaauaaagucugagugggcggcaaaaaaaaaaaaaaaaaaaaaaaaaaaaaaaaaaaaaaaaaaaaaaaaaaaaaaaaaaaaaaaaaaaaaaaaaaaaaaaaaaaaaaaaaaaaaaaaaaaa

SEQ ID NO: 26075 - RNA, 4095 nt, Artificial Sequence
  SARS-CoV-2/Wuhan/WIV05/2019__EPI_ISL_402128 spike protein mRNA gc (1-1273)(D614G_I692V)
gggaaauaagagagaaaagaagaguaagaagaaauauaagaccccggcgccgccaccauguucguguuccugguccuccugccccuggugagcucccagugcgugaaccucaccacccgcacgcagcugccgcccgccuacaccaacagcuucacccggggcgucuacuaccccgacaagguguuccgcuccagcgugcugcacuccacccaggaccucuuccugcccuucuucagcaacgucacgugguuccacgccauccacguguccgggaccaacggcaccaagcgguucgacaacccggugcugcccuucaacgacggggucuacuucgcgagcaccgagaaguccaacaucauccgcggcuggaucuucgggacgacccucgacagcaagacccagucccugcugaucgugaacaacgccaccaacguggucaucaaggugugcgaguuccaguucugcaacgaccccuuccucggcguguacuaccacaagaacaacaagagcuggauggaguccgaguuccgggucuacagcuccgccaacaacugcacguucgaguacgugagccagcccuuccugauggaccuggagggcaagcaggggaacuucaagaaccuccgcgaguucguguucaagaacaucgacggcuacuucaagaucuacuccaagcacaccccgaucaaccugguccgggaccugccccagggguucagcgcccucgagccccugguggaccugcccaucggcaucaacaucacccgcuuccagacccuccuggcccugcaccgguccuaccucacgccgggggacagcagcuccggcuggaccgcgggcgccgccgccuacuacgugggguaccugcagccccgcaccuuccugcucaaguacaacgagaacggcaccaucacggacgcggucgacugcgcccuggacccccugagcgagaccaagugcacccucaaguccuucaccguggagaaggggaucuaccagacgagcaacuuccgggugcagcccaccgaguccaucguccgcuucccgaacaucaccaaccugugccccuucggcgagguguucaacgccacccgguucgccagcgucuacgccuggaaccgcaagcggaucuccaacugcguggcggacuacagcgugcuguacaacuccgccagcuucuccacguucaagugcuacggcgucagccccaccaagcucaacgaccugugcuucaccaacguguacgccgacuccuucgugauccgcggggacgagguccggcagaucgcccccggccagaccgggaagaucgccgacuacaacuacaagcugccggacgacuucacgggcugcgugaucgcguggaacagcaacaaccucgacuccaaggucgggggcaacuacaacuaccuguaccgccuguuccgcaagagcaaccucaagcccuucgagcgggacaucuccaccgagaucuaccaggccggcagcacccccugcaacgggguggagggcuucaacugcuacuucccccugcaguccuacggguuccagccgaccaacggcgugggguaccagcccuaccggguggucgugcugagcuucgagcuccugcacgcccccgccacggugugcggccccaagaaguccaccaaccuggucaagaacaagugcgugaacuucaacuucaacggccucaccgggaccggcgugcugaccgagagcaacaagaaguuccugccguuccagcaguucgggcgcgacaucgccgacacgaccgacgcgguccgcgacccccagacccuggagauccucgacaucacccccugcagcuucggcgggguguccgugaucacgccgggcaccaacaccagcaaccaggucgccgugcuguaccagggcgugaacugcaccgagguccccguggccauccacgccgaccagcugacgcccaccuggcggguguacuccaccgggagcaacgucuuccagacccgcgccggcugccucaucggggcggagcacgugaacaacuccuacgagugcgacauccccaucggcgccggcaucugcgccagcuaccagacgcagaccaacuccccgcggcgcgcccggagcguggcgucccagagcgucaucgccuacaccaugucccugggggccgagaacagcguggccuacuccaacaacagcaucgccauccccaccaacuucacgaucuccgugaccaccgagauccugcccgucagcaugaccaagacgagcguggacugcaccauguacaucugcggcgacuccaccgagugcagcaaccuccugcugcaguacggguccuucugcacccagcucaaccgcgcgcugacgggcaucgccguggagcaggacaagaacacccaggaggucuucgcccaggugaagcagaucuacaagacgcccccgaucaaggacuucgggggcuucaacuucagccagauccugcccgaccccuccaagcccagcaagcgguccuucaucgaggaccuccuguucaacaaggugacccuggccgacgccggcuucaucaagcaguacggggacugccucggcgacaucgcggcccgcgaccugaucugcgcccagaaguucaacgggcugaccguccucccgccccugcugaccgacgagaugaucgcccaguacaccagcgcccuccuggcgggcaccaucacguccggguggaccuucggcgccggcgccgcccugcagauccccuucgcgaugcagauggccuaccgguucaacgggaucggcgugacccagaacgugcucuacgagaaccagaagcugaucgccaaccaguucaacagcgccaucgggaagauccaggacucccugagcuccaccgccagcgcgcucggcaagcugcaggacgucgugaaccagaacgcccaggcccugaacacgcucgugaagcagcuguccagcaacuucggggccaucuccagcguccugaacgacauccucucccgccuggacaagguggaggccgaggugcagaucgaccggcugaucaccggccgccuccagagccugcagaccuacgucacccagcagcugauccgggcggccgagauccgcgccagcgccaaccucgccgcgaccaagauguccgagugcgugcugggccagagcaagcggguggacuucugcgggaagggcuaccaccugauguccuucccccagagcgccccgcacggggucguguuccuccacgucacguacgugcccgcccaggagaagaacuucaccaccgcccccgcgaucugccacgacggcaaggcccacuucccccgcgaggggguguucgucuccaacggcacccacugguucgugacgcagcggaacuucuacgagccgcagaucaucaccaccgacaacaccuucgugagcggcaacugcgacgucgugaucgggaucgugaacaacacggucuacgacccccugcagcccgagcuggacuccuucaaggaggagcucgacaaguacuucaagaaccacaccagccccgacguggaccugggcgacaucuccgggaucaacgccagcguggucaacauccagaaggagaucgaccgccugaacgagguggccaagaaccucaacgagucccugaucgaccugcaggagcucggcaaguacgagcaguacaucaaguggccgugguacaucuggcugggcuucaucgccgggcugaucgcgaucgugauggucaccaucaugcucugcugcaugaccagcugcugcuccugccugaagggcugcugcagcugcggguccugcugcaaguucgacgaggacgacagcgagcccgugcugaagggcgugaagcuccacuacacgugauaauaggcuggagccucgguggccuagcuucuugccccuugggccuccccccagccccuccuccccuuccugcacccguacccccguggucuuugaauaaagucugagugggcggcaaaaaaaaaaaaaaaaaaaaaaaaaaaaaaaaaaaaaaaaaaaaaaaaaaaaaaaaaaaaaaaaaaaaaaaaaaaaaaaaaaaaaaaaaaaaaaaaaaaa

SEQ ID NO: 26076 - RNA, 4095 nt, Artificial Sequence
  SARS-CoV-2/Wuhan/WIV05/2019__EPI_ISL_402128 spike protein mRNA gc (1-1273)(D614G_M1229I)
gggaaauaagagagaaaagaagaguaagaagaaauauaagaccccggcgccgccaccauguucguguuccugguccuccugccccuggugagcucccagugcgugaaccucaccacccgcacgcagcugccgcccgccuacaccaacagcuucacccggggcgucuacuaccccgacaagguguuccgcuccagcgugcugcacuccacccaggaccucuuccugcccuucuucagcaacgucacgugguuccacgccauccacguguccgggaccaacggcaccaagcgguucgacaacccggugcugcccuucaacgacggggucuacuucgcgagcaccgagaaguccaacaucauccgcggcuggaucuucgggacgacccucgacagcaagacccagucccugcugaucgugaacaacgccaccaacguggucaucaaggugugcgaguuccaguucugcaacgaccccuuccucggcguguacuaccacaagaacaacaagagcuggauggaguccgaguuccgggucuacagcuccgccaacaacugcacguucgaguacgugagccagcccuuccugauggaccuggagggcaagcaggggaacuucaagaaccuccgcgaguucguguucaagaacaucgacggcuacuucaagaucuacuccaagcacaccccgaucaaccugguccgggaccugccccagggguucagcgcccucgagccccugguggaccugcccaucggcaucaacaucacccgcuuccagacccuccuggcccugcaccgguccuaccucacgccgggggacagcagcuccggcuggaccgcgggcgccgccgccuacuacgugggguaccugcagccccgcaccuuccugcucaaguacaacgagaacggcaccaucacggacgcggucgacugcgcccuggacccccugagcgagaccaagugcacccucaaguccuucaccguggagaaggggaucuaccagacgagcaacuuccgggugcagcccaccgaguccaucguccgcuucccgaacaucaccaaccugugccccuucggcgagguguucaacgccacccgguucgccagcgucuacgccuggaaccgcaagcggaucuccaacugcguggcggacuacagcgugcuguacaacuccgccagcuucuccacguucaagugcuacggcgucagccccaccaagcucaacgaccugugcuucaccaacguguacgccgacuccuucgugauccgcggggacgagguccggcagaucgcccccggccagaccgggaagaucgccgacuacaacuacaagcugccggacgacuucacgggcugcgugaucgcguggaacagcaacaaccucgacuccaaggucgggggcaacuacaacuaccuguaccgccuguuccgcaagagcaaccucaagcccuucgagcgggacaucuccaccgagaucuaccaggccggcagcacccccugcaacgggguggagggcuucaacugcuacuucccccugcaguccuacggguuccagccgaccaacggcgugggguaccagcccuaccggguggucgugcugagcuucgagcuccugcacgcccccgccacggugugcggccccaagaaguccaccaaccuggucaagaacaagugcgugaacuucaacuucaacggccucaccgggaccggcgugcugaccgagagcaacaagaaguuccugccguuccagcaguucgggcgcgacaucgccgacacgaccgacgcgguccgcgacccccagacccuggagauccucgacaucacccccugcagcuucggcgggguguccgugaucacgccgggcaccaacaccagcaaccaggucgccgugcuguaccagggcgugaacugcaccgagguccccguggccauccacgccgaccagcugacgcccaccuggcggguguacuccaccgggagcaacgucuuccagacccgcgccggcugccucaucggggcggagcacgugaacaacuccuacgagugcgacauccccaucggcgccggcaucugcgccagcuaccagacgcagaccaacuccccgcggcgcgcccggagcguggcgucccagagcaucaucgccuacaccaugucccugggggccgagaacagcgucgccuacuccaacaacagcaucgccauccccaccaacuucacgaucuccgugaccaccgagauccugcccgugagcaugaccaagacgagcgucgacugcaccauguacaucugcggcgacuccaccgagugcagcaaccuccugcugcaguacggguccuucugcacccagcucaaccgcgcgcugacgggcaucgccguggagcaggacaagaacacccaggagguguucgcccaggucaagcagaucuacaagacgcccccgaucaaggacuucgggggcuucaacuucagccagauccugcccgaccccuccaagcccagcaagcgguccuucaucgaggaccuccuguucaacaaggugacccuggccgacgccggcuucaucaagcaguacggggacugccucggcgacaucgcggcccgcgaccugaucugcgcccagaaguucaacgggcugaccgugcucccgccccugcugaccgacgagaugaucgcccaguacaccagcgcccuccuggcgggcaccaucacguccggguggaccuucggcgccggcgccgcccugcagauccccuucgcgaugcagauggccuaccgguucaacgggaucggcgucacccagaacgugcucuacgagaaccagaagcugaucgccaaccaguucaacagcgccaucgggaagauccaggacucccugagcuccaccgccagcgcgcucggcaagcugcaggacguggucaaccagaacgcccaggcccugaacacgcucgugaagcagcuguccagcaacuucggggccaucuccagcgugcugaacgacauccucucccgccuggacaaggucgaggccgaggugcagaucgaccggcugaucaccggccgccuccagagccugcagaccuacgugacccagcagcugauccgggcggccgagauccgcgccagcgccaaccucgccgcgaccaagauguccgagugcguccugggccagagcaagcggguggacuucugcgggaagggcuaccaccugauguccuucccccagagcgccccgcacgggguggucuuccuccacgugacguacguccccgcccaggagaagaacuucaccaccgcccccgcgaucugccacgacggcaaggcccacuucccccgcgaggggguguucguguccaacggcacccacugguucgucacgcagcggaacuucuacgagccgcagaucaucaccaccgacaacaccuucgugagcggcaacugcgacguggucaucgggaucgugaacaacacgguguacgacccccugcagcccgagcuggacuccuucaaggaggagcucgacaaguacuucaagaaccacaccagccccgacgucgaccugggcgacaucuccgggaucaacgccagcguggugaacauccagaaggagaucgaccgccugaacgaggucgccaagaaccucaacgagucccugaucgaccugcaggagcucggcaaguacgagcaguacaucaaguggccgugguacaucuggcugggcuucaucgccgggcugaucgcgaucgugaucgugaccaucaugcucugcugcaugaccagcugcugcuccugccugaagggcugcugcagcugcggguccugcugcaaguucgacgaggacgacagcgagcccguccugaagggcgugaagcuccacuacacgugauaauaggcuggagccucgguggccuagcuucuugccccuugggccuccccccagccccuccuccccuuccugcacccguacccccguggucuuugaauaaagucugagugggcggcaaaaaaaaaaaaaaaaaaaaaaaaaaaaaaaaaaaaaaaaaaaaaaaaaaaaaaaaaaaaaaaaaaaaaaaaaaaaaaaaaaaaaaaaaaaaaaaaaaaa

SEQ ID NO: 26077 - RNA, 4089 nt, Artificial Sequence
  SARS-CoV-2/Wuhan/WIV05/2019__EPI_ISL_402128 spike protein mRNA gc (1-1273)(H69del_V70del_A222V_Y453F_S477N_D614G_I692V)
gggaaauaagagagaaaagaagaguaagaagaaauauaagaccccggcgccgccaccauguucguguuccugguccuccugccccuggugagcucccagugcgugaaccucaccacccgcacgcagcugccgcccgccuacaccaacagcuucacccggggcgucuacuaccccgacaagguguuccgcuccagcgugcugcacuccacccaggaccucuuccugcccuucuucagcaacgucacgugguuccacgccaucuccgggaccaacggcaccaagcgguucgacaacccggugcugcccuucaacgacgggguguacuucgcgagcaccgagaaguccaacaucauccgcggcuggaucuucgggacgacccucgacagcaagacccagucccugcugaucgucaacaacgccaccaacguggugaucaaggucugcgaguuccaguucugcaacgaccccuuccucggcguguacuaccacaagaacaacaagagcuggauggaguccgaguuccggguguacagcuccgccaacaacugcacguucgaguacgucagccagcccuuccugauggaccuggagggcaagcaggggaacuucaagaaccuccgcgaguucguguucaagaacaucgacggcuacuucaagaucuacuccaagcacaccccgaucaaccuggugcgggaccugccccagggguucagcguccucgagccccugguggaccugcccaucggcaucaacaucacccgcuuccagacccuccuggcccugcaccgguccuaccucacgccgggggacagcagcuccggcuggaccgccggcgcggccgccuacuacgugggguaccugcagccccgcaccuuccugcucaaguacaacgagaacggcaccaucacggacgccgucgacugcgcgcuggacccccugagcgagaccaagugcacccucaaguccuucaccguggagaaggggaucuaccagacgagcaacuuccgggugcagcccaccgaguccaucguccgcuucccgaacaucaccaaccugugccccuucggcgagguguucaacgccacccgguucgccagcgucuacgccuggaaccgcaagcggaucuccaacugcguggccgacuacagcgugcuguacaacuccgcgagcuucuccacguucaagugcuacggcgucagccccaccaagcucaacgaccugugcuucaccaacguguacgccgacuccuucgugauccgcggggacgagguccggcagaucgcccccggccagaccgggaagaucgccgacuacaacuacaagcugccggacgacuucacgggcugcgugaucgccuggaacagcaacaaccucgacuccaaggucgggggcaacuacaacuaccuguuccgccuguuccgcaagagcaaccucaagcccuucgagcgggacaucuccaccgagaucuaccaggcgggcaacacccccugcaacgggguggagggcuucaacugcuacuucccccugcagagcuacggguuccagccgaccaacggcgugggguaccagcccuaccggguggucgugcuguccuucgagcuccugcacgcccccgccacggugugcggccccaagaaguccaccaaccuggucaagaacaagugcgugaacuucaacuucaacggccucaccgggaccggcgugcugaccgagagcaacaagaaguuccugccguuccagcaguucgggcgcgacaucgccgacacgaccgacgccguccgcgacccccagacccuggagauccucgacaucacccccugcagcuucggcggggugagcgugaucacgccgggcaccaacaccuccaaccaggucgcggugcuguaccagggcgugaacugcaccgagguccccguggccauccacgccgaccagcugacgcccaccuggcggguguacagcaccggguccaacgucuuccagacccgcgccggcugccucaucggggccgagcacgugaacaacagcuacgagugcgacauccccaucggcgcgggcaucugcgccuccuaccagacgcagaccaacagcccgcggcgcgcccgguccguggccagccaguccgucaucgcguacaccaugagccugggggccgagaacuccguggccuacagcaacaacuccaucgccauccccaccaacuucacgaucagcgugaccaccgagauccugcccgucuccaugaccaagacgagcguggacugcaccauguacaucugcggcgacagcaccgagugcuccaaccuccugcugcaguacgggagcuucugcacccagcucaaccgcgcccugacgggcaucgcgguggagcaggacaagaacacccaggaggucuucgcccaggugaagcagaucuacaagacgcccccgaucaaggacuucgggggcuucaacuucucccagauccugcccgaccccagcaagcccuccaagcggagcuucaucgaggaccuccuguucaacaaggugacccuggccgacgccggcuucaucaagcaguacggggacugccucggcgacaucgccgcgcgcgaccugaucugcgcccagaaguucaacgggcugaccguccucccgccccugcugaccgacgagaugaucgcccaguacaccuccgcccuccuggccggcaccaucacgagcggguggaccuucggcgcgggcgccgcccugcagauccccuucgccaugcagauggcguaccgguucaacgggaucggcgugacccagaacgugcucuacgagaaccagaagcugaucgccaaccaguucaacuccgccaucgggaagauccaggacagccuguccagcaccgccuccgcccucggcaagcugcaggacgucgugaaccagaacgcgcaggcccugaacacgcucgugaagcagcugagcuccaacuucggggccaucagcuccguccugaacgacauccucagccgccuggacaagguggaggccgaggugcagaucgaccggcugaucaccggccgccuccagucccugcagaccuacgucacccagcagcugauccgggccgcggagauccgcgccagcgccaaccucgccgccaccaagaugagcgagugcgugcugggccaguccaagcggguggacuucugcgggaagggcuaccaccugaugagcuucccccaguccgcgccgcacggggucguguuccuccacgucacguacgugcccgcccaggagaagaacuucaccaccgcccccgccaucugccacgacggcaaggcgcacuucccccgcgaggggguguucgucagcaacggcacccacugguucgugacgcagcggaacuucuacgagccgcagaucaucaccaccgacaacaccuucguguccggcaacugcgacgucgugaucgggaucgugaacaacacggucuacgacccccugcagcccgagcuggacagcuucaaggaggagcucgacaaguacuucaagaaccacaccucccccgacguggaccugggcgacaucagcgggaucaacgccuccguggucaacauccagaaggagaucgaccgccugaacgagguggccaagaaccucaacgagagccugaucgaccugcaggagcucggcaaguacgagcaguacaucaaguggccgugguacaucuggcugggcuucaucgccgggcugaucgccaucgugauggucaccaucaugcucugcugcaugaccuccugcugcagcugccugaagggcugcugcuccugcgggagcugcugcaaguucgacgaggacgacuccgagcccgugcugaagggcgugaagcuccacuacacgugauaauaggcuggagccucgguggccuagcuucuugccccuugggccuccccccagccccuccuccccuuccugcacccguacccccguggucuuugaauaaagucugagugggcggcaaaaaaaaaaaaaaaaaaaaaaaaaaaaaaaaaaaaaaaaaaaaaaaaaaaaaaaaaaaaaaaaaaaaaaaaaaaaaaaaaaaaaaaaaaaaaaaaaaaa

SEQ ID NO: 26078 - RNA, 4089 nt, Artificial Sequence
  SARS-CoV-2/Wuhan/WIV05/2019__EPI_ISL_402128 spike protein mRNA gc (1-1273)(H69del_V70del_Y453F_D614G_I692V_M1229I)
gggaaauaagagagaaaagaagaguaagaagaaauauaagaccccggcgccgccaccauguucguguuccugguccuccugccccuggugagcucccagugcgugaaccucaccacccgcacgcagcugccgcccgccuacaccaacagcuucacccggggcgucuacuaccccgacaagguguuccgcuccagcgugcugcacuccacccaggaccucuuccugcccuucuucagcaacgucacgugguuccacgccaucuccgggaccaacggcaccaagcgguucgacaacccggugcugcccuucaacgacgggguguacuucgcgagcaccgagaaguccaacaucauccgcggcuggaucuucgggacgacccucgacagcaagacccagucccugcugaucgucaacaacgccaccaacguggugaucaaggucugcgaguuccaguucugcaacgaccccuuccucggcguguacuaccacaagaacaacaagagcuggauggaguccgaguuccggguguacagcuccgccaacaacugcacguucgaguacgucagccagcccuuccugauggaccuggagggcaagcaggggaacuucaagaaccuccgcgaguucguguucaagaacaucgacggcuacuucaagaucuacuccaagcacaccccgaucaaccuggugcgggaccugccccagggguucagcgcccucgagccccuggucgaccugcccaucggcaucaacaucacccgcuuccagacccuccuggcccugcaccgguccuaccucacgccgggggacagcagcuccggcuggaccgcgggcgccgccgccuacuacgugggguaccugcagccccgcaccuuccugcucaaguacaacgagaacggcaccaucacggacgcgguggacugcgcccuggacccccugagcgagaccaagugcacccucaaguccuucaccgucgagaaggggaucuaccagacgagcaacuuccgggugcagcccaccgaguccaucgugcgcuucccgaacaucaccaaccugugccccuucggcgaggucuucaacgccacccgguucgccagcguguacgccuggaaccgcaagcggaucuccaacugcgucgcggacuacagcgugcuguacaacuccgccagcuucuccacguucaagugcuacggcgugagccccaccaagcucaacgaccugugcuucaccaacgucuacgccgacuccuucgugauccgcggggacgaggugcggcagaucgcccccggccagaccgggaagaucgccgacuacaacuacaagcugccggacgacuucacgggcugcgucaucgcguggaacagcaacaaccucgacuccaaggucgggggcaacuacaacuaccuguuccgccuguuccgcaagagcaaccucaagcccuucgagcgggacaucuccaccgagaucuaccaggccggcagcacccccugcaacgggguggagggcuucaacugcuacuucccccugcaguccuacggguuccagccgaccaacggcgugggguaccagcccuaccggguggugguccugagcuucgagcuccugcacgcccccgccacggugugcggccccaagaaguccaccaaccuggugaagaacaagugcgucaacuucaacuucaacggccucaccgggaccggcgugcugaccgagagcaacaagaaguuccugccguuccagcaguucgggcgcgacaucgccgacacgaccgacgcggugcgcgacccccagacccuggagauccucgacaucacccccugcagcuucggcggggucuccgugaucacgccgggcaccaacaccagcaaccagguggccguccuguaccagggcgugaacugcaccgaggugcccgucgccauccacgccgaccagcugacgcccaccuggcggguguacuccaccgggagcaacguguuccagacccgcgccggcugccucaucggggcggagcacgucaacaacuccuacgagugcgacauccccaucggcgccggcaucugcgccagcuaccagacgcagaccaacuccccgcggcgcgcccggagcguggcgucccagagcgugaucgccuacaccaugucccugggggccgagaacagcgucgccuacuccaacaacagcaucgccauccccaccaacuucacgaucuccgugaccaccgagauccugcccgugagcaugaccaagacgagcgucgacugcaccauguacaucugcggcgacuccaccgagugcagcaaccuccugcugcaguacggguccuucugcacccagcucaaccgcgcgcugacgggcaucgccguggagcaggacaagaacacccaggagguguucgcccaggucaagcagaucuacaagacgcccccgaucaaggacuucgggggcuucaacuucagccagauccugcccgaccccuccaagcccagcaagcgguccuucaucgaggaccuccuguucaacaaggugacccuggccgacgccggcuucaucaagcaguacggggacugccucggcgacaucgcggcccgcgaccugaucugcgcccagaaguucaacgggcugaccgugcucccgccccugcugaccgacgagaugaucgcccaguacaccagcgcccuccuggcgggcaccaucacguccggguggaccuucggcgccggcgccgcccugcagauccccuucgcgaugcagauggccuaccgguucaacgggaucggcgucacccagaacgugcucuacgagaaccagaagcugaucgccaaccaguucaacagcgccaucgggaagauccaggacucccugagcuccaccgccagcgcgcucggcaagcugcaggacguggucaaccagaacgcccaggcccugaacacgcucgugaagcagcuguccagcaacuucggggccaucuccagcgugcugaacgacauccucucccgccuggacaaggucgaggccgaggugcagaucgaccggcugaucaccggccgccuccagagccugcagaccuacgugacccagcagcugauccgggcggccgagauccgcgccagcgccaaccucgccgcgaccaagauguccgagugcguccugggccagagcaagcggguggacuucugcgggaagggcuaccaccugauguccuucccccagagcgccccgcacgggguggucuuccuccacgugacguacguccccgcccaggagaagaacuucaccaccgcccccgcgaucugccacgacggcaaggcccacuucccccgcgaggggguguucguguccaacggcacccacugguucgucacgcagcggaacuucuacgagccgcagaucaucaccaccgacaacaccuucgugagcggcaacugcgacguggucaucgggaucgugaacaacacgguguacgacccccugcagcccgagcuggacuccuucaaggaggagcucgacaaguacuucaagaaccacaccagccccgacgucgaccugggcgacaucuccgggaucaacgccagcguggugaacauccagaaggagaucgaccgccugaacgaggucgccaagaaccucaacgagucccugaucgaccugcaggagcucggcaaguacgagcaguacaucaaguggccgugguacaucuggcugggcuucaucgccgggcugaucgcgaucgugaucgugaccaucaugcucugcugcaugaccagcugcugcuccugccugaagggcugcugcagcugcggguccugcugcaaguucgacgaggacgacagcgagcccguccugaagggcgugaagcuccacuacacgugauaauaggcuggagccucgguggccuagcuucuugccccuugggccuccccccagccccuccuccccuuccugcacccguacccccguggucuuugaauaaagucugagugggcggcaaaaaaaaaaaaaaaaaaaaaaaaaaaaaaaaaaaaaaaaaaaaaaaaaaaaaaaaaaaaaaaaaaaaaaaaaaaaaaaaaaaaaaaaaaaaaaaaaaaa

SEQ ID NO: 26079 - RNA, 4086 nt, Artificial Sequence
  SARS-CoV-2/Wuhan/WIV05/2019__EPI_ISL_402128 spike protein mRNA gc (1-1273)(H69del_V70del_Y144del_N501Y_A570D_D614G_P681H_T716I_S982 A_D1118H)
gggaaauaagagagaaaagaagaguaagaagaaauauaagaccccggcgccgccaccauguucguguuccugguccuccugccccuggugagcucccagugcgugaaccucaccacccgcacgcagcugccgcccgccuacaccaacagcuucacccggggcgucuacuaccccgacaagguguuccgcuccagcgugcugcacuccacccaggaccucuuccugcccuucuucagcaacgucacgugguuccacgccaucuccgggaccaacggcaccaagcgguucgacaacccggugcugcccuucaacgacgggguguacuucgcgagcaccgagaaguccaacaucauccgcggcuggaucuucgggacgacccucgacagcaagacccagucccugcugaucgucaacaacgccaccaacguggugaucaaggucugcgaguuccaguucugcaacgaccccuuccucggcguguaccacaagaacaacaagagcuggauggaguccgaguuccggguguacagcuccgccaacaacugcacguucgaguacgucagccagcccuuccugauggaccuggagggcaagcaggggaacuucaagaaccuccgcgaguucguguucaagaacaucgacggcuacuucaagaucuacuccaagcacaccccgaucaaccuggugcgggaccugccccagggguucagcgcccucgagccccuggucgaccugcccaucggcaucaacaucacccgcuuccagacccuccuggcccugcaccgguccuaccucacgccgggggacagcagcuccggcuggaccgcgggcgccgccgccuacuacgugggguaccugcagccccgcaccuuccugcucaaguacaacgagaacggcaccaucacggacgcgguggacugcgcccuggacccccugagcgagaccaagugcacccucaaguccuucaccgucgagaaggggaucuaccagacgagcaacuuccgggugcagcccaccgaguccaucgugcgcuucccgaacaucaccaaccugugccccuucggcgaggucuucaacgccacccgguucgccagcguguacgccuggaaccgcaagcggaucuccaacugcgucgcggacuacagcgugcuguacaacuccgccagcuucuccacguucaagugcuacggcgugagccccaccaagcucaacgaccugugcuucaccaacgucuacgccgacuccuucgugauccgcggggacgaggugcggcagaucgcccccggccagaccgggaagaucgccgacuacaacuacaagcugccggacgacuucacgggcugcgucaucgcguggaacagcaacaaccucgacuccaaggucgggggcaacuacaacuaccuguaccgccuguuccgcaagagcaaccucaagcccuucgagcgggacaucuccaccgagaucuaccaggccggcagcacccccugcaacgggguggagggcuucaacugcuacuucccccugcaguccuacggguuccagccgaccuacggcgugggguaccagcccuaccggguggugguccugagcuucgagcuccugcacgcccccgccacggugugcggccccaagaaguccaccaaccuggugaagaacaagugcgucaacuucaacuucaacggccucaccgggaccggcgugcugaccgagagcaacaagaaguuccugccguuccagcaguucgggcgcgacaucgacgacacgaccgacgccgugcgcgacccccagacccuggagauccucgacaucacccccugcagcuucggcggggucuccgugaucacgccgggcaccaacaccagcaaccagguggcgguccuguaccagggcgugaacugcaccgaggugcccgucgccauccacgccgaccagcugacgcccaccuggcggguguacuccaccgggagcaacguguuccagacccgcgccggcugccucaucggggccgagcacgucaacaacuccuacgagugcgacauccccaucggcgcgggcaucugcgccagcuaccagacgcagaccaacucccaccggcgcgcccggagcguggccucccagagcaucaucgcguacaccaugucccugggggccgagaacagcguggccuacuccaacaacagcaucgccaucccgaucaacuucaccaucuccgucacgaccgagauccugcccgugagcaugaccaagaccagcguggacugcacgauguacaucugcggcgacuccaccgagugcagcaaccuccugcugcaguacggguccuucugcacccagcucaaccgcgcccugaccggcaucgcggucgagcaggacaagaacacgcaggagguguucgcccaggugaagcagaucuacaagaccccgcccaucaaggacuucgggggcuucaacuucagccagauccugcccgaccccuccaagcccagcaagcgguccuucaucgaggaccuccuguucaacaaggucacccuggccgacgccggcuucaucaagcaguacggggacugccucggcgacaucgccgcgcgcgaccugaucugcgcccagaaguucaacgggcugaccgugcugcccccgcuccugacggacgagaugaucgcccaguacaccagcgcccuccuggccggcaccaucaccuccggguggacguucggcgcgggcgccgcccugcagauccccuucgccaugcagauggcguaccgguucaacgggaucggcgugacccagaacguccucuacgagaaccagaagcugaucgccaaccaguucaacagcgccaucgggaagauccaggacucccugagcuccaccgccagcgcccucggcaagcugcaggacguggugaaccagaacgcgcaggcccugaacacccucgucaagcagcuguccagcaacuucggggccaucuccagcgugcugaacgacauccucgcccgccuggacaagguggaggccgagguccagaucgaccggcugaucacgggccgccuccagucccugcagaccuacgugacccagcagcugauccgggcggccgagauccgcgccagcgccaaccucgccgcgaccaagaugagcgagugcgugcugggccaguccaagcgggucgacuucugcgggaagggcuaccaccugaugagcuucccccaguccgcgccccacggggugguguuccuccacgucaccuacgugccggcccaggagaagaacuucacgaccgcccccgccaucugccacgacggcaaggcccacuucccccgcgagggggucuucgugagcaacggcacccacugguucgugacccagcggaacuucuacgagccccagaucaucacgacccacaacaccuucgucuccggcaacugcgacguggugaucgggaucgucaacaacaccguguacgacccgcugcagcccgagcuggacagcuucaaggaggagcucgacaaguacuucaagaaccacacgucccccgacguggaccugggcgacaucagcgggaucaacgccuccgucgugaacauccagaaggagaucgaccgccugaacgagguggccaagaaccucaacgagagccugaucgaccugcaggagcucggcaaguacgagcaguacaucaaguggcccugguacaucuggcugggcuucaucgccgggcugaucgcgaucgucauggugaccaucaugcucugcugcaugaccuccugcugcagcugccugaagggcugcugcuccugcgggagcugcugcaaguucgacgaggacgacuccgagccggugcugaagggcgucaagcuccacuacaccugauaauaggcuggagccucgguggccuagcuucuugccccuugggccuccccccagccccuccuccccuuccugcacccguacccccguggucuuugaauaaagucugagugggcggcaaaaaaaaaaaaaaaaaaaaaaaaaaaaaaaaaaaaaaaaaaaaaaaaaaaaaaaaaaaaaaaaaaaaaaaaaaaaaaaaaaaaaaaaaaaaaaaaaaaa

SEQ ID NO: 26080 - RNA, 4095 nt, Artificial Sequence
  SARS-CoV-2/Wuhan/WIV05/2019__EPI_ISL_402128 spike protein mRNA gc (1-1273)(K417N_E484K_N501Y_D614G)
gggaaauaagagagaaaagaagaguaagaagaaauauaagaccccggcgccgccaccauguucguguuccugguccuccugccccuggugagcucccagugcgugaaccucaccacccgcacgcagcugccgcccgccuacaccaacagcuucacccggggcgucuacuaccccgacaagguguuccgcuccagcgugcugcacuccacccaggaccucuuccugcccuucuucagcaacgucacgugguuccacgccauccacguguccgggaccaacggcaccaagcgguucgacaacccggugcugcccuucaacgacggggucuacuucgcgagcaccgagaaguccaacaucauccgcggcuggaucuucgggacgacccucgacagcaagacccagucccugcugaucgugaacaacgccaccaacguggucaucaaggugugcgaguuccaguucugcaacgaccccuuccucggcguguacuaccacaagaacaacaagagcuggauggaguccgaguuccgggucuacagcuccgccaacaacugcacguucgaguacgugagccagcccuuccugauggaccuggagggcaagcaggggaacuucaagaaccuccgcgaguucguguucaagaacaucgacggcuacuucaagaucuacuccaagcacaccccgaucaaccugguccgggaccugccccagggguucagcgcccucgagccccugguggaccugcccaucggcaucaacaucacccgcuuccagacccuccuggcccugcaccgguccuaccucacgccgggggacagcagcuccggcuggaccgcgggcgccgccgccuacuacgugggguaccugcagccccgcaccuuccugcucaaguacaacgagaacggcaccaucacggacgcggucgacugcgcccuggacccccugagcgagaccaagugcacccucaaguccuucaccguggagaaggggaucuaccagacgagcaacuuccgggugcagcccaccgaguccaucguccgcuucccgaacaucaccaaccugugccccuucggcgagguguucaacgccacccgguucgccagcgucuacgccuggaaccgcaagcggaucuccaacugcguggcggacuacagcgugcuguacaacuccgccagcuucuccacguucaagugcuacggcgucagccccaccaagcucaacgaccugugcuucaccaacguguacgccgacuccuucgugauccgcggggacgagguccggcagaucgcccccggccagaccgggaacaucgccgacuacaacuacaagcugccggacgacuucacgggcugcgugaucgcguggaacagcaacaaccucgacuccaaggucgggggcaacuacaacuaccuguaccgccuguuccgcaagagcaaccucaagcccuucgagcgggacaucuccaccgagaucuaccaggccggcagcacccccugcaacggggugaagggcuucaacugcuacuucccccugcaguccuacggguuccagccgaccuacggcgugggguaccagcccuaccggguggucgugcugagcuucgagcuccugcacgcccccgccacggugugcggccccaagaaguccaccaaccuggucaagaacaagugcgugaacuucaacuucaacggccucaccgggaccggcgugcugaccgagagcaacaagaaguuccugccguuccagcaguucgggcgcgacaucgccgacacgaccgacgcgguccgcgacccccagacccuggagauccucgacaucacccccugcagcuucggcgggguguccgugaucacgccgggcaccaacaccagcaaccaggucgccgugcuguaccagggcgugaacugcaccgagguccccguggccauccacgccgaccagcugacgcccaccuggcggguguacuccaccgggagcaacgucuuccagacccgcgccggcugccucaucggggcggagcacgugaacaacuccuacgagugcgacauccccaucggcgccggcaucugcgccagcuaccagacgcagaccaacuccccgcggcgcgcccggagcguggcgucccagagcaucaucgccuacaccaugucccugggggccgagaacagcgucgccuacuccaacaacagcaucgccauccccaccaacuucacgaucuccgugaccaccgagauccugcccgugagcaugaccaagacgagcgucgacugcaccauguacaucugcggcgacuccaccgagugcagcaaccuccugcugcaguacggguccuucugcacccagcucaaccgcgcgcugacgggcaucgccguggagcaggacaagaacacccaggagguguucgcccaggucaagcagaucuacaagacgcccccgaucaaggacuucgggggcuucaacuucagccagauccugcccgaccccuccaagcccagcaagcgguccuucaucgaggaccuccuguucaacaaggugacccuggccgacgccggcuucaucaagcaguacggggacugccucggcgacaucgcggcccgcgaccugaucugcgcccagaaguucaacgggcugaccgugcucccgccccugcugaccgacgagaugaucgcccaguacaccagcgcccuccuggcgggcaccaucacguccggguggaccuucggcgccggcgccgcccugcagauccccuucgcgaugcagauggccuaccgguucaacgggaucggcgucacccagaacgugcucuacgagaaccagaagcugaucgccaaccaguucaacagcgccaucgggaagauccaggacucccugagcuccaccgccagcgcgcucggcaagcugcaggacguggucaaccagaacgcccaggcccugaacacgcucgugaagcagcuguccagcaacuucggggccaucuccagcgugcugaacgacauccucucccgccuggacaaggucgaggccgaggugcagaucgaccggcugaucaccggccgccuccagagccugcagaccuacgugacccagcagcugauccgggcggccgagauccgcgccagcgccaaccucgccgcgaccaagauguccgagugcguccugggccagagcaagcggguggacuucugcgggaagggcuaccaccugauguccuucccccagagcgccccgcacgggguggucuuccuccacgugacguacguccccgcccaggagaagaacuucaccaccgcccccgcgaucugccacgacggcaaggcccacuucccccgcgaggggguguucguguccaacggcacccacugguucgucacgcagcggaacuucuacgagccgcagaucaucaccaccgacaacaccuucgugagcggcaacugcgacguggucaucgggaucgugaacaacacgguguacgacccccugcagcccgagcuggacuccuucaaggaggagcucgacaaguacuucaagaaccacaccagccccgacgucgaccugggcgacaucuccgggaucaacgccagcguggugaacauccagaaggagaucgaccgccugaacgaggucgccaagaaccucaacgagucccugaucgaccugcaggagcucggcaaguacgagcaguacaucaaguggccgugguacaucuggcugggcuucaucgccgggcugaucgcgaucgugauggugaccaucaugcucugcugcaugaccagcugcugcuccugccugaagggcugcugcagcugcggguccugcugcaaguucgacgaggacgacagcgagcccguccugaagggcgugaagcuccacuacacgugauaauaggcuggagccucgguggccuagcuucuugccccuugggccuccccccagccccuccuccccuuccugcacccguacccccguggucuuugaauaaagucugagugggcggcaaaaaaaaaaaaaaaaaaaaaaaaaaaaaaaaaaaaaaaaaaaaaaaaaaaaaaaaaaaaaaaaaaaaaaaaaaaaaaaaaaaaaaaaaaaaaaaaaaaa

SEQ ID NO: 26081 - RNA, 4086 nt, Artificial Sequence
  SARS-CoV-2/Wuhan/WIV05/2019__EPI_ISL_402128 spike protein mRNA gc (1-1273)(L18F_D80A_D215G_L242del_A243del_L244del_R246I_K417N_E484 K_N501Y_D614G_A701V)
gggaaauaagagagaaaagaagaguaagaagaaauauaagaccccggcgccgccaccauguucguguuccugguccuccugccccuggugagcucccagugcgugaacuucaccacccgcacgcagcucccgcccgccuacaccaacagcuucacccggggcgucuacuaccccgacaagguguuccgcuccagcgugcugcacuccacccaggaccuguuccuccccuucuucagcaacgucacgugguuccacgccauccacguguccgggaccaacggcaccaagcgguucgcgaacccggugcugcccuucaacgacggggucuacuucgccagcaccgagaaguccaacaucauccgcggcuggaucuucgggacgacccuggacagcaagacccagucccuccugaucgugaacaacgccaccaacguggucaucaaggugugcgaguuccaguucugcaacgaccccuuccugggcguguacuaccacaagaacaacaagagcuggauggaguccgaguuccgggucuacagcuccgccaacaacugcacguucgaguacgugagccagcccuuccucauggaccuggagggcaagcaggggaacuucaagaaccugcgcgaguucguguucaagaacaucgacggcuacuucaagaucuacuccaagcacaccccgaucaaccucguccgggggcugccccagggcuucagcgcccuggagccccucguggaccugcccaucgggaucaacaucacccgcuuccagacccugcacaucuccuaccucacgccgggcgacagcagcuccggcuggaccgcgggggccgccgccuacuacgugggcuaccugcagccccggaccuuccugcucaaguacaacgagaacgggaccaucacggacgcggucgacugcgcccuggacccccugagcgagaccaagugcacccucaaguccuucaccguggagaagggcaucuaccagacgagcaacuuccgcgugcagcccaccgaguccaucguccgguucccgaacaucaccaaccugugccccuucggcgagguguucaacgccacccgcuucgccagcgucuacgccuggaaccggaagcgcaucuccaacugcguggcggacuacagcgugcuguacaacuccgccagcuucuccacguucaagugcuacggggucagccccaccaagcucaacgaccugugcuucaccaacguguacgccgacuccuucgugauccggggcgacgagguccgccagaucgcccccgggcagaccggcaacaucgccgacuacaacuacaagcugccggacgacuucacggggugcgugaucgcguggaacagcaacaaccucgacuccaaggugggcggcaacuacaacuaccuguaccggcuguuccgcaagagcaaccucaagcccuucgagcgggacaucuccaccgagaucuaccaggccgggagcacccccugcaacggcgucaagggguucaacugcuacuucccccugcaguccuacggcuuccagccgaccuacggggugggcuaccagcccuaccgcguggucgugcugagcuucgagcuccugcacgcccccgccacggugugcggccccaagaaguccaccaaccuggucaagaacaagugcgugaacuucaacuucaacgggcucaccggcaccggggugcugaccgagagcaacaagaaguuccugccguuccagcaguucggccgggacaucgccgacacgaccgacgcgguccgcgacccccagacccucgagauccuggacaucacccccugcagcuucgggggcguguccgugaucacgccgggcaccaacaccagcaaccaggucgccgugcuguaccagggggugaacugcaccgagguccccguggccauccacgccgaccagcugacgcccaccuggcgcguguacuccaccggcagcaacgucuuccagacccgggccgggugccucaucggcgcggagcacgugaacaacuccuacgagugcgacauccccaucggcgccgggaucugcgccagcuaccagacgcagaccaacuccccgcgccgggcccgcagcguggcgucccagagcaucaucgccuacaccaugucccugggcgucgagaacagcguggccuacuccaacaacagcaucgccauccccaccaacuucacgaucuccgugaccaccgagauccugcccgucagcaugaccaagacgagcguggacugcaccauguacaucugcggggacuccaccgagugcagcaaccuccugcugcaguacggcuccuucugcacccagcucaaccgggcccugacggggaucgcgguggagcaggacaagaacacccaggaggucuucgcccaggugaagcagaucuacaagacgcccccgaucaaggacuucggcggcuucaacuucagccagauccugcccgaccccuccaagcccagcaagcgcuccuucaucgaggaccuccuguucaacaaggugacccuggccgacgccggguucaucaagcaguacggcgacugccucggggacaucgccgcgcgggaccugaucugcgcccagaaguucaacggccugaccguccucccgccccugcugaccgacgagaugaucgcccaguacaccagcgcccuccuggccgggaccaucacguccggcuggaccuucggcgcgggggccgcccugcagauccccuucgccaugcagauggcguaccgcuucaacggcaucggggugacccagaacgugcucuacgagaaccagaagcugaucgccaaccaguucaacagcgccaucggcaagauccaggacucccugagcuccaccgccagcgcccucgggaagcugcaggacgucgugaaccagaacgcgcaggcccugaacacgcucgugaagcagcuguccagcaacuucggcgccaucuccagcguccugaacgacauccucucccggcuggacaagguggaggccgaggugcagaucgaccgccugaucaccggccggcuccagagccugcagaccuacgucacccagcagcugauccgcgccgcggagauccgggccagcgccaaccucgccgccaccaagauguccgagugcgugcuggggcagagcaagcgcguggacuucugcggcaagggguaccaccugauguccuucccccagagcgcgccgcacggcgucguguuccuccacgucacguacgugcccgcccaggagaagaacuucaccaccgcccccgccaucugccacgacgggaaggcgcacuucccccgggagggcguguucgucuccaacggcacccacugguucgugacgcagcgcaacuucuacgagccgcagaucaucaccaccgacaacaccuucgugagcgggaacugcgacgucgugaucggcaucgugaacaacacggucuacgacccccugcagcccgagcuggacuccuucaaggaggagcucgacaaguacuucaagaaccacaccagccccgacguggaccugggggacaucuccggcaucaacgccagcguggucaacauccagaaggagaucgaccggcugaacgagguggccaagaaccucaacgagucccugaucgaccugcaggagcucggcaaguacgagcaguacaucaaguggccgugguacaucuggcugggguucaucgccggccugaucgccaucgugauggucaccaucaugcucugcugcaugaccagcugcugcuccugccugaaggggugcugcagcugcggcuccugcugcaaguucgacgaggacgacagcgagcccgugcugaagggggugaagcuccacuacacgugauaauaggcuggagccucgguggccuagcuucuugccccuugggccuccccccagccccuccuccccuuccugcacccguacccccguggucuuugaauaaagucugagugggcggcaaaaaaaaaaaaaaaaaaaaaaaaaaaaaaaaaaaaaaaaaaaaaaaaaaaaaaaaaaaaaaaaaaaaaaaaaaaaaaaaaaaaaaaaaaaaaaaaaaaa

SEQ ID NO: 26082 - RNA, 4095 nt, Artificial Sequence
  SARS-CoV-2/Wuhan/WIV05/2019__EPI_ISL_402128 spike protein mRNA gc (1-1273)(E484K_D614G)
gggaaauaagagagaaaagaagaguaagaagaaauauaagaccccggcgccgccaccauguucguguuccugguccuccugccccuggugagcucccagugcgugaaccucaccacccgcacgcagcugccgcccgccuacaccaacagcuucacccggggcgucuacuaccccgacaagguguuccgcuccagcgugcugcacuccacccaggaccucuuccugcccuucuucagcaacgucacgugguuccacgccauccacguguccgggaccaacggcaccaagcgguucgacaacccggugcugcccuucaacgacggggucuacuucgcgagcaccgagaaguccaacaucauccgcggcuggaucuucgggacgacccucgacagcaagacccagucccugcugaucgugaacaacgccaccaacguggucaucaaggugugcgaguuccaguucugcaacgaccccuuccucggcguguacuaccacaagaacaacaagagcuggauggaguccgaguuccgggucuacagcuccgccaacaacugcacguucgaguacgugagccagcccuuccugauggaccuggagggcaagcaggggaacuucaagaaccuccgcgaguucguguucaagaacaucgacggcuacuucaagaucuacuccaagcacaccccgaucaaccugguccgggaccugccccagggguucagcgcccucgagccccugguggaccugcccaucggcaucaacaucacccgcuuccagacccuccuggcccugcaccgguccuaccucacgccgggggacagcagcuccggcuggaccgcgggcgccgccgccuacuacgugggguaccugcagccccgcaccuuccugcucaaguacaacgagaacggcaccaucacggacgcggucgacugcgcccuggacccccugagcgagaccaagugcacccucaaguccuucaccguggagaaggggaucuaccagacgagcaacuuccgggugcagcccaccgaguccaucguccgcuucccgaacaucaccaaccugugccccuucggcgagguguucaacgccacccgguucgccagcgucuacgccuggaaccgcaagcggaucuccaacugcguggcggacuacagcgugcuguacaacuccgccagcuucuccacguucaagugcuacggcgucagccccaccaagcucaacgaccugugcuucaccaacguguacgccgacuccuucgugauccgcggggacgagguccggcagaucgcccccggccagaccgggaagaucgccgacuacaacuacaagcugccggacgacuucacgggcugcgugaucgcguggaacagcaacaaccucgacuccaaggucgggggcaacuacaacuaccuguaccgccuguuccgcaagagcaaccucaagcccuucgagcgggacaucuccaccgagaucuaccaggccggcagcacccccugcaacggggugaagggcuucaacugcuacuucccccugcaguccuacggguuccagccgaccaacggcgugggguaccagcccuaccggguggucgugcugagcuucgagcuccugcacgcccccgccacggugugcggccccaagaaguccaccaaccuggucaagaacaagugcgugaacuucaacuucaacggccucaccgggaccggcgugcugaccgagagcaacaagaaguuccugccguuccagcaguucgggcgcgacaucgccgacacgaccgacgcgguccgcgacccccagacccuggagauccucgacaucacccccugcagcuucggcgggguguccgugaucacgccgggcaccaacaccagcaaccaggucgccgugcuguaccagggcgugaacugcaccgagguccccguggccauccacgccgaccagcugacgcccaccuggcggguguacuccaccgggagcaacgucuuccagacccgcgccggcugccucaucggggcggagcacgugaacaacuccuacgagugcgacauccccaucggcgccggcaucugcgccagcuaccagacgcagaccaacuccccgcggcgcgcccggagcguggcgucccagagcaucaucgccuacaccaugucccugggggccgagaacagcgucgccuacuccaacaacagcaucgccauccccaccaacuucacgaucuccgugaccaccgagauccugcccgugagcaugaccaagacgagcgucgacugcaccauguacaucugcggcgacuccaccgagugcagcaaccuccugcugcaguacggguccuucugcacccagcucaaccgcgcgcugacgggcaucgccguggagcaggacaagaacacccaggagguguucgcccaggucaagcagaucuacaagacgcccccgaucaaggacuucgggggcuucaacuucagccagauccugcccgaccccuccaagcccagcaagcgguccuucaucgaggaccuccuguucaacaaggugacccuggccgacgccggcuucaucaagcaguacggggacugccucggcgacaucgcggcccgcgaccugaucugcgcccagaaguucaacgggcugaccgugcucccgccccugcugaccgacgagaugaucgcccaguacaccagcgcccuccuggcgggcaccaucacguccggguggaccuucggcgccggcgccgcccugcagauccccuucgcgaugcagauggccuaccgguucaacgggaucggcgucacccagaacgugcucuacgagaaccagaagcugaucgccaaccaguucaacagcgccaucgggaagauccaggacucccugagcuccaccgccagcgcgcucggcaagcugcaggacguggucaaccagaacgcccaggcccugaacacgcucgugaagcagcuguccagcaacuucggggccaucuccagcgugcugaacgacauccucucccgccuggacaaggucgaggccgaggugcagaucgaccggcugaucaccggccgccuccagagccugcagaccuacgugacccagcagcugauccgggcggccgagauccgcgccagcgccaaccucgccgcgaccaagauguccgagugcguccugggccagagcaagcggguggacuucugcgggaagggcuaccaccugauguccuucccccagagcgccccgcacgggguggucuuccuccacgugacguacguccccgcccaggagaagaacuucaccaccgcccccgcgaucugccacgacggcaaggcccacuucccccgcgaggggguguucguguccaacggcacccacugguucgucacgcagcggaacuucuacgagccgcagaucaucaccaccgacaacaccuucgugagcggcaacugcgacguggucaucgggaucgugaacaacacgguguacgacccccugcagcccgagcuggacuccuucaaggaggagcucgacaaguacuucaagaaccacaccagccccgacgucgaccugggcgacaucuccgggaucaacgccagcguggugaacauccagaaggagaucgaccgccugaacgaggucgccaagaaccucaacgagucccugaucgaccugcaggagcucggcaaguacgagcaguacaucaaguggccgugguacaucuggcugggcuucaucgccgggcugaucgcgaucgugauggugaccaucaugcucugcugcaugaccagcugcugcuccugccugaagggcugcugcagcugcggguccugcugcaaguucgacgaggacgacagcgagcccguccugaagggcgugaagcuccacuacacgugauaauaggcuggagccucgguggccuagcuucuugccccuugggccuccccccagccccuccuccccuuccugcacccguacccccguggucuuugaauaaagucugagugggcggcaaaaaaaaaaaaaaaaaaaaaaaaaaaaaaaaaaaaaaaaaaaaaaaaaaaaaaaaaaaaaaaaaaaaaaaaaaaaaaaaaaaaaaaaaaaaaaaaaaaa

SEQ ID NO: 26083 - RNA, 4095 nt, Artificial Sequence
  SARS-CoV-2/Wuhan/WIV05/2019__EPI_ISL_402128 spike protein mRNA gc (1-1273)(L18F_T20N_P26S_D138Y_R190S_K417T_E484K_N501Y_D614G_H655Y _T1027I)
gggaaauaagagagaaaagaagaguaagaagaaauauaagaccccggcgccgccaccauguucguguuccugguccuccugccccuggugagcucccagugcgugaacuucaccaaccgcacccagcucccgagcgccuacacgaacuccuucacccggggcgucuacuaccccgacaagguguuccgcagcuccgugcugcacagcacccaggaccuguuccuccccuucuucuccaacgucaccugguuccacgccauccacgugagcgggacgaacggcaccaagcgguucgacaaccccgugcugccguucaacgacggggucuacuucgcguccaccgagaaguccaacaucauccgcggcuggaucuucgggaccacgcuggacuccaagacccagagccuccugaucgugaacaacgccaccaacguggucaucaaggugugcgaguuccaguucugcaacuaccccuuccugggcguguacuaccacaagaacaacaaguccuggauggagagcgaguuccgggucuacuccagcgccaacaacugcaccuucgaguacgugucccagcccuuccucauggaccuggagggcaagcaggggaacuucaagaaccugagcgaguucguguucaagaacaucgacggcuacuucaagaucuacuccaagcacacgcccaucaaccucguccgcgaccugccgcagggguucagcgcccuggagccccucguggaccugcccaucggcaucaacaucacccgguuccagacccugcucgcccugcaccgcagcuaccugacccccggggacuccagcuccggcuggacggcgggcgccgccgccuacuacgugggguaccuccagccgcggaccuuccugcugaaguacaacgagaacggcaccaucaccgacgcggucgacugcgcccucgacccccugagcgagacgaagugcacccugaaguccuucaccguggagaaggggaucuaccagaccagcaacuuccgcgugcagcccacggaguccaucguccgguuccccaacaucaccaaccucugcccguucggcgagguguucaacgccacccgcuucgccagcgucuacgccuggaaccggaagcgcaucuccaacugcguggcggacuacagcgugcuguacaacuccgccagcuucuccaccuucaagugcuacggcgucagccccacgaagcugaacgaccucugcuucaccaacguguacgccgacuccuucgugauccgcggggacgagguccggcagaucgcccccggccagaccgggaccaucgccgacuacaacuacaagcugcccgacgacuucacgggcugcgugaucgcguggaacagcaacaaccuggacuccaaggucgggggcaacuacaacuaccucuaccggcuguuccgcaagagcaaccugaagccguucgagcgggacaucuccaccgagaucuaccaggccggcagcacccccugcaacggggugaagggcuucaacugcuacuucccccuccagagcuacggguuccagcccaccuacggcgugggguaccagccguaccgcguggucgugcuguccuucgagcugcuccacgcccccgccacggugugcggccccaagaaguccaccaaccuggucaagaacaagugcgugaacuucaacuucaacggccugaccgggaccggcgugcucaccgagagcaacaagaaguuccugcccuuccagcaguucgggcgggacaucgccgacacgaccgacgcgguccgcgacccgcagacccuggagauccuggacaucacccccugcagcuucggcgggguguccgugaucacgcccggcaccaacaccagcaaccaggucgccgugcucuaccagggcgugaacugcaccgaggucccgguggccauccacgccgaccagcugacgcccaccuggcgcguguacuccaccgggagcaacgucuuccagacccgggccggcugccugaucggggcggaguacgugaacaacuccuacgagugcgacauccccaucggcgccggcaucugcgccagcuaccagacgcagaccaacagcccccgccgggcccgcagcguggcgucccagagcaucaucgccuacaccaugucccucggggccgagaacagcgucgccuacuccaacaacagcaucgccaucccgaccaacuucacgaucagcgugaccaccgagauccugcccguguccaugaccaagacgagcgucgacugcaccauguacaucugcggcgacuccaccgagugcagcaaccugcuccugcaguacggguccuucugcacccagcugaaccgggcgcucacgggcaucgccguggagcaggacaagaacacccaggagguguucgcccaggucaagcagaucuacaagaccccgcccaucaaggacuucgggggcuucaacuucagccagauccugcccgaccccuccaagcccagcaagcgcuccuucaucgaggaccuccuguucaacaaggugacccuggccgacgccggcuucaucaagcaguacggggacugccugggcgacaucgcggcccgggaccucaucugcgcccagaaguucaacgggcugacggugcugcccccgcuccugaccgacgagaugaucgcccaguacaccagcgcccugcucgcgggcaccaucacguccggguggaccuucggcgccggcgccgcccugcagauccccuucgcgaugcagauggccuaccgcuucaacgggaucggcgucacccagaacgugcuguacgagaaccagaagcucaucgccaaccaguucaacagcgccaucgggaagauccaggacucccugagcuccaccgccagcgcgcugggcaagcuccaggacguggucaaccagaacgcccaggcccugaacacgcuggugaagcagcucuccagcaacuucggggccaucuccagcgugcugaacgacauccugagccggcucgacaaggucgaggccgaggugcagaucgaccgccugaucaccggccggcugcagucccuccagaccuacgugacccagcagcugauccgcgcggccgagauccgggccagcgccaaccuggccgcgaucaagauguccgagugcguccucggccagagcaagcgcguggacuucugcgggaagggcuaccaccugauguccuucccccagagcgcgccccacgggguggucuuccugcacgugaccuacgucccggcccaggagaagaacuucacgaccgcccccgccaucugccacgacggcaaggcccacuucccccgggaggggguguucguguccaacggcacccacugguucgucacccagcgcaacuucuacgagccccagaucaucacgaccgacaacaccuucgugagcggcaacugcgacguggucaucgggaucgugaacaacaccguguacgacccgcuccagcccgagcuggacuccuucaaggaggagcuggacaaguacuucaagaaccacacgagccccgacgucgaccucggcgacaucuccgggaucaacgccagcguggugaacauccagaaggagaucgaccggcugaacgaggucgccaagaaccugaacgagucccucaucgaccugcaggagcugggcaaguacgagcaguacaucaaguggcccugguacaucuggcucggcuucaucgccgggcugaucgcgaucgugauggugaccaucaugcugugcugcaugaccagcugcugcuccugccucaagggcugcugcagcugcggguccugcugcaaguucgacgaggacgacagcgagccgguccugaagggcgugaagcugcacuacaccugauaauaggcuggagccucgguggccuagcuucuugccccuugggccuccccccagccccuccuccccuuccugcacccguacccccguggucuuugaauaaagucugagugggcggcaaaaaaaaaaaaaaaaaaaaaaaaaaaaaaaaaaaaaaaaaaaaaaaaaaaaaaaaaaaaaaaaaaaaaaaaaaaaaaaaaaaaaaaaaaaaaaaaaaaa

SEQ ID NO: 26084 - RNA, 4095 nt, Artificial Sequence
  SARS-CoV-2/Wuhan/WIV05/2019__EPI_ISL_402128 spike protein mRNA gc (1-1273)(S13I_W152C_L452R_D614G)
gggaaauaagagagaaaagaagaguaagaagaaauauaagaccccggcgccgccaccauguucguguuccugguccuccugccccuggugagcauccagugcgugaaccucaccacccgcacgcagcugccgcccgccuacaccaacuccuucacccggggcgucuacuaccccgacaagguguuccgcagcuccgugcugcacagcacccaggaccucuuccugcccuucuucuccaacgucacgugguuccacgccauccacgugagcgggaccaacggcaccaagcgguucgacaacccggugcugcccuucaacgacggggucuacuucgcguccaccgagaaguccaacaucauccgcggcuggaucuucgggacgacccucgacagcaagacccagagccugcugaucgugaacaacgccaccaacguggucaucaaggugugcgaguuccaguucugcaacgaccccuuccucggcguguacuaccacaagaacaacaaguccugcauggagagcgaguuccgggucuacuccagcgccaacaacugcacguucgaguacgugucccagcccuuccugauggaccuggagggcaagcaggggaacuucaagaaccuccgcgaguucguguucaagaacaucgacggcuacuucaagaucuacagcaagcacaccccgaucaaccugguccgggaccugccccagggguucuccgcccucgagccccugguggaccugcccaucggcaucaacaucacccgcuuccagacccuccuggcccugcaccggagcuaccucacgccgggggacuccagcagcggcuggaccgcgggcgccgccgccuacuacgugggguaccugcagccccgcaccuuccugcucaaguacaacgagaacggcaccaucacggacgcggucgacugcgcccuggacccccuguccgagaccaagugcacccucaagagcuucaccguggagaaggggaucuaccagacguccaacuuccgggugcagcccaccgagagcaucguccgcuucccgaacaucaccaaccugugccccuucggcgagguguucaacgccacccgguucgccuccgucuacgccuggaaccgcaagcggaucagcaacugcguggcggacuacuccgugcuguacaacagcgccuccuucagcacguucaagugcuacggcgucucccccaccaagcucaacgaccugugcuucaccaacguguacgccgacagcuucgugauccgcggggacgagguccggcagaucgcccccggccagaccgggaagaucgccgacuacaacuacaagcugccggacgacuucacgggcugcgugaucgcguggaacuccaacaaccucgacagcaaggucgggggcaacuacaacuaccgcuaccggcuguuccgcaaguccaaccugaagcccuucgagcgggacaucagcaccgagaucuaccaggccggcuccacccccugcaacgggguggagggcuucaacugcuacuucccccuccagagcuacggguuccagccgaccaacggcgugggguaccagcccuaccgcguggucgugcuguccuucgagcugcuccacgcccccgccacggugugcggccccaagaaguccaccaaccuggucaagaacaagugcgugaacuucaacuucaacggccugaccgggaccggcgugcucaccgagagcaacaagaaguuccugccguuccagcaguucgggcgcgacaucgccgacacgaccgacgcgguccgggacccccagacccuggagauccuggacaucacccccugcagcuucggcggggugagcgugaucacgccgggcaccaacaccuccaaccaggucgccgugcucuaccagggcgugaacugcaccgagguccccguggccauccacgccgaccagcugacgcccaccuggcgcguguacagcaccggguccaacgucuuccagacccgggccggcugccugaucggggcggagcacgugaacaacagcuacgagugcgacauccccaucggcgccggcaucugcgccuccuaccagacgcagaccaacagcccgcgccgggcccgcuccguggcgagccaguccaucaucgccuacaccaugagccucggggccgagaacuccgucgccuacagcaacaacuccaucgccauccccaccaacuucacgaucagcgugaccaccgagauccugcccguguccaugaccaagacgagcgucgacugcaccauguacaucugcggcgacagcaccgagugcuccaaccugcuccugcaguacgggagcuucugcacccagcugaaccgggcgcucacgggcaucgccguggagcaggacaagaacacccaggagguguucgcccaggucaagcagaucuacaagacgcccccgaucaaggacuucgggggcuucaacuucucccagauccugcccgaccccagcaagcccuccaagcgcagcuucaucgaggaccuccuguucaacaaggugacccuggccgacgccggcuucaucaagcaguacggggacugccugggcgacaucgcggcccgggaccucaucugcgcccagaaguucaacgggcugaccgugcugccgccccuccugaccgacgagaugaucgcccaguacaccuccgcccugcucgcgggcaccaucacgagcggguggaccuucggcgccggcgccgcccugcagauccccuucgcgaugcagauggccuaccgcuucaacgggaucggcgucacccagaacgugcuguacgagaaccagaagcucaucgccaaccaguucaacuccgccaucgggaagauccaggacagccuguccagcaccgccuccgcgcugggcaagcuccaggacguggucaaccagaacgcccaggcccugaacacgcuggugaagcagcucagcuccaacuucggggccaucagcuccgugcugaacgacauccugagccggcucgacaaggucgaggccgaggugcagaucgaccgccugaucaccggccggcugcagucccuccagaccuacgugacccagcagcugauccgcgcggccgagauccgggccagcgccaaccuggccgcgaccaagaugagcgagugcguccucggccaguccaagcgcguggacuucugcgggaagggcuaccaccugaugagcuucccccaguccgccccgcacgggguggucuuccugcacgugacguacguccccgcccaggagaagaacuucaccaccgcccccgcgaucugccacgacggcaaggcccacuucccccgggaggggguguucgugagcaacggcacccacugguucgucacgcagcgcaacuucuacgagccgcagaucaucaccaccgacaacaccuucguguccggcaacugcgacguggucaucgggaucgugaacaacacgguguacgacccccuccagcccgagcuggacagcuucaaggaggagcuggacaaguacuucaagaaccacaccucccccgacgucgaccucggcgacaucagcgggaucaacgccuccguggugaacauccagaaggagaucgaccggcugaacgaggucgccaagaaccugaacgagagccucaucgaccugcaggagcugggcaaguacgagcaguacaucaaguggccgugguacaucuggcucggcuucaucgccgggcugaucgcgaucgugauggugaccaucaugcugugcugcaugaccuccugcugcagcugccucaagggcugcugcuccugcgggagcugcugcaaguucgacgaggacgacuccgagcccguccugaagggcgugaagcugcacuacacgugauaauaggcuggagccucgguggccuagcuucuugccccuugggccuccccccagccccuccuccccuuccugcacccguacccccguggucuuugaauaaagucugagugggcggcaaaaaaaaaaaaaaaaaaaaaaaaaaaaaaaaaaaaaaaaaaaaaaaaaaaaaaaaaaaaaaaaaaaaaaaaaaaaaaaaaaaaaaaaaaaaaaaaaaaa

SEQ ID NO: 26085 - RNA, 4095 nt, Artificial Sequence
  SARS-CoV-2/Wuhan/WIV05/2019__EPI_ISL_402128 spike protein mRNA gc (1-1273)
gggaaauaagagagaaaagaagaguaagaagaaauauaagaccccggcgccgccaccauguucguguuccuggugcugcugccccuggugagcagccagugcgugaaccugaccacccggacccagcugccaccagccuacaccaacagcuucacccggggcgucuacuaccccgacaagguguuccggagcagcguccugcacagcacccaggaccuguuccugcccuucuucagcaacgugaccugguuccacgccauccacgugagcggcaccaacggcaccaagcgguucgacaaccccgugcugcccuucaacgacggcguguacuucgccagcaccgagaagagcaacaucauccggggcuggaucuucggcaccacccuggacagcaagacccagagccugcugaucgugaauaacgccaccaacguggugaucaaggugugcgaguuccaguucugcaacgaccccuuccugggcguguacuaccacaagaacaacaagagcuggauggagagcgaguuccggguguacagcagcgccaacaacugcaccuucgaguacgugagccagcccuuccugauggaccuggagggcaagcagggcaacuucaagaaccugcgggaguucguguucaagaacaucgacggcuacuucaagaucuacagcaagcacaccccaaucaaccuggugcgggaucugccccagggcuucucagcccuggagccccugguggaccugcccaucggcaucaacaucacccgguuccagacccugcuggcccugcaccggagcuaccugaccccaggcgacagcagcagcggguggacagcaggcgcggcugcuuacuacgugggcuaccugcagccccggaccuuccugcugaaguacaacgagaacggcaccaucaccgacgccguggacugcgcccuggacccucugagcgagaccaagugcacccugaagagcuucaccguggagaagggcaucuaccagaccagcaacuuccgggugcagcccaccgagagcaucgugcgguuccccaacaucaccaaccugugccccuucggcgagguguucaacgccacccgguucgccagcguguacgccuggaaccggaagcggaucagcaacugcguggccgacuacagcgugcuguacaacagcgccagcuucagcaccuucaagugcuacggcgugagccccaccaagcugaacgaccugugcuucaccaacguguacgccgacagcuucgugauccguggcgacgaggugcggcagaucgcacccggccagacaggcaagaucgccgacuacaacuacaagcugcccgacgacuucaccggcugcgugaucgccuggaacagcaacaaccucgacagcaaggugggcggcaacuacaacuaccuguaccggcuguuccggaagagcaaccugaagcccuucgagcgggacaucagcaccgagaucuaccaagccggcuccaccccuugcaacggcguggagggcuucaacugcuacuucccucugcagagcuacggcuuccagcccaccaacggcgugggcuaccagcccuaccgggugguggugcugagcuucgagcugcugcacgccccagccaccguguguggccccaagaagagcaccaaccuggugaagaacaagugcgugaacuucaacuucaacggccuuaccggcaccggcgugcugaccgagagcaacaagaaauuccugcccuuucagcaguucggccgggacaucgccgacaccaccgacgcugugcgggauccccagacccuggagauccuggacaucaccccuugcagcuucggcggcgugagcgugaucaccccaggcaccaacaccagcaaccagguggccgugcuguaccaggacgugaacugcaccgaggugcccguggccauccacgccgaccagcugacacccaccuggcgggucuacagcaccggcagcaacguguuccagacccgggccgguugccugaucggcgccgagcacgugaacaacagcuacgagugcgacauccccaucggcgccggcaucugugccagcuaccagacccagaccaauucaccccggagggcaaggagcguggccagccagagcaucaucgccuacaccaugagccugggcgccgagaacagcguggccuacagcaacaacagcaucgccauccccaccaacuucaccaucagcgugaccaccgagauucugcccgugagcaugaccaagaccagcguggacugcaccauguacaucugcggcgacagcaccgagugcagcaaccugcugcugcaguacggcagcuucugcacccagcugaaccgggcccugaccggcaucgccguggagcaggacaagaacacccaggagguguucgcccaggugaagcagaucuacaagaccccucccaucaaggacuucggcggcuucaacuucagccagauccugcccgaccccagcaagcccagcaagcggagcuucaucgaggaccugcuguucaacaaggugacccuagccgacgccggcuucaucaagcaguacggcgacugccucggcgacauagccgcccgggaccugaucugcgcccagaaguucaacggccugaccgugcugccuccccugcugaccgacgagaugaucgcccaguacaccagcgcccuguuagccggaaccaucaccagcggcuggacuuucggcgcuggagccgcucugcagauccccuucgccaugcagauggccuaccgguucaacggcaucggcgugacccagaacgugcuguacgagaaccagaagcugaucgccaaccaguucaacagcgccaucggcaagauccaggacagccugagcagcaccgcuagcgcccugggcaagcugcaggacguggugaaccagaacgcccaggcccugaacacccuggugaagcagcugagcagcaacuucggcgccaucagcagcgugcugaacgacauccugagccggcuggacaaggucgaggccgaggugcagaucgaccggcugaucacuggccggcugcagagccugcagaccuacgugacccagcagcugauccgggccgccgagauucgggccagcgccaaccuggccgccaccaagaugagcgagugcgugcugggccagagcaagcggguggacuucugcggcaagggcuaccaccugaugagcuuuccccagagcgcaccccacggagugguguuccugcacgugaccuacgugcccgcccaggagaagaacuucaccaccgccccagccaucugccacgacggcaaggcccacuuuccccgggagggcguguucgugagcaacggcacccacugguucgugacccagcggaacuucuacgagccccagaucaucaccaccgacaacaccuucgugagcggcaacugcgacguggugaucggcaucgugaacaacaccguguacgauccccugcagcccgagcuggacagcuucaaggaggagcuggacaaguacuucaagaaucacaccagccccgacguggaccugggcgacaucagcggcaucaacgccagcguggugaacauccagaaggagaucgaucggcugaacgagguggccaagaaccugaacgagagccugaucgaccugcaggagcugggcaaguacgagcaguacaucaaguggcccugguacaucuggcugggcuucaucgccggccugaucgccaucgugauggugaccaucaugcugugcugcaugaccagcugcugcagcugccugaagggcuguugcagcugcggcagcugcugcaaguucgacgaggacgacagcgagcccgugcugaagggcgugaagcugcacuacaccugauaauaggcuggagccucgguggccuagcuucuugccccuugggccuccccccagccccuccuccccuuccugcacccguacccccguggucuuugaauaaagucugagugggcggcaaaaaaaaaaaaaaaaaaaaaaaaaaaaaaaaaaaaaaaaaaaaaaaaaaaaaaaaaaaaaaaaaaaaaaaaaaaaaaaaaaaaaaaaaaaaaaaaaaaa

SEQ ID NO: 26086 - RNA, 4095 nt, Artificial Sequence
  SARS-CoV-2/Wuhan/WIV05/2019__EPI_ISL_402128 spike protein mRNA gc (1-1273)(D614G)
gggaaauaagagagaaaagaagaguaagaagaaauauaagaccccggcgccgccaccauguucguguuccuggugcugcugccccuggugagcagccagugcgugaaccugaccacccggacccagcugccaccagccuacaccaacagcuucacccggggcgucuacuaccccgacaagguguuccggagcagcguccugcacagcacccaggaccuguuccugcccuucuucagcaacgugaccugguuccacgccauccacgugagcggcaccaacggcaccaagcgguucgacaaccccgugcugcccuucaacgacggcguguacuucgccagcaccgagaagagcaacaucauccggggcuggaucuucggcaccacccuggacagcaagacccagagccugcugaucgugaauaacgccaccaacguggugaucaaggugugcgaguuccaguucugcaacgaccccuuccugggcguguacuaccacaagaacaacaagagcuggauggagagcgaguuccggguguacagcagcgccaacaacugcaccuucgaguacgugagccagcccuuccugauggaccuggagggcaagcagggcaacuucaagaaccugcgggaguucguguucaagaacaucgacggcuacuucaagaucuacagcaagcacaccccaaucaaccuggugcgggaucugccccagggcuucucagcccuggagccccugguggaccugcccaucggcaucaacaucacccgguuccagacccugcuggcccugcaccggagcuaccugaccccaggcgacagcagcagcggguggacagcaggcgcggcugcuuacuacgugggcuaccugcagccccggaccuuccugcugaaguacaacgagaacggcaccaucaccgacgccguggacugcgcccuggacccucugagcgagaccaagugcacccugaagagcuucaccguggagaagggcaucuaccagaccagcaacuuccgggugcagcccaccgagagcaucgugcgguuccccaacaucaccaaccugugccccuucggcgagguguucaacgccacccgguucgccagcguguacgccuggaaccggaagcggaucagcaacugcguggccgacuacagcgugcuguacaacagcgccagcuucagcaccuucaagugcuacggcgugagccccaccaagcugaacgaccugugcuucaccaacguguacgccgacagcuucgugauccguggcgacgaggugcggcagaucgcacccggccagacaggcaagaucgccgacuacaacuacaagcugcccgacgacuucaccggcugcgugaucgccuggaacagcaacaaccucgacagcaaggugggcggcaacuacaacuaccuguaccggcuguuccggaagagcaaccugaagcccuucgagcgggacaucagcaccgagaucuaccaagccggcuccaccccuugcaacggcguggagggcuucaacugcuacuucccucugcagagcuacggcuuccagcccaccaacggcgugggcuaccagcccuaccgggugguggugcugagcuucgagcugcugcacgccccagccaccguguguggccccaagaagagcaccaaccuggugaagaacaagugcgugaacuucaacuucaacggccuuaccggcaccggcgugcugaccgagagcaacaagaaauuccugcccuuucagcaguucggccgggacaucgccgacaccaccgacgcugugcgggauccccagacccuggagauccuggacaucaccccuugcagcuucggcggcgugagcgugaucaccccaggcaccaacaccagcaaccagguggccgugcuguaccagggcgugaacugcaccgaggugcccguggccauccacgccgaccagcugacacccaccuggcgggucuacagcaccggcagcaacguguuccagacccgggccgguugccugaucggcgccgagcacgugaacaacagcuacgagugcgacauccccaucggcgccggcaucugugccagcuaccagacccagaccaauucaccccggagggcaaggagcguggccagccagagcaucaucgccuacaccaugagccugggcgccgagaacagcguggccuacagcaacaacagcaucgccauccccaccaacuucaccaucagcgugaccaccgagauucugcccgugagcaugaccaagaccagcguggacugcaccauguacaucugcggcgacagcaccgagugcagcaaccugcugcugcaguacggcagcuucugcacccagcugaaccgggcccugaccggcaucgccguggagcaggacaagaacacccaggagguguucgcccaggugaagcagaucuacaagaccccucccaucaaggacuucggcggcuucaacuucagccagauccugcccgaccccagcaagcccagcaagcggagcuucaucgaggaccugcuguucaacaaggugacccuagccgacgccggcuucaucaagcaguacggcgacugccucggcgacauagccgcccgggaccugaucugcgcccagaaguucaacggccugaccgugcugccuccccugcugaccgacgagaugaucgcccaguacaccagcgcccuguuagccggaaccaucaccagcggcuggacuuucggcgcuggagccgcucugcagauccccuucgccaugcagauggccuaccgguucaacggcaucggcgugacccagaacgugcuguacgagaaccagaagcugaucgccaaccaguucaacagcgccaucggcaagauccaggacagccugagcagcaccgcuagcgcccugggcaagcugcaggacguggugaaccagaacgcccaggcccugaacacccuggugaagcagcugagcagcaacuucggcgccaucagcagcgugcugaacgacauccugagccggcuggacaaggucgaggccgaggugcagaucgaccggcugaucacuggccggcugcagagccugcagaccuacgugacccagcagcugauccgggccgccgagauucgggccagcgccaaccuggccgccaccaagaugagcgagugcgugcugggccagagcaagcggguggacuucugcggcaagggcuaccaccugaugagcuuuccccagagcgcaccccacggagugguguuccugcacgugaccuacgugcccgcccaggagaagaacuucaccaccgccccagccaucugccacgacggcaaggcccacuuuccccgggagggcguguucgugagcaacggcacccacugguucgugacccagcggaacuucuacgagccccagaucaucaccaccgacaacaccuucgugagcggcaacugcgacguggugaucggcaucgugaacaacaccguguacgauccccugcagcccgagcuggacagcuucaaggaggagcuggacaaguacuucaagaaucacaccagccccgacguggaccugggcgacaucagcggcaucaacgccagcguggugaacauccagaaggagaucgaucggcugaacgagguggccaagaaccugaacgagagccugaucgaccugcaggagcugggcaaguacgagcaguacaucaaguggcccugguacaucuggcugggcuucaucgccggccugaucgccaucgugauggugaccaucaugcugugcugcaugaccagcugcugcagcugccugaagggcuguugcagcugcggcagcugcugcaaguucgacgaggacgacagcgagcccgugcugaagggcgugaagcugcacuacaccugauaauaggcuggagccucgguggccuagcuucuugccccuugggccuccccccagccccuccuccccuuccugcacccguacccccguggucuuugaauaaagucugagugggcggcaaaaaaaaaaaaaaaaaaaaaaaaaaaaaaaaaaaaaaaaaaaaaaaaaaaaaaaaaaaaaaaaaaaaaaaaaaaaaaaaaaaaaaaaaaaaaaaaaaaa

SEQ ID NO: 26087 - RNA, 4095 nt, Artificial Sequence
  SARS-CoV-2/Wuhan/WIV05/2019__EPI_ISL_402128 spike protein mRNA gc (1-1273)(A222V_D614G)
gggaaauaagagagaaaagaagaguaagaagaaauauaagaccccggcgccgccaccauguucguguuccuggugcugcugccccuggugagcagccagugcgugaaccugaccacccggacccagcugccaccagccuacaccaacagcuucacccggggcgucuacuaccccgacaagguguuccggagcagcguccugcacagcacccaggaccuguuccugcccuucuucagcaacgugaccugguuccacgccauccacgugagcggcaccaacggcaccaagcgguucgacaaccccgugcugcccuucaacgacggcguguacuucgccagcaccgagaagagcaacaucauccggggcuggaucuucggcaccacccuggacagcaagacccagagccugcugaucgugaauaacgccaccaacguggugaucaaggugugcgaguuccaguucugcaacgaccccuuccugggcguguacuaccacaagaacaacaagagcuggauggagagcgaguuccggguguacagcagcgccaacaacugcaccuucgaguacgugagccagcccuuccugauggaccuggagggcaagcagggcaacuucaagaaccugcgggaguucguguucaagaacaucgacggcuacuucaagaucuacagcaagcacaccccaaucaaccuggugcgggaucugccccagggcuucucagugcuggagccccugguggaccugcccaucggcaucaacaucacccgguuccagacccugcuggcccugcaccggagcuaccugaccccaggcgacagcagcagcggguggacagcaggcgcggcugcuuacuacgugggcuaccugcagccccggaccuuccugcugaaguacaacgagaacggcaccaucaccgacgccguggacugcgcccuggacccucugagcgagaccaagugcacccugaagagcuucaccguggagaagggcaucuaccagaccagcaacuuccgggugcagcccaccgagagcaucgugcgguuccccaacaucaccaaccugugccccuucggcgagguguucaacgccacccgguucgccagcguguacgccuggaaccggaagcggaucagcaacugcguggccgacuacagcgugcuguacaacagcgccagcuucagcaccuucaagugcuacggcgugagccccaccaagcugaacgaccugugcuucaccaacguguacgccgacagcuucgugauccguggcgacgaggugcggcagaucgcacccggccagacaggcaagaucgccgacuacaacuacaagcugcccgacgacuucaccggcugcgugaucgccuggaacagcaacaaccucgacagcaaggugggcggcaacuacaacuaccuguaccggcuguuccggaagagcaaccugaagcccuucgagcgggacaucagcaccgagaucuaccaagccggcuccaccccuugcaacggcguggagggcuucaacugcuacuucccucugcagagcuacggcuuccagcccaccaacggcgugggcuaccagcccuaccgggugguggugcugagcuucgagcugcugcacgccccagccaccguguguggccccaagaagagcaccaaccuggugaagaacaagugcgugaacuucaacuucaacggccuuaccggcaccggcgugcugaccgagagcaacaagaaauuccugcccuuucagcaguucggccgggacaucgccgacaccaccgacgcugugcgggauccccagacccuggagauccuggacaucaccccuugcagcuucggcggcgugagcgugaucaccccaggcaccaacaccagcaaccagguggccgugcuguaccagggcgugaacugcaccgaggugcccguggccauccacgccgaccagcugacacccaccuggcgggucuacagcaccggcagcaacguguuccagacccgggccgguugccugaucggcgccgagcacgugaacaacagcuacgagugcgacauccccaucggcgccggcaucugugccagcuaccagacccagaccaauucaccccggagggcaaggagcguggccagccagagcaucaucgccuacaccaugagccugggcgccgagaacagcguggccuacagcaacaacagcaucgccauccccaccaacuucaccaucagcgugaccaccgagauucugcccgugagcaugaccaagaccagcguggacugcaccauguacaucugcggcgacagcaccgagugcagcaaccugcugcugcaguacggcagcuucugcacccagcugaaccgggcccugaccggcaucgccguggagcaggacaagaacacccaggagguguucgcccaggugaagcagaucuacaagaccccucccaucaaggacuucggcggcuucaacuucagccagauccugcccgaccccagcaagcccagcaagcggagcuucaucgaggaccugcuguucaacaaggugacccuagccgacgccggcuucaucaagcaguacggcgacugccucggcgacauagccgcccgggaccugaucugcgcccagaaguucaacggccugaccgugcugccuccccugcugaccgacgagaugaucgcccaguacaccagcgcccuguuagccggaaccaucaccagcggcuggacuuucggcgcuggagccgcucugcagauccccuucgccaugcagauggccuaccgguucaacggcaucggcgugacccagaacgugcuguacgagaaccagaagcugaucgccaaccaguucaacagcgccaucggcaagauccaggacagccugagcagcaccgcuagcgcccugggcaagcugcaggacguggugaaccagaacgcccaggcccugaacacccuggugaagcagcugagcagcaacuucggcgccaucagcagcgugcugaacgacauccugagccggcuggacaaggucgaggccgaggugcagaucgaccggcugaucacuggccggcugcagagccugcagaccuacgugacccagcagcugauccgggccgccgagauucgggccagcgccaaccuggccgccaccaagaugagcgagugcgugcugggccagagcaagcggguggacuucugcggcaagggcuaccaccugaugagcuuuccccagagcgcaccccacggagugguguuccugcacgugaccuacgugcccgcccaggagaagaacuucaccaccgccccagccaucugccacgacggcaaggcccacuuuccccgggagggcguguucgugagcaacggcacccacugguucgugacccagcggaacuucuacgagccccagaucaucaccaccgacaacaccuucgugagcggcaacugcgacguggugaucggcaucgugaacaacaccguguacgauccccugcagcccgagcuggacagcuucaaggaggagcuggacaaguacuucaagaaucacaccagccccgacguggaccugggcgacaucagcggcaucaacgccagcguggugaacauccagaaggagaucgaucggcugaacgagguggccaagaaccugaacgagagccugaucgaccugcaggagcugggcaaguacgagcaguacaucaaguggcccugguacaucuggcugggcuucaucgccggccugaucgccaucgugauggugaccaucaugcugugcugcaugaccagcugcugcagcugccugaagggcuguugcagcugcggcagcugcugcaaguucgacgaggacgacagcgagcccgugcugaagggcgugaagcugcacuacaccugauaauaggcuggagccucgguggccuagcuucuugccccuugggccuccccccagccccuccuccccuuccugcacccguacccccguggucuuugaauaaagucugagugggcggcaaaaaaaaaaaaaaaaaaaaaaaaaaaaaaaaaaaaaaaaaaaaaaaaaaaaaaaaaaaaaaaaaaaaaaaaaaaaaaaaaaaaaaaaaaaaaaaaaaaa

SEQ ID NO: 26088 - RNA, 4095 nt, Artificial Sequence
  SARS-CoV-2/Wuhan/WIV05/2019__EPI_ISL_402128 spike protein mRNA gc (1-1273)(N439K_D614G)
gggaaauaagagagaaaagaagaguaagaagaaauauaagaccccggcgccgccaccauguucguguuccuggugcugcugccccuggugagcagccagugcgugaaccugaccacccggacccagcugccaccagccuacaccaacagcuucacccggggcgucuacuaccccgacaagguguuccggagcagcguccugcacagcacccaggaccuguuccugcccuucuucagcaacgugaccugguuccacgccauccacgugagcggcaccaacggcaccaagcgguucgacaaccccgugcugcccuucaacgacggcguguacuucgccagcaccgagaagagcaacaucauccggggcuggaucuucggcaccacccuggacagcaagacccagagccugcugaucgugaauaacgccaccaacguggugaucaaggugugcgaguuccaguucugcaacgaccccuuccugggcguguacuaccacaagaacaacaagagcuggauggagagcgaguuccggguguacagcagcgccaacaacugcaccuucgaguacgugagccagcccuuccugauggaccuggagggcaagcagggcaacuucaagaaccugcgggaguucguguucaagaacaucgacggcuacuucaagaucuacagcaagcacaccccaaucaaccuggugcgggaucugccccagggcuucucagcccuggagccccugguggaccugcccaucggcaucaacaucacccgguuccagacccugcuggcccugcaccggagcuaccugaccccaggcgacagcagcagcggguggacagcaggcgcggcugcuuacuacgugggcuaccugcagccccggaccuuccugcugaaguacaacgagaacggcaccaucaccgacgccguggacugcgcccuggacccucugagcgagaccaagugcacccugaagagcuucaccguggagaagggcaucuaccagaccagcaacuuccgggugcagcccaccgagagcaucgugcgguuccccaacaucaccaaccugugccccuucggcgagguguucaacgccacccgguucgccagcguguacgccuggaaccggaagcggaucagcaacugcguggccgacuacagcgugcuguacaacagcgccagcuucagcaccuucaagugcuacggcgugagccccaccaagcugaacgaccugugcuucaccaacguguacgccgacagcuucgugauccguggcgacgaggugcggcagaucgcacccggccagacaggcaagaucgccgacuacaacuacaagcugcccgacgacuucaccggcugcgugaucgccuggaacagcaagaaccucgacagcaaggugggcggcaacuacaacuaccuguaccggcuguuccggaagagcaaccugaagcccuucgagcgggacaucagcaccgagaucuaccaagccggcuccaccccuugcaacggcguggagggcuucaacugcuacuucccucugcagagcuacggcuuccagcccaccaacggcgugggcuaccagcccuaccgggugguggugcugagcuucgagcugcugcacgccccagccaccguguguggccccaagaagagcaccaaccuggugaagaacaagugcgugaacuucaacuucaacggccuuaccggcaccggcgugcugaccgagagcaacaagaaauuccugcccuuucagcaguucggccgggacaucgccgacaccaccgacgcugugcgggauccccagacccuggagauccuggacaucaccccuugcagcuucggcggcgugagcgugaucaccccaggcaccaacaccagcaaccagguggccgugcuguaccagggcgugaacugcaccgaggugcccguggccauccacgccgaccagcugacacccaccuggcgggucuacagcaccggcagcaacguguuccagacccgggccgguugccugaucggcgccgagcacgugaacaacagcuacgagugcgacauccccaucggcgccggcaucugugccagcuaccagacccagaccaauucaccccggagggcaaggagcguggccagccagagcaucaucgccuacaccaugagccugggcgccgagaacagcguggccuacagcaacaacagcaucgccauccccaccaacuucaccaucagcgugaccaccgagauucugcccgugagcaugaccaagaccagcguggacugcaccauguacaucugcggcgacagcaccgagugcagcaaccugcugcugcaguacggcagcuucugcacccagcugaaccgggcccugaccggcaucgccguggagcaggacaagaacacccaggagguguucgcccaggugaagcagaucuacaagaccccucccaucaaggacuucggcggcuucaacuucagccagauccugcccgaccccagcaagcccagcaagcggagcuucaucgaggaccugcuguucaacaaggugacccuagccgacgccggcuucaucaagcaguacggcgacugccucggcgacauagccgcccgggaccugaucugcgcccagaaguucaacggccugaccgugcugccuccccugcugaccgacgagaugaucgcccaguacaccagcgcccuguuagccggaaccaucaccagcggcuggacuuucggcgcuggagccgcucugcagauccccuucgccaugcagauggccuaccgguucaacggcaucggcgugacccagaacgugcuguacgagaaccagaagcugaucgccaaccaguucaacagcgccaucggcaagauccaggacagccugagcagcaccgcuagcgcccugggcaagcugcaggacguggugaaccagaacgcccaggcccugaacacccuggugaagcagcugagcagcaacuucggcgccaucagcagcgugcugaacgacauccugagccggcuggacaaggucgaggccgaggugcagaucgaccggcugaucacuggccggcugcagagccugcagaccuacgugacccagcagcugauccgggccgccgagauucgggccagcgccaaccuggccgccaccaagaugagcgagugcgugcugggccagagcaagcggguggacuucugcggcaagggcuaccaccugaugagcuuuccccagagcgcaccccacggagugguguuccugcacgugaccuacgugcccgcccaggagaagaacuucaccaccgccccagccaucugccacgacggcaaggcccacuuuccccgggagggcguguucgugagcaacggcacccacugguucgugacccagcggaacuucuacgagccccagaucaucaccaccgacaacaccuucgugagcggcaacugcgacguggugaucggcaucgugaacaacaccguguacgauccccugcagcccgagcuggacagcuucaaggaggagcuggacaaguacuucaagaaucacaccagccccgacguggaccugggcgacaucagcggcaucaacgccagcguggugaacauccagaaggagaucgaucggcugaacgagguggccaagaaccugaacgagagccugaucgaccugcaggagcugggcaaguacgagcaguacaucaaguggcccugguacaucuggcugggcuucaucgccggccugaucgccaucgugauggugaccaucaugcugugcugcaugaccagcugcugcagcugccugaagggcuguugcagcugcggcagcugcugcaaguucgacgaggacgacagcgagcccgugcugaagggcgugaagcugcacuacaccugauaauaggcuggagccucgguggccuagcuucuugccccuugggccuccccccagccccuccuccccuuccugcacccguacccccguggucuuugaauaaagucugagugggcggcaaaaaaaaaaaaaaaaaaaaaaaaaaaaaaaaaaaaaaaaaaaaaaaaaaaaaaaaaaaaaaaaaaaaaaaaaaaaaaaaaaaaaaaaaaaaaaaaaaaa

SEQ ID NO: 26089 - RNA, 4095 nt, Artificial Sequence
  SARS-CoV-2/Wuhan/WIV05/2019__EPI_ISL_402128 spike protein mRNA gc (1-1273)(S477N_D614G)
gggaaauaagagagaaaagaagaguaagaagaaauauaagaccccggcgccgccaccauguucguguuccuggugcugcugccccuggugagcagccagugcgugaaccugaccacccggacccagcugccaccagccuacaccaacagcuucacccggggcgucuacuaccccgacaagguguuccggagcagcguccugcacagcacccaggaccuguuccugcccuucuucagcaacgugaccugguuccacgccauccacgugagcggcaccaacggcaccaagcgguucgacaaccccgugcugcccuucaacgacggcguguacuucgccagcaccgagaagagcaacaucauccggggcuggaucuucggcaccacccuggacagcaagacccagagccugcugaucgugaauaacgccaccaacguggugaucaaggugugcgaguuccaguucugcaacgaccccuuccugggcguguacuaccacaagaacaacaagagcuggauggagagcgaguuccggguguacagcagcgccaacaacugcaccuucgaguacgugagccagcccuuccugauggaccuggagggcaagcagggcaacuucaagaaccugcgggaguucguguucaagaacaucgacggcuacuucaagaucuacagcaagcacaccccaaucaaccuggugcgggaucugccccagggcuucucagcccuggagccccugguggaccugcccaucggcaucaacaucacccgguuccagacccugcuggcccugcaccggagcuaccugaccccaggcgacagcagcagcggguggacagcaggcgcggcugcuuacuacgugggcuaccugcagccccggaccuuccugcugaaguacaacgagaacggcaccaucaccgacgccguggacugcgcccuggacccucugagcgagaccaagugcacccugaagagcuucaccguggagaagggcaucuaccagaccagcaacuuccgggugcagcccaccgagagcaucgugcgguuccccaacaucaccaaccugugccccuucggcgagguguucaacgccacccgguucgccagcguguacgccuggaaccggaagcggaucagcaacugcguggccgacuacagcgugcuguacaacagcgccagcuucagcaccuucaagugcuacggcgugagccccaccaagcugaacgaccugugcuucaccaacguguacgccgacagcuucgugauccguggcgacgaggugcggcagaucgcacccggccagacaggcaagaucgccgacuacaacuacaagcugcccgacgacuucaccggcugcgugaucgccuggaacagcaacaaccucgacagcaaggugggcggcaacuacaacuaccuguaccggcuguuccggaagagcaaccugaagcccuucgagcgggacaucagcaccgagaucuaccaagccggcaacaccccuugcaacggcguggagggcuucaacugcuacuucccucugcagagcuacggcuuccagcccaccaacggcgugggcuaccagcccuaccgggugguggugcugagcuucgagcugcugcacgccccagccaccguguguggccccaagaagagcaccaaccuggugaagaacaagugcgugaacuucaacuucaacggccuuaccggcaccggcgugcugaccgagagcaacaagaaauuccugcccuuucagcaguucggccgggacaucgccgacaccaccgacgcugugcgggauccccagacccuggagauccuggacaucaccccuugcagcuucggcggcgugagcgugaucaccccaggcaccaacaccagcaaccagguggccgugcuguaccagggcgugaacugcaccgaggugcccguggccauccacgccgaccagcugacacccaccuggcgggucuacagcaccggcagcaacguguuccagacccgggccgguugccugaucggcgccgagcacgugaacaacagcuacgagugcgacauccccaucggcgccggcaucugugccagcuaccagacccagaccaauucaccccggagggcaaggagcguggccagccagagcaucaucgccuacaccaugagccugggcgccgagaacagcguggccuacagcaacaacagcaucgccauccccaccaacuucaccaucagcgugaccaccgagauucugcccgugagcaugaccaagaccagcguggacugcaccauguacaucugcggcgacagcaccgagugcagcaaccugcugcugcaguacggcagcuucugcacccagcugaaccgggcccugaccggcaucgccguggagcaggacaagaacacccaggagguguucgcccaggugaagcagaucuacaagaccccucccaucaaggacuucggcggcuucaacuucagccagauccugcccgaccccagcaagcccagcaagcggagcuucaucgaggaccugcuguucaacaaggugacccuagccgacgccggcuucaucaagcaguacggcgacugccucggcgacauagccgcccgggaccugaucugcgcccagaaguucaacggccugaccgugcugccuccccugcugaccgacgagaugaucgcccaguacaccagcgcccuguuagccggaaccaucaccagcggcuggacuuucggcgcuggagccgcucugcagauccccuucgccaugcagauggccuaccgguucaacggcaucggcgugacccagaacgugcuguacgagaaccagaagcugaucgccaaccaguucaacagcgccaucggcaagauccaggacagccugagcagcaccgcuagcgcccugggcaagcugcaggacguggugaaccagaacgcccaggcccugaacacccuggugaagcagcugagcagcaacuucggcgccaucagcagcgugcugaacgacauccugagccggcuggacaaggucgaggccgaggugcagaucgaccggcugaucacuggccggcugcagagccugcagaccuacgugacccagcagcugauccgggccgccgagauucgggccagcgccaaccuggccgccaccaagaugagcgagugcgugcugggccagagcaagcggguggacuucugcggcaagggcuaccaccugaugagcuuuccccagagcgcaccccacggagugguguuccugcacgugaccuacgugcccgcccaggagaagaacuucaccaccgccccagccaucugccacgacggcaaggcccacuuuccccgggagggcguguucgugagcaacggcacccacugguucgugacccagcggaacuucuacgagccccagaucaucaccaccgacaacaccuucgugagcggcaacugcgacguggugaucggcaucgugaacaacaccguguacgauccccugcagcccgagcuggacagcuucaaggaggagcuggacaaguacuucaagaaucacaccagccccgacguggaccugggcgacaucagcggcaucaacgccagcguggugaacauccagaaggagaucgaucggcugaacgagguggccaagaaccugaacgagagccugaucgaccugcaggagcugggcaaguacgagcaguacaucaaguggcccugguacaucuggcugggcuucaucgccggccugaucgccaucgugauggugaccaucaugcugugcugcaugaccagcugcugcagcugccugaagggcuguugcagcugcggcagcugcugcaaguucgacgaggacgacagcgagcccgugcugaagggcgugaagcugcacuacaccugauaauaggcuggagccucgguggccuagcuucuugccccuugggccuccccccagccccuccuccccuuccugcacccguacccccguggucuuugaauaaagucugagugggcggcaaaaaaaaaaaaaaaaaaaaaaaaaaaaaaaaaaaaaaaaaaaaaaaaaaaaaaaaaaaaaaaaaaaaaaaaaaaaaaaaaaaaaaaaaaaaaaaaaaaa

SEQ ID NO: 26090 - RNA, 4095 nt, Artificial Sequence
  SARS-CoV-2/Wuhan/WIV05/2019__EPI_ISL_402128 spike protein mRNA gc (1-1273)(N501Y_D614G)
gggaaauaagagagaaaagaagaguaagaagaaauauaagaccccggcgccgccaccauguucguguuccuggugcugcugccccuggugagcagccagugcgugaaccugaccacccggacccagcugccaccagccuacaccaacagcuucacccggggcgucuacuaccccgacaagguguuccggagcagcguccugcacagcacccaggaccuguuccugcccuucuucagcaacgugaccugguuccacgccauccacgugagcggcaccaacggcaccaagcgguucgacaaccccgugcugcccuucaacgacggcguguacuucgccagcaccgagaagagcaacaucauccggggcuggaucuucggcaccacccuggacagcaagacccagagccugcugaucgugaauaacgccaccaacguggugaucaaggugugcgaguuccaguucugcaacgaccccuuccugggcguguacuaccacaagaacaacaagagcuggauggagagcgaguuccggguguacagcagcgccaacaacugcaccuucgaguacgugagccagcccuuccugauggaccuggagggcaagcagggcaacuucaagaaccugcgggaguucguguucaagaacaucgacggcuacuucaagaucuacagcaagcacaccccaaucaaccuggugcgggaucugccccagggcuucucagcccuggagccccugguggaccugcccaucggcaucaacaucacccgguuccagacccugcuggcccugcaccggagcuaccugaccccaggcgacagcagcagcggguggacagcaggcgcggcugcuuacuacgugggcuaccugcagccccggaccuuccugcugaaguacaacgagaacggcaccaucaccgacgccguggacugcgcccuggacccucugagcgagaccaagugcacccugaagagcuucaccguggagaagggcaucuaccagaccagcaacuuccgggugcagcccaccgagagcaucgugcgguuccccaacaucaccaaccugugccccuucggcgagguguucaacgccacccgguucgccagcguguacgccuggaaccggaagcggaucagcaacugcguggccgacuacagcgugcuguacaacagcgccagcuucagcaccuucaagugcuacggcgugagccccaccaagcugaacgaccugugcuucaccaacguguacgccgacagcuucgugauccguggcgacgaggugcggcagaucgcacccggccagacaggcaagaucgccgacuacaacuacaagcugcccgacgacuucaccggcugcgugaucgccuggaacagcaacaaccucgacagcaaggugggcggcaacuacaacuaccuguaccggcuguuccggaagagcaaccugaagcccuucgagcgggacaucagcaccgagaucuaccaagccggcuccaccccuugcaacggcguggagggcuucaacugcuacuucccucugcagagcuacggcuuccagcccaccuacggcgugggcuaccagcccuaccgggugguggugcugagcuucgagcugcugcacgccccagccaccguguguggccccaagaagagcaccaaccuggugaagaacaagugcgugaacuucaacuucaacggccuuaccggcaccggcgugcugaccgagagcaacaagaaauuccugcccuuucagcaguucggccgggacaucgccgacaccaccgacgcugugcgggauccccagacccuggagauccuggacaucaccccuugcagcuucggcggcgugagcgugaucaccccaggcaccaacaccagcaaccagguggccgugcuguaccagggcgugaacugcaccgaggugcccguggccauccacgccgaccagcugacacccaccuggcgggucuacagcaccggcagcaacguguuccagacccgggccgguugccugaucggcgccgagcacgugaacaacagcuacgagugcgacauccccaucggcgccggcaucugugccagcuaccagacccagaccaauucaccccggagggcaaggagcguggccagccagagcaucaucgccuacaccaugagccugggcgccgagaacagcguggccuacagcaacaacagcaucgccauccccaccaacuucaccaucagcgugaccaccgagauucugcccgugagcaugaccaagaccagcguggacugcaccauguacaucugcggcgacagcaccgagugcagcaaccugcugcugcaguacggcagcuucugcacccagcugaaccgggcccugaccggcaucgccguggagcaggacaagaacacccaggagguguucgcccaggugaagcagaucuacaagaccccucccaucaaggacuucggcggcuucaacuucagccagauccugcccgaccccagcaagcccagcaagcggagcuucaucgaggaccugcuguucaacaaggugacccuagccgacgccggcuucaucaagcaguacggcgacugccucggcgacauagccgcccgggaccugaucugcgcccagaaguucaacggccugaccgugcugccuccccugcugaccgacgagaugaucgcccaguacaccagcgcccuguuagccggaaccaucaccagcggcuggacuuucggcgcuggagccgcucugcagauccccuucgccaugcagauggccuaccgguucaacggcaucggcgugacccagaacgugcuguacgagaaccagaagcugaucgccaaccaguucaacagcgccaucggcaagauccaggacagccugagcagcaccgcuagcgcccugggcaagcugcaggacguggugaaccagaacgcccaggcccugaacacccuggugaagcagcugagcagcaacuucggcgccaucagcagcgugcugaacgacauccugagccggcuggacaaggucgaggccgaggugcagaucgaccggcugaucacuggccggcugcagagccugcagaccuacgugacccagcagcugauccgggccgccgagauucgggccagcgccaaccuggccgccaccaagaugagcgagugcgugcugggccagagcaagcggguggacuucugcggcaagggcuaccaccugaugagcuuuccccagagcgcaccccacggagugguguuccugcacgugaccuacgugcccgcccaggagaagaacuucaccaccgccccagccaucugccacgacggcaaggcccacuuuccccgggagggcguguucgugagcaacggcacccacugguucgugacccagcggaacuucuacgagccccagaucaucaccaccgacaacaccuucgugagcggcaacugcgacguggugaucggcaucgugaacaacaccguguacgauccccugcagcccgagcuggacagcuucaaggaggagcuggacaaguacuucaagaaucacaccagccccgacguggaccugggcgacaucagcggcaucaacgccagcguggugaacauccagaaggagaucgaucggcugaacgagguggccaagaaccugaacgagagccugaucgaccugcaggagcugggcaaguacgagcaguacaucaaguggcccugguacaucuggcugggcuucaucgccggccugaucgccaucgugauggugaccaucaugcugugcugcaugaccagcugcugcagcugccugaagggcuguugcagcugcggcagcugcugcaaguucgacgaggacgacagcgagcccgugcugaagggcgugaagcugcacuacaccugauaauaggcuggagccucgguggccuagcuucuugccccuugggccuccccccagccccuccuccccuuccugcacccguacccccguggucuuugaauaaagucugagugggcggcaaaaaaaaaaaaaaaaaaaaaaaaaaaaaaaaaaaaaaaaaaaaaaaaaaaaaaaaaaaaaaaaaaaaaaaaaaaaaaaaaaaaaaaaaaaaaaaaaaaa

SEQ ID NO: 26091 - RNA, 4089 nt, Artificial Sequence
  SARS-CoV-2/Wuhan/WIV05/2019__EPI_ISL_402128 spike protein mRNA gc (1-1273)(H69del_V70del_D614G)
gggaaauaagagagaaaagaagaguaagaagaaauauaagaccccggcgccgccaccauguucguguuccuggugcugcugccccuggugagcagccagugcgugaaccugaccacccggacccagcugccaccagccuacaccaacagcuucacccggggcgucuacuaccccgacaagguguuccggagcagcguccugcacagcacccaggaccuguuccugcccuucuucagcaacgugaccugguuccacgccaucagcggcaccaacggcaccaagcgguucgacaaccccgugcugcccuucaacgacggcguguacuucgccagcaccgagaagagcaacaucauccggggcuggaucuucggcaccacccuggacagcaagacccagagccugcugaucgugaauaacgccaccaacguggugaucaaggugugcgaguuccaguucugcaacgaccccuuccugggcguguacuaccacaagaacaacaagagcuggauggagagcgaguuccggguguacagcagcgccaacaacugcaccuucgaguacgugagccagcccuuccugauggaccuggagggcaagcagggcaacuucaagaaccugcgggaguucguguucaagaacaucgacggcuacuucaagaucuacagcaagcacaccccaaucaaccuggugcgggaucugccccagggcuucucagcccuggagccccugguggaccugcccaucggcaucaacaucacccgguuccagacccugcuggcccugcaccggagcuaccugaccccaggcgacagcagcagcggguggacagcaggcgcggcugcuuacuacgugggcuaccugcagccccggaccuuccugcugaaguacaacgagaacggcaccaucaccgacgccguggacugcgcccuggacccucugagcgagaccaagugcacccugaagagcuucaccguggagaagggcaucuaccagaccagcaacuuccgggugcagcccaccgagagcaucgugcgguuccccaacaucaccaaccugugccccuucggcgagguguucaacgccacccgguucgccagcguguacgccuggaaccggaagcggaucagcaacugcguggccgacuacagcgugcuguacaacagcgccagcuucagcaccuucaagugcuacggcgugagccccaccaagcugaacgaccugugcuucaccaacguguacgccgacagcuucgugauccguggcgacgaggugcggcagaucgcacccggccagacaggcaagaucgccgacuacaacuacaagcugcccgacgacuucaccggcugcgugaucgccuggaacagcaacaaccucgacagcaaggugggcggcaacuacaacuaccuguaccggcuguuccggaagagcaaccugaagcccuucgagcgggacaucagcaccgagaucuaccaagccggcuccaccccuugcaacggcguggagggcuucaacugcuacuucccucugcagagcuacggcuuccagcccaccaacggcgugggcuaccagcccuaccgggugguggugcugagcuucgagcugcugcacgccccagccaccguguguggccccaagaagagcaccaaccuggugaagaacaagugcgugaacuucaacuucaacggccuuaccggcaccggcgugcugaccgagagcaacaagaaauuccugcccuuucagcaguucggccgggacaucgccgacaccaccgacgcugugcgggauccccagacccuggagauccuggacaucaccccuugcagcuucggcggcgugagcgugaucaccccaggcaccaacaccagcaaccagguggccgugcuguaccagggcgugaacugcaccgaggugcccguggccauccacgccgaccagcugacacccaccuggcgggucuacagcaccggcagcaacguguuccagacccgggccgguugccugaucggcgccgagcacgugaacaacagcuacgagugcgacauccccaucggcgccggcaucugugccagcuaccagacccagaccaauucaccccggagggcaaggagcguggccagccagagcaucaucgccuacaccaugagccugggcgccgagaacagcguggccuacagcaacaacagcaucgccauccccaccaacuucaccaucagcgugaccaccgagauucugcccgugagcaugaccaagaccagcguggacugcaccauguacaucugcggcgacagcaccgagugcagcaaccugcugcugcaguacggcagcuucugcacccagcugaaccgggcccugaccggcaucgccguggagcaggacaagaacacccaggagguguucgcccaggugaagcagaucuacaagaccccucccaucaaggacuucggcggcuucaacuucagccagauccugcccgaccccagcaagcccagcaagcggagcuucaucgaggaccugcuguucaacaaggugacccuagccgacgccggcuucaucaagcaguacggcgacugccucggcgacauagccgcccgggaccugaucugcgcccagaaguucaacggccugaccgugcugccuccccugcugaccgacgagaugaucgcccaguacaccagcgcccuguuagccggaaccaucaccagcggcuggacuuucggcgcuggagccgcucugcagauccccuucgccaugcagauggccuaccgguucaacggcaucggcgugacccagaacgugcuguacgagaaccagaagcugaucgccaaccaguucaacagcgccaucggcaagauccaggacagccugagcagcaccgcuagcgcccugggcaagcugcaggacguggugaaccagaacgcccaggcccugaacacccuggugaagcagcugagcagcaacuucggcgccaucagcagcgugcugaacgacauccugagccggcuggacaaggucgaggccgaggugcagaucgaccggcugaucacuggccggcugcagagccugcagaccuacgugacccagcagcugauccgggccgccgagauucgggccagcgccaaccuggccgccaccaagaugagcgagugcgugcugggccagagcaagcggguggacuucugcggcaagggcuaccaccugaugagcuuuccccagagcgcaccccacggagugguguuccugcacgugaccuacgugcccgcccaggagaagaacuucaccaccgccccagccaucugccacgacggcaaggcccacuuuccccgggagggcguguucgugagcaacggcacccacugguucgugacccagcggaacuucuacgagccccagaucaucaccaccgacaacaccuucgugagcggcaacugcgacguggugaucggcaucgugaacaacaccguguacgauccccugcagcccgagcuggacagcuucaaggaggagcuggacaaguacuucaagaaucacaccagccccgacguggaccugggcgacaucagcggcaucaacgccagcguggugaacauccagaaggagaucgaucggcugaacgagguggccaagaaccugaacgagagccugaucgaccugcaggagcugggcaaguacgagcaguacaucaaguggcccugguacaucuggcugggcuucaucgccggccugaucgccaucgugauggugaccaucaugcugugcugcaugaccagcugcugcagcugccugaagggcuguugcagcugcggcagcugcugcaaguucgacgaggacgacagcgagcccgugcugaagggcgugaagcugcacuacaccugauaauaggcuggagccucgguggccuagcuucuugccccuugggccuccccccagccccuccuccccuuccugcacccguacccccguggucuuugaauaaagucugagugggcggcaaaaaaaaaaaaaaaaaaaaaaaaaaaaaaaaaaaaaaaaaaaaaaaaaaaaaaaaaaaaaaaaaaaaaaaaaaaaaaaaaaaaaaaaaaaaaaaaaaaa

SEQ ID NO: 26092 - RNA, 4095 nt, Artificial Sequence
  SARS-CoV-2/Wuhan/WIV05/2019__EPI_ISL_402128 spike protein mRNA gc (1-1273)(Y453F_D614G)
gggaaauaagagagaaaagaagaguaagaagaaauauaagaccccggcgccgccaccauguucguguuccuggugcugcugccccuggugagcagccagugcgugaaccugaccacccggacccagcugccaccagccuacaccaacagcuucacccggggcgucuacuaccccgacaagguguuccggagcagcguccugcacagcacccaggaccuguuccugcccuucuucagcaacgugaccugguuccacgccauccacgugagcggcaccaacggcaccaagcgguucgacaaccccgugcugcccuucaacgacggcguguacuucgccagcaccgagaagagcaacaucauccggggcuggaucuucggcaccacccuggacagcaagacccagagccugcugaucgugaauaacgccaccaacguggugaucaaggugugcgaguuccaguucugcaacgaccccuuccugggcguguacuaccacaagaacaacaagagcuggauggagagcgaguuccggguguacagcagcgccaacaacugcaccuucgaguacgugagccagcccuuccugauggaccuggagggcaagcagggcaacuucaagaaccugcgggaguucguguucaagaacaucgacggcuacuucaagaucuacagcaagcacaccccaaucaaccuggugcgggaucugccccagggcuucucagcccuggagccccugguggaccugcccaucggcaucaacaucacccgguuccagacccugcuggcccugcaccggagcuaccugaccccaggcgacagcagcagcggguggacagcaggcgcggcugcuuacuacgugggcuaccugcagccccggaccuuccugcugaaguacaacgagaacggcaccaucaccgacgccguggacugcgcccuggacccucugagcgagaccaagugcacccugaagagcuucaccguggagaagggcaucuaccagaccagcaacuuccgggugcagcccaccgagagcaucgugcgguuccccaacaucaccaaccugugccccuucggcgagguguucaacgccacccgguucgccagcguguacgccuggaaccggaagcggaucagcaacugcguggccgacuacagcgugcuguacaacagcgccagcuucagcaccuucaagugcuacggcgugagccccaccaagcugaacgaccugugcuucaccaacguguacgccgacagcuucgugauccguggcgacgaggugcggcagaucgcacccggccagacaggcaagaucgccgacuacaacuacaagcugcccgacgacuucaccggcugcgugaucgccuggaacagcaacaaccucgacagcaaggugggcggcaacuacaacuaccuguuccggcuguuccggaagagcaaccugaagcccuucgagcgggacaucagcaccgagaucuaccaagccggcuccaccccuugcaacggcguggagggcuucaacugcuacuucccucugcagagcuacggcuuccagcccaccaacggcgugggcuaccagcccuaccgggugguggugcugagcuucgagcugcugcacgccccagccaccguguguggccccaagaagagcaccaaccuggugaagaacaagugcgugaacuucaacuucaacggccuuaccggcaccggcgugcugaccgagagcaacaagaaauuccugcccuuucagcaguucggccgggacaucgccgacaccaccgacgcugugcgggauccccagacccuggagauccuggacaucaccccuugcagcuucggcggcgugagcgugaucaccccaggcaccaacaccagcaaccagguggccgugcuguaccagggcgugaacugcaccgaggugcccguggccauccacgccgaccagcugacacccaccuggcgggucuacagcaccggcagcaacguguuccagacccgggccgguugccugaucggcgccgagcacgugaacaacagcuacgagugcgacauccccaucggcgccggcaucugugccagcuaccagacccagaccaauucaccccggagggcaaggagcguggccagccagagcaucaucgccuacaccaugagccugggcgccgagaacagcguggccuacagcaacaacagcaucgccauccccaccaacuucaccaucagcgugaccaccgagauucugcccgugagcaugaccaagaccagcguggacugcaccauguacaucugcggcgacagcaccgagugcagcaaccugcugcugcaguacggcagcuucugcacccagcugaaccgggcccugaccggcaucgccguggagcaggacaagaacacccaggagguguucgcccaggugaagcagaucuacaagaccccucccaucaaggacuucggcggcuucaacuucagccagauccugcccgaccccagcaagcccagcaagcggagcuucaucgaggaccugcuguucaacaaggugacccuagccgacgccggcuucaucaagcaguacggcgacugccucggcgacauagccgcccgggaccugaucugcgcccagaaguucaacggccugaccgugcugccuccccugcugaccgacgagaugaucgcccaguacaccagcgcccuguuagccggaaccaucaccagcggcuggacuuucggcgcuggagccgcucugcagauccccuucgccaugcagauggccuaccgguucaacggcaucggcgugacccagaacgugcuguacgagaaccagaagcugaucgccaaccaguucaacagcgccaucggcaagauccaggacagccugagcagcaccgcuagcgcccugggcaagcugcaggacguggugaaccagaacgcccaggcccugaacacccuggugaagcagcugagcagcaacuucggcgccaucagcagcgugcugaacgacauccugagccggcuggacaaggucgaggccgaggugcagaucgaccggcugaucacuggccggcugcagagccugcagaccuacgugacccagcagcugauccgggccgccgagauucgggccagcgccaaccuggccgccaccaagaugagcgagugcgugcugggccagagcaagcggguggacuucugcggcaagggcuaccaccugaugagcuuuccccagagcgcaccccacggagugguguuccugcacgugaccuacgugcccgcccaggagaagaacuucaccaccgccccagccaucugccacgacggcaaggcccacuuuccccgggagggcguguucgugagcaacggcacccacugguucgugacccagcggaacuucuacgagccccagaucaucaccaccgacaacaccuucgugagcggcaacugcgacguggugaucggcaucgugaacaacaccguguacgauccccugcagcccgagcuggacagcuucaaggaggagcuggacaaguacuucaagaaucacaccagccccgacguggaccugggcgacaucagcggcaucaacgccagcguggugaacauccagaaggagaucgaucggcugaacgagguggccaagaaccugaacgagagccugaucgaccugcaggagcugggcaaguacgagcaguacaucaaguggcccugguacaucuggcugggcuucaucgccggccugaucgccaucgugauggugaccaucaugcugugcugcaugaccagcugcugcagcugccugaagggcuguugcagcugcggcagcugcugcaaguucgacgaggacgacagcgagcccgugcugaagggcgugaagcugcacuacaccugauaauaggcuggagccucgguggccuagcuucuugccccuugggccuccccccagccccuccuccccuuccugcacccguacccccguggucuuugaauaaagucugagugggcggcaaaaaaaaaaaaaaaaaaaaaaaaaaaaaaaaaaaaaaaaaaaaaaaaaaaaaaaaaaaaaaaaaaaaaaaaaaaaaaaaaaaaaaaaaaaaaaaaaaaa

SEQ ID NO: 26093 - RNA, 4095 nt, Artificial Sequence
  SARS-CoV-2/Wuhan/WIV05/2019__EPI_ISL_402128 spike protein mRNA gc (1-1273)(D614G_I692V)
gggaaauaagagagaaaagaagaguaagaagaaauauaagaccccggcgccgccaccauguucguguuccuggugcugcugccccuggugagcagccagugcgugaaccugaccacccggacccagcugccaccagccuacaccaacagcuucacccggggcgucuacuaccccgacaagguguuccggagcagcguccugcacagcacccaggaccuguuccugcccuucuucagcaacgugaccugguuccacgccauccacgugagcggcaccaacggcaccaagcgguucgacaaccccgugcugcccuucaacgacggcguguacuucgccagcaccgagaagagcaacaucauccggggcuggaucuucggcaccacccuggacagcaagacccagagccugcugaucgugaauaacgccaccaacguggugaucaaggugugcgaguuccaguucugcaacgaccccuuccugggcguguacuaccacaagaacaacaagagcuggauggagagcgaguuccggguguacagcagcgccaacaacugcaccuucgaguacgugagccagcccuuccugauggaccuggagggcaagcagggcaacuucaagaaccugcgggaguucguguucaagaacaucgacggcuacuucaagaucuacagcaagcacaccccaaucaaccuggugcgggaucugccccagggcuucucagcccuggagccccugguggaccugcccaucggcaucaacaucacccgguuccagacccugcuggcccugcaccggagcuaccugaccccaggcgacagcagcagcggguggacagcaggcgcggcugcuuacuacgugggcuaccugcagccccggaccuuccugcugaaguacaacgagaacggcaccaucaccgacgccguggacugcgcccuggacccucugagcgagaccaagugcacccugaagagcuucaccguggagaagggcaucuaccagaccagcaacuuccgggugcagcccaccgagagcaucgugcgguuccccaacaucaccaaccugugccccuucggcgagguguucaacgccacccgguucgccagcguguacgccuggaaccggaagcggaucagcaacugcguggccgacuacagcgugcuguacaacagcgccagcuucagcaccuucaagugcuacggcgugagccccaccaagcugaacgaccugugcuucaccaacguguacgccgacagcuucgugauccguggcgacgaggugcggcagaucgcacccggccagacaggcaagaucgccgacuacaacuacaagcugcccgacgacuucaccggcugcgugaucgccuggaacagcaacaaccucgacagcaaggugggcggcaacuacaacuaccuguaccggcuguuccggaagagcaaccugaagcccuucgagcgggacaucagcaccgagaucuaccaagccggcuccaccccuugcaacggcguggagggcuucaacugcuacuucccucugcagagcuacggcuuccagcccaccaacggcgugggcuaccagcccuaccgggugguggugcugagcuucgagcugcugcacgccccagccaccguguguggccccaagaagagcaccaaccuggugaagaacaagugcgugaacuucaacuucaacggccuuaccggcaccggcgugcugaccgagagcaacaagaaauuccugcccuuucagcaguucggccgggacaucgccgacaccaccgacgcugugcgggauccccagacccuggagauccuggacaucaccccuugcagcuucggcggcgugagcgugaucaccccaggcaccaacaccagcaaccagguggccgugcuguaccagggcgugaacugcaccgaggugcccguggccauccacgccgaccagcugacacccaccuggcgggucuacagcaccggcagcaacguguuccagacccgggccgguugccugaucggcgccgagcacgugaacaacagcuacgagugcgacauccccaucggcgccggcaucugugccagcuaccagacccagaccaauucaccccggagggcaaggagcguggccagccagagcgugaucgccuacaccaugagccugggcgccgagaacagcguggccuacagcaacaacagcaucgccauccccaccaacuucaccaucagcgugaccaccgagauucugcccgugagcaugaccaagaccagcguggacugcaccauguacaucugcggcgacagcaccgagugcagcaaccugcugcugcaguacggcagcuucugcacccagcugaaccgggcccugaccggcaucgccguggagcaggacaagaacacccaggagguguucgcccaggugaagcagaucuacaagaccccucccaucaaggacuucggcggcuucaacuucagccagauccugcccgaccccagcaagcccagcaagcggagcuucaucgaggaccugcuguucaacaaggugacccuagccgacgccggcuucaucaagcaguacggcgacugccucggcgacauagccgcccgggaccugaucugcgcccagaaguucaacggccugaccgugcugccuccccugcugaccgacgagaugaucgcccaguacaccagcgcccuguuagccggaaccaucaccagcggcuggacuuucggcgcuggagccgcucugcagauccccuucgccaugcagauggccuaccgguucaacggcaucggcgugacccagaacgugcuguacgagaaccagaagcugaucgccaaccaguucaacagcgccaucggcaagauccaggacagccugagcagcaccgcuagcgcccugggcaagcugcaggacguggugaaccagaacgcccaggcccugaacacccuggugaagcagcugagcagcaacuucggcgccaucagcagcgugcugaacgacauccugagccggcuggacaaggucgaggccgaggugcagaucgaccggcugaucacuggccggcugcagagccugcagaccuacgugacccagcagcugauccgggccgccgagauucgggccagcgccaaccuggccgccaccaagaugagcgagugcgugcugggccagagcaagcggguggacuucugcggcaagggcuaccaccugaugagcuuuccccagagcgcaccccacggagugguguuccugcacgugaccuacgugcccgcccaggagaagaacuucaccaccgccccagccaucugccacgacggcaaggcccacuuuccccgggagggcguguucgugagcaacggcacccacugguucgugacccagcggaacuucuacgagccccagaucaucaccaccgacaacaccuucgugagcggcaacugcgacguggugaucggcaucgugaacaacaccguguacgauccccugcagcccgagcuggacagcuucaaggaggagcuggacaaguacuucaagaaucacaccagccccgacguggaccugggcgacaucagcggcaucaacgccagcguggugaacauccagaaggagaucgaucggcugaacgagguggccaagaaccugaacgagagccugaucgaccugcaggagcugggcaaguacgagcaguacaucaaguggcccugguacaucuggcugggcuucaucgccggccugaucgccaucgugauggugaccaucaugcugugcugcaugaccagcugcugcagcugccugaagggcuguugcagcugcggcagcugcugcaaguucgacgaggacgacagcgagcccgugcugaagggcgugaagcugcacuacaccugauaauaggcuggagccucgguggccuagcuucuugccccuugggccuccccccagccccuccuccccuuccugcacccguacccccguggucuuugaauaaagucugagugggcggcaaaaaaaaaaaaaaaaaaaaaaaaaaaaaaaaaaaaaaaaaaaaaaaaaaaaaaaaaaaaaaaaaaaaaaaaaaaaaaaaaaaaaaaaaaaaaaaaaaaa

SEQ ID NO: 26094 - RNA, 4095 nt, Artificial Sequence
  SARS-CoV-2/Wuhan/WIV05/2019__EPI_ISL_402128 spike protein mRNA gc (1-1273)(D614G_M1229I)
gggaaauaagagagaaaagaagaguaagaagaaauauaagaccccggcgccgccaccauguucguguuccuggugcugcugccccuggugagcagccagugcgugaaccugaccacccggacccagcugccaccagccuacaccaacagcuucacccggggcgucuacuaccccgacaagguguuccggagcagcguccugcacagcacccaggaccuguuccugcccuucuucagcaacgugaccugguuccacgccauccacgugagcggcaccaacggcaccaagcgguucgacaaccccgugcugcccuucaacgacggcguguacuucgccagcaccgagaagagcaacaucauccggggcuggaucuucggcaccacccuggacagcaagacccagagccugcugaucgugaauaacgccaccaacguggugaucaaggugugcgaguuccaguucugcaacgaccccuuccugggcguguacuaccacaagaacaacaagagcuggauggagagcgaguuccggguguacagcagcgccaacaacugcaccuucgaguacgugagccagcccuuccugauggaccuggagggcaagcagggcaacuucaagaaccugcgggaguucguguucaagaacaucgacggcuacuucaagaucuacagcaagcacaccccaaucaaccuggugcgggaucugccccagggcuucucagcccuggagccccugguggaccugcccaucggcaucaacaucacccgguuccagacccugcuggcccugcaccggagcuaccugaccccaggcgacagcagcagcggguggacagcaggcgcggcugcuuacuacgugggcuaccugcagccccggaccuuccugcugaaguacaacgagaacggcaccaucaccgacgccguggacugcgcccuggacccucugagcgagaccaagugcacccugaagagcuucaccguggagaagggcaucuaccagaccagcaacuuccgggugcagcccaccgagagcaucgugcgguuccccaacaucaccaaccugugccccuucggcgagguguucaacgccacccgguucgccagcguguacgccuggaaccggaagcggaucagcaacugcguggccgacuacagcgugcuguacaacagcgccagcuucagcaccuucaagugcuacggcgugagccccaccaagcugaacgaccugugcuucaccaacguguacgccgacagcuucgugauccguggcgacgaggugcggcagaucgcacccggccagacaggcaagaucgccgacuacaacuacaagcugcccgacgacuucaccggcugcgugaucgccuggaacagcaacaaccucgacagcaaggugggcggcaacuacaacuaccuguaccggcuguuccggaagagcaaccugaagcccuucgagcgggacaucagcaccgagaucuaccaagccggcuccaccccuugcaacggcguggagggcuucaacugcuacuucccucugcagagcuacggcuuccagcccaccaacggcgugggcuaccagcccuaccgggugguggugcugagcuucgagcugcugcacgccccagccaccguguguggccccaagaagagcaccaaccuggugaagaacaagugcgugaacuucaacuucaacggccuuaccggcaccggcgugcugaccgagagcaacaagaaauuccugcccuuucagcaguucggccgggacaucgccgacaccaccgacgcugugcgggauccccagacccuggagauccuggacaucaccccuugcagcuucggcggcgugagcgugaucaccccaggcaccaacaccagcaaccagguggccgugcuguaccagggcgugaacugcaccgaggugcccguggccauccacgccgaccagcugacacccaccuggcgggucuacagcaccggcagcaacguguuccagacccgggccgguugccugaucggcgccgagcacgugaacaacagcuacgagugcgacauccccaucggcgccggcaucugugccagcuaccagacccagaccaauucaccccggagggcaaggagcguggccagccagagcaucaucgccuacaccaugagccugggcgccgagaacagcguggccuacagcaacaacagcaucgccauccccaccaacuucaccaucagcgugaccaccgagauucugcccgugagcaugaccaagaccagcguggacugcaccauguacaucugcggcgacagcaccgagugcagcaaccugcugcugcaguacggcagcuucugcacccagcugaaccgggcccugaccggcaucgccguggagcaggacaagaacacccaggagguguucgcccaggugaagcagaucuacaagaccccucccaucaaggacuucggcggcuucaacuucagccagauccugcccgaccccagcaagcccagcaagcggagcuucaucgaggaccugcuguucaacaaggugacccuagccgacgccggcuucaucaagcaguacggcgacugccucggcgacauagccgcccgggaccugaucugcgcccagaaguucaacggccugaccgugcugccuccccugcugaccgacgagaugaucgcccaguacaccagcgcccuguuagccggaaccaucaccagcggcuggacuuucggcgcuggagccgcucugcagauccccuucgccaugcagauggccuaccgguucaacggcaucggcgugacccagaacgugcuguacgagaaccagaagcugaucgccaaccaguucaacagcgccaucggcaagauccaggacagccugagcagcaccgcuagcgcccugggcaagcugcaggacguggugaaccagaacgcccaggcccugaacacccuggugaagcagcugagcagcaacuucggcgccaucagcagcgugcugaacgacauccugagccggcuggacaaggucgaggccgaggugcagaucgaccggcugaucacuggccggcugcagagccugcagaccuacgugacccagcagcugauccgggccgccgagauucgggccagcgccaaccuggccgccaccaagaugagcgagugcgugcugggccagagcaagcggguggacuucugcggcaagggcuaccaccugaugagcuuuccccagagcgcaccccacggagugguguuccugcacgugaccuacgugcccgcccaggagaagaacuucaccaccgccccagccaucugccacgacggcaaggcccacuuuccccgggagggcguguucgugagcaacggcacccacugguucgugacccagcggaacuucuacgagccccagaucaucaccaccgacaacaccuucgugagcggcaacugcgacguggugaucggcaucgugaacaacaccguguacgauccccugcagcccgagcuggacagcuucaaggaggagcuggacaaguacuucaagaaucacaccagccccgacguggaccugggcgacaucagcggcaucaacgccagcguggugaacauccagaaggagaucgaucggcugaacgagguggccaagaaccugaacgagagccugaucgaccugcaggagcugggcaaguacgagcaguacaucaaguggcccugguacaucuggcugggcuucaucgccggccugaucgccaucgugaucgugaccaucaugcugugcugcaugaccagcugcugcagcugccugaagggcuguugcagcugcggcagcugcugcaaguucgacgaggacgacagcgagcccgugcugaagggcgugaagcugcacuacaccugauaauaggcuggagccucgguggccuagcuucuugccccuugggccuccccccagccccuccuccccuuccugcacccguacccccguggucuuugaauaaagucugagugggcggcaaaaaaaaaaaaaaaaaaaaaaaaaaaaaaaaaaaaaaaaaaaaaaaaaaaaaaaaaaaaaaaaaaaaaaaaaaaaaaaaaaaaaaaaaaaaaaaaaaaa

SEQ ID NO: 26095 - RNA, 4089 nt, Artificial Sequence
  SARS-CoV-2/Wuhan/WIV05/2019__EPI_ISL_402128 spike protein mRNA gc (1-1273)(H69del_V70del_A222V_Y453F_S477N_D614G_I692V)
gggaaauaagagagaaaagaagaguaagaagaaauauaagaccccggcgccgccaccauguucguguuccuggugcugcugccccuggugagcagccagugcgugaaccugaccacccggacccagcugccaccagccuacaccaacagcuucacccggggcgucuacuaccccgacaagguguuccggagcagcguccugcacagcacccaggaccuguuccugcccuucuucagcaacgugaccugguuccacgccaucagcggcaccaacggcaccaagcgguucgacaaccccgugcugcccuucaacgacggcguguacuucgccagcaccgagaagagcaacaucauccggggcuggaucuucggcaccacccuggacagcaagacccagagccugcugaucgugaauaacgccaccaacguggugaucaaggugugcgaguuccaguucugcaacgaccccuuccugggcguguacuaccacaagaacaacaagagcuggauggagagcgaguuccggguguacagcagcgccaacaacugcaccuucgaguacgugagccagcccuuccugauggaccuggagggcaagcagggcaacuucaagaaccugcgggaguucguguucaagaacaucgacggcuacuucaagaucuacagcaagcacaccccaaucaaccuggugcgggaucugccccagggcuucucagugcuggagccccugguggaccugcccaucggcaucaacaucacccgguuccagacccugcuggcccugcaccggagcuaccugaccccaggcgacagcagcagcggguggacagcaggcgcggcugcuuacuacgugggcuaccugcagccccggaccuuccugcugaaguacaacgagaacggcaccaucaccgacgccguggacugcgcccuggacccucugagcgagaccaagugcacccugaagagcuucaccguggagaagggcaucuaccagaccagcaacuuccgggugcagcccaccgagagcaucgugcgguuccccaacaucaccaaccugugccccuucggcgagguguucaacgccacccgguucgccagcguguacgccuggaaccggaagcggaucagcaacugcguggccgacuacagcgugcuguacaacagcgccagcuucagcaccuucaagugcuacggcgugagccccaccaagcugaacgaccugugcuucaccaacguguacgccgacagcuucgugauccguggcgacgaggugcggcagaucgcacccggccagacaggcaagaucgccgacuacaacuacaagcugcccgacgacuucaccggcugcgugaucgccuggaacagcaacaaccucgacagcaaggugggcggcaacuacaacuaccuguuccggcuguuccggaagagcaaccugaagcccuucgagcgggacaucagcaccgagaucuaccaagccggcaacaccccuugcaacggcguggagggcuucaacugcuacuucccucugcagagcuacggcuuccagcccaccaacggcgugggcuaccagcccuaccgggugguggugcugagcuucgagcugcugcacgccccagccaccguguguggccccaagaagagcaccaaccuggugaagaacaagugcgugaacuucaacuucaacggccuuaccggcaccggcgugcugaccgagagcaacaagaaauuccugcccuuucagcaguucggccgggacaucgccgacaccaccgacgcugugcgggauccccagacccuggagauccuggacaucaccccuugcagcuucggcggcgugagcgugaucaccccaggcaccaacaccagcaaccagguggccgugcuguaccagggcgugaacugcaccgaggugcccguggccauccacgccgaccagcugacacccaccuggcgggucuacagcaccggcagcaacguguuccagacccgggccgguugccugaucggcgccgagcacgugaacaacagcuacgagugcgacauccccaucggcgccggcaucugugccagcuaccagacccagaccaauucaccccggagggcaaggagcguggccagccagagcgugaucgccuacaccaugagccugggcgccgagaacagcguggccuacagcaacaacagcaucgccauccccaccaacuucaccaucagcgugaccaccgagauucugcccgugagcaugaccaagaccagcguggacugcaccauguacaucugcggcgacagcaccgagugcagcaaccugcugcugcaguacggcagcuucugcacccagcugaaccgggcccugaccggcaucgccguggagcaggacaagaacacccaggagguguucgcccaggugaagcagaucuacaagaccccucccaucaaggacuucggcggcuucaacuucagccagauccugcccgaccccagcaagcccagcaagcggagcuucaucgaggaccugcuguucaacaaggugacccuagccgacgccggcuucaucaagcaguacggcgacugccucggcgacauagccgcccgggaccugaucugcgcccagaaguucaacggccugaccgugcugccuccccugcugaccgacgagaugaucgcccaguacaccagcgcccuguuagccggaaccaucaccagcggcuggacuuucggcgcuggagccgcucugcagauccccuucgccaugcagauggccuaccgguucaacggcaucggcgugacccagaacgugcuguacgagaaccagaagcugaucgccaaccaguucaacagcgccaucggcaagauccaggacagccugagcagcaccgcuagcgcccugggcaagcugcaggacguggugaaccagaacgcccaggcccugaacacccuggugaagcagcugagcagcaacuucggcgccaucagcagcgugcugaacgacauccugagccggcuggacaaggucgaggccgaggugcagaucgaccggcugaucacuggccggcugcagagccugcagaccuacgugacccagcagcugauccgggccgccgagauucgggccagcgccaaccuggccgccaccaagaugagcgagugcgugcugggccagagcaagcggguggacuucugcggcaagggcuaccaccugaugagcuuuccccagagcgcaccccacggagugguguuccugcacgugaccuacgugcccgcccaggagaagaacuucaccaccgccccagccaucugccacgacggcaaggcccacuuuccccgggagggcguguucgugagcaacggcacccacugguucgugacccagcggaacuucuacgagccccagaucaucaccaccgacaacaccuucgugagcggcaacugcgacguggugaucggcaucgugaacaacaccguguacgauccccugcagcccgagcuggacagcuucaaggaggagcuggacaaguacuucaagaaucacaccagccccgacguggaccugggcgacaucagcggcaucaacgccagcguggugaacauccagaaggagaucgaucggcugaacgagguggccaagaaccugaacgagagccugaucgaccugcaggagcugggcaaguacgagcaguacaucaaguggcccugguacaucuggcugggcuucaucgccggccugaucgccaucgugauggugaccaucaugcugugcugcaugaccagcugcugcagcugccugaagggcuguugcagcugcggcagcugcugcaaguucgacgaggacgacagcgagcccgugcugaagggcgugaagcugcacuacaccugauaauaggcuggagccucgguggccuagcuucuugccccuugggccuccccccagccccuccuccccuuccugcacccguacccccguggucuuugaauaaagucugagugggcggcaaaaaaaaaaaaaaaaaaaaaaaaaaaaaaaaaaaaaaaaaaaaaaaaaaaaaaaaaaaaaaaaaaaaaaaaaaaaaaaaaaaaaaaaaaaaaaaaaaaa

SEQ ID NO: 26096 - RNA, 4089 nt, Artificial Sequence
  SARS-CoV-2/Wuhan/WIV05/2019__EPI_ISL_402128 spike protein mRNA gc (1-1273)(H69del_V70del_Y453F_D614G_I692V_M1229I)
gggaaauaagagagaaaagaagaguaagaagaaauauaagaccccggcgccgccaccauguucguguuccuggugcugcugccccuggugagcagccagugcgugaaccugaccacccggacccagcugccaccagccuacaccaacagcuucacccggggcgucuacuaccccgacaagguguuccggagcagcguccugcacagcacccaggaccuguuccugcccuucuucagcaacgugaccugguuccacgccaucagcggcaccaacggcaccaagcgguucgacaaccccgugcugcccuucaacgacggcguguacuucgccagcaccgagaagagcaacaucauccggggcuggaucuucggcaccacccuggacagcaagacccagagccugcugaucgugaauaacgccaccaacguggugaucaaggugugcgaguuccaguucugcaacgaccccuuccugggcguguacuaccacaagaacaacaagagcuggauggagagcgaguuccggguguacagcagcgccaacaacugcaccuucgaguacgugagccagcccuuccugauggaccuggagggcaagcagggcaacuucaagaaccugcgggaguucguguucaagaacaucgacggcuacuucaagaucuacagcaagcacaccccaaucaaccuggugcgggaucugccccagggcuucucagcccuggagccccugguggaccugcccaucggcaucaacaucacccgguuccagacccugcuggcccugcaccggagcuaccugaccccaggcgacagcagcagcggguggacagcaggcgcggcugcuuacuacgugggcuaccugcagccccggaccuuccugcugaaguacaacgagaacggcaccaucaccgacgccguggacugcgcccuggacccucugagcgagaccaagugcacccugaagagcuucaccguggagaagggcaucuaccagaccagcaacuuccgggugcagcccaccgagagcaucgugcgguuccccaacaucaccaaccugugccccuucggcgagguguucaacgccacccgguucgccagcguguacgccuggaaccggaagcggaucagcaacugcguggccgacuacagcgugcuguacaacagcgccagcuucagcaccuucaagugcuacggcgugagccccaccaagcugaacgaccugugcuucaccaacguguacgccgacagcuucgugauccguggcgacgaggugcggcagaucgcacccggccagacaggcaagaucgccgacuacaacuacaagcugcccgacgacuucaccggcugcgugaucgccuggaacagcaacaaccucgacagcaaggugggcggcaacuacaacuaccuguuccggcuguuccggaagagcaaccugaagcccuucgagcgggacaucagcaccgagaucuaccaagccggcuccaccccuugcaacggcguggagggcuucaacugcuacuucccucugcagagcuacggcuuccagcccaccaacggcgugggcuaccagcccuaccgggugguggugcugagcuucgagcugcugcacgccccagccaccguguguggccccaagaagagcaccaaccuggugaagaacaagugcgugaacuucaacuucaacggccuuaccggcaccggcgugcugaccgagagcaacaagaaauuccugcccuuucagcaguucggccgggacaucgccgacaccaccgacgcugugcgggauccccagacccuggagauccuggacaucaccccuugcagcuucggcggcgugagcgugaucaccccaggcaccaacaccagcaaccagguggccgugcuguaccagggcgugaacugcaccgaggugcccguggccauccacgccgaccagcugacacccaccuggcgggucuacagcaccggcagcaacguguuccagacccgggccgguugccugaucggcgccgagcacgugaacaacagcuacgagugcgacauccccaucggcgccggcaucugugccagcuaccagacccagaccaauucaccccggagggcaaggagcguggccagccagagcgugaucgccuacaccaugagccugggcgccgagaacagcguggccuacagcaacaacagcaucgccauccccaccaacuucaccaucagcgugaccaccgagauucugcccgugagcaugaccaagaccagcguggacugcaccauguacaucugcggcgacagcaccgagugcagcaaccugcugcugcaguacggcagcuucugcacccagcugaaccgggcccugaccggcaucgccguggagcaggacaagaacacccaggagguguucgcccaggugaagcagaucuacaagaccccucccaucaaggacuucggcggcuucaacuucagccagauccugcccgaccccagcaagcccagcaagcggagcuucaucgaggaccugcuguucaacaaggugacccuagccgacgccggcuucaucaagcaguacggcgacugccucggcgacauagccgcccgggaccugaucugcgcccagaaguucaacggccugaccgugcugccuccccugcugaccgacgagaugaucgcccaguacaccagcgcccuguuagccggaaccaucaccagcggcuggacuuucggcgcuggagccgcucugcagauccccuucgccaugcagauggccuaccgguucaacggcaucggcgugacccagaacgugcuguacgagaaccagaagcugaucgccaaccaguucaacagcgccaucggcaagauccaggacagccugagcagcaccgcuagcgcccugggcaagcugcaggacguggugaaccagaacgcccaggcccugaacacccuggugaagcagcugagcagcaacuucggcgccaucagcagcgugcugaacgacauccugagccggcuggacaaggucgaggccgaggugcagaucgaccggcugaucacuggccggcugcagagccugcagaccuacgugacccagcagcugauccgggccgccgagauucgggccagcgccaaccuggccgccaccaagaugagcgagugcgugcugggccagagcaagcggguggacuucugcggcaagggcuaccaccugaugagcuuuccccagagcgcaccccacggagugguguuccugcacgugaccuacgugcccgcccaggagaagaacuucaccaccgccccagccaucugccacgacggcaaggcccacuuuccccgggagggcguguucgugagcaacggcacccacugguucgugacccagcggaacuucuacgagccccagaucaucaccaccgacaacaccuucgugagcggcaacugcgacguggugaucggcaucgugaacaacaccguguacgauccccugcagcccgagcuggacagcuucaaggaggagcuggacaaguacuucaagaaucacaccagccccgacguggaccugggcgacaucagcggcaucaacgccagcguggugaacauccagaaggagaucgaucggcugaacgagguggccaagaaccugaacgagagccugaucgaccugcaggagcugggcaaguacgagcaguacaucaaguggcccugguacaucuggcugggcuucaucgccggccugaucgccaucgugaucgugaccaucaugcugugcugcaugaccagcugcugcagcugccugaagggcuguugcagcugcggcagcugcugcaaguucgacgaggacgacagcgagcccgugcugaagggcgugaagcugcacuacaccugauaauaggcuggagccucgguggccuagcuucuugccccuugggccuccccccagccccuccuccccuuccugcacccguacccccguggucuuugaauaaagucugagugggcggcaaaaaaaaaaaaaaaaaaaaaaaaaaaaaaaaaaaaaaaaaaaaaaaaaaaaaaaaaaaaaaaaaaaaaaaaaaaaaaaaaaaaaaaaaaaaaaaaaaaa

SEQ ID NO: 26097 - RNA, 4086 nt, Artificial Sequence
  SARS-CoV-2/Wuhan/WIV05/2019__EPI_ISL_402128 spike protein mRNA gc (1-1273)(H69del_V70del_Y144del_N501Y_A570D_D614G_P681H_T716I_S982 A_D1118H)
gggaaauaagagagaaaagaagaguaagaagaaauauaagaccccggcgccgccaccauguucguguuccuggugcugcugccccuggugagcagccagugcgugaaccugaccacccggacccagcugccaccagccuacaccaacagcuucacccggggcgucuacuaccccgacaagguguuccggagcagcguccugcacagcacccaggaccuguuccugcccuucuucagcaacgugaccugguuccacgccaucagcggcaccaacggcaccaagcgguucgacaaccccgugcugcccuucaacgacggcguguacuucgccagcaccgagaagagcaacaucauccggggcuggaucuucggcaccacccuggacagcaagacccagagccugcugaucgugaauaacgccaccaacguggugaucaaggugugcgaguuccaguucugcaacgaccccuuccugggcguguaccacaagaacaacaagagcuggauggagagcgaguuccggguguacagcagcgccaacaacugcaccuucgaguacgugagccagcccuuccugauggaccuggagggcaagcagggcaacuucaagaaccugcgggaguucguguucaagaacaucgacggcuacuucaagaucuacagcaagcacaccccaaucaaccuggugcgggaucugccccagggcuucucagcccuggagccccugguggaccugcccaucggcaucaacaucacccgguuccagacccugcuggcccugcaccggagcuaccugaccccaggcgacagcagcagcggguggacagcaggcgcggcugcuuacuacgugggcuaccugcagccccggaccuuccugcugaaguacaacgagaacggcaccaucaccgacgccguggacugcgcccuggacccucugagcgagaccaagugcacccugaagagcuucaccguggagaagggcaucuaccagaccagcaacuuccgggugcagcccaccgagagcaucgugcgguuccccaacaucaccaaccugugccccuucggcgagguguucaacgccacccgguucgccagcguguacgccuggaaccggaagcggaucagcaacugcguggccgacuacagcgugcuguacaacagcgccagcuucagcaccuucaagugcuacggcgugagccccaccaagcugaacgaccugugcuucaccaacguguacgccgacagcuucgugauccguggcgacgaggugcggcagaucgcacccggccagacaggcaagaucgccgacuacaacuacaagcugcccgacgacuucaccggcugcgugaucgccuggaacagcaacaaccucgacagcaaggugggcggcaacuacaacuaccuguaccggcuguuccggaagagcaaccugaagcccuucgagcgggacaucagcaccgagaucuaccaagccggcuccaccccuugcaacggcguggagggcuucaacugcuacuucccucugcagagcuacggcuuccagcccaccuacggcgugggcuaccagcccuaccgggugguggugcugagcuucgagcugcugcacgccccagccaccguguguggccccaagaagagcaccaaccuggugaagaacaagugcgugaacuucaacuucaacggccuuaccggcaccggcgugcugaccgagagcaacaagaaauuccugcccuuucagcaguucggccgggacaucgacgacaccaccgacgcugugcgggauccccagacccuggagauccuggacaucaccccuugcagcuucggcggcgugagcgugaucaccccaggcaccaacaccagcaaccagguggccgugcuguaccagggcgugaacugcaccgaggugcccguggccauccacgccgaccagcugacacccaccuggcgggucuacagcaccggcagcaacguguuccagacccgggccgguugccugaucggcgccgagcacgugaacaacagcuacgagugcgacauccccaucggcgccggcaucugugccagcuaccagacccagaccaauucacaccggagggcaaggagcguggccagccagagcaucaucgccuacaccaugagccugggcgccgagaacagcguggccuacagcaacaacagcaucgccauccccaucaacuucaccaucagcgugaccaccgagauucugcccgugagcaugaccaagaccagcguggacugcaccauguacaucugcggcgacagcaccgagugcagcaaccugcugcugcaguacggcagcuucugcacccagcugaaccgggcccugaccggcaucgccguggagcaggacaagaacacccaggagguguucgcccaggugaagcagaucuacaagaccccucccaucaaggacuucggcggcuucaacuucagccagauccugcccgaccccagcaagcccagcaagcggagcuucaucgaggaccugcuguucaacaaggugacccuagccgacgccggcuucaucaagcaguacggcgacugccucggcgacauagccgcccgggaccugaucugcgcccagaaguucaacggccugaccgugcugccuccccugcugaccgacgagaugaucgcccaguacaccagcgcccuguuagccggaaccaucaccagcggcuggacuuucggcgcuggagccgcucugcagauccccuucgccaugcagauggccuaccgguucaacggcaucggcgugacccagaacgugcuguacgagaaccagaagcugaucgccaaccaguucaacagcgccaucggcaagauccaggacagccugagcagcaccgcuagcgcccugggcaagcugcaggacguggugaaccagaacgcccaggcccugaacacccuggugaagcagcugagcagcaacuucggcgccaucagcagcgugcugaacgacauccuggcccggcuggacaaggucgaggccgaggugcagaucgaccggcugaucacuggccggcugcagagccugcagaccuacgugacccagcagcugauccgggccgccgagauucgggccagcgccaaccuggccgccaccaagaugagcgagugcgugcugggccagagcaagcggguggacuucugcggcaagggcuaccaccugaugagcuuuccccagagcgcaccccacggagugguguuccugcacgugaccuacgugcccgcccaggagaagaacuucaccaccgccccagccaucugccacgacggcaaggcccacuuuccccgggagggcguguucgugagcaacggcacccacugguucgugacccagcggaacuucuacgagccccagaucaucaccacccacaacaccuucgugagcggcaacugcgacguggugaucggcaucgugaacaacaccguguacgauccccugcagcccgagcuggacagcuucaaggaggagcuggacaaguacuucaagaaucacaccagccccgacguggaccugggcgacaucagcggcaucaacgccagcguggugaacauccagaaggagaucgaucggcugaacgagguggccaagaaccugaacgagagccugaucgaccugcaggagcugggcaaguacgagcaguacaucaaguggcccugguacaucuggcugggcuucaucgccggccugaucgccaucgugauggugaccaucaugcugugcugcaugaccagcugcugcagcugccugaagggcuguugcagcugcggcagcugcugcaaguucgacgaggacgacagcgagcccgugcugaagggcgugaagcugcacuacaccugauaauaggcuggagccucgguggccuagcuucuugccccuugggccuccccccagccccuccuccccuuccugcacccguacccccguggucuuugaauaaagucugagugggcggcaaaaaaaaaaaaaaaaaaaaaaaaaaaaaaaaaaaaaaaaaaaaaaaaaaaaaaaaaaaaaaaaaaaaaaaaaaaaaaaaaaaaaaaaaaaaaaaaaaaa

SEQ ID NO: 26098 - RNA, 4095 nt, Artificial Sequence
  SARS-CoV-2/Wuhan/WIV05/2019__EPI_ISL_402128 spike protein mRNA gc (1-1273)(K417N_E484K_N501Y_D614G)
gggaaauaagagagaaaagaagaguaagaagaaauauaagaccccggcgccgccaccauguucguguuccuggugcugcugccccuggugagcagccagugcgugaaccugaccacccggacccagcugccaccagccuacaccaacagcuucacccggggcgucuacuaccccgacaagguguuccggagcagcguccugcacagcacccaggaccuguuccugcccuucuucagcaacgugaccugguuccacgccauccacgugagcggcaccaacggcaccaagcgguucgacaaccccgugcugcccuucaacgacggcguguacuucgccagcaccgagaagagcaacaucauccggggcuggaucuucggcaccacccuggacagcaagacccagagccugcugaucgugaauaacgccaccaacguggugaucaaggugugcgaguuccaguucugcaacgaccccuuccugggcguguacuaccacaagaacaacaagagcuggauggagagcgaguuccggguguacagcagcgccaacaacugcaccuucgaguacgugagccagcccuuccugauggaccuggagggcaagcagggcaacuucaagaaccugcgggaguucguguucaagaacaucgacggcuacuucaagaucuacagcaagcacaccccaaucaaccuggugcgggaucugccccagggcuucucagcccuggagccccugguggaccugcccaucggcaucaacaucacccgguuccagacccugcuggcccugcaccggagcuaccugaccccaggcgacagcagcagcggguggacagcaggcgcggcugcuuacuacgugggcuaccugcagccccggaccuuccugcugaaguacaacgagaacggcaccaucaccgacgccguggacugcgcccuggacccucugagcgagaccaagugcacccugaagagcuucaccguggagaagggcaucuaccagaccagcaacuuccgggugcagcccaccgagagcaucgugcgguuccccaacaucaccaaccugugccccuucggcgagguguucaacgccacccgguucgccagcguguacgccuggaaccggaagcggaucagcaacugcguggccgacuacagcgugcuguacaacagcgccagcuucagcaccuucaagugcuacggcgugagccccaccaagcugaacgaccugugcuucaccaacguguacgccgacagcuucgugauccguggcgacgaggugcggcagaucgcacccggccagacaggcaacaucgccgacuacaacuacaagcugcccgacgacuucaccggcugcgugaucgccuggaacagcaacaaccucgacagcaaggugggcggcaacuacaacuaccuguaccggcuguuccggaagagcaaccugaagcccuucgagcgggacaucagcaccgagaucuaccaagccggcuccaccccuugcaacggcgugaagggcuucaacugcuacuucccucugcagagcuacggcuuccagcccaccuacggcgugggcuaccagcccuaccgggugguggugcugagcuucgagcugcugcacgccccagccaccguguguggccccaagaagagcaccaaccuggugaagaacaagugcgugaacuucaacuucaacggccuuaccggcaccggcgugcugaccgagagcaacaagaaauuccugcccuuucagcaguucggccgggacaucgccgacaccaccgacgcugugcgggauccccagacccuggagauccuggacaucaccccuugcagcuucggcggcgugagcgugaucaccccaggcaccaacaccagcaaccagguggccgugcuguaccagggcgugaacugcaccgaggugcccguggccauccacgccgaccagcugacacccaccuggcgggucuacagcaccggcagcaacguguuccagacccgggccgguugccugaucggcgccgagcacgugaacaacagcuacgagugcgacauccccaucggcgccggcaucugugccagcuaccagacccagaccaauucaccccggagggcaaggagcguggccagccagagcaucaucgccuacaccaugagccugggcgccgagaacagcguggccuacagcaacaacagcaucgccauccccaccaacuucaccaucagcgugaccaccgagauucugcccgugagcaugaccaagaccagcguggacugcaccauguacaucugcggcgacagcaccgagugcagcaaccugcugcugcaguacggcagcuucugcacccagcugaaccgggcccugaccggcaucgccguggagcaggacaagaacacccaggagguguucgcccaggugaagcagaucuacaagaccccucccaucaaggacuucggcggcuucaacuucagccagauccugcccgaccccagcaagcccagcaagcggagcuucaucgaggaccugcuguucaacaaggugacccuagccgacgccggcuucaucaagcaguacggcgacugccucggcgacauagccgcccgggaccugaucugcgcccagaaguucaacggccugaccgugcugccuccccugcugaccgacgagaugaucgcccaguacaccagcgcccuguuagccggaaccaucaccagcggcuggacuuucggcgcuggagccgcucugcagauccccuucgccaugcagauggccuaccgguucaacggcaucggcgugacccagaacgugcuguacgagaaccagaagcugaucgccaaccaguucaacagcgccaucggcaagauccaggacagccugagcagcaccgcuagcgcccugggcaagcugcaggacguggugaaccagaacgcccaggcccugaacacccuggugaagcagcugagcagcaacuucggcgccaucagcagcgugcugaacgacauccugagccggcuggacaaggucgaggccgaggugcagaucgaccggcugaucacuggccggcugcagagccugcagaccuacgugacccagcagcugauccgggccgccgagauucgggccagcgccaaccuggccgccaccaagaugagcgagugcgugcugggccagagcaagcggguggacuucugcggcaagggcuaccaccugaugagcuuuccccagagcgcaccccacggagugguguuccugcacgugaccuacgugcccgcccaggagaagaacuucaccaccgccccagccaucugccacgacggcaaggcccacuuuccccgggagggcguguucgugagcaacggcacccacugguucgugacccagcggaacuucuacgagccccagaucaucaccaccgacaacaccuucgugagcggcaacugcgacguggugaucggcaucgugaacaacaccguguacgauccccugcagcccgagcuggacagcuucaaggaggagcuggacaaguacuucaagaaucacaccagccccgacguggaccugggcgacaucagcggcaucaacgccagcguggugaacauccagaaggagaucgaucggcugaacgagguggccaagaaccugaacgagagccugaucgaccugcaggagcugggcaaguacgagcaguacaucaaguggcccugguacaucuggcugggcuucaucgccggccugaucgccaucgugauggugaccaucaugcugugcugcaugaccagcugcugcagcugccugaagggcuguugcagcugcggcagcugcugcaaguucgacgaggacgacagcgagcccgugcugaagggcgugaagcugcacuacaccugauaauaggcuggagccucgguggccuagcuucuugccccuugggccuccccccagccccuccuccccuuccugcacccguacccccguggucuuugaauaaagucugagugggcggcaaaaaaaaaaaaaaaaaaaaaaaaaaaaaaaaaaaaaaaaaaaaaaaaaaaaaaaaaaaaaaaaaaaaaaaaaaaaaaaaaaaaaaaaaaaaaaaaaaaa

SEQ ID NO: 26099 - RNA, 4086 nt, Artificial Sequence
  SARS-CoV-2/Wuhan/WIV05/2019__EPI_ISL_402128 spike protein mRNA gc (1-1273)(L18F_D80A_D215G_L242del_A243del_L244del_R246I_K417N_E484 K_N501Y_D614G_A701V)
gggaaauaagagagaaaagaagaguaagaagaaauauaagaccccggcgccgccaccauguucguguuccuggugcugcugccccuggugagcagccagugcgugaacuucaccacccggacccagcugccaccagccuacaccaacagcuucacccggggcgucuacuaccccgacaagguguuccggagcagcguccugcacagcacccaggaccuguuccugcccuucuucagcaacgugaccugguuccacgccauccacgugagcggcaccaacggcaccaagcgguucgccaaccccgugcugcccuucaacgacggcguguacuucgccagcaccgagaagagcaacaucauccggggcuggaucuucggcaccacccuggacagcaagacccagagccugcugaucgugaauaacgccaccaacguggugaucaaggugugcgaguuccaguucugcaacgaccccuuccugggcguguacuaccacaagaacaacaagagcuggauggagagcgaguuccggguguacagcagcgccaacaacugcaccuucgaguacgugagccagcccuuccugauggaccuggagggcaagcagggcaacuucaagaaccugcgggaguucguguucaagaacaucgacggcuacuucaagaucuacagcaagcacaccccaaucaaccuggugcggggccugccccagggcuucucagcccuggagccccugguggaccugcccaucggcaucaacaucacccgguuccagacccugcacaucagcuaccugaccccaggcgacagcagcagcggguggacagcaggcgcggcugcuuacuacgugggcuaccugcagccccggaccuuccugcugaaguacaacgagaacggcaccaucaccgacgccguggacugcgcccuggacccucugagcgagaccaagugcacccugaagagcuucaccguggagaagggcaucuaccagaccagcaacuuccgggugcagcccaccgagagcaucgugcgguuccccaacaucaccaaccugugccccuucggcgagguguucaacgccacccgguucgccagcguguacgccuggaaccggaagcggaucagcaacugcguggccgacuacagcgugcuguacaacagcgccagcuucagcaccuucaagugcuacggcgugagccccaccaagcugaacgaccugugcuucaccaacguguacgccgacagcuucgugauccguggcgacgaggugcggcagaucgcacccggccagacaggcaacaucgccgacuacaacuacaagcugcccgacgacuucaccggcugcgugaucgccuggaacagcaacaaccucgacagcaaggugggcggcaacuacaacuaccuguaccggcuguuccggaagagcaaccugaagcccuucgagcgggacaucagcaccgagaucuaccaagccggcuccaccccuugcaacggcgugaagggcuucaacugcuacuucccucugcagagcuacggcuuccagcccaccuacggcgugggcuaccagcccuaccgggugguggugcugagcuucgagcugcugcacgccccagccaccguguguggccccaagaagagcaccaaccuggugaagaacaagugcgugaacuucaacuucaacggccuuaccggcaccggcgugcugaccgagagcaacaagaaauuccugcccuuucagcaguucggccgggacaucgccgacaccaccgacgcugugcgggauccccagacccuggagauccuggacaucaccccuugcagcuucggcggcgugagcgugaucaccccaggcaccaacaccagcaaccagguggccgugcuguaccagggcgugaacugcaccgaggugcccguggccauccacgccgaccagcugacacccaccuggcgggucuacagcaccggcagcaacguguuccagacccgggccgguugccugaucggcgccgagcacgugaacaacagcuacgagugcgacauccccaucggcgccggcaucugugccagcuaccagacccagaccaauucaccccggagggcaaggagcguggccagccagagcaucaucgccuacaccaugagccugggcguggagaacagcguggccuacagcaacaacagcaucgccauccccaccaacuucaccaucagcgugaccaccgagauucugcccgugagcaugaccaagaccagcguggacugcaccauguacaucugcggcgacagcaccgagugcagcaaccugcugcugcaguacggcagcuucugcacccagcugaaccgggcccugaccggcaucgccguggagcaggacaagaacacccaggagguguucgcccaggugaagcagaucuacaagaccccucccaucaaggacuucggcggcuucaacuucagccagauccugcccgaccccagcaagcccagcaagcggagcuucaucgaggaccugcuguucaacaaggugacccuagccgacgccggcuucaucaagcaguacggcgacugccucggcgacauagccgcccgggaccugaucugcgcccagaaguucaacggccugaccgugcugccuccccugcugaccgacgagaugaucgcccaguacaccagcgcccuguuagccggaaccaucaccagcggcuggacuuucggcgcuggagccgcucugcagauccccuucgccaugcagauggccuaccgguucaacggcaucggcgugacccagaacgugcuguacgagaaccagaagcugaucgccaaccaguucaacagcgccaucggcaagauccaggacagccugagcagcaccgcuagcgcccugggcaagcugcaggacguggugaaccagaacgcccaggcccugaacacccuggugaagcagcugagcagcaacuucggcgccaucagcagcgugcugaacgacauccugagccggcuggacaaggucgaggccgaggugcagaucgaccggcugaucacuggccggcugcagagccugcagaccuacgugacccagcagcugauccgggccgccgagauucgggccagcgccaaccuggccgccaccaagaugagcgagugcgugcugggccagagcaagcggguggacuucugcggcaagggcuaccaccugaugagcuuuccccagagcgcaccccacggagugguguuccugcacgugaccuacgugcccgcccaggagaagaacuucaccaccgccccagccaucugccacgacggcaaggcccacuuuccccgggagggcguguucgugagcaacggcacccacugguucgugacccagcggaacuucuacgagccccagaucaucaccaccgacaacaccuucgugagcggcaacugcgacguggugaucggcaucgugaacaacaccguguacgauccccugcagcccgagcuggacagcuucaaggaggagcuggacaaguacuucaagaaucacaccagccccgacguggaccugggcgacaucagcggcaucaacgccagcguggugaacauccagaaggagaucgaucggcugaacgagguggccaagaaccugaacgagagccugaucgaccugcaggagcugggcaaguacgagcaguacaucaaguggcccugguacaucuggcugggcuucaucgccggccugaucgccaucgugauggugaccaucaugcugugcugcaugaccagcugcugcagcugccugaagggcuguugcagcugcggcagcugcugcaaguucgacgaggacgacagcgagcccgugcugaagggcgugaagcugcacuacaccugauaauaggcuggagccucgguggccuagcuucuugccccuugggccuccccccagccccuccuccccuuccugcacccguacccccguggucuuugaauaaagucugagugggcggcaaaaaaaaaaaaaaaaaaaaaaaaaaaaaaaaaaaaaaaaaaaaaaaaaaaaaaaaaaaaaaaaaaaaaaaaaaaaaaaaaaaaaaaaaaaaaaaaaaaa

SEQ ID NO: 26100 - RNA, 4095 nt, Artificial Sequence
  SARS-CoV-2/Wuhan/WIV05/2019__EPI_ISL_402128 spike protein mRNA gc (1-1273)(E484K_D614G)
gggaaauaagagagaaaagaagaguaagaagaaauauaagaccccggcgccgccaccauguucguguuccuggugcugcugccccuggugagcagccagugcgugaaccugaccacccggacccagcugccaccagccuacaccaacagcuucacccggggcgucuacuaccccgacaagguguuccggagcagcguccugcacagcacccaggaccuguuccugcccuucuucagcaacgugaccugguuccacgccauccacgugagcggcaccaacggcaccaagcgguucgacaaccccgugcugcccuucaacgacggcguguacuucgccagcaccgagaagagcaacaucauccggggcuggaucuucggcaccacccuggacagcaagacccagagccugcugaucgugaauaacgccaccaacguggugaucaaggugugcgaguuccaguucugcaacgaccccuuccugggcguguacuaccacaagaacaacaagagcuggauggagagcgaguuccggguguacagcagcgccaacaacugcaccuucgaguacgugagccagcccuuccugauggaccuggagggcaagcagggcaacuucaagaaccugcgggaguucguguucaagaacaucgacggcuacuucaagaucuacagcaagcacaccccaaucaaccuggugcgggaucugccccagggcuucucagcccuggagccccugguggaccugcccaucggcaucaacaucacccgguuccagacccugcuggcccugcaccggagcuaccugaccccaggcgacagcagcagcggguggacagcaggcgcggcugcuuacuacgugggcuaccugcagccccggaccuuccugcugaaguacaacgagaacggcaccaucaccgacgccguggacugcgcccuggacccucugagcgagaccaagugcacccugaagagcuucaccguggagaagggcaucuaccagaccagcaacuuccgggugcagcccaccgagagcaucgugcgguuccccaacaucaccaaccugugccccuucggcgagguguucaacgccacccgguucgccagcguguacgccuggaaccggaagcggaucagcaacugcguggccgacuacagcgugcuguacaacagcgccagcuucagcaccuucaagugcuacggcgugagccccaccaagcugaacgaccugugcuucaccaacguguacgccgacagcuucgugauccguggcgacgaggugcggcagaucgcacccggccagacaggcaagaucgccgacuacaacuacaagcugcccgacgacuucaccggcugcgugaucgccuggaacagcaacaaccucgacagcaaggugggcggcaacuacaacuaccuguaccggcuguuccggaagagcaaccugaagcccuucgagcgggacaucagcaccgagaucuaccaagccggcuccaccccuugcaacggcgugaagggcuucaacugcuacuucccucugcagagcuacggcuuccagcccaccaacggcgugggcuaccagcccuaccgggugguggugcugagcuucgagcugcugcacgccccagccaccguguguggccccaagaagagcaccaaccuggugaagaacaagugcgugaacuucaacuucaacggccuuaccggcaccggcgugcugaccgagagcaacaagaaauuccugcccuuucagcaguucggccgggacaucgccgacaccaccgacgcugugcgggauccccagacccuggagauccuggacaucaccccuugcagcuucggcggcgugagcgugaucaccccaggcaccaacaccagcaaccagguggccgugcuguaccagggcgugaacugcaccgaggugcccguggccauccacgccgaccagcugacacccaccuggcgggucuacagcaccggcagcaacguguuccagacccgggccgguugccugaucggcgccgagcacgugaacaacagcuacgagugcgacauccccaucggcgccggcaucugugccagcuaccagacccagaccaauucaccccggagggcaaggagcguggccagccagagcaucaucgccuacaccaugagccugggcgccgagaacagcguggccuacagcaacaacagcaucgccauccccaccaacuucaccaucagcgugaccaccgagauucugcccgugagcaugaccaagaccagcguggacugcaccauguacaucugcggcgacagcaccgagugcagcaaccugcugcugcaguacggcagcuucugcacccagcugaaccgggcccugaccggcaucgccguggagcaggacaagaacacccaggagguguucgcccaggugaagcagaucuacaagaccccucccaucaaggacuucggcggcuucaacuucagccagauccugcccgaccccagcaagcccagcaagcggagcuucaucgaggaccugcuguucaacaaggugacccuagccgacgccggcuucaucaagcaguacggcgacugccucggcgacauagccgcccgggaccugaucugcgcccagaaguucaacggccugaccgugcugccuccccugcugaccgacgagaugaucgcccaguacaccagcgcccuguuagccggaaccaucaccagcggcuggacuuucggcgcuggagccgcucugcagauccccuucgccaugcagauggccuaccgguucaacggcaucggcgugacccagaacgugcuguacgagaaccagaagcugaucgccaaccaguucaacagcgccaucggcaagauccaggacagccugagcagcaccgcuagcgcccugggcaagcugcaggacguggugaaccagaacgcccaggcccugaacacccuggugaagcagcugagcagcaacuucggcgccaucagcagcgugcugaacgacauccugagccggcuggacaaggucgaggccgaggugcagaucgaccggcugaucacuggccggcugcagagccugcagaccuacgugacccagcagcugauccgggccgccgagauucgggccagcgccaaccuggccgccaccaagaugagcgagugcgugcugggccagagcaagcggguggacuucugcggcaagggcuaccaccugaugagcuuuccccagagcgcaccccacggagugguguuccugcacgugaccuacgugcccgcccaggagaagaacuucaccaccgccccagccaucugccacgacggcaaggcccacuuuccccgggagggcguguucgugagcaacggcacccacugguucgugacccagcggaacuucuacgagccccagaucaucaccaccgacaacaccuucgugagcggcaacugcgacguggugaucggcaucgugaacaacaccguguacgauccccugcagcccgagcuggacagcuucaaggaggagcuggacaaguacuucaagaaucacaccagccccgacguggaccugggcgacaucagcggcaucaacgccagcguggugaacauccagaaggagaucgaucggcugaacgagguggccaagaaccugaacgagagccugaucgaccugcaggagcugggcaaguacgagcaguacaucaaguggcccugguacaucuggcugggcuucaucgccggccugaucgccaucgugauggugaccaucaugcugugcugcaugaccagcugcugcagcugccugaagggcuguugcagcugcggcagcugcugcaaguucgacgaggacgacagcgagcccgugcugaagggcgugaagcugcacuacaccugauaauaggcuggagccucgguggccuagcuucuugccccuugggccuccccccagccccuccuccccuuccugcacccguacccccguggucuuugaauaaagucugagugggcggcaaaaaaaaaaaaaaaaaaaaaaaaaaaaaaaaaaaaaaaaaaaaaaaaaaaaaaaaaaaaaaaaaaaaaaaaaaaaaaaaaaaaaaaaaaaaaaaaaaaa

SEQ ID NO: 26101 - RNA, 4095 nt, Artificial Sequence
  SARS-CoV-2/Wuhan/WIV05/2019__EPI_ISL_402128 spike protein mRNA gc (1-1273)(L18F_T20N_P26S_D138Y_R190S_K417T_E484K_N501Y_D614G_H655Y _T1027I)
gggaaauaagagagaaaagaagaguaagaagaaauauaagaccccggcgccgccaccauguucguguuccuggugcugcugccccuggugagcagccagugcgugaacuucaccaaccggacccagcugccaagcgccuacaccaacagcuucacccggggcgucuacuaccccgacaagguguuccggagcagcguccugcacagcacccaggaccuguuccugcccuucuucagcaacgugaccugguuccacgccauccacgugagcggcaccaacggcaccaagcgguucgacaaccccgugcugcccuucaacgacggcguguacuucgccagcaccgagaagagcaacaucauccggggcuggaucuucggcaccacccuggacagcaagacccagagccugcugaucgugaauaacgccaccaacguggugaucaaggugugcgaguuccaguucugcaacuaccccuuccugggcguguacuaccacaagaacaacaagagcuggauggagagcgaguuccggguguacagcagcgccaacaacugcaccuucgaguacgugagccagcccuuccugauggaccuggagggcaagcagggcaacuucaagaaccugagcgaguucguguucaagaacaucgacggcuacuucaagaucuacagcaagcacaccccaaucaaccuggugcgggaucugccccagggcuucucagcccuggagccccugguggaccugcccaucggcaucaacaucacccgguuccagacccugcuggcccugcaccggagcuaccugaccccaggcgacagcagcagcggguggacagcaggcgcggcugcuuacuacgugggcuaccugcagccccggaccuuccugcugaaguacaacgagaacggcaccaucaccgacgccguggacugcgcccuggacccucugagcgagaccaagugcacccugaagagcuucaccguggagaagggcaucuaccagaccagcaacuuccgggugcagcccaccgagagcaucgugcgguuccccaacaucaccaaccugugccccuucggcgagguguucaacgccacccgguucgccagcguguacgccuggaaccggaagcggaucagcaacugcguggccgacuacagcgugcuguacaacagcgccagcuucagcaccuucaagugcuacggcgugagccccaccaagcugaacgaccugugcuucaccaacguguacgccgacagcuucgugauccguggcgacgaggugcggcagaucgcacccggccagacaggcaccaucgccgacuacaacuacaagcugcccgacgacuucaccggcugcgugaucgccuggaacagcaacaaccucgacagcaaggugggcggcaacuacaacuaccuguaccggcuguuccggaagagcaaccugaagcccuucgagcgggacaucagcaccgagaucuaccaagccggcuccaccccuugcaacggcgugaagggcuucaacugcuacuucccucugcagagcuacggcuuccagcccaccuacggcgugggcuaccagcccuaccgggugguggugcugagcuucgagcugcugcacgccccagccaccguguguggccccaagaagagcaccaaccuggugaagaacaagugcgugaacuucaacuucaacggccuuaccggcaccggcgugcugaccgagagcaacaagaaauuccugcccuuucagcaguucggccgggacaucgccgacaccaccgacgcugugcgggauccccagacccuggagauccuggacaucaccccuugcagcuucggcggcgugagcgugaucaccccaggcaccaacaccagcaaccagguggccgugcuguaccagggcgugaacugcaccgaggugcccguggccauccacgccgaccagcugacacccaccuggcgggucuacagcaccggcagcaacguguuccagacccgggccgguugccugaucggcgccgaguacgugaacaacagcuacgagugcgacauccccaucggcgccggcaucugugccagcuaccagacccagaccaauucaccccggagggcaaggagcguggccagccagagcaucaucgccuacaccaugagccugggcgccgagaacagcguggccuacagcaacaacagcaucgccauccccaccaacuucaccaucagcgugaccaccgagauucugcccgugagcaugaccaagaccagcguggacugcaccauguacaucugcggcgacagcaccgagugcagcaaccugcugcugcaguacggcagcuucugcacccagcugaaccgggcccugaccggcaucgccguggagcaggacaagaacacccaggagguguucgcccaggugaagcagaucuacaagaccccucccaucaaggacuucggcggcuucaacuucagccagauccugcccgaccccagcaagcccagcaagcggagcuucaucgaggaccugcuguucaacaaggugacccuagccgacgccggcuucaucaagcaguacggcgacugccucggcgacauagccgcccgggaccugaucugcgcccagaaguucaacggccugaccgugcugccuccccugcugaccgacgagaugaucgcccaguacaccagcgcccuguuagccggaaccaucaccagcggcuggacuuucggcgcuggagccgcucugcagauccccuucgccaugcagauggccuaccgguucaacggcaucggcgugacccagaacgugcuguacgagaaccagaagcugaucgccaaccaguucaacagcgccaucggcaagauccaggacagccugagcagcaccgcuagcgcccugggcaagcugcaggacguggugaaccagaacgcccaggcccugaacacccuggugaagcagcugagcagcaacuucggcgccaucagcagcgugcugaacgacauccugagccggcuggacaaggucgaggccgaggugcagaucgaccggcugaucacuggccggcugcagagccugcagaccuacgugacccagcagcugauccgggccgccgagauucgggccagcgccaaccuggccgccaucaagaugagcgagugcgugcugggccagagcaagcggguggacuucugcggcaagggcuaccaccugaugagcuuuccccagagcgcaccccacggagugguguuccugcacgugaccuacgugcccgcccaggagaagaacuucaccaccgccccagccaucugccacgacggcaaggcccacuuuccccgggagggcguguucgugagcaacggcacccacugguucgugacccagcggaacuucuacgagccccagaucaucaccaccgacaacaccuucgugagcggcaacugcgacguggugaucggcaucgugaacaacaccguguacgauccccugcagcccgagcuggacagcuucaaggaggagcuggacaaguacuucaagaaucacaccagccccgacguggaccugggcgacaucagcggcaucaacgccagcguggugaacauccagaaggagaucgaucggcugaacgagguggccaagaaccugaacgagagccugaucgaccugcaggagcugggcaaguacgagcaguacaucaaguggcccugguacaucuggcugggcuucaucgccggccugaucgccaucgugauggugaccaucaugcugugcugcaugaccagcugcugcagcugccugaagggcuguugcagcugcggcagcugcugcaaguucgacgaggacgacagcgagcccgugcugaagggcgugaagcugcacuacaccugauaauaggcuggagccucgguggccuagcuucuugccccuugggccuccccccagccccuccuccccuuccugcacccguacccccguggucuuugaauaaagucugagugggcggcaaaaaaaaaaaaaaaaaaaaaaaaaaaaaaaaaaaaaaaaaaaaaaaaaaaaaaaaaaaaaaaaaaaaaaaaaaaaaaaaaaaaaaaaaaaaaaaaaaaa

SEQ ID NO: 26102 - RNA, 4095 nt, Artificial Sequence
  SARS-CoV-2/Wuhan/WIV05/2019__EPI_ISL_402128 spike protein mRNA gc (1-1273)(S13I_W152C_L452R_D614G)
gggaaauaagagagaaaagaagaguaagaagaaauauaagaccccggcgccgccaccauguucguguuccuggugcugcugccccuggugagcauccagugcgugaaccugaccacccggacccagcugccaccagccuacaccaacagcuucacccggggcgucuacuaccccgacaagguguuccggagcagcguccugcacagcacccaggaccuguuccugcccuucuucagcaacgugaccugguuccacgccauccacgugagcggcaccaacggcaccaagcgguucgacaaccccgugcugcccuucaacgacggcguguacuucgccagcaccgagaagagcaacaucauccggggcuggaucuucggcaccacccuggacagcaagacccagagccugcugaucgugaauaacgccaccaacguggugaucaaggugugcgaguuccaguucugcaacgaccccuuccugggcguguacuaccacaagaacaacaagagcugcauggagagcgaguuccggguguacagcagcgccaacaacugcaccuucgaguacgugagccagcccuuccugauggaccuggagggcaagcagggcaacuucaagaaccugcgggaguucguguucaagaacaucgacggcuacuucaagaucuacagcaagcacaccccaaucaaccuggugcgggaucugccccagggcuucucagcccuggagccccugguggaccugcccaucggcaucaacaucacccgguuccagacccugcuggcccugcaccggagcuaccugaccccaggcgacagcagcagcggguggacagcaggcgcggcugcuuacuacgugggcuaccugcagccccggaccuuccugcugaaguacaacgagaacggcaccaucaccgacgccguggacugcgcccuggacccucugagcgagaccaagugcacccugaagagcuucaccguggagaagggcaucuaccagaccagcaacuuccgggugcagcccaccgagagcaucgugcgguuccccaacaucaccaaccugugccccuucggcgagguguucaacgccacccgguucgccagcguguacgccuggaaccggaagcggaucagcaacugcguggccgacuacagcgugcuguacaacagcgccagcuucagcaccuucaagugcuacggcgugagccccaccaagcugaacgaccugugcuucaccaacguguacgccgacagcuucgugauccguggcgacgaggugcggcagaucgcacccggccagacaggcaagaucgccgacuacaacuacaagcugcccgacgacuucaccggcugcgugaucgccuggaacagcaacaaccucgacagcaaggugggcggcaacuacaacuaccgcuaccggcuguuccggaagagcaaccugaagcccuucgagcgggacaucagcaccgagaucuaccaagccggcuccaccccuugcaacggcguggagggcuucaacugcuacuucccucugcagagcuacggcuuccagcccaccaacggcgugggcuaccagcccuaccgggugguggugcugagcuucgagcugcugcacgccccagccaccguguguggccccaagaagagcaccaaccuggugaagaacaagugcgugaacuucaacuucaacggccuuaccggcaccggcgugcugaccgagagcaacaagaaauuccugcccuuucagcaguucggccgggacaucgccgacaccaccgacgcugugcgggauccccagacccuggagauccuggacaucaccccuugcagcuucggcggcgugagcgugaucaccccaggcaccaacaccagcaaccagguggccgugcuguaccagggcgugaacugcaccgaggugcccguggccauccacgccgaccagcugacacccaccuggcgggucuacagcaccggcagcaacguguuccagacccgggccgguugccugaucggcgccgagcacgugaacaacagcuacgagugcgacauccccaucggcgccggcaucugugccagcuaccagacccagaccaauucaccccggagggcaaggagcguggccagccagagcaucaucgccuacaccaugagccugggcgccgagaacagcguggccuacagcaacaacagcaucgccauccccaccaacuucaccaucagcgugaccaccgagauucugcccgugagcaugaccaagaccagcguggacugcaccauguacaucugcggcgacagcaccgagugcagcaaccugcugcugcaguacggcagcuucugcacccagcugaaccgggcccugaccggcaucgccguggagcaggacaagaacacccaggagguguucgcccaggugaagcagaucuacaagaccccucccaucaaggacuucggcggcuucaacuucagccagauccugcccgaccccagcaagcccagcaagcggagcuucaucgaggaccugcuguucaacaaggugacccuagccgacgccggcuucaucaagcaguacggcgacugccucggcgacauagccgcccgggaccugaucugcgcccagaaguucaacggccugaccgugcugccuccccugcugaccgacgagaugaucgcccaguacaccagcgcccuguuagccggaaccaucaccagcggcuggacuuucggcgcuggagccgcucugcagauccccuucgccaugcagauggccuaccgguucaacggcaucggcgugacccagaacgugcuguacgagaaccagaagcugaucgccaaccaguucaacagcgccaucggcaagauccaggacagccugagcagcaccgcuagcgcccugggcaagcugcaggacguggugaaccagaacgcccaggcccugaacacccuggugaagcagcugagcagcaacuucggcgccaucagcagcgugcugaacgacauccugagccggcuggacaaggucgaggccgaggugcagaucgaccggcugaucacuggccggcugcagagccugcagaccuacgugacccagcagcugauccgggccgccgagauucgggccagcgccaaccuggccgccaccaagaugagcgagugcgugcugggccagagcaagcggguggacuucugcggcaagggcuaccaccugaugagcuuuccccagagcgcaccccacggagugguguuccugcacgugaccuacgugcccgcccaggagaagaacuucaccaccgccccagccaucugccacgacggcaaggcccacuuuccccgggagggcguguucgugagcaacggcacccacugguucgugacccagcggaacuucuacgagccccagaucaucaccaccgacaacaccuucgugagcggcaacugcgacguggugaucggcaucgugaacaacaccguguacgauccccugcagcccgagcuggacagcuucaaggaggagcuggacaaguacuucaagaaucacaccagccccgacguggaccugggcgacaucagcggcaucaacgccagcguggugaacauccagaaggagaucgaucggcugaacgagguggccaagaaccugaacgagagccugaucgaccugcaggagcugggcaaguacgagcaguacaucaaguggcccugguacaucuggcugggcuucaucgccggccugaucgccaucgugauggugaccaucaugcugugcugcaugaccagcugcugcagcugccugaagggcuguugcagcugcggcagcugcugcaaguucgacgaggacgacagcgagcccgugcugaagggcgugaagcugcacuacaccugauaauaggcuggagccucgguggccuagcuucuugccccuugggccuccccccagccccuccuccccuuccugcacccguacccccguggucuuugaauaaagucugagugggcggcaaaaaaaaaaaaaaaaaaaaaaaaaaaaaaaaaaaaaaaaaaaaaaaaaaaaaaaaaaaaaaaaaaaaaaaaaaaaaaaaaaaaaaaaaaaaaaaaaaaa

SEQ ID NO: 26103 - RNA, 4095 nt, Artificial Sequence
  SARS-CoV-2/Wuhan/WIV05/2019__EPI_ISL_402128 spike protein mRNA gc (1-1273)
gggaaauaagagagaaaagaagaguaagaagaaauauaagaccccggcgccgccaccauguucguguuccuggugcugcugccccuggugagcagccagugcgugaaccugaccacccggacccagcugcccccugccuacaccaacagcuucacccggggcguguacuaccccgacaagguguuccggagcagcgugcugcacagcacccaggaccuguuccugcccuucuucagcaacgugaccugguuccacgccauccacgugagcggcaccaacggcaccaagcgguucgacaacccagugcugcccuucaacgacggcguguacuucgccagcaccgagaagucaaacaucauccggggcuggaucuucggcaccacccuggacagcaagacacagagccugcugaucgugaacaacgccaccaacguggugaucaaggugugcgaguuucaguucugcaacgaccccuuccugggcguguacuaccacaagaacaacaagagcuggauggagagcgaguuccgggucuacagcagcgcuaacaauugcaccuucgaguacgugagccagcccuuccugauggaccucgagggcaagcagggcaacuucaagaaccugcgggaguucguguucaagaacaucgauggcuacuucaagaucuacagcaagcacacccccaucaaccuggugcgggaccugccccagggauucagcgcccuggagccucugguggaccugcccaucggcaucaacaucaccagguuccagacccugcuggcccugcaccggagcuaccugacccccggcgacagcagcagcggcuggaccgccggcgccgccgcauacuacgugggcuaccugcagccacggaccuuccugcugaaguacaacgagaacggcaccaucaccgacgccguggacugcgcccuggacccccugagcgagaccaagugcacccuaaagagcuucaccguggagaagggcaucuaccagaccagcaacuuccgggugcagcccacugagagcaucgugcgguuccccaacauuaccaaccugugucccuucggcgagguguucaacgccacccgguucgccagcguguacgccuggaaccggaagcggaucagcaacugcguggccgacuacagcgugcuguacaacagcgccagcuucagcaccuucaagugcuacggcgugagcccuaccaagcugaacgaccugugcuucaccaacguguacgcugacagcuucgugauccggggcgacgaggugcggcagaucgcccccggccagaccggcaagaucgccgacuacaacuacaagcugcccgacgacuucaccggcugcgugaucgccuggaacagcaacaaccuggacagcaaggugggcggcaacuacaacuaccuguaccggcuguuccguaagagcaaccugaagccauucgagcgggacaucagcaccgagaucuaccaggccggcagcacccccugcaacgguguggagggcuuuaacugcuacuucccccugcagagcuacggcuuccagcccaccaacggcgugggcuaccagcccuaccgggugguggugcugagcuucgagcugcugcacgcccccgccaccgugugcggcccuaaaaagagcaccaaccuggugaagaacaagugcgugaacuucaauuucaacggccugaccggcaccggcgugcugaccgagagcaacaagaaguuccugcccuuccagcaguucggccgggauaucgccgacaccaccgacgcagugcgggacccccagacccuggagauccuggacaucaccccaugcagcuucggcggcgugagcgucaucacccccggcacaaacaccagcaaccagguggccgugcuguaccaggacgugaacugcaccgaggugcccguggccauccacgccgaccagcugacccccaccuggcggguguacagcaccggaagcaacguguuccagacccgggccggcugccugaucggcgccgagcacgugaacaacuccuacgagugcgacauccccaucggcgcuggcaucugcgccagcuaccagacccagaccaacagcccccggcgggcccggagcguggccagccagagcaucaucgccuacaccaugagcuuaggcgccgagaacagcguggccuacagcaacaacagcaucgcgaucccuaccaacuucaccaucagcgugaccaccgagauacugcccgugagcaugaccaagaccagcguggacuguaccauguacaucugcggcgacagcaccgagugcagcaaccugcugcugcaguacggcagcuucugcacccagcugaaccgggcccugaccggcaucgccguggagcaggacaagaacacccaagagguguucgcccaggugaagcagaucuacaagacucccccaaucaaggacuucggcggcuucaacuucagccagauccugcccgaccccagcaagcccagcaagcggagcuucaucgaggaccugcuguucaacaaggugacccuggccgacgccggcuucaucaagcaguacggcgauugccugggcgacaucgccgcucgggaccugaucugcgcccagaaguucaacgggcugaccgugcugcccccucugcugaccgacgagaugaucgcccaguacaccagcgcccugcuugccggcaccaucaccagcggcuggaccuucggcgccggcgcagcccugcagauccccuucgccaugcagauggccuaccgguucaacggcaucggcgugacccagaacgugcuguacgagaaccagaagcugaucgccaaccaguucaacagcgccaucggcaagauccaggacagccugagcagcaccgccagcgcccugggcaagcugcaggacguggugaaccagaacgcucaggcccugaacacccuggugaagcagcugagcagcaacuucggcgccaucagcucagugcugaaugacauccugagcaggcuggacaagguggaggccgaggugcagaucgaccggcugaucaccggccggcugcagagccugcagaccuacgugacccagcagcugauccgggccgccgagauccgggccagcgccaaccuggcagccaccaagaugagcgagugcgugcugggccagagcaagcggguggacuuuugcggcaagggcuaccaccugaugagcuucccccagagcgccccacacggcgugguguuccuccacgucacauacgugcccgcccaggagaagaacuucaccaccgcccccgccauuugccacgacggcaaggcucacuucccccgggagggcguguucgugagcaacggaacccacugguucgugacccagcggaacuucuacgagccccagaucaucaccaccgacaacaccuucgugagcggcaacugcgacguggugaucggcaucgugaacaacaccguguacgacccccugcagccugagcuggacagcuucaaggaggagcuggacaaguacuucaagaaccacaccagccccgauguggaccugggcgacaucagcggcaucaacgccagcguggugaacauccagaaggagaucgaccggcugaacgagguggccaagaaccugaacgagagccugaucgaccugcaggagcugggcaaguacgagcaguacaucaaguggcccugguacaucuggcugggcuucaucgccggccugaucgccaucgugauggugaccaucaugcugugcugcaugaccagcugcuguagcugccugaagggcugcugcagcugcggcagcugcugcaaguucgacgaggacgacagcgagccagugcugaagggcgugaagcugcacuacaccugauaauaggcuggagccucgguggccuagcuucuugccccuugggccuccccccagccccuccuccccuuccugcacccguacccccguggucuuugaauaaagucugagugggcggcaaaaaaaaaaaaaaaaaaaaaaaaaaaaaaaaaaaaaaaaaaaaaaaaaaaaaaaaaaaaaaaaaaaaaaaaaaaaaaaaaaaaaaaaaaaaaaaaaaaa

SEQ ID NO: 26104 - RNA, 4095 nt, Artificial Sequence
  SARS-CoV-2/Wuhan/WIV05/2019__EPI_ISL_402128 spike protein mRNA gc (1-1273)(D614G)
gggaaauaagagagaaaagaagaguaagaagaaauauaagaccccggcgccgccaccauguucguguuccuggugcugcugccccuggugagcagccagugcgugaaccugaccacccggacccagcugcccccugccuacaccaacagcuucacccggggcguguacuaccccgacaagguguuccggagcagcgugcugcacagcacccaggaccuguuccugcccuucuucagcaacgugaccugguuccacgccauccacgugagcggcaccaacggcaccaagcgguucgacaacccagugcugcccuucaacgacggcguguacuucgccagcaccgagaagucaaacaucauccggggcuggaucuucggcaccacccuggacagcaagacacagagccugcugaucgugaacaacgccaccaacguggugaucaaggugugcgaguuucaguucugcaacgaccccuuccugggcguguacuaccacaagaacaacaagagcuggauggagagcgaguuccgggucuacagcagcgcuaacaauugcaccuucgaguacgugagccagcccuuccugauggaccucgagggcaagcagggcaacuucaagaaccugcgggaguucguguucaagaacaucgauggcuacuucaagaucuacagcaagcacacccccaucaaccuggugcgggaccugccccagggauucagcgcccuggagccucugguggaccugcccaucggcaucaacaucaccagguuccagacccugcuggcccugcaccggagcuaccugacccccggcgacagcagcagcggcuggaccgccggcgccgccgcauacuacgugggcuaccugcagccacggaccuuccugcugaaguacaacgagaacggcaccaucaccgacgccguggacugcgcccuggacccccugagcgagaccaagugcacccuaaagagcuucaccguggagaagggcaucuaccagaccagcaacuuccgggugcagcccacugagagcaucgugcgguuccccaacauuaccaaccugugucccuucggcgagguguucaacgccacccgguucgccagcguguacgccuggaaccggaagcggaucagcaacugcguggccgacuacagcgugcuguacaacagcgccagcuucagcaccuucaagugcuacggcgugagcccuaccaagcugaacgaccugugcuucaccaacguguacgcugacagcuucgugauccggggcgacgaggugcggcagaucgcccccggccagaccggcaagaucgccgacuacaacuacaagcugcccgacgacuucaccggcugcgugaucgccuggaacagcaacaaccuggacagcaaggugggcggcaacuacaacuaccuguaccggcuguuccguaagagcaaccugaagccauucgagcgggacaucagcaccgagaucuaccaggccggcagcacccccugcaacgguguggagggcuuuaacugcuacuucccccugcagagcuacggcuuccagcccaccaacggcgugggcuaccagcccuaccgggugguggugcugagcuucgagcugcugcacgcccccgccaccgugugcggcccuaaaaagagcaccaaccuggugaagaacaagugcgugaacuucaauuucaacggccugaccggcaccggcgugcugaccgagagcaacaagaaguuccugcccuuccagcaguucggccgggauaucgccgacaccaccgacgcagugcgggacccccagacccuggagauccuggacaucaccccaugcagcuucggcggcgugagcgucaucacccccggcacaaacaccagcaaccagguggccgugcuguaccagggagugaacugcaccgaggugcccguggccauccacgccgaccagcugacccccaccuggcggguguacagcaccggcagcaacguguuccagacccgggccggcugccugaucggcgccgagcacgugaacaacuccuacgagugcgacauccccaucggcgcuggcaucugcgccagcuaccagacccagaccaacagcccccggcgggcccggagcguggccagccagagcaucaucgccuacaccaugagcuuaggcgccgagaacagcguggccuacagcaacaacagcaucgcgaucccuaccaacuucaccaucagcgugaccaccgagauacugcccgugagcaugaccaagaccagcguggacuguaccauguacaucugcggcgacagcaccgagugcagcaaccugcugcugcaguacggcagcuucugcacccagcugaaccgggcccugaccggcaucgccguggagcaggacaagaacacccaagagguguucgcccaggugaagcagaucuacaagacucccccaaucaaggacuucggcggcuucaacuucagccagauccugcccgaccccagcaagcccagcaagcggagcuucaucgaggaccugcuguucaacaaggugacccuggccgacgccggcuucaucaagcaguacggcgacugccugggggauaucgccgcucgggaccugaucugcgcccagaaguucaacggccugaccgugcugcccccucugcugaccgacgagaugaucgcccaguacaccagcgcccugcuugccggcaccaucaccagcggcuggaccuucggcgccggcgcagcccugcagauccccuucgccaugcagauggccuaccgguucaacggcaucggcgugacccagaacgugcuguacgagaaccagaagcugaucgccaaccaguucaacagcgccaucggcaagauccaggacagccugagcagcaccgccagcgcccugggcaagcugcaggacguggugaaccagaacgcucaggcccugaacacccuggugaagcagcugagcagcaacuucggcgccaucagcucagugcugaaugacauccugagcaggcuggacaagguggaggccgaggugcagaucgaccggcugaucaccggccggcugcagagccugcagaccuacgugacccagcagcugauccgggccgccgagauccgggccagcgccaaccuggcagccaccaagaugagcgagugcgugcugggccagagcaagcggguggacuuuugcggcaagggcuaccaccugaugagcuucccccagagcgccccacacggcgugguguuccuccacgucacauacgugcccgcccaggagaagaacuucaccaccgcccccgccauuugccacgacggcaaggcucacuucccccgggagggaguguucgugagcaacggcacccacugguucgugacccagcggaacuucuacgagccccagaucaucaccaccgacaacaccuucgugagcggcaacugcgacguggugaucggcaucgugaacaacaccguguacgacccccugcagccugagcuggacagcuucaaggaggagcuggacaaguacuucaagaaccacaccagccccgacguggaucugggcgacaucagcggcaucaacgccagcguggugaacauccagaaggagaucgaccggcugaacgagguggccaagaaccugaacgagagccugaucgaccugcaggagcugggcaaguacgagcaguacaucaaguggcccugguacaucuggcugggcuucaucgccggccugaucgccaucgugauggugaccaucaugcugugcugcaugaccagcugcuguagcugccugaagggcugcugcagcugcggcagcugcugcaaguucgacgaggacgacagcgagccagugcugaagggcgugaagcugcacuacaccugauaauaggcuggagccucgguggccuagcuucuugccccuugggccuccccccagccccuccuccccuuccugcacccguacccccguggucuuugaauaaagucugagugggcggcaaaaaaaaaaaaaaaaaaaaaaaaaaaaaaaaaaaaaaaaaaaaaaaaaaaaaaaaaaaaaaaaaaaaaaaaaaaaaaaaaaaaaaaaaaaaaaaaaaaa

SEQ ID NO: 26105 - RNA, 4095 nt, Artificial Sequence
  SARS-CoV-2/Wuhan/WIV05/2019__EPI_ISL_402128 spike protein mRNA gc (1-1273)(A222V_D614G)
gggaaauaagagagaaaagaagaguaagaagaaauauaagaccccggcgccgccaccauguucguguuccuggugcugcugccccuggugagcagccagugcgugaaccugaccacccggacccagcugcccccugccuacaccaacagcuucacccggggcguguacuaccccgacaagguguuccggagcagcgugcugcacagcacccaggaccuguuccugcccuucuucagcaacgugaccugguuccacgccauccacgugagcggcaccaacggcaccaagcgguucgacaacccagugcugcccuucaacgacggcguguacuucgccagcaccgagaagucaaacaucauccggggcuggaucuucggcaccacccuggacagcaagacacagagccugcugaucgugaacaacgccaccaacguggugaucaaggugugcgaguuucaguucugcaacgaccccuuccugggcguguacuaccacaagaacaacaagagcuggauggagagcgaguuccgggucuacagcagcgcuaacaauugcaccuucgaguacgugagccagcccuuccugauggaccucgagggcaagcagggcaacuucaagaaccugcgggaguucguguucaagaacaucgauggcuacuucaagaucuacagcaagcacacccccaucaaccuggugcgggaccugccccagggauucagcgugcuggagccucugguggaccugcccaucggcaucaacaucaccagguuccagacccugcuggcccugcaccggagcuaccugacccccggcgacagcagcagcggcuggaccgccggcgccgccgccuacuacgugggcuaccugcagccacggaccuuccugcugaaguacaacgagaacggcaccaucaccgacgcaguggacugcgcccuggacccccugagcgagaccaagugcacccuaaagagcuucaccguggagaagggcaucuaccagaccagcaacuuccgggugcagcccacugagagcaucgugcgguuccccaacauuaccaaccugugucccuucggcgagguguucaacgccacccgguucgccagcguguacgccuggaaccggaagcggaucagcaacugcguggccgacuacagcgugcuguacaacagcgccagcuucagcaccuucaagugcuacggcgugagcccuaccaagcugaacgaccugugcuucaccaacguguacgccgacagcuucgugauccggggcgacgaggugcggcagaucgcucccggccagaccggcaagaucgccgacuacaacuacaagcugcccgacgacuucaccggcugcgugaucgccuggaacagcaacaaccuggacagcaaggugggcggcaacuacaacuaccuguaccggcuguuccguaagagcaaccugaagccauucgagcgggacaucagcaccgagaucuaccaggccggcagcacccccugcaacgguguggagggcuuuaacugcuacuucccccugcagagcuacggcuuccagcccaccaacggcgugggcuaccagcccuaccgggugguggugcugagcuucgagcugcugcacgcccccgccaccgugugcggcccuaaaaagagcaccaaccuggugaagaacaagugcgugaacuucaauuucaacggccugaccggcaccggcgugcugaccgagagcaacaagaaguuccugcccuuccagcaguucggccgggauaucgccgacaccaccgacgccgugcgggacccccagacccuggagauccuggacaucaccccaugcagcuucggcggcgucagcgugaucacccccggcacaaacaccagcaaccagguggcagugcuguaccagggagugaacugcaccgaggugcccguggccauccacgccgaccagcugacccccaccuggcggguguacagcaccggcagcaacguguuccagacccgggccggcugccugaucggcgccgagcacgugaacaacuccuacgagugcgacauccccaucggcgccggcaucugcgcuagcuaccagacccagaccaacagcccccggcgggcccggagcguggccagccagagcaucaucgccuacaccaugagcuuaggcgccgagaacagcguggccuacagcaacaacagcaucgccaucccuaccaacuucaccaucagcgugaccaccgagauacugcccgugagcaugaccaagaccagcguggacuguaccauguacaucugcggcgacagcaccgagugcagcaaccugcugcugcaguacggcagcuucugcacccagcugaaccgggcgcugaccggcaucgccguggagcaggacaagaacacccaagagguguucgcccaggugaagcagaucuacaagacucccccaaucaaggacuucggcggcuucaacuucagccagauccugcccgaccccagcaagcccagcaagcggagcuucaucgaggaccugcuguucaacaaggugacccuggccgacgccggcuucaucaagcaguacggcgacugccugggggauaucgccgcccgggaccugaucugcgcucagaaguucaacggccugaccgugcugcccccucugcugaccgacgagaugaucgcccaguacaccagcgcccugcuugccggcaccaucaccagcggcuggaccuucggcgccggcgccgcacugcagauccccuucgccaugcagauggccuaccgguucaacggcaucggcgugacccagaacgugcuguacgagaaccagaagcugaucgccaaccaguucaacagcgccaucggcaagauccaggacagccugagcagcaccgccagcgcccugggcaagcugcaggacguggugaaccagaacgcccaggcucugaacacccuggugaagcagcugagcagcaacuucggcgccaucagcucagugcugaaugacauccugagcaggcuggacaagguggaggccgaggugcagaucgaccggcugaucaccggccggcugcagagccugcagaccuacgugacccagcagcugauccgggccgccgagauccgggccagcgccaaccuggccgcaaccaagaugagcgagugcgugcugggccagagcaagcggguggacuuuugcggcaagggcuaccaccugaugagcuucccccagagcgccccacacggcguggucuuccuccacgugacauacgugcccgcccaggagaagaacuucaccaccgcccccgccauuugccacgacggcaaggcccacuucccccgggagggaguguucgugagcaacggcacccacugguucgugacccagcggaacuucuacgagccccagaucaucaccaccgacaacaccuucgugagcggcaacugcgacguggugaucggcaucgugaacaacaccguguacgacccccugcagccugagcuggacagcuucaaggaggagcuggacaaguacuucaagaaccacaccagccccgacguggaucugggcgacaucagcggcaucaacgcuagcguggugaacauccagaaggagaucgaccggcugaacgagguggccaagaaccugaacgagagccugaucgaccugcaggagcugggcaaguacgagcaguacaucaaguggcccugguacaucuggcugggcuucaucgccggccugaucgccaucgugauggugaccaucaugcugugcugcaugaccagcugcuguagcugccugaagggcugcugcagcugcggcagcugcugcaaguucgacgaggacgacagcgagccagugcugaagggcgugaagcugcacuacaccugauaauaggcuggagccucgguggccuagcuucuugccccuugggccuccccccagccccuccuccccuuccugcacccguacccccguggucuuugaauaaagucugagugggcggcaaaaaaaaaaaaaaaaaaaaaaaaaaaaaaaaaaaaaaaaaaaaaaaaaaaaaaaaaaaaaaaaaaaaaaaaaaaaaaaaaaaaaaaaaaaaaaaaaaaa

SEQ ID NO: 26106 - RNA, 4095 nt, Artificial Sequence
  SARS-CoV-2/Wuhan/WIV05/2019__EPI_ISL_402128 spike protein mRNA gc (1-1273)(N439K_D614G)
gggaaauaagagagaaaagaagaguaagaagaaauauaagaccccggcgccgccaccauguucguguuccuggugcugcugccccuggugagcagccagugcgugaaccugaccacccggacccagcugcccccugccuacaccaacagcuucacccggggcguguacuaccccgacaagguguuccggagcagcgugcugcacagcacccaggaccuguuccugcccuucuucagcaacgugaccugguuccacgccauccacgugagcggcaccaacggcaccaagcgguucgacaacccagugcugcccuucaacgacggcguguacuucgccagcaccgagaagucaaacaucauccggggcuggaucuucggcaccacccuggacagcaagacacagagccugcugaucgugaacaacgccaccaacguggugaucaaggugugcgaguuucaguucugcaacgaccccuuccugggcguguacuaccacaagaacaacaagagcuggauggagagcgaguuccgggucuacagcagcgcuaacaauugcaccuucgaguacgugagccagcccuuccugauggaccucgagggcaagcagggcaacuucaagaaccugcgggaguucguguucaagaacaucgauggcuacuucaagaucuacagcaagcacacccccaucaaccuggugcgggaccugccccagggauucagcgcccuggagccucugguggaccugcccaucggcaucaacaucaccagguuccagacccugcuggcccugcaccggagcuaccugacccccggcgacagcagcagcggcuggaccgccggcgccgccgcauacuacgugggcuaccugcagccacggaccuuccugcugaaguacaacgagaacggcaccaucaccgacgccguggacugcgcccuggacccccugagcgagaccaagugcacccuaaagagcuucaccguggagaagggcaucuaccagaccagcaacuuccgggugcagcccacugagagcaucgugcgguuccccaacauuaccaaccugugucccuucggcgagguguucaacgccacccgguucgccagcguguacgccuggaaccggaagcggaucagcaacugcguggccgacuacagcgugcuguacaacagcgccagcuucagcaccuucaagugcuacggcgugagcccuaccaagcugaacgaccugugcuucaccaacguguacgcugacagcuucgugauccggggcgacgaggugcggcagaucgcccccggccagaccggcaagaucgccgacuacaacuacaagcugcccgacgacuucaccggcugcgugaucgccuggaacagcaagaaccuggacagcaaggugggcggcaacuacaacuaccuguaccggcuguuccguaagagcaaccugaagccauucgagcgggacaucagcaccgagaucuaccaggccggcagcacccccugcaacgguguggagggcuuuaacugcuacuucccccugcagagcuacggcuuccagcccaccaacggcgugggcuaccagcccuaccgggugguggugcugagcuucgagcugcugcacgcccccgccaccgugugcggcccuaaaaagagcaccaaccuggugaagaacaagugcgugaacuucaacuucaauggccugaccggcaccggcgugcugaccgagagcaacaagaaguuccugcccuuccagcaguucggccgggauaucgccgacaccaccgacgcagugcgggacccccagacccuggagauccuggacaucaccccaugcagcuucggcggcgugagcgucaucacccccggcacaaacaccagcaaccagguggccgugcuguaccagggagugaacugcaccgaggugcccguggccauccacgccgaccagcugacccccaccuggcggguguacagcaccggcagcaacguguuccagacccgggccggcugccugaucggcgccgagcacgugaacaacuccuacgagugcgacauccccaucggcgcuggcaucugcgccagcuaccagacccagaccaacagcccccggcgggcccggagcguggccagccagagcaucaucgccuacaccaugagcuuaggcgccgagaacagcguggccuacagcaacaacagcaucgcgaucccuaccaacuucaccaucagcgugaccaccgagauacugcccgugagcaugaccaagaccagcguggacuguaccauguacaucugcggcgacagcaccgagugcagcaaccugcugcugcaguacggcagcuucugcacccagcugaaccgggcccugaccggcaucgccguggagcaggacaagaacacccaagagguguucgcccaggugaagcagaucuacaagacucccccaaucaaggacuucggcggcuucaacuucagccagauccugcccgaccccagcaagcccagcaagcggagcuucaucgaggaccugcuguucaacaaggugacccuggccgacgccggcuucaucaagcaguacggcgacugccugggggauaucgccgcucgggaccugaucugcgcccagaaguucaacggccugaccgugcugcccccucugcugaccgacgagaugaucgcccaguacaccagcgcccugcuugccggcaccaucaccagcggcuggaccuucggcgccggcgcagcccugcagauccccuucgccaugcagauggccuaccgguucaacggcaucggcgugacccagaacgugcuguacgagaaccagaagcugaucgccaaccaguucaacagcgccaucggcaagauccaggacagccugagcagcaccgccagcgcccugggcaagcugcaggacguggugaaccagaacgcucaggcccugaacacccuggugaagcagcugagcagcaacuucggcgccaucagcucagugcugaacgacauccugagcaggcuggacaagguggaggccgaggugcagaucgaccggcugaucaccggccggcugcagagccugcagaccuacgugacccagcagcugauccgggccgccgagauccgggccagcgccaaucuggcagccaccaagaugagcgagugcgugcugggccagagcaagcggguggacuuuugcggcaagggcuaccaccugaugagcuucccccagagcgccccacacggcgugguguuccuccacgucacauacgugcccgcccaggagaagaacuucaccaccgcccccgccauuugccacgacggcaaggcucacuucccccgggagggaguguucgugagcaacggcacccacugguucgugacccagcggaacuucuacgagccccagaucaucaccaccgacaacaccuucgugagcggcaacugcgacguggugaucggcaucgugaacaacaccguguacgacccccugcagccugagcuggacagcuucaaggaggagcuggacaaguacuucaagaaccacaccagccccgacguggaucugggcgacaucagcggcaucaacgccagcguggugaacauccagaaggagaucgaccggcugaacgagguggccaagaaccugaacgagagccugaucgaccugcaggagcugggcaaguacgagcaguacaucaaguggcccugguacaucuggcugggcuucaucgccggccugaucgccaucgugauggugaccaucaugcugugcugcaugaccagcugcuguagcugccugaagggcugcugcagcugcggcagcugcugcaaguucgacgaggacgacagcgagccagugcugaagggcgugaagcugcacuacaccugauaauaggcuggagccucgguggccuagcuucuugccccuugggccuccccccagccccuccuccccuuccugcacccguacccccguggucuuugaauaaagucugagugggcggcaaaaaaaaaaaaaaaaaaaaaaaaaaaaaaaaaaaaaaaaaaaaaaaaaaaaaaaaaaaaaaaaaaaaaaaaaaaaaaaaaaaaaaaaaaaaaaaaaaaa

SEQ ID NO: 26107 - RNA, 4095 nt, Artificial Sequence
  SARS-CoV-2/Wuhan/WIV05/2019__EPI_ISL_402128 spike protein mRNA gc (1-1273)(S477N_D614G)
gggaaauaagagagaaaagaagaguaagaagaaauauaagaccccggcgccgccaccauguucguguuccuggugcugcugccccuggugagcagccagugcgugaaccugaccacccggacccagcugcccccugccuacaccaacagcuucacccggggcguguacuaccccgacaagguguuccggagcagcgugcugcacagcacccaggaccuguuccugcccuucuucagcaacgugaccugguuccacgccauccacgugagcggcaccaacggcaccaagcgguucgacaacccagugcugcccuucaacgacggcguguacuucgccagcaccgagaagucaaacaucauccggggcuggaucuucggcaccacccuggacagcaagacacagagccugcugaucgugaacaacgccaccaacguggugaucaaggugugcgaguuucaguucugcaacgaccccuuccugggcguguacuaccacaagaacaacaagagcuggauggagagcgaguuccgggucuacagcagcgcuaacaauugcaccuucgaguacgugagccagcccuuccugauggaccucgagggcaagcagggcaacuucaagaaccugcgggaguucguguucaagaacaucgauggcuacuucaagaucuacagcaagcacacccccaucaaccuggugcgggaccugccccagggauucagcgcccuggagccucugguggaccugcccaucggcaucaacaucaccagguuccagacccugcuggcccugcaccggagcuaccugacccccggcgacagcagcagcggcuggaccgccggcgccgccgcauacuacgugggcuaccugcagccacggaccuuccugcugaaguacaacgagaacggcaccaucaccgacgccguggacugcgcccuggacccccugagcgagaccaagugcacccuaaagagcuucaccguggagaagggcaucuaccagaccagcaacuuccgggugcagcccacugagagcaucgugcgguuccccaacauuaccaaccugugucccuucggcgagguguucaacgccacccgguucgccagcguguacgccuggaaccggaagcggaucagcaacugcguggccgacuacagcgugcuguacaacagcgccagcuucagcaccuucaagugcuacggcgugagcccuaccaagcugaacgaccugugcuucaccaacguguacgcugacagcuucgugauccggggcgacgaggugcggcagaucgcccccggccagaccggcaagaucgccgacuacaacuacaagcugcccgacgacuucaccggcugcgugaucgccuggaacagcaacaaccuggacagcaaggugggcggcaacuacaacuaccuguaccggcuguuccguaagagcaaccugaagccauucgagcgggacaucagcaccgagaucuaccaggccggcaacacccccugcaacgguguggagggcuuuaacugcuacuucccccugcagagcuacggcuuccagcccaccaacggcgugggcuaccagcccuaccgggugguggugcugagcuucgagcugcugcacgcccccgccaccgugugcggcccuaaaaagagcaccaaccuggugaagaacaagugcgugaauuucaacuucaacggccugaccggcaccggcgugcugaccgagagcaacaagaaguuccugcccuuccagcaguucggccgggauaucgccgacaccaccgacgcagugcgggacccccagacccuggagauccuggacaucaccccaugcagcuucggcggcgugagcgucaucacccccggcacaaacaccagcaaccagguggccgugcuguaccagggagugaacugcaccgaggugcccguggccauccacgccgaccagcugacccccaccuggcggguguacagcaccggcagcaacguguuccagacccgggccggcugccugaucggcgccgagcacgugaacaacagcuacgagugcgacauccccaucggcgcuggcaucugcgccuccuaccagacccagaccaacagcccccggcgggcccggagcguggccagccagagcaucaucgccuacaccaugagcuuaggcgccgagaacagcguggccuacagcaacaacagcaucgcgaucccuaccaacuucaccaucagcgugaccaccgagauacugcccgugagcaugaccaagaccagcguggacuguaccauguacaucugcggcgacagcaccgagugcagcaaccugcugcugcaguacggcagcuucugcacccagcugaaccgggcccugaccggcaucgccguggagcaggacaagaacacccaagagguguucgcccaggugaagcagaucuacaagacucccccaaucaaggacuucggcggcuucaacuucagccagauccugcccgaccccagcaagcccagcaagcggagcuucaucgaggaccugcuguucaacaaggugacccuggccgacgccggcuucaucaagcaguacggcgacugccugggggauaucgccgcucgggaccugaucugcgcccagaaguucaacggccugaccgugcugcccccucugcugaccgacgagaugaucgcccaguacaccagcgcccugcuugccggcaccaucaccagcggcuggaccuucggcgccggcgcagcccugcagauccccuucgccaugcagauggccuaccgguucaacggcaucggcgugacccagaacgugcuguacgagaaccagaagcugaucgccaaccaguucaacagcgccaucggcaagauccaggacagccugagcagcaccgccagcgcccugggcaagcugcaggacguggugaaccagaacgcucaggcccugaacacccuggugaagcagcugagcagcaauuucggcgccaucagcagcgugcugaacgacauccugucaaggcuggacaagguggaggccgaggugcagaucgaccggcugaucaccggccggcugcagagccugcagaccuacgugacccagcagcugauccgggccgccgagauccgggccagcgccaaccuggcagccaccaagaugagcgagugcgugcugggccagagcaagcggguggacuuuugcggcaagggcuaccaccugaugagcuucccccagagcgccccacacggcgugguguuccuccacgucacauacgugcccgcccaggagaagaacuucaccaccgcccccgccauuugccacgacggcaaggcucacuucccccgggagggaguguucgugagcaacggcacccacugguucgugacccagcggaacuucuacgagccccagaucaucaccaccgacaacaccuucgugagcggcaacugcgacguggugaucggcaucgugaacaacaccguguacgacccccugcagccugagcuggacagcuucaaggaggagcuggacaaguacuucaagaaccacaccagccccgacguggaucugggcgacaucagcggcaucaacgccagcguggugaacauccagaaggagaucgaccggcugaacgagguggccaagaaccugaacgagagccugaucgaccugcaggagcugggcaaguacgagcaguacaucaaguggcccugguacaucuggcugggcuucaucgccggccugaucgccaucgugauggugaccaucaugcugugcugcaugaccagcugcuguagcugccugaagggcugcugcagcugcggcagcugcugcaaguucgacgaggacgacagcgagccagugcugaagggcgugaagcugcacuacaccugauaauaggcuggagccucgguggccuagcuucuugccccuugggccuccccccagccccuccuccccuuccugcacccguacccccguggucuuugaauaaagucugagugggcggcaaaaaaaaaaaaaaaaaaaaaaaaaaaaaaaaaaaaaaaaaaaaaaaaaaaaaaaaaaaaaaaaaaaaaaaaaaaaaaaaaaaaaaaaaaaaaaaaaaaa

SEQ ID NO: 26108 - RNA, 4095 nt, Artificial Sequence
  SARS-CoV-2/Wuhan/WIV05/2019__EPI_ISL_402128 spike protein mRNA gc (1-1273)(N501Y_D614G)
gggaaauaagagagaaaagaagaguaagaagaaauauaagaccccggcgccgccaccauguucguguuccuggugcugcugccccuggugagcagccagugcgugaaccugaccacccggacccagcugcccccugccuacaccaacagcuucacccggggcguguacuaccccgacaagguguuccggagcagcgugcugcacagcacccaggaccuguuccugcccuucuucagcaacgugaccugguuccacgccauccacgugagcggcaccaacggcaccaagcgguucgacaacccagugcugcccuucaacgacggcguguacuucgccagcaccgagaagucaaacaucauccggggcuggaucuucggcaccacccuggacagcaagacacagagccugcugaucgugaacaacgccaccaacguggugaucaaggugugcgaguuucaguucugcaacgaccccuuccugggcguguacuaccacaagaacaacaagagcuggauggagagcgaguuccgggucuacagcagcgcuaacaauugcaccuucgaguacgugagccagcccuuccugauggaccucgagggcaagcagggcaacuucaagaaccugcgggaguucguguucaagaacaucgauggcuacuucaagaucuacagcaagcacacccccaucaaccuggugcgggaccugccccagggauucagcgcccuggagccucugguggaccugcccaucggcaucaacaucaccagguuccagacccugcuggcccugcaccggagcuaccugacccccggcgacagcagcagcggcuggaccgccggcgccgccgcauacuacgugggcuaccugcagccacggaccuuccugcugaaguacaacgagaacggcaccaucaccgacgccguggacugcgcccuggacccccugagcgagaccaagugcacccuaaagagcuucaccguggagaagggcaucuaccagaccagcaacuuccgggugcagcccacugagagcaucgugcgguuccccaacauuaccaaccugugucccuucggcgagguguucaacgccacccgguucgccagcguguacgccuggaaccggaagcggaucagcaacugcguggccgacuacagcgugcuguacaacagcgccagcuucagcaccuucaagugcuacggcgugagcccuaccaagcugaacgaccugugcuucaccaacguguacgcugacagcuucgugauccggggcgacgaggugcggcagaucgcccccggccagaccggcaagaucgccgacuacaacuacaagcugcccgacgacuucaccggcugcgugaucgccuggaacagcaacaaccuggacagcaaggugggcggcaacuacaacuaccuguaccggcuguuccguaagagcaaccugaagccauucgagcgggacaucagcaccgagaucuaccaggccggcagcacccccugcaacgguguggagggcuuuaacugcuacuucccccugcagagcuacggcuuccagcccaccuacggcgugggcuaccagcccuaccgggugguggugcugagcuucgagcugcugcacgcccccgccaccgugugcggcccuaaaaagagcaccaaccuggugaagaacaagugcgugaacuucaacuucaauggccugaccggcaccggcgugcugaccgagagcaacaagaaguuccugcccuuccagcaguucggccgggauaucgccgacaccaccgacgcagugcgggacccccagacccuggagauccuggacaucaccccaugcagcuucggcggcgugagcgucaucacccccggcacaaacaccagcaaccagguggccgugcuguaccagggagugaacugcaccgaggugcccguggccauccacgccgaccagcugacccccaccuggcggguguacagcaccggcagcaacguguuccagacccgggccggcugccugaucggcgccgagcacgugaacaacuccuacgagugcgacauccccaucggcgcuggcaucugcgccagcuaccagacccagaccaacagcccccggcgggcccggagcguggccagccagagcaucaucgccuacaccaugagcuuaggcgccgagaacagcguggccuacagcaacaacagcaucgcgaucccuaccaacuucaccaucagcgugaccaccgagauacugcccgugagcaugaccaagaccagcguggacuguaccauguacaucugcggcgacagcaccgagugcagcaaccugcugcugcaguacggcagcuucugcacccagcugaaccgggcccugaccggcaucgccguggagcaggacaagaacacccaagagguguucgcccaggugaagcagaucuacaagacucccccaaucaaggacuucggcggcuucaacuucagccagauccugcccgaccccagcaagcccagcaagcggagcuucaucgaggaccugcuguucaacaaggugacccuggccgacgccggcuucaucaagcaguacggcgacugccugggggauaucgccgcucgggaccugaucugcgcccagaaguucaacggccugaccgugcugcccccucugcugaccgacgagaugaucgcccaguacaccagcgcccugcuugccggcaccaucaccagcggcuggaccuucggcgccggcgcagcccugcagauccccuucgccaugcagauggccuaccgguucaacggcaucggcgugacccagaacgugcuguacgagaaccagaagcugaucgccaaccaguucaacagcgccaucggcaagauccaggacagccugagcagcaccgccagcgcccugggcaagcugcaggacguggugaaccagaacgcucaggcccugaacacccuggugaagcagcugagcagcaacuucggcgccaucagcucagugcugaacgacauccugagcaggcuggacaagguggaggccgaggugcagaucgaccggcugaucaccggccggcugcagagccugcagaccuacgugacccagcagcugauccgggccgccgagauccgggccagcgccaaucuggcagccaccaagaugagcgagugcgugcugggccagagcaagcggguggacuuuugcggcaagggcuaccaccugaugagcuucccccagagcgccccacacggcgugguguuccuccacgucacauacgugcccgcccaggagaagaacuucaccaccgcccccgccauuugccacgacggcaaggcucacuucccccgggagggaguguucgugagcaacggcacccacugguucgugacccagcggaacuucuacgagccccagaucaucaccaccgacaacaccuucgugagcggcaacugcgacguggugaucggcaucgugaacaacaccguguacgacccccugcagccugagcuggacagcuucaaggaggagcuggacaaguacuucaagaaccacaccagccccgacguggaucugggcgacaucagcggcaucaacgccagcguggugaacauccagaaggagaucgaccggcugaacgagguggccaagaaccugaacgagagccugaucgaccugcaggagcugggcaaguacgagcaguacaucaaguggcccugguacaucuggcugggcuucaucgccggccugaucgccaucgugauggugaccaucaugcugugcugcaugaccagcugcuguagcugccugaagggcugcugcagcugcggcagcugcugcaaguucgacgaggacgacagcgagccagugcugaagggcgugaagcugcacuacaccugauaauaggcuggagccucgguggccuagcuucuugccccuugggccuccccccagccccuccuccccuuccugcacccguacccccguggucuuugaauaaagucugagugggcggcaaaaaaaaaaaaaaaaaaaaaaaaaaaaaaaaaaaaaaaaaaaaaaaaaaaaaaaaaaaaaaaaaaaaaaaaaaaaaaaaaaaaaaaaaaaaaaaaaaaa

SEQ ID NO: 26109 - RNA, 4089 nt, Artificial Sequence
  SARS-CoV-2/Wuhan/WIV05/2019__EPI_ISL_402128 spike protein mRNA gc (1-1273)(H69del_V70del_D614G)
gggaaauaagagagaaaagaagaguaagaagaaauauaagaccccggcgccgccaccauguucguguuccuggugcugcugccccuggugagcagccagugcgugaaccugaccacccggacccagcugcccccugccuacaccaacagcuucacccggggcguguacuaccccgacaagguguuccggagcagcgugcugcacagcacccaggaccuguuccugcccuucuucagcaacgugaccugguuccacgccaucagcggcaccaacggcaccaagcgguucgacaacccagugcugcccuucaacgacggcguguacuucgccagcaccgagaagucaaacaucauccggggcuggaucuucggcaccacccuggacagcaagacacagagccugcugaucgugaacaacgccaccaacguggugaucaaggugugcgaguuucaguucugcaacgaccccuuccugggcguguacuaccacaagaacaacaagagcuggauggagagcgaguuccggguguacagcagcgcuaacaauugcaccuucgaguacgucagccagcccuuccugauggaccucgagggcaagcagggcaacuucaagaaccugcgggaguucguguucaagaacaucgauggcuacuucaagaucuacagcaagcacacccccaucaaccuggugcgggaccugccccagggauucagcgcccuggagccucugguggaccugcccaucggcaucaacaucaccagguuccagacccugcuggcccugcaccggagcuaccugacccccggcgacagcagcagcggcuggaccgccggcgccgccgcauacuacgugggcuaccugcagccacggaccuuccugcugaaguacaacgagaacggcaccaucaccgacgccguggacugcgcccuggacccccugagcgagaccaagugcacccuaaagagcuucaccguggagaagggcaucuaccagaccagcaacuuccgggugcagcccacugagagcaucgugcgguuccccaacauuaccaaccugugucccuucggcgagguguucaacgccacccgguucgccagcguguacgccuggaaccggaagcggaucagcaacugcguggccgacuacagcgugcuguacaacagcgccagcuucagcaccuucaagugcuacggcgugagcccuaccaagcugaacgaccugugcuucaccaacguguacgcugacagcuucgugauccggggcgacgaggugcggcagaucgcccccggccagaccggcaagaucgccgacuacaacuacaagcugcccgacgacuucaccggcugcgugaucgccuggaacagcaacaaccuggacagcaaggugggcggcaacuacaacuaccuguaccggcuguuccguaagagcaaccugaagccauucgagcgggacaucagcaccgagaucuaccaggccggcagcacccccugcaacgguguggagggcuuuaacugcuacuucccccugcagagcuacggcuuccagcccaccaacggcgugggcuaccagcccuaccgggugguggugcugagcuucgagcugcugcacgcccccgccaccgugugcggcccuaaaaagagcaccaaccuggugaagaacaagugcgugaacuucaauuucaacggccugaccggcaccggcgugcugaccgagagcaacaagaaguuccugcccuuccagcaguucggccgggauaucgccgacaccaccgacgcagugcgggacccccagacccuggagauccuggacaucaccccaugcagcuucggcggcgugagcgugaucacccccggcacaaacaccagcaaccaggucgccgugcuguaccagggagugaacugcaccgaggugcccguggccauccacgccgaccagcugacccccaccuggcggguguacagcaccggcagcaacguguuccagacccgggccggcugccugaucggcgccgagcacgugaacaacuccuacgagugcgacauccccaucggcgcuggcaucugcgccagcuaccagacccagaccaacagcccccggcgggcccggagcguggccagccagagcaucaucgccuacaccaugagcuuaggcgccgagaacagcguggccuacagcaacaacagcaucgcgaucccuaccaacuucaccaucagcgugaccaccgagauacugcccgugagcaugaccaagaccagcguggacuguaccauguacaucugcggcgacagcaccgagugcagcaaccugcugcugcaguacggcagcuucugcacccagcugaaccgggcccugaccggcaucgccguggagcaggacaagaacacccaagagguguucgcccaggugaagcagaucuacaagacucccccaaucaaggacuucggcggcuucaacuucagccagauccugcccgaccccagcaagcccagcaagcggagcuucaucgaggaccugcuguucaacaaggugacccuggccgacgccggcuucaucaagcaguacggcgacugccugggggauaucgccgcucgggaccugaucugcgcccagaaguucaacggccugaccgugcugcccccucugcugaccgacgagaugaucgcccaguacaccagcgcccugcuugccggcaccaucaccagcggcuggaccuucggcgccggcgcagcccugcagauccccuucgccaugcagauggccuaccgguucaacggcaucggcgugacccagaacgugcuguacgagaaccagaagcugaucgccaaccaguucaacagcgccaucggcaagauccaggacagccugagcagcaccgccagcgcccugggcaagcugcaggacguggugaaccagaacgcucaggcccugaacacccuggugaagcagcugagcagcaacuucggcgccaucagcucagugcugaaugacauccugagcaggcuggacaagguggaggccgaggugcagaucgaccggcugaucaccggccggcugcagagccugcagaccuacgugacccagcagcugauccgggccgccgagauccgggccagcgccaaccuggcagccaccaagaugagcgagugcgugcugggccagagcaagcggguggacuuuugcggcaagggcuaccaccugaugagcuucccccagagcgccccacacggcgugguguuccuccacgugacauacguccccgcccaggagaagaacuucaccaccgcccccgccauuugccacgacggcaaggcucacuucccccgggagggaguguucgugagcaacggcacccacugguucgugacccagcggaacuucuacgagccccagaucaucaccaccgacaacaccuucgugagcggcaacugcgacguggugaucggcaucgugaacaacaccguguacgacccccugcagccugagcuggacagcuucaaggaggagcuggacaaguacuucaagaaccacaccagccccgacguggaucugggcgacaucagcggcaucaacgccagcguggugaacauccagaaggagaucgaccggcugaacgagguggccaagaaccugaacgagagccugaucgaccugcaggagcugggcaaguacgagcaguacaucaaguggcccugguacaucuggcugggcuucaucgccggccugaucgccaucgugauggugaccaucaugcugugcugcaugaccagcugcuguagcugccugaagggcugcugcagcugcggcagcugcugcaaguucgacgaggacgacagcgagccagugcugaagggcgugaagcugcacuacaccugauaauaggcuggagccucgguggccuagcuucuugccccuugggccuccccccagccccuccuccccuuccugcacccguacccccguggucuuugaauaaagucugagugggcggcaaaaaaaaaaaaaaaaaaaaaaaaaaaaaaaaaaaaaaaaaaaaaaaaaaaaaaaaaaaaaaaaaaaaaaaaaaaaaaaaaaaaaaaaaaaaaaaaaaaa

SEQ ID NO: 26110 - RNA, 4095 nt, Artificial Sequence
  SARS-CoV-2/Wuhan/WIV05/2019__EPI_ISL_402128 spike protein mRNA gc (1-1273)(Y453F_D614G)
gggaaauaagagagaaaagaagaguaagaagaaauauaagaccccggcgccgccaccauguucguguuccuggugcugcugccccuggugagcagccagugcgugaaccugaccacccggacccagcugcccccugccuacaccaacagcuucacccggggcguguacuaccccgacaagguguuccggagcagcgugcugcacagcacccaggaccuguuccugcccuucuucagcaacgugaccugguuccacgccauccacgugagcggcaccaacggcaccaagcgguucgacaacccagugcugcccuucaacgacggcguguacuucgccagcaccgagaagucaaacaucauccggggcuggaucuucggcaccacccuggacagcaagacacagagccugcugaucgugaacaacgccaccaacguggugaucaaggugugcgaguuucaguucugcaacgaccccuuccugggcguguacuaccacaagaacaacaagagcuggauggagagcgaguuccgggucuacagcagcgcuaacaauugcaccuucgaguacgugagccagcccuuccugauggaccucgagggcaagcagggcaacuucaagaaccugcgggaguucguguucaagaacaucgauggcuacuucaagaucuacagcaagcacacccccaucaaccuggugcgggaccugccccagggauucagcgcccuggagccucugguggaccugcccaucggcaucaacaucaccagguuccagacccugcuggcccugcaccggagcuaccugacccccggcgacagcagcagcggcuggaccgccggcgccgccgcauacuacgugggcuaccugcagccacggaccuuccugcugaaguacaacgagaacggcaccaucaccgacgccguggacugcgcccuggacccccugagcgagaccaagugcacccuaaagagcuucaccguggagaagggcaucuaccagaccagcaacuuccgggugcagcccacugagagcaucgugcgguuccccaacauuaccaaccugugucccuucggcgagguguucaacgccacccgguucgccagcguguacgccuggaaccggaagcggaucagcaacugcguggccgacuacagcgugcuguacaacagcgccagcuucagcaccuucaagugcuacggcgugagcccuaccaagcugaacgaccugugcuucaccaacguguacgcugacagcuucgugauccggggcgacgaggugcggcagaucgcccccggccagaccggcaagaucgccgacuacaacuacaagcugcccgacgacuucaccggcugcgugaucgccuggaacagcaacaaccuggacagcaaggugggcggcaacuacaacuaccuguuccggcuguuccguaagagcaaccugaagccauuugagcgggacaucagcaccgagaucuaccaggccggcagcacccccugcaacgguguggagggcuucaacugcuacuucccccugcagagcuacggcuuccagcccaccaacggcgugggcuaccagcccuaccgggugguggugcugagcuucgagcugcugcacgcccccgccaccgugugcggcccuaaaaagagcaccaaccuggugaagaacaagugcgugaacuucaauuucaacggccugaccggcaccggcgugcugaccgagagcaacaagaaguuccugcccuuccagcaguucggccgggauaucgccgacaccaccgacgcagugcgggacccccagacccuggagauccuggacaucaccccaugcagcuucggcggcgugagcgucaucacccccggcacaaacaccagcaaccagguggccgugcuguaccagggagugaacugcaccgaggugcccguggccauccacgccgaccagcugacccccaccuggcggguguacagcaccggcagcaacguguuccagacccgggccggcugccugaucggcgccgagcacgugaacaacuccuacgagugcgacauccccaucggcgcuggcaucugcgccagcuaccagacccagaccaacagcccccggcgggcccggagcguggccagccagagcaucaucgccuacaccaugagcuuaggcgccgagaacagcguggccuacagcaacaacagcaucgcgaucccuaccaacuucaccaucagcgugaccaccgagauacugcccgugagcaugaccaagaccagcguggacuguaccauguacaucugcggcgacagcaccgagugcagcaaccugcugcugcaguacggcagcuucugcacccagcugaaccgggcccugaccggcaucgccguggagcaggacaagaacacccaagagguguucgcccaggugaagcagaucuacaagacucccccaaucaaggacuucggcggcuucaacuucagccagauccugcccgaccccagcaagcccagcaagcggagcuucaucgaggaccugcuguucaacaaggugacccuggccgacgccggcuucaucaagcaguacggcgacugccugggggauaucgccgcucgggaccugaucugcgcccagaaguucaacggccugaccgugcugcccccucugcugaccgacgagaugaucgcccaguacaccagcgcccugcuugccggcaccaucaccagcggcuggaccuucggcgccggcgcagcccugcagauccccuucgccaugcagauggccuaccgguucaacggcaucggcgugacccagaacgugcuguacgagaaccagaagcugaucgccaaccaguucaacagcgccaucggcaagauccaggacagccugagcagcaccgccagcgcccugggcaagcugcaggacguggugaaccagaacgcucaggcccugaacacccuggugaagcagcugagcagcaacuuuggcgccaucagcucagugcugaaugacauccugagcaggcuggacaagguggaggccgaggugcagaucgaccggcugaucaccggccggcugcagagccugcagaccuacgugacccagcagcugauccgggccgccgagauccgggccagcgccaaccuggcagccaccaagaugagcgagugcgugcugggccagagcaagcggguggacuucugcggcaagggcuaccaccugaugagcuucccccagagcgccccacacggcgugguguuccuccacgucacauacgugcccgcccaggagaagaacuucaccaccgcccccgccauuugccacgacggcaaggcucacuucccccgggagggaguguucgugagcaacggcacccacugguucgugacccagcggaacuucuacgagccccagaucaucaccaccgacaacaccuucgugagcggcaacugcgacguggugaucggcaucgugaacaacaccguguacgacccccugcagccugagcuggacagcuucaaggaggagcuggacaaguacuucaagaaccacaccagccccgacguggaucugggcgacaucagcggcaucaacgccagcguggugaacauccagaaggagaucgaccggcugaacgagguggccaagaaccugaacgagagccugaucgaccugcaggagcugggcaaguacgagcaguacaucaaguggcccugguacaucuggcugggcuucaucgccggccugaucgccaucgugauggugaccaucaugcugugcugcaugaccagcugcuguagcugccugaagggcugcugcagcugcggcagcugcugcaaguucgacgaggacgacagcgagccagugcugaagggcgugaagcugcacuacaccugauaauaggcuggagccucgguggccuagcuucuugccccuugggccuccccccagccccuccuccccuuccugcacccguacccccguggucuuugaauaaagucugagugggcggcaaaaaaaaaaaaaaaaaaaaaaaaaaaaaaaaaaaaaaaaaaaaaaaaaaaaaaaaaaaaaaaaaaaaaaaaaaaaaaaaaaaaaaaaaaaaaaaaaaaa

SEQ ID NO: 26111 - RNA, 4095 nt, Artificial Sequence
  SARS-CoV-2/Wuhan/WIV05/2019__EPI_ISL_402128 spike protein mRNA gc (1-1273)(D614G_I692V)
gggaaauaagagagaaaagaagaguaagaagaaauauaagaccccggcgccgccaccauguucguguuccuggugcugcugccccuggugagcagccagugcgugaaccugaccacccggacccagcugcccccugccuacaccaacagcuucacccggggcguguacuaccccgacaagguguuccggagcagcgugcugcacagcacccaggaccuguuccugcccuucuucagcaacgugaccugguuccacgccauccacgugagcggcaccaacggcaccaagcgguucgacaacccagugcugcccuucaacgacggcguguacuucgccagcaccgagaagucaaacaucauccggggcuggaucuucggcaccacccuggacagcaagacacagagccugcugaucgugaacaacgccaccaacguggugaucaaggugugcgaguuucaguucugcaacgaccccuuccugggcguguacuaccacaagaacaacaagagcuggauggagagcgaguuccgggucuacagcagcgcuaacaauugcaccuucgaguacgugagccagcccuuccugauggaccucgagggcaagcagggcaacuucaagaaccugcgggaguucguguucaagaacaucgauggcuacuucaagaucuacagcaagcacacccccaucaaccuggugcgggaccugccccagggauucagcgcccuggagccucugguggaccugcccaucggcaucaacaucaccagguuccagacccugcuggcccugcaccggagcuaccugacccccggcgacagcagcagcggcuggaccgccggcgccgccgcauacuacgugggcuaccugcagccacggaccuuccugcugaaguacaacgagaacggcaccaucaccgacgccguggacugcgcccuggacccccugagcgagaccaagugcacccuaaagagcuucaccguggagaagggcaucuaccagaccagcaacuuccgggugcagcccacugagagcaucgugcgguuccccaacauuaccaaccugugucccuucggcgagguguucaacgccacccgguucgccagcguguacgccuggaaccggaagcggaucagcaacugcguggccgacuacagcgugcuguacaacagcgccagcuucagcaccuucaagugcuacggcgugagcccuaccaagcugaacgaccugugcuucaccaacguguacgcugacagcuucgugauccggggcgacgaggugcggcagaucgcccccggccagaccggcaagaucgccgacuacaacuacaagcugcccgacgacuucaccggcugcgugaucgccuggaacagcaacaaccuggacagcaaggugggcggcaacuacaacuaccuguaccggcuguuccguaagagcaaccugaagccauucgagcgggacaucagcaccgagaucuaccaggccggcagcacccccugcaacgguguggagggcuuuaacugcuacuucccccugcagagcuacggcuuccagcccaccaacggcgugggcuaccagcccuaccgggugguggugcugagcuucgagcugcugcacgcccccgccaccgugugcggcccuaaaaagagcaccaaccuggugaagaacaagugcgugaacuucaauuucaacggccugaccggcaccggcgugcugaccgagagcaacaagaaguuccugcccuuccagcaguucggccgggauaucgccgacaccaccgacgcagugcgggacccccagacccuggagauccuggacaucaccccaugcagcuucggcggcgugagcgucaucacccccggcacaaacaccagcaaccagguggccgugcuguaccagggagugaacugcaccgaggugcccguggccauccacgccgaccagcugacccccaccuggcggguguacagcaccggcagcaacguguuccagacccgggccggcugccugaucggcgccgagcacgugaacaacuccuacgagugcgacauccccaucggcgcuggcaucugcgccagcuaccagacccagaccaacagcccccggcgggcccggagcguggccagccagagcgugaucgccuacaccaugagcuuaggcgccgagaacagcguggccuacagcaacaacagcaucgcgaucccuaccaacuucaccaucagcgugaccaccgagauccugcccgugagcaugaccaagaccagcguggacuguaccauguacauaugcggcgacagcaccgagugcagcaaccugcugcugcaguacggcagcuucugcacccagcugaaccgggcccugaccggcaucgccguggagcaggacaagaacacccaagagguguucgcccaggugaagcagaucuacaagacucccccaaucaaggacuucggcggcuucaacuucagccagauccugcccgaccccagcaagcccagcaagcggagcuucaucgaggaccugcuguucaacaaggugacccuggccgacgccggcuucaucaagcaguacggcgacugccugggggauaucgccgcucgggaccugaucugcgcccagaaguucaacggccugaccgugcugcccccucugcugaccgacgagaugaucgcccaguacaccagcgcccugcuugccggcaccaucaccagcggcuggaccuucggcgccggcgcagcccugcagauccccuucgccaugcagauggccuaccgguucaacggcaucggcgugacccagaacgugcuguacgagaaccagaagcugaucgccaaccaguucaacagcgccaucggcaagauccaggacagccugagcagcaccgccagcgcccugggcaagcugcaggacguggugaaccagaacgcucaggcccugaacacccuggugaagcagcugagcagcaacuucggcgccaucagcucagugcugaaugacauccugagcaggcuggacaagguggaggccgaggugcagaucgaccggcugaucaccggccggcugcagagccugcagaccuacgugacccagcagcugauccgggccgccgagauccgggccagcgccaaccuggcagccaccaagaugagcgagugcgugcugggccagagcaagcggguggacuuuugcggcaagggcuaccaccugaugagcuucccccagagcgccccacacggcguggucuuccuccacgugacauacgugcccgcccaggagaagaacuucaccaccgcccccgccaucugccacgacggcaaggcucacuucccccgggagggaguguucgugagcaacggcacccacugguucgugacccagcggaacuucuacgagccccagauuaucaccaccgacaacaccuucgugagcggcaacugcgacguggugaucggcaucgugaacaacaccguguacgacccccugcagccugagcuggacagcuucaaggaggagcuggacaaguacuucaagaaccacaccagccccgacguggaucugggcgacaucagcggcaucaacgccagcguggugaacauccagaaggagaucgaccggcugaacgagguggccaagaaccugaacgagagccugaucgaccugcaggagcugggcaaguacgagcaguacaucaaguggcccugguacaucuggcugggcuucaucgccggccugaucgccaucgugauggugaccaucaugcugugcugcaugaccagcugcuguagcugccugaagggcugcugcagcugcggcagcugcugcaaguucgacgaggacgacagcgagccagugcugaagggcgugaagcugcacuacaccugauaauaggcuggagccucgguggccuagcuucuugccccuugggccuccccccagccccuccuccccuuccugcacccguacccccguggucuuugaauaaagucugagugggcggcaaaaaaaaaaaaaaaaaaaaaaaaaaaaaaaaaaaaaaaaaaaaaaaaaaaaaaaaaaaaaaaaaaaaaaaaaaaaaaaaaaaaaaaaaaaaaaaaaaaa

SEQ ID NO: 26112 - RNA, 4095 nt, Artificial Sequence
  SARS-CoV-2/Wuhan/WIV05/2019__EPI_ISL_402128 spike protein mRNA gc (1-1273)(D614G_M1229I)
gggaaauaagagagaaaagaagaguaagaagaaauauaagaccccggcgccgccaccauguucguguuccuggugcugcugccccuggugagcagccagugcgugaaccugaccacccggacccagcugcccccugccuacaccaacagcuucacccggggcguguacuaccccgacaagguguuccggagcagcgugcugcacagcacccaggaccuguuccugcccuucuucagcaacgugaccugguuccacgccauccacgugagcggcaccaacggcaccaagcgguucgacaacccagugcugcccuucaacgacggcguguacuucgccagcaccgagaagucaaacaucauccggggcuggaucuucggcaccacccuggacagcaagacacagagccugcugaucgugaacaacgccaccaacguggugaucaaggugugcgaguuucaguucugcaacgaccccuuccugggcguguacuaccacaagaacaacaagagcuggauggagagcgaguuccgggucuacagcagcgcuaacaauugcaccuucgaguacgugagccagcccuuccugauggaccucgagggcaagcagggcaacuucaagaaccugcgggaguucguguucaagaacaucgauggcuacuucaagaucuacagcaagcacacccccaucaaccuggugcgggaccugccccagggauucagcgcccuggagccucugguggaccugcccaucggcaucaacaucaccagguuccagacccugcuggcccugcaccggagcuaccugacccccggcgacagcagcagcggcuggaccgccggcgccgccgcauacuacgugggcuaccugcagccacggaccuuccugcugaaguacaacgagaacggcaccaucaccgacgccguggacugcgcccuggacccccugagcgagaccaagugcacccuaaagagcuucaccguggagaagggcaucuaccagaccagcaacuuccgggugcagcccacugagagcaucgugcgguuccccaacauuaccaaccugugucccuucggcgagguguucaacgccacccgguucgccagcguguacgccuggaaccggaagcggaucagcaacugcguggccgacuacagcgugcuguacaacagcgccagcuucagcaccuucaagugcuacggcgugagcccuaccaagcugaacgaccugugcuucaccaacguguacgcugacagcuucgugauccggggcgacgaggugcggcagaucgcccccggccagaccggcaagaucgccgacuacaacuacaagcugcccgacgacuucaccggcugcgugaucgccuggaacagcaacaaccuggacagcaaggugggcggcaacuacaacuaccuguaccggcuguuccguaagagcaaccugaagccauucgagcgggacaucagcaccgagaucuaccaggccggcagcacccccugcaacgguguggagggcuuuaacugcuacuucccccugcagagcuacggcuuccagcccaccaacggcgugggcuaccagcccuaccgggugguggugcugagcuucgagcugcugcacgcccccgccaccgugugcggcccuaaaaagagcaccaaccuggugaagaacaagugcgugaacuucaauuucaacggccugaccggcaccggcgugcugaccgagagcaacaagaaguuccugcccuuccagcaguucggccgggauaucgccgacaccaccgacgcagugcgggacccccagacccuggagauccuggacaucaccccaugcagcuucggcggcgugagcgucaucacccccggcacaaacaccagcaaccagguggccgugcuguaccagggagugaacugcaccgaggugcccguggccauccacgccgaccagcugacccccaccuggcggguguacagcaccggcagcaacguguuccagacccgggccggcugccugaucggcgccgagcacgugaacaacuccuacgagugcgacauccccaucggcgcuggcaucugcgccagcuaccagacccagaccaacagcccccggcgggcccggagcguggccagccagagcaucaucgccuacaccaugagcuuaggcgccgagaacagcguggccuacagcaacaacagcaucgcgaucccuaccaacuucaccaucagcgugaccaccgagauacugcccgugagcaugaccaagaccagcguggacuguaccauguacaucugcggcgacagcaccgagugcagcaaccugcugcugcaguacggcagcuucugcacccagcugaaccgggcccugaccggcaucgccguggagcaggacaagaacacccaagagguguucgcccaggugaagcagaucuacaagacucccccaaucaaggacuucggcggcuucaacuucagccagauccugcccgaccccagcaagcccagcaagcggagcuucaucgaggaccugcuguucaacaaggugacccuggccgacgccggcuucaucaagcaguacggcgacugccugggggauaucgccgcucgggaccugaucugcgcccagaaguucaacggccugaccgugcugcccccucugcugaccgacgagaugaucgcccaguacaccagcgcccugcuugccggcaccaucaccagcggcuggaccuucggcgccggcgcagcccugcagauccccuucgccaugcagauggccuaccgguucaacggcaucggcgugacccagaacgugcuguacgagaaccagaagcugaucgccaaccaguucaacagcgccaucggcaagauccaggacagccugagcagcaccgccagcgcccugggcaagcugcaggacguggugaaccagaacgcucaggcccugaacacccuggugaagcagcugagcagcaacuucggcgccaucagcucagugcugaaugacauccugagcaggcuggacaagguggaggccgaggugcagaucgaccggcugaucaccggccggcugcagagccugcagaccuacgugacccagcagcugauccgggccgccgagauccgggccagcgccaaccuggcagccaccaagaugagcgagugcgugcugggccagagcaagcggguggacuuuugcggcaagggcuaccaccugaugagcuucccccagagcgccccacacggcgugguguuccuccacgucacauacgugcccgcccaggagaagaacuucaccaccgcccccgccauuugccacgacggcaaggcucacuucccccgggagggaguguucgugagcaacggcacccacugguucgugacccagcggaacuucuacgagccccagaucaucaccaccgacaacaccuucgugagcggcaacugcgacguggugaucggcaucgugaacaacaccguguacgacccccugcagccugagcuggacagcuucaaggaggagcuggacaaguacuucaagaaccacaccagccccgacguggaucugggcgacaucagcggcaucaacgccagcguggugaacauccagaaggagaucgaccggcugaacgagguggccaagaaccugaacgagagccugaucgaccugcaggagcugggcaaguacgagcaguacaucaaguggcccugguacaucuggcugggcuucaucgccggccugaucgccaucgugaucgugaccaucaugcugugcugcaugaccagcugcuguagcugccugaagggcugcugcagcugcggcagcugcugcaaguucgacgaggacgacagcgagccagugcugaagggcgugaagcugcacuacaccugauaauaggcuggagccucgguggccuagcuucuugccccuugggccuccccccagccccuccuccccuuccugcacccguacccccguggucuuugaauaaagucugagugggcggcaaaaaaaaaaaaaaaaaaaaaaaaaaaaaaaaaaaaaaaaaaaaaaaaaaaaaaaaaaaaaaaaaaaaaaaaaaaaaaaaaaaaaaaaaaaaaaaaaaaa

SEQ ID NO: 26113 - RNA, 4089 nt, Artificial Sequence
  SARS-CoV-2/Wuhan/WIV05/2019__EPI_ISL_402128 spike protein mRNA gc (1-1273)(H69del_V70del_A222V_Y453F_S477N_D614G_I692V)
gggaaauaagagagaaaagaagaguaagaagaaauauaagaccccggcgccgccaccauguucguguuccuggugcugcugccccuggugagcagccagugcgugaaccugaccacccggacccagcugcccccugccuacaccaacagcuucacccggggcguguacuaccccgacaagguguuccggagcagcgugcugcacagcacccaggaccuguuccugcccuucuucagcaacgugaccugguuccacgccaucagcggcaccaacggcaccaagcgguucgacaacccagugcugcccuucaacgacggcguguacuucgccagcaccgagaagucaaacaucauccggggcuggaucuucggcaccacccuggacagcaagacacagagccugcugaucgugaacaacgccaccaacguggugaucaaggugugcgaguuucaguucugcaacgaccccuuccugggcguguacuaccacaagaacaacaagagcuggauggagagcgaguuccggguguacagcagcgcuaacaauugcaccuucgaguacgucagccagcccuuccugauggaccucgagggcaagcagggcaacuucaagaaccugcgggaguucguguucaagaacaucgauggcuacuucaagaucuacagcaagcacacccccaucaaccuggugcgggaccugccccagggauucagcgugcuggagccucugguggaccugcccaucggcaucaacaucaccagguuccagacccugcuggcccugcaccggagcuaccugacccccggcgacagcagcagcggcuggaccgccggcgccgccgccuacuacgugggcuaccugcagccacggaccuuccugcugaaguacaacgagaacggcaccaucaccgacgcaguggacugcgcccuggacccccugagcgagaccaagugcacccuaaagagcuucaccguggagaagggcaucuaccagaccagcaacuuccgggugcagcccacugagagcaucgugcgguuccccaacauuaccaaccugugucccuucggcgagguguucaacgccacccgguucgccagcguguacgccuggaaccggaagcggaucagcaacugcguggccgacuacagcgugcuguacaacagcgccagcuucagcaccuucaagugcuacggcgugagcccuaccaagcugaacgaccugugcuucaccaacguguacgccgacagcuucgugauccggggcgacgaggugcggcagaucgcucccggccagaccggcaagaucgccgacuacaacuacaagcugcccgacgacuucaccggcugcgugaucgccuggaacagcaacaaccuggacagcaaggugggcggcaacuacaacuaccuguuccggcuguuccguaagagcaaccugaagccauuugagcgggacaucagcaccgagaucuaccaggccggcaacacccccugcaacgguguggagggcuucaacugcuacuucccccugcagagcuacggcuuccagcccaccaacggcgugggcuaccagcccuaccgggugguggugcugagcuucgagcugcugcacgcccccgccaccgugugcggcccuaaaaagagcaccaaccuggugaagaacaagugcgugaauuucaacuucaacggccugaccggcaccggcgugcugaccgagagcaacaagaaguuccugcccuuccagcaguucggccgggauaucgccgacaccaccgacgccgugcgggacccccagacccuggagauccuggacaucaccccaugcagcuucggcggcgugagcgucaucacccccggcacaaacaccagcaaccagguggcagugcuguaccagggagugaacugcaccgaggugcccguggccauccacgccgaccagcugacccccaccuggcggguguacagcaccggcagcaacguguuccagacccgggccggcugccugaucggcgccgagcacgugaacaacagcuacgagugcgacauccccaucggcgccggcaucugcgcuuccuaccagacccagaccaacagcccccggcgggcccggagcguggccagccagagcgugaucgccuacaccaugagcuuaggcgccgagaacagcguggccuacagcaacaacagcaucgccaucccuaccaacuucaccaucagcgugaccaccgagauccugcccgugagcaugaccaagaccagcguggacuguaccauguacauaugcggcgacagcaccgagugcagcaaccugcugcugcaguacggcagcuucugcacccagcugaaccgggcgcugaccggcaucgccguggagcaggacaagaacacccaagagguguucgcccaggugaagcagaucuacaagacucccccaaucaaggacuucggcggcuucaacuucagccagauccugcccgaccccagcaagcccagcaagcggagcuucaucgaggaccugcuguucaacaaggugacccuggccgacgccggcuucaucaagcaguacggcgacugccugggggauaucgccgcccgggaccugaucugcgcucagaaguucaacggccugaccgugcugcccccucugcugaccgacgagaugaucgcccaguacaccagcgcccugcuugccggcaccaucaccagcggcuggaccuucggcgccggcgccgcacugcagauccccuucgccaugcagauggccuaccgguucaacggcaucggcgugacccagaacgugcuguacgagaaccagaagcugaucgccaaccaguucaacagcgccaucggcaagauccaggacagccugagcagcaccgccagcgcccugggcaagcugcaggacguggugaaccagaacgcccaggcucugaacacccuggugaagcagcugagcagcaauuuuggcgccaucagcagcgugcugaacgacauccugucaaggcuggacaagguggaggccgaggugcagaucgaccggcugaucaccggccggcugcagagccugcagaccuacgugacccagcagcugauccgggccgccgagauccgggccagcgccaaccuggccgcaaccaagaugagcgagugcgugcugggccagagcaagcggguggacuucugcggcaagggcuaccaccugaugagcuucccccagagcgccccacacggcguggucuuccuccacgugacauacgugcccgcccaggagaagaacuucaccaccgcccccgccaucugccacgacggcaaggcccacuucccccgggagggaguguucgugagcaacggcacccacugguucgugacccagcggaacuucuacgagccccagauuaucaccaccgacaacaccuucgugagcggcaacugcgacguggugaucggcaucgugaacaacaccguguacgacccccugcagccugagcuggacagcuucaaggaggagcuggacaaguacuucaagaaccacaccagccccgacguggaucugggcgacaucagcggcaucaacgcuagcguggugaacauccagaaggagaucgaccggcugaacgagguggccaagaaccugaacgagagccugaucgaccugcaggagcugggcaaguacgagcaguacaucaaguggcccugguacaucuggcugggcuucaucgccggccugaucgccaucgugauggugaccaucaugcugugcugcaugaccagcugcuguagcugccugaagggcugcugcagcugcggcagcugcugcaaguucgacgaggacgacagcgagccagugcugaagggcgugaagcugcacuacaccugauaauaggcuggagccucgguggccuagcuucuugccccuugggccuccccccagccccuccuccccuuccugcacccguacccccguggucuuugaauaaagucugagugggcggcaaaaaaaaaaaaaaaaaaaaaaaaaaaaaaaaaaaaaaaaaaaaaaaaaaaaaaaaaaaaaaaaaaaaaaaaaaaaaaaaaaaaaaaaaaaaaaaaaaaa

SEQ ID NO: 26114 - RNA, 4089 nt, Artificial Sequence
  SARS-CoV-2/Wuhan/WIV05/2019__EPI_ISL_402128 spike protein mRNA gc (1-1273)(H69del_V70del_Y453F_D614G_I692V_M1229I)
gggaaauaagagagaaaagaagaguaagaagaaauauaagaccccggcgccgccaccauguucguguuccuggugcugcugccccuggugagcagccagugcgugaaccugaccacccggacccagcugcccccugccuacaccaacagcuucacccggggcguguacuaccccgacaagguguuccggagcagcgugcugcacagcacccaggaccuguuccugcccuucuucagcaacgugaccugguuccacgccaucagcggcaccaacggcaccaagcgguucgacaacccagugcugcccuucaacgacggcguguacuucgccagcaccgagaagucaaacaucauccggggcuggaucuucggcaccacccuggacagcaagacacagagccugcugaucgugaacaacgccaccaacguggugaucaaggugugcgaguuucaguucugcaacgaccccuuccugggcguguacuaccacaagaacaacaagagcuggauggagagcgaguuccggguguacagcagcgcuaacaauugcaccuucgaguacgucagccagcccuuccugauggaccucgagggcaagcagggcaacuucaagaaccugcgggaguucguguucaagaacaucgauggcuacuucaagaucuacagcaagcacacccccaucaaccuggugcgggaccugccccagggauucagcgcccuggagccucugguggaccugcccaucggcaucaacaucaccagguuccagacccugcuggcccugcaccggagcuaccugacccccggcgacagcagcagcggcuggaccgccggcgccgccgcauacuacgugggcuaccugcagccacggaccuuccugcugaaguacaacgagaacggcaccaucaccgacgccguggacugcgcccuggacccccugagcgagaccaagugcacccuaaagagcuucaccguggagaagggcaucuaccagaccagcaacuuccgggugcagcccacugagagcaucgugcgguuccccaacauuaccaaccugugucccuucggcgagguguucaacgccacccgguucgccagcguguacgccuggaaccggaagcggaucagcaacugcguggccgacuacagcgugcuguacaacagcgccagcuucagcaccuucaagugcuacggcgugagcccuaccaagcugaacgaccugugcuucaccaacguguacgcugacagcuucgugauccggggcgacgaggugcggcagaucgcccccggccagaccggcaagaucgccgacuacaacuacaagcugcccgacgacuucaccggcugcgugaucgccuggaacagcaacaaccuggacagcaaggugggcggcaacuacaacuaccuguuccggcuguuccguaagagcaaccugaagccauuugagcgggacaucagcaccgagaucuaccaggccggcagcacccccugcaacgguguggagggcuucaacugcuacuucccccugcagagcuacggcuuccagcccaccaacggcgugggcuaccagcccuaccgggugguggugcugagcuucgagcugcugcacgcccccgccaccgugugcggcccuaaaaagagcaccaaccuggugaagaacaagugcgugaacuucaauuucaacggccugaccggcaccggcgugcugaccgagagcaacaagaaguuccugcccuuccagcaguucggccgggauaucgccgacaccaccgacgcagugcgggacccccagacccuggagauccuggacaucaccccaugcagcuucggcggcgugagcgugaucacccccggcacaaacaccagcaaccaggucgccgugcuguaccagggagugaacugcaccgaggugcccguggccauccacgccgaccagcugacccccaccuggcggguguacagcaccggcagcaacguguuccagacccgggccggcugccugaucggcgccgagcacgugaacaacuccuacgagugcgacauccccaucggcgcuggcaucugcgccagcuaccagacccagaccaacagcccccggcgggcccggagcguggccagccagagcgugaucgccuacaccaugagcuuaggcgccgagaacagcguggccuacagcaacaacagcaucgcgaucccuaccaacuucaccaucagcgugaccaccgagauccugcccgugagcaugaccaagaccagcguggacuguaccauguacauaugcggcgacagcaccgagugcagcaaccugcugcugcaguacggcagcuucugcacccagcugaaccgggcccugaccggcaucgccguggagcaggacaagaacacccaagagguguucgcccaggugaagcagaucuacaagacucccccaaucaaggacuucggcggcuucaacuucagccagauccugcccgaccccagcaagcccagcaagcggagcuucaucgaggaccugcuguucaacaaggugacccuggccgacgccggcuucaucaagcaguacggcgacugccugggggauaucgccgcucgggaccugaucugcgcccagaaguucaacggccugaccgugcugcccccucugcugaccgacgagaugaucgcccaguacaccagcgcccugcuugccggcaccaucaccagcggcuggaccuucggcgccggcgcagcccugcagauccccuucgccaugcagauggccuaccgguucaacggcaucggcgugacccagaacgugcuguacgagaaccagaagcugaucgccaaccaguucaacagcgccaucggcaagauccaggacagccugagcagcaccgccagcgcccugggcaagcugcaggacguggugaaccagaacgcucaggcccugaacacccuggugaagcagcugagcagcaacuuuggcgccaucagcucagugcugaaugacauccugagcaggcuggacaagguggaggccgaggugcagaucgaccggcugaucaccggccggcugcagagccugcagaccuacgugacccagcagcugauccgggccgccgagauccgggccagcgccaaccuggcagccaccaagaugagcgagugcgugcugggccagagcaagcggguggacuucugcggcaagggcuaccaccugaugagcuucccccagagcgccccacacggcgugguguuccuccacgucacauacgugcccgcccaggagaagaacuucaccaccgcccccgccaucugccacgacggcaaggcucacuucccccgggagggaguguucgugagcaacggcacccacugguucgugacccagcggaacuucuacgagccccagauuaucaccaccgacaacaccuucgugagcggcaacugcgacguggugaucggcaucgugaacaacaccguguacgacccccugcagccugagcuggacagcuucaaggaggagcuggacaaguacuucaagaaccacaccagccccgacguggaucugggcgacaucagcggcaucaacgccagcguggugaacauccagaaggagaucgaccggcugaacgagguggccaagaaccugaacgagagccugaucgaccugcaggagcugggcaaguacgagcaguacaucaaguggcccugguacaucuggcugggcuucaucgccggccugaucgccaucgugaucgugaccaucaugcugugcugcaugaccagcugcuguagcugccugaagggcugcugcagcugcggcagcugcugcaaguucgacgaggacgacagcgagccagugcugaagggcgugaagcugcacuacaccugauaauaggcuggagccucgguggccuagcuucuugccccuugggccuccccccagccccuccuccccuuccugcacccguacccccguggucuuugaauaaagucugagugggcggcaaaaaaaaaaaaaaaaaaaaaaaaaaaaaaaaaaaaaaaaaaaaaaaaaaaaaaaaaaaaaaaaaaaaaaaaaaaaaaaaaaaaaaaaaaaaaaaaaaaa

SEQ ID NO: 26115 - RNA, 4086 nt, Artificial Sequence
  SARS-CoV-2/Wuhan/WIV05/2019__EPI_ISL_402128 spike protein mRNA gc (1-1273)(H69del_V70del_Y144del_N501Y_A570D_D614G_P681H_T716I_S982 A_D1118H)
gggaaauaagagagaaaagaagaguaagaagaaauauaagaccccggcgccgccaccauguucguguuccuggugcugcugccccuggugagcagccagugcgugaaccugaccacccggacccagcugcccccugccuacaccaacagcuucacccggggcguguacuaccccgacaagguguuccggagcagcgugcugcacagcacccaggaccuguuccugcccuucuucagcaacgugaccugguuccacgccaucagcggcaccaacggcaccaagcgguucgacaacccagugcugcccuucaacgacggcguguacuucgccagcaccgagaagucaaacaucauccggggcuggaucuucggcaccacccuggacagcaagacacagagccugcugaucgugaacaacgccaccaacguggugaucaaggugugcgaguuucaguucugcaacgaccccuuccugggcguguaccacaagaacaacaagagcuggauggagagcgaguuccggguguacagcagcgcuaacaauugcaccuucgaguacgucagccagcccuuccugauggaccucgagggcaagcagggcaacuucaagaaccugcgggaguucguguucaagaacaucgauggcuacuucaagaucuacagcaagcacacccccaucaaccuggugcgggaccugccccagggauucagcgcccuggagccucugguggaccugcccaucggcaucaacaucaccagguuccagacccugcuggcccugcaccggagcuaccugacccccggcgacagcagcagcggcuggaccgccggcgccgccgcauacuacgugggcuaccugcagccacggaccuuccugcugaaguacaacgagaacggcaccaucaccgacgccguggacugcgcccuggacccccugagcgagaccaagugcacccuaaagagcuucaccguggagaagggcaucuaccagaccagcaacuuccgggugcagcccacugagagcaucgugcgguuccccaacauuaccaaccugugucccuucggcgagguguucaacgccacccgguucgccagcguguacgccuggaaccggaagcggaucagcaacugcguggccgacuacagcgugcuguacaacagcgccagcuucagcaccuucaagugcuacggcgugagcccuaccaagcugaacgaccugugcuucaccaacguguacgcugacagcuucgugauccggggcgacgaggugcggcagaucgcccccggccagaccggcaagaucgccgacuacaacuacaagcugcccgacgacuucaccggcugcgugaucgccuggaacagcaacaaccuggacagcaaggugggcggcaacuacaacuaccuguaccggcuguuccguaagagcaaccugaagccauucgagcgggacaucagcaccgagaucuaccaggccggcagcacccccugcaacgguguggagggcuuuaacugcuacuucccccugcagagcuacggcuuccagcccaccuacggcgugggcuaccagcccuaccgggugguggugcugagcuucgagcugcugcacgcccccgccaccgugugcggcccuaaaaagagcaccaaccuggugaagaacaagugcgugaacuucaacuucaauggccugaccggcaccggcgugcugaccgagagcaacaagaaguuccugcccuuccagcaguucggccgggauaucgacgacaccaccgacgccgugcgggacccccagacccuggagauccuggacaucaccccaugcagcuucggcggcgugagcgugaucacccccggcacaaacaccagcaaccaggucgcagugcuguaccagggagugaacugcaccgaggugcccguggccauccacgccgaccagcugacccccaccuggcggguguacagcaccggcagcaacguguuccagacccgggccggcugccugaucggcgccgagcacgugaacaacuccuacgagugcgacauccccaucggcgccggcaucugcgcuagcuaccagacccagaccaacagccaccggcgggcccggagcguggccagccagagcaucaucgccuacaccaugagcuuaggcgccgagaacagcguggccuacagcaacaacagcaucgccauccccaucaacuucaccauaagcgugaccaccgagauccugccugugagcaugaccaagaccagcguggacuguaccauguacaucugcggcgacagcaccgagugcagcaaccugcugcugcaguacggcagcuucugcacccagcugaaccgggcgcugaccggcaucgccguggagcaggacaagaacacccaagagguguucgcccaggugaagcagaucuacaagaccccacccaucaaggacuucggcggcuucaacuucagccagauccugcccgaccccagcaagcccagcaagcggagcuucaucgaggaccugcuguucaacaaggugacucuggccgacgccggcuucaucaagcaguacggcgauugccugggggacaucgccgcccgggaccugaucugcgcucagaaguucaacggccugaccgugcugccuccccugcugaccgacgagaugaucgcccaguacaccagcgcccugcuugccggcaccaucaccagcggcuggaccuucggcgccggcgccgcacugcagauccccuucgccaugcagauggccuaccgguucaacggcaucggcgugacccagaacgugcuguacgagaaccagaagcugaucgccaaccaguucaacagcgccaucggcaagauccaggacagccugagcagcaccgccagcgcccugggcaagcugcaggacguggugaaccagaacgcccaggcucugaacacccuggugaagcagcugagcagcaacuucggcgccaucagcucagugcugaacgacauccuggccaggcuggacaagguggaggccgaggugcagaucgaccggcugaucaccggccggcugcagagccugcagaccuacgugacccagcagcugauccgggccgccgagauucgggccagcgccaaucuggcagccaccaagaugagcgagugcgugcugggccagagcaagcggguggacuuuugcggcaagggcuaccaccugaugagcuucccccagagcgcuccccacggcgugguguuccuccacgugaccuacgucccagcccaggagaagaacuucacaaccgcccccgccaucugccacgacggcaaggcccacuucccccgggagggaguguucgugagcaacggcacccacugguucgugacccagcggaacuucuacgagccccagaucaucaccacccacaacaccuucgugagcggcaacugcgacguggugaucggcaucgugaacaacaccguguacgacccccugcagcccgagcuggacagcuucaaggaggagcuggacaaguacuucaagaaccacaccagcccugacguggaucugggcgacaucagcggcaucaacgccagcguggugaacauccagaaggagaucgaccggcugaacgagguggccaagaaccugaacgagagccugaucgaccugcaggagcugggcaaguacgagcaguacaucaaguggcccugguacaucuggcugggcuucaucgccggccugaucgccaucgugauggugaccaucaugcugugcugcaugaccagcugcuguagcugccugaagggcugcugcagcugcggcagcugcugcaaguucgacgaggacgacagcgagcccgugcugaagggcgugaagcugcacuacaccugauaauaggcuggagccucgguggccuagcuucuugccccuugggccuccccccagccccuccuccccuuccugcacccguacccccguggucuuugaauaaagucugagugggcggcaaaaaaaaaaaaaaaaaaaaaaaaaaaaaaaaaaaaaaaaaaaaaaaaaaaaaaaaaaaaaaaaaaaaaaaaaaaaaaaaaaaaaaaaaaaaaaaaaaaa

SEQ ID NO: 26116 - RNA, 4095 nt, Artificial Sequence
  SARS-CoV-2/Wuhan/WIV05/2019__EPI_ISL_402128 spike protein mRNA gc (1-1273)(K417N_E484K_N501Y_D614G)
gggaaauaagagagaaaagaagaguaagaagaaauauaagaccccggcgccgccaccauguucguguuccuggugcugcugccccuggugagcagccagugcgugaaccugaccacccggacccagcugcccccugccuacaccaacagcuucacccggggcguguacuaccccgacaagguguuccggagcagcgugcugcacagcacccaggaccuguuccugcccuucuucagcaacgugaccugguuccacgccauccacgugagcggcaccaacggcaccaagcgguucgacaacccagugcugcccuucaacgacggcguguacuucgccagcaccgagaagucaaacaucauccggggcuggaucuucggcaccacccuggacagcaagacacagagccugcugaucgugaacaacgccaccaacguggugaucaaggugugcgaguuucaguucugcaacgaccccuuccugggcguguacuaccacaagaacaacaagagcuggauggagagcgaguuccgggucuacagcagcgcuaacaauugcaccuucgaguacgugagccagcccuuccugauggaccucgagggcaagcagggcaacuucaagaaccugcgggaguucguguucaagaacaucgauggcuacuucaagaucuacagcaagcacacccccaucaaccuggugcgggaccugccccagggauucagcgcccuggagccucugguggaccugcccaucggcaucaacaucaccagguuccagacccugcuggcccugcaccggagcuaccugacccccggcgacagcagcagcggcuggaccgccggcgccgccgcauacuacgugggcuaccugcagccacggaccuuccugcugaaguacaacgagaacggcaccaucaccgacgccguggacugcgcccuggacccccugagcgagaccaagugcacccuaaagagcuucaccguggagaagggcaucuaccagaccagcaacuuccgggugcagcccacugagagcaucgugcgguuccccaacauuaccaaccugugucccuucggcgagguguucaacgccacccgguucgccagcguguacgccuggaaccggaagcggaucagcaacugcguggccgacuacagcgugcuguacaacagcgccagcuucagcaccuucaagugcuacggcgugagcccuaccaagcugaacgaccugugcuucaccaacguguacgcugacagcuucgugauccggggcgacgaggugcggcagaucgcccccggccagaccggcaacaucgccgacuacaacuacaagcugcccgacgacuucaccggcugcgugaucgccuggaacagcaacaaccuggacagcaaggugggcggcaacuacaacuaccuguaccggcuguuccguaagagcaaccugaagccauucgagcgggacaucagcaccgagaucuaccaggccggcagcacccccugcaacggugugaagggcuuuaacugcuacuucccccugcagagcuacggcuuccagcccaccuacggcgugggcuaccagcccuaccgggugguggugcugagcuucgagcugcugcacgcccccgccaccgugugcggcccuaaaaagagcaccaaccuggugaagaacaagugcgugaacuucaauuucaacggccugaccggcaccggcgugcugaccgagagcaacaagaaguuccugcccuuccagcaguucggccgggauaucgccgacaccaccgacgcagugcgggacccccagacccuggagauccuggacaucaccccaugcagcuucggcggcgugagcgucaucacccccggcacaaacaccagcaaccagguggccgugcuguaccagggagugaacugcaccgaggugcccguggccauccacgccgaccagcugacccccaccuggcggguguacagcaccggcagcaacguguuccagacccgggccggcugccugaucggcgccgagcacgugaacaacuccuacgagugcgacauccccaucggcgcuggcaucugcgccagcuaccagacccagaccaacagcccccggcgggcccggagcguggccagccagagcaucaucgccuacaccaugagcuuaggcgccgagaacagcguggccuacagcaacaacagcaucgcgaucccuaccaacuucaccaucagcgugaccaccgagauacugcccgugagcaugaccaagaccagcguggacuguaccauguacaucugcggcgacagcaccgagugcagcaaccugcugcugcaguacggcagcuucugcacccagcugaaccgggcccugaccggcaucgccguggagcaggacaagaacacccaagagguguucgcccaggugaagcagaucuacaagacucccccaaucaaggacuucggcggcuucaacuucagccagauccugcccgaccccagcaagcccagcaagcggagcuucaucgaggaccugcuguucaacaaggugacccuggccgacgccggcuucaucaagcaguacggcgacugccugggggauaucgccgcucgggaccugaucugcgcccagaaguucaacggccugaccgugcugcccccucugcugaccgacgagaugaucgcccaguacaccagcgcccugcuugccggcaccaucaccagcggcuggaccuucggcgccggcgcagcccugcagauccccuucgccaugcagauggccuaccgguucaacggcaucggcgugacccagaacgugcuguacgagaaccagaagcugaucgccaaccaguucaacagcgccaucggcaagauccaggacagccugagcagcaccgccagcgcccugggcaagcugcaggacguggugaaccagaacgcucaggcccugaacacccuggugaagcagcugagcagcaacuucggcgccaucagcucagugcugaaugacauccugagcaggcuggacaagguggaggccgaggugcagaucgaccggcugaucaccggccggcugcagagccugcagaccuacgugacccagcagcugauccgggccgccgagauccgggccagcgccaaccuggcagccaccaagaugagcgagugcgugcugggccagagcaagcggguggacuuuugcggcaagggcuaccaccugaugagcuucccccagagcgccccacacggcgugguguuccuccacgucacauacgugcccgcccaggagaagaacuucaccaccgcccccgccauuugccacgacggcaaggcucacuucccccgggagggaguguucgugagcaacggcacccacugguucgugacccagcggaacuucuacgagccccagaucaucaccaccgacaacaccuucgugagcggcaacugcgacguggugaucggcaucgugaacaacaccguguacgacccccugcagccugagcuggacagcuucaaggaggagcuggacaaguacuucaagaaccacaccagccccgacguggaucugggcgacaucagcggcaucaacgccagcguggugaacauccagaaggagaucgaccggcugaacgagguggccaagaaccugaacgagagccugaucgaccugcaggagcugggcaaguacgagcaguacaucaaguggcccugguacaucuggcugggcuucaucgccggccugaucgccaucgugauggugaccaucaugcugugcugcaugaccagcugcuguagcugccugaagggcugcugcagcugcggcagcugcugcaaguucgacgaggacgacagcgagccagugcugaagggcgugaagcugcacuacaccugauaauaggcuggagccucgguggccuagcuucuugccccuugggccuccccccagccccuccuccccuuccugcacccguacccccguggucuuugaauaaagucugagugggcggcaaaaaaaaaaaaaaaaaaaaaaaaaaaaaaaaaaaaaaaaaaaaaaaaaaaaaaaaaaaaaaaaaaaaaaaaaaaaaaaaaaaaaaaaaaaaaaaaaaaa

SEQ ID NO: 26117 - RNA, 4086 nt, Artificial Sequence
  SARS-CoV-2/Wuhan/WIV05/2019__EPI_ISL_402128 spike protein mRNA gc (1-1273)(L18F_D80A_D215G_L242del_A243del_L244del_R246I_K417N_E484 K_N501Y_D614G_A701V)
gggaaauaagagagaaaagaagaguaagaagaaauauaagaccccggcgccgccaccauguucguguuccuggugcugcugccccuggugagcagccagugcgugaacuucaccacccggacccagcugcccccugccuacaccaacagcuucacccggggcguguacuaccccgacaagguguuccggagcagcgugcugcacagcacccaggaccuguuccugcccuucuucagcaacgugaccugguuccacgccauccacgugagcggcaccaacggcaccaagcgguucgccaacccagugcugcccuucaacgacggcguguacuucgccagcaccgagaagucaaacaucauccggggcuggaucuuuggcaccacccuggacagcaagacacagagccugcugaucgugaacaacgcuaccaacguggugaucaaggugugcgaguuccaguucugcaacgaccccuuccugggcguguacuaccacaagaacaacaagagcuggauggagagcgaguuccgggucuacagcagcgccaacaauugcaccuucgaguacgugagccagcccuuccugauggaccuggagggcaagcagggcaacuucaagaaccuccgggaguucguguucaagaacaucgacggcuacuucaagaucuacagcaagcacacccccaucaaccuggugcggggacugccccagggcuucagcgcccuggagccucugguggaucugcccaucggcaucaacaucaccagguuccagacccugcacaucagcuaccugacccccggcgacagcagcagcggcuggaccgccggcgccgccgcauacuacgugggcuaccugcagccacggaccuuccugcugaaguacaacgagaacggcaccaucaccgacgccguggacugcgcccuggacccccugagcgagaccaagugcacccuuaagagcuucaccguggagaagggcaucuaccagaccagcaacuuccgggugcagcccacugagagcauugugcgguuccccaacaucaccaaccugugucccuucggcgagguguucaacgccacccgguucgccagcguguacgccuggaaccggaagcggaucagcaacugcguggccgacuacagcgugcuguacaacagcgccagcuucagcaccuucaagugcuacggcgugagcccuaccaagcugaacgaccugugcuucaccaacguguacgcugacagcuucgugauccggggcgacgaggugcggcagaucgcccccggccagaccggcaacaucgccgacuacaacuacaagcugcccgacgacuucaccggcugcgugaucgccuggaacagcaacaaccuggacagcaaggugggcggcaacuacaacuaccuguaccggcuauuccguaagagcaaccugaagccauuugagcgggacaucagcaccgagaucuaccaggccgguagcacccccugcaacggcgugaagggcuucaacugcuacuucccccugcagagcuacggcuuccagcccaccuacggcgugggcuaccagcccuaccgggugguggugcugagcuucgagcugcugcacgcccccgccaccgugugcggcccuaaaaagagcaccaaccuggugaagaacaagugcgugaacuucaauuucaacggccugaccggcaccggcgugcugaccgagagcaacaagaaguuccugcccuuccagcaguucggccgggacaucgccgacaccaccgaugcagugcgggacccccagacccuggagauccuggacaucaccccaugcagcuucggcggcgugagcgucaucacccccggaacaaacaccagcaaccagguggccgugcuguaccagggcgugaacugcaccgaggugcccguggccauccacgccgaccagcugacccccaccuggcggguguacagcaccggcagcaacguguuccagacccgggccggcugccugaucggcgccgagcacgugaacaacuccuacgagugcgacauccccaucggcgcuggcaucugcgccagcuaccagacccagaccaacagcccccggcgggcccggagcguggccagccagagcaucaucgccuacaccaugagccugggcguggagaacagcguggccuacagcaacaacagcaucgccaucccuaccaacuucaccauaagcgugaccaccgagauccugcccgugagcaugaccaagaccagcguggacuguaccauguacaucugcggcgacagcaccgagugcagcaaccuguuacugcaguacggcagcuucugcacccagcugaaccgggcgcugaccggcaucgccguggagcaggacaagaacacccaagagguguucgcccaggugaagcagaucuacaagacucccccaaucaaggacuucggcggcuucaacuucagccagauccugcccgaccccagcaagcccagcaagcggagcuucaucgaggaccugcuguucaacaaggugacccuggccgacgccggcuucaucaagcaguacggggacugccugggcgacaucgccgcccgggaccugaucugcgcucagaaguucaacggccugaccgugcugcccccucugcugaccgaugagaugaucgcccaguacaccagcgcccugcuggccggcaccaucaccagcggcuggaccuucggcgccggcgccgcacugcagauccccuucgccaugcagauggccuaccgguucaacggcaucggcgugacccagaacgugcuguacgagaaccagaagcugaucgccaaccaguucaacagcgccaucggcaagauccaggacagccugagcagcaccgccagcgcccugggcaagcugcaggacguggugaaccagaacgcccaggcucugaacacccuggugaagcagcugagcagcaacuuuggcgccaucagcucagugcugaaugacauccugagccggcuggacaagguggaggccgaggugcagaucgacaggcugaucaccggccggcugcagagccugcagaccuacgugacccagcagcugauccgggccgccgagauucgggccagcgccaaccuggccgcaaccaagaugagcgagugcgugcugggccagagcaagcggguggacuucugcggcaagggcuaccaccugaugagcuucccccagagcgccccacacggcguggucuuccugcacgugacauacgugcccgcccaggagaagaacuucaccaccgcccccgccaucugccacgacggaaaggcccacuucccccgggagggcguguucgugagcaacggcacccacugguucgugacccagcggaacuucuacgagccccagaucaucaccaccgacaacaccuucgugagcggcaacugcgacguggugaucggcaucgugaacaacaccguguacgacccccugcagccugagcuggacagcuucaaggaggagcucgacaaguacuucaagaaccacaccagccccgacguggaccugggcgacaucagcggcaucaacgcuagcguggugaacauccagaaggagaucgaucggcugaacgagguggccaagaaccugaacgagagccugaucgaccugcaggagcugggcaaguacgagcaguacaucaaguggcccugguacaucuggcugggcuucaucgccggccugaucgccaucgugauggugaccaucaugcugugcugcaugaccagcugcuguagcugccugaagggcugcugcagcugcggcagcugcugcaaguucgacgaggacgacagcgagccagugcugaagggcgugaagcugcacuacaccugauaauaggcuggagccucgguggccuagcuucuugccccuugggccuccccccagccccuccuccccuuccugcacccguacccccguggucuuugaauaaagucugagugggcggcaaaaaaaaaaaaaaaaaaaaaaaaaaaaaaaaaaaaaaaaaaaaaaaaaaaaaaaaaaaaaaaaaaaaaaaaaaaaaaaaaaaaaaaaaaaaaaaaaaaa

SEQ ID NO: 26118 - RNA, 4095 nt, Artificial Sequence
  SARS-CoV-2/Wuhan/WIV05/2019__EPI_ISL_402128 spike protein mRNA gc (1-1273)(E484K_D614G)
gggaaauaagagagaaaagaagaguaagaagaaauauaagaccccggcgccgccaccauguucguguuccuggugcugcugccccuggugagcagccagugcgugaaccugaccacccggacccagcugcccccugccuacaccaacagcuucacccggggcguguacuaccccgacaagguguuccggagcagcgugcugcacagcacccaggaccuguuccugcccuucuucagcaacgugaccugguuccacgccauccacgugagcggcaccaacggcaccaagcgguucgacaacccagugcugcccuucaacgacggcguguacuucgccagcaccgagaagucaaacaucauccggggcuggaucuucggcaccacccuggacagcaagacacagagccugcugaucgugaacaacgccaccaacguggugaucaaggugugcgaguuucaguucugcaacgaccccuuccugggcguguacuaccacaagaacaacaagagcuggauggagagcgaguuccgggucuacagcagcgcuaacaauugcaccuucgaguacgugagccagcccuuccugauggaccucgagggcaagcagggcaacuucaagaaccugcgggaguucguguucaagaacaucgauggcuacuucaagaucuacagcaagcacacccccaucaaccuggugcgggaccugccccagggauucagcgcccuggagccucugguggaccugcccaucggcaucaacaucaccagguuccagacccugcuggcccugcaccggagcuaccugacccccggcgacagcagcagcggcuggaccgccggcgccgccgcauacuacgugggcuaccugcagccacggaccuuccugcugaaguacaacgagaacggcaccaucaccgacgccguggacugcgcccuggacccccugagcgagaccaagugcacccuaaagagcuucaccguggagaagggcaucuaccagaccagcaacuuccgggugcagcccacugagagcaucgugcgguuccccaacauuaccaaccugugucccuucggcgagguguucaacgccacccgguucgccagcguguacgccuggaaccggaagcggaucagcaacugcguggccgacuacagcgugcuguacaacagcgccagcuucagcaccuucaagugcuacggcgugagcccuaccaagcugaacgaccugugcuucaccaacguguacgcugacagcuucgugauccggggcgacgaggugcggcagaucgcccccggccagaccggcaagaucgccgacuacaacuacaagcugcccgacgacuucaccggcugcgugaucgccuggaacagcaacaaccuggacagcaaggugggcggcaacuacaacuaccuguaccggcuguuccguaagagcaaccugaagccauucgagcgggacaucagcaccgagaucuaccaggccggcagcacccccugcaacggugugaagggcuuuaacugcuacuucccccugcagagcuacggcuuccagcccaccaacggcgugggcuaccagcccuaccgggugguggugcugagcuucgagcugcugcacgcccccgccaccgugugcggcccuaaaaagagcaccaaccuggugaagaacaagugcgugaacuucaauuucaacggccugaccggcaccggcgugcugaccgagagcaacaagaaguuccugcccuuccagcaguucggccgggauaucgccgacaccaccgacgcagugcgggacccccagacccuggagauccuggacaucaccccaugcagcuucggcggcgugagcgucaucacccccggcacaaacaccagcaaccagguggccgugcuguaccagggagugaacugcaccgaggugcccguggccauccacgccgaccagcugacccccaccuggcggguguacagcaccggcagcaacguguuccagacccgggccggcugccugaucggcgccgagcacgugaacaacuccuacgagugcgacauccccaucggcgcuggcaucugcgccagcuaccagacccagaccaacagcccccggcgggcccggagcguggccagccagagcaucaucgccuacaccaugagcuuaggcgccgagaacagcguggccuacagcaacaacagcaucgcgaucccuaccaacuucaccaucagcgugaccaccgagauacugcccgugagcaugaccaagaccagcguggacuguaccauguacaucugcggcgacagcaccgagugcagcaaccugcugcugcaguacggcagcuucugcacccagcugaaccgggcccugaccggcaucgccguggagcaggacaagaacacccaagagguguucgcccaggugaagcagaucuacaagacucccccaaucaaggacuucggcggcuucaacuucagccagauccugcccgaccccagcaagcccagcaagcggagcuucaucgaggaccugcuguucaacaaggugacccuggccgacgccggcuucaucaagcaguacggcgacugccugggggauaucgccgcucgggaccugaucugcgcccagaaguucaacggccugaccgugcugcccccucugcugaccgacgagaugaucgcccaguacaccagcgcccugcuugccggcaccaucaccagcggcuggaccuucggcgccggcgcagcccugcagauccccuucgccaugcagauggccuaccgguucaacggcaucggcgugacccagaacgugcuguacgagaaccagaagcugaucgccaaccaguucaacagcgccaucggcaagauccaggacagccugagcagcaccgccagcgcccugggcaagcugcaggacguggugaaccagaacgcucaggcccugaacacccuggugaagcagcugagcagcaacuucggcgccaucagcucagugcugaaugacauccugagcaggcuggacaagguggaggccgaggugcagaucgaccggcugaucaccggccggcugcagagccugcagaccuacgugacccagcagcugauccgggccgccgagauccgggccagcgccaaccuggcagccaccaagaugagcgagugcgugcugggccagagcaagcggguggacuuuugcggcaagggcuaccaccugaugagcuucccccagagcgccccacacggcgugguguuccuccacgucacauacgugcccgcccaggagaagaacuucaccaccgcccccgccauuugccacgacggcaaggcucacuucccccgggagggaguguucgugagcaacggcacccacugguucgugacccagcggaacuucuacgagccccagaucaucaccaccgacaacaccuucgugagcggcaacugcgacguggugaucggcaucgugaacaacaccguguacgacccccugcagccugagcuggacagcuucaaggaggagcuggacaaguacuucaagaaccacaccagccccgacguggaucugggcgacaucagcggcaucaacgccagcguggugaacauccagaaggagaucgaccggcugaacgagguggccaagaaccugaacgagagccugaucgaccugcaggagcugggcaaguacgagcaguacaucaaguggcccugguacaucuggcugggcuucaucgccggccugaucgccaucgugauggugaccaucaugcugugcugcaugaccagcugcuguagcugccugaagggcugcugcagcugcggcagcugcugcaaguucgacgaggacgacagcgagccagugcugaagggcgugaagcugcacuacaccugauaauaggcuggagccucgguggccuagcuucuugccccuugggccuccccccagccccuccuccccuuccugcacccguacccccguggucuuugaauaaagucugagugggcggcaaaaaaaaaaaaaaaaaaaaaaaaaaaaaaaaaaaaaaaaaaaaaaaaaaaaaaaaaaaaaaaaaaaaaaaaaaaaaaaaaaaaaaaaaaaaaaaaaaaa

SEQ ID NO: 26119 - RNA, 4095 nt, Artificial Sequence
  SARS-CoV-2/Wuhan/WIV05/2019__EPI_ISL_402128 spike protein mRNA gc (1-1273)(L18F_T20N_P26S_D138Y_R190S_K417T_E484K_N501Y_D614G_H655Y _T1027I)
gggaaauaagagagaaaagaagaguaagaagaaauauaagaccccggcgccgccaccauguucguguuccuggugcugcugccccuggugagcagccagugcgugaacuucaccaaccggacccagcugcccagcgccuacaccaacagcuucacccggggcguguacuacccugacaagguguuccggagcagcgugcugcacagcacccaggaccuguuccugcccuucuucagcaacgugaccugguuccacgccauccacgugagcggcaccaacggcaccaagcgguucgacaaccccgugcugccauucaacgacggcguguacuucgccagcaccgagaagucaaacaucauccggggcuggaucuuuggcaccacccuggacagcaagacccagagccugcugaucgugaacaacgccacaaacguggugaucaaggugugcgaguuccaguucugcaacuaccccuuccugggcguguacuaccacaagaacaacaagagcuggauggagagcgaguuccgggucuacagcagcgcuaauaacugcaccuucgaguacgugagccagcccuuccugauggaccuggagggcaagcagggcaacuucaagaaccucagcgaguucguguucaagaacaucgacggcuacuucaagaucuacagcaagcacacccccaucaaccuggugcgggaucugccccagggauucagcgcccuggagccccugguggaccugccuaucggcaucaacaucacccgguuccagacccugcuggcccugcacaggagcuaccugacccccggcgacagcagcagcggcuggaccgccggcgccgccgcauacuacgugggcuaccugcagccccggaccuuccugcugaaguacaacgagaacggcaccaucaccgacgccguggacugcgcccuggacccacugagcgagaccaagugcacccuaaagagcuucaccguggagaagggcaucuaccagaccagcaacuuccgggugcagcccaccgagagcaucgugcgguuccccaacauuacuaaccugugucccuucggcgagguguucaacgccacccgguucgccagcguguacgccuggaaccggaagcggaucagcaacugcguggccgacuacagcgugcuguacaacagcgccagcuucagcaccuucaagugcuacggcgugagccccaccaagcugaacgaccugugcuucaccaacguguacgcugacagcuucgugauccggggcgacgaggugcggcagaucgccccuggccagaccggcaccaucgccgacuacaacuacaagcugcccgacgacuucaccggcugcgugaucgccuggaacagcaacaaccuggacagcaaggugggcggcaacuacaacuaccuguaccggcuguuccguaagagcaaccugaagcccuuugagcgggacaucagcaccgagaucuaccaggccggcagcaccccaugcaacggugugaagggcuucaacugcuacuucccccugcagagcuacggcuuccagcccaccuacggcgugggcuaccagcccuaccgggugguggugcugagcuucgagcugcugcacgcccccgccaccgugugcggccccaaaaagagcaccaaccuggugaagaacaagugcgugaacuucaauuucaacggccugaccggcaccggcgugcugaccgagagcaacaagaaguuccugccuuuccagcaguucggccgggacaucgccgauaccaccgacgcagugcgggacccccagacccuggagauccuggacaucacccccugcagcuucggcggcgugagcgucaucaccccaggcacaaacaccagcaaccagguggccgugcuguaccagggagugaacugcaccgaggugcccguggccauccacgccgaccagcugacccccaccuggcggguguacuccaccggcagcaacguguuccagacccgggccggcugccugaucggcgccgaguacgugaacaacagcuacgagugcgacauccccaucggcgcuggcaucugcgccagcuaccagacccagaccaacagcccccggcgggcccggagcguggccagccagagcaucaucgccuacaccaugagccugggcgccgagaacagcguggccuacagcaacaacagcaucgcgauccccaccaacuucaccaucagcgugaccaccgagauauuaccugugagcaugaccaagaccagcguggacuguaccauguacaucugcggcgacagcaccgagugcagcaaccugcugcugcaguacggcagcuucugcacccagcugaaccgggcccugaccggcaucgccguggagcaggacaagaacacccaagagguguucgcccaggugaagcagaucuacaagacuccacccaucaaggacuucggcggcuucaacuucagccagauccugcccgaccccagcaagcccagcaagcggagcuucaucgaggaccugcuguucaacaaggugacccuggccgacgccggcuucaucaagcaguacggcgacugccugggggacaucgccgcucgggaucugaucugcgcccagaaguucaacggccugaccgugcugccuccccugcugaccgacgagaugaucgcccaguacaccagcgcccugcuggccggcaccaucaccagcggcuggaccuucggcgccggcgcagcccuucagauccccuucgccaugcagauggccuaccgguucaacggcaucggcgugacccagaacgugcuguacgagaaccagaagcugaucgccaaccaguucaacagcgccaucggcaagauccaggacagccugagcagcaccgccagcgcccugggcaagcugcaggacguggugaaccagaacgcucaggcccugaacacccuggugaagcagcugagcucaaacuuuggcgccaucagcagcgugcugaaugacauccugagccggcuggacaagguggaggccgaggugcagaucgacaggcugaucaccggccggcugcagagccugcagaccuacgugacccagcagcugauccgggccgccgagauccgggccagcgccaaccuggcagccauuaagaugagcgagugcgugcugggccagagcaagcggguggacuucugcggcaagggcuaccaccugaugagcuucccccagagcgcuccccacggcgugguguuccugcacgucaccuacgugccagcccaggagaagaacuucacaaccgcccccgccaucugccacgacggcaaggcccacuucccccgggagggaguguucgugagcaacggcacccacugguucgugacccagcggaacuucuacgagccccagaucaucaccaccgacaacaccuucgugagcggcaacugcgacguggugaucggcaucgugaacaacaccguguacgacccccuccagcccgagcuggacagcuucaaggaggagcuggacaaguacuucaagaaccacaccagcccugacguggaccugggcgauaucagcggcaucaacgccagcguggugaacauccagaaggagaucgaccggcugaacgagguggccaagaaccugaacgagagccugaucgaccugcaggagcugggcaaguacgagcaguacaucaaguggcccugguacaucuggcugggcuucaucgccggccugaucgccaucgugauggugaccaucaugcugugcugcaugaccagcugcuguagcugccugaagggcugcugcagcugcggcagcugcugcaaguucgacgaggacgacagcgagcccgugcugaagggcgugaagcugcacuacaccugauaauaggcuggagccucgguggccuagcuucuugccccuugggccuccccccagccccuccuccccuuccugcacccguacccccguggucuuugaauaaagucugagugggcggcaaaaaaaaaaaaaaaaaaaaaaaaaaaaaaaaaaaaaaaaaaaaaaaaaaaaaaaaaaaaaaaaaaaaaaaaaaaaaaaaaaaaaaaaaaaaaaaaaaaa

SEQ ID NO: 26120 - RNA, 4095 nt, Artificial Sequence
  SARS-CoV-2/Wuhan/WIV05/2019__EPI_ISL_402128 spike protein mRNA gc (1-1273)(S13I_W152C_L452R_D614G)
gggaaauaagagagaaaagaagaguaagaagaaauauaagaccccggcgccgccaccauguucguguuccuggugcugcugccccuggugagcauccagugcgugaaccugaccacccggacccagcugcccccugccuacaccaacagcuucacccggggcguguacuaccccgacaagguguuccggagcagcgugcugcacagcacccaggaccuguuccugcccuucuucagcaacgugaccugguuccacgccauccacgugagcggcaccaacggcaccaagcgguucgacaacccagugcugcccuucaacgacggcguguacuucgccagcaccgagaagucaaacaucauccggggcuggaucuucggcaccacccuggacagcaagacacagagccugcugaucgugaacaacgccaccaacguggugaucaaggugugcgaguuucaguucugcaacgaccccuuccugggcguguacuaccacaagaacaacaagagcugcauggagagcgaguuccgggucuacagcagcgcuaacaauugcaccuucgaguacgugagccagcccuuccugauggaccucgagggcaagcagggcaacuucaagaaccugcgggaguucguguucaagaacaucgauggcuacuucaagaucuacagcaagcacacccccaucaaccuggugcgggaccugccccagggauucagcgcccuggagccucugguggaccugcccaucggcaucaacaucaccagguuccagacccugcuggcccugcaccggagcuaccugacccccggcgacagcagcagcggcuggaccgccggcgccgccgcauacuacgugggcuaccugcagccacggaccuuccugcugaaguacaacgagaacggcaccaucaccgacgccguggacugcgcccuggacccccugagcgagaccaaguguacccuaaagagcuucaccguggagaagggcaucuaccagaccagcaacuuccgggugcagcccacugagagcauugugcgguuccccaacaucaccaaccugugccccuucggcgagguguucaacgccacccgguucgccagcguguacgccuggaaccggaagcggaucagcaacugcguggccgacuacagcgugcuguacaacagcgccagcuucagcaccuucaagugcuacggcgugagcccuaccaagcugaacgaccugugcuucaccaacguguacgcugacagcuucgugauccggggcgacgaggugcggcagaucgcccccggccagaccggcaagaucgccgacuacaacuacaagcugcccgacgacuucaccggcugcgugaucgccuggaacagcaacaaccuggacagcaaggugggcggcaacuacaacuaccgguaccggcuguuccguaagagcaaccugaagccauucgagcgggacaucagcaccgagaucuaccaggccggcagcacccccugcaacgguguggagggcuuuaacugcuacuucccccugcagagcuacggcuuccagcccaccaacggcgugggcuaccagcccuaccgggugguggugcugagcuucgagcugcugcacgcccccgccaccgugugcggcccuaaaaagagcaccaaccuggugaagaacaagugcgugaacuucaauuucaacggccugaccggcaccggcgugcugaccgagagcaacaagaaguuccugcccuuccagcaguucggccgggauaucgccgacaccaccgacgcagugcgggacccccagacccuggagauccuggacaucaccccaugcagcuucggcggcgugagcgucaucacccccggcacaaacaccagcaaccagguggccgugcuguaccagggagugaacugcaccgaggugcccguggccauccacgccgaccagcugacccccaccuggcggguguacagcaccggcagcaacguguuccagacccgggccggcugccugaucggcgccgagcacgugaacaacagcuacgagugcgacauccccaucggcgcuggcaucugugccuccuaccagacccagaccaacagcccccggcgggcccggagcguggccagccagagcaucaucgccuacaccaugagccugggcgccgagaacagcguggccuacagcaacaacagcaucgcgaucccuaccaacuucaccauaagcgugaccaccgagaucuuacccgugagcaugaccaagaccagcguggacugcaccauguacaucugcggcgacagcaccgagugcagcaaccugcugcugcaguacggcagcuucugcacccagcugaaccgggcccugaccggcaucgccguggagcaggacaagaacacccaagagguguucgcccaggugaagcagaucuacaagacucccccaaucaaggacuucggcggcuucaacuucagccagauccugcccgaccccagcaagcccagcaagcggagcuucaucgaggaccugcuguucaacaaggugacccuggccgacgccggcuucaucaagcaguacggcgacugccugggggauaucgccgcucgggaccugaucugcgcccagaaguucaacggccugaccgugcugcccccucugcugaccgacgagaugaucgcccaguacaccagcgcccugcuggccggcaccaucaccagcggcuggaccuucggcgccggcgcagcccuucagauccccuucgccaugcagauggccuacagguucaacggcaucggcgugacccagaacgugcuguacgagaaccagaagcugaucgccaaccaguucaacagcgccaucggcaagauccaggacagccugagcagcaccgccagcgcccugggcaagcugcaggacguggugaaccagaacgcucaggcccugaacacccuggugaagcagcugagcagcaacuucggcgccaucagcagcgugcugaaugacauccugucacggcuggacaagguggaggccgaggugcagaucgaccggcugaucaccggccggcugcagagccugcagaccuacgugacccagcagcugauccgggccgccgagauucgggccagcgccaaccuggcagccaccaagaugagcgagugcgugcugggccagagcaagcggguggacuuuugcggcaagggcuaccaccugaugagcuucccccagagcgccccacacggcgugguguuccugcacgucacauacgugcccgcccaggagaagaacuucaccaccgcccccgccaucugccacgacggcaaggcucacuucccccgggagggaguguucgugagcaacggcacccacugguucgugacccagcggaacuucuacgagccccagaucaucaccaccgacaacaccuucgugagcggcaacugcgacguggugaucggcaucgugaacaacaccguguacgacccccuccagccugagcuggacagcuucaaggaggagcuggacaaguacuucaagaaccacaccagccccgacguggaucugggcgacaucagcggcaucaacgccagcguggugaacauccagaaggagaucgaccggcugaacgagguggccaagaaccugaacgagagccugaucgaccugcaggagcugggcaaguacgagcaguacaucaaguggcccugguacaucuggcugggcuucaucgccggccugaucgccaucgugauggugaccaucaugcugugcugcaugaccagcuguugcagcugccugaagggcugcugcagcugcggcagcugcugcaaguucgacgaggacgacagcgagccagugcugaagggcgugaagcugcacuacaccugauaauaggcuggagccucgguggccuagcuucuugccccuugggccuccccccagccccuccuccccuuccugcacccguacccccguggucuuugaauaaagucugagugggcggcaaaaaaaaaaaaaaaaaaaaaaaaaaaaaaaaaaaaaaaaaaaaaaaaaaaaaaaaaaaaaaaaaaaaaaaaaaaaaaaaaaaaaaaaaaaaaaaaaaaa

SEQ ID NO: 26121 - RNA, 4095 nt, Artificial Sequence
  SARS-CoV-2/Wuhan/WIV05/2019__EPI_ISL_402128 spike protein mRNA gc mod (1-1273)
gggaaauaagagagaaaagaagaguaagaagaaauauaagaccccggcgccgccaccauguucguguuucuggugcugcugccccugguguccagccagugugugaaccugaccaccagaacacagcugccuccagccuacaccaacagcuucaccagaggcguguacuaccccgacaagguguucagauccagcgugcugcacucuacccaggaccuguuccugccuuucuucagcaacgugaccugguuccacgccauccacguguccggcaccaauggcaccaagagauucgacaaccccgugcugcccuucaacgacgggguguacuuugccagcaccgagaaguccaacaucaucagaggcuggaucuucggcaccacacuggacagcaagacccagagccugcugaucgugaacaacgccaccaacguggucaucaaagugugcgaguuccaguucugcaacgaccccuuccugggcgucuacuaccacaagaacaacaagagcuggauggaaagcgaguuccggguguacagcagcgccaacaacugcaccuucgaguacgugucccagccuuuccugauggaccuggaaggcaagcagggcaacuucaagaaccugcgcgaguucguguucaagaacaucgacggcuacuucaaaaucuacagcaagcacaccccuaucaaccucgugcgggaucugccucagggcuucucugcucuggaaccccugguggaucugcccaucggcaucaacaucacccgguuucagacacugcuggcccugcacagaagcuaccugacaccuggcgauagcagcagcggauggacagcuggugccgccgcuuacuaugugggcuaccugcagccuagaaccuuccugcugaaguacaacgagaacggcaccaucaccgacgccguggauugugcucuggauccucugagcgagacaaagugcacccugaaguccuucaccguggaaaagggcaucuaccagaccagcaacuuccgggugcagcccaccgaauccaucgugcgguuccccaauaucaccaaucugugccccuucggcgagguguucaaugccaccagauucgccucuguguacgccuggaaccggaagcggaucagcaauugcguggccgacuacuccgugcuguacaacuccgccagcuucagcaccuucaagugcuacggcguguccccuaccaagcugaacgaccugugcuucacaaacguguacgccgacagcuucgugauccggggagaugaagugcggcagauugccccuggacagacaggcaagaucgccgacuacaacuacaagcugcccgacgacuucaccggcugugugauugccuggaacagcaacaaccuggacuccaaagucggcggcaacuacaauuaccuguaccggcuguuccggaaguccaaucugaagcccuucgagcgggacaucagcaccgaaaucuaucaggccggcagcaccccuugcaacggcguggaaggcuucaacugcuacuucccacugcaguccuacggcuuucagcccacaaauggcgugggcuaucagcccuacagagugguggugcugagcuucgaacugcugcaugcuccugccacagugugcggcccuaagaaaagcaccaaucucgugaagaacaaaugcgugaacuucaacuucaacggccugaccggcaccggcgugcugacagagagcaacaagaaguuccugccauuccagcaguuuggccgggauaucgccgauaccacagacgccguuagagauccccagacacuggaaauccuggacaucaccccaugcagcuucggcggagugucugugaucaccccuggcaccaacaccagcaaucagguggcagugcuguaccaggacgugaacuguaccgaagugcccguggccauucacgccgaucagcugacaccuacauggcggguguacuccaccggcagcaauguguuucagaccagagccggcugucugaucggagccgagcacgugaacaauagcuacgagugcgacauccccaucggcgcuggcaucugugccagcuaccagacacagacaaacagccccagacgggcuagaagcguggccagccagagcaucauugccuacacaaugucucugggcgccgagaacagcguggccuacuccaacaacucuaucgcuauccccaccaacuucaccaucagcgugaccaccgagauccugccuguguccaugaccaagaccagcguggacugcaccauguacaucugcggcgauuccaccgagugcuccaaccugcugcugcaguacggcagcuucugcacccagcugaauagagcccugacagggaucgccguggaacaggacaagaacacccaagagguguucgcccaagugaagcaaaucuacaagaccccuccuaucaaggacuucggcggcuucaauuucagccagauucugcccgauccuagcaagcccagcaagcggagcuucaucgaggaccugcuguucaacaaagugacacuggccgacgccggcuucaucaagcaguauggcgauugucugggcgacauugccgccagggaucugauuugcgcccagaaguuuaacggacugacagugcugccuccucugcugaccgaugagaugaucgcccaguacacaucugcccugcuggccggcacaaucacaagcggcuggacauuuggagcuggcgccgcucugcagauccccuuugcuaugcagauggccuaccgguucaacggcaucggagugacccagaaugugcuguacgagaaccagaagcugaucgccaaccaguucaacagcgccaucggcaagauccaggacagccugagcagcacagcaagcgcccugggaaagcugcaggacguggucaaccagaaugcccaggcacugaacacccuggucaagcagcuguccuccaacuucggcgccaucagcucugugcugaacgauauccugagcagacuggacaaggucgaggccgaggugcagaucgacagacugaucacaggcagacugcagagccuccagacauacgugacccagcagcugaucagagccgccgagauuagagccucugccaaucuggccgccaccaagaugucugagugugugcugggccagagcaagagaguggacuuuugcggcaagggcuaccaccugaugagcuucccucagucugccccucacggcgugguguuucugcacgugacauaugugcccgcucaagagaagaauuucaccaccgcuccagccaucugccacgacggcaaagcccacuuuccuagagaaggcguguucguguccaacggcacccauugguucgugacacagcggaacuucuacgagccccagaucaucaccaccgacaacaccuucgugucuggcaacugcgacguugugaucggcauugugaacaauaccguguacgacccucugcagcccgagcuggacagcuucaaagaggaacuggacaaguacuuuaagaaccacacaagccccgacguggaccugggcgauaucagcggaaucaaugccagcgucgugaacauccagaaagagaucgaccggcugaacgagguggccaagaaucugaacgagagccugaucgaccugcaagaacuggggaaguacgagcaguacaucaaguggcccugguacaucuggcugggcuuuaucgccggacugauugccaucgugauggucacaaucaugcuguguugcaugaccagcugcuguagcugccugaagggcuguuguagcuguggcagcugcugcaaguucgacgaggacgauucugagcccgugcugaagggcgugaaacugcacuacaccugauaauaggcuggagccucgguggccuagcuucuugccccuugggccuccccccagccccuccuccccuuccugcacccguacccccguggucuuugaauaaagucugagugggcggcaaaaaaaaaaaaaaaaaaaaaaaaaaaaaaaaaaaaaaaaaaaaaaaaaaaaaaaaaaaaaaaaaaaaaaaaaaaaaaaaaaaaaaaaaaaaaaaaaaaa

SEQ ID NO: 26122 - RNA, 4095 nt, Artificial Sequence
  SARS-CoV-2/Wuhan/WIV05/2019__EPI_ISL_402128 spike protein mRNA gc mod (1-1273)(D614G)
gggaaauaagagagaaaagaagaguaagaagaaauauaagaccccggcgccgccaccauguucguguuucuggugcugcugccccugguguccagccagugugugaaccugaccaccagaacacagcugccuccagccuacaccaacagcuucaccagaggcguguacuaccccgacaagguguucagauccagcgugcugcacucuacccaggaccuguuccugccuuucuucagcaacgugaccugguuccacgccauccacguguccggcaccaauggcaccaagagauucgacaaccccgugcugcccuucaacgacgggguguacuuugccagcaccgagaaguccaacaucaucagaggcuggaucuucggcaccacacuggacagcaagacccagagccugcugaucgugaacaacgccaccaacguggucaucaaagugugcgaguuccaguucugcaacgaccccuuccugggcgucuacuaccacaagaacaacaagagcuggauggaaagcgaguuccggguguacagcagcgccaacaacugcaccuucgaguacgugucccagccuuuccugauggaccuggaaggcaagcagggcaacuucaagaaccugcgcgaguucguguucaagaacaucgacggcuacuucaaaaucuacagcaagcacaccccuaucaaccucgugcgggaucugccucagggcuucucugcucuggaaccccugguggaucugcccaucggcaucaacaucacccgguuucagacacugcuggcccugcacagaagcuaccugacaccuggcgauagcagcagcggauggacagcuggugccgccgcuuacuaugugggcuaccugcagccuagaaccuuccugcugaaguacaacgagaacggcaccaucaccgacgccguggauugugcucuggauccucugagcgagacaaagugcacccugaaguccuucaccguggaaaagggcaucuaccagaccagcaacuuccgggugcagcccaccgaauccaucgugcgguuccccaauaucaccaaucugugccccuucggcgagguguucaaugccaccagauucgccucuguguacgccuggaaccggaagcggaucagcaauugcguggccgacuacuccgugcuguacaacuccgccagcuucagcaccuucaagugcuacggcguguccccuaccaagcugaacgaccugugcuucacaaacguguacgccgacagcuucgugauccggggagaugaagugcggcagauugccccuggacagacaggcaagaucgccgacuacaacuacaagcugcccgacgacuucaccggcugugugauugccuggaacagcaacaaccuggacuccaaagucggcggcaacuacaauuaccuguaccggcuguuccggaaguccaaucugaagcccuucgagcgggacaucagcaccgaaaucuaucaggccggcagcaccccuugcaacggcguggaaggcuucaacugcuacuucccacugcaguccuacggcuuucagcccacaaauggcgugggcuaucagcccuacagagugguggugcugagcuucgaacugcugcaugcuccugccacagugugcggcccuaagaaaagcaccaaucucgugaagaacaaaugcgugaacuucaacuucaacggccugaccggcaccggcgugcugacagagagcaacaagaaguuccugccauuccagcaguuuggccgggauaucgccgauaccacagacgccguuagagauccccagacacuggaaauccuggacaucaccccaugcagcuucggcggagugucugugaucaccccuggcaccaacaccagcaaucagguggcagugcuguaccagggcgugaacuguaccgaagugcccguggccauucacgccgaucagcugacaccuacauggcggguguacuccaccggcagcaauguguuucagaccagagccggcugucugaucggagccgagcacgugaacaauagcuacgagugcgacauccccaucggcgcuggcaucugugccagcuaccagacacagacaaacagccccagacgggcuagaagcguggccagccagagcaucauugccuacacaaugucucugggcgccgagaacagcguggccuacuccaacaacucuaucgcuauccccaccaacuucaccaucagcgugaccaccgagauccugccuguguccaugaccaagaccagcguggacugcaccauguacaucugcggcgauuccaccgagugcuccaaccugcugcugcaguacggcagcuucugcacccagcugaauagagcccugacagggaucgccguggaacaggacaagaacacccaagagguguucgcccaagugaagcaaaucuacaagaccccuccuaucaaggacuucggcggcuucaauuucagccagauucugcccgauccuagcaagcccagcaagcggagcuucaucgaggaccugcuguucaacaaagugacacuggccgacgccggcuucaucaagcaguauggcgauugucugggcgacauugccgccagggaucugauuugcgcccagaaguuuaacggacugacagugcugccuccucugcugaccgaugagaugaucgcccaguacacaucugcccugcuggccggcacaaucacaagcggcuggacauuuggagcuggcgccgcucugcagauccccuuugcuaugcagauggccuaccgguucaacggcaucggagugacccagaaugugcuguacgagaaccagaagcugaucgccaaccaguucaacagcgccaucggcaagauccaggacagccugagcagcacagcaagcgcccugggaaagcugcaggacguggucaaccagaaugcccaggcacugaacacccuggucaagcagcuguccuccaacuucggcgccaucagcucugugcugaacgauauccugagcagacuggacaaggucgaggccgaggugcagaucgacagacugaucacaggcagacugcagagccuccagacauacgugacccagcagcugaucagagccgccgagauuagagccucugccaaucuggccgccaccaagaugucugagugugugcugggccagagcaagagaguggacuuuugcggcaagggcuaccaccugaugagcuucccucagucugccccucacggcgugguguuucugcacgugacauaugugcccgcucaagagaagaauuucaccaccgcuccagccaucugccacgacggcaaagcccacuuuccuagagaaggcguguucguguccaacggcacccauugguucgugacacagcggaacuucuacgagccccagaucaucaccaccgacaacaccuucgugucuggcaacugcgacguugugaucggcauugugaacaauaccguguacgacccucugcagcccgagcuggacagcuucaaagaggaacuggacaaguacuuuaagaaccacacaagccccgacguggaccugggcgauaucagcggaaucaaugccagcgucgugaacauccagaaagagaucgaccggcugaacgagguggccaagaaucugaacgagagccugaucgaccugcaagaacuggggaaguacgagcaguacaucaaguggcccugguacaucuggcugggcuuuaucgccggacugauugccaucgugauggucacaaucaugcuguguugcaugaccagcugcuguagcugccugaagggcuguuguagcuguggcagcugcugcaaguucgacgaggacgauucugagcccgugcugaagggcgugaaacugcacuacaccugauaauaggcuggagccucgguggccuagcuucuugccccuugggccuccccccagccccuccuccccuuccugcacccguacccccguggucuuugaauaaagucugagugggcggcaaaaaaaaaaaaaaaaaaaaaaaaaaaaaaaaaaaaaaaaaaaaaaaaaaaaaaaaaaaaaaaaaaaaaaaaaaaaaaaaaaaaaaaaaaaaaaaaaaaa

SEQ ID NO: 26123 - RNA, 4095 nt, Artificial Sequence
  SARS-CoV-2/Wuhan/WIV05/2019__EPI_ISL_402128 spike protein mRNA gc mod (1-1273)(A222V_D614G)
gggaaauaagagagaaaagaagaguaagaagaaauauaagaccccggcgccgccaccauguucguguuucuggugcugcugccccugguguccagccagugugugaaccugaccaccagaacacagcugccuccagccuacaccaacagcuucaccagaggcguguacuaccccgacaagguguucagauccagcgugcugcacucuacccaggaccuguuccugccuuucuucagcaacgugaccugguuccacgccauccacguguccggcaccaauggcaccaagagauucgacaaccccgugcugcccuucaacgacgggguguacuuugccagcaccgagaaguccaacaucaucagaggcuggaucuucggcaccacacuggacagcaagacccagagccugcugaucgugaacaacgccaccaacguggucaucaaagugugcgaguuccaguucugcaacgaccccuuccugggcgucuacuaccacaagaacaacaagagcuggauggaaagcgaguuccggguguacagcagcgccaacaacugcaccuucgaguacgugucccagccuuuccugauggaccuggaaggcaagcagggcaacuucaagaaccugcgcgaguucguguucaagaacaucgacggcuacuucaaaaucuacagcaagcacaccccuaucaaccucgugcgggaucugccucagggcuucucugugcuggaaccccugguggaucugcccaucggcaucaacaucacccgguuucagacacugcuggcccugcacagaagcuaccugacaccuggcgauagcagcagcggauggacagcuggugccgccgcuuacuaugugggcuaccugcagccuagaaccuuccugcugaaguacaacgagaacggcaccaucaccgacgccguggauugugcucuggauccucugagcgagacaaagugcacccugaaguccuucaccguggaaaagggcaucuaccagaccagcaacuuccgggugcagcccaccgaauccaucgugcgguuccccaauaucaccaaucugugccccuucggcgagguguucaaugccaccagauucgccucuguguacgccuggaaccggaagcggaucagcaauugcguggccgacuacuccgugcuguacaacuccgccagcuucagcaccuucaagugcuacggcguguccccuaccaagcugaacgaccugugcuucacaaacguguacgccgacagcuucgugauccggggagaugaagugcggcagauugccccuggacagacaggcaagaucgccgacuacaacuacaagcugcccgacgacuucaccggcugugugauugccuggaacagcaacaaccuggacuccaaagucggcggcaacuacaauuaccuguaccggcuguuccggaaguccaaucugaagcccuucgagcgggacaucagcaccgaaaucuaucaggccggcagcaccccuugcaacggcguggaaggcuucaacugcuacuucccacugcaguccuacggcuuucagcccacaaauggcgugggcuaucagcccuacagagugguggugcugagcuucgaacugcugcaugcuccugccacagugugcggcccuaagaaaagcaccaaucucgugaagaacaaaugcgugaacuucaacuucaacggccugaccggcaccggcgugcugacagagagcaacaagaaguuccugccauuccagcaguuuggccgggauaucgccgauaccacagacgccguuagagauccccagacacuggaaauccuggacaucaccccaugcagcuucggcggagugucugugaucaccccuggcaccaacaccagcaaucagguggcagugcuguaccagggcgugaacuguaccgaagugcccguggccauucacgccgaucagcugacaccuacauggcggguguacuccaccggcagcaauguguuucagaccagagccggcugucugaucggagccgagcacgugaacaauagcuacgagugcgacauccccaucggcgcuggcaucugugccagcuaccagacacagacaaacagccccagacgggcuagaagcguggccagccagagcaucauugccuacacaaugucucugggcgccgagaacagcguggccuacuccaacaacucuaucgcuauccccaccaacuucaccaucagcgugaccaccgagauccugccuguguccaugaccaagaccagcguggacugcaccauguacaucugcggcgauuccaccgagugcuccaaccugcugcugcaguacggcagcuucugcacccagcugaauagagcccugacagggaucgccguggaacaggacaagaacacccaagagguguucgcccaagugaagcaaaucuacaagaccccuccuaucaaggacuucggcggcuucaauuucagccagauucugcccgauccuagcaagcccagcaagcggagcuucaucgaggaccugcuguucaacaaagugacacuggccgacgccggcuucaucaagcaguauggcgauugucugggcgacauugccgccagggaucugauuugcgcccagaaguuuaacggacugacagugcugccuccucugcugaccgaugagaugaucgcccaguacacaucugcccugcuggccggcacaaucacaagcggcuggacauuuggagcuggcgccgcucugcagauccccuuugcuaugcagauggccuaccgguucaacggcaucggagugacccagaaugugcuguacgagaaccagaagcugaucgccaaccaguucaacagcgccaucggcaagauccaggacagccugagcagcacagcaagcgcccugggaaagcugcaggacguggucaaccagaaugcccaggcacugaacacccuggucaagcagcuguccuccaacuucggcgccaucagcucugugcugaacgauauccugagcagacuggacaaggucgaggccgaggugcagaucgacagacugaucacaggcagacugcagagccuccagacauacgugacccagcagcugaucagagccgccgagauuagagccucugccaaucuggccgccaccaagaugucugagugugugcugggccagagcaagagaguggacuuuugcggcaagggcuaccaccugaugagcuucccucagucugccccucacggcgugguguuucugcacgugacauaugugcccgcucaagagaagaauuucaccaccgcuccagccaucugccacgacggcaaagcccacuuuccuagagaaggcguguucguguccaacggcacccauugguucgugacacagcggaacuucuacgagccccagaucaucaccaccgacaacaccuucgugucuggcaacugcgacguugugaucggcauugugaacaauaccguguacgacccucugcagcccgagcuggacagcuucaaagaggaacuggacaaguacuuuaagaaccacacaagccccgacguggaccugggcgauaucagcggaaucaaugccagcgucgugaacauccagaaagagaucgaccggcugaacgagguggccaagaaucugaacgagagccugaucgaccugcaagaacuggggaaguacgagcaguacaucaaguggcccugguacaucuggcugggcuuuaucgccggacugauugccaucgugauggucacaaucaugcuguguugcaugaccagcugcuguagcugccugaagggcuguuguagcuguggcagcugcugcaaguucgacgaggacgauucugagcccgugcugaagggcgugaaacugcacuacaccugauaauaggcuggagccucgguggccuagcuucuugccccuugggccuccccccagccccuccuccccuuccugcacccguacccccguggucuuugaauaaagucugagugggcggcaaaaaaaaaaaaaaaaaaaaaaaaaaaaaaaaaaaaaaaaaaaaaaaaaaaaaaaaaaaaaaaaaaaaaaaaaaaaaaaaaaaaaaaaaaaaaaaaaaaa

SEQ ID NO: 26124 - RNA, 4095 nt, Artificial Sequence
  SARS-CoV-2/Wuhan/WIV05/2019__EPI_ISL_402128 spike protein mRNA gc mod (1-1273)(N439K_D614G)
gggaaauaagagagaaaagaagaguaagaagaaauauaagaccccggcgccgccaccauguucguguuucuggugcugcugccccugguguccagccagugugugaaccugaccaccagaacacagcugccuccagccuacaccaacagcuucaccagaggcguguacuaccccgacaagguguucagauccagcgugcugcacucuacccaggaccuguuccugccuuucuucagcaacgugaccugguuccacgccauccacguguccggcaccaauggcaccaagagauucgacaaccccgugcugcccuucaacgacgggguguacuuugccagcaccgagaaguccaacaucaucagaggcuggaucuucggcaccacacuggacagcaagacccagagccugcugaucgugaacaacgccaccaacguggucaucaaagugugcgaguuccaguucugcaacgaccccuuccugggcgucuacuaccacaagaacaacaagagcuggauggaaagcgaguuccggguguacagcagcgccaacaacugcaccuucgaguacgugucccagccuuuccugauggaccuggaaggcaagcagggcaacuucaagaaccugcgcgaguucguguucaagaacaucgacggcuacuucaaaaucuacagcaagcacaccccuaucaaccucgugcgggaucugccucagggcuucucugcucuggaaccccugguggaucugcccaucggcaucaacaucacccgguuucagacacugcuggcccugcacagaagcuaccugacaccuggcgauagcagcagcggauggacagcuggugccgccgcuuacuaugugggcuaccugcagccuagaaccuuccugcugaaguacaacgagaacggcaccaucaccgacgccguggauugugcucuggauccucugagcgagacaaagugcacccugaaguccuucaccguggaaaagggcaucuaccagaccagcaacuuccgggugcagcccaccgaauccaucgugcgguuccccaauaucaccaaucugugccccuucggcgagguguucaaugccaccagauucgccucuguguacgccuggaaccggaagcggaucagcaauugcguggccgacuacuccgugcuguacaacuccgccagcuucagcaccuucaagugcuacggcguguccccuaccaagcugaacgaccugugcuucacaaacguguacgccgacagcuucgugauccggggagaugaagugcggcagauugccccuggacagacaggcaagaucgccgacuacaacuacaagcugcccgacgacuucaccggcugugugauugccuggaacagcaagaaccuggacuccaaagucggcggcaacuacaauuaccuguaccggcuguuccggaaguccaaucugaagcccuucgagcgggacaucagcaccgaaaucuaucaggccggcagcaccccuugcaacggcguggaaggcuucaacugcuacuucccacugcaguccuacggcuuucagcccacaaauggcgugggcuaucagcccuacagagugguggugcugagcuucgaacugcugcaugcuccugccacagugugcggcccuaagaaaagcaccaaucucgugaagaacaaaugcgugaacuucaacuucaacggccugaccggcaccggcgugcugacagagagcaacaagaaguuccugccauuccagcaguuuggccgggauaucgccgauaccacagacgccguuagagauccccagacacuggaaauccuggacaucaccccaugcagcuucggcggagugucugugaucaccccuggcaccaacaccagcaaucagguggcagugcuguaccagggcgugaacuguaccgaagugcccguggccauucacgccgaucagcugacaccuacauggcggguguacuccaccggcagcaauguguuucagaccagagccggcugucugaucggagccgagcacgugaacaauagcuacgagugcgacauccccaucggcgcuggcaucugugccagcuaccagacacagacaaacagccccagacgggcuagaagcguggccagccagagcaucauugccuacacaaugucucugggcgccgagaacagcguggccuacuccaacaacucuaucgcuauccccaccaacuucaccaucagcgugaccaccgagauccugccuguguccaugaccaagaccagcguggacugcaccauguacaucugcggcgauuccaccgagugcuccaaccugcugcugcaguacggcagcuucugcacccagcugaauagagcccugacagggaucgccguggaacaggacaagaacacccaagagguguucgcccaagugaagcaaaucuacaagaccccuccuaucaaggacuucggcggcuucaauuucagccagauucugcccgauccuagcaagcccagcaagcggagcuucaucgaggaccugcuguucaacaaagugacacuggccgacgccggcuucaucaagcaguauggcgauugucugggcgacauugccgccagggaucugauuugcgcccagaaguuuaacggacugacagugcugccuccucugcugaccgaugagaugaucgcccaguacacaucugcccugcuggccggcacaaucacaagcggcuggacauuuggagcuggcgccgcucugcagauccccuuugcuaugcagauggccuaccgguucaacggcaucggagugacccagaaugugcuguacgagaaccagaagcugaucgccaaccaguucaacagcgccaucggcaagauccaggacagccugagcagcacagcaagcgcccugggaaagcugcaggacguggucaaccagaaugcccaggcacugaacacccuggucaagcagcuguccuccaacuucggcgccaucagcucugugcugaacgauauccugagcagacuggacaaggucgaggccgaggugcagaucgacagacugaucacaggcagacugcagagccuccagacauacgugacccagcagcugaucagagccgccgagauuagagccucugccaaucuggccgccaccaagaugucugagugugugcugggccagagcaagagaguggacuuuugcggcaagggcuaccaccugaugagcuucccucagucugccccucacggcgugguguuucugcacgugacauaugugcccgcucaagagaagaauuucaccaccgcuccagccaucugccacgacggcaaagcccacuuuccuagagaaggcguguucguguccaacggcacccauugguucgugacacagcggaacuucuacgagccccagaucaucaccaccgacaacaccuucgugucuggcaacugcgacguugugaucggcauugugaacaauaccguguacgacccucugcagcccgagcuggacagcuucaaagaggaacuggacaaguacuuuaagaaccacacaagccccgacguggaccugggcgauaucagcggaaucaaugccagcgucgugaacauccagaaagagaucgaccggcugaacgagguggccaagaaucugaacgagagccugaucgaccugcaagaacuggggaaguacgagcaguacaucaaguggcccugguacaucuggcugggcuuuaucgccggacugauugccaucgugauggucacaaucaugcuguguugcaugaccagcugcuguagcugccugaagggcuguuguagcuguggcagcugcugcaaguucgacgaggacgauucugagcccgugcugaagggcgugaaacugcacuacaccugauaauaggcuggagccucgguggccuagcuucuugccccuugggccuccccccagccccuccuccccuuccugcacccguacccccguggucuuugaauaaagucugagugggcggcaaaaaaaaaaaaaaaaaaaaaaaaaaaaaaaaaaaaaaaaaaaaaaaaaaaaaaaaaaaaaaaaaaaaaaaaaaaaaaaaaaaaaaaaaaaaaaaaaaaa

SEQ ID NO: 26125 - RNA, 4095 nt, Artificial Sequence
  SARS-CoV-2/Wuhan/WIV05/2019__EPI_ISL_402128 spike protein mRNA gc mod (1-1273)(S477N_D614G)
gggaaauaagagagaaaagaagaguaagaagaaauauaagaccccggcgccgccaccauguucguguuucuggugcugcugccccugguguccagccagugugugaaccugaccaccagaacacagcugccuccagccuacaccaacagcuucaccagaggcguguacuaccccgacaagguguucagauccagcgugcugcacucuacccaggaccuguuccugccuuucuucagcaacgugaccugguuccacgccauccacguguccggcaccaauggcaccaagagauucgacaaccccgugcugcccuucaacgacgggguguacuuugccagcaccgagaaguccaacaucaucagaggcuggaucuucggcaccacacuggacagcaagacccagagccugcugaucgugaacaacgccaccaacguggucaucaaagugugcgaguuccaguucugcaacgaccccuuccugggcgucuacuaccacaagaacaacaagagcuggauggaaagcgaguuccggguguacagcagcgccaacaacugcaccuucgaguacgugucccagccuuuccugauggaccuggaaggcaagcagggcaacuucaagaaccugcgcgaguucguguucaagaacaucgacggcuacuucaaaaucuacagcaagcacaccccuaucaaccucgugcgggaucugccucagggcuucucugcucuggaaccccugguggaucugcccaucggcaucaacaucacccgguuucagacacugcuggcccugcacagaagcuaccugacaccuggcgauagcagcagcggauggacagcuggugccgccgcuuacuaugugggcuaccugcagccuagaaccuuccugcugaaguacaacgagaacggcaccaucaccgacgccguggauugugcucuggauccucugagcgagacaaagugcacccugaaguccuucaccguggaaaagggcaucuaccagaccagcaacuuccgggugcagcccaccgaauccaucgugcgguuccccaauaucaccaaucugugccccuucggcgagguguucaaugccaccagauucgccucuguguacgccuggaaccggaagcggaucagcaauugcguggccgacuacuccgugcuguacaacuccgccagcuucagcaccuucaagugcuacggcguguccccuaccaagcugaacgaccugugcuucacaaacguguacgccgacagcuucgugauccggggagaugaagugcggcagauugccccuggacagacaggcaagaucgccgacuacaacuacaagcugcccgacgacuucaccggcugugugauugccuggaacagcaacaaccuggacuccaaagucggcggcaacuacaauuaccuguaccggcuguuccggaaguccaaucugaagcccuucgagcgggacaucagcaccgaaaucuaucaggccggcaacaccccuugcaacggcguggaaggcuucaacugcuacuucccacugcaguccuacggcuuucagcccacaaauggcgugggcuaucagcccuacagagugguggugcugagcuucgaacugcugcaugcuccugccacagugugcggcccuaagaaaagcaccaaucucgugaagaacaaaugcgugaacuucaacuucaacggccugaccggcaccggcgugcugacagagagcaacaagaaguuccugccauuccagcaguuuggccgggauaucgccgauaccacagacgccguuagagauccccagacacuggaaauccuggacaucaccccaugcagcuucggcggagugucugugaucaccccuggcaccaacaccagcaaucagguggcagugcuguaccagggcgugaacuguaccgaagugcccguggccauucacgccgaucagcugacaccuacauggcggguguacuccaccggcagcaauguguuucagaccagagccggcugucugaucggagccgagcacgugaacaauagcuacgagugcgacauccccaucggcgcuggcaucugugccagcuaccagacacagacaaacagccccagacgggcuagaagcguggccagccagagcaucauugccuacacaaugucucugggcgccgagaacagcguggccuacuccaacaacucuaucgcuauccccaccaacuucaccaucagcgugaccaccgagauccugccuguguccaugaccaagaccagcguggacugcaccauguacaucugcggcgauuccaccgagugcuccaaccugcugcugcaguacggcagcuucugcacccagcugaauagagcccugacagggaucgccguggaacaggacaagaacacccaagagguguucgcccaagugaagcaaaucuacaagaccccuccuaucaaggacuucggcggcuucaauuucagccagauucugcccgauccuagcaagcccagcaagcggagcuucaucgaggaccugcuguucaacaaagugacacuggccgacgccggcuucaucaagcaguauggcgauugucugggcgacauugccgccagggaucugauuugcgcccagaaguuuaacggacugacagugcugccuccucugcugaccgaugagaugaucgcccaguacacaucugcccugcuggccggcacaaucacaagcggcuggacauuuggagcuggcgccgcucugcagauccccuuugcuaugcagauggccuaccgguucaacggcaucggagugacccagaaugugcuguacgagaaccagaagcugaucgccaaccaguucaacagcgccaucggcaagauccaggacagccugagcagcacagcaagcgcccugggaaagcugcaggacguggucaaccagaaugcccaggcacugaacacccuggucaagcagcuguccuccaacuucggcgccaucagcucugugcugaacgauauccugagcagacuggacaaggucgaggccgaggugcagaucgacagacugaucacaggcagacugcagagccuccagacauacgugacccagcagcugaucagagccgccgagauuagagccucugccaaucuggccgccaccaagaugucugagugugugcugggccagagcaagagaguggacuuuugcggcaagggcuaccaccugaugagcuucccucagucugccccucacggcgugguguuucugcacgugacauaugugcccgcucaagagaagaauuucaccaccgcuccagccaucugccacgacggcaaagcccacuuuccuagagaaggcguguucguguccaacggcacccauugguucgugacacagcggaacuucuacgagccccagaucaucaccaccgacaacaccuucgugucuggcaacugcgacguugugaucggcauugugaacaauaccguguacgacccucugcagcccgagcuggacagcuucaaagaggaacuggacaaguacuuuaagaaccacacaagccccgacguggaccugggcgauaucagcggaaucaaugccagcgucgugaacauccagaaagagaucgaccggcugaacgagguggccaagaaucugaacgagagccugaucgaccugcaagaacuggggaaguacgagcaguacaucaaguggcccugguacaucuggcugggcuuuaucgccggacugauugccaucgugauggucacaaucaugcuguguugcaugaccagcugcuguagcugccugaagggcuguuguagcuguggcagcugcugcaaguucgacgaggacgauucugagcccgugcugaagggcgugaaacugcacuacaccugauaauaggcuggagccucgguggccuagcuucuugccccuugggccuccccccagccccuccuccccuuccugcacccguacccccguggucuuugaauaaagucugagugggcggcaaaaaaaaaaaaaaaaaaaaaaaaaaaaaaaaaaaaaaaaaaaaaaaaaaaaaaaaaaaaaaaaaaaaaaaaaaaaaaaaaaaaaaaaaaaaaaaaaaaa

SEQ ID NO: 26126 - RNA, 4095 nt, Artificial Sequence
  SARS-CoV-2/Wuhan/WIV05/2019__EPI_ISL_402128 spike protein mRNA gc mod (1-1273)(N501Y_D614G)
gggaaauaagagagaaaagaagaguaagaagaaauauaagaccccggcgccgccaccauguucguguuucuggugcugcugccccugguguccagccagugugugaaccugaccaccagaacacagcugccuccagccuacaccaacagcuucaccagaggcguguacuaccccgacaagguguucagauccagcgugcugcacucuacccaggaccuguuccugccuuucuucagcaacgugaccugguuccacgccauccacguguccggcaccaauggcaccaagagauucgacaaccccgugcugcccuucaacgacgggguguacuuugccagcaccgagaaguccaacaucaucagaggcuggaucuucggcaccacacuggacagcaagacccagagccugcugaucgugaacaacgccaccaacguggucaucaaagugugcgaguuccaguucugcaacgaccccuuccugggcgucuacuaccacaagaacaacaagagcuggauggaaagcgaguuccggguguacagcagcgccaacaacugcaccuucgaguacgugucccagccuuuccugauggaccuggaaggcaagcagggcaacuucaagaaccugcgcgaguucguguucaagaacaucgacggcuacuucaaaaucuacagcaagcacaccccuaucaaccucgugcgggaucugccucagggcuucucugcucuggaaccccugguggaucugcccaucggcaucaacaucacccgguuucagacacugcuggcccugcacagaagcuaccugacaccuggcgauagcagcagcggauggacagcuggugccgccgcuuacuaugugggcuaccugcagccuagaaccuuccugcugaaguacaacgagaacggcaccaucaccgacgccguggauugugcucuggauccucugagcgagacaaagugcacccugaaguccuucaccguggaaaagggcaucuaccagaccagcaacuuccgggugcagcccaccgaauccaucgugcgguuccccaauaucaccaaucugugccccuucggcgagguguucaaugccaccagauucgccucuguguacgccuggaaccggaagcggaucagcaauugcguggccgacuacuccgugcuguacaacuccgccagcuucagcaccuucaagugcuacggcguguccccuaccaagcugaacgaccugugcuucacaaacguguacgccgacagcuucgugauccggggagaugaagugcggcagauugccccuggacagacaggcaagaucgccgacuacaacuacaagcugcccgacgacuucaccggcugugugauugccuggaacagcaacaaccuggacuccaaagucggcggcaacuacaauuaccuguaccggcuguuccggaaguccaaucugaagcccuucgagcgggacaucagcaccgaaaucuaucaggccggcagcaccccuugcaacggcguggaaggcuucaacugcuacuucccacugcaguccuacggcuuucagcccacauacggcgugggcuaucagcccuacagagugguggugcugagcuucgaacugcugcaugcuccugccacagugugcggcccuaagaaaagcaccaaucucgugaagaacaaaugcgugaacuucaacuucaacggccugaccggcaccggcgugcugacagagagcaacaagaaguuccugccauuccagcaguuuggccgggauaucgccgauaccacagacgccguuagagauccccagacacuggaaauccuggacaucaccccaugcagcuucggcggagugucugugaucaccccuggcaccaacaccagcaaucagguggcagugcuguaccagggcgugaacuguaccgaagugcccguggccauucacgccgaucagcugacaccuacauggcggguguacuccaccggcagcaauguguuucagaccagagccggcugucugaucggagccgagcacgugaacaauagcuacgagugcgacauccccaucggcgcuggcaucugugccagcuaccagacacagacaaacagccccagacgggcuagaagcguggccagccagagcaucauugccuacacaaugucucugggcgccgagaacagcguggccuacuccaacaacucuaucgcuauccccaccaacuucaccaucagcgugaccaccgagauccugccuguguccaugaccaagaccagcguggacugcaccauguacaucugcggcgauuccaccgagugcuccaaccugcugcugcaguacggcagcuucugcacccagcugaauagagcccugacagggaucgccguggaacaggacaagaacacccaagagguguucgcccaagugaagcaaaucuacaagaccccuccuaucaaggacuucggcggcuucaauuucagccagauucugcccgauccuagcaagcccagcaagcggagcuucaucgaggaccugcuguucaacaaagugacacuggccgacgccggcuucaucaagcaguauggcgauugucugggcgacauugccgccagggaucugauuugcgcccagaaguuuaacggacugacagugcugccuccucugcugaccgaugagaugaucgcccaguacacaucugcccugcuggccggcacaaucacaagcggcuggacauuuggagcuggcgccgcucugcagauccccuuugcuaugcagauggccuaccgguucaacggcaucggagugacccagaaugugcuguacgagaaccagaagcugaucgccaaccaguucaacagcgccaucggcaagauccaggacagccugagcagcacagcaagcgcccugggaaagcugcaggacguggucaaccagaaugcccaggcacugaacacccuggucaagcagcuguccuccaacuucggcgccaucagcucugugcugaacgauauccugagcagacuggacaaggucgaggccgaggugcagaucgacagacugaucacaggcagacugcagagccuccagacauacgugacccagcagcugaucagagccgccgagauuagagccucugccaaucuggccgccaccaagaugucugagugugugcugggccagagcaagagaguggacuuuugcggcaagggcuaccaccugaugagcuucccucagucugccccucacggcgugguguuucugcacgugacauaugugcccgcucaagagaagaauuucaccaccgcuccagccaucugccacgacggcaaagcccacuuuccuagagaaggcguguucguguccaacggcacccauugguucgugacacagcggaacuucuacgagccccagaucaucaccaccgacaacaccuucgugucuggcaacugcgacguugugaucggcauugugaacaauaccguguacgacccucugcagcccgagcuggacagcuucaaagaggaacuggacaaguacuuuaagaaccacacaagccccgacguggaccugggcgauaucagcggaaucaaugccagcgucgugaacauccagaaagagaucgaccggcugaacgagguggccaagaaucugaacgagagccugaucgaccugcaagaacuggggaaguacgagcaguacaucaaguggcccugguacaucuggcugggcuuuaucgccggacugauugccaucgugauggucacaaucaugcuguguugcaugaccagcugcuguagcugccugaagggcuguuguagcuguggcagcugcugcaaguucgacgaggacgauucugagcccgugcugaagggcgugaaacugcacuacaccugauaauaggcuggagccucgguggccuagcuucuugccccuugggccuccccccagccccuccuccccuuccugcacccguacccccguggucuuugaauaaagucugagugggcggcaaaaaaaaaaaaaaaaaaaaaaaaaaaaaaaaaaaaaaaaaaaaaaaaaaaaaaaaaaaaaaaaaaaaaaaaaaaaaaaaaaaaaaaaaaaaaaaaaaaa

SEQ ID NO: 26127 - RNA, 4089 nt, Artificial Sequence
  SARS-CoV-2/Wuhan/WIV05/2019__EPI_ISL_402128 spike protein mRNA gc mod (1-1273)(H69del_V70del_D614G)
gggaaauaagagagaaaagaagaguaagaagaaauauaagaccccggcgccgccaccauguucguguuucuggugcugcugccccugguguccagccagugugugaaccugaccaccagaacacagcugccuccagccuacaccaacagcuucaccagaggcguguacuaccccgacaagguguucagauccagcgugcugcacucuacccaggaccuguuccugccuuucuucagcaacgugaccugguuccacgccaucuccggcaccaauggcaccaagagauucgacaaccccgugcugcccuucaacgacgggguguacuuugccagcaccgagaaguccaacaucaucagaggcuggaucuucggcaccacacuggacagcaagacccagagccugcugaucgugaacaacgccaccaacguggucaucaaagugugcgaguuccaguucugcaacgaccccuuccugggcgucuacuaccacaagaacaacaagagcuggauggaaagcgaguuccggguguacagcagcgccaacaacugcaccuucgaguacgugucccagccuuuccugauggaccuggaaggcaagcagggcaacuucaagaaccugcgcgaguucguguucaagaacaucgacggcuacuucaaaaucuacagcaagcacaccccuaucaaccucgugcgggaucugccucagggcuucucugcucuggaaccccugguggaucugcccaucggcaucaacaucacccgguuucagacacugcuggcccugcacagaagcuaccugacaccuggcgauagcagcagcggauggacagcuggugccgccgcuuacuaugugggcuaccugcagccuagaaccuuccugcugaaguacaacgagaacggcaccaucaccgacgccguggauugugcucuggauccucugagcgagacaaagugcacccugaaguccuucaccguggaaaagggcaucuaccagaccagcaacuuccgggugcagcccaccgaauccaucgugcgguuccccaauaucaccaaucugugccccuucggcgagguguucaaugccaccagauucgccucuguguacgccuggaaccggaagcggaucagcaauugcguggccgacuacuccgugcuguacaacuccgccagcuucagcaccuucaagugcuacggcguguccccuaccaagcugaacgaccugugcuucacaaacguguacgccgacagcuucgugauccggggagaugaagugcggcagauugccccuggacagacaggcaagaucgccgacuacaacuacaagcugcccgacgacuucaccggcugugugauugccuggaacagcaacaaccuggacuccaaagucggcggcaacuacaauuaccuguaccggcuguuccggaaguccaaucugaagcccuucgagcgggacaucagcaccgaaaucuaucaggccggcagcaccccuugcaacggcguggaaggcuucaacugcuacuucccacugcaguccuacggcuuucagcccacaaauggcgugggcuaucagcccuacagagugguggugcugagcuucgaacugcugcaugcuccugccacagugugcggcccuaagaaaagcaccaaucucgugaagaacaaaugcgugaacuucaacuucaacggccugaccggcaccggcgugcugacagagagcaacaagaaguuccugccauuccagcaguuuggccgggauaucgccgauaccacagacgccguuagagauccccagacacuggaaauccuggacaucaccccaugcagcuucggcggagugucugugaucaccccuggcaccaacaccagcaaucagguggcagugcuguaccagggcgugaacuguaccgaagugcccguggccauucacgccgaucagcugacaccuacauggcggguguacuccaccggcagcaauguguuucagaccagagccggcugucugaucggagccgagcacgugaacaauagcuacgagugcgacauccccaucggcgcuggcaucugugccagcuaccagacacagacaaacagccccagacgggcuagaagcguggccagccagagcaucauugccuacacaaugucucugggcgccgagaacagcguggccuacuccaacaacucuaucgcuauccccaccaacuucaccaucagcgugaccaccgagauccugccuguguccaugaccaagaccagcguggacugcaccauguacaucugcggcgauuccaccgagugcuccaaccugcugcugcaguacggcagcuucugcacccagcugaauagagcccugacagggaucgccguggaacaggacaagaacacccaagagguguucgcccaagugaagcaaaucuacaagaccccuccuaucaaggacuucggcggcuucaauuucagccagauucugcccgauccuagcaagcccagcaagcggagcuucaucgaggaccugcuguucaacaaagugacacuggccgacgccggcuucaucaagcaguauggcgauugucugggcgacauugccgccagggaucugauuugcgcccagaaguuuaacggacugacagugcugccuccucugcugaccgaugagaugaucgcccaguacacaucugcccugcuggccggcacaaucacaagcggcuggacauuuggagcuggcgccgcucugcagauccccuuugcuaugcagauggccuaccgguucaacggcaucggagugacccagaaugugcuguacgagaaccagaagcugaucgccaaccaguucaacagcgccaucggcaagauccaggacagccugagcagcacagcaagcgcccugggaaagcugcaggacguggucaaccagaaugcccaggcacugaacacccuggucaagcagcuguccuccaacuucggcgccaucagcucugugcugaacgauauccugagcagacuggacaaggucgaggccgaggugcagaucgacagacugaucacaggcagacugcagagccuccagacauacgugacccagcagcugaucagagccgccgagauuagagccucugccaaucuggccgccaccaagaugucugagugugugcugggccagagcaagagaguggacuuuugcggcaagggcuaccaccugaugagcuucccucagucugccccucacggcgugguguuucugcacgugacauaugugcccgcucaagagaagaauuucaccaccgcuccagccaucugccacgacggcaaagcccacuuuccuagagaaggcguguucguguccaacggcacccauugguucgugacacagcggaacuucuacgagccccagaucaucaccaccgacaacaccuucgugucuggcaacugcgacguugugaucggcauugugaacaauaccguguacgacccucugcagcccgagcuggacagcuucaaagaggaacuggacaaguacuuuaagaaccacacaagccccgacguggaccugggcgauaucagcggaaucaaugccagcgucgugaacauccagaaagagaucgaccggcugaacgagguggccaagaaucugaacgagagccugaucgaccugcaagaacuggggaaguacgagcaguacaucaaguggcccugguacaucuggcugggcuuuaucgccggacugauugccaucgugauggucacaaucaugcuguguugcaugaccagcugcuguagcugccugaagggcuguuguagcuguggcagcugcugcaaguucgacgaggacgauucugagcccgugcugaagggcgugaaacugcacuacaccugauaauaggcuggagccucgguggccuagcuucuugccccuugggccuccccccagccccuccuccccuuccugcacccguacccccguggucuuugaauaaagucugagugggcggcaaaaaaaaaaaaaaaaaaaaaaaaaaaaaaaaaaaaaaaaaaaaaaaaaaaaaaaaaaaaaaaaaaaaaaaaaaaaaaaaaaaaaaaaaaaaaaaaaaaa

SEQ ID NO: 26128 - RNA, 4095 nt, Artificial Sequence
  SARS-CoV-2/Wuhan/WIV05/2019__EPI_ISL_402128 spike protein mRNA gc mod (1-1273)(Y453F_D614G)
gggaaauaagagagaaaagaagaguaagaagaaauauaagaccccggcgccgccaccauguucguguuucuggugcugcugccccugguguccagccagugugugaaccugaccaccagaacacagcugccuccagccuacaccaacagcuucaccagaggcguguacuaccccgacaagguguucagauccagcgugcugcacucuacccaggaccuguuccugccuuucuucagcaacgugaccugguuccacgccauccacguguccggcaccaauggcaccaagagauucgacaaccccgugcugcccuucaacgacgggguguacuuugccagcaccgagaaguccaacaucaucagaggcuggaucuucggcaccacacuggacagcaagacccagagccugcugaucgugaacaacgccaccaacguggucaucaaagugugcgaguuccaguucugcaacgaccccuuccugggcgucuacuaccacaagaacaacaagagcuggauggaaagcgaguuccggguguacagcagcgccaacaacugcaccuucgaguacgugucccagccuuuccugauggaccuggaaggcaagcagggcaacuucaagaaccugcgcgaguucguguucaagaacaucgacggcuacuucaaaaucuacagcaagcacaccccuaucaaccucgugcgggaucugccucagggcuucucugcucuggaaccccugguggaucugcccaucggcaucaacaucacccgguuucagacacugcuggcccugcacagaagcuaccugacaccuggcgauagcagcagcggauggacagcuggugccgccgcuuacuaugugggcuaccugcagccuagaaccuuccugcugaaguacaacgagaacggcaccaucaccgacgccguggauugugcucuggauccucugagcgagacaaagugcacccugaaguccuucaccguggaaaagggcaucuaccagaccagcaacuuccgggugcagcccaccgaauccaucgugcgguuccccaauaucaccaaucugugccccuucggcgagguguucaaugccaccagauucgccucuguguacgccuggaaccggaagcggaucagcaauugcguggccgacuacuccgugcuguacaacuccgccagcuucagcaccuucaagugcuacggcguguccccuaccaagcugaacgaccugugcuucacaaacguguacgccgacagcuucgugauccggggagaugaagugcggcagauugccccuggacagacaggcaagaucgccgacuacaacuacaagcugcccgacgacuucaccggcugugugauugccuggaacagcaacaaccuggacuccaaagucggcggcaacuacaauuaccuguuccggcuguuccggaaguccaaucugaagcccuucgagcgggacaucagcaccgaaaucuaucaggccggcagcaccccuugcaacggcguggaaggcuucaacugcuacuucccacugcaguccuacggcuuucagcccacaaauggcgugggcuaucagcccuacagagugguggugcugagcuucgaacugcugcaugcuccugccacagugugcggcccuaagaaaagcaccaaucucgugaagaacaaaugcgugaacuucaacuucaacggccugaccggcaccggcgugcugacagagagcaacaagaaguuccugccauuccagcaguuuggccgggauaucgccgauaccacagacgccguuagagauccccagacacuggaaauccuggacaucaccccaugcagcuucggcggagugucugugaucaccccuggcaccaacaccagcaaucagguggcagugcuguaccagggcgugaacuguaccgaagugcccguggccauucacgccgaucagcugacaccuacauggcggguguacuccaccggcagcaauguguuucagaccagagccggcugucugaucggagccgagcacgugaacaauagcuacgagugcgacauccccaucggcgcuggcaucugugccagcuaccagacacagacaaacagccccagacgggcuagaagcguggccagccagagcaucauugccuacacaaugucucugggcgccgagaacagcguggccuacuccaacaacucuaucgcuauccccaccaacuucaccaucagcgugaccaccgagauccugccuguguccaugaccaagaccagcguggacugcaccauguacaucugcggcgauuccaccgagugcuccaaccugcugcugcaguacggcagcuucugcacccagcugaauagagcccugacagggaucgccguggaacaggacaagaacacccaagagguguucgcccaagugaagcaaaucuacaagaccccuccuaucaaggacuucggcggcuucaauuucagccagauucugcccgauccuagcaagcccagcaagcggagcuucaucgaggaccugcuguucaacaaagugacacuggccgacgccggcuucaucaagcaguauggcgauugucugggcgacauugccgccagggaucugauuugcgcccagaaguuuaacggacugacagugcugccuccucugcugaccgaugagaugaucgcccaguacacaucugcccugcuggccggcacaaucacaagcggcuggacauuuggagcuggcgccgcucugcagauccccuuugcuaugcagauggccuaccgguucaacggcaucggagugacccagaaugugcuguacgagaaccagaagcugaucgccaaccaguucaacagcgccaucggcaagauccaggacagccugagcagcacagcaagcgcccugggaaagcugcaggacguggucaaccagaaugcccaggcacugaacacccuggucaagcagcuguccuccaacuucggcgccaucagcucugugcugaacgauauccugagcagacuggacaaggucgaggccgaggugcagaucgacagacugaucacaggcagacugcagagccuccagacauacgugacccagcagcugaucagagccgccgagauuagagccucugccaaucuggccgccaccaagaugucugagugugugcugggccagagcaagagaguggacuuuugcggcaagggcuaccaccugaugagcuucccucagucugccccucacggcgugguguuucugcacgugacauaugugcccgcucaagagaagaauuucaccaccgcuccagccaucugccacgacggcaaagcccacuuuccuagagaaggcguguucguguccaacggcacccauugguucgugacacagcggaacuucuacgagccccagaucaucaccaccgacaacaccuucgugucuggcaacugcgacguugugaucggcauugugaacaauaccguguacgacccucugcagcccgagcuggacagcuucaaagaggaacuggacaaguacuuuaagaaccacacaagccccgacguggaccugggcgauaucagcggaaucaaugccagcgucgugaacauccagaaagagaucgaccggcugaacgagguggccaagaaucugaacgagagccugaucgaccugcaagaacuggggaaguacgagcaguacaucaaguggcccugguacaucuggcugggcuuuaucgccggacugauugccaucgugauggucacaaucaugcuguguugcaugaccagcugcuguagcugccugaagggcuguuguagcuguggcagcugcugcaaguucgacgaggacgauucugagcccgugcugaagggcgugaaacugcacuacaccugauaauaggcuggagccucgguggccuagcuucuugccccuugggccuccccccagccccuccuccccuuccugcacccguacccccguggucuuugaauaaagucugagugggcggcaaaaaaaaaaaaaaaaaaaaaaaaaaaaaaaaaaaaaaaaaaaaaaaaaaaaaaaaaaaaaaaaaaaaaaaaaaaaaaaaaaaaaaaaaaaaaaaaaaaa

SEQ ID NO: 26129 - RNA, 4095 nt, Artificial Sequence
  SARS-CoV-2/Wuhan/WIV05/2019__EPI_ISL_402128 spike protein mRNA gc mod (1-1273)(D614G_I692V)
gggaaauaagagagaaaagaagaguaagaagaaauauaagaccccggcgccgccaccauguucguguuucuggugcugcugccccugguguccagccagugugugaaccugaccaccagaacacagcugccuccagccuacaccaacagcuucaccagaggcguguacuaccccgacaagguguucagauccagcgugcugcacucuacccaggaccuguuccugccuuucuucagcaacgugaccugguuccacgccauccacguguccggcaccaauggcaccaagagauucgacaaccccgugcugcccuucaacgacgggguguacuuugccagcaccgagaaguccaacaucaucagaggcuggaucuucggcaccacacuggacagcaagacccagagccugcugaucgugaacaacgccaccaacguggucaucaaagugugcgaguuccaguucugcaacgaccccuuccugggcgucuacuaccacaagaacaacaagagcuggauggaaagcgaguuccggguguacagcagcgccaacaacugcaccuucgaguacgugucccagccuuuccugauggaccuggaaggcaagcagggcaacuucaagaaccugcgcgaguucguguucaagaacaucgacggcuacuucaaaaucuacagcaagcacaccccuaucaaccucgugcgggaucugccucagggcuucucugcucuggaaccccugguggaucugcccaucggcaucaacaucacccgguuucagacacugcuggcccugcacagaagcuaccugacaccuggcgauagcagcagcggauggacagcuggugccgccgcuuacuaugugggcuaccugcagccuagaaccuuccugcugaaguacaacgagaacggcaccaucaccgacgccguggauugugcucuggauccucugagcgagacaaagugcacccugaaguccuucaccguggaaaagggcaucuaccagaccagcaacuuccgggugcagcccaccgaauccaucgugcgguuccccaauaucaccaaucugugccccuucggcgagguguucaaugccaccagauucgccucuguguacgccuggaaccggaagcggaucagcaauugcguggccgacuacuccgugcuguacaacuccgccagcuucagcaccuucaagugcuacggcguguccccuaccaagcugaacgaccugugcuucacaaacguguacgccgacagcuucgugauccggggagaugaagugcggcagauugccccuggacagacaggcaagaucgccgacuacaacuacaagcugcccgacgacuucaccggcugugugauugccuggaacagcaacaaccuggacuccaaagucggcggcaacuacaauuaccuguaccggcuguuccggaaguccaaucugaagcccuucgagcgggacaucagcaccgaaaucuaucaggccggcagcaccccuugcaacggcguggaaggcuucaacugcuacuucccacugcaguccuacggcuuucagcccacaaauggcgugggcuaucagcccuacagagugguggugcugagcuucgaacugcugcaugcuccugccacagugugcggcccuaagaaaagcaccaaucucgugaagaacaaaugcgugaacuucaacuucaacggccugaccggcaccggcgugcugacagagagcaacaagaaguuccugccauuccagcaguuuggccgggauaucgccgauaccacagacgccguuagagauccccagacacuggaaauccuggacaucaccccaugcagcuucggcggagugucugugaucaccccuggcaccaacaccagcaaucagguggcagugcuguaccagggcgugaacuguaccgaagugcccguggccauucacgccgaucagcugacaccuacauggcggguguacuccaccggcagcaauguguuucagaccagagccggcugucugaucggagccgagcacgugaacaauagcuacgagugcgacauccccaucggcgcuggcaucugugccagcuaccagacacagacaaacagccccagacgggcuagaagcguggccagccagagcgugauugccuacacaaugucucugggcgccgagaacagcguggccuacuccaacaacucuaucgcuauccccaccaacuucaccaucagcgugaccaccgagauccugccuguguccaugaccaagaccagcguggacugcaccauguacaucugcggcgauuccaccgagugcuccaaccugcugcugcaguacggcagcuucugcacccagcugaauagagcccugacagggaucgccguggaacaggacaagaacacccaagagguguucgcccaagugaagcaaaucuacaagaccccuccuaucaaggacuucggcggcuucaauuucagccagauucugcccgauccuagcaagcccagcaagcggagcuucaucgaggaccugcuguucaacaaagugacacuggccgacgccggcuucaucaagcaguauggcgauugucugggcgacauugccgccagggaucugauuugcgcccagaaguuuaacggacugacagugcugccuccucugcugaccgaugagaugaucgcccaguacacaucugcccugcuggccggcacaaucacaagcggcuggacauuuggagcuggcgccgcucugcagauccccuuugcuaugcagauggccuaccgguucaacggcaucggagugacccagaaugugcuguacgagaaccagaagcugaucgccaaccaguucaacagcgccaucggcaagauccaggacagccugagcagcacagcaagcgcccugggaaagcugcaggacguggucaaccagaaugcccaggcacugaacacccuggucaagcagcuguccuccaacuucggcgccaucagcucugugcugaacgauauccugagcagacuggacaaggucgaggccgaggugcagaucgacagacugaucacaggcagacugcagagccuccagacauacgugacccagcagcugaucagagccgccgagauuagagccucugccaaucuggccgccaccaagaugucugagugugugcugggccagagcaagagaguggacuuuugcggcaagggcuaccaccugaugagcuucccucagucugccccucacggcgugguguuucugcacgugacauaugugcccgcucaagagaagaauuucaccaccgcuccagccaucugccacgacggcaaagcccacuuuccuagagaaggcguguucguguccaacggcacccauugguucgugacacagcggaacuucuacgagccccagaucaucaccaccgacaacaccuucgugucuggcaacugcgacguugugaucggcauugugaacaauaccguguacgacccucugcagcccgagcuggacagcuucaaagaggaacuggacaaguacuuuaagaaccacacaagccccgacguggaccugggcgauaucagcggaaucaaugccagcgucgugaacauccagaaagagaucgaccggcugaacgagguggccaagaaucugaacgagagccugaucgaccugcaagaacuggggaaguacgagcaguacaucaaguggcccugguacaucuggcugggcuuuaucgccggacugauugccaucgugauggucacaaucaugcuguguugcaugaccagcugcuguagcugccugaagggcuguuguagcuguggcagcugcugcaaguucgacgaggacgauucugagcccgugcugaagggcgugaaacugcacuacaccugauaauaggcuggagccucgguggccuagcuucuugccccuugggccuccccccagccccuccuccccuuccugcacccguacccccguggucuuugaauaaagucugagugggcggcaaaaaaaaaaaaaaaaaaaaaaaaaaaaaaaaaaaaaaaaaaaaaaaaaaaaaaaaaaaaaaaaaaaaaaaaaaaaaaaaaaaaaaaaaaaaaaaaaaaa

SEQ ID NO: 26130 - RNA, 4095 nt, Artificial Sequence
  SARS-CoV-2/Wuhan/WIV05/2019__EPI_ISL_402128 spike protein mRNA gc mod (1-1273)(D614G_M1229I)
gggaaauaagagagaaaagaagaguaagaagaaauauaagaccccggcgccgccaccauguucguguuucuggugcugcugccccugguguccagccagugugugaaccugaccaccagaacacagcugccuccagccuacaccaacagcuucaccagaggcguguacuaccccgacaagguguucagauccagcgugcugcacucuacccaggaccuguuccugccuuucuucagcaacgugaccugguuccacgccauccacguguccggcaccaauggcaccaagagauucgacaaccccgugcugcccuucaacgacgggguguacuuugccagcaccgagaaguccaacaucaucagaggcuggaucuucggcaccacacuggacagcaagacccagagccugcugaucgugaacaacgccaccaacguggucaucaaagugugcgaguuccaguucugcaacgaccccuuccugggcgucuacuaccacaagaacaacaagagcuggauggaaagcgaguuccggguguacagcagcgccaacaacugcaccuucgaguacgugucccagccuuuccugauggaccuggaaggcaagcagggcaacuucaagaaccugcgcgaguucguguucaagaacaucgacggcuacuucaaaaucuacagcaagcacaccccuaucaaccucgugcgggaucugccucagggcuucucugcucuggaaccccugguggaucugcccaucggcaucaacaucacccgguuucagacacugcuggcccugcacagaagcuaccugacaccuggcgauagcagcagcggauggacagcuggugccgccgcuuacuaugugggcuaccugcagccuagaaccuuccugcugaaguacaacgagaacggcaccaucaccgacgccguggauugugcucuggauccucugagcgagacaaagugcacccugaaguccuucaccguggaaaagggcaucuaccagaccagcaacuuccgggugcagcccaccgaauccaucgugcgguuccccaauaucaccaaucugugccccuucggcgagguguucaaugccaccagauucgccucuguguacgccuggaaccggaagcggaucagcaauugcguggccgacuacuccgugcuguacaacuccgccagcuucagcaccuucaagugcuacggcguguccccuaccaagcugaacgaccugugcuucacaaacguguacgccgacagcuucgugauccggggagaugaagugcggcagauugccccuggacagacaggcaagaucgccgacuacaacuacaagcugcccgacgacuucaccggcugugugauugccuggaacagcaacaaccuggacuccaaagucggcggcaacuacaauuaccuguaccggcuguuccggaaguccaaucugaagcccuucgagcgggacaucagcaccgaaaucuaucaggccggcagcaccccuugcaacggcguggaaggcuucaacugcuacuucccacugcaguccuacggcuuucagcccacaaauggcgugggcuaucagcccuacagagugguggugcugagcuucgaacugcugcaugcuccugccacagugugcggcccuaagaaaagcaccaaucucgugaagaacaaaugcgugaacuucaacuucaacggccugaccggcaccggcgugcugacagagagcaacaagaaguuccugccauuccagcaguuuggccgggauaucgccgauaccacagacgccguuagagauccccagacacuggaaauccuggacaucaccccaugcagcuucggcggagugucugugaucaccccuggcaccaacaccagcaaucagguggcagugcuguaccagggcgugaacuguaccgaagugcccguggccauucacgccgaucagcugacaccuacauggcggguguacuccaccggcagcaauguguuucagaccagagccggcugucugaucggagccgagcacgugaacaauagcuacgagugcgacauccccaucggcgcuggcaucugugccagcuaccagacacagacaaacagccccagacgggcuagaagcguggccagccagagcaucauugccuacacaaugucucugggcgccgagaacagcguggccuacuccaacaacucuaucgcuauccccaccaacuucaccaucagcgugaccaccgagauccugccuguguccaugaccaagaccagcguggacugcaccauguacaucugcggcgauuccaccgagugcuccaaccugcugcugcaguacggcagcuucugcacccagcugaauagagcccugacagggaucgccguggaacaggacaagaacacccaagagguguucgcccaagugaagcaaaucuacaagaccccuccuaucaaggacuucggcggcuucaauuucagccagauucugcccgauccuagcaagcccagcaagcggagcuucaucgaggaccugcuguucaacaaagugacacuggccgacgccggcuucaucaagcaguauggcgauugucugggcgacauugccgccagggaucugauuugcgcccagaaguuuaacggacugacagugcugccuccucugcugaccgaugagaugaucgcccaguacacaucugcccugcuggccggcacaaucacaagcggcuggacauuuggagcuggcgccgcucugcagauccccuuugcuaugcagauggccuaccgguucaacggcaucggagugacccagaaugugcuguacgagaaccagaagcugaucgccaaccaguucaacagcgccaucggcaagauccaggacagccugagcagcacagcaagcgcccugggaaagcugcaggacguggucaaccagaaugcccaggcacugaacacccuggucaagcagcuguccuccaacuucggcgccaucagcucugugcugaacgauauccugagcagacuggacaaggucgaggccgaggugcagaucgacagacugaucacaggcagacugcagagccuccagacauacgugacccagcagcugaucagagccgccgagauuagagccucugccaaucuggccgccaccaagaugucugagugugugcugggccagagcaagagaguggacuuuugcggcaagggcuaccaccugaugagcuucccucagucugccccucacggcgugguguuucugcacgugacauaugugcccgcucaagagaagaauuucaccaccgcuccagccaucugccacgacggcaaagcccacuuuccuagagaaggcguguucguguccaacggcacccauugguucgugacacagcggaacuucuacgagccccagaucaucaccaccgacaacaccuucgugucuggcaacugcgacguugugaucggcauugugaacaauaccguguacgacccucugcagcccgagcuggacagcuucaaagaggaacuggacaaguacuuuaagaaccacacaagccccgacguggaccugggcgauaucagcggaaucaaugccagcgucgugaacauccagaaagagaucgaccggcugaacgagguggccaagaaucugaacgagagccugaucgaccugcaagaacuggggaaguacgagcaguacaucaaguggcccugguacaucuggcugggcuuuaucgccggacugauugccaucgugaucgucacaaucaugcuguguugcaugaccagcugcuguagcugccugaagggcuguuguagcuguggcagcugcugcaaguucgacgaggacgauucugagcccgugcugaagggcgugaaacugcacuacaccugauaauaggcuggagccucgguggccuagcuucuugccccuugggccuccccccagccccuccuccccuuccugcacccguacccccguggucuuugaauaaagucugagugggcggcaaaaaaaaaaaaaaaaaaaaaaaaaaaaaaaaaaaaaaaaaaaaaaaaaaaaaaaaaaaaaaaaaaaaaaaaaaaaaaaaaaaaaaaaaaaaaaaaaaaa

SEQ ID NO: 26131 - RNA, 4089 nt, Artificial Sequence
  SARS-CoV-2/Wuhan/WIV05/2019__EPI_ISL_402128 spike protein mRNA gc mod (1-1273)(H69del_V70del_A222V_Y453F_S477N_D614G_I692V)
gggaaauaagagagaaaagaagaguaagaagaaauauaagaccccggcgccgccaccauguucguguuucuggugcugcugccccugguguccagccagugugugaaccugaccaccagaacacagcugccuccagccuacaccaacagcuucaccagaggcguguacuaccccgacaagguguucagauccagcgugcugcacucuacccaggaccuguuccugccuuucuucagcaacgugaccugguuccacgccaucuccggcaccaauggcaccaagagauucgacaaccccgugcugcccuucaacgacgggguguacuuugccagcaccgagaaguccaacaucaucagaggcuggaucuucggcaccacacuggacagcaagacccagagccugcugaucgugaacaacgccaccaacguggucaucaaagugugcgaguuccaguucugcaacgaccccuuccugggcgucuacuaccacaagaacaacaagagcuggauggaaagcgaguuccggguguacagcagcgccaacaacugcaccuucgaguacgugucccagccuuuccugauggaccuggaaggcaagcagggcaacuucaagaaccugcgcgaguucguguucaagaacaucgacggcuacuucaaaaucuacagcaagcacaccccuaucaaccucgugcgggaucugccucagggcuucucugugcuggaaccccugguggaucugcccaucggcaucaacaucacccgguuucagacacugcuggcccugcacagaagcuaccugacaccuggcgauagcagcagcggauggacagcuggugccgccgcuuacuaugugggcuaccugcagccuagaaccuuccugcugaaguacaacgagaacggcaccaucaccgacgccguggauugugcucuggauccucugagcgagacaaagugcacccugaaguccuucaccguggaaaagggcaucuaccagaccagcaacuuccgggugcagcccaccgaauccaucgugcgguuccccaauaucaccaaucugugccccuucggcgagguguucaaugccaccagauucgccucuguguacgccuggaaccggaagcggaucagcaauugcguggccgacuacuccgugcuguacaacuccgccagcuucagcaccuucaagugcuacggcguguccccuaccaagcugaacgaccugugcuucacaaacguguacgccgacagcuucgugauccggggagaugaagugcggcagauugccccuggacagacaggcaagaucgccgacuacaacuacaagcugcccgacgacuucaccggcugugugauugccuggaacagcaacaaccuggacuccaaagucggcggcaacuacaauuaccuguuccggcuguuccggaaguccaaucugaagcccuucgagcgggacaucagcaccgaaaucuaucaggccggcaacaccccuugcaacggcguggaaggcuucaacugcuacuucccacugcaguccuacggcuuucagcccacaaauggcgugggcuaucagcccuacagagugguggugcugagcuucgaacugcugcaugcuccugccacagugugcggcccuaagaaaagcaccaaucucgugaagaacaaaugcgugaacuucaacuucaacggccugaccggcaccggcgugcugacagagagcaacaagaaguuccugccauuccagcaguuuggccgggauaucgccgauaccacagacgccguuagagauccccagacacuggaaauccuggacaucaccccaugcagcuucggcggagugucugugaucaccccuggcaccaacaccagcaaucagguggcagugcuguaccagggcgugaacuguaccgaagugcccguggccauucacgccgaucagcugacaccuacauggcggguguacuccaccggcagcaauguguuucagaccagagccggcugucugaucggagccgagcacgugaacaauagcuacgagugcgacauccccaucggcgcuggcaucugugccagcuaccagacacagacaaacagccccagacgggcuagaagcguggccagccagagcgugauugccuacacaaugucucugggcgccgagaacagcguggccuacuccaacaacucuaucgcuauccccaccaacuucaccaucagcgugaccaccgagauccugccuguguccaugaccaagaccagcguggacugcaccauguacaucugcggcgauuccaccgagugcuccaaccugcugcugcaguacggcagcuucugcacccagcugaauagagcccugacagggaucgccguggaacaggacaagaacacccaagagguguucgcccaagugaagcaaaucuacaagaccccuccuaucaaggacuucggcggcuucaauuucagccagauucugcccgauccuagcaagcccagcaagcggagcuucaucgaggaccugcuguucaacaaagugacacuggccgacgccggcuucaucaagcaguauggcgauugucugggcgacauugccgccagggaucugauuugcgcccagaaguuuaacggacugacagugcugccuccucugcugaccgaugagaugaucgcccaguacacaucugcccugcuggccggcacaaucacaagcggcuggacauuuggagcuggcgccgcucugcagauccccuuugcuaugcagauggccuaccgguucaacggcaucggagugacccagaaugugcuguacgagaaccagaagcugaucgccaaccaguucaacagcgccaucggcaagauccaggacagccugagcagcacagcaagcgcccugggaaagcugcaggacguggucaaccagaaugcccaggcacugaacacccuggucaagcagcuguccuccaacuucggcgccaucagcucugugcugaacgauauccugagcagacuggacaaggucgaggccgaggugcagaucgacagacugaucacaggcagacugcagagccuccagacauacgugacccagcagcugaucagagccgccgagauuagagccucugccaaucuggccgccaccaagaugucugagugugugcugggccagagcaagagaguggacuuuugcggcaagggcuaccaccugaugagcuucccucagucugccccucacggcgugguguuucugcacgugacauaugugcccgcucaagagaagaauuucaccaccgcuccagccaucugccacgacggcaaagcccacuuuccuagagaaggcguguucguguccaacggcacccauugguucgugacacagcggaacuucuacgagccccagaucaucaccaccgacaacaccuucgugucuggcaacugcgacguugugaucggcauugugaacaauaccguguacgacccucugcagcccgagcuggacagcuucaaagaggaacuggacaaguacuuuaagaaccacacaagccccgacguggaccugggcgauaucagcggaaucaaugccagcgucgugaacauccagaaagagaucgaccggcugaacgagguggccaagaaucugaacgagagccugaucgaccugcaagaacuggggaaguacgagcaguacaucaaguggcccugguacaucuggcugggcuuuaucgccggacugauugccaucgugauggucacaaucaugcuguguugcaugaccagcugcuguagcugccugaagggcuguuguagcuguggcagcugcugcaaguucgacgaggacgauucugagcccgugcugaagggcgugaaacugcacuacaccugauaauaggcuggagccucgguggccuagcuucuugccccuugggccuccccccagccccuccuccccuuccugcacccguacccccguggucuuugaauaaagucugagugggcggcaaaaaaaaaaaaaaaaaaaaaaaaaaaaaaaaaaaaaaaaaaaaaaaaaaaaaaaaaaaaaaaaaaaaaaaaaaaaaaaaaaaaaaaaaaaaaaaaaaaa

SEQ ID NO: 26132 - RNA, 4089 nt, Artificial Sequence
  SARS-CoV-2/Wuhan/WIV05/2019__EPI_ISL_402128 spike protein mRNA gc mod (1-1273)(H69del_V70del_Y453F_D614G_I692V_M1229I)
gggaaauaagagagaaaagaagaguaagaagaaauauaagaccccggcgccgccaccauguucguguuucuggugcugcugccccugguguccagccagugugugaaccugaccaccagaacacagcugccuccagccuacaccaacagcuucaccagaggcguguacuaccccgacaagguguucagauccagcgugcugcacucuacccaggaccuguuccugccuuucuucagcaacgugaccugguuccacgccaucuccggcaccaauggcaccaagagauucgacaaccccgugcugcccuucaacgacgggguguacuuugccagcaccgagaaguccaacaucaucagaggcuggaucuucggcaccacacuggacagcaagacccagagccugcugaucgugaacaacgccaccaacguggucaucaaagugugcgaguuccaguucugcaacgaccccuuccugggcgucuacuaccacaagaacaacaagagcuggauggaaagcgaguuccggguguacagcagcgccaacaacugcaccuucgaguacgugucccagccuuuccugauggaccuggaaggcaagcagggcaacuucaagaaccugcgcgaguucguguucaagaacaucgacggcuacuucaaaaucuacagcaagcacaccccuaucaaccucgugcgggaucugccucagggcuucucugcucuggaaccccugguggaucugcccaucggcaucaacaucacccgguuucagacacugcuggcccugcacagaagcuaccugacaccuggcgauagcagcagcggauggacagcuggugccgccgcuuacuaugugggcuaccugcagccuagaaccuuccugcugaaguacaacgagaacggcaccaucaccgacgccguggauugugcucuggauccucugagcgagacaaagugcacccugaaguccuucaccguggaaaagggcaucuaccagaccagcaacuuccgggugcagcccaccgaauccaucgugcgguuccccaauaucaccaaucugugccccuucggcgagguguucaaugccaccagauucgccucuguguacgccuggaaccggaagcggaucagcaauugcguggccgacuacuccgugcuguacaacuccgccagcuucagcaccuucaagugcuacggcguguccccuaccaagcugaacgaccugugcuucacaaacguguacgccgacagcuucgugauccggggagaugaagugcggcagauugccccuggacagacaggcaagaucgccgacuacaacuacaagcugcccgacgacuucaccggcugugugauugccuggaacagcaacaaccuggacuccaaagucggcggcaacuacaauuaccuguuccggcuguuccggaaguccaaucugaagcccuucgagcgggacaucagcaccgaaaucuaucaggccggcagcaccccuugcaacggcguggaaggcuucaacugcuacuucccacugcaguccuacggcuuucagcccacaaauggcgugggcuaucagcccuacagagugguggugcugagcuucgaacugcugcaugcuccugccacagugugcggcccuaagaaaagcaccaaucucgugaagaacaaaugcgugaacuucaacuucaacggccugaccggcaccggcgugcugacagagagcaacaagaaguuccugccauuccagcaguuuggccgggauaucgccgauaccacagacgccguuagagauccccagacacuggaaauccuggacaucaccccaugcagcuucggcggagugucugugaucaccccuggcaccaacaccagcaaucagguggcagugcuguaccagggcgugaacuguaccgaagugcccguggccauucacgccgaucagcugacaccuacauggcggguguacuccaccggcagcaauguguuucagaccagagccggcugucugaucggagccgagcacgugaacaauagcuacgagugcgacauccccaucggcgcuggcaucugugccagcuaccagacacagacaaacagccccagacgggcuagaagcguggccagccagagcgugauugccuacacaaugucucugggcgccgagaacagcguggccuacuccaacaacucuaucgcuauccccaccaacuucaccaucagcgugaccaccgagauccugccuguguccaugaccaagaccagcguggacugcaccauguacaucugcggcgauuccaccgagugcuccaaccugcugcugcaguacggcagcuucugcacccagcugaauagagcccugacagggaucgccguggaacaggacaagaacacccaagagguguucgcccaagugaagcaaaucuacaagaccccuccuaucaaggacuucggcggcuucaauuucagccagauucugcccgauccuagcaagcccagcaagcggagcuucaucgaggaccugcuguucaacaaagugacacuggccgacgccggcuucaucaagcaguauggcgauugucugggcgacauugccgccagggaucugauuugcgcccagaaguuuaacggacugacagugcugccuccucugcugaccgaugagaugaucgcccaguacacaucugcccugcuggccggcacaaucacaagcggcuggacauuuggagcuggcgccgcucugcagauccccuuugcuaugcagauggccuaccgguucaacggcaucggagugacccagaaugugcuguacgagaaccagaagcugaucgccaaccaguucaacagcgccaucggcaagauccaggacagccugagcagcacagcaagcgcccugggaaagcugcaggacguggucaaccagaaugcccaggcacugaacacccuggucaagcagcuguccuccaacuucggcgccaucagcucugugcugaacgauauccugagcagacuggacaaggucgaggccgaggugcagaucgacagacugaucacaggcagacugcagagccuccagacauacgugacccagcagcugaucagagccgccgagauuagagccucugccaaucuggccgccaccaagaugucugagugugugcugggccagagcaagagaguggacuuuugcggcaagggcuaccaccugaugagcuucccucagucugccccucacggcgugguguuucugcacgugacauaugugcccgcucaagagaagaauuucaccaccgcuccagccaucugccacgacggcaaagcccacuuuccuagagaaggcguguucguguccaacggcacccauugguucgugacacagcggaacuucuacgagccccagaucaucaccaccgacaacaccuucgugucuggcaacugcgacguugugaucggcauugugaacaauaccguguacgacccucugcagcccgagcuggacagcuucaaagaggaacuggacaaguacuuuaagaaccacacaagccccgacguggaccugggcgauaucagcggaaucaaugccagcgucgugaacauccagaaagagaucgaccggcugaacgagguggccaagaaucugaacgagagccugaucgaccugcaagaacuggggaaguacgagcaguacaucaaguggcccugguacaucuggcugggcuuuaucgccggacugauugccaucgugaucgucacaaucaugcuguguugcaugaccagcugcuguagcugccugaagggcuguuguagcuguggcagcugcugcaaguucgacgaggacgauucugagcccgugcugaagggcgugaaacugcacuacaccugauaauaggcuggagccucgguggccuagcuucuugccccuugggccuccccccagccccuccuccccuuccugcacccguacccccguggucuuugaauaaagucugagugggcggcaaaaaaaaaaaaaaaaaaaaaaaaaaaaaaaaaaaaaaaaaaaaaaaaaaaaaaaaaaaaaaaaaaaaaaaaaaaaaaaaaaaaaaaaaaaaaaaaaaaa

SEQ ID NO: 26133 - RNA, 4086 nt, Artificial Sequence
  SARS-CoV-2/Wuhan/WIV05/2019__EPI_ISL_402128 spike protein mRNA gc mod (1-1273)(H69del_V70del_Y144del_N501Y_A570D_D614G_P681H_T716I_S982 A_D1118H)
gggaaauaagagagaaaagaagaguaagaagaaauauaagaccccggcgccgccaccauguucguguuucuggugcugcugccccugguguccagccagugugugaaccugaccaccagaacacagcugccuccagccuacaccaacagcuucaccagaggcguguacuaccccgacaagguguucagauccagcgugcugcacucuacccaggaccuguuccugccuuucuucagcaacgugaccugguuccacgccaucuccggcaccaauggcaccaagagauucgacaaccccgugcugcccuucaacgacgggguguacuuugccagcaccgagaaguccaacaucaucagaggcuggaucuucggcaccacacuggacagcaagacccagagccugcugaucgugaacaacgccaccaacguggucaucaaagugugcgaguuccaguucugcaacgaccccuuccugggcgucuaccacaagaacaacaagagcuggauggaaagcgaguuccggguguacagcagcgccaacaacugcaccuucgaguacgugucccagccuuuccugauggaccuggaaggcaagcagggcaacuucaagaaccugcgcgaguucguguucaagaacaucgacggcuacuucaaaaucuacagcaagcacaccccuaucaaccucgugcgggaucugccucagggcuucucugcucuggaaccccugguggaucugcccaucggcaucaacaucacccgguuucagacacugcuggcccugcacagaagcuaccugacaccuggcgauagcagcagcggauggacagcuggugccgccgcuuacuaugugggcuaccugcagccuagaaccuuccugcugaaguacaacgagaacggcaccaucaccgacgccguggauugugcucuggauccucugagcgagacaaagugcacccugaaguccuucaccguggaaaagggcaucuaccagaccagcaacuuccgggugcagcccaccgaauccaucgugcgguuccccaauaucaccaaucugugccccuucggcgagguguucaaugccaccagauucgccucuguguacgccuggaaccggaagcggaucagcaauugcguggccgacuacuccgugcuguacaacuccgccagcuucagcaccuucaagugcuacggcguguccccuaccaagcugaacgaccugugcuucacaaacguguacgccgacagcuucgugauccggggagaugaagugcggcagauugccccuggacagacaggcaagaucgccgacuacaacuacaagcugcccgacgacuucaccggcugugugauugccuggaacagcaacaaccuggacuccaaagucggcggcaacuacaauuaccuguaccggcuguuccggaaguccaaucugaagcccuucgagcgggacaucagcaccgaaaucuaucaggccggcagcaccccuugcaacggcguggaaggcuucaacugcuacuucccacugcaguccuacggcuuucagcccacauacggcgugggcuaucagcccuacagagugguggugcugagcuucgaacugcugcaugcuccugccacagugugcggcccuaagaaaagcaccaaucucgugaagaacaaaugcgugaacuucaacuucaacggccugaccggcaccggcgugcugacagagagcaacaagaaguuccugccauuccagcaguuuggccgggauaucgacgauaccacagacgccguuagagauccccagacacuggaaauccuggacaucaccccaugcagcuucggcggagugucugugaucaccccuggcaccaacaccagcaaucagguggcagugcuguaccagggcgugaacuguaccgaagugcccguggccauucacgccgaucagcugacaccuacauggcggguguacuccaccggcagcaauguguuucagaccagagccggcugucugaucggagccgagcacgugaacaauagcuacgagugcgacauccccaucggcgcuggcaucugugccagcuaccagacacagacaaacagccacagacgggcuagaagcguggccagccagagcaucauugccuacacaaugucucugggcgccgagaacagcguggccuacuccaacaacucuaucgcuauccccaucaacuucaccaucagcgugaccaccgagauccugccuguguccaugaccaagaccagcguggacugcaccauguacaucugcggcgauuccaccgagugcuccaaccugcugcugcaguacggcagcuucugcacccagcugaauagagcccugacagggaucgccguggaacaggacaagaacacccaagagguguucgcccaagugaagcaaaucuacaagaccccuccuaucaaggacuucggcggcuucaauuucagccagauucugcccgauccuagcaagcccagcaagcggagcuucaucgaggaccugcuguucaacaaagugacacuggccgacgccggcuucaucaagcaguauggcgauugucugggcgacauugccgccagggaucugauuugcgcccagaaguuuaacggacugacagugcugccuccucugcugaccgaugagaugaucgcccaguacacaucugcccugcuggccggcacaaucacaagcggcuggacauuuggagcuggcgccgcucugcagauccccuuugcuaugcagauggccuaccgguucaacggcaucggagugacccagaaugugcuguacgagaaccagaagcugaucgccaaccaguucaacagcgccaucggcaagauccaggacagccugagcagcacagcaagcgcccugggaaagcugcaggacguggucaaccagaaugcccaggcacugaacacccuggucaagcagcuguccuccaacuucggcgccaucagcucugugcugaacgauauccuggccagacuggacaaggucgaggccgaggugcagaucgacagacugaucacaggcagacugcagagccuccagacauacgugacccagcagcugaucagagccgccgagauuagagccucugccaaucuggccgccaccaagaugucugagugugugcugggccagagcaagagaguggacuuuugcggcaagggcuaccaccugaugagcuucccucagucugccccucacggcgugguguuucugcacgugacauaugugcccgcucaagagaagaauuucaccaccgcuccagccaucugccacgacggcaaagcccacuuuccuagagaaggcguguucguguccaacggcacccauugguucgugacacagcggaacuucuacgagccccagaucaucaccacccacaacaccuucgugucuggcaacugcgacguugugaucggcauugugaacaauaccguguacgacccucugcagcccgagcuggacagcuucaaagaggaacuggacaaguacuuuaagaaccacacaagccccgacguggaccugggcgauaucagcggaaucaaugccagcgucgugaacauccagaaagagaucgaccggcugaacgagguggccaagaaucugaacgagagccugaucgaccugcaagaacuggggaaguacgagcaguacaucaaguggcccugguacaucuggcugggcuuuaucgccggacugauugccaucgugauggucacaaucaugcuguguugcaugaccagcugcuguagcugccugaagggcuguuguagcuguggcagcugcugcaaguucgacgaggacgauucugagcccgugcugaagggcgugaaacugcacuacaccugauaauaggcuggagccucgguggccuagcuucuugccccuugggccuccccccagccccuccuccccuuccugcacccguacccccguggucuuugaauaaagucugagugggcggcaaaaaaaaaaaaaaaaaaaaaaaaaaaaaaaaaaaaaaaaaaaaaaaaaaaaaaaaaaaaaaaaaaaaaaaaaaaaaaaaaaaaaaaaaaaaaaaaaaaa

SEQ ID NO: 26134 - RNA, 4095 nt, Artificial Sequence
  SARS-CoV-2/Wuhan/WIV05/2019__EPI_ISL_402128 spike protein mRNA gc mod (1-1273)(K417N_E484K_N501Y_D614G)
gggaaauaagagagaaaagaagaguaagaagaaauauaagaccccggcgccgccaccauguucguguuucuggugcugcugccccugguguccagccagugugugaaccugaccaccagaacacagcugccuccagccuacaccaacagcuucaccagaggcguguacuaccccgacaagguguucagauccagcgugcugcacucuacccaggaccuguuccugccuuucuucagcaacgugaccugguuccacgccauccacguguccggcaccaauggcaccaagagauucgacaaccccgugcugcccuucaacgacgggguguacuuugccagcaccgagaaguccaacaucaucagaggcuggaucuucggcaccacacuggacagcaagacccagagccugcugaucgugaacaacgccaccaacguggucaucaaagugugcgaguuccaguucugcaacgaccccuuccugggcgucuacuaccacaagaacaacaagagcuggauggaaagcgaguuccggguguacagcagcgccaacaacugcaccuucgaguacgugucccagccuuuccugauggaccuggaaggcaagcagggcaacuucaagaaccugcgcgaguucguguucaagaacaucgacggcuacuucaaaaucuacagcaagcacaccccuaucaaccucgugcgggaucugccucagggcuucucugcucuggaaccccugguggaucugcccaucggcaucaacaucacccgguuucagacacugcuggcccugcacagaagcuaccugacaccuggcgauagcagcagcggauggacagcuggugccgccgcuuacuaugugggcuaccugcagccuagaaccuuccugcugaaguacaacgagaacggcaccaucaccgacgccguggauugugcucuggauccucugagcgagacaaagugcacccugaaguccuucaccguggaaaagggcaucuaccagaccagcaacuuccgggugcagcccaccgaauccaucgugcgguuccccaauaucaccaaucugugccccuucggcgagguguucaaugccaccagauucgccucuguguacgccuggaaccggaagcggaucagcaauugcguggccgacuacuccgugcuguacaacuccgccagcuucagcaccuucaagugcuacggcguguccccuaccaagcugaacgaccugugcuucacaaacguguacgccgacagcuucgugauccggggagaugaagugcggcagauugccccuggacagacaggcaacaucgccgacuacaacuacaagcugcccgacgacuucaccggcugugugauugccuggaacagcaacaaccuggacuccaaagucggcggcaacuacaauuaccuguaccggcuguuccggaaguccaaucugaagcccuucgagcgggacaucagcaccgaaaucuaucaggccggcagcaccccuugcaacggcgugaagggcuucaacugcuacuucccacugcaguccuacggcuuucagcccacauacggcgugggcuaucagcccuacagagugguggugcugagcuucgaacugcugcaugcuccugccacagugugcggcccuaagaaaagcaccaaucucgugaagaacaaaugcgugaacuucaacuucaacggccugaccggcaccggcgugcugacagagagcaacaagaaguuccugccauuccagcaguuuggccgggauaucgccgauaccacagacgccguuagagauccccagacacuggaaauccuggacaucaccccaugcagcuucggcggagugucugugaucaccccuggcaccaacaccagcaaucagguggcagugcuguaccagggcgugaacuguaccgaagugcccguggccauucacgccgaucagcugacaccuacauggcggguguacuccaccggcagcaauguguuucagaccagagccggcugucugaucggagccgagcacgugaacaauagcuacgagugcgacauccccaucggcgcuggcaucugugccagcuaccagacacagacaaacagccccagacgggcuagaagcguggccagccagagcaucauugccuacacaaugucucugggcgccgagaacagcguggccuacuccaacaacucuaucgcuauccccaccaacuucaccaucagcgugaccaccgagauccugccuguguccaugaccaagaccagcguggacugcaccauguacaucugcggcgauuccaccgagugcuccaaccugcugcugcaguacggcagcuucugcacccagcugaauagagcccugacagggaucgccguggaacaggacaagaacacccaagagguguucgcccaagugaagcaaaucuacaagaccccuccuaucaaggacuucggcggcuucaauuucagccagauucugcccgauccuagcaagcccagcaagcggagcuucaucgaggaccugcuguucaacaaagugacacuggccgacgccggcuucaucaagcaguauggcgauugucugggcgacauugccgccagggaucugauuugcgcccagaaguuuaacggacugacagugcugccuccucugcugaccgaugagaugaucgcccaguacacaucugcccugcuggccggcacaaucacaagcggcuggacauuuggagcuggcgccgcucugcagauccccuuugcuaugcagauggccuaccgguucaacggcaucggagugacccagaaugugcuguacgagaaccagaagcugaucgccaaccaguucaacagcgccaucggcaagauccaggacagccugagcagcacagcaagcgcccugggaaagcugcaggacguggucaaccagaaugcccaggcacugaacacccuggucaagcagcuguccuccaacuucggcgccaucagcucugugcugaacgauauccugagcagacuggacaaggucgaggccgaggugcagaucgacagacugaucacaggcagacugcagagccuccagacauacgugacccagcagcugaucagagccgccgagauuagagccucugccaaucuggccgccaccaagaugucugagugugugcugggccagagcaagagaguggacuuuugcggcaagggcuaccaccugaugagcuucccucagucugccccucacggcgugguguuucugcacgugacauaugugcccgcucaagagaagaauuucaccaccgcuccagccaucugccacgacggcaaagcccacuuuccuagagaaggcguguucguguccaacggcacccauugguucgugacacagcggaacuucuacgagccccagaucaucaccaccgacaacaccuucgugucuggcaacugcgacguugugaucggcauugugaacaauaccguguacgacccucugcagcccgagcuggacagcuucaaagaggaacuggacaaguacuuuaagaaccacacaagccccgacguggaccugggcgauaucagcggaaucaaugccagcgucgugaacauccagaaagagaucgaccggcugaacgagguggccaagaaucugaacgagagccugaucgaccugcaagaacuggggaaguacgagcaguacaucaaguggcccugguacaucuggcugggcuuuaucgccggacugauugccaucgugauggucacaaucaugcuguguugcaugaccagcugcuguagcugccugaagggcuguuguagcuguggcagcugcugcaaguucgacgaggacgauucugagcccgugcugaagggcgugaaacugcacuacaccugauaauaggcuggagccucgguggccuagcuucuugccccuugggccuccccccagccccuccuccccuuccugcacccguacccccguggucuuugaauaaagucugagugggcggcaaaaaaaaaaaaaaaaaaaaaaaaaaaaaaaaaaaaaaaaaaaaaaaaaaaaaaaaaaaaaaaaaaaaaaaaaaaaaaaaaaaaaaaaaaaaaaaaaaaa

SEQ ID NO: 26135 - RNA, 4086 nt, Artificial Sequence
  SARS-CoV-2/Wuhan/WIV05/2019__EPI_ISL_402128 spike protein mRNA gc mod (1-1273)(L18F_D80A_D215G_L242del_A243del_L244del_R246I_K417N_E484 K_N501Y_D614G_A701V)
gggaaauaagagagaaaagaagaguaagaagaaauauaagaccccggcgccgccaccauguucguguuucuggugcugcugccccugguguccagccagugugugaacuucaccaccagaacacagcugccuccagccuacaccaacagcuucaccagaggcguguacuaccccgacaagguguucagauccagcgugcugcacucuacccaggaccuguuccugccuuucuucagcaacgugaccugguuccacgccauccacguguccggcaccaauggcaccaagagauucgccaaccccgugcugcccuucaacgacgggguguacuuugccagcaccgagaaguccaacaucaucagaggcuggaucuucggcaccacacuggacagcaagacccagagccugcugaucgugaacaacgccaccaacguggucaucaaagugugcgaguuccaguucugcaacgaccccuuccugggcgucuacuaccacaagaacaacaagagcuggauggaaagcgaguuccggguguacagcagcgccaacaacugcaccuucgaguacgugucccagccuuuccugauggaccuggaaggcaagcagggcaacuucaagaaccugcgcgaguucguguucaagaacaucgacggcuacuucaaaaucuacagcaagcacaccccuaucaaccucgugcggggccugccucagggcuucucugcucuggaaccccugguggaucugcccaucggcaucaacaucacccgguuucagacacugcacaucagcuaccugacaccuggcgauagcagcagcggauggacagcuggugccgccgcuuacuaugugggcuaccugcagccuagaaccuuccugcugaaguacaacgagaacggcaccaucaccgacgccguggauugugcucuggauccucugagcgagacaaagugcacccugaaguccuucaccguggaaaagggcaucuaccagaccagcaacuuccgggugcagcccaccgaauccaucgugcgguuccccaauaucaccaaucugugccccuucggcgagguguucaaugccaccagauucgccucuguguacgccuggaaccggaagcggaucagcaauugcguggccgacuacuccgugcuguacaacuccgccagcuucagcaccuucaagugcuacggcguguccccuaccaagcugaacgaccugugcuucacaaacguguacgccgacagcuucgugauccggggagaugaagugcggcagauugccccuggacagacaggcaacaucgccgacuacaacuacaagcugcccgacgacuucaccggcugugugauugccuggaacagcaacaaccuggacuccaaagucggcggcaacuacaauuaccuguaccggcuguuccggaaguccaaucugaagcccuucgagcgggacaucagcaccgaaaucuaucaggccggcagcaccccuugcaacggcgugaagggcuucaacugcuacuucccacugcaguccuacggcuuucagcccacauacggcgugggcuaucagcccuacagagugguggugcugagcuucgaacugcugcaugcuccugccacagugugcggcccuaagaaaagcaccaaucucgugaagaacaaaugcgugaacuucaacuucaacggccugaccggcaccggcgugcugacagagagcaacaagaaguuccugccauuccagcaguuuggccgggauaucgccgauaccacagacgccguuagagauccccagacacuggaaauccuggacaucaccccaugcagcuucggcggagugucugugaucaccccuggcaccaacaccagcaaucagguggcagugcuguaccagggcgugaacuguaccgaagugcccguggccauucacgccgaucagcugacaccuacauggcggguguacuccaccggcagcaauguguuucagaccagagccggcugucugaucggagccgagcacgugaacaauagcuacgagugcgacauccccaucggcgcuggcaucugugccagcuaccagacacagacaaacagccccagacgggcuagaagcguggccagccagagcaucauugccuacacaaugucucugggcguggagaacagcguggccuacuccaacaacucuaucgcuauccccaccaacuucaccaucagcgugaccaccgagauccugccuguguccaugaccaagaccagcguggacugcaccauguacaucugcggcgauuccaccgagugcuccaaccugcugcugcaguacggcagcuucugcacccagcugaauagagcccugacagggaucgccguggaacaggacaagaacacccaagagguguucgcccaagugaagcaaaucuacaagaccccuccuaucaaggacuucggcggcuucaauuucagccagauucugcccgauccuagcaagcccagcaagcggagcuucaucgaggaccugcuguucaacaaagugacacuggccgacgccggcuucaucaagcaguauggcgauugucugggcgacauugccgccagggaucugauuugcgcccagaaguuuaacggacugacagugcugccuccucugcugaccgaugagaugaucgcccaguacacaucugcccugcuggccggcacaaucacaagcggcuggacauuuggagcuggcgccgcucugcagauccccuuugcuaugcagauggccuaccgguucaacggcaucggagugacccagaaugugcuguacgagaaccagaagcugaucgccaaccaguucaacagcgccaucggcaagauccaggacagccugagcagcacagcaagcgcccugggaaagcugcaggacguggucaaccagaaugcccaggcacugaacacccuggucaagcagcuguccuccaacuucggcgccaucagcucugugcugaacgauauccugagcagacuggacaaggucgaggccgaggugcagaucgacagacugaucacaggcagacugcagagccuccagacauacgugacccagcagcugaucagagccgccgagauuagagccucugccaaucuggccgccaccaagaugucugagugugugcugggccagagcaagagaguggacuuuugcggcaagggcuaccaccugaugagcuucccucagucugccccucacggcgugguguuucugcacgugacauaugugcccgcucaagagaagaauuucaccaccgcuccagccaucugccacgacggcaaagcccacuuuccuagagaaggcguguucguguccaacggcacccauugguucgugacacagcggaacuucuacgagccccagaucaucaccaccgacaacaccuucgugucuggcaacugcgacguugugaucggcauugugaacaauaccguguacgacccucugcagcccgagcuggacagcuucaaagaggaacuggacaaguacuuuaagaaccacacaagccccgacguggaccugggcgauaucagcggaaucaaugccagcgucgugaacauccagaaagagaucgaccggcugaacgagguggccaagaaucugaacgagagccugaucgaccugcaagaacuggggaaguacgagcaguacaucaaguggcccugguacaucuggcugggcuuuaucgccggacugauugccaucgugauggucacaaucaugcuguguugcaugaccagcugcuguagcugccugaagggcuguuguagcuguggcagcugcugcaaguucgacgaggacgauucugagcccgugcugaagggcgugaaacugcacuacaccugauaauaggcuggagccucgguggccuagcuucuugccccuugggccuccccccagccccuccuccccuuccugcacccguacccccguggucuuugaauaaagucugagugggcggcaaaaaaaaaaaaaaaaaaaaaaaaaaaaaaaaaaaaaaaaaaaaaaaaaaaaaaaaaaaaaaaaaaaaaaaaaaaaaaaaaaaaaaaaaaaaaaaaaaaa

SEQ ID NO: 26136 - RNA, 4095 nt, Artificial Sequence
  SARS-CoV-2/Wuhan/WIV05/2019__EPI_ISL_402128 spike protein mRNA gc mod (1-1273)(E484K_D614G)
gggaaauaagagagaaaagaagaguaagaagaaauauaagaccccggcgccgccaccauguucguguuucuggugcugcugccccugguguccagccagugugugaaccugaccaccagaacacagcugccuccagccuacaccaacagcuucaccagaggcguguacuaccccgacaagguguucagauccagcgugcugcacucuacccaggaccuguuccugccuuucuucagcaacgugaccugguuccacgccauccacguguccggcaccaauggcaccaagagauucgacaaccccgugcugcccuucaacgacgggguguacuuugccagcaccgagaaguccaacaucaucagaggcuggaucuucggcaccacacuggacagcaagacccagagccugcugaucgugaacaacgccaccaacguggucaucaaagugugcgaguuccaguucugcaacgaccccuuccugggcgucuacuaccacaagaacaacaagagcuggauggaaagcgaguuccggguguacagcagcgccaacaacugcaccuucgaguacgugucccagccuuuccugauggaccuggaaggcaagcagggcaacuucaagaaccugcgcgaguucguguucaagaacaucgacggcuacuucaaaaucuacagcaagcacaccccuaucaaccucgugcgggaucugccucagggcuucucugcucuggaaccccugguggaucugcccaucggcaucaacaucacccgguuucagacacugcuggcccugcacagaagcuaccugacaccuggcgauagcagcagcggauggacagcuggugccgccgcuuacuaugugggcuaccugcagccuagaaccuuccugcugaaguacaacgagaacggcaccaucaccgacgccguggauugugcucuggauccucugagcgagacaaagugcacccugaaguccuucaccguggaaaagggcaucuaccagaccagcaacuuccgggugcagcccaccgaauccaucgugcgguuccccaauaucaccaaucugugccccuucggcgagguguucaaugccaccagauucgccucuguguacgccuggaaccggaagcggaucagcaauugcguggccgacuacuccgugcuguacaacuccgccagcuucagcaccuucaagugcuacggcguguccccuaccaagcugaacgaccugugcuucacaaacguguacgccgacagcuucgugauccggggagaugaagugcggcagauugccccuggacagacaggcaagaucgccgacuacaacuacaagcugcccgacgacuucaccggcugugugauugccuggaacagcaacaaccuggacuccaaagucggcggcaacuacaauuaccuguaccggcuguuccggaaguccaaucugaagcccuucgagcgggacaucagcaccgaaaucuaucaggccggcagcaccccuugcaacggcgugaagggcuucaacugcuacuucccacugcaguccuacggcuuucagcccacaaauggcgugggcuaucagcccuacagagugguggugcugagcuucgaacugcugcaugcuccugccacagugugcggcccuaagaaaagcaccaaucucgugaagaacaaaugcgugaacuucaacuucaacggccugaccggcaccggcgugcugacagagagcaacaagaaguuccugccauuccagcaguuuggccgggauaucgccgauaccacagacgccguuagagauccccagacacuggaaauccuggacaucaccccaugcagcuucggcggagugucugugaucaccccuggcaccaacaccagcaaucagguggcagugcuguaccagggcgugaacuguaccgaagugcccguggccauucacgccgaucagcugacaccuacauggcggguguacuccaccggcagcaauguguuucagaccagagccggcugucugaucggagccgagcacgugaacaauagcuacgagugcgacauccccaucggcgcuggcaucugugccagcuaccagacacagacaaacagccccagacgggcuagaagcguggccagccagagcaucauugccuacacaaugucucugggcgccgagaacagcguggccuacuccaacaacucuaucgcuauccccaccaacuucaccaucagcgugaccaccgagauccugccuguguccaugaccaagaccagcguggacugcaccauguacaucugcggcgauuccaccgagugcuccaaccugcugcugcaguacggcagcuucugcacccagcugaauagagcccugacagggaucgccguggaacaggacaagaacacccaagagguguucgcccaagugaagcaaaucuacaagaccccuccuaucaaggacuucggcggcuucaauuucagccagauucugcccgauccuagcaagcccagcaagcggagcuucaucgaggaccugcuguucaacaaagugacacuggccgacgccggcuucaucaagcaguauggcgauugucugggcgacauugccgccagggaucugauuugcgcccagaaguuuaacggacugacagugcugccuccucugcugaccgaugagaugaucgcccaguacacaucugcccugcuggccggcacaaucacaagcggcuggacauuuggagcuggcgccgcucugcagauccccuuugcuaugcagauggccuaccgguucaacggcaucggagugacccagaaugugcuguacgagaaccagaagcugaucgccaaccaguucaacagcgccaucggcaagauccaggacagccugagcagcacagcaagcgcccugggaaagcugcaggacguggucaaccagaaugcccaggcacugaacacccuggucaagcagcuguccuccaacuucggcgccaucagcucugugcugaacgauauccugagcagacuggacaaggucgaggccgaggugcagaucgacagacugaucacaggcagacugcagagccuccagacauacgugacccagcagcugaucagagccgccgagauuagagccucugccaaucuggccgccaccaagaugucugagugugugcugggccagagcaagagaguggacuuuugcggcaagggcuaccaccugaugagcuucccucagucugccccucacggcgugguguuucugcacgugacauaugugcccgcucaagagaagaauuucaccaccgcuccagccaucugccacgacggcaaagcccacuuuccuagagaaggcguguucguguccaacggcacccauugguucgugacacagcggaacuucuacgagccccagaucaucaccaccgacaacaccuucgugucuggcaacugcgacguugugaucggcauugugaacaauaccguguacgacccucugcagcccgagcuggacagcuucaaagaggaacuggacaaguacuuuaagaaccacacaagccccgacguggaccugggcgauaucagcggaaucaaugccagcgucgugaacauccagaaagagaucgaccggcugaacgagguggccaagaaucugaacgagagccugaucgaccugcaagaacuggggaaguacgagcaguacaucaaguggcccugguacaucuggcugggcuuuaucgccggacugauugccaucgugauggucacaaucaugcuguguugcaugaccagcugcuguagcugccugaagggcuguuguagcuguggcagcugcugcaaguucgacgaggacgauucugagcccgugcugaagggcgugaaacugcacuacaccugauaauaggcuggagccucgguggccuagcuucuugccccuugggccuccccccagccccuccuccccuuccugcacccguacccccguggucuuugaauaaagucugagugggcggcaaaaaaaaaaaaaaaaaaaaaaaaaaaaaaaaaaaaaaaaaaaaaaaaaaaaaaaaaaaaaaaaaaaaaaaaaaaaaaaaaaaaaaaaaaaaaaaaaaaa

SEQ ID NO: 26137 - RNA, 4095 nt, Artificial Sequence
  SARS-CoV-2/Wuhan/WIV05/2019__EPI_ISL_402128 spike protein mRNA gc mod (1-1273)(L18F_T20N_P26S_D138Y_R190S_K417T_E484K_N501Y_D614G_H655Y _T1027I)
gggaaauaagagagaaaagaagaguaagaagaaauauaagaccccggcgccgccaccauguucguguuucuggugcugcugccccugguguccagccagugugugaacuucaccaacagaacacagcugccuagcgccuacaccaacagcuucaccagaggcguguacuaccccgacaagguguucagauccagcgugcugcacucuacccaggaccuguuccugccuuucuucagcaacgugaccugguuccacgccauccacguguccggcaccaauggcaccaagagauucgacaaccccgugcugcccuucaacgacgggguguacuuugccagcaccgagaaguccaacaucaucagaggcuggaucuucggcaccacacuggacagcaagacccagagccugcugaucgugaacaacgccaccaacguggucaucaaagugugcgaguuccaguucugcaacuaccccuuccugggcgucuacuaccacaagaacaacaagagcuggauggaaagcgaguuccggguguacagcagcgccaacaacugcaccuucgaguacgugucccagccuuuccugauggaccuggaaggcaagcagggcaacuucaagaaccugagcgaguucguguucaagaacaucgacggcuacuucaaaaucuacagcaagcacaccccuaucaaccucgugcgggaucugccucagggcuucucugcucuggaaccccugguggaucugcccaucggcaucaacaucacccgguuucagacacugcuggcccugcacagaagcuaccugacaccuggcgauagcagcagcggauggacagcuggugccgccgcuuacuaugugggcuaccugcagccuagaaccuuccugcugaaguacaacgagaacggcaccaucaccgacgccguggauugugcucuggauccucugagcgagacaaagugcacccugaaguccuucaccguggaaaagggcaucuaccagaccagcaacuuccgggugcagcccaccgaauccaucgugcgguuccccaauaucaccaaucugugccccuucggcgagguguucaaugccaccagauucgccucuguguacgccuggaaccggaagcggaucagcaauugcguggccgacuacuccgugcuguacaacuccgccagcuucagcaccuucaagugcuacggcguguccccuaccaagcugaacgaccugugcuucacaaacguguacgccgacagcuucgugauccggggagaugaagugcggcagauugccccuggacagacaggcaccaucgccgacuacaacuacaagcugcccgacgacuucaccggcugugugauugccuggaacagcaacaaccuggacuccaaagucggcggcaacuacaauuaccuguaccggcuguuccggaaguccaaucugaagcccuucgagcgggacaucagcaccgaaaucuaucaggccggcagcaccccuugcaacggcgugaagggcuucaacugcuacuucccacugcaguccuacggcuuucagcccacauacggcgugggcuaucagcccuacagagugguggugcugagcuucgaacugcugcaugcuccugccacagugugcggcccuaagaaaagcaccaaucucgugaagaacaaaugcgugaacuucaacuucaacggccugaccggcaccggcgugcugacagagagcaacaagaaguuccugccauuccagcaguuuggccgggauaucgccgauaccacagacgccguuagagauccccagacacuggaaauccuggacaucaccccaugcagcuucggcggagugucugugaucaccccuggcaccaacaccagcaaucagguggcagugcuguaccagggcgugaacuguaccgaagugcccguggccauucacgccgaucagcugacaccuacauggcggguguacuccaccggcagcaauguguuucagaccagagccggcugucugaucggagccgaguacgugaacaauagcuacgagugcgacauccccaucggcgcuggcaucugugccagcuaccagacacagacaaacagccccagacgggcuagaagcguggccagccagagcaucauugccuacacaaugucucugggcgccgagaacagcguggccuacuccaacaacucuaucgcuauccccaccaacuucaccaucagcgugaccaccgagauccugccuguguccaugaccaagaccagcguggacugcaccauguacaucugcggcgauuccaccgagugcuccaaccugcugcugcaguacggcagcuucugcacccagcugaauagagcccugacagggaucgccguggaacaggacaagaacacccaagagguguucgcccaagugaagcaaaucuacaagaccccuccuaucaaggacuucggcggcuucaauuucagccagauucugcccgauccuagcaagcccagcaagcggagcuucaucgaggaccugcuguucaacaaagugacacuggccgacgccggcuucaucaagcaguauggcgauugucugggcgacauugccgccagggaucugauuugcgcccagaaguuuaacggacugacagugcugccuccucugcugaccgaugagaugaucgcccaguacacaucugcccugcuggccggcacaaucacaagcggcuggacauuuggagcuggcgccgcucugcagauccccuuugcuaugcagauggccuaccgguucaacggcaucggagugacccagaaugugcuguacgagaaccagaagcugaucgccaaccaguucaacagcgccaucggcaagauccaggacagccugagcagcacagcaagcgcccugggaaagcugcaggacguggucaaccagaaugcccaggcacugaacacccuggucaagcagcuguccuccaacuucggcgccaucagcucugugcugaacgauauccugagcagacuggacaaggucgaggccgaggugcagaucgacagacugaucacaggcagacugcagagccuccagacauacgugacccagcagcugaucagagccgccgagauuagagccucugccaaucuggccgccaucaagaugucugagugugugcugggccagagcaagagaguggacuuuugcggcaagggcuaccaccugaugagcuucccucagucugccccucacggcgugguguuucugcacgugacauaugugcccgcucaagagaagaauuucaccaccgcuccagccaucugccacgacggcaaagcccacuuuccuagagaaggcguguucguguccaacggcacccauugguucgugacacagcggaacuucuacgagccccagaucaucaccaccgacaacaccuucgugucuggcaacugcgacguugugaucggcauugugaacaauaccguguacgacccucugcagcccgagcuggacagcuucaaagaggaacuggacaaguacuuuaagaaccacacaagccccgacguggaccugggcgauaucagcggaaucaaugccagcgucgugaacauccagaaagagaucgaccggcugaacgagguggccaagaaucugaacgagagccugaucgaccugcaagaacuggggaaguacgagcaguacaucaaguggcccugguacaucuggcugggcuuuaucgccggacugauugccaucgugauggucacaaucaugcuguguugcaugaccagcugcuguagcugccugaagggcuguuguagcuguggcagcugcugcaaguucgacgaggacgauucugagcccgugcugaagggcgugaaacugcacuacaccugauaauaggcuggagccucgguggccuagcuucuugccccuugggccuccccccagccccuccuccccuuccugcacccguacccccguggucuuugaauaaagucugagugggcggcaaaaaaaaaaaaaaaaaaaaaaaaaaaaaaaaaaaaaaaaaaaaaaaaaaaaaaaaaaaaaaaaaaaaaaaaaaaaaaaaaaaaaaaaaaaaaaaaaaaa

SEQ ID NO: 26138 - RNA, 4095 nt, Artificial Sequence
  SARS-CoV-2/Wuhan/WIV05/2019__EPI_ISL_402128 spike protein mRNA gc mod (1-1273)(S13I_W152C_L452R_D614G)
gggaaauaagagagaaaagaagaguaagaagaaauauaagaccccggcgccgccaccauguucguguuucuggugcugcugccccugguguccauccagugugugaaccugaccaccagaacacagcugccuccagccuacaccaacagcuucaccagaggcguguacuaccccgacaagguguucagauccagcgugcugcacucuacccaggaccuguuccugccuuucuucagcaacgugaccugguuccacgccauccacguguccggcaccaauggcaccaagagauucgacaaccccgugcugcccuucaacgacgggguguacuuugccagcaccgagaaguccaacaucaucagaggcuggaucuucggcaccacacuggacagcaagacccagagccugcugaucgugaacaacgccaccaacguggucaucaaagugugcgaguuccaguucugcaacgaccccuuccugggcgucuacuaccacaagaacaacaagagcugcauggaaagcgaguuccggguguacagcagcgccaacaacugcaccuucgaguacgugucccagccuuuccugauggaccuggaaggcaagcagggcaacuucaagaaccugcgcgaguucguguucaagaacaucgacggcuacuucaaaaucuacagcaagcacaccccuaucaaccucgugcgggaucugccucagggcuucucugcucuggaaccccugguggaucugcccaucggcaucaacaucacccgguuucagacacugcuggcccugcacagaagcuaccugacaccuggcgauagcagcagcggauggacagcuggugccgccgcuuacuaugugggcuaccugcagccuagaaccuuccugcugaaguacaacgagaacggcaccaucaccgacgccguggauugugcucuggauccucugagcgagacaaagugcacccugaaguccuucaccguggaaaagggcaucuaccagaccagcaacuuccgggugcagcccaccgaauccaucgugcgguuccccaauaucaccaaucugugccccuucggcgagguguucaaugccaccagauucgccucuguguacgccuggaaccggaagcggaucagcaauugcguggccgacuacuccgugcuguacaacuccgccagcuucagcaccuucaagugcuacggcguguccccuaccaagcugaacgaccugugcuucacaaacguguacgccgacagcuucgugauccggggagaugaagugcggcagauugccccuggacagacaggcaagaucgccgacuacaacuacaagcugcccgacgacuucaccggcugugugauugccuggaacagcaacaaccuggacuccaaagucggcggcaacuacaauuaccgcuaccggcuguuccggaaguccaaucugaagcccuucgagcgggacaucagcaccgaaaucuaucaggccggcagcaccccuugcaacggcguggaaggcuucaacugcuacuucccacugcaguccuacggcuuucagcccacaaauggcgugggcuaucagcccuacagagugguggugcugagcuucgaacugcugcaugcuccugccacagugugcggcccuaagaaaagcaccaaucucgugaagaacaaaugcgugaacuucaacuucaacggccugaccggcaccggcgugcugacagagagcaacaagaaguuccugccauuccagcaguuuggccgggauaucgccgauaccacagacgccguuagagauccccagacacuggaaauccuggacaucaccccaugcagcuucggcggagugucugugaucaccccuggcaccaacaccagcaaucagguggcagugcuguaccagggcgugaacuguaccgaagugcccguggccauucacgccgaucagcugacaccuacauggcggguguacuccaccggcagcaauguguuucagaccagagccggcugucugaucggagccgagcacgugaacaauagcuacgagugcgacauccccaucggcgcuggcaucugugccagcuaccagacacagacaaacagccccagacgggcuagaagcguggccagccagagcaucauugccuacacaaugucucugggcgccgagaacagcguggccuacuccaacaacucuaucgcuauccccaccaacuucaccaucagcgugaccaccgagauccugccuguguccaugaccaagaccagcguggacugcaccauguacaucugcggcgauuccaccgagugcuccaaccugcugcugcaguacggcagcuucugcacccagcugaauagagcccugacagggaucgccguggaacaggacaagaacacccaagagguguucgcccaagugaagcaaaucuacaagaccccuccuaucaaggacuucggcggcuucaauuucagccagauucugcccgauccuagcaagcccagcaagcggagcuucaucgaggaccugcuguucaacaaagugacacuggccgacgccggcuucaucaagcaguauggcgauugucugggcgacauugccgccagggaucugauuugcgcccagaaguuuaacggacugacagugcugccuccucugcugaccgaugagaugaucgcccaguacacaucugcccugcuggccggcacaaucacaagcggcuggacauuuggagcuggcgccgcucugcagauccccuuugcuaugcagauggccuaccgguucaacggcaucggagugacccagaaugugcuguacgagaaccagaagcugaucgccaaccaguucaacagcgccaucggcaagauccaggacagccugagcagcacagcaagcgcccugggaaagcugcaggacguggucaaccagaaugcccaggcacugaacacccuggucaagcagcuguccuccaacuucggcgccaucagcucugugcugaacgauauccugagcagacuggacaaggucgaggccgaggugcagaucgacagacugaucacaggcagacugcagagccuccagacauacgugacccagcagcugaucagagccgccgagauuagagccucugccaaucuggccgccaccaagaugucugagugugugcugggccagagcaagagaguggacuuuugcggcaagggcuaccaccugaugagcuucccucagucugccccucacggcgugguguuucugcacgugacauaugugcccgcucaagagaagaauuucaccaccgcuccagccaucugccacgacggcaaagcccacuuuccuagagaaggcguguucguguccaacggcacccauugguucgugacacagcggaacuucuacgagccccagaucaucaccaccgacaacaccuucgugucuggcaacugcgacguugugaucggcauugugaacaauaccguguacgacccucugcagcccgagcuggacagcuucaaagaggaacuggacaaguacuuuaagaaccacacaagccccgacguggaccugggcgauaucagcggaaucaaugccagcgucgugaacauccagaaagagaucgaccggcugaacgagguggccaagaaucugaacgagagccugaucgaccugcaagaacuggggaaguacgagcaguacaucaaguggcccugguacaucuggcugggcuuuaucgccggacugauugccaucgugauggucacaaucaugcuguguugcaugaccagcugcuguagcugccugaagggcuguuguagcuguggcagcugcugcaaguucgacgaggacgauucugagcccgugcugaagggcgugaaacugcacuacaccugauaauaggcuggagccucgguggccuagcuucuugccccuugggccuccccccagccccuccuccccuuccugcacccguacccccguggucuuugaauaaagucugagugggcggcaaaaaaaaaaaaaaaaaaaaaaaaaaaaaaaaaaaaaaaaaaaaaaaaaaaaaaaaaaaaaaaaaaaaaaaaaaaaaaaaaaaaaaaaaaaaaaaaaaaa

SEQ ID NO: 26139 - RNA, 4095 nt, Artificial Sequence
  SARS-CoV-2/Wuhan/WIV05/2019__EPI_ISL_402128 spike protein mRNA gc mod (1-1273)
gggaaauaagagagaaaagaagaguaagaagaaauauaagaccccggcgccgccaccauguucguguuccuggugcugcugccucugguguccagccagugugugaaccugaccaccagaacacagcugccuccagccuacaccaacagcuuuaccagaggcguguacuaccccgacaagguguucagauccagcgugcugcacucuacccaggaccuguuccugccuuucuucagcaacgugaccugguuccacgccauccacguguccggcaccaauggcaccaagagauucgacaaccccgugcugcccuucaacgacgggguguacuuugccagcaccgagaaguccaacaucaucagaggcuggaucuucggcaccacacuggacagcaagacccagagccugcugaucgugaacaacgccaccaacguggucaucaaagugugcgaguuccaguucugcaacgaccccuuccugggcgucuacuaccacaagaacaacaagagcuggauggaaagcgaguuccggguguacagcagcgccaacaacugcaccuucgaguacgugucccagccuuuccugauggaccuggaaggcaagcagggcaacuucaagaaccugcgcgaguucguguuuaagaacaucgacggcuacuucaagaucuacagcaagcacaccccuaucaaccucgugcgggaucugccucagggcuucucugcucuggaaccccugguggaucugcccaucggcaucaacaucacccgguuucagacacugcuggcccugcacagaagcuaccugacaccuggcgauagcagcagcggauggacagcuggugccgccgcuuacuaugugggcuaccugcagccuagaaccuuccugcugaaguacaacgagaacggcaccaucaccgacgccguggauugugcucuggauccucugagcgagacaaagugcacccugaaguccuucaccguggaaaagggcaucuaccagaccagcaacuuccgggugcagcccaccgaauccaucgugcgguuccccaauaucaccaaucugugccccuucggcgagguguucaaugccaccagauucgccucuguguacgccuggaaccggaagcggaucagcaauugcguggccgacuacuccgugcuguacaacuccgccagcuucagcaccuucaagugcuacggcguguccccuaccaagcugaacgaccugugcuucacaaacguguacgccgacagcuucgugauccggggagaugaagugcggcagauugccccuggacagacaggcaagaucgccgacuacaacuacaagcugcccgacgacuucaccggcugugugauugccuggaacagcaacaaccuggacuccaaagucggcggcaacuacaauuaccuguaccggcuguuccggaaguccaaucugaagcccuucgagcgggacaucuccaccgagaucuaucaggccggcagcaccccuuguaacggcguggaaggcuucaacugcuacuucccacugcaguccuacggcuuucagcccacaaauggcgugggcuaucagcccuacagagugguggugcugagcuucgaacugcugcaugccccugccacagugugcggcccuaagaaaagcaccaaucucgugaagaacaaaugcgugaacuucaacuucaacggccugaccggcaccggcgugcugacagagagcaacaagaaguuccugccauuccagcaguuuggccgggauaucgccgauaccacagacgccguuagagauccccagacacuggaaauccuggacaucaccccuugcagcuucggcggagugucugugaucaccccuggcaccaacaccagcaaucagguggcagugcuguaccaggacgugaacuguaccgaagugcccguggccauucacgccgaucagcugacaccuacauggcggguguacuccaccggcagcaauguguuucagaccagagccggcugucugaucggagccgagcacgugaacaauagcuacgagugcgacauccccaucggcgcuggaaucugcgccagcuaccagacacagacaaacagcccucggagagccagaagcguggccagccagagcaucauugccuacacaaugucucugggcgccgagaacagcguggccuacuccaacaacucuaucgcuauccccaccaacuucaccaucagcgugaccacagagauccugccuguguccaugaccaagaccagcguggacugcaccauguacaucugcggcgauuccaccgagugcuccaaccugcugcugcaguacggcagcuucugcacccagcugaauagagcccugacagggaucgccguggaacaggacaagaacacccaagagguguucgcccaagugaagcagaucuacaagaccccuccuaucaaggacuucggcggcuucaauuucagccagauucugcccgauccuagcaagcccagcaagcggagcuucaucgaggaccugcuguucaacaaagugacacuggccgacgccggcuucaucaagcaguauggcgauugucugggcgacauugccgccagggaucugauuugcgcccagaaguuuaacggacugacagugcugccuccucugcugaccgaugagaugaucgcccaguacacaucugcccugcuggccggcacaaucacaagcggcuggacauuuggagcaggcgccgcucugcagauccccuuugcuaugcagauggccuaccgguucaacggcaucggagugacccagaaugugcuguacgagaaccagaagcugaucgccaaccaguucaacagcgccaucggcaagauccaggacagccugagcagcacagcaagcgcccugggaaagcugcaggacguggucaaccagaaugcccaggcacugaacacccuggucaagcagcuguccuccaacuucggcgccaucagcucugugcugaacgauauccugagcagacuggacaaggucgaggccgaggugcagaucgacagacugaucacaggcagacugcagagccuccagacauacgugacccagcagcugaucagagccgccgagauuagagccucugccaaucuggccgccaccaagaugucugagugugugcugggccagagcaagagaguggacuuuugcggcaagggcuaccaccugaugagcuucccucagucugccccucacggcgugguguuucugcacgugacauaugugcccgcucaagagaagaauuucaccaccgcuccagccaucugccacgacggcaaagcccacuuuccuagagaaggcguguucguguccaacggcacccauugguucgugacacagcggaacuucuacgagccccagaucaucaccaccgacaacaccuucgugucuggcaacugcgacgucgugaucggcauugugaacaauaccguguacgacccucugcagcccgagcuggacagcuucaaagaggaacuggacaaguacuuuaagaaccacacaagccccgacguggaccugggcgauaucagcggaaucaaugccagcgucgugaacauccagaaagagaucgaccggcugaacgagguggccaagaaucugaacgagagccugaucgaccugcaagaacuggggaaguacgagcaguacaucaaguggcccugguacaucuggcugggcuuuaucgccggacugauugccaucgugauggucacaaucaugcuguguugcaugaccagcugcuguagcugccugaagggcuguuguagcuguggcagcugcugcaaguucgacgaggacgauucugagcccgugcugaagggcgugaaacugcacuacacaugauaauaggcuggagccucgguggccuagcuucuugccccuugggccuccccccagccccuccuccccuuccugcacccguacccccguggucuuugaauaaagucugagugggcggcaaaaaaaaaaaaaaaaaaaaaaaaaaaaaaaaaaaaaaaaaaaaaaaaaaaaaaaaaaaaaaaaaaaaaaaaaaaaaaaaaaaaaaaaaaaaaaaaaaaa

SEQ ID NO: 26140 - RNA, 4095 nt, Artificial Sequence
  SARS-CoV-2/Wuhan/WIV05/2019__EPI_ISL_402128 spike protein mRNA gc mod (1-1273)(D614G)
gggaaauaagagagaaaagaagaguaagaagaaauauaagaccccggcgccgccaccauguucguguuccuggugcugcugccucugguguccagccagugugugaaccugaccaccagaacacagcugccuccagccuacaccaacagcuuuaccagaggcguguacuaccccgacaagguguucagauccagcgugcugcacucuacccaggaccuguuccugccuuucuucagcaacgugaccugguuccacgccauccacguguccggcaccaauggcaccaagagauucgacaaccccgugcugcccuucaacgacgggguguacuuugccagcaccgagaaguccaacaucaucagaggcuggaucuucggcaccacacuggacagcaagacccagagccugcugaucgugaacaacgccaccaacguggucaucaaagugugcgaguuccaguucugcaacgaccccuuccugggcgucuacuaccacaagaacaacaagagcuggauggaaagcgaguuccggguguacagcagcgccaacaacugcaccuucgaguacgugucccagccuuuccugauggaccuggaaggcaagcagggcaacuucaagaaccugcgcgaguucguguuuaagaacaucgacggcuacuucaagaucuacagcaagcacaccccuaucaaccucgugcgggaucugccucagggcuucucugcucuggaaccccugguggaucugcccaucggcaucaacaucacccgguuucagacacugcuggcccugcacagaagcuaccugacaccuggcgauagcagcagcggauggacagcuggugccgccgcuuacuaugugggcuaccugcagccuagaaccuuccugcugaaguacaacgagaacggcaccaucaccgacgccguggauugugcucuggauccucugagcgagacaaagugcacccugaaguccuucaccguggaaaagggcaucuaccagaccagcaacuuccgggugcagcccaccgaauccaucgugcgguuccccaauaucaccaaucugugccccuucggcgagguguucaaugccaccagauucgccucuguguacgccuggaaccggaagcggaucagcaauugcguggccgacuacuccgugcuguacaacuccgccagcuucagcaccuucaagugcuacggcguguccccuaccaagcugaacgaccugugcuucacaaacguguacgccgacagcuucgugauccggggagaugaagugcggcagauugccccuggacagacaggcaagaucgccgacuacaacuacaagcugcccgacgacuucaccggcugugugauugccuggaacagcaacaaccuggacuccaaagucggcggcaacuacaauuaccuguaccggcuguuccggaaguccaaucugaagcccuucgagcgggacaucuccaccgagaucuaucaggccggcagcaccccuuguaacggcguggaaggcuucaacugcuacuucccacugcaguccuacggcuuucagcccacaaauggcgugggcuaucagcccuacagagugguggugcugagcuucgaacugcugcaugccccugccacagugugcggcccuaagaaaagcaccaaucucgugaagaacaaaugcgugaacuucaacuucaacggccugaccggcaccggcgugcugacagagagcaacaagaaguuccugccauuccagcaguuuggccgggauaucgccgauaccacagacgccguuagagauccccagacacuggaaauccuggacaucaccccuugcagcuucggcggagugucugugaucaccccuggcaccaacaccagcaaucagguggcagugcuguaccagggcgugaacuguaccgaagugcccguggccauucacgccgaucagcugacaccuacauggcggguguacuccaccggcagcaauguguuucagaccagagccggcugucugaucggagccgagcacgugaacaauagcuacgagugcgacauccccaucggcgcuggaaucugcgccagcuaccagacacagacaaacagcccucggagagccagaagcguggccagccagagcaucauugccuacacaaugucucugggcgccgagaacagcguggccuacuccaacaacucuaucgcuauccccaccaacuucaccaucagcgugaccacagagauccugccuguguccaugaccaagaccagcguggacugcaccauguacaucugcggcgauuccaccgagugcuccaaccugcugcugcaguacggcagcuucugcacccagcugaauagagcccugacagggaucgccguggaacaggacaagaacacccaagagguguucgcccaagugaagcagaucuacaagaccccuccuaucaaggacuucggcggcuucaauuucagccagauucugcccgauccuagcaagcccagcaagcggagcuucaucgaggaccugcuguucaacaaagugacacuggccgacgccggcuucaucaagcaguauggcgauugucugggcgacauugccgccagggaucugauuugcgcccagaaguuuaacggacugacagugcugccuccucugcugaccgaugagaugaucgcccaguacacaucugcccugcuggccggcacaaucacaagcggcuggacauuuggagcaggcgccgcucugcagauccccuuugcuaugcagauggccuaccgguucaacggcaucggagugacccagaaugugcuguacgagaaccagaagcugaucgccaaccaguucaacagcgccaucggcaagauccaggacagccugagcagcacagcaagcgcccugggaaagcugcaggacguggucaaccagaaugcccaggcacugaacacccuggucaagcagcuguccuccaacuucggcgccaucagcucugugcugaacgauauccugagcagacuggacaaggucgaggccgaggugcagaucgacagacugaucacaggcagacugcagagccuccagacauacgugacccagcagcugaucagagccgccgagauuagagccucugccaaucuggccgccaccaagaugucugagugugugcugggccagagcaagagaguggacuuuugcggcaagggcuaccaccugaugagcuucccucagucugccccucacggcgugguguuucugcacgugacauaugugcccgcucaagagaagaauuucaccaccgcuccagccaucugccacgacggcaaagcccacuuuccuagagaaggcguguucguguccaacggcacccauugguucgugacacagcggaacuucuacgagccccagaucaucaccaccgacaacaccuucgugucuggcaacugcgacgucgugaucggcauugugaacaauaccguguacgacccucugcagcccgagcuggacagcuucaaagaggaacuggacaaguacuuuaagaaccacacaagccccgacguggaccugggcgauaucagcggaaucaaugccagcgucgugaacauccagaaagagaucgaccggcugaacgagguggccaagaaucugaacgagagccugaucgaccugcaagaacuggggaaguacgagcaguacaucaaguggcccugguacaucuggcugggcuuuaucgccggacugauugccaucgugauggucacaaucaugcuguguugcaugaccagcugcuguagcugccugaagggcuguuguagcuguggcagcugcugcaaguucgacgaggacgauucugagcccgugcugaagggcgugaaacugcacuacacaugauaauaggcuggagccucgguggccuagcuucuugccccuugggccuccccccagccccuccuccccuuccugcacccguacccccguggucuuugaauaaagucugagugggcggcaaaaaaaaaaaaaaaaaaaaaaaaaaaaaaaaaaaaaaaaaaaaaaaaaaaaaaaaaaaaaaaaaaaaaaaaaaaaaaaaaaaaaaaaaaaaaaaaaaaa

SEQ ID NO: 26141 - RNA, 4095 nt, Artificial Sequence
  SARS-CoV-2/Wuhan/WIV05/2019__EPI_ISL_402128 spike protein mRNA gc mod (1-1273)(A222V_D614G)
gggaaauaagagagaaaagaagaguaagaagaaauauaagaccccggcgccgccaccauguucguguuccuggugcugcugccucugguguccagccagugugugaaccugaccaccagaacacagcugccuccagccuacaccaacagcuuuaccagaggcguguacuaccccgacaagguguucagauccagcgugcugcacucuacccaggaccuguuccugccuuucuucagcaacgugaccugguuccacgccauccacguguccggcaccaauggcaccaagagauucgacaaccccgugcugcccuucaacgacgggguguacuuugccagcaccgagaaguccaacaucaucagaggcuggaucuucggcaccacacuggacagcaagacccagagccugcugaucgugaacaacgccaccaacguggucaucaaagugugcgaguuccaguucugcaacgaccccuuccugggcgucuacuaccacaagaacaacaagagcuggauggaaagcgaguuccggguguacagcagcgccaacaacugcaccuucgaguacgugucccagccuuuccugauggaccuggaaggcaagcagggcaacuucaagaaccugcgcgaguucguguuuaagaacaucgacggcuacuucaagaucuacagcaagcacaccccuaucaaccucgugcgggaucugccucagggcuucucugugcuggaaccccugguggaucugcccaucggcaucaacaucacccgguuucagacacugcuggcccugcacagaagcuaccugacaccuggcgauagcagcagcggauggacagcuggugccgccgcuuacuaugugggcuaccugcagccuagaaccuuccugcugaaguacaacgagaacggcaccaucaccgacgccguggauugugcucuggauccucugagcgagacaaagugcacccugaaguccuucaccguggaaaagggcaucuaccagaccagcaacuuccgggugcagcccaccgaauccaucgugcgguuccccaauaucaccaaucugugccccuucggcgagguguucaaugccaccagauucgccucuguguacgccuggaaccggaagcggaucagcaauugcguggccgacuacuccgugcuguacaacuccgccagcuucagcaccuucaagugcuacggcguguccccuaccaagcugaacgaccugugcuucacaaacguguacgccgacagcuucgugauccggggagaugaagugcggcagauugccccuggacagacaggcaagaucgccgacuacaacuacaagcugcccgacgacuucaccggcugugugauugccuggaacagcaacaaccuggacuccaaagucggcggcaacuacaauuaccuguaccggcuguuccggaaguccaaucugaagcccuucgagcgggacaucuccaccgagaucuaucaggccggcagcaccccuuguaacggcguggaaggcuucaacugcuacuucccacugcaguccuacggcuuucagcccacaaauggcgugggcuaucagcccuacagagugguggugcugagcuucgaacugcugcaugccccugccacagugugcggcccuaagaaaagcaccaaucucgugaagaacaaaugcgugaacuucaacuucaacggccugaccggcaccggcgugcugacagagagcaacaagaaguuccugccauuccagcaguuuggccgggauaucgccgauaccacagacgccguuagagauccccagacacuggaaauccuggacaucaccccuugcagcuucggcggagugucugugaucaccccuggcaccaacaccagcaaucagguggcagugcuguaccagggcgugaacuguaccgaagugcccguggccauucacgccgaucagcugacaccuacauggcggguguacuccaccggcagcaauguguuucagaccagagccggcugucugaucggagccgagcacgugaacaauagcuacgagugcgacauccccaucggcgcuggaaucugcgccagcuaccagacacagacaaacagcccucggagagccagaagcguggccagccagagcaucauugccuacacaaugucucugggcgccgagaacagcguggccuacuccaacaacucuaucgcuauccccaccaacuucaccaucagcgugaccacagagauccugccuguguccaugaccaagaccagcguggacugcaccauguacaucugcggcgauuccaccgagugcuccaaccugcugcugcaguacggcagcuucugcacccagcugaauagagcccugacagggaucgccguggaacaggacaagaacacccaagagguguucgcccaagugaagcagaucuacaagaccccuccuaucaaggacuucggcggcuucaauuucagccagauucugcccgauccuagcaagcccagcaagcggagcuucaucgaggaccugcuguucaacaaagugacacuggccgacgccggcuucaucaagcaguauggcgauugucugggcgacauugccgccagggaucugauuugcgcccagaaguuuaacggacugacagugcugccuccucugcugaccgaugagaugaucgcccaguacacaucugcccugcuggccggcacaaucacaagcggcuggacauuuggagcaggcgccgcucugcagauccccuuugcuaugcagauggccuaccgguucaacggcaucggagugacccagaaugugcuguacgagaaccagaagcugaucgccaaccaguucaacagcgccaucggcaagauccaggacagccugagcagcacagcaagcgcccugggaaagcugcaggacguggucaaccagaaugcccaggcacugaacacccuggucaagcagcuguccuccaacuucggcgccaucagcucugugcugaacgauauccugagcagacuggacaaggucgaggccgaggugcagaucgacagacugaucacaggcagacugcagagccuccagacauacgugacccagcagcugaucagagccgccgagauuagagccucugccaaucuggccgccaccaagaugucugagugugugcugggccagagcaagagaguggacuuuugcggcaagggcuaccaccugaugagcuucccucagucugccccucacggcgugguguuucugcacgugacauaugugcccgcucaagagaagaauuucaccaccgcuccagccaucugccacgacggcaaagcccacuuuccuagagaaggcguguucguguccaacggcacccauugguucgugacacagcggaacuucuacgagccccagaucaucaccaccgacaacaccuucgugucuggcaacugcgacgucgugaucggcauugugaacaauaccguguacgacccucugcagcccgagcuggacagcuucaaagaggaacuggacaaguacuuuaagaaccacacaagccccgacguggaccugggcgauaucagcggaaucaaugccagcgucgugaacauccagaaagagaucgaccggcugaacgagguggccaagaaucugaacgagagccugaucgaccugcaagaacuggggaaguacgagcaguacaucaaguggcccugguacaucuggcugggcuuuaucgccggacugauugccaucgugauggucacaaucaugcuguguugcaugaccagcugcuguagcugccugaagggcuguuguagcuguggcagcugcugcaaguucgacgaggacgauucugagcccgugcugaagggcgugaaacugcacuacacaugauaauaggcuggagccucgguggccuagcuucuugccccuugggccuccccccagccccuccuccccuuccugcacccguacccccguggucuuugaauaaagucugagugggcggcaaaaaaaaaaaaaaaaaaaaaaaaaaaaaaaaaaaaaaaaaaaaaaaaaaaaaaaaaaaaaaaaaaaaaaaaaaaaaaaaaaaaaaaaaaaaaaaaaaaa

SEQ ID NO: 26142 - RNA, 4095 nt, Artificial Sequence
  SARS-CoV-2/Wuhan/WIV05/2019__EPI_ISL_402128 spike protein mRNA gc mod (1-1273)(N439K_D614G)
gggaaauaagagagaaaagaagaguaagaagaaauauaagaccccggcgccgccaccauguucguguuccuggugcugcugccucugguguccagccagugugugaaccugaccaccagaacacagcugccuccagccuacaccaacagcuuuaccagaggcguguacuaccccgacaagguguucagauccagcgugcugcacucuacccaggaccuguuccugccuuucuucagcaacgugaccugguuccacgccauccacguguccggcaccaauggcaccaagagauucgacaaccccgugcugcccuucaacgacgggguguacuuugccagcaccgagaaguccaacaucaucagaggcuggaucuucggcaccacacuggacagcaagacccagagccugcugaucgugaacaacgccaccaacguggucaucaaagugugcgaguuccaguucugcaacgaccccuuccugggcgucuacuaccacaagaacaacaagagcuggauggaaagcgaguuccggguguacagcagcgccaacaacugcaccuucgaguacgugucccagccuuuccugauggaccuggaaggcaagcagggcaacuucaagaaccugcgcgaguucguguuuaagaacaucgacggcuacuucaagaucuacagcaagcacaccccuaucaaccucgugcgggaucugccucagggcuucucugcucuggaaccccugguggaucugcccaucggcaucaacaucacccgguuucagacacugcuggcccugcacagaagcuaccugacaccuggcgauagcagcagcggauggacagcuggugccgccgcuuacuaugugggcuaccugcagccuagaaccuuccugcugaaguacaacgagaacggcaccaucaccgacgccguggauugugcucuggauccucugagcgagacaaagugcacccugaaguccuucaccguggaaaagggcaucuaccagaccagcaacuuccgggugcagcccaccgaauccaucgugcgguuccccaauaucaccaaucugugccccuucggcgagguguucaaugccaccagauucgccucuguguacgccuggaaccggaagcggaucagcaauugcguggccgacuacuccgugcuguacaacuccgccagcuucagcaccuucaagugcuacggcguguccccuaccaagcugaacgaccugugcuucacaaacguguacgccgacagcuucgugauccggggagaugaagugcggcagauugccccuggacagacaggcaagaucgccgacuacaacuacaagcugcccgacgacuucaccggcugugugauugccuggaacagcaagaaccuggacuccaaagucggcggcaacuacaauuaccuguaccggcuguuccggaaguccaaucugaagcccuucgagcgggacaucuccaccgagaucuaucaggccggcagcaccccuuguaacggcguggaaggcuucaacugcuacuucccacugcaguccuacggcuuucagcccacaaauggcgugggcuaucagcccuacagagugguggugcugagcuucgaacugcugcaugccccugccacagugugcggcccuaagaaaagcaccaaucucgugaagaacaaaugcgugaacuucaacuucaacggccugaccggcaccggcgugcugacagagagcaacaagaaguuccugccauuccagcaguuuggccgggauaucgccgauaccacagacgccguuagagauccccagacacuggaaauccuggacaucaccccuugcagcuucggcggagugucugugaucaccccuggcaccaacaccagcaaucagguggcagugcuguaccagggcgugaacuguaccgaagugcccguggccauucacgccgaucagcugacaccuacauggcggguguacuccaccggcagcaauguguuucagaccagagccggcugucugaucggagccgagcacgugaacaauagcuacgagugcgacauccccaucggcgcuggaaucugcgccagcuaccagacacagacaaacagcccucggagagccagaagcguggccagccagagcaucauugccuacacaaugucucugggcgccgagaacagcguggccuacuccaacaacucuaucgcuauccccaccaacuucaccaucagcgugaccacagagauccugccuguguccaugaccaagaccagcguggacugcaccauguacaucugcggcgauuccaccgagugcuccaaccugcugcugcaguacggcagcuucugcacccagcugaauagagcccugacagggaucgccguggaacaggacaagaacacccaagagguguucgcccaagugaagcagaucuacaagaccccuccuaucaaggacuucggcggcuucaauuucagccagauucugcccgauccuagcaagcccagcaagcggagcuucaucgaggaccugcuguucaacaaagugacacuggccgacgccggcuucaucaagcaguauggcgauugucugggcgacauugccgccagggaucugauuugcgcccagaaguuuaacggacugacagugcugccuccucugcugaccgaugagaugaucgcccaguacacaucugcccugcuggccggcacaaucacaagcggcuggacauuuggagcaggcgccgcucugcagauccccuuugcuaugcagauggccuaccgguucaacggcaucggagugacccagaaugugcuguacgagaaccagaagcugaucgccaaccaguucaacagcgccaucggcaagauccaggacagccugagcagcacagcaagcgcccugggaaagcugcaggacguggucaaccagaaugcccaggcacugaacacccuggucaagcagcuguccuccaacuucggcgccaucagcucugugcugaacgauauccugagcagacuggacaaggucgaggccgaggugcagaucgacagacugaucacaggcagacugcagagccuccagacauacgugacccagcagcugaucagagccgccgagauuagagccucugccaaucuggccgccaccaagaugucugagugugugcugggccagagcaagagaguggacuuuugcggcaagggcuaccaccugaugagcuucccucagucugccccucacggcgugguguuucugcacgugacauaugugcccgcucaagagaagaauuucaccaccgcuccagccaucugccacgacggcaaagcccacuuuccuagagaaggcguguucguguccaacggcacccauugguucgugacacagcggaacuucuacgagccccagaucaucaccaccgacaacaccuucgugucuggcaacugcgacgucgugaucggcauugugaacaauaccguguacgacccucugcagcccgagcuggacagcuucaaagaggaacuggacaaguacuuuaagaaccacacaagccccgacguggaccugggcgauaucagcggaaucaaugccagcgucgugaacauccagaaagagaucgaccggcugaacgagguggccaagaaucugaacgagagccugaucgaccugcaagaacuggggaaguacgagcaguacaucaaguggcccugguacaucuggcugggcuuuaucgccggacugauugccaucgugauggucacaaucaugcuguguugcaugaccagcugcuguagcugccugaagggcuguuguagcuguggcagcugcugcaaguucgacgaggacgauucugagcccgugcugaagggcgugaaacugcacuacacaugauaauaggcuggagccucgguggccuagcuucuugccccuugggccuccccccagccccuccuccccuuccugcacccguacccccguggucuuugaauaaagucugagugggcggcaaaaaaaaaaaaaaaaaaaaaaaaaaaaaaaaaaaaaaaaaaaaaaaaaaaaaaaaaaaaaaaaaaaaaaaaaaaaaaaaaaaaaaaaaaaaaaaaaaaa

SEQ ID NO: 26143 - RNA, 4095 nt, Artificial Sequence
  SARS-CoV-2/Wuhan/WIV05/2019__EPI_ISL_402128 spike protein mRNA gc mod (1-1273)(S477N_D614G)
gggaaauaagagagaaaagaagaguaagaagaaauauaagaccccggcgccgccaccauguucguguuccuggugcugcugccucugguguccagccagugugugaaccugaccaccagaacacagcugccuccagccuacaccaacagcuuuaccagaggcguguacuaccccgacaagguguucagauccagcgugcugcacucuacccaggaccuguuccugccuuucuucagcaacgugaccugguuccacgccauccacguguccggcaccaauggcaccaagagauucgacaaccccgugcugcccuucaacgacgggguguacuuugccagcaccgagaaguccaacaucaucagaggcuggaucuucggcaccacacuggacagcaagacccagagccugcugaucgugaacaacgccaccaacguggucaucaaagugugcgaguuccaguucugcaacgaccccuuccugggcgucuacuaccacaagaacaacaagagcuggauggaaagcgaguuccggguguacagcagcgccaacaacugcaccuucgaguacgugucccagccuuuccugauggaccuggaaggcaagcagggcaacuucaagaaccugcgcgaguucguguuuaagaacaucgacggcuacuucaagaucuacagcaagcacaccccuaucaaccucgugcgggaucugccucagggcuucucugcucuggaaccccugguggaucugcccaucggcaucaacaucacccgguuucagacacugcuggcccugcacagaagcuaccugacaccuggcgauagcagcagcggauggacagcuggugccgccgcuuacuaugugggcuaccugcagccuagaaccuuccugcugaaguacaacgagaacggcaccaucaccgacgccguggauugugcucuggauccucugagcgagacaaagugcacccugaaguccuucaccguggaaaagggcaucuaccagaccagcaacuuccgggugcagcccaccgaauccaucgugcgguuccccaauaucaccaaucugugccccuucggcgagguguucaaugccaccagauucgccucuguguacgccuggaaccggaagcggaucagcaauugcguggccgacuacuccgugcuguacaacuccgccagcuucagcaccuucaagugcuacggcguguccccuaccaagcugaacgaccugugcuucacaaacguguacgccgacagcuucgugauccggggagaugaagugcggcagauugccccuggacagacaggcaagaucgccgacuacaacuacaagcugcccgacgacuucaccggcugugugauugccuggaacagcaacaaccuggacuccaaagucggcggcaacuacaauuaccuguaccggcuguuccggaaguccaaucugaagcccuucgagcgggacaucuccaccgagaucuaucaggccggcaacaccccuuguaacggcguggaaggcuucaacugcuacuucccacugcaguccuacggcuuucagcccacaaauggcgugggcuaucagcccuacagagugguggugcugagcuucgaacugcugcaugccccugccacagugugcggcccuaagaaaagcaccaaucucgugaagaacaaaugcgugaacuucaacuucaacggccugaccggcaccggcgugcugacagagagcaacaagaaguuccugccauuccagcaguuuggccgggauaucgccgauaccacagacgccguuagagauccccagacacuggaaauccuggacaucaccccuugcagcuucggcggagugucugugaucaccccuggcaccaacaccagcaaucagguggcagugcuguaccagggcgugaacuguaccgaagugcccguggccauucacgccgaucagcugacaccuacauggcggguguacuccaccggcagcaauguguuucagaccagagccggcugucugaucggagccgagcacgugaacaauagcuacgagugcgacauccccaucggcgcuggaaucugcgccagcuaccagacacagacaaacagcccucggagagccagaagcguggccagccagagcaucauugccuacacaaugucucugggcgccgagaacagcguggccuacuccaacaacucuaucgcuauccccaccaacuucaccaucagcgugaccacagagauccugccuguguccaugaccaagaccagcguggacugcaccauguacaucugcggcgauuccaccgagugcuccaaccugcugcugcaguacggcagcuucugcacccagcugaauagagcccugacagggaucgccguggaacaggacaagaacacccaagagguguucgcccaagugaagcagaucuacaagaccccuccuaucaaggacuucggcggcuucaauuucagccagauucugcccgauccuagcaagcccagcaagcggagcuucaucgaggaccugcuguucaacaaagugacacuggccgacgccggcuucaucaagcaguauggcgauugucugggcgacauugccgccagggaucugauuugcgcccagaaguuuaacggacugacagugcugccuccucugcugaccgaugagaugaucgcccaguacacaucugcccugcuggccggcacaaucacaagcggcuggacauuuggagcaggcgccgcucugcagauccccuuugcuaugcagauggccuaccgguucaacggcaucggagugacccagaaugugcuguacgagaaccagaagcugaucgccaaccaguucaacagcgccaucggcaagauccaggacagccugagcagcacagcaagcgcccugggaaagcugcaggacguggucaaccagaaugcccaggcacugaacacccuggucaagcagcuguccuccaacuucggcgccaucagcucugugcugaacgauauccugagcagacuggacaaggucgaggccgaggugcagaucgacagacugaucacaggcagacugcagagccuccagacauacgugacccagcagcugaucagagccgccgagauuagagccucugccaaucuggccgccaccaagaugucugagugugugcugggccagagcaagagaguggacuuuugcggcaagggcuaccaccugaugagcuucccucagucugccccucacggcgugguguuucugcacgugacauaugugcccgcucaagagaagaauuucaccaccgcuccagccaucugccacgacggcaaagcccacuuuccuagagaaggcguguucguguccaacggcacccauugguucgugacacagcggaacuucuacgagccccagaucaucaccaccgacaacaccuucgugucuggcaacugcgacgucgugaucggcauugugaacaauaccguguacgacccucugcagcccgagcuggacagcuucaaagaggaacuggacaaguacuuuaagaaccacacaagccccgacguggaccugggcgauaucagcggaaucaaugccagcgucgugaacauccagaaagagaucgaccggcugaacgagguggccaagaaucugaacgagagccugaucgaccugcaagaacuggggaaguacgagcaguacaucaaguggcccugguacaucuggcugggcuuuaucgccggacugauugccaucgugauggucacaaucaugcuguguugcaugaccagcugcuguagcugccugaagggcuguuguagcuguggcagcugcugcaaguucgacgaggacgauucugagcccgugcugaagggcgugaaacugcacuacacaugauaauaggcuggagccucgguggccuagcuucuugccccuugggccuccccccagccccuccuccccuuccugcacccguacccccguggucuuugaauaaagucugagugggcggcaaaaaaaaaaaaaaaaaaaaaaaaaaaaaaaaaaaaaaaaaaaaaaaaaaaaaaaaaaaaaaaaaaaaaaaaaaaaaaaaaaaaaaaaaaaaaaaaaaaa

SEQ ID NO: 26144 - RNA, 4095 nt, Artificial Sequence
  SARS-CoV-2/Wuhan/WIV05/2019__EPI_ISL_402128 spike protein mRNA gc mod (1-1273)(N501Y_D614G)
gggaaauaagagagaaaagaagaguaagaagaaauauaagaccccggcgccgccaccauguucguguuccuggugcugcugccucugguguccagccagugugugaaccugaccaccagaacacagcugccuccagccuacaccaacagcuuuaccagaggcguguacuaccccgacaagguguucagauccagcgugcugcacucuacccaggaccuguuccugccuuucuucagcaacgugaccugguuccacgccauccacguguccggcaccaauggcaccaagagauucgacaaccccgugcugcccuucaacgacgggguguacuuugccagcaccgagaaguccaacaucaucagaggcuggaucuucggcaccacacuggacagcaagacccagagccugcugaucgugaacaacgccaccaacguggucaucaaagugugcgaguuccaguucugcaacgaccccuuccugggcgucuacuaccacaagaacaacaagagcuggauggaaagcgaguuccggguguacagcagcgccaacaacugcaccuucgaguacgugucccagccuuuccugauggaccuggaaggcaagcagggcaacuucaagaaccugcgcgaguucguguuuaagaacaucgacggcuacuucaagaucuacagcaagcacaccccuaucaaccucgugcgggaucugccucagggcuucucugcucuggaaccccugguggaucugcccaucggcaucaacaucacccgguuucagacacugcuggcccugcacagaagcuaccugacaccuggcgauagcagcagcggauggacagcuggugccgccgcuuacuaugugggcuaccugcagccuagaaccuuccugcugaaguacaacgagaacggcaccaucaccgacgccguggauugugcucuggauccucugagcgagacaaagugcacccugaaguccuucaccguggaaaagggcaucuaccagaccagcaacuuccgggugcagcccaccgaauccaucgugcgguuccccaauaucaccaaucugugccccuucggcgagguguucaaugccaccagauucgccucuguguacgccuggaaccggaagcggaucagcaauugcguggccgacuacuccgugcuguacaacuccgccagcuucagcaccuucaagugcuacggcguguccccuaccaagcugaacgaccugugcuucacaaacguguacgccgacagcuucgugauccggggagaugaagugcggcagauugccccuggacagacaggcaagaucgccgacuacaacuacaagcugcccgacgacuucaccggcugugugauugccuggaacagcaacaaccuggacuccaaagucggcggcaacuacaauuaccuguaccggcuguuccggaaguccaaucugaagcccuucgagcgggacaucuccaccgagaucuaucaggccggcagcaccccuuguaacggcguggaaggcuucaacugcuacuucccacugcaguccuacggcuuucagcccacauacggcgugggcuaucagcccuacagagugguggugcugagcuucgaacugcugcaugccccugccacagugugcggcccuaagaaaagcaccaaucucgugaagaacaaaugcgugaacuucaacuucaacggccugaccggcaccggcgugcugacagagagcaacaagaaguuccugccauuccagcaguuuggccgggauaucgccgauaccacagacgccguuagagauccccagacacuggaaauccuggacaucaccccuugcagcuucggcggagugucugugaucaccccuggcaccaacaccagcaaucagguggcagugcuguaccagggcgugaacuguaccgaagugcccguggccauucacgccgaucagcugacaccuacauggcggguguacuccaccggcagcaauguguuucagaccagagccggcugucugaucggagccgagcacgugaacaauagcuacgagugcgacauccccaucggcgcuggaaucugcgccagcuaccagacacagacaaacagcccucggagagccagaagcguggccagccagagcaucauugccuacacaaugucucugggcgccgagaacagcguggccuacuccaacaacucuaucgcuauccccaccaacuucaccaucagcgugaccacagagauccugccuguguccaugaccaagaccagcguggacugcaccauguacaucugcggcgauuccaccgagugcuccaaccugcugcugcaguacggcagcuucugcacccagcugaauagagcccugacagggaucgccguggaacaggacaagaacacccaagagguguucgcccaagugaagcagaucuacaagaccccuccuaucaaggacuucggcggcuucaauuucagccagauucugcccgauccuagcaagcccagcaagcggagcuucaucgaggaccugcuguucaacaaagugacacuggccgacgccggcuucaucaagcaguauggcgauugucugggcgacauugccgccagggaucugauuugcgcccagaaguuuaacggacugacagugcugccuccucugcugaccgaugagaugaucgcccaguacacaucugcccugcuggccggcacaaucacaagcggcuggacauuuggagcaggcgccgcucugcagauccccuuugcuaugcagauggccuaccgguucaacggcaucggagugacccagaaugugcuguacgagaaccagaagcugaucgccaaccaguucaacagcgccaucggcaagauccaggacagccugagcagcacagcaagcgcccugggaaagcugcaggacguggucaaccagaaugcccaggcacugaacacccuggucaagcagcuguccuccaacuucggcgccaucagcucugugcugaacgauauccugagcagacuggacaaggucgaggccgaggugcagaucgacagacugaucacaggcagacugcagagccuccagacauacgugacccagcagcugaucagagccgccgagauuagagccucugccaaucuggccgccaccaagaugucugagugugugcugggccagagcaagagaguggacuuuugcggcaagggcuaccaccugaugagcuucccucagucugccccucacggcgugguguuucugcacgugacauaugugcccgcucaagagaagaauuucaccaccgcuccagccaucugccacgacggcaaagcccacuuuccuagagaaggcguguucguguccaacggcacccauugguucgugacacagcggaacuucuacgagccccagaucaucaccaccgacaacaccuucgugucuggcaacugcgacgucgugaucggcauugugaacaauaccguguacgacccucugcagcccgagcuggacagcuucaaagaggaacuggacaaguacuuuaagaaccacacaagccccgacguggaccugggcgauaucagcggaaucaaugccagcgucgugaacauccagaaagagaucgaccggcugaacgagguggccaagaaucugaacgagagccugaucgaccugcaagaacuggggaaguacgagcaguacaucaaguggcccugguacaucuggcugggcuuuaucgccggacugauugccaucgugauggucacaaucaugcuguguugcaugaccagcugcuguagcugccugaagggcuguuguagcuguggcagcugcugcaaguucgacgaggacgauucugagcccgugcugaagggcgugaaacugcacuacacaugauaauaggcuggagccucgguggccuagcuucuugccccuugggccuccccccagccccuccuccccuuccugcacccguacccccguggucuuugaauaaagucugagugggcggcaaaaaaaaaaaaaaaaaaaaaaaaaaaaaaaaaaaaaaaaaaaaaaaaaaaaaaaaaaaaaaaaaaaaaaaaaaaaaaaaaaaaaaaaaaaaaaaaaaaa

SEQ ID NO: 26145 - RNA, 4089 nt, Artificial Sequence
  SARS-CoV-2/Wuhan/WIV05/2019__EPI_ISL_402128 spike protein mRNA gc mod (1-1273)(H69del_V70del_D614G)
gggaaauaagagagaaaagaagaguaagaagaaauauaagaccccggcgccgccaccauguucguguuccuggugcugcugccucugguguccagccagugugugaaccugaccaccagaacacagcugccuccagccuacaccaacagcuuuaccagaggcguguacuaccccgacaagguguucagauccagcgugcugcacucuacccaggaccuguuccugccuuucuucagcaacgugaccugguuccacgccaucuccggcaccaauggcaccaagagauucgacaaccccgugcugcccuucaacgacgggguguacuuugccagcaccgagaaguccaacaucaucagaggcuggaucuucggcaccacacuggacagcaagacccagagccugcugaucgugaacaacgccaccaacguggucaucaaagugugcgaguuccaguucugcaacgaccccuuccugggcgucuacuaccacaagaacaacaagagcuggauggaaagcgaguuccggguguacagcagcgccaacaacugcaccuucgaguacgugucccagccuuuccugauggaccuggaaggcaagcagggcaacuucaagaaccugcgcgaguucguguuuaagaacaucgacggcuacuucaagaucuacagcaagcacaccccuaucaaccucgugcgggaucugccucagggcuucucugcucuggaaccccugguggaucugcccaucggcaucaacaucacccgguuucagacacugcuggcccugcacagaagcuaccugacaccuggcgauagcagcagcggauggacagcuggugccgccgcuuacuaugugggcuaccugcagccuagaaccuuccugcugaaguacaacgagaacggcaccaucaccgacgccguggauugugcucuggauccucugagcgagacaaagugcacccugaaguccuucaccguggaaaagggcaucuaccagaccagcaacuuccgggugcagcccaccgaauccaucgugcgguuccccaauaucaccaaucugugccccuucggcgagguguucaaugccaccagauucgccucuguguacgccuggaaccggaagcggaucagcaauugcguggccgacuacuccgugcuguacaacuccgccagcuucagcaccuucaagugcuacggcguguccccuaccaagcugaacgaccugugcuucacaaacguguacgccgacagcuucgugauccggggagaugaagugcggcagauugccccuggacagacaggcaagaucgccgacuacaacuacaagcugcccgacgacuucaccggcugugugauugccuggaacagcaacaaccuggacuccaaagucggcggcaacuacaauuaccuguaccggcuguuccggaaguccaaucugaagcccuucgagcgggacaucuccaccgagaucuaucaggccggcagcaccccuuguaacggcguggaaggcuucaacugcuacuucccacugcaguccuacggcuuucagcccacaaauggcgugggcuaucagcccuacagagugguggugcugagcuucgaacugcugcaugccccugccacagugugcggcccuaagaaaagcaccaaucucgugaagaacaaaugcgugaacuucaacuucaacggccugaccggcaccggcgugcugacagagagcaacaagaaguuccugccauuccagcaguuuggccgggauaucgccgauaccacagacgccguuagagauccccagacacuggaaauccuggacaucaccccuugcagcuucggcggagugucugugaucaccccuggcaccaacaccagcaaucagguggcagugcuguaccagggcgugaacuguaccgaagugcccguggccauucacgccgaucagcugacaccuacauggcggguguacuccaccggcagcaauguguuucagaccagagccggcugucugaucggagccgagcacgugaacaauagcuacgagugcgacauccccaucggcgcuggaaucugcgccagcuaccagacacagacaaacagcccucggagagccagaagcguggccagccagagcaucauugccuacacaaugucucugggcgccgagaacagcguggccuacuccaacaacucuaucgcuauccccaccaacuucaccaucagcgugaccacagagauccugccuguguccaugaccaagaccagcguggacugcaccauguacaucugcggcgauuccaccgagugcuccaaccugcugcugcaguacggcagcuucugcacccagcugaauagagcccugacagggaucgccguggaacaggacaagaacacccaagagguguucgcccaagugaagcagaucuacaagaccccuccuaucaaggacuucggcggcuucaauuucagccagauucugcccgauccuagcaagcccagcaagcggagcuucaucgaggaccugcuguucaacaaagugacacuggccgacgccggcuucaucaagcaguauggcgauugucugggcgacauugccgccagggaucugauuugcgcccagaaguuuaacggacugacagugcugccuccucugcugaccgaugagaugaucgcccaguacacaucugcccugcuggccggcacaaucacaagcggcuggacauuuggagcaggcgccgcucugcagauccccuuugcuaugcagauggccuaccgguucaacggcaucggagugacccagaaugugcuguacgagaaccagaagcugaucgccaaccaguucaacagcgccaucggcaagauccaggacagccugagcagcacagcaagcgcccugggaaagcugcaggacguggucaaccagaaugcccaggcacugaacacccuggucaagcagcuguccuccaacuucggcgccaucagcucugugcugaacgauauccugagcagacuggacaaggucgaggccgaggugcagaucgacagacugaucacaggcagacugcagagccuccagacauacgugacccagcagcugaucagagccgccgagauuagagccucugccaaucuggccgccaccaagaugucugagugugugcugggccagagcaagagaguggacuuuugcggcaagggcuaccaccugaugagcuucccucagucugccccucacggcgugguguuucugcacgugacauaugugcccgcucaagagaagaauuucaccaccgcuccagccaucugccacgacggcaaagcccacuuuccuagagaaggcguguucguguccaacggcacccauugguucgugacacagcggaacuucuacgagccccagaucaucaccaccgacaacaccuucgugucuggcaacugcgacgucgugaucggcauugugaacaauaccguguacgacccucugcagcccgagcuggacagcuucaaagaggaacuggacaaguacuuuaagaaccacacaagccccgacguggaccugggcgauaucagcggaaucaaugccagcgucgugaacauccagaaagagaucgaccggcugaacgagguggccaagaaucugaacgagagccugaucgaccugcaagaacuggggaaguacgagcaguacaucaaguggcccugguacaucuggcugggcuuuaucgccggacugauugccaucgugauggucacaaucaugcuguguugcaugaccagcugcuguagcugccugaagggcuguuguagcuguggcagcugcugcaaguucgacgaggacgauucugagcccgugcugaagggcgugaaacugcacuacacaugauaauaggcuggagccucgguggccuagcuucuugccccuugggccuccccccagccccuccuccccuuccugcacccguacccccguggucuuugaauaaagucugagugggcggcaaaaaaaaaaaaaaaaaaaaaaaaaaaaaaaaaaaaaaaaaaaaaaaaaaaaaaaaaaaaaaaaaaaaaaaaaaaaaaaaaaaaaaaaaaaaaaaaaaaa

SEQ ID NO: 26146 - RNA, 4095 nt, Artificial Sequence
  SARS-CoV-2/Wuhan/WIV05/2019__EPI_ISL_402128 spike protein mRNA gc mod (1-1273)(Y453F_D614G)
gggaaauaagagagaaaagaagaguaagaagaaauauaagaccccggcgccgccaccauguucguguuccuggugcugcugccucugguguccagccagugugugaaccugaccaccagaacacagcugccuccagccuacaccaacagcuuuaccagaggcguguacuaccccgacaagguguucagauccagcgugcugcacucuacccaggaccuguuccugccuuucuucagcaacgugaccugguuccacgccauccacguguccggcaccaauggcaccaagagauucgacaaccccgugcugcccuucaacgacgggguguacuuugccagcaccgagaaguccaacaucaucagaggcuggaucuucggcaccacacuggacagcaagacccagagccugcugaucgugaacaacgccaccaacguggucaucaaagugugcgaguuccaguucugcaacgaccccuuccugggcgucuacuaccacaagaacaacaagagcuggauggaaagcgaguuccggguguacagcagcgccaacaacugcaccuucgaguacgugucccagccuuuccugauggaccuggaaggcaagcagggcaacuucaagaaccugcgcgaguucguguuuaagaacaucgacggcuacuucaagaucuacagcaagcacaccccuaucaaccucgugcgggaucugccucagggcuucucugcucuggaaccccugguggaucugcccaucggcaucaacaucacccgguuucagacacugcuggcccugcacagaagcuaccugacaccuggcgauagcagcagcggauggacagcuggugccgccgcuuacuaugugggcuaccugcagccuagaaccuuccugcugaaguacaacgagaacggcaccaucaccgacgccguggauugugcucuggauccucugagcgagacaaagugcacccugaaguccuucaccguggaaaagggcaucuaccagaccagcaacuuccgggugcagcccaccgaauccaucgugcgguuccccaauaucaccaaucugugccccuucggcgagguguucaaugccaccagauucgccucuguguacgccuggaaccggaagcggaucagcaauugcguggccgacuacuccgugcuguacaacuccgccagcuucagcaccuucaagugcuacggcguguccccuaccaagcugaacgaccugugcuucacaaacguguacgccgacagcuucgugauccggggagaugaagugcggcagauugccccuggacagacaggcaagaucgccgacuacaacuacaagcugcccgacgacuucaccggcugugugauugccuggaacagcaacaaccuggacuccaaagucggcggcaacuacaauuaccuguuccggcuguuccggaaguccaaucugaagcccuucgagcgggacaucuccaccgagaucuaucaggccggcagcaccccuuguaacggcguggaaggcuucaacugcuacuucccacugcaguccuacggcuuucagcccacaaauggcgugggcuaucagcccuacagagugguggugcugagcuucgaacugcugcaugccccugccacagugugcggcccuaagaaaagcaccaaucucgugaagaacaaaugcgugaacuucaacuucaacggccugaccggcaccggcgugcugacagagagcaacaagaaguuccugccauuccagcaguuuggccgggauaucgccgauaccacagacgccguuagagauccccagacacuggaaauccuggacaucaccccuugcagcuucggcggagugucugugaucaccccuggcaccaacaccagcaaucagguggcagugcuguaccagggcgugaacuguaccgaagugcccguggccauucacgccgaucagcugacaccuacauggcggguguacuccaccggcagcaauguguuucagaccagagccggcugucugaucggagccgagcacgugaacaauagcuacgagugcgacauccccaucggcgcuggaaucugcgccagcuaccagacacagacaaacagcccucggagagccagaagcguggccagccagagcaucauugccuacacaaugucucugggcgccgagaacagcguggccuacuccaacaacucuaucgcuauccccaccaacuucaccaucagcgugaccacagagauccugccuguguccaugaccaagaccagcguggacugcaccauguacaucugcggcgauuccaccgagugcuccaaccugcugcugcaguacggcagcuucugcacccagcugaauagagcccugacagggaucgccguggaacaggacaagaacacccaagagguguucgcccaagugaagcagaucuacaagaccccuccuaucaaggacuucggcggcuucaauuucagccagauucugcccgauccuagcaagcccagcaagcggagcuucaucgaggaccugcuguucaacaaagugacacuggccgacgccggcuucaucaagcaguauggcgauugucugggcgacauugccgccagggaucugauuugcgcccagaaguuuaacggacugacagugcugccuccucugcugaccgaugagaugaucgcccaguacacaucugcccugcuggccggcacaaucacaagcggcuggacauuuggagcaggcgccgcucugcagauccccuuugcuaugcagauggccuaccgguucaacggcaucggagugacccagaaugugcuguacgagaaccagaagcugaucgccaaccaguucaacagcgccaucggcaagauccaggacagccugagcagcacagcaagcgcccugggaaagcugcaggacguggucaaccagaaugcccaggcacugaacacccuggucaagcagcuguccuccaacuucggcgccaucagcucugugcugaacgauauccugagcagacuggacaaggucgaggccgaggugcagaucgacagacugaucacaggcagacugcagagccuccagacauacgugacccagcagcugaucagagccgccgagauuagagccucugccaaucuggccgccaccaagaugucugagugugugcugggccagagcaagagaguggacuuuugcggcaagggcuaccaccugaugagcuucccucagucugccccucacggcgugguguuucugcacgugacauaugugcccgcucaagagaagaauuucaccaccgcuccagccaucugccacgacggcaaagcccacuuuccuagagaaggcguguucguguccaacggcacccauugguucgugacacagcggaacuucuacgagccccagaucaucaccaccgacaacaccuucgugucuggcaacugcgacgucgugaucggcauugugaacaauaccguguacgacccucugcagcccgagcuggacagcuucaaagaggaacuggacaaguacuuuaagaaccacacaagccccgacguggaccugggcgauaucagcggaaucaaugccagcgucgugaacauccagaaagagaucgaccggcugaacgagguggccaagaaucugaacgagagccugaucgaccugcaagaacuggggaaguacgagcaguacaucaaguggcccugguacaucuggcugggcuuuaucgccggacugauugccaucgugauggucacaaucaugcuguguugcaugaccagcugcuguagcugccugaagggcuguuguagcuguggcagcugcugcaaguucgacgaggacgauucugagcccgugcugaagggcgugaaacugcacuacacaugauaauaggcuggagccucgguggccuagcuucuugccccuugggccuccccccagccccuccuccccuuccugcacccguacccccguggucuuugaauaaagucugagugggcggcaaaaaaaaaaaaaaaaaaaaaaaaaaaaaaaaaaaaaaaaaaaaaaaaaaaaaaaaaaaaaaaaaaaaaaaaaaaaaaaaaaaaaaaaaaaaaaaaaaaa

SEQ ID NO: 26147 - RNA, 4095 nt, Artificial Sequence
  SARS-CoV-2/Wuhan/WIV05/2019__EPI_ISL_402128 spike protein mRNA gc mod (1-1273)(D614G_I692V)
gggaaauaagagagaaaagaagaguaagaagaaauauaagaccccggcgccgccaccauguucguguuccuggugcugcugccucugguguccagccagugugugaaccugaccaccagaacacagcugccuccagccuacaccaacagcuuuaccagaggcguguacuaccccgacaagguguucagauccagcgugcugcacucuacccaggaccuguuccugccuuucuucagcaacgugaccugguuccacgccauccacguguccggcaccaauggcaccaagagauucgacaaccccgugcugcccuucaacgacgggguguacuuugccagcaccgagaaguccaacaucaucagaggcuggaucuucggcaccacacuggacagcaagacccagagccugcugaucgugaacaacgccaccaacguggucaucaaagugugcgaguuccaguucugcaacgaccccuuccugggcgucuacuaccacaagaacaacaagagcuggauggaaagcgaguuccggguguacagcagcgccaacaacugcaccuucgaguacgugucccagccuuuccugauggaccuggaaggcaagcagggcaacuucaagaaccugcgcgaguucguguuuaagaacaucgacggcuacuucaagaucuacagcaagcacaccccuaucaaccucgugcgggaucugccucagggcuucucugcucuggaaccccugguggaucugcccaucggcaucaacaucacccgguuucagacacugcuggcccugcacagaagcuaccugacaccuggcgauagcagcagcggauggacagcuggugccgccgcuuacuaugugggcuaccugcagccuagaaccuuccugcugaaguacaacgagaacggcaccaucaccgacgccguggauugugcucuggauccucugagcgagacaaagugcacccugaaguccuucaccguggaaaagggcaucuaccagaccagcaacuuccgggugcagcccaccgaauccaucgugcgguuccccaauaucaccaaucugugccccuucggcgagguguucaaugccaccagauucgccucuguguacgccuggaaccggaagcggaucagcaauugcguggccgacuacuccgugcuguacaacuccgccagcuucagcaccuucaagugcuacggcguguccccuaccaagcugaacgaccugugcuucacaaacguguacgccgacagcuucgugauccggggagaugaagugcggcagauugccccuggacagacaggcaagaucgccgacuacaacuacaagcugcccgacgacuucaccggcugugugauugccuggaacagcaacaaccuggacuccaaagucggcggcaacuacaauuaccuguaccggcuguuccggaaguccaaucugaagcccuucgagcgggacaucuccaccgagaucuaucaggccggcagcaccccuuguaacggcguggaaggcuucaacugcuacuucccacugcaguccuacggcuuucagcccacaaauggcgugggcuaucagcccuacagagugguggugcugagcuucgaacugcugcaugccccugccacagugugcggcccuaagaaaagcaccaaucucgugaagaacaaaugcgugaacuucaacuucaacggccugaccggcaccggcgugcugacagagagcaacaagaaguuccugccauuccagcaguuuggccgggauaucgccgauaccacagacgccguuagagauccccagacacuggaaauccuggacaucaccccuugcagcuucggcggagugucugugaucaccccuggcaccaacaccagcaaucagguggcagugcuguaccagggcgugaacuguaccgaagugcccguggccauucacgccgaucagcugacaccuacauggcggguguacuccaccggcagcaauguguuucagaccagagccggcugucugaucggagccgagcacgugaacaauagcuacgagugcgacauccccaucggcgcuggaaucugcgccagcuaccagacacagacaaacagcccucggagagccagaagcguggccagccagagcgugauugccuacacaaugucucugggcgccgagaacagcguggccuacuccaacaacucuaucgcuauccccaccaacuucaccaucagcgugaccacagagauccugccuguguccaugaccaagaccagcguggacugcaccauguacaucugcggcgauuccaccgagugcuccaaccugcugcugcaguacggcagcuucugcacccagcugaauagagcccugacagggaucgccguggaacaggacaagaacacccaagagguguucgcccaagugaagcagaucuacaagaccccuccuaucaaggacuucggcggcuucaauuucagccagauucugcccgauccuagcaagcccagcaagcggagcuucaucgaggaccugcuguucaacaaagugacacuggccgacgccggcuucaucaagcaguauggcgauugucugggcgacauugccgccagggaucugauuugcgcccagaaguuuaacggacugacagugcugccuccucugcugaccgaugagaugaucgcccaguacacaucugcccugcuggccggcacaaucacaagcggcuggacauuuggagcaggcgccgcucugcagauccccuuugcuaugcagauggccuaccgguucaacggcaucggagugacccagaaugugcuguacgagaaccagaagcugaucgccaaccaguucaacagcgccaucggcaagauccaggacagccugagcagcacagcaagcgcccugggaaagcugcaggacguggucaaccagaaugcccaggcacugaacacccuggucaagcagcuguccuccaacuucggcgccaucagcucugugcugaacgauauccugagcagacuggacaaggucgaggccgaggugcagaucgacagacugaucacaggcagacugcagagccuccagacauacgugacccagcagcugaucagagccgccgagauuagagccucugccaaucuggccgccaccaagaugucugagugugugcugggccagagcaagagaguggacuuuugcggcaagggcuaccaccugaugagcuucccucagucugccccucacggcgugguguuucugcacgugacauaugugcccgcucaagagaagaauuucaccaccgcuccagccaucugccacgacggcaaagcccacuuuccuagagaaggcguguucguguccaacggcacccauugguucgugacacagcggaacuucuacgagccccagaucaucaccaccgacaacaccuucgugucuggcaacugcgacgucgugaucggcauugugaacaauaccguguacgacccucugcagcccgagcuggacagcuucaaagaggaacuggacaaguacuuuaagaaccacacaagccccgacguggaccugggcgauaucagcggaaucaaugccagcgucgugaacauccagaaagagaucgaccggcugaacgagguggccaagaaucugaacgagagccugaucgaccugcaagaacuggggaaguacgagcaguacaucaaguggcccugguacaucuggcugggcuuuaucgccggacugauugccaucgugauggucacaaucaugcuguguugcaugaccagcugcuguagcugccugaagggcuguuguagcuguggcagcugcugcaaguucgacgaggacgauucugagcccgugcugaagggcgugaaacugcacuacacaugauaauaggcuggagccucgguggccuagcuucuugccccuugggccuccccccagccccuccuccccuuccugcacccguacccccguggucuuugaauaaagucugagugggcggcaaaaaaaaaaaaaaaaaaaaaaaaaaaaaaaaaaaaaaaaaaaaaaaaaaaaaaaaaaaaaaaaaaaaaaaaaaaaaaaaaaaaaaaaaaaaaaaaaaaa

SEQ ID NO: 26148 - RNA, 4095 nt, Artificial Sequence
  SARS-CoV-2/Wuhan/WIV05/2019__EPI_ISL_402128 spike protein mRNA gc mod (1-1273)(D614G_M1229I)
gggaaauaagagagaaaagaagaguaagaagaaauauaagaccccggcgccgccaccauguucguguuccuggugcugcugccucugguguccagccagugugugaaccugaccaccagaacacagcugccuccagccuacaccaacagcuuuaccagaggcguguacuaccccgacaagguguucagauccagcgugcugcacucuacccaggaccuguuccugccuuucuucagcaacgugaccugguuccacgccauccacguguccggcaccaauggcaccaagagauucgacaaccccgugcugcccuucaacgacgggguguacuuugccagcaccgagaaguccaacaucaucagaggcuggaucuucggcaccacacuggacagcaagacccagagccugcugaucgugaacaacgccaccaacguggucaucaaagugugcgaguuccaguucugcaacgaccccuuccugggcgucuacuaccacaagaacaacaagagcuggauggaaagcgaguuccggguguacagcagcgccaacaacugcaccuucgaguacgugucccagccuuuccugauggaccuggaaggcaagcagggcaacuucaagaaccugcgcgaguucguguuuaagaacaucgacggcuacuucaagaucuacagcaagcacaccccuaucaaccucgugcgggaucugccucagggcuucucugcucuggaaccccugguggaucugcccaucggcaucaacaucacccgguuucagacacugcuggcccugcacagaagcuaccugacaccuggcgauagcagcagcggauggacagcuggugccgccgcuuacuaugugggcuaccugcagccuagaaccuuccugcugaaguacaacgagaacggcaccaucaccgacgccguggauugugcucuggauccucugagcgagacaaagugcacccugaaguccuucaccguggaaaagggcaucuaccagaccagcaacuuccgggugcagcccaccgaauccaucgugcgguuccccaauaucaccaaucugugccccuucggcgagguguucaaugccaccagauucgccucuguguacgccuggaaccggaagcggaucagcaauugcguggccgacuacuccgugcuguacaacuccgccagcuucagcaccuucaagugcuacggcguguccccuaccaagcugaacgaccugugcuucacaaacguguacgccgacagcuucgugauccggggagaugaagugcggcagauugccccuggacagacaggcaagaucgccgacuacaacuacaagcugcccgacgacuucaccggcugugugauugccuggaacagcaacaaccuggacuccaaagucggcggcaacuacaauuaccuguaccggcuguuccggaaguccaaucugaagcccuucgagcgggacaucuccaccgagaucuaucaggccggcagcaccccuuguaacggcguggaaggcuucaacugcuacuucccacugcaguccuacggcuuucagcccacaaauggcgugggcuaucagcccuacagagugguggugcugagcuucgaacugcugcaugccccugccacagugugcggcccuaagaaaagcaccaaucucgugaagaacaaaugcgugaacuucaacuucaacggccugaccggcaccggcgugcugacagagagcaacaagaaguuccugccauuccagcaguuuggccgggauaucgccgauaccacagacgccguuagagauccccagacacuggaaauccuggacaucaccccuugcagcuucggcggagugucugugaucaccccuggcaccaacaccagcaaucagguggcagugcuguaccagggcgugaacuguaccgaagugcccguggccauucacgccgaucagcugacaccuacauggcggguguacuccaccggcagcaauguguuucagaccagagccggcugucugaucggagccgagcacgugaacaauagcuacgagugcgacauccccaucggcgcuggaaucugcgccagcuaccagacacagacaaacagcccucggagagccagaagcguggccagccagagcaucauugccuacacaaugucucugggcgccgagaacagcguggccuacuccaacaacucuaucgcuauccccaccaacuucaccaucagcgugaccacagagauccugccuguguccaugaccaagaccagcguggacugcaccauguacaucugcggcgauuccaccgagugcuccaaccugcugcugcaguacggcagcuucugcacccagcugaauagagcccugacagggaucgccguggaacaggacaagaacacccaagagguguucgcccaagugaagcagaucuacaagaccccuccuaucaaggacuucggcggcuucaauuucagccagauucugcccgauccuagcaagcccagcaagcggagcuucaucgaggaccugcuguucaacaaagugacacuggccgacgccggcuucaucaagcaguauggcgauugucugggcgacauugccgccagggaucugauuugcgcccagaaguuuaacggacugacagugcugccuccucugcugaccgaugagaugaucgcccaguacacaucugcccugcuggccggcacaaucacaagcggcuggacauuuggagcaggcgccgcucugcagauccccuuugcuaugcagauggccuaccgguucaacggcaucggagugacccagaaugugcuguacgagaaccagaagcugaucgccaaccaguucaacagcgccaucggcaagauccaggacagccugagcagcacagcaagcgcccugggaaagcugcaggacguggucaaccagaaugcccaggcacugaacacccuggucaagcagcuguccuccaacuucggcgccaucagcucugugcugaacgauauccugagcagacuggacaaggucgaggccgaggugcagaucgacagacugaucacaggcagacugcagagccuccagacauacgugacccagcagcugaucagagccgccgagauuagagccucugccaaucuggccgccaccaagaugucugagugugugcugggccagagcaagagaguggacuuuugcggcaagggcuaccaccugaugagcuucccucagucugccccucacggcgugguguuucugcacgugacauaugugcccgcucaagagaagaauuucaccaccgcuccagccaucugccacgacggcaaagcccacuuuccuagagaaggcguguucguguccaacggcacccauugguucgugacacagcggaacuucuacgagccccagaucaucaccaccgacaacaccuucgugucuggcaacugcgacgucgugaucggcauugugaacaauaccguguacgacccucugcagcccgagcuggacagcuucaaagaggaacuggacaaguacuuuaagaaccacacaagccccgacguggaccugggcgauaucagcggaaucaaugccagcgucgugaacauccagaaagagaucgaccggcugaacgagguggccaagaaucugaacgagagccugaucgaccugcaagaacuggggaaguacgagcaguacaucaaguggcccugguacaucuggcugggcuuuaucgccggacugauugccaucgugaucgucacaaucaugcuguguugcaugaccagcugcuguagcugccugaagggcuguuguagcuguggcagcugcugcaaguucgacgaggacgauucugagcccgugcugaagggcgugaaacugcacuacacaugauaauaggcuggagccucgguggccuagcuucuugccccuugggccuccccccagccccuccuccccuuccugcacccguacccccguggucuuugaauaaagucugagugggcggcaaaaaaaaaaaaaaaaaaaaaaaaaaaaaaaaaaaaaaaaaaaaaaaaaaaaaaaaaaaaaaaaaaaaaaaaaaaaaaaaaaaaaaaaaaaaaaaaaaaa

SEQ ID NO: 26149 - RNA, 4089 nt, Artificial Sequence
  SARS-CoV-2/Wuhan/WIV05/2019__EPI_ISL_402128 spike protein mRNA gc mod (1-1273)(H69del_V70del_A222V_Y453F_S477N_D614G_I692V)
gggaaauaagagagaaaagaagaguaagaagaaauauaagaccccggcgccgccaccauguucguguuccuggugcugcugccucugguguccagccagugugugaaccugaccaccagaacacagcugccuccagccuacaccaacagcuuuaccagaggcguguacuaccccgacaagguguucagauccagcgugcugcacucuacccaggaccuguuccugccuuucuucagcaacgugaccugguuccacgccaucuccggcaccaauggcaccaagagauucgacaaccccgugcugcccuucaacgacgggguguacuuugccagcaccgagaaguccaacaucaucagaggcuggaucuucggcaccacacuggacagcaagacccagagccugcugaucgugaacaacgccaccaacguggucaucaaagugugcgaguuccaguucugcaacgaccccuuccugggcgucuacuaccacaagaacaacaagagcuggauggaaagcgaguuccggguguacagcagcgccaacaacugcaccuucgaguacgugucccagccuuuccugauggaccuggaaggcaagcagggcaacuucaagaaccugcgcgaguucguguuuaagaacaucgacggcuacuucaagaucuacagcaagcacaccccuaucaaccucgugcgggaucugccucagggcuucucugugcuggaaccccugguggaucugcccaucggcaucaacaucacccgguuucagacacugcuggcccugcacagaagcuaccugacaccuggcgauagcagcagcggauggacagcuggugccgccgcuuacuaugugggcuaccugcagccuagaaccuuccugcugaaguacaacgagaacggcaccaucaccgacgccguggauugugcucuggauccucugagcgagacaaagugcacccugaaguccuucaccguggaaaagggcaucuaccagaccagcaacuuccgggugcagcccaccgaauccaucgugcgguuccccaauaucaccaaucugugccccuucggcgagguguucaaugccaccagauucgccucuguguacgccuggaaccggaagcggaucagcaauugcguggccgacuacuccgugcuguacaacuccgccagcuucagcaccuucaagugcuacggcguguccccuaccaagcugaacgaccugugcuucacaaacguguacgccgacagcuucgugauccggggagaugaagugcggcagauugccccuggacagacaggcaagaucgccgacuacaacuacaagcugcccgacgacuucaccggcugugugauugccuggaacagcaacaaccuggacuccaaagucggcggcaacuacaauuaccuguuccggcuguuccggaaguccaaucugaagcccuucgagcgggacaucuccaccgagaucuaucaggccggcaacaccccuuguaacggcguggaaggcuucaacugcuacuucccacugcaguccuacggcuuucagcccacaaauggcgugggcuaucagcccuacagagugguggugcugagcuucgaacugcugcaugccccugccacagugugcggcccuaagaaaagcaccaaucucgugaagaacaaaugcgugaacuucaacuucaacggccugaccggcaccggcgugcugacagagagcaacaagaaguuccugccauuccagcaguuuggccgggauaucgccgauaccacagacgccguuagagauccccagacacuggaaauccuggacaucaccccuugcagcuucggcggagugucugugaucaccccuggcaccaacaccagcaaucagguggcagugcuguaccagggcgugaacuguaccgaagugcccguggccauucacgccgaucagcugacaccuacauggcggguguacuccaccggcagcaauguguuucagaccagagccggcugucugaucggagccgagcacgugaacaauagcuacgagugcgacauccccaucggcgcuggaaucugcgccagcuaccagacacagacaaacagcccucggagagccagaagcguggccagccagagcgugauugccuacacaaugucucugggcgccgagaacagcguggccuacuccaacaacucuaucgcuauccccaccaacuucaccaucagcgugaccacagagauccugccuguguccaugaccaagaccagcguggacugcaccauguacaucugcggcgauuccaccgagugcuccaaccugcugcugcaguacggcagcuucugcacccagcugaauagagcccugacagggaucgccguggaacaggacaagaacacccaagagguguucgcccaagugaagcagaucuacaagaccccuccuaucaaggacuucggcggcuucaauuucagccagauucugcccgauccuagcaagcccagcaagcggagcuucaucgaggaccugcuguucaacaaagugacacuggccgacgccggcuucaucaagcaguauggcgauugucugggcgacauugccgccagggaucugauuugcgcccagaaguuuaacggacugacagugcugccuccucugcugaccgaugagaugaucgcccaguacacaucugcccugcuggccggcacaaucacaagcggcuggacauuuggagcaggcgccgcucugcagauccccuuugcuaugcagauggccuaccgguucaacggcaucggagugacccagaaugugcuguacgagaaccagaagcugaucgccaaccaguucaacagcgccaucggcaagauccaggacagccugagcagcacagcaagcgcccugggaaagcugcaggacguggucaaccagaaugcccaggcacugaacacccuggucaagcagcuguccuccaacuucggcgccaucagcucugugcugaacgauauccugagcagacuggacaaggucgaggccgaggugcagaucgacagacugaucacaggcagacugcagagccuccagacauacgugacccagcagcugaucagagccgccgagauuagagccucugccaaucuggccgccaccaagaugucugagugugugcugggccagagcaagagaguggacuuuugcggcaagggcuaccaccugaugagcuucccucagucugccccucacggcgugguguuucugcacgugacauaugugcccgcucaagagaagaauuucaccaccgcuccagccaucugccacgacggcaaagcccacuuuccuagagaaggcguguucguguccaacggcacccauugguucgugacacagcggaacuucuacgagccccagaucaucaccaccgacaacaccuucgugucuggcaacugcgacgucgugaucggcauugugaacaauaccguguacgacccucugcagcccgagcuggacagcuucaaagaggaacuggacaaguacuuuaagaaccacacaagccccgacguggaccugggcgauaucagcggaaucaaugccagcgucgugaacauccagaaagagaucgaccggcugaacgagguggccaagaaucugaacgagagccugaucgaccugcaagaacuggggaaguacgagcaguacaucaaguggcccugguacaucuggcugggcuuuaucgccggacugauugccaucgugauggucacaaucaugcuguguugcaugaccagcugcuguagcugccugaagggcuguuguagcuguggcagcugcugcaaguucgacgaggacgauucugagcccgugcugaagggcgugaaacugcacuacacaugauaauaggcuggagccucgguggccuagcuucuugccccuugggccuccccccagccccuccuccccuuccugcacccguacccccguggucuuugaauaaagucugagugggcggcaaaaaaaaaaaaaaaaaaaaaaaaaaaaaaaaaaaaaaaaaaaaaaaaaaaaaaaaaaaaaaaaaaaaaaaaaaaaaaaaaaaaaaaaaaaaaaaaaaaa

SEQ ID NO: 26150 - RNA, 4089 nt, Artificial Sequence
  SARS-CoV-2/Wuhan/WIV05/2019__EPI_ISL_402128 spike protein mRNA gc mod (1-1273)(H69del_V70del_Y453F_D614G_I692V_M1229I)
gggaaauaagagagaaaagaagaguaagaagaaauauaagaccccggcgccgccaccauguucguguuccuggugcugcugccucugguguccagccagugugugaaccugaccaccagaacacagcugccuccagccuacaccaacagcuuuaccagaggcguguacuaccccgacaagguguucagauccagcgugcugcacucuacccaggaccuguuccugccuuucuucagcaacgugaccugguuccacgccaucuccggcaccaauggcaccaagagauucgacaaccccgugcugcccuucaacgacgggguguacuuugccagcaccgagaaguccaacaucaucagaggcuggaucuucggcaccacacuggacagcaagacccagagccugcugaucgugaacaacgccaccaacguggucaucaaagugugcgaguuccaguucugcaacgaccccuuccugggcgucuacuaccacaagaacaacaagagcuggauggaaagcgaguuccggguguacagcagcgccaacaacugcaccuucgaguacgugucccagccuuuccugauggaccuggaaggcaagcagggcaacuucaagaaccugcgcgaguucguguuuaagaacaucgacggcuacuucaagaucuacagcaagcacaccccuaucaaccucgugcgggaucugccucagggcuucucugcucuggaaccccugguggaucugcccaucggcaucaacaucacccgguuucagacacugcuggcccugcacagaagcuaccugacaccuggcgauagcagcagcggauggacagcuggugccgccgcuuacuaugugggcuaccugcagccuagaaccuuccugcugaaguacaacgagaacggcaccaucaccgacgccguggauugugcucuggauccucugagcgagacaaagugcacccugaaguccuucaccguggaaaagggcaucuaccagaccagcaacuuccgggugcagcccaccgaauccaucgugcgguuccccaauaucaccaaucugugccccuucggcgagguguucaaugccaccagauucgccucuguguacgccuggaaccggaagcggaucagcaauugcguggccgacuacuccgugcuguacaacuccgccagcuucagcaccuucaagugcuacggcguguccccuaccaagcugaacgaccugugcuucacaaacguguacgccgacagcuucgugauccggggagaugaagugcggcagauugccccuggacagacaggcaagaucgccgacuacaacuacaagcugcccgacgacuucaccggcugugugauugccuggaacagcaacaaccuggacuccaaagucggcggcaacuacaauuaccuguuccggcuguuccggaaguccaaucugaagcccuucgagcgggacaucuccaccgagaucuaucaggccggcagcaccccuuguaacggcguggaaggcuucaacugcuacuucccacugcaguccuacggcuuucagcccacaaauggcgugggcuaucagcccuacagagugguggugcugagcuucgaacugcugcaugccccugccacagugugcggcccuaagaaaagcaccaaucucgugaagaacaaaugcgugaacuucaacuucaacggccugaccggcaccggcgugcugacagagagcaacaagaaguuccugccauuccagcaguuuggccgggauaucgccgauaccacagacgccguuagagauccccagacacuggaaauccuggacaucaccccuugcagcuucggcggagugucugugaucaccccuggcaccaacaccagcaaucagguggcagugcuguaccagggcgugaacuguaccgaagugcccguggccauucacgccgaucagcugacaccuacauggcggguguacuccaccggcagcaauguguuucagaccagagccggcugucugaucggagccgagcacgugaacaauagcuacgagugcgacauccccaucggcgcuggaaucugcgccagcuaccagacacagacaaacagcccucggagagccagaagcguggccagccagagcgugauugccuacacaaugucucugggcgccgagaacagcguggccuacuccaacaacucuaucgcuauccccaccaacuucaccaucagcgugaccacagagauccugccuguguccaugaccaagaccagcguggacugcaccauguacaucugcggcgauuccaccgagugcuccaaccugcugcugcaguacggcagcuucugcacccagcugaauagagcccugacagggaucgccguggaacaggacaagaacacccaagagguguucgcccaagugaagcagaucuacaagaccccuccuaucaaggacuucggcggcuucaauuucagccagauucugcccgauccuagcaagcccagcaagcggagcuucaucgaggaccugcuguucaacaaagugacacuggccgacgccggcuucaucaagcaguauggcgauugucugggcgacauugccgccagggaucugauuugcgcccagaaguuuaacggacugacagugcugccuccucugcugaccgaugagaugaucgcccaguacacaucugcccugcuggccggcacaaucacaagcggcuggacauuuggagcaggcgccgcucugcagauccccuuugcuaugcagauggccuaccgguucaacggcaucggagugacccagaaugugcuguacgagaaccagaagcugaucgccaaccaguucaacagcgccaucggcaagauccaggacagccugagcagcacagcaagcgcccugggaaagcugcaggacguggucaaccagaaugcccaggcacugaacacccuggucaagcagcuguccuccaacuucggcgccaucagcucugugcugaacgauauccugagcagacuggacaaggucgaggccgaggugcagaucgacagacugaucacaggcagacugcagagccuccagacauacgugacccagcagcugaucagagccgccgagauuagagccucugccaaucuggccgccaccaagaugucugagugugugcugggccagagcaagagaguggacuuuugcggcaagggcuaccaccugaugagcuucccucagucugccccucacggcgugguguuucugcacgugacauaugugcccgcucaagagaagaauuucaccaccgcuccagccaucugccacgacggcaaagcccacuuuccuagagaaggcguguucguguccaacggcacccauugguucgugacacagcggaacuucuacgagccccagaucaucaccaccgacaacaccuucgugucuggcaacugcgacgucgugaucggcauugugaacaauaccguguacgacccucugcagcccgagcuggacagcuucaaagaggaacuggacaaguacuuuaagaaccacacaagccccgacguggaccugggcgauaucagcggaaucaaugccagcgucgugaacauccagaaagagaucgaccggcugaacgagguggccaagaaucugaacgagagccugaucgaccugcaagaacuggggaaguacgagcaguacaucaaguggcccugguacaucuggcugggcuuuaucgccggacugauugccaucgugaucgucacaaucaugcuguguugcaugaccagcugcuguagcugccugaagggcuguuguagcuguggcagcugcugcaaguucgacgaggacgauucugagcccgugcugaagggcgugaaacugcacuacacaugauaauaggcuggagccucgguggccuagcuucuugccccuugggccuccccccagccccuccuccccuuccugcacccguacccccguggucuuugaauaaagucugagugggcggcaaaaaaaaaaaaaaaaaaaaaaaaaaaaaaaaaaaaaaaaaaaaaaaaaaaaaaaaaaaaaaaaaaaaaaaaaaaaaaaaaaaaaaaaaaaaaaaaaaaa

SEQ ID NO: 26151 - RNA, 4086 nt, Artificial Sequence
  SARS-CoV-2/Wuhan/WIV05/2019__EPI_ISL_402128 spike protein mRNA gc mod (1-1273)(H69del_V70del_Y144del_N501Y_A570D_D614G_P681H_T716I_S982 A_D1118H)
gggaaauaagagagaaaagaagaguaagaagaaauauaagaccccggcgccgccaccauguucguguuccuggugcugcugccucugguguccagccagugugugaaccugaccaccagaacacagcugccuccagccuacaccaacagcuuuaccagaggcguguacuaccccgacaagguguucagauccagcgugcugcacucuacccaggaccuguuccugccuuucuucagcaacgugaccugguuccacgccaucuccggcaccaauggcaccaagagauucgacaaccccgugcugcccuucaacgacgggguguacuuugccagcaccgagaaguccaacaucaucagaggcuggaucuucggcaccacacuggacagcaagacccagagccugcugaucgugaacaacgccaccaacguggucaucaaagugugcgaguuccaguucugcaacgaccccuuccugggcgucuaccacaagaacaacaagagcuggauggaaagcgaguuccggguguacagcagcgccaacaacugcaccuucgaguacgugucccagccuuuccugauggaccuggaaggcaagcagggcaacuucaagaaccugcgcgaguucguguuuaagaacaucgacggcuacuucaagaucuacagcaagcacaccccuaucaaccucgugcgggaucugccucagggcuucucugcucuggaaccccugguggaucugcccaucggcaucaacaucacccgguuucagacacugcuggcccugcacagaagcuaccugacaccuggcgauagcagcagcggauggacagcuggugccgccgcuuacuaugugggcuaccugcagccuagaaccuuccugcugaaguacaacgagaacggcaccaucaccgacgccguggauugugcucuggauccucugagcgagacaaagugcacccugaaguccuucaccguggaaaagggcaucuaccagaccagcaacuuccgggugcagcccaccgaauccaucgugcgguuccccaauaucaccaaucugugccccuucggcgagguguucaaugccaccagauucgccucuguguacgccuggaaccggaagcggaucagcaauugcguggccgacuacuccgugcuguacaacuccgccagcuucagcaccuucaagugcuacggcguguccccuaccaagcugaacgaccugugcuucacaaacguguacgccgacagcuucgugauccggggagaugaagugcggcagauugccccuggacagacaggcaagaucgccgacuacaacuacaagcugcccgacgacuucaccggcugugugauugccuggaacagcaacaaccuggacuccaaagucggcggcaacuacaauuaccuguaccggcuguuccggaaguccaaucugaagcccuucgagcgggacaucuccaccgagaucuaucaggccggcagcaccccuuguaacggcguggaaggcuucaacugcuacuucccacugcaguccuacggcuuucagcccacauacggcgugggcuaucagcccuacagagugguggugcugagcuucgaacugcugcaugccccugccacagugugcggcccuaagaaaagcaccaaucucgugaagaacaaaugcgugaacuucaacuucaacggccugaccggcaccggcgugcugacagagagcaacaagaaguuccugccauuccagcaguuuggccgggauaucgacgauaccacagacgccguuagagauccccagacacuggaaauccuggacaucaccccuugcagcuucggcggagugucugugaucaccccuggcaccaacaccagcaaucagguggcagugcuguaccagggcgugaacuguaccgaagugcccguggccauucacgccgaucagcugacaccuacauggcggguguacuccaccggcagcaauguguuucagaccagagccggcugucugaucggagccgagcacgugaacaauagcuacgagugcgacauccccaucggcgcuggaaucugcgccagcuaccagacacagacaaacagccaccggagagccagaagcguggccagccagagcaucauugccuacacaaugucucugggcgccgagaacagcguggccuacuccaacaacucuaucgcuauccccaucaacuucaccaucagcgugaccacagagauccugccuguguccaugaccaagaccagcguggacugcaccauguacaucugcggcgauuccaccgagugcuccaaccugcugcugcaguacggcagcuucugcacccagcugaauagagcccugacagggaucgccguggaacaggacaagaacacccaagagguguucgcccaagugaagcagaucuacaagaccccuccuaucaaggacuucggcggcuucaauuucagccagauucugcccgauccuagcaagcccagcaagcggagcuucaucgaggaccugcuguucaacaaagugacacuggccgacgccggcuucaucaagcaguauggcgauugucugggcgacauugccgccagggaucugauuugcgcccagaaguuuaacggacugacagugcugccuccucugcugaccgaugagaugaucgcccaguacacaucugcccugcuggccggcacaaucacaagcggcuggacauuuggagcaggcgccgcucugcagauccccuuugcuaugcagauggccuaccgguucaacggcaucggagugacccagaaugugcuguacgagaaccagaagcugaucgccaaccaguucaacagcgccaucggcaagauccaggacagccugagcagcacagcaagcgcccugggaaagcugcaggacguggucaaccagaaugcccaggcacugaacacccuggucaagcagcuguccuccaacuucggcgccaucagcucugugcugaacgauauccuggccagacuggacaaggucgaggccgaggugcagaucgacagacugaucacaggcagacugcagagccuccagacauacgugacccagcagcugaucagagccgccgagauuagagccucugccaaucuggccgccaccaagaugucugagugugugcugggccagagcaagagaguggacuuuugcggcaagggcuaccaccugaugagcuucccucagucugccccucacggcgugguguuucugcacgugacauaugugcccgcucaagagaagaauuucaccaccgcuccagccaucugccacgacggcaaagcccacuuuccuagagaaggcguguucguguccaacggcacccauugguucgugacacagcggaacuucuacgagccccagaucaucaccacccacaacaccuucgugucuggcaacugcgacgucgugaucggcauugugaacaauaccguguacgacccucugcagcccgagcuggacagcuucaaagaggaacuggacaaguacuuuaagaaccacacaagccccgacguggaccugggcgauaucagcggaaucaaugccagcgucgugaacauccagaaagagaucgaccggcugaacgagguggccaagaaucugaacgagagccugaucgaccugcaagaacuggggaaguacgagcaguacaucaaguggcccugguacaucuggcugggcuuuaucgccggacugauugccaucgugauggucacaaucaugcuguguugcaugaccagcugcuguagcugccugaagggcuguuguagcuguggcagcugcugcaaguucgacgaggacgauucugagcccgugcugaagggcgugaaacugcacuacacaugauaauaggcuggagccucgguggccuagcuucuugccccuugggccuccccccagccccuccuccccuuccugcacccguacccccguggucuuugaauaaagucugagugggcggcaaaaaaaaaaaaaaaaaaaaaaaaaaaaaaaaaaaaaaaaaaaaaaaaaaaaaaaaaaaaaaaaaaaaaaaaaaaaaaaaaaaaaaaaaaaaaaaaaaaa

SEQ ID NO: 26152 - RNA, 4095 nt, Artificial Sequence
  SARS-CoV-2/Wuhan/WIV05/2019__EPI_ISL_402128 spike protein mRNA gc mod (1-1273)(K417N_E484K_N501Y_D614G)
gggaaauaagagagaaaagaagaguaagaagaaauauaagaccccggcgccgccaccauguucguguuccuggugcugcugccucugguguccagccagugugugaaccugaccaccagaacacagcugccuccagccuacaccaacagcuuuaccagaggcguguacuaccccgacaagguguucagauccagcgugcugcacucuacccaggaccuguuccugccuuucuucagcaacgugaccugguuccacgccauccacguguccggcaccaauggcaccaagagauucgacaaccccgugcugcccuucaacgacgggguguacuuugccagcaccgagaaguccaacaucaucagaggcuggaucuucggcaccacacuggacagcaagacccagagccugcugaucgugaacaacgccaccaacguggucaucaaagugugcgaguuccaguucugcaacgaccccuuccugggcgucuacuaccacaagaacaacaagagcuggauggaaagcgaguuccggguguacagcagcgccaacaacugcaccuucgaguacgugucccagccuuuccugauggaccuggaaggcaagcagggcaacuucaagaaccugcgcgaguucguguuuaagaacaucgacggcuacuucaagaucuacagcaagcacaccccuaucaaccucgugcgggaucugccucagggcuucucugcucuggaaccccugguggaucugcccaucggcaucaacaucacccgguuucagacacugcuggcccugcacagaagcuaccugacaccuggcgauagcagcagcggauggacagcuggugccgccgcuuacuaugugggcuaccugcagccuagaaccuuccugcugaaguacaacgagaacggcaccaucaccgacgccguggauugugcucuggauccucugagcgagacaaagugcacccugaaguccuucaccguggaaaagggcaucuaccagaccagcaacuuccgggugcagcccaccgaauccaucgugcgguuccccaauaucaccaaucugugccccuucggcgagguguucaaugccaccagauucgccucuguguacgccuggaaccggaagcggaucagcaauugcguggccgacuacuccgugcuguacaacuccgccagcuucagcaccuucaagugcuacggcguguccccuaccaagcugaacgaccugugcuucacaaacguguacgccgacagcuucgugauccggggagaugaagugcggcagauugccccuggacagacaggcaacaucgccgacuacaacuacaagcugcccgacgacuucaccggcugugugauugccuggaacagcaacaaccuggacuccaaagucggcggcaacuacaauuaccuguaccggcuguuccggaaguccaaucugaagcccuucgagcgggacaucuccaccgagaucuaucaggccggcagcaccccuuguaacggcgugaagggcuucaacugcuacuucccacugcaguccuacggcuuucagcccacauacggcgugggcuaucagcccuacagagugguggugcugagcuucgaacugcugcaugccccugccacagugugcggcccuaagaaaagcaccaaucucgugaagaacaaaugcgugaacuucaacuucaacggccugaccggcaccggcgugcugacagagagcaacaagaaguuccugccauuccagcaguuuggccgggauaucgccgauaccacagacgccguuagagauccccagacacuggaaauccuggacaucaccccuugcagcuucggcggagugucugugaucaccccuggcaccaacaccagcaaucagguggcagugcuguaccagggcgugaacuguaccgaagugcccguggccauucacgccgaucagcugacaccuacauggcggguguacuccaccggcagcaauguguuucagaccagagccggcugucugaucggagccgagcacgugaacaauagcuacgagugcgacauccccaucggcgcuggaaucugcgccagcuaccagacacagacaaacagcccucggagagccagaagcguggccagccagagcaucauugccuacacaaugucucugggcgccgagaacagcguggccuacuccaacaacucuaucgcuauccccaccaacuucaccaucagcgugaccacagagauccugccuguguccaugaccaagaccagcguggacugcaccauguacaucugcggcgauuccaccgagugcuccaaccugcugcugcaguacggcagcuucugcacccagcugaauagagcccugacagggaucgccguggaacaggacaagaacacccaagagguguucgcccaagugaagcagaucuacaagaccccuccuaucaaggacuucggcggcuucaauuucagccagauucugcccgauccuagcaagcccagcaagcggagcuucaucgaggaccugcuguucaacaaagugacacuggccgacgccggcuucaucaagcaguauggcgauugucugggcgacauugccgccagggaucugauuugcgcccagaaguuuaacggacugacagugcugccuccucugcugaccgaugagaugaucgcccaguacacaucugcccugcuggccggcacaaucacaagcggcuggacauuuggagcaggcgccgcucugcagauccccuuugcuaugcagauggccuaccgguucaacggcaucggagugacccagaaugugcuguacgagaaccagaagcugaucgccaaccaguucaacagcgccaucggcaagauccaggacagccugagcagcacagcaagcgcccugggaaagcugcaggacguggucaaccagaaugcccaggcacugaacacccuggucaagcagcuguccuccaacuucggcgccaucagcucugugcugaacgauauccugagcagacuggacaaggucgaggccgaggugcagaucgacagacugaucacaggcagacugcagagccuccagacauacgugacccagcagcugaucagagccgccgagauuagagccucugccaaucuggccgccaccaagaugucugagugugugcugggccagagcaagagaguggacuuuugcggcaagggcuaccaccugaugagcuucccucagucugccccucacggcgugguguuucugcacgugacauaugugcccgcucaagagaagaauuucaccaccgcuccagccaucugccacgacggcaaagcccacuuuccuagagaaggcguguucguguccaacggcacccauugguucgugacacagcggaacuucuacgagccccagaucaucaccaccgacaacaccuucgugucuggcaacugcgacgucgugaucggcauugugaacaauaccguguacgacccucugcagcccgagcuggacagcuucaaagaggaacuggacaaguacuuuaagaaccacacaagccccgacguggaccugggcgauaucagcggaaucaaugccagcgucgugaacauccagaaagagaucgaccggcugaacgagguggccaagaaucugaacgagagccugaucgaccugcaagaacuggggaaguacgagcaguacaucaaguggcccugguacaucuggcugggcuuuaucgccggacugauugccaucgugauggucacaaucaugcuguguugcaugaccagcugcuguagcugccugaagggcuguuguagcuguggcagcugcugcaaguucgacgaggacgauucugagcccgugcugaagggcgugaaacugcacuacacaugauaauaggcuggagccucgguggccuagcuucuugccccuugggccuccccccagccccuccuccccuuccugcacccguacccccguggucuuugaauaaagucugagugggcggcaaaaaaaaaaaaaaaaaaaaaaaaaaaaaaaaaaaaaaaaaaaaaaaaaaaaaaaaaaaaaaaaaaaaaaaaaaaaaaaaaaaaaaaaaaaaaaaaaaaa

SEQ ID NO: 26153 - RNA, 4086 nt, Artificial Sequence
  SARS-CoV-2/Wuhan/WIV05/2019__EPI_ISL_402128 spike protein mRNA gc mod (1-1273)(L18F_D80A_D215G_L242del_A243del_L244del_R246I_K417N_E484 K_N501Y_D614G_A701V)
gggaaauaagagagaaaagaagaguaagaagaaauauaagaccccggcgccgccaccauguucguguuccuggugcugcugccucugguguccagccagugugugaacuucaccaccagaacacagcugccuccagccuacaccaacagcuuuaccagaggcguguacuaccccgacaagguguucagauccagcgugcugcacucuacccaggaccuguuccugccuuucuucagcaacgugaccugguuccacgccauccacguguccggcaccaauggcaccaagagauucgccaaccccgugcugcccuucaacgacgggguguacuuugccagcaccgagaaguccaacaucaucagaggcuggaucuucggcaccacacuggacagcaagacccagagccugcugaucgugaacaacgccaccaacguggucaucaaagugugcgaguuccaguucugcaacgaccccuuccugggcgucuacuaccacaagaacaacaagagcuggauggaaagcgaguuccggguguacagcagcgccaacaacugcaccuucgaguacgugucccagccuuuccugauggaccuggaaggcaagcagggcaacuucaagaaccugcgcgaguucguguuuaagaacaucgacggcuacuucaagaucuacagcaagcacaccccuaucaaccucgugcggggccugccucagggcuucucugcucuggaaccccugguggaucugcccaucggcaucaacaucacccgguuucagacacugcacaucagcuaccugacaccuggcgauagcagcagcggauggacagcuggugccgccgcuuacuaugugggcuaccugcagccuagaaccuuccugcugaaguacaacgagaacggcaccaucaccgacgccguggauugugcucuggauccucugagcgagacaaagugcacccugaaguccuucaccguggaaaagggcaucuaccagaccagcaacuuccgggugcagcccaccgaauccaucgugcgguuccccaauaucaccaaucugugccccuucggcgagguguucaaugccaccagauucgccucuguguacgccuggaaccggaagcggaucagcaauugcguggccgacuacuccgugcuguacaacuccgccagcuucagcaccuucaagugcuacggcguguccccuaccaagcugaacgaccugugcuucacaaacguguacgccgacagcuucgugauccggggagaugaagugcggcagauugccccuggacagacaggcaacaucgccgacuacaacuacaagcugcccgacgacuucaccggcugugugauugccuggaacagcaacaaccuggacuccaaagucggcggcaacuacaauuaccuguaccggcuguuccggaaguccaaucugaagcccuucgagcgggacaucuccaccgagaucuaucaggccggcagcaccccuuguaacggcgugaagggcuucaacugcuacuucccacugcaguccuacggcuuucagcccacauacggcgugggcuaucagcccuacagagugguggugcugagcuucgaacugcugcaugccccugccacagugugcggcccuaagaaaagcaccaaucucgugaagaacaaaugcgugaacuucaacuucaacggccugaccggcaccggcgugcugacagagagcaacaagaaguuccugccauuccagcaguuuggccgggauaucgccgauaccacagacgccguuagagauccccagacacuggaaauccuggacaucaccccuugcagcuucggcggagugucugugaucaccccuggcaccaacaccagcaaucagguggcagugcuguaccagggcgugaacuguaccgaagugcccguggccauucacgccgaucagcugacaccuacauggcggguguacuccaccggcagcaauguguuucagaccagagccggcugucugaucggagccgagcacgugaacaauagcuacgagugcgacauccccaucggcgcuggaaucugcgccagcuaccagacacagacaaacagcccucggagagccagaagcguggccagccagagcaucauugccuacacaaugucucugggcguggagaacagcguggccuacuccaacaacucuaucgcuauccccaccaacuucaccaucagcgugaccacagagauccugccuguguccaugaccaagaccagcguggacugcaccauguacaucugcggcgauuccaccgagugcuccaaccugcugcugcaguacggcagcuucugcacccagcugaauagagcccugacagggaucgccguggaacaggacaagaacacccaagagguguucgcccaagugaagcagaucuacaagaccccuccuaucaaggacuucggcggcuucaauuucagccagauucugcccgauccuagcaagcccagcaagcggagcuucaucgaggaccugcuguucaacaaagugacacuggccgacgccggcuucaucaagcaguauggcgauugucugggcgacauugccgccagggaucugauuugcgcccagaaguuuaacggacugacagugcugccuccucugcugaccgaugagaugaucgcccaguacacaucugcccugcuggccggcacaaucacaagcggcuggacauuuggagcaggcgccgcucugcagauccccuuugcuaugcagauggccuaccgguucaacggcaucggagugacccagaaugugcuguacgagaaccagaagcugaucgccaaccaguucaacagcgccaucggcaagauccaggacagccugagcagcacagcaagcgcccugggaaagcugcaggacguggucaaccagaaugcccaggcacugaacacccuggucaagcagcuguccuccaacuucggcgccaucagcucugugcugaacgauauccugagcagacuggacaaggucgaggccgaggugcagaucgacagacugaucacaggcagacugcagagccuccagacauacgugacccagcagcugaucagagccgccgagauuagagccucugccaaucuggccgccaccaagaugucugagugugugcugggccagagcaagagaguggacuuuugcggcaagggcuaccaccugaugagcuucccucagucugccccucacggcgugguguuucugcacgugacauaugugcccgcucaagagaagaauuucaccaccgcuccagccaucugccacgacggcaaagcccacuuuccuagagaaggcguguucguguccaacggcacccauugguucgugacacagcggaacuucuacgagccccagaucaucaccaccgacaacaccuucgugucuggcaacugcgacgucgugaucggcauugugaacaauaccguguacgacccucugcagcccgagcuggacagcuucaaagaggaacuggacaaguacuuuaagaaccacacaagccccgacguggaccugggcgauaucagcggaaucaaugccagcgucgugaacauccagaaagagaucgaccggcugaacgagguggccaagaaucugaacgagagccugaucgaccugcaagaacuggggaaguacgagcaguacaucaaguggcccugguacaucuggcugggcuuuaucgccggacugauugccaucgugauggucacaaucaugcuguguugcaugaccagcugcuguagcugccugaagggcuguuguagcuguggcagcugcugcaaguucgacgaggacgauucugagcccgugcugaagggcgugaaacugcacuacacaugauaauaggcuggagccucgguggccuagcuucuugccccuugggccuccccccagccccuccuccccuuccugcacccguacccccguggucuuugaauaaagucugagugggcggcaaaaaaaaaaaaaaaaaaaaaaaaaaaaaaaaaaaaaaaaaaaaaaaaaaaaaaaaaaaaaaaaaaaaaaaaaaaaaaaaaaaaaaaaaaaaaaaaaaaa

SEQ ID NO: 26154 - RNA, 4095 nt, Artificial Sequence
  SARS-CoV-2/Wuhan/WIV05/2019__EPI_ISL_402128 spike protein mRNA gc mod (1-1273)(E484K_D614G)
gggaaauaagagagaaaagaagaguaagaagaaauauaagaccccggcgccgccaccauguucguguuccuggugcugcugccucugguguccagccagugugugaaccugaccaccagaacacagcugccuccagccuacaccaacagcuuuaccagaggcguguacuaccccgacaagguguucagauccagcgugcugcacucuacccaggaccuguuccugccuuucuucagcaacgugaccugguuccacgccauccacguguccggcaccaauggcaccaagagauucgacaaccccgugcugcccuucaacgacgggguguacuuugccagcaccgagaaguccaacaucaucagaggcuggaucuucggcaccacacuggacagcaagacccagagccugcugaucgugaacaacgccaccaacguggucaucaaagugugcgaguuccaguucugcaacgaccccuuccugggcgucuacuaccacaagaacaacaagagcuggauggaaagcgaguuccggguguacagcagcgccaacaacugcaccuucgaguacgugucccagccuuuccugauggaccuggaaggcaagcagggcaacuucaagaaccugcgcgaguucguguuuaagaacaucgacggcuacuucaagaucuacagcaagcacaccccuaucaaccucgugcgggaucugccucagggcuucucugcucuggaaccccugguggaucugcccaucggcaucaacaucacccgguuucagacacugcuggcccugcacagaagcuaccugacaccuggcgauagcagcagcggauggacagcuggugccgccgcuuacuaugugggcuaccugcagccuagaaccuuccugcugaaguacaacgagaacggcaccaucaccgacgccguggauugugcucuggauccucugagcgagacaaagugcacccugaaguccuucaccguggaaaagggcaucuaccagaccagcaacuuccgggugcagcccaccgaauccaucgugcgguuccccaauaucaccaaucugugccccuucggcgagguguucaaugccaccagauucgccucuguguacgccuggaaccggaagcggaucagcaauugcguggccgacuacuccgugcuguacaacuccgccagcuucagcaccuucaagugcuacggcguguccccuaccaagcugaacgaccugugcuucacaaacguguacgccgacagcuucgugauccggggagaugaagugcggcagauugccccuggacagacaggcaagaucgccgacuacaacuacaagcugcccgacgacuucaccggcugugugauugccuggaacagcaacaaccuggacuccaaagucggcggcaacuacaauuaccuguaccggcuguuccggaaguccaaucugaagcccuucgagcgggacaucuccaccgagaucuaucaggccggcagcaccccuuguaacggcgugaagggcuucaacugcuacuucccacugcaguccuacggcuuucagcccacaaauggcgugggcuaucagcccuacagagugguggugcugagcuucgaacugcugcaugccccugccacagugugcggcccuaagaaaagcaccaaucucgugaagaacaaaugcgugaacuucaacuucaacggccugaccggcaccggcgugcugacagagagcaacaagaaguuccugccauuccagcaguuuggccgggauaucgccgauaccacagacgccguuagagauccccagacacuggaaauccuggacaucaccccuugcagcuucggcggagugucugugaucaccccuggcaccaacaccagcaaucagguggcagugcuguaccagggcgugaacuguaccgaagugcccguggccauucacgccgaucagcugacaccuacauggcggguguacuccaccggcagcaauguguuucagaccagagccggcugucugaucggagccgagcacgugaacaauagcuacgagugcgacauccccaucggcgcuggaaucugcgccagcuaccagacacagacaaacagcccucggagagccagaagcguggccagccagagcaucauugccuacacaaugucucugggcgccgagaacagcguggccuacuccaacaacucuaucgcuauccccaccaacuucaccaucagcgugaccacagagauccugccuguguccaugaccaagaccagcguggacugcaccauguacaucugcggcgauuccaccgagugcuccaaccugcugcugcaguacggcagcuucugcacccagcugaauagagcccugacagggaucgccguggaacaggacaagaacacccaagagguguucgcccaagugaagcagaucuacaagaccccuccuaucaaggacuucggcggcuucaauuucagccagauucugcccgauccuagcaagcccagcaagcggagcuucaucgaggaccugcuguucaacaaagugacacuggccgacgccggcuucaucaagcaguauggcgauugucugggcgacauugccgccagggaucugauuugcgcccagaaguuuaacggacugacagugcugccuccucugcugaccgaugagaugaucgcccaguacacaucugcccugcuggccggcacaaucacaagcggcuggacauuuggagcaggcgccgcucugcagauccccuuugcuaugcagauggccuaccgguucaacggcaucggagugacccagaaugugcuguacgagaaccagaagcugaucgccaaccaguucaacagcgccaucggcaagauccaggacagccugagcagcacagcaagcgcccugggaaagcugcaggacguggucaaccagaaugcccaggcacugaacacccuggucaagcagcuguccuccaacuucggcgccaucagcucugugcugaacgauauccugagcagacuggacaaggucgaggccgaggugcagaucgacagacugaucacaggcagacugcagagccuccagacauacgugacccagcagcugaucagagccgccgagauuagagccucugccaaucuggccgccaccaagaugucugagugugugcugggccagagcaagagaguggacuuuugcggcaagggcuaccaccugaugagcuucccucagucugccccucacggcgugguguuucugcacgugacauaugugcccgcucaagagaagaauuucaccaccgcuccagccaucugccacgacggcaaagcccacuuuccuagagaaggcguguucguguccaacggcacccauugguucgugacacagcggaacuucuacgagccccagaucaucaccaccgacaacaccuucgugucuggcaacugcgacgucgugaucggcauugugaacaauaccguguacgacccucugcagcccgagcuggacagcuucaaagaggaacuggacaaguacuuuaagaaccacacaagccccgacguggaccugggcgauaucagcggaaucaaugccagcgucgugaacauccagaaagagaucgaccggcugaacgagguggccaagaaucugaacgagagccugaucgaccugcaagaacuggggaaguacgagcaguacaucaaguggcccugguacaucuggcugggcuuuaucgccggacugauugccaucgugauggucacaaucaugcuguguugcaugaccagcugcuguagcugccugaagggcuguuguagcuguggcagcugcugcaaguucgacgaggacgauucugagcccgugcugaagggcgugaaacugcacuacacaugauaauaggcuggagccucgguggccuagcuucuugccccuugggccuccccccagccccuccuccccuuccugcacccguacccccguggucuuugaauaaagucugagugggcggcaaaaaaaaaaaaaaaaaaaaaaaaaaaaaaaaaaaaaaaaaaaaaaaaaaaaaaaaaaaaaaaaaaaaaaaaaaaaaaaaaaaaaaaaaaaaaaaaaaaa

SEQ ID NO: 26155 - RNA, 4095 nt, Artificial Sequence
  SARS-CoV-2/Wuhan/WIV05/2019__EPI_ISL_402128 spike protein mRNA gc mod (1-1273)(L18F_T20N_P26S_D138Y_R190S_K417T_E484K_N501Y_D614G_H655Y _T1027I)
gggaaauaagagagaaaagaagaguaagaagaaauauaagaccccggcgccgccaccauguucguguuccuggugcugcugccucugguguccagccagugugugaacuucaccaacagaacacagcugccuagcgccuacaccaacagcuuuaccagaggcguguacuaccccgacaagguguucagauccagcgugcugcacucuacccaggaccuguuccugccuuucuucagcaacgugaccugguuccacgccauccacguguccggcaccaauggcaccaagagauucgacaaccccgugcugcccuucaacgacgggguguacuuugccagcaccgagaaguccaacaucaucagaggcuggaucuucggcaccacacuggacagcaagacccagagccugcugaucgugaacaacgccaccaacguggucaucaaagugugcgaguuccaguucugcaacuaccccuuccugggcgucuacuaccacaagaacaacaagagcuggauggaaagcgaguuccggguguacagcagcgccaacaacugcaccuucgaguacgugucccagccuuuccugauggaccuggaaggcaagcagggcaacuucaagaaccugagcgaguucguguuuaagaacaucgacggcuacuucaagaucuacagcaagcacaccccuaucaaccucgugcgggaucugccucagggcuucucugcucuggaaccccugguggaucugcccaucggcaucaacaucacccgguuucagacacugcuggcccugcacagaagcuaccugacaccuggcgauagcagcagcggauggacagcuggugccgccgcuuacuaugugggcuaccugcagccuagaaccuuccugcugaaguacaacgagaacggcaccaucaccgacgccguggauugugcucuggauccucugagcgagacaaagugcacccugaaguccuucaccguggaaaagggcaucuaccagaccagcaacuuccgggugcagcccaccgaauccaucgugcgguuccccaauaucaccaaucugugccccuucggcgagguguucaaugccaccagauucgccucuguguacgccuggaaccggaagcggaucagcaauugcguggccgacuacuccgugcuguacaacuccgccagcuucagcaccuucaagugcuacggcguguccccuaccaagcugaacgaccugugcuucacaaacguguacgccgacagcuucgugauccggggagaugaagugcggcagauugccccuggacagacaggcaccaucgccgacuacaacuacaagcugcccgacgacuucaccggcugugugauugccuggaacagcaacaaccuggacuccaaagucggcggcaacuacaauuaccuguaccggcuguuccggaaguccaaucugaagcccuucgagcgggacaucuccaccgagaucuaucaggccggcagcaccccuuguaacggcgugaagggcuucaacugcuacuucccacugcaguccuacggcuuucagcccacauacggcgugggcuaucagcccuacagagugguggugcugagcuucgaacugcugcaugccccugccacagugugcggcccuaagaaaagcaccaaucucgugaagaacaaaugcgugaacuucaacuucaacggccugaccggcaccggcgugcugacagagagcaacaagaaguuccugccauuccagcaguuuggccgggauaucgccgauaccacagacgccguuagagauccccagacacuggaaauccuggacaucaccccuugcagcuucggcggagugucugugaucaccccuggcaccaacaccagcaaucagguggcagugcuguaccagggcgugaacuguaccgaagugcccguggccauucacgccgaucagcugacaccuacauggcggguguacuccaccggcagcaauguguuucagaccagagccggcugucugaucggagccgaguacgugaacaauagcuacgagugcgacauccccaucggcgcuggaaucugcgccagcuaccagacacagacaaacagcccucggagagccagaagcguggccagccagagcaucauugccuacacaaugucucugggcgccgagaacagcguggccuacuccaacaacucuaucgcuauccccaccaacuucaccaucagcgugaccacagagauccugccuguguccaugaccaagaccagcguggacugcaccauguacaucugcggcgauuccaccgagugcuccaaccugcugcugcaguacggcagcuucugcacccagcugaauagagcccugacagggaucgccguggaacaggacaagaacacccaagagguguucgcccaagugaagcagaucuacaagaccccuccuaucaaggacuucggcggcuucaauuucagccagauucugcccgauccuagcaagcccagcaagcggagcuucaucgaggaccugcuguucaacaaagugacacuggccgacgccggcuucaucaagcaguauggcgauugucugggcgacauugccgccagggaucugauuugcgcccagaaguuuaacggacugacagugcugccuccucugcugaccgaugagaugaucgcccaguacacaucugcccugcuggccggcacaaucacaagcggcuggacauuuggagcaggcgccgcucugcagauccccuuugcuaugcagauggccuaccgguucaacggcaucggagugacccagaaugugcuguacgagaaccagaagcugaucgccaaccaguucaacagcgccaucggcaagauccaggacagccugagcagcacagcaagcgcccugggaaagcugcaggacguggucaaccagaaugcccaggcacugaacacccuggucaagcagcuguccuccaacuucggcgccaucagcucugugcugaacgauauccugagcagacuggacaaggucgaggccgaggugcagaucgacagacugaucacaggcagacugcagagccuccagacauacgugacccagcagcugaucagagccgccgagauuagagccucugccaaucuggccgccaucaagaugucugagugugugcugggccagagcaagagaguggacuuuugcggcaagggcuaccaccugaugagcuucccucagucugccccucacggcgugguguuucugcacgugacauaugugcccgcucaagagaagaauuucaccaccgcuccagccaucugccacgacggcaaagcccacuuuccuagagaaggcguguucguguccaacggcacccauugguucgugacacagcggaacuucuacgagccccagaucaucaccaccgacaacaccuucgugucuggcaacugcgacgucgugaucggcauugugaacaauaccguguacgacccucugcagcccgagcuggacagcuucaaagaggaacuggacaaguacuuuaagaaccacacaagccccgacguggaccugggcgauaucagcggaaucaaugccagcgucgugaacauccagaaagagaucgaccggcugaacgagguggccaagaaucugaacgagagccugaucgaccugcaagaacuggggaaguacgagcaguacaucaaguggcccugguacaucuggcugggcuuuaucgccggacugauugccaucgugauggucacaaucaugcuguguugcaugaccagcugcuguagcugccugaagggcuguuguagcuguggcagcugcugcaaguucgacgaggacgauucugagcccgugcugaagggcgugaaacugcacuacacaugauaauaggcuggagccucgguggccuagcuucuugccccuugggccuccccccagccccuccuccccuuccugcacccguacccccguggucuuugaauaaagucugagugggcggcaaaaaaaaaaaaaaaaaaaaaaaaaaaaaaaaaaaaaaaaaaaaaaaaaaaaaaaaaaaaaaaaaaaaaaaaaaaaaaaaaaaaaaaaaaaaaaaaaaaa

SEQ ID NO: 26156 - RNA, 4095 nt, Artificial Sequence
  SARS-CoV-2/Wuhan/WIV05/2019__EPI_ISL_402128 spike protein mRNA gc mod (1-1273)(S13I_W152C_L452R_D614G)
gggaaauaagagagaaaagaagaguaagaagaaauauaagaccccggcgccgccaccauguucguguuccuggugcugcugccucugguguccauccagugugugaaccugaccaccagaacacagcugccuccagccuacaccaacagcuuuaccagaggcguguacuaccccgacaagguguucagauccagcgugcugcacucuacccaggaccuguuccugccuuucuucagcaacgugaccugguuccacgccauccacguguccggcaccaauggcaccaagagauucgacaaccccgugcugcccuucaacgacgggguguacuuugccagcaccgagaaguccaacaucaucagaggcuggaucuucggcaccacacuggacagcaagacccagagccugcugaucgugaacaacgccaccaacguggucaucaaagugugcgaguuccaguucugcaacgaccccuuccugggcgucuacuaccacaagaacaacaagagcugcauggaaagcgaguuccggguguacagcagcgccaacaacugcaccuucgaguacgugucccagccuuuccugauggaccuggaaggcaagcagggcaacuucaagaaccugcgcgaguucguguuuaagaacaucgacggcuacuucaagaucuacagcaagcacaccccuaucaaccucgugcgggaucugccucagggcuucucugcucuggaaccccugguggaucugcccaucggcaucaacaucacccgguuucagacacugcuggcccugcacagaagcuaccugacaccuggcgauagcagcagcggauggacagcuggugccgccgcuuacuaugugggcuaccugcagccuagaaccuuccugcugaaguacaacgagaacggcaccaucaccgacgccguggauugugcucuggauccucugagcgagacaaagugcacccugaaguccuucaccguggaaaagggcaucuaccagaccagcaacuuccgggugcagcccaccgaauccaucgugcgguuccccaauaucaccaaucugugccccuucggcgagguguucaaugccaccagauucgccucuguguacgccuggaaccggaagcggaucagcaauugcguggccgacuacuccgugcuguacaacuccgccagcuucagcaccuucaagugcuacggcguguccccuaccaagcugaacgaccugugcuucacaaacguguacgccgacagcuucgugauccggggagaugaagugcggcagauugccccuggacagacaggcaagaucgccgacuacaacuacaagcugcccgacgacuucaccggcugugugauugccuggaacagcaacaaccuggacuccaaagucggcggcaacuacaauuaccgcuaccggcuguuccggaaguccaaucugaagcccuucgagcgggacaucuccaccgagaucuaucaggccggcagcaccccuuguaacggcguggaaggcuucaacugcuacuucccacugcaguccuacggcuuucagcccacaaauggcgugggcuaucagcccuacagagugguggugcugagcuucgaacugcugcaugccccugccacagugugcggcccuaagaaaagcaccaaucucgugaagaacaaaugcgugaacuucaacuucaacggccugaccggcaccggcgugcugacagagagcaacaagaaguuccugccauuccagcaguuuggccgggauaucgccgauaccacagacgccguuagagauccccagacacuggaaauccuggacaucaccccuugcagcuucggcggagugucugugaucaccccuggcaccaacaccagcaaucagguggcagugcuguaccagggcgugaacuguaccgaagugcccguggccauucacgccgaucagcugacaccuacauggcggguguacuccaccggcagcaauguguuucagaccagagccggcugucugaucggagccgagcacgugaacaauagcuacgagugcgacauccccaucggcgcuggaaucugcgccagcuaccagacacagacaaacagcccucggagagccagaagcguggccagccagagcaucauugccuacacaaugucucugggcgccgagaacagcguggccuacuccaacaacucuaucgcuauccccaccaacuucaccaucagcgugaccacagagauccugccuguguccaugaccaagaccagcguggacugcaccauguacaucugcggcgauuccaccgagugcuccaaccugcugcugcaguacggcagcuucugcacccagcugaauagagcccugacagggaucgccguggaacaggacaagaacacccaagagguguucgcccaagugaagcagaucuacaagaccccuccuaucaaggacuucggcggcuucaauuucagccagauucugcccgauccuagcaagcccagcaagcggagcuucaucgaggaccugcuguucaacaaagugacacuggccgacgccggcuucaucaagcaguauggcgauugucugggcgacauugccgccagggaucugauuugcgcccagaaguuuaacggacugacagugcugccuccucugcugaccgaugagaugaucgcccaguacacaucugcccugcuggccggcacaaucacaagcggcuggacauuuggagcaggcgccgcucugcagauccccuuugcuaugcagauggccuaccgguucaacggcaucggagugacccagaaugugcuguacgagaaccagaagcugaucgccaaccaguucaacagcgccaucggcaagauccaggacagccugagcagcacagcaagcgcccugggaaagcugcaggacguggucaaccagaaugcccaggcacugaacacccuggucaagcagcuguccuccaacuucggcgccaucagcucugugcugaacgauauccugagcagacuggacaaggucgaggccgaggugcagaucgacagacugaucacaggcagacugcagagccuccagacauacgugacccagcagcugaucagagccgccgagauuagagccucugccaaucuggccgccaccaagaugucugagugugugcugggccagagcaagagaguggacuuuugcggcaagggcuaccaccugaugagcuucccucagucugccccucacggcgugguguuucugcacgugacauaugugcccgcucaagagaagaauuucaccaccgcuccagccaucugccacgacggcaaagcccacuuuccuagagaaggcguguucguguccaacggcacccauugguucgugacacagcggaacuucuacgagccccagaucaucaccaccgacaacaccuucgugucuggcaacugcgacgucgugaucggcauugugaacaauaccguguacgacccucugcagcccgagcuggacagcuucaaagaggaacuggacaaguacuuuaagaaccacacaagccccgacguggaccugggcgauaucagcggaaucaaugccagcgucgugaacauccagaaagagaucgaccggcugaacgagguggccaagaaucugaacgagagccugaucgaccugcaagaacuggggaaguacgagcaguacaucaaguggcccugguacaucuggcugggcuuuaucgccggacugauugccaucgugauggucacaaucaugcuguguugcaugaccagcugcuguagcugccugaagggcuguuguagcuguggcagcugcugcaaguucgacgaggacgauucugagcccgugcugaagggcgugaaacugcacuacacaugauaauaggcuggagccucgguggccuagcuucuugccccuugggccuccccccagccccuccuccccuuccugcacccguacccccguggucuuugaauaaagucugagugggcggcaaaaaaaaaaaaaaaaaaaaaaaaaaaaaaaaaaaaaaaaaaaaaaaaaaaaaaaaaaaaaaaaaaaaaaaaaaaaaaaaaaaaaaaaaaaaaaaaaaaa

SEQ ID NO: 26157 - RNA, 4095 nt, Artificial Sequence
  SARS-CoV-2/Wuhan/WIV05/2019__EPI_ISL_402128 spike protein mRNA gc (1-1273)(K986P_V987P)
gggaaauaagagagaaaagaagaguaagaagaaauauaagaccccggcgccgccaccauguucguguuccugguccuccugccccuggugagcucccagugcgugaaccucaccacccgcacgcagcugccgcccgccuacaccaacagcuucacccggggcgucuacuaccccgacaagguguuccgcuccagcgugcugcacuccacccaggaccucuuccugcccuucuucagcaacgucacgugguuccacgccauccacguguccgggaccaacggcaccaagcgguucgacaacccggugcugcccuucaacgacggggucuacuucgcgagcaccgagaaguccaacaucauccgcggcuggaucuucgggacgacccucgacagcaagacccagucccugcugaucgugaacaacgccaccaacguggucaucaaggugugcgaguuccaguucugcaacgaccccuuccucggcguguacuaccacaagaacaacaagagcuggauggaguccgaguuccgggucuacagcuccgccaacaacugcacguucgaguacgugagccagcccuuccugauggaccuggagggcaagcaggggaacuucaagaaccuccgcgaguucguguucaagaacaucgacggcuacuucaagaucuacuccaagcacaccccgaucaaccugguccgggaccugccccagggguucagcgcccucgagccccugguggaccugcccaucggcaucaacaucacccgcuuccagacccuccuggcccugcaccgguccuaccucacgccgggggacagcagcuccggcuggaccgcgggcgccgccgccuacuacgugggguaccugcagccccgcaccuuccugcucaaguacaacgagaacggcaccaucacggacgcggucgacugcgcccuggacccccugagcgagaccaagugcacccucaaguccuucaccguggagaaggggaucuaccagacgagcaacuuccgggugcagcccaccgaguccaucguccgcuucccgaacaucaccaaccugugccccuucggcgagguguucaacgccacccgguucgccagcgucuacgccuggaaccgcaagcggaucuccaacugcguggcggacuacagcgugcuguacaacuccgccagcuucuccacguucaagugcuacggcgucagccccaccaagcucaacgaccugugcuucaccaacguguacgccgacuccuucgugauccgcggggacgagguccggcagaucgcccccggccagaccgggaagaucgccgacuacaacuacaagcugccggacgacuucacgggcugcgugaucgcguggaacagcaacaaccucgacuccaaggucgggggcaacuacaacuaccuguaccgccuguuccgcaagagcaaccucaagcccuucgagcgggacaucuccaccgagaucuaccaggccggcagcacccccugcaacgggguggagggcuucaacugcuacuucccccugcaguccuacggguuccagccgaccaacggcgugggguaccagcccuaccggguggucgugcugagcuucgagcuccugcacgcccccgccacggugugcggccccaagaaguccaccaaccuggucaagaacaagugcgugaacuucaacuucaacggccucaccgggaccggcgugcugaccgagagcaacaagaaguuccugccguuccagcaguucgggcgcgacaucgccgacacgaccgacgcgguccgcgacccccagacccuggagauccucgacaucacccccugcagcuucggcgggguguccgugaucacgccgggcaccaacaccagcaaccaggucgccgugcuguaccaggacgugaacugcaccgagguccccguggccauccacgccgaccagcugacgcccaccuggcggguguacuccaccggcagcaacgucuuccagacccgcgccgggugccucaucggcgcggagcacgugaacaacuccuacgagugcgacauccccaucggggccggcaucugcgccagcuaccagacgcagaccaacuccccgcggcgcgcccggagcguggcgucccagagcaucaucgccuacaccaugucccugggcgccgagaacagcgucgccuacuccaacaacagcaucgccauccccaccaacuucacgaucuccgugaccaccgagauccugcccgugagcaugaccaagacgagcgucgacugcaccauguacaucugcggggacuccaccgagugcagcaaccuccugcugcaguacggcuccuucugcacccagcucaaccgcgcgcugacggggaucgccguggagcaggacaagaacacccaggagguguucgcccaggucaagcagaucuacaagacgcccccgaucaaggacuucggcggguucaacuucagccagauccugcccgaccccuccaagcccagcaagcgguccuucaucgaggaccuccuguucaacaaggugacccuggccgacgccggcuucaucaagcaguacggcgacugccucggggacaucgcggcccgcgaccugaucugcgcccagaaguucaacggccugaccgugcucccgccccugcugaccgacgagaugaucgcccaguacaccagcgcccuccuggcggggaccaucacguccggcuggaccuucggggccggcgccgcccugcagauccccuucgcgaugcagauggccuaccgguucaacggcaucggggucacccagaacgugcucuacgagaaccagaagcugaucgccaaccaguucaacagcgccaucggcaagauccaggacucccugagcuccaccgccagcgcgcucgggaagcugcaggacguggucaaccagaacgcccaggcccugaacacgcucgugaagcagcuguccagcaacuucggcgccaucuccagcgugcugaacgacauccucucccgccuggacccgcccgaggccgaggugcagaucgaccggcugaucaccgggcgccuccagagccugcagaccuacgugacccagcagcugauccgggcggccgagauccgcgccagcgccaaccucgccgcgaccaagauguccgagugcguccugggccagagcaagcggguggacuucugcggcaagggguaccaccugauguccuucccccagagcgccccgcacggcguggucuuccuccacgugacguacguccccgcccaggagaagaacuucaccaccgcccccgcgaucugccacgacgggaaggcccacuucccccgcgagggcguguucguguccaacgggacccacugguucgucacgcagcggaacuucuacgagccgcagaucaucaccaccgacaacaccuucgugagcggcaacugcgacguggucaucggcaucgugaacaacacgguguacgacccccugcagcccgagcuggacuccuucaaggaggagcucgacaaguacuucaagaaccacaccagccccgacgucgaccugggggacaucuccggcaucaacgccagcguggugaacauccagaaggagaucgaccgccugaacgaggucgccaagaaccucaacgagucccugaucgaccugcaggagcucgggaaguacgagcaguacaucaaguggccgugguacaucuggcugggcuucaucgccggccugaucgcgaucgugauggugaccaucaugcucugcugcaugaccagcugcugcuccugccugaaggggugcugcagcugcggcuccugcugcaaguucgacgaggacgacagcgagcccguccugaagggggugaagcuccacuacacgugauaauaggcuggagccucgguggccuagcuucuugccccuugggccuccccccagccccuccuccccuuccugcacccguacccccguggucuuugaauaaagucugagugggcggcaaaaaaaaaaaaaaaaaaaaaaaaaaaaaaaaaaaaaaaaaaaaaaaaaaaaaaaaaaaaaaaaaaaaaaaaaaaaaaaaaaaaaaaaaaaaaaaaaaaa

SEQ ID NO: 26158 - RNA, 4095 nt, Artificial Sequence
  SARS-CoV-2/Wuhan/WIV05/2019__EPI_ISL_402128 spike protein mRNA gc (1-1273)(K986P_V987P_ D614G)
gggaaauaagagagaaaagaagaguaagaagaaauauaagaccccggcgccgccaccauguucguguuccugguccuccugccccuggugagcucccagugcgugaaccucaccacccgcacgcagcugccgcccgccuacaccaacagcuucacccggggcgucuacuaccccgacaagguguuccgcuccagcgugcugcacuccacccaggaccucuuccugcccuucuucagcaacgucacgugguuccacgccauccacguguccgggaccaacggcaccaagcgguucgacaacccggugcugcccuucaacgacggggucuacuucgcgagcaccgagaaguccaacaucauccgcggcuggaucuucgggacgacccucgacagcaagacccagucccugcugaucgugaacaacgccaccaacguggucaucaaggugugcgaguuccaguucugcaacgaccccuuccucggcguguacuaccacaagaacaacaagagcuggauggaguccgaguuccgggucuacagcuccgccaacaacugcacguucgaguacgugagccagcccuuccugauggaccuggagggcaagcaggggaacuucaagaaccuccgcgaguucguguucaagaacaucgacggcuacuucaagaucuacuccaagcacaccccgaucaaccugguccgggaccugccccagggguucagcgcccucgagccccugguggaccugcccaucggcaucaacaucacccgcuuccagacccuccuggcccugcaccgguccuaccucacgccgggggacagcagcuccggcuggaccgcgggcgccgccgccuacuacgugggguaccugcagccccgcaccuuccugcucaaguacaacgagaacggcaccaucacggacgcggucgacugcgcccuggacccccugagcgagaccaagugcacccucaaguccuucaccguggagaaggggaucuaccagacgagcaacuuccgggugcagcccaccgaguccaucguccgcuucccgaacaucaccaaccugugccccuucggcgagguguucaacgccacccgguucgccagcgucuacgccuggaaccgcaagcggaucuccaacugcguggcggacuacagcgugcuguacaacuccgccagcuucuccacguucaagugcuacggcgucagccccaccaagcucaacgaccugugcuucaccaacguguacgccgacuccuucgugauccgcggggacgagguccggcagaucgcccccggccagaccgggaagaucgccgacuacaacuacaagcugccggacgacuucacgggcugcgugaucgcguggaacagcaacaaccucgacuccaaggucgggggcaacuacaacuaccuguaccgccuguuccgcaagagcaaccucaagcccuucgagcgggacaucuccaccgagaucuaccaggccggcagcacccccugcaacgggguggagggcuucaacugcuacuucccccugcaguccuacggguuccagccgaccaacggcgugggguaccagcccuaccggguggucgugcugagcuucgagcuccugcacgcccccgccacggugugcggccccaagaaguccaccaaccuggucaagaacaagugcgugaacuucaacuucaacggccucaccgggaccggcgugcugaccgagagcaacaagaaguuccugccguuccagcaguucgggcgcgacaucgccgacacgaccgacgcgguccgcgacccccagacccuggagauccucgacaucacccccugcagcuucggcgggguguccgugaucacgccgggcaccaacaccagcaaccaggucgccgugcuguaccagggcgugaacugcaccgagguccccguggccauccacgccgaccagcugacgcccaccuggcggguguacuccaccggcagcaacgucuuccagacccgcgccgggugccucaucggcgcggagcacgugaacaacuccuacgagugcgacauccccaucggggccggcaucugcgccagcuaccagacgcagaccaacuccccgcggcgcgcccggagcguggcgucccagagcaucaucgccuacaccaugucccugggcgccgagaacagcgucgccuacuccaacaacagcaucgccauccccaccaacuucacgaucuccgugaccaccgagauccugcccgugagcaugaccaagacgagcgucgacugcaccauguacaucugcggggacuccaccgagugcagcaaccuccugcugcaguacggcuccuucugcacccagcucaaccgcgcgcugacggggaucgccguggagcaggacaagaacacccaggagguguucgcccaggucaagcagaucuacaagacgcccccgaucaaggacuucggcggguucaacuucagccagauccugcccgaccccuccaagcccagcaagcgguccuucaucgaggaccuccuguucaacaaggugacccuggccgacgccggcuucaucaagcaguacggcgacugccucggggacaucgcggcccgcgaccugaucugcgcccagaaguucaacggccugaccgugcucccgccccugcugaccgacgagaugaucgcccaguacaccagcgcccuccuggcggggaccaucacguccggcuggaccuucggggccggcgccgcccugcagauccccuucgcgaugcagauggccuaccgguucaacggcaucggggucacccagaacgugcucuacgagaaccagaagcugaucgccaaccaguucaacagcgccaucggcaagauccaggacucccugagcuccaccgccagcgcgcucgggaagcugcaggacguggucaaccagaacgcccaggcccugaacacgcucgugaagcagcuguccagcaacuucggcgccaucuccagcgugcugaacgacauccucucccgccuggacccgcccgaggccgaggugcagaucgaccggcugaucaccgggcgccuccagagccugcagaccuacgugacccagcagcugauccgggcggccgagauccgcgccagcgccaaccucgccgcgaccaagauguccgagugcguccugggccagagcaagcggguggacuucugcggcaagggguaccaccugauguccuucccccagagcgccccgcacggcguggucuuccuccacgugacguacguccccgcccaggagaagaacuucaccaccgcccccgcgaucugccacgacgggaaggcccacuucccccgcgagggcguguucguguccaacgggacccacugguucgucacgcagcggaacuucuacgagccgcagaucaucaccaccgacaacaccuucgugagcggcaacugcgacguggucaucggcaucgugaacaacacgguguacgacccccugcagcccgagcuggacuccuucaaggaggagcucgacaaguacuucaagaaccacaccagccccgacgucgaccugggggacaucuccggcaucaacgccagcguggugaacauccagaaggagaucgaccgccugaacgaggucgccaagaaccucaacgagucccugaucgaccugcaggagcucgggaaguacgagcaguacaucaaguggccgugguacaucuggcugggcuucaucgccggccugaucgcgaucgugauggugaccaucaugcucugcugcaugaccagcugcugcuccugccugaaggggugcugcagcugcggcuccugcugcaaguucgacgaggacgacagcgagcccguccugaagggggugaagcuccacuacacgugauaauaggcuggagccucgguggccuagcuucuugccccuugggccuccccccagccccuccuccccuuccugcacccguacccccguggucuuugaauaaagucugagugggcggcaaaaaaaaaaaaaaaaaaaaaaaaaaaaaaaaaaaaaaaaaaaaaaaaaaaaaaaaaaaaaaaaaaaaaaaaaaaaaaaaaaaaaaaaaaaaaaaaaaaa

SEQ ID NO: 26159 - RNA, 4095 nt, Artificial Sequence
  SARS-CoV-2/Wuhan/WIV05/2019__EPI_ISL_402128 spike protein mRNA gc (1-1273)(K986P_V987P_A222V_D614G)
gggaaauaagagagaaaagaagaguaagaagaaauauaagaccccggcgccgccaccauguucguguuccugguccuccugccccuggugagcucccagugcgugaaccucaccacccgcacgcagcugccgcccgccuacaccaacagcuucacccggggcgucuacuaccccgacaagguguuccgcuccagcgugcugcacuccacccaggaccucuuccugcccuucuucagcaacgucacgugguuccacgccauccacguguccgggaccaacggcaccaagcgguucgacaacccggugcugcccuucaacgacggggucuacuucgcgagcaccgagaaguccaacaucauccgcggcuggaucuucgggacgacccucgacagcaagacccagucccugcugaucgugaacaacgccaccaacguggucaucaaggugugcgaguuccaguucugcaacgaccccuuccucggcguguacuaccacaagaacaacaagagcuggauggaguccgaguuccgggucuacagcuccgccaacaacugcacguucgaguacgugagccagcccuuccugauggaccuggagggcaagcaggggaacuucaagaaccuccgcgaguucguguucaagaacaucgacggcuacuucaagaucuacuccaagcacaccccgaucaaccugguccgggaccugccccagggguucagcguccucgagccccugguggaccugcccaucggcaucaacaucacccgcuuccagacccuccuggcccugcaccgguccuaccucacgccgggggacagcagcuccggcuggaccgcgggcgccgccgccuacuacgugggguaccugcagccccgcaccuuccugcucaaguacaacgagaacggcaccaucacggacgcggucgacugcgcccuggacccccugagcgagaccaagugcacccucaaguccuucaccguggagaaggggaucuaccagacgagcaacuuccgggugcagcccaccgaguccaucguccgcuucccgaacaucaccaaccugugccccuucggcgagguguucaacgccacccgguucgccagcgucuacgccuggaaccgcaagcggaucuccaacugcguggcggacuacagcgugcuguacaacuccgccagcuucuccacguucaagugcuacggcgucagccccaccaagcucaacgaccugugcuucaccaacguguacgccgacuccuucgugauccgcggggacgagguccggcagaucgcccccggccagaccgggaagaucgccgacuacaacuacaagcugccggacgacuucacgggcugcgugaucgcguggaacagcaacaaccucgacuccaaggucgggggcaacuacaacuaccuguaccgccuguuccgcaagagcaaccucaagcccuucgagcgggacaucuccaccgagaucuaccaggccggcagcacccccugcaacgggguggagggcuucaacugcuacuucccccugcaguccuacggguuccagccgaccaacggcgugggguaccagcccuaccggguggucgugcugagcuucgagcuccugcacgcccccgccacggugugcggccccaagaaguccaccaaccuggucaagaacaagugcgugaacuucaacuucaacggccucaccgggaccggcgugcugaccgagagcaacaagaaguuccugccguuccagcaguucgggcgcgacaucgccgacacgaccgacgcgguccgcgacccccagacccuggagauccucgacaucacccccugcagcuucggcgggguguccgugaucacgccgggcaccaacaccagcaaccaggucgccgugcuguaccagggcgugaacugcaccgagguccccguggccauccacgccgaccagcugacgcccaccuggcggguguacuccaccggcagcaacgucuuccagacccgcgccgggugccucaucggcgcggagcacgugaacaacuccuacgagugcgacauccccaucggggccggcaucugcgccagcuaccagacgcagaccaacuccccgcggcgcgcccggagcguggcgucccagagcaucaucgccuacaccaugucccugggcgccgagaacagcgucgccuacuccaacaacagcaucgccauccccaccaacuucacgaucuccgugaccaccgagauccugcccgugagcaugaccaagacgagcgucgacugcaccauguacaucugcggggacuccaccgagugcagcaaccuccugcugcaguacggcuccuucugcacccagcucaaccgcgcgcugacggggaucgccguggagcaggacaagaacacccaggagguguucgcccaggucaagcagaucuacaagacgcccccgaucaaggacuucggcggguucaacuucagccagauccugcccgaccccuccaagcccagcaagcgguccuucaucgaggaccuccuguucaacaaggugacccuggccgacgccggcuucaucaagcaguacggcgacugccucggggacaucgcggcccgcgaccugaucugcgcccagaaguucaacggccugaccgugcucccgccccugcugaccgacgagaugaucgcccaguacaccagcgcccuccuggcggggaccaucacguccggcuggaccuucggggccggcgccgcccugcagauccccuucgcgaugcagauggccuaccgguucaacggcaucggggucacccagaacgugcucuacgagaaccagaagcugaucgccaaccaguucaacagcgccaucggcaagauccaggacucccugagcuccaccgccagcgcgcucgggaagcugcaggacguggucaaccagaacgcccaggcccugaacacgcucgugaagcagcuguccagcaacuucggcgccaucuccagcgugcugaacgacauccucucccgccuggacccgcccgaggccgaggugcagaucgaccggcugaucaccgggcgccuccagagccugcagaccuacgugacccagcagcugauccgggcggccgagauccgcgccagcgccaaccucgccgcgaccaagauguccgagugcguccugggccagagcaagcggguggacuucugcggcaagggguaccaccugauguccuucccccagagcgccccgcacggcguggucuuccuccacgugacguacguccccgcccaggagaagaacuucaccaccgcccccgcgaucugccacgacgggaaggcccacuucccccgcgagggcguguucguguccaacgggacccacugguucgucacgcagcggaacuucuacgagccgcagaucaucaccaccgacaacaccuucgugagcggcaacugcgacguggucaucggcaucgugaacaacacgguguacgacccccugcagcccgagcuggacuccuucaaggaggagcucgacaaguacuucaagaaccacaccagccccgacgucgaccugggggacaucuccggcaucaacgccagcguggugaacauccagaaggagaucgaccgccugaacgaggucgccaagaaccucaacgagucccugaucgaccugcaggagcucgggaaguacgagcaguacaucaaguggccgugguacaucuggcugggcuucaucgccggccugaucgcgaucgugauggugaccaucaugcucugcugcaugaccagcugcugcuccugccugaaggggugcugcagcugcggcuccugcugcaaguucgacgaggacgacagcgagcccguccugaagggggugaagcuccacuacacgugauaauaggcuggagccucgguggccuagcuucuugccccuugggccuccccccagccccuccuccccuuccugcacccguacccccguggucuuugaauaaagucugagugggcggcaaaaaaaaaaaaaaaaaaaaaaaaaaaaaaaaaaaaaaaaaaaaaaaaaaaaaaaaaaaaaaaaaaaaaaaaaaaaaaaaaaaaaaaaaaaaaaaaaaaa

SEQ ID NO: 26160 - RNA, 4095 nt, Artificial Sequence
  SARS-CoV-2/Wuhan/WIV05/2019__EPI_ISL_402128 spike protein mRNA gc (1-1273)(K986P_V987P_N439K_D614G)
gggaaauaagagagaaaagaagaguaagaagaaauauaagaccccggcgccgccaccauguucguguuccugguccuccugccccuggugagcucccagugcgugaaccucaccacccgcacgcagcugccgcccgccuacaccaacagcuucacccggggcgucuacuaccccgacaagguguuccgcuccagcgugcugcacuccacccaggaccucuuccugcccuucuucagcaacgucacgugguuccacgccauccacguguccgggaccaacggcaccaagcgguucgacaacccggugcugcccuucaacgacggggucuacuucgcgagcaccgagaaguccaacaucauccgcggcuggaucuucgggacgacccucgacagcaagacccagucccugcugaucgugaacaacgccaccaacguggucaucaaggugugcgaguuccaguucugcaacgaccccuuccucggcguguacuaccacaagaacaacaagagcuggauggaguccgaguuccgggucuacagcuccgccaacaacugcacguucgaguacgugagccagcccuuccugauggaccuggagggcaagcaggggaacuucaagaaccuccgcgaguucguguucaagaacaucgacggcuacuucaagaucuacuccaagcacaccccgaucaaccugguccgggaccugccccagggguucagcgcccucgagccccugguggaccugcccaucggcaucaacaucacccgcuuccagacccuccuggcccugcaccgguccuaccucacgccgggggacagcagcuccggcuggaccgcgggcgccgccgccuacuacgugggguaccugcagccccgcaccuuccugcucaaguacaacgagaacggcaccaucacggacgcggucgacugcgcccuggacccccugagcgagaccaagugcacccucaaguccuucaccguggagaaggggaucuaccagacgagcaacuuccgggugcagcccaccgaguccaucguccgcuucccgaacaucaccaaccugugccccuucggcgagguguucaacgccacccgguucgccagcgucuacgccuggaaccgcaagcggaucuccaacugcguggcggacuacagcgugcuguacaacuccgccagcuucuccacguucaagugcuacggcgucagccccaccaagcucaacgaccugugcuucaccaacguguacgccgacuccuucgugauccgcggggacgagguccggcagaucgcccccggccagaccgggaagaucgccgacuacaacuacaagcugccggacgacuucacgggcugcgugaucgcguggaacagcaagaaccucgacuccaaggucgggggcaacuacaacuaccuguaccgccuguuccgcaagagcaaccucaagcccuucgagcgggacaucuccaccgagaucuaccaggccggcagcacccccugcaacgggguggagggcuucaacugcuacuucccccugcaguccuacggguuccagccgaccaacggcgugggguaccagcccuaccggguggucgugcugagcuucgagcuccugcacgcccccgccacggugugcggccccaagaaguccaccaaccuggucaagaacaagugcgugaacuucaacuucaacggccucaccgggaccggcgugcugaccgagagcaacaagaaguuccugccguuccagcaguucgggcgcgacaucgccgacacgaccgacgcgguccgcgacccccagacccuggagauccucgacaucacccccugcagcuucggcgggguguccgugaucacgccgggcaccaacaccagcaaccaggucgccgugcuguaccagggcgugaacugcaccgagguccccguggccauccacgccgaccagcugacgcccaccuggcggguguacuccaccggcagcaacgucuuccagacccgcgccgggugccucaucggcgcggagcacgugaacaacuccuacgagugcgacauccccaucggggccggcaucugcgccagcuaccagacgcagaccaacuccccgcggcgcgcccggagcguggcgucccagagcaucaucgccuacaccaugucccugggcgccgagaacagcgucgccuacuccaacaacagcaucgccauccccaccaacuucacgaucuccgugaccaccgagauccugcccgugagcaugaccaagacgagcgucgacugcaccauguacaucugcggggacuccaccgagugcagcaaccuccugcugcaguacggcuccuucugcacccagcucaaccgcgcgcugacggggaucgccguggagcaggacaagaacacccaggagguguucgcccaggucaagcagaucuacaagacgcccccgaucaaggacuucggcggguucaacuucagccagauccugcccgaccccuccaagcccagcaagcgguccuucaucgaggaccuccuguucaacaaggugacccuggccgacgccggcuucaucaagcaguacggcgacugccucggggacaucgcggcccgcgaccugaucugcgcccagaaguucaacggccugaccgugcucccgccccugcugaccgacgagaugaucgcccaguacaccagcgcccuccuggcggggaccaucacguccggcuggaccuucggggccggcgccgcccugcagauccccuucgcgaugcagauggccuaccgguucaacggcaucggggucacccagaacgugcucuacgagaaccagaagcugaucgccaaccaguucaacagcgccaucggcaagauccaggacucccugagcuccaccgccagcgcgcucgggaagcugcaggacguggucaaccagaacgcccaggcccugaacacgcucgugaagcagcuguccagcaacuucggcgccaucuccagcgugcugaacgacauccucucccgccuggacccgcccgaggccgaggugcagaucgaccggcugaucaccgggcgccuccagagccugcagaccuacgugacccagcagcugauccgggcggccgagauccgcgccagcgccaaccucgccgcgaccaagauguccgagugcguccugggccagagcaagcggguggacuucugcggcaagggguaccaccugauguccuucccccagagcgccccgcacggcguggucuuccuccacgugacguacguccccgcccaggagaagaacuucaccaccgcccccgcgaucugccacgacgggaaggcccacuucccccgcgagggcguguucguguccaacgggacccacugguucgucacgcagcggaacuucuacgagccgcagaucaucaccaccgacaacaccuucgugagcggcaacugcgacguggucaucggcaucgugaacaacacgguguacgacccccugcagcccgagcuggacuccuucaaggaggagcucgacaaguacuucaagaaccacaccagccccgacgucgaccugggggacaucuccggcaucaacgccagcguggugaacauccagaaggagaucgaccgccugaacgaggucgccaagaaccucaacgagucccugaucgaccugcaggagcucgggaaguacgagcaguacaucaaguggccgugguacaucuggcugggcuucaucgccggccugaucgcgaucgugauggugaccaucaugcucugcugcaugaccagcugcugcuccugccugaaggggugcugcagcugcggcuccugcugcaaguucgacgaggacgacagcgagcccguccugaagggggugaagcuccacuacacgugauaauaggcuggagccucgguggccuagcuucuugccccuugggccuccccccagccccuccuccccuuccugcacccguacccccguggucuuugaauaaagucugagugggcggcaaaaaaaaaaaaaaaaaaaaaaaaaaaaaaaaaaaaaaaaaaaaaaaaaaaaaaaaaaaaaaaaaaaaaaaaaaaaaaaaaaaaaaaaaaaaaaaaaaaa

SEQ ID NO: 26161 - RNA, 4095 nt, Artificial Sequence
  SARS-CoV-2/Wuhan/WIV05/2019__EPI_ISL_402128 spike protein mRNA gc (1-1273)(K986P_V987P_S477N_D614G)
gggaaauaagagagaaaagaagaguaagaagaaauauaagaccccggcgccgccaccauguucguguuccugguccuccugccccuggugagcucccagugcgugaaccucaccacccgcacgcagcugccgcccgccuacaccaacagcuucacccggggcgucuacuaccccgacaagguguuccgcuccagcgugcugcacuccacccaggaccucuuccugcccuucuucagcaacgucacgugguuccacgccauccacguguccgggaccaacggcaccaagcgguucgacaacccggugcugcccuucaacgacggggucuacuucgcgagcaccgagaaguccaacaucauccgcggcuggaucuucgggacgacccucgacagcaagacccagucccugcugaucgugaacaacgccaccaacguggucaucaaggugugcgaguuccaguucugcaacgaccccuuccucggcguguacuaccacaagaacaacaagagcuggauggaguccgaguuccgggucuacagcuccgccaacaacugcacguucgaguacgugagccagcccuuccugauggaccuggagggcaagcaggggaacuucaagaaccuccgcgaguucguguucaagaacaucgacggcuacuucaagaucuacuccaagcacaccccgaucaaccugguccgggaccugccccagggguucagcgcccucgagccccugguggaccugcccaucggcaucaacaucacccgcuuccagacccuccuggcccugcaccgguccuaccucacgccgggggacagcagcuccggcuggaccgcgggcgccgccgccuacuacgugggguaccugcagccccgcaccuuccugcucaaguacaacgagaacggcaccaucacggacgcggucgacugcgcccuggacccccugagcgagaccaagugcacccucaaguccuucaccguggagaaggggaucuaccagacgagcaacuuccgggugcagcccaccgaguccaucguccgcuucccgaacaucaccaaccugugccccuucggcgagguguucaacgccacccgguucgccagcgucuacgccuggaaccgcaagcggaucuccaacugcguggcggacuacagcgugcuguacaacuccgccagcuucuccacguucaagugcuacggcgucagccccaccaagcucaacgaccugugcuucaccaacguguacgccgacuccuucgugauccgcggggacgagguccggcagaucgcccccggccagaccgggaagaucgccgacuacaacuacaagcugccggacgacuucacgggcugcgugaucgcguggaacagcaacaaccucgacuccaaggucgggggcaacuacaacuaccuguaccgccuguuccgcaagagcaaccucaagcccuucgagcgggacaucuccaccgagaucuaccaggccggcaacacccccugcaacgggguggagggcuucaacugcuacuucccccugcaguccuacggguuccagccgaccaacggcgugggguaccagcccuaccggguggucgugcugagcuucgagcuccugcacgcccccgccacggugugcggccccaagaaguccaccaaccuggucaagaacaagugcgugaacuucaacuucaacggccucaccgggaccggcgugcugaccgagagcaacaagaaguuccugccguuccagcaguucgggcgcgacaucgccgacacgaccgacgcgguccgcgacccccagacccuggagauccucgacaucacccccugcagcuucggcgggguguccgugaucacgccgggcaccaacaccagcaaccaggucgccgugcuguaccagggcgugaacugcaccgagguccccguggccauccacgccgaccagcugacgcccaccuggcggguguacuccaccggcagcaacgucuuccagacccgcgccgggugccucaucggcgcggagcacgugaacaacuccuacgagugcgacauccccaucggggccggcaucugcgccagcuaccagacgcagaccaacuccccgcggcgcgcccggagcguggcgucccagagcaucaucgccuacaccaugucccugggcgccgagaacagcgucgccuacuccaacaacagcaucgccauccccaccaacuucacgaucuccgugaccaccgagauccugcccgugagcaugaccaagacgagcgucgacugcaccauguacaucugcggggacuccaccgagugcagcaaccuccugcugcaguacggcuccuucugcacccagcucaaccgcgcgcugacggggaucgccguggagcaggacaagaacacccaggagguguucgcccaggucaagcagaucuacaagacgcccccgaucaaggacuucggcggguucaacuucagccagauccugcccgaccccuccaagcccagcaagcgguccuucaucgaggaccuccuguucaacaaggugacccuggccgacgccggcuucaucaagcaguacggcgacugccucggggacaucgcggcccgcgaccugaucugcgcccagaaguucaacggccugaccgugcucccgccccugcugaccgacgagaugaucgcccaguacaccagcgcccuccuggcggggaccaucacguccggcuggaccuucggggccggcgccgcccugcagauccccuucgcgaugcagauggccuaccgguucaacggcaucggggucacccagaacgugcucuacgagaaccagaagcugaucgccaaccaguucaacagcgccaucggcaagauccaggacucccugagcuccaccgccagcgcgcucgggaagcugcaggacguggucaaccagaacgcccaggcccugaacacgcucgugaagcagcuguccagcaacuucggcgccaucuccagcgugcugaacgacauccucucccgccuggacccgcccgaggccgaggugcagaucgaccggcugaucaccgggcgccuccagagccugcagaccuacgugacccagcagcugauccgggcggccgagauccgcgccagcgccaaccucgccgcgaccaagauguccgagugcguccugggccagagcaagcggguggacuucugcggcaagggguaccaccugauguccuucccccagagcgccccgcacggcguggucuuccuccacgugacguacguccccgcccaggagaagaacuucaccaccgcccccgcgaucugccacgacgggaaggcccacuucccccgcgagggcguguucguguccaacgggacccacugguucgucacgcagcggaacuucuacgagccgcagaucaucaccaccgacaacaccuucgugagcggcaacugcgacguggucaucggcaucgugaacaacacgguguacgacccccugcagcccgagcuggacuccuucaaggaggagcucgacaaguacuucaagaaccacaccagccccgacgucgaccugggggacaucuccggcaucaacgccagcguggugaacauccagaaggagaucgaccgccugaacgaggucgccaagaaccucaacgagucccugaucgaccugcaggagcucgggaaguacgagcaguacaucaaguggccgugguacaucuggcugggcuucaucgccggccugaucgcgaucgugauggugaccaucaugcucugcugcaugaccagcugcugcuccugccugaaggggugcugcagcugcggcuccugcugcaaguucgacgaggacgacagcgagcccguccugaagggggugaagcuccacuacacgugauaauaggcuggagccucgguggccuagcuucuugccccuugggccuccccccagccccuccuccccuuccugcacccguacccccguggucuuugaauaaagucugagugggcggcaaaaaaaaaaaaaaaaaaaaaaaaaaaaaaaaaaaaaaaaaaaaaaaaaaaaaaaaaaaaaaaaaaaaaaaaaaaaaaaaaaaaaaaaaaaaaaaaaaaa

SEQ ID NO: 26162 - RNA, 4095 nt, Artificial Sequence
  SARS-CoV-2/Wuhan/WIV05/2019__EPI_ISL_402128 spike protein mRNA gc (1-1273)(K986P_V987P_N501Y_D614G)
gggaaauaagagagaaaagaagaguaagaagaaauauaagaccccggcgccgccaccauguucguguuccugguccuccugccccuggugagcucccagugcgugaaccucaccacccgcacgcagcugccgcccgccuacaccaacagcuucacccggggcgucuacuaccccgacaagguguuccgcuccagcgugcugcacuccacccaggaccucuuccugcccuucuucagcaacgucacgugguuccacgccauccacguguccgggaccaacggcaccaagcgguucgacaacccggugcugcccuucaacgacggggucuacuucgcgagcaccgagaaguccaacaucauccgcggcuggaucuucgggacgacccucgacagcaagacccagucccugcugaucgugaacaacgccaccaacguggucaucaaggugugcgaguuccaguucugcaacgaccccuuccucggcguguacuaccacaagaacaacaagagcuggauggaguccgaguuccgggucuacagcuccgccaacaacugcacguucgaguacgugagccagcccuuccugauggaccuggagggcaagcaggggaacuucaagaaccuccgcgaguucguguucaagaacaucgacggcuacuucaagaucuacuccaagcacaccccgaucaaccugguccgggaccugccccagggguucagcgcccucgagccccugguggaccugcccaucggcaucaacaucacccgcuuccagacccuccuggcccugcaccgguccuaccucacgccgggggacagcagcuccggcuggaccgcgggcgccgccgccuacuacgugggguaccugcagccccgcaccuuccugcucaaguacaacgagaacggcaccaucacggacgcggucgacugcgcccuggacccccugagcgagaccaagugcacccucaaguccuucaccguggagaaggggaucuaccagacgagcaacuuccgggugcagcccaccgaguccaucguccgcuucccgaacaucaccaaccugugccccuucggcgagguguucaacgccacccgguucgccagcgucuacgccuggaaccgcaagcggaucuccaacugcguggcggacuacagcgugcuguacaacuccgccagcuucuccacguucaagugcuacggcgucagccccaccaagcucaacgaccugugcuucaccaacguguacgccgacuccuucgugauccgcggggacgagguccggcagaucgcccccggccagaccgggaagaucgccgacuacaacuacaagcugccggacgacuucacgggcugcgugaucgcguggaacagcaacaaccucgacuccaaggucgggggcaacuacaacuaccuguaccgccuguuccgcaagagcaaccucaagcccuucgagcgggacaucuccaccgagaucuaccaggccggcagcacccccugcaacgggguggagggcuucaacugcuacuucccccugcaguccuacggguuccagccgaccuacggcgugggguaccagcccuaccggguggucgugcugagcuucgagcuccugcacgcccccgccacggugugcggccccaagaaguccaccaaccuggucaagaacaagugcgugaacuucaacuucaacggccucaccgggaccggcgugcugaccgagagcaacaagaaguuccugccguuccagcaguucgggcgcgacaucgccgacacgaccgacgcgguccgcgacccccagacccuggagauccucgacaucacccccugcagcuucggcgggguguccgugaucacgccgggcaccaacaccagcaaccaggucgccgugcuguaccagggcgugaacugcaccgagguccccguggccauccacgccgaccagcugacgcccaccuggcggguguacuccaccggcagcaacgucuuccagacccgcgccgggugccucaucggcgcggagcacgugaacaacuccuacgagugcgacauccccaucggggccggcaucugcgccagcuaccagacgcagaccaacuccccgcggcgcgcccggagcguggcgucccagagcaucaucgccuacaccaugucccugggcgccgagaacagcgucgccuacuccaacaacagcaucgccauccccaccaacuucacgaucuccgugaccaccgagauccugcccgugagcaugaccaagacgagcgucgacugcaccauguacaucugcggggacuccaccgagugcagcaaccuccugcugcaguacggcuccuucugcacccagcucaaccgcgcgcugacggggaucgccguggagcaggacaagaacacccaggagguguucgcccaggucaagcagaucuacaagacgcccccgaucaaggacuucggcggguucaacuucagccagauccugcccgaccccuccaagcccagcaagcgguccuucaucgaggaccuccuguucaacaaggugacccuggccgacgccggcuucaucaagcaguacggcgacugccucggggacaucgcggcccgcgaccugaucugcgcccagaaguucaacggccugaccgugcucccgccccugcugaccgacgagaugaucgcccaguacaccagcgcccuccuggcggggaccaucacguccggcuggaccuucggggccggcgccgcccugcagauccccuucgcgaugcagauggccuaccgguucaacggcaucggggucacccagaacgugcucuacgagaaccagaagcugaucgccaaccaguucaacagcgccaucggcaagauccaggacucccugagcuccaccgccagcgcgcucgggaagcugcaggacguggucaaccagaacgcccaggcccugaacacgcucgugaagcagcuguccagcaacuucggcgccaucuccagcgugcugaacgacauccucucccgccuggacccgcccgaggccgaggugcagaucgaccggcugaucaccgggcgccuccagagccugcagaccuacgugacccagcagcugauccgggcggccgagauccgcgccagcgccaaccucgccgcgaccaagauguccgagugcguccugggccagagcaagcggguggacuucugcggcaagggguaccaccugauguccuucccccagagcgccccgcacggcguggucuuccuccacgugacguacguccccgcccaggagaagaacuucaccaccgcccccgcgaucugccacgacgggaaggcccacuucccccgcgagggcguguucguguccaacgggacccacugguucgucacgcagcggaacuucuacgagccgcagaucaucaccaccgacaacaccuucgugagcggcaacugcgacguggucaucggcaucgugaacaacacgguguacgacccccugcagcccgagcuggacuccuucaaggaggagcucgacaaguacuucaagaaccacaccagccccgacgucgaccugggggacaucuccggcaucaacgccagcguggugaacauccagaaggagaucgaccgccugaacgaggucgccaagaaccucaacgagucccugaucgaccugcaggagcucgggaaguacgagcaguacaucaaguggccgugguacaucuggcugggcuucaucgccggccugaucgcgaucgugauggugaccaucaugcucugcugcaugaccagcugcugcuccugccugaaggggugcugcagcugcggcuccugcugcaaguucgacgaggacgacagcgagcccguccugaagggggugaagcuccacuacacgugauaauaggcuggagccucgguggccuagcuucuugccccuugggccuccccccagccccuccuccccuuccugcacccguacccccguggucuuugaauaaagucugagugggcggcaaaaaaaaaaaaaaaaaaaaaaaaaaaaaaaaaaaaaaaaaaaaaaaaaaaaaaaaaaaaaaaaaaaaaaaaaaaaaaaaaaaaaaaaaaaaaaaaaaaa

SEQ ID NO: 26163 - RNA, 4089 nt, Artificial Sequence
  SARS-CoV-2/Wuhan/WIV05/2019__EPI_ISL_402128 spike protein mRNA gc (1-1273)(K986P_V987P_H69del_V70del_D614G)
gggaaauaagagagaaaagaagaguaagaagaaauauaagaccccggcgccgccaccauguucguguuccugguccuccugccccuggugagcucccagugcgugaaccucaccacccgcacgcagcugccgcccgccuacaccaacagcuucacccggggcgucuacuaccccgacaagguguuccgcuccagcgugcugcacuccacccaggaccucuuccugcccuucuucagcaacgucacgugguuccacgccaucuccgggaccaacggcaccaagcgguucgacaacccggugcugcccuucaacgacggggucuacuucgcgagcaccgagaaguccaacaucauccgcggcuggaucuucgggacgacccucgacagcaagacccagucccugcugaucgugaacaacgccaccaacguggucaucaaggugugcgaguuccaguucugcaacgaccccuuccucggcguguacuaccacaagaacaacaagagcuggauggaguccgaguuccgggucuacagcuccgccaacaacugcacguucgaguacgugagccagcccuuccugauggaccuggagggcaagcaggggaacuucaagaaccuccgcgaguucguguucaagaacaucgacggcuacuucaagaucuacuccaagcacaccccgaucaaccugguccgggaccugccccagggguucagcgcccucgagccccugguggaccugcccaucggcaucaacaucacccgcuuccagacccuccuggcccugcaccgguccuaccucacgccgggggacagcagcuccggcuggaccgcgggcgccgccgccuacuacgugggguaccugcagccccgcaccuuccugcucaaguacaacgagaacggcaccaucacggacgcggucgacugcgcccuggacccccugagcgagaccaagugcacccucaaguccuucaccguggagaaggggaucuaccagacgagcaacuuccgggugcagcccaccgaguccaucguccgcuucccgaacaucaccaaccugugccccuucggcgagguguucaacgccacccgguucgccagcgucuacgccuggaaccgcaagcggaucuccaacugcguggcggacuacagcgugcuguacaacuccgccagcuucuccacguucaagugcuacggcgucagccccaccaagcucaacgaccugugcuucaccaacguguacgccgacuccuucgugauccgcggggacgagguccggcagaucgcccccggccagaccgggaagaucgccgacuacaacuacaagcugccggacgacuucacgggcugcgugaucgcguggaacagcaacaaccucgacuccaaggucgggggcaacuacaacuaccuguaccgccuguuccgcaagagcaaccucaagcccuucgagcgggacaucuccaccgagaucuaccaggccggcagcacccccugcaacgggguggagggcuucaacugcuacuucccccugcaguccuacggguuccagccgaccaacggcgugggguaccagcccuaccggguggucgugcugagcuucgagcuccugcacgcccccgccacggugugcggccccaagaaguccaccaaccuggucaagaacaagugcgugaacuucaacuucaacggccucaccgggaccggcgugcugaccgagagcaacaagaaguuccugccguuccagcaguucgggcgcgacaucgccgacacgaccgacgcgguccgcgacccccagacccuggagauccucgacaucacccccugcagcuucggcgggguguccgugaucacgccgggcaccaacaccagcaaccaggucgccgugcuguaccagggcgugaacugcaccgagguccccguggccauccacgccgaccagcugacgcccaccuggcggguguacuccaccggcagcaacgucuuccagacccgcgccgggugccucaucggcgcggagcacgugaacaacuccuacgagugcgacauccccaucggggccggcaucugcgccagcuaccagacgcagaccaacuccccgcggcgcgcccggagcguggcgucccagagcaucaucgccuacaccaugucccugggcgccgagaacagcgucgccuacuccaacaacagcaucgccauccccaccaacuucacgaucuccgugaccaccgagauccugcccgugagcaugaccaagacgagcgucgacugcaccauguacaucugcggggacuccaccgagugcagcaaccuccugcugcaguacggcuccuucugcacccagcucaaccgcgcgcugacggggaucgccguggagcaggacaagaacacccaggagguguucgcccaggucaagcagaucuacaagacgcccccgaucaaggacuucggcggguucaacuucagccagauccugcccgaccccuccaagcccagcaagcgguccuucaucgaggaccuccuguucaacaaggugacccuggccgacgccggcuucaucaagcaguacggcgacugccucggggacaucgcggcccgcgaccugaucugcgcccagaaguucaacggccugaccgugcucccgccccugcugaccgacgagaugaucgcccaguacaccagcgcccuccuggcggggaccaucacguccggcuggaccuucggggccggcgccgcccugcagauccccuucgcgaugcagauggccuaccgguucaacggcaucggggucacccagaacgugcucuacgagaaccagaagcugaucgccaaccaguucaacagcgccaucggcaagauccaggacucccugagcuccaccgccagcgcgcucgggaagcugcaggacguggucaaccagaacgcccaggcccugaacacgcucgugaagcagcuguccagcaacuucggcgccaucuccagcgugcugaacgacauccucucccgccuggacccgcccgaggccgaggugcagaucgaccggcugaucaccgggcgccuccagagccugcagaccuacgugacccagcagcugauccgggcggccgagauccgcgccagcgccaaccucgccgcgaccaagauguccgagugcguccugggccagagcaagcggguggacuucugcggcaagggguaccaccugauguccuucccccagagcgccccgcacggcguggucuuccuccacgugacguacguccccgcccaggagaagaacuucaccaccgcccccgcgaucugccacgacgggaaggcccacuucccccgcgagggcguguucguguccaacgggacccacugguucgucacgcagcggaacuucuacgagccgcagaucaucaccaccgacaacaccuucgugagcggcaacugcgacguggucaucggcaucgugaacaacacgguguacgacccccugcagcccgagcuggacuccuucaaggaggagcucgacaaguacuucaagaaccacaccagccccgacgucgaccugggggacaucuccggcaucaacgccagcguggugaacauccagaaggagaucgaccgccugaacgaggucgccaagaaccucaacgagucccugaucgaccugcaggagcucgggaaguacgagcaguacaucaaguggccgugguacaucuggcugggcuucaucgccggccugaucgcgaucgugauggugaccaucaugcucugcugcaugaccagcugcugcuccugccugaaggggugcugcagcugcggcuccugcugcaaguucgacgaggacgacagcgagcccguccugaagggggugaagcuccacuacacgugauaauaggcuggagccucgguggccuagcuucuugccccuugggccuccccccagccccuccuccccuuccugcacccguacccccguggucuuugaauaaagucugagugggcggcaaaaaaaaaaaaaaaaaaaaaaaaaaaaaaaaaaaaaaaaaaaaaaaaaaaaaaaaaaaaaaaaaaaaaaaaaaaaaaaaaaaaaaaaaaaaaaaaaaaa

SEQ ID NO: 26164 - RNA, 4095 nt, Artificial Sequence
  SARS-CoV-2/Wuhan/WIV05/2019__EPI_ISL_402128 spike protein mRNA gc (1-1273)(K986P_V987P_Y453F_D614G)
gggaaauaagagagaaaagaagaguaagaagaaauauaagaccccggcgccgccaccauguucguguuccugguccuccugccccuggugagcucccagugcgugaaccucaccacccgcacgcagcugccgcccgccuacaccaacagcuucacccggggcgucuacuaccccgacaagguguuccgcuccagcgugcugcacuccacccaggaccucuuccugcccuucuucagcaacgucacgugguuccacgccauccacguguccgggaccaacggcaccaagcgguucgacaacccggugcugcccuucaacgacggggucuacuucgcgagcaccgagaaguccaacaucauccgcggcuggaucuucgggacgacccucgacagcaagacccagucccugcugaucgugaacaacgccaccaacguggucaucaaggugugcgaguuccaguucugcaacgaccccuuccucggcguguacuaccacaagaacaacaagagcuggauggaguccgaguuccgggucuacagcuccgccaacaacugcacguucgaguacgugagccagcccuuccugauggaccuggagggcaagcaggggaacuucaagaaccuccgcgaguucguguucaagaacaucgacggcuacuucaagaucuacuccaagcacaccccgaucaaccugguccgggaccugccccagggguucagcgcccucgagccccugguggaccugcccaucggcaucaacaucacccgcuuccagacccuccuggcccugcaccgguccuaccucacgccgggggacagcagcuccggcuggaccgcgggcgccgccgccuacuacgugggguaccugcagccccgcaccuuccugcucaaguacaacgagaacggcaccaucacggacgcggucgacugcgcccuggacccccugagcgagaccaagugcacccucaaguccuucaccguggagaaggggaucuaccagacgagcaacuuccgggugcagcccaccgaguccaucguccgcuucccgaacaucaccaaccugugccccuucggcgagguguucaacgccacccgguucgccagcgucuacgccuggaaccgcaagcggaucuccaacugcguggcggacuacagcgugcuguacaacuccgccagcuucuccacguucaagugcuacggcgucagccccaccaagcucaacgaccugugcuucaccaacguguacgccgacuccuucgugauccgcggggacgagguccggcagaucgcccccggccagaccgggaagaucgccgacuacaacuacaagcugccggacgacuucacgggcugcgugaucgcguggaacagcaacaaccucgacuccaaggucgggggcaacuacaacuaccuguuccgccuguuccgcaagagcaaccucaagcccuucgagcgggacaucuccaccgagaucuaccaggccggcagcacccccugcaacgggguggagggcuucaacugcuacuucccccugcaguccuacggguuccagccgaccaacggcgugggguaccagcccuaccggguggucgugcugagcuucgagcuccugcacgcccccgccacggugugcggccccaagaaguccaccaaccuggucaagaacaagugcgugaacuucaacuucaacggccucaccgggaccggcgugcugaccgagagcaacaagaaguuccugccguuccagcaguucgggcgcgacaucgccgacacgaccgacgcgguccgcgacccccagacccuggagauccucgacaucacccccugcagcuucggcgggguguccgugaucacgccgggcaccaacaccagcaaccaggucgccgugcuguaccagggcgugaacugcaccgagguccccguggccauccacgccgaccagcugacgcccaccuggcggguguacuccaccggcagcaacgucuuccagacccgcgccgggugccucaucggcgcggagcacgugaacaacuccuacgagugcgacauccccaucggggccggcaucugcgccagcuaccagacgcagaccaacuccccgcggcgcgcccggagcguggcgucccagagcaucaucgccuacaccaugucccugggcgccgagaacagcgucgccuacuccaacaacagcaucgccauccccaccaacuucacgaucuccgugaccaccgagauccugcccgugagcaugaccaagacgagcgucgacugcaccauguacaucugcggggacuccaccgagugcagcaaccuccugcugcaguacggcuccuucugcacccagcucaaccgcgcgcugacggggaucgccguggagcaggacaagaacacccaggagguguucgcccaggucaagcagaucuacaagacgcccccgaucaaggacuucggcggguucaacuucagccagauccugcccgaccccuccaagcccagcaagcgguccuucaucgaggaccuccuguucaacaaggugacccuggccgacgccggcuucaucaagcaguacggcgacugccucggggacaucgcggcccgcgaccugaucugcgcccagaaguucaacggccugaccgugcucccgccccugcugaccgacgagaugaucgcccaguacaccagcgcccuccuggcggggaccaucacguccggcuggaccuucggggccggcgccgcccugcagauccccuucgcgaugcagauggccuaccgguucaacggcaucggggucacccagaacgugcucuacgagaaccagaagcugaucgccaaccaguucaacagcgccaucggcaagauccaggacucccugagcuccaccgccagcgcgcucgggaagcugcaggacguggucaaccagaacgcccaggcccugaacacgcucgugaagcagcuguccagcaacuucggcgccaucuccagcgugcugaacgacauccucucccgccuggacccgcccgaggccgaggugcagaucgaccggcugaucaccgggcgccuccagagccugcagaccuacgugacccagcagcugauccgggcggccgagauccgcgccagcgccaaccucgccgcgaccaagauguccgagugcguccugggccagagcaagcggguggacuucugcggcaagggguaccaccugauguccuucccccagagcgccccgcacggcguggucuuccuccacgugacguacguccccgcccaggagaagaacuucaccaccgcccccgcgaucugccacgacgggaaggcccacuucccccgcgagggcguguucguguccaacgggacccacugguucgucacgcagcggaacuucuacgagccgcagaucaucaccaccgacaacaccuucgugagcggcaacugcgacguggucaucggcaucgugaacaacacgguguacgacccccugcagcccgagcuggacuccuucaaggaggagcucgacaaguacuucaagaaccacaccagccccgacgucgaccugggggacaucuccggcaucaacgccagcguggugaacauccagaaggagaucgaccgccugaacgaggucgccaagaaccucaacgagucccugaucgaccugcaggagcucgggaaguacgagcaguacaucaaguggccgugguacaucuggcugggcuucaucgccggccugaucgcgaucgugauggugaccaucaugcucugcugcaugaccagcugcugcuccugccugaaggggugcugcagcugcggcuccugcugcaaguucgacgaggacgacagcgagcccguccugaagggggugaagcuccacuacacgugauaauaggcuggagccucgguggccuagcuucuugccccuugggccuccccccagccccuccuccccuuccugcacccguacccccguggucuuugaauaaagucugagugggcggcaaaaaaaaaaaaaaaaaaaaaaaaaaaaaaaaaaaaaaaaaaaaaaaaaaaaaaaaaaaaaaaaaaaaaaaaaaaaaaaaaaaaaaaaaaaaaaaaaaaa

SEQ ID NO: 26165 - RNA, 4095 nt, Artificial Sequence
  SARS-CoV-2/Wuhan/WIV05/2019__EPI_ISL_402128 spike protein mRNA gc (1-1273)(K986P_V987P_D614G_I692V)
gggaaauaagagagaaaagaagaguaagaagaaauauaagaccccggcgccgccaccauguucguguuccugguccuccugccccuggugagcucccagugcgugaaccucaccacccgcacgcagcugccgcccgccuacaccaacagcuucacccggggcgucuacuaccccgacaagguguuccgcuccagcgugcugcacuccacccaggaccucuuccugcccuucuucagcaacgucacgugguuccacgccauccacguguccgggaccaacggcaccaagcgguucgacaacccggugcugcccuucaacgacggggucuacuucgcgagcaccgagaaguccaacaucauccgcggcuggaucuucgggacgacccucgacagcaagacccagucccugcugaucgugaacaacgccaccaacguggucaucaaggugugcgaguuccaguucugcaacgaccccuuccucggcguguacuaccacaagaacaacaagagcuggauggaguccgaguuccgggucuacagcuccgccaacaacugcacguucgaguacgugagccagcccuuccugauggaccuggagggcaagcaggggaacuucaagaaccuccgcgaguucguguucaagaacaucgacggcuacuucaagaucuacuccaagcacaccccgaucaaccugguccgggaccugccccagggguucagcgcccucgagccccugguggaccugcccaucggcaucaacaucacccgcuuccagacccuccuggcccugcaccgguccuaccucacgccgggggacagcagcuccggcuggaccgcgggcgccgccgccuacuacgugggguaccugcagccccgcaccuuccugcucaaguacaacgagaacggcaccaucacggacgcggucgacugcgcccuggacccccugagcgagaccaagugcacccucaaguccuucaccguggagaaggggaucuaccagacgagcaacuuccgggugcagcccaccgaguccaucguccgcuucccgaacaucaccaaccugugccccuucggcgagguguucaacgccacccgguucgccagcgucuacgccuggaaccgcaagcggaucuccaacugcguggcggacuacagcgugcuguacaacuccgccagcuucuccacguucaagugcuacggcgucagccccaccaagcucaacgaccugugcuucaccaacguguacgccgacuccuucgugauccgcggggacgagguccggcagaucgcccccggccagaccgggaagaucgccgacuacaacuacaagcugccggacgacuucacgggcugcgugaucgcguggaacagcaacaaccucgacuccaaggucgggggcaacuacaacuaccuguaccgccuguuccgcaagagcaaccucaagcccuucgagcgggacaucuccaccgagaucuaccaggccggcagcacccccugcaacgggguggagggcuucaacugcuacuucccccugcaguccuacggguuccagccgaccaacggcgugggguaccagcccuaccggguggucgugcugagcuucgagcuccugcacgcccccgccacggugugcggccccaagaaguccaccaaccuggucaagaacaagugcgugaacuucaacuucaacggccucaccgggaccggcgugcugaccgagagcaacaagaaguuccugccguuccagcaguucgggcgcgacaucgccgacacgaccgacgcgguccgcgacccccagacccuggagauccucgacaucacccccugcagcuucggcgggguguccgugaucacgccgggcaccaacaccagcaaccaggucgccgugcuguaccagggcgugaacugcaccgagguccccguggccauccacgccgaccagcugacgcccaccuggcggguguacuccaccggcagcaacgucuuccagacccgcgccgggugccucaucggcgcggagcacgugaacaacuccuacgagugcgacauccccaucggggccggcaucugcgccagcuaccagacgcagaccaacuccccgcggcgcgcccggagcguggcgucccagagcgucaucgccuacaccaugucccugggcgccgagaacagcgucgccuacuccaacaacagcaucgccauccccaccaacuucacgaucuccgugaccaccgagauccugcccgugagcaugaccaagacgagcgucgacugcaccauguacaucugcggggacuccaccgagugcagcaaccuccugcugcaguacggcuccuucugcacccagcucaaccgcgcgcugacggggaucgccguggagcaggacaagaacacccaggagguguucgcccaggucaagcagaucuacaagacgcccccgaucaaggacuucggcggguucaacuucagccagauccugcccgaccccuccaagcccagcaagcgguccuucaucgaggaccuccuguucaacaaggugacccuggccgacgccggcuucaucaagcaguacggcgacugccucggggacaucgcggcccgcgaccugaucugcgcccagaaguucaacggccugaccgugcucccgccccugcugaccgacgagaugaucgcccaguacaccagcgcccuccuggcggggaccaucacguccggcuggaccuucggggccggcgccgcccugcagauccccuucgcgaugcagauggccuaccgguucaacggcaucggggucacccagaacgugcucuacgagaaccagaagcugaucgccaaccaguucaacagcgccaucggcaagauccaggacucccugagcuccaccgccagcgcgcucgggaagcugcaggacguggucaaccagaacgcccaggcccugaacacgcucgugaagcagcuguccagcaacuucggcgccaucuccagcgugcugaacgacauccucucccgccuggacccgcccgaggccgaggugcagaucgaccggcugaucaccgggcgccuccagagccugcagaccuacgugacccagcagcugauccgggcggccgagauccgcgccagcgccaaccucgccgcgaccaagauguccgagugcguccugggccagagcaagcggguggacuucugcggcaagggguaccaccugauguccuucccccagagcgccccgcacggcguggucuuccuccacgugacguacguccccgcccaggagaagaacuucaccaccgcccccgcgaucugccacgacgggaaggcccacuucccccgcgagggcguguucguguccaacgggacccacugguucgucacgcagcggaacuucuacgagccgcagaucaucaccaccgacaacaccuucgugagcggcaacugcgacguggucaucggcaucgugaacaacacgguguacgacccccugcagcccgagcuggacuccuucaaggaggagcucgacaaguacuucaagaaccacaccagccccgacgucgaccugggggacaucuccggcaucaacgccagcguggugaacauccagaaggagaucgaccgccugaacgaggucgccaagaaccucaacgagucccugaucgaccugcaggagcucgggaaguacgagcaguacaucaaguggccgugguacaucuggcugggcuucaucgccggccugaucgcgaucgugauggugaccaucaugcucugcugcaugaccagcugcugcuccugccugaaggggugcugcagcugcggcuccugcugcaaguucgacgaggacgacagcgagcccguccugaagggggugaagcuccacuacacgugauaauaggcuggagccucgguggccuagcuucuugccccuugggccuccccccagccccuccuccccuuccugcacccguacccccguggucuuugaauaaagucugagugggcggcaaaaaaaaaaaaaaaaaaaaaaaaaaaaaaaaaaaaaaaaaaaaaaaaaaaaaaaaaaaaaaaaaaaaaaaaaaaaaaaaaaaaaaaaaaaaaaaaaaaa

SEQ ID NO: 26166 - RNA, 4095 nt, Artificial Sequence
  SARS-CoV-2/Wuhan/WIV05/2019__EPI_ISL_402128 spike protein mRNA gc (1-1273)(K986P_V987P_D614G_M1229I)
gggaaauaagagagaaaagaagaguaagaagaaauauaagaccccggcgccgccaccauguucguguuccugguccuccugccccuggugagcucccagugcgugaaccucaccacccgcacgcagcugccgcccgccuacaccaacagcuucacccggggcgucuacuaccccgacaagguguuccgcuccagcgugcugcacuccacccaggaccucuuccugcccuucuucagcaacgucacgugguuccacgccauccacguguccgggaccaacggcaccaagcgguucgacaacccggugcugcccuucaacgacggggucuacuucgcgagcaccgagaaguccaacaucauccgcggcuggaucuucgggacgacccucgacagcaagacccagucccugcugaucgugaacaacgccaccaacguggucaucaaggugugcgaguuccaguucugcaacgaccccuuccucggcguguacuaccacaagaacaacaagagcuggauggaguccgaguuccgggucuacagcuccgccaacaacugcacguucgaguacgugagccagcccuuccugauggaccuggagggcaagcaggggaacuucaagaaccuccgcgaguucguguucaagaacaucgacggcuacuucaagaucuacuccaagcacaccccgaucaaccugguccgggaccugccccagggguucagcgcccucgagccccugguggaccugcccaucggcaucaacaucacccgcuuccagacccuccuggcccugcaccgguccuaccucacgccgggggacagcagcuccggcuggaccgcgggcgccgccgccuacuacgugggguaccugcagccccgcaccuuccugcucaaguacaacgagaacggcaccaucacggacgcggucgacugcgcccuggacccccugagcgagaccaagugcacccucaaguccuucaccguggagaaggggaucuaccagacgagcaacuuccgggugcagcccaccgaguccaucguccgcuucccgaacaucaccaaccugugccccuucggcgagguguucaacgccacccgguucgccagcgucuacgccuggaaccgcaagcggaucuccaacugcguggcggacuacagcgugcuguacaacuccgccagcuucuccacguucaagugcuacggcgucagccccaccaagcucaacgaccugugcuucaccaacguguacgccgacuccuucgugauccgcggggacgagguccggcagaucgcccccggccagaccgggaagaucgccgacuacaacuacaagcugccggacgacuucacgggcugcgugaucgcguggaacagcaacaaccucgacuccaaggucgggggcaacuacaacuaccuguaccgccuguuccgcaagagcaaccucaagcccuucgagcgggacaucuccaccgagaucuaccaggccggcagcacccccugcaacgggguggagggcuucaacugcuacuucccccugcaguccuacggguuccagccgaccaacggcgugggguaccagcccuaccggguggucgugcugagcuucgagcuccugcacgcccccgccacggugugcggccccaagaaguccaccaaccuggucaagaacaagugcgugaacuucaacuucaacggccucaccgggaccggcgugcugaccgagagcaacaagaaguuccugccguuccagcaguucgggcgcgacaucgccgacacgaccgacgcgguccgcgacccccagacccuggagauccucgacaucacccccugcagcuucggcgggguguccgugaucacgccgggcaccaacaccagcaaccaggucgccgugcuguaccagggcgugaacugcaccgagguccccguggccauccacgccgaccagcugacgcccaccuggcggguguacuccaccggcagcaacgucuuccagacccgcgccgggugccucaucggcgcggagcacgugaacaacuccuacgagugcgacauccccaucggggccggcaucugcgccagcuaccagacgcagaccaacuccccgcggcgcgcccggagcguggcgucccagagcaucaucgccuacaccaugucccugggcgccgagaacagcgucgccuacuccaacaacagcaucgccauccccaccaacuucacgaucuccgugaccaccgagauccugcccgugagcaugaccaagacgagcgucgacugcaccauguacaucugcggggacuccaccgagugcagcaaccuccugcugcaguacggcuccuucugcacccagcucaaccgcgcgcugacggggaucgccguggagcaggacaagaacacccaggagguguucgcccaggucaagcagaucuacaagacgcccccgaucaaggacuucggcggguucaacuucagccagauccugcccgaccccuccaagcccagcaagcgguccuucaucgaggaccuccuguucaacaaggugacccuggccgacgccggcuucaucaagcaguacggcgacugccucggggacaucgcggcccgcgaccugaucugcgcccagaaguucaacggccugaccgugcucccgccccugcugaccgacgagaugaucgcccaguacaccagcgcccuccuggcggggaccaucacguccggcuggaccuucggggccggcgccgcccugcagauccccuucgcgaugcagauggccuaccgguucaacggcaucggggucacccagaacgugcucuacgagaaccagaagcugaucgccaaccaguucaacagcgccaucggcaagauccaggacucccugagcuccaccgccagcgcgcucgggaagcugcaggacguggucaaccagaacgcccaggcccugaacacgcucgugaagcagcuguccagcaacuucggcgccaucuccagcgugcugaacgacauccucucccgccuggacccgcccgaggccgaggugcagaucgaccggcugaucaccgggcgccuccagagccugcagaccuacgugacccagcagcugauccgggcggccgagauccgcgccagcgccaaccucgccgcgaccaagauguccgagugcguccugggccagagcaagcggguggacuucugcggcaagggguaccaccugauguccuucccccagagcgccccgcacggcguggucuuccuccacgugacguacguccccgcccaggagaagaacuucaccaccgcccccgcgaucugccacgacgggaaggcccacuucccccgcgagggcguguucguguccaacgggacccacugguucgucacgcagcggaacuucuacgagccgcagaucaucaccaccgacaacaccuucgugagcggcaacugcgacguggucaucggcaucgugaacaacacgguguacgacccccugcagcccgagcuggacuccuucaaggaggagcucgacaaguacuucaagaaccacaccagccccgacgucgaccugggggacaucuccggcaucaacgccagcguggugaacauccagaaggagaucgaccgccugaacgaggucgccaagaaccucaacgagucccugaucgaccugcaggagcucgggaaguacgagcaguacaucaaguggccgugguacaucuggcugggcuucaucgccggccugaucgcgaucgugaucgugaccaucaugcucugcugcaugaccagcugcugcuccugccugaaggggugcugcagcugcggcuccugcugcaaguucgacgaggacgacagcgagcccguccugaagggggugaagcuccacuacacgugauaauaggcuggagccucgguggccuagcuucuugccccuugggccuccccccagccccuccuccccuuccugcacccguacccccguggucuuugaauaaagucugagugggcggcaaaaaaaaaaaaaaaaaaaaaaaaaaaaaaaaaaaaaaaaaaaaaaaaaaaaaaaaaaaaaaaaaaaaaaaaaaaaaaaaaaaaaaaaaaaaaaaaaaaa

SEQ ID NO: 26167 - RNA, 4089 nt, Artificial Sequence
  SARS-CoV-2/Wuhan/WIV05/2019__EPI_ISL_402128 spike protein mRNA gc (1-1273)(K986P_V987P_H69del_V70del_A222V_Y453F_S477N_D614G_I692V)
gggaaauaagagagaaaagaagaguaagaagaaauauaagaccccggcgccgccaccauguucguguuccugguccuccugccccuggugagcucccagugcgugaaccucaccacccgcacgcagcugccgcccgccuacaccaacagcuucacccggggcgucuacuaccccgacaagguguuccgcuccagcgugcugcacuccacccaggaccucuuccugcccuucuucagcaacgucacgugguuccacgccaucuccgggaccaacggcaccaagcgguucgacaacccggugcugcccuucaacgacggggucuacuucgcgagcaccgagaaguccaacaucauccgcggcuggaucuucgggacgacccucgacagcaagacccagucccugcugaucgugaacaacgccaccaacguggucaucaaggugugcgaguuccaguucugcaacgaccccuuccucggcguguacuaccacaagaacaacaagagcuggauggaguccgaguuccgggucuacagcuccgccaacaacugcacguucgaguacgugagccagcccuuccugauggaccuggagggcaagcaggggaacuucaagaaccuccgcgaguucguguucaagaacaucgacggcuacuucaagaucuacuccaagcacaccccgaucaaccugguccgggaccugccccagggguucagcguccucgagccccugguggaccugcccaucggcaucaacaucacccgcuuccagacccuccuggcccugcaccgguccuaccucacgccgggggacagcagcuccggcuggaccgcgggcgccgccgccuacuacgugggguaccugcagccccgcaccuuccugcucaaguacaacgagaacggcaccaucacggacgcggucgacugcgcccuggacccccugagcgagaccaagugcacccucaaguccuucaccguggagaaggggaucuaccagacgagcaacuuccgggugcagcccaccgaguccaucguccgcuucccgaacaucaccaaccugugccccuucggcgagguguucaacgccacccgguucgccagcgucuacgccuggaaccgcaagcggaucuccaacugcguggcggacuacagcgugcuguacaacuccgccagcuucuccacguucaagugcuacggcgucagccccaccaagcucaacgaccugugcuucaccaacguguacgccgacuccuucgugauccgcggggacgagguccggcagaucgcccccggccagaccgggaagaucgccgacuacaacuacaagcugccggacgacuucacgggcugcgugaucgcguggaacagcaacaaccucgacuccaaggucgggggcaacuacaacuaccuguuccgccuguuccgcaagagcaaccucaagcccuucgagcgggacaucuccaccgagaucuaccaggccggcaacacccccugcaacgggguggagggcuucaacugcuacuucccccugcaguccuacggguuccagccgaccaacggcgugggguaccagcccuaccggguggucgugcugagcuucgagcuccugcacgcccccgccacggugugcggccccaagaaguccaccaaccuggucaagaacaagugcgugaacuucaacuucaacggccucaccgggaccggcgugcugaccgagagcaacaagaaguuccugccguuccagcaguucgggcgcgacaucgccgacacgaccgacgcgguccgcgacccccagacccuggagauccucgacaucacccccugcagcuucggcgggguguccgugaucacgccgggcaccaacaccagcaaccaggucgccgugcuguaccagggcgugaacugcaccgagguccccguggccauccacgccgaccagcugacgcccaccuggcggguguacuccaccggcagcaacgucuuccagacccgcgccgggugccucaucggcgcggagcacgugaacaacuccuacgagugcgacauccccaucggggccggcaucugcgccagcuaccagacgcagaccaacuccccgcggcgcgcccggagcguggcgucccagagcgucaucgccuacaccaugucccugggcgccgagaacagcgucgccuacuccaacaacagcaucgccauccccaccaacuucacgaucuccgugaccaccgagauccugcccgugagcaugaccaagacgagcgucgacugcaccauguacaucugcggggacuccaccgagugcagcaaccuccugcugcaguacggcuccuucugcacccagcucaaccgcgcgcugacggggaucgccguggagcaggacaagaacacccaggagguguucgcccaggucaagcagaucuacaagacgcccccgaucaaggacuucggcggguucaacuucagccagauccugcccgaccccuccaagcccagcaagcgguccuucaucgaggaccuccuguucaacaaggugacccuggccgacgccggcuucaucaagcaguacggcgacugccucggggacaucgcggcccgcgaccugaucugcgcccagaaguucaacggccugaccgugcucccgccccugcugaccgacgagaugaucgcccaguacaccagcgcccuccuggcggggaccaucacguccggcuggaccuucggggccggcgccgcccugcagauccccuucgcgaugcagauggccuaccgguucaacggcaucggggucacccagaacgugcucuacgagaaccagaagcugaucgccaaccaguucaacagcgccaucggcaagauccaggacucccugagcuccaccgccagcgcgcucgggaagcugcaggacguggucaaccagaacgcccaggcccugaacacgcucgugaagcagcuguccagcaacuucggcgccaucuccagcgugcugaacgacauccucucccgccuggacccgcccgaggccgaggugcagaucgaccggcugaucaccgggcgccuccagagccugcagaccuacgugacccagcagcugauccgggcggccgagauccgcgccagcgccaaccucgccgcgaccaagauguccgagugcguccugggccagagcaagcggguggacuucugcggcaagggguaccaccugauguccuucccccagagcgccccgcacggcguggucuuccuccacgugacguacguccccgcccaggagaagaacuucaccaccgcccccgcgaucugccacgacgggaaggcccacuucccccgcgagggcguguucguguccaacgggacccacugguucgucacgcagcggaacuucuacgagccgcagaucaucaccaccgacaacaccuucgugagcggcaacugcgacguggucaucggcaucgugaacaacacgguguacgacccccugcagcccgagcuggacuccuucaaggaggagcucgacaaguacuucaagaaccacaccagccccgacgucgaccugggggacaucuccggcaucaacgccagcguggugaacauccagaaggagaucgaccgccugaacgaggucgccaagaaccucaacgagucccugaucgaccugcaggagcucgggaaguacgagcaguacaucaaguggccgugguacaucuggcugggcuucaucgccggccugaucgcgaucgugauggugaccaucaugcucugcugcaugaccagcugcugcuccugccugaaggggugcugcagcugcggcuccugcugcaaguucgacgaggacgacagcgagcccguccugaagggggugaagcuccacuacacgugauaauaggcuggagccucgguggccuagcuucuugccccuugggccuccccccagccccuccuccccuuccugcacccguacccccguggucuuugaauaaagucugagugggcggcaaaaaaaaaaaaaaaaaaaaaaaaaaaaaaaaaaaaaaaaaaaaaaaaaaaaaaaaaaaaaaaaaaaaaaaaaaaaaaaaaaaaaaaaaaaaaaaaaaaa

SEQ ID NO: 26168 - RNA, 4089 nt, Artificial Sequence
  SARS-CoV-2/Wuhan/WIV05/2019__EPI_ISL_402128 spike protein mRNA gc (1-1273)(K986P_V987P_H69del_V70del_Y453F_D614G_I692V_M1229I)
gggaaauaagagagaaaagaagaguaagaagaaauauaagaccccggcgccgccaccauguucguguuccugguccuccugccccuggugagcucccagugcgugaaccucaccacccgcacgcagcugccgcccgccuacaccaacagcuucacccggggcgucuacuaccccgacaagguguuccgcuccagcgugcugcacuccacccaggaccucuuccugcccuucuucagcaacgucacgugguuccacgccaucuccgggaccaacggcaccaagcgguucgacaacccggugcugcccuucaacgacggggucuacuucgcgagcaccgagaaguccaacaucauccgcggcuggaucuucgggacgacccucgacagcaagacccagucccugcugaucgugaacaacgccaccaacguggucaucaaggugugcgaguuccaguucugcaacgaccccuuccucggcguguacuaccacaagaacaacaagagcuggauggaguccgaguuccgggucuacagcuccgccaacaacugcacguucgaguacgugagccagcccuuccugauggaccuggagggcaagcaggggaacuucaagaaccuccgcgaguucguguucaagaacaucgacggcuacuucaagaucuacuccaagcacaccccgaucaaccugguccgggaccugccccagggguucagcgcccucgagccccugguggaccugcccaucggcaucaacaucacccgcuuccagacccuccuggcccugcaccgguccuaccucacgccgggggacagcagcuccggcuggaccgcgggcgccgccgccuacuacgugggguaccugcagccccgcaccuuccugcucaaguacaacgagaacggcaccaucacggacgcggucgacugcgcccuggacccccugagcgagaccaagugcacccucaaguccuucaccguggagaaggggaucuaccagacgagcaacuuccgggugcagcccaccgaguccaucguccgcuucccgaacaucaccaaccugugccccuucggcgagguguucaacgccacccgguucgccagcgucuacgccuggaaccgcaagcggaucuccaacugcguggcggacuacagcgugcuguacaacuccgccagcuucuccacguucaagugcuacggcgucagccccaccaagcucaacgaccugugcuucaccaacguguacgccgacuccuucgugauccgcggggacgagguccggcagaucgcccccggccagaccgggaagaucgccgacuacaacuacaagcugccggacgacuucacgggcugcgugaucgcguggaacagcaacaaccucgacuccaaggucgggggcaacuacaacuaccuguuccgccuguuccgcaagagcaaccucaagcccuucgagcgggacaucuccaccgagaucuaccaggccggcagcacccccugcaacgggguggagggcuucaacugcuacuucccccugcaguccuacggguuccagccgaccaacggcgugggguaccagcccuaccggguggucgugcugagcuucgagcuccugcacgcccccgccacggugugcggccccaagaaguccaccaaccuggucaagaacaagugcgugaacuucaacuucaacggccucaccgggaccggcgugcugaccgagagcaacaagaaguuccugccguuccagcaguucgggcgcgacaucgccgacacgaccgacgcgguccgcgacccccagacccuggagauccucgacaucacccccugcagcuucggcgggguguccgugaucacgccgggcaccaacaccagcaaccaggucgccgugcuguaccagggcgugaacugcaccgagguccccguggccauccacgccgaccagcugacgcccaccuggcggguguacuccaccggcagcaacgucuuccagacccgcgccgggugccucaucggcgcggagcacgugaacaacuccuacgagugcgacauccccaucggggccggcaucugcgccagcuaccagacgcagaccaacuccccgcggcgcgcccggagcguggcgucccagagcgugaucgccuacaccaugucccugggcgccgagaacagcgucgccuacuccaacaacagcaucgccauccccaccaacuucacgaucuccgugaccaccgagauccugcccgugagcaugaccaagacgagcgucgacugcaccauguacaucugcggggacuccaccgagugcagcaaccuccugcugcaguacggcuccuucugcacccagcucaaccgcgcgcugacggggaucgccguggagcaggacaagaacacccaggagguguucgcccaggucaagcagaucuacaagacgcccccgaucaaggacuucggcggguucaacuucagccagauccugcccgaccccuccaagcccagcaagcgguccuucaucgaggaccuccuguucaacaaggugacccuggccgacgccggcuucaucaagcaguacggcgacugccucggggacaucgcggcccgcgaccugaucugcgcccagaaguucaacggccugaccgugcucccgccccugcugaccgacgagaugaucgcccaguacaccagcgcccuccuggcggggaccaucacguccggcuggaccuucggggccggcgccgcccugcagauccccuucgcgaugcagauggccuaccgguucaacggcaucggggucacccagaacgugcucuacgagaaccagaagcugaucgccaaccaguucaacagcgccaucggcaagauccaggacucccugagcuccaccgccagcgcgcucgggaagcugcaggacguggucaaccagaacgcccaggcccugaacacgcucgugaagcagcuguccagcaacuucggcgccaucuccagcgugcugaacgacauccucucccgccuggacccgcccgaggccgaggugcagaucgaccggcugaucaccgggcgccuccagagccugcagaccuacgugacccagcagcugauccgggcggccgagauccgcgccagcgccaaccucgccgcgaccaagauguccgagugcguccugggccagagcaagcggguggacuucugcggcaagggguaccaccugauguccuucccccagagcgccccgcacggcguggucuuccuccacgugacguacguccccgcccaggagaagaacuucaccaccgcccccgcgaucugccacgacgggaaggcccacuucccccgcgagggcguguucguguccaacgggacccacugguucgucacgcagcggaacuucuacgagccgcagaucaucaccaccgacaacaccuucgugagcggcaacugcgacguggucaucggcaucgugaacaacacgguguacgacccccugcagcccgagcuggacuccuucaaggaggagcucgacaaguacuucaagaaccacaccagccccgacgucgaccugggggacaucuccggcaucaacgccagcguggugaacauccagaaggagaucgaccgccugaacgaggucgccaagaaccucaacgagucccugaucgaccugcaggagcucgggaaguacgagcaguacaucaaguggccgugguacaucuggcugggcuucaucgccggccugaucgcgaucgugaucgugaccaucaugcucugcugcaugaccagcugcugcuccugccugaaggggugcugcagcugcggcuccugcugcaaguucgacgaggacgacagcgagcccguccugaagggggugaagcuccacuacacgugauaauaggcuggagccucgguggccuagcuucuugccccuugggccuccccccagccccuccuccccuuccugcacccguacccccguggucuuugaauaaagucugagugggcggcaaaaaaaaaaaaaaaaaaaaaaaaaaaaaaaaaaaaaaaaaaaaaaaaaaaaaaaaaaaaaaaaaaaaaaaaaaaaaaaaaaaaaaaaaaaaaaaaaaaa

SEQ ID NO: 26169 - RNA, 4086 nt, Artificial Sequence
  SARS-CoV-2/Wuhan/WIV05/2019__EPI_ISL_402128 spike protein mRNA gc (1-1273)(K986P_V987P_K986P_V987P_H69del_V70del_Y144del_N501Y_A570 D_D614G_P681H_T716I_S982A_D1118H)
gggaaauaagagagaaaagaagaguaagaagaaauauaagaccccggcgccgccaccauguucguguuccugguccuccugccccuggugagcucccagugcgugaaccucaccacccgcacgcagcugccgcccgccuacaccaacagcuucacccggggcgucuacuaccccgacaagguguuccgcuccagcgugcugcacuccacccaggaccucuuccugcccuucuucagcaacgucacgugguuccacgccaucuccgggaccaacggcaccaagcgguucgacaacccggugcugcccuucaacgacggggucuacuucgcgagcaccgagaaguccaacaucauccgcggcuggaucuucgggacgacccucgacagcaagacccagucccugcugaucgugaacaacgccaccaacguggucaucaaggugugcgaguuccaguucugcaacgaccccuuccucggcguguaccacaagaacaacaagagcuggauggaguccgaguuccgggucuacagcuccgccaacaacugcacguucgaguacgugagccagcccuuccugauggaccuggagggcaagcaggggaacuucaagaaccuccgcgaguucguguucaagaacaucgacggcuacuucaagaucuacuccaagcacaccccgaucaaccugguccgggaccugccccagggguucagcgcccucgagccccugguggaccugcccaucggcaucaacaucacccgcuuccagacccuccuggcccugcaccgguccuaccucacgccgggggacagcagcuccggcuggaccgcgggcgccgccgccuacuacgugggguaccugcagccccgcaccuuccugcucaaguacaacgagaacggcaccaucacggacgcggucgacugcgcccuggacccccugagcgagaccaagugcacccucaaguccuucaccguggagaaggggaucuaccagacgagcaacuuccgggugcagcccaccgaguccaucguccgcuucccgaacaucaccaaccugugccccuucggcgagguguucaacgccacccgguucgccagcgucuacgccuggaaccgcaagcggaucuccaacugcguggcggacuacagcgugcuguacaacuccgccagcuucuccacguucaagugcuacggcgucagccccaccaagcucaacgaccugugcuucaccaacguguacgccgacuccuucgugauccgcggggacgagguccggcagaucgcccccggccagaccgggaagaucgccgacuacaacuacaagcugccggacgacuucacgggcugcgugaucgcguggaacagcaacaaccucgacuccaaggucgggggcaacuacaacuaccuguaccgccuguuccgcaagagcaaccucaagcccuucgagcgggacaucuccaccgagaucuaccaggccggcagcacccccugcaacgggguggagggcuucaacugcuacuucccccugcaguccuacggguuccagccgaccuacggcgugggguaccagcccuaccggguggucgugcugagcuucgagcuccugcacgcccccgccacggugugcggccccaagaaguccaccaaccuggucaagaacaagugcgugaacuucaacuucaacggccucaccgggaccggcgugcugaccgagagcaacaagaaguuccugccguuccagcaguucgggcgcgacaucgacgacacgaccgacgcgguccgcgacccccagacccuggagauccucgacaucacccccugcagcuucggcgggguguccgugaucacgccgggcaccaacaccagcaaccaggucgccgugcuguaccagggcgugaacugcaccgagguccccguggccauccacgccgaccagcugacgcccaccuggcggguguacuccaccggcagcaacgucuuccagacccgcgccgggugccucaucggcgcggagcacgugaacaacuccuacgagugcgacauccccaucggggccggcaucugcgccagcuaccagacgcagaccaacucccaccggcgcgcccggagcguggcgucccagagcaucaucgccuacaccaugucccugggcgccgagaacagcgucgccuacuccaacaacagcaucgccauccccaucaacuucacgaucuccgugaccaccgagauccugcccgugagcaugaccaagacgagcgucgacugcaccauguacaucugcggggacuccaccgagugcagcaaccuccugcugcaguacggcuccuucugcacccagcucaaccgcgcgcugacggggaucgccguggagcaggacaagaacacccaggagguguucgcccaggucaagcagaucuacaagacgcccccgaucaaggacuucggcggguucaacuucagccagauccugcccgaccccuccaagcccagcaagcgguccuucaucgaggaccuccuguucaacaaggugacccuggccgacgccggcuucaucaagcaguacggcgacugccucggggacaucgcggcccgcgaccugaucugcgcccagaaguucaacggccugaccgugcucccgccccugcugaccgacgagaugaucgcccaguacaccagcgcccuccuggcggggaccaucacguccggcuggaccuucggggccggcgccgcccugcagauccccuucgcgaugcagauggccuaccgguucaacggcaucggggucacccagaacgugcucuacgagaaccagaagcugaucgccaaccaguucaacagcgccaucggcaagauccaggacucccugagcuccaccgccagcgcgcucgggaagcugcaggacguggucaaccagaacgcccaggcccugaacacgcucgugaagcagcuguccagcaacuucggcgccaucuccagcgugcugaacgacauccucgcccgccuggacccgcccgaggccgaggugcagaucgaccggcugaucaccgggcgccuccagagccugcagaccuacgugacccagcagcugauccgggcggccgagauccgcgccagcgccaaccucgccgcgaccaagauguccgagugcguccugggccagagcaagcggguggacuucugcggcaagggguaccaccugauguccuucccccagagcgccccgcacggcguggucuuccuccacgugacguacguccccgcccaggagaagaacuucaccaccgcccccgcgaucugccacgacgggaaggcccacuucccccgcgagggcguguucguguccaacgggacccacugguucgucacgcagcggaacuucuacgagccgcagaucaucaccacccacaacaccuucgugagcggcaacugcgacguggucaucggcaucgugaacaacacgguguacgacccccugcagcccgagcuggacuccuucaaggaggagcucgacaaguacuucaagaaccacaccagccccgacgucgaccugggggacaucuccggcaucaacgccagcguggugaacauccagaaggagaucgaccgccugaacgaggucgccaagaaccucaacgagucccugaucgaccugcaggagcucgggaaguacgagcaguacaucaaguggccgugguacaucuggcugggcuucaucgccggccugaucgcgaucgugauggugaccaucaugcucugcugcaugaccagcugcugcuccugccugaaggggugcugcagcugcggcuccugcugcaaguucgacgaggacgacagcgagcccguccugaagggggugaagcuccacuacacgugauaauaggcuggagccucgguggccuagcuucuugccccuugggccuccccccagccccuccuccccuuccugcacccguacccccguggucuuugaauaaagucugagugggcggcaaaaaaaaaaaaaaaaaaaaaaaaaaaaaaaaaaaaaaaaaaaaaaaaaaaaaaaaaaaaaaaaaaaaaaaaaaaaaaaaaaaaaaaaaaaaaaaaaaaa

SEQ ID NO: 26170 - RNA, 4095 nt, Artificial Sequence
  SARS-CoV-2/Wuhan/WIV05/2019__EPI_ISL_402128 spike protein mRNA gc (1-1273)(K986P_V987P_K986P_V987P_K417N_E484K_N501Y_D614G)
gggaaauaagagagaaaagaagaguaagaagaaauauaagaccccggcgccgccaccauguucguguuccugguccuccugccccuggugagcucccagugcgugaaccucaccacccgcacgcagcugccgcccgccuacaccaacagcuucacccggggcgucuacuaccccgacaagguguuccgcuccagcgugcugcacuccacccaggaccucuuccugcccuucuucagcaacgucacgugguuccacgccauccacguguccgggaccaacggcaccaagcgguucgacaacccggugcugcccuucaacgacggggucuacuucgcgagcaccgagaaguccaacaucauccgcggcuggaucuucgggacgacccucgacagcaagacccagucccugcugaucgugaacaacgccaccaacguggucaucaaggugugcgaguuccaguucugcaacgaccccuuccucggcguguacuaccacaagaacaacaagagcuggauggaguccgaguuccgggucuacagcuccgccaacaacugcacguucgaguacgugagccagcccuuccugauggaccuggagggcaagcaggggaacuucaagaaccuccgcgaguucguguucaagaacaucgacggcuacuucaagaucuacuccaagcacaccccgaucaaccugguccgggaccugccccagggguucagcgcccucgagccccugguggaccugcccaucggcaucaacaucacccgcuuccagacccuccuggcccugcaccgguccuaccucacgccgggggacagcagcuccggcuggaccgcgggcgccgccgccuacuacgugggguaccugcagccccgcaccuuccugcucaaguacaacgagaacggcaccaucacggacgcggucgacugcgcccuggacccccugagcgagaccaagugcacccucaaguccuucaccguggagaaggggaucuaccagacgagcaacuuccgggugcagcccaccgaguccaucguccgcuucccgaacaucaccaaccugugccccuucggcgagguguucaacgccacccgguucgccagcgucuacgccuggaaccgcaagcggaucuccaacugcguggcggacuacagcgugcuguacaacuccgccagcuucuccacguucaagugcuacggcgucagccccaccaagcucaacgaccugugcuucaccaacguguacgccgacuccuucgugauccgcggggacgagguccggcagaucgcccccggccagaccgggaacaucgccgacuacaacuacaagcugccggacgacuucacgggcugcgugaucgcguggaacagcaacaaccucgacuccaaggucgggggcaacuacaacuaccuguaccgccuguuccgcaagagcaaccucaagcccuucgagcgggacaucuccaccgagaucuaccaggccggcagcacccccugcaacggggugaagggcuucaacugcuacuucccccugcaguccuacggguuccagccgaccuacggcgugggguaccagcccuaccggguggucgugcugagcuucgagcuccugcacgcccccgccacggugugcggccccaagaaguccaccaaccuggucaagaacaagugcgugaacuucaacuucaacggccucaccgggaccggcgugcugaccgagagcaacaagaaguuccugccguuccagcaguucgggcgcgacaucgccgacacgaccgacgcgguccgcgacccccagacccuggagauccucgacaucacccccugcagcuucggcgggguguccgugaucacgccgggcaccaacaccagcaaccaggucgccgugcuguaccagggcgugaacugcaccgagguccccguggccauccacgccgaccagcugacgcccaccuggcggguguacuccaccggcagcaacgucuuccagacccgcgccgggugccucaucggcgcggagcacgugaacaacuccuacgagugcgacauccccaucggggccggcaucugcgccagcuaccagacgcagaccaacuccccgcggcgcgcccggagcguggcgucccagagcaucaucgccuacaccaugucccugggcgccgagaacagcgucgccuacuccaacaacagcaucgccauccccaccaacuucacgaucuccgugaccaccgagauccugcccgugagcaugaccaagacgagcgucgacugcaccauguacaucugcggggacuccaccgagugcagcaaccuccugcugcaguacggcuccuucugcacccagcucaaccgcgcgcugacggggaucgccguggagcaggacaagaacacccaggagguguucgcccaggucaagcagaucuacaagacgcccccgaucaaggacuucggcggguucaacuucagccagauccugcccgaccccuccaagcccagcaagcgguccuucaucgaggaccuccuguucaacaaggugacccuggccgacgccggcuucaucaagcaguacggcgacugccucggggacaucgcggcccgcgaccugaucugcgcccagaaguucaacggccugaccgugcucccgccccugcugaccgacgagaugaucgcccaguacaccagcgcccuccuggcggggaccaucacguccggcuggaccuucggggccggcgccgcccugcagauccccuucgcgaugcagauggccuaccgguucaacggcaucggggucacccagaacgugcucuacgagaaccagaagcugaucgccaaccaguucaacagcgccaucggcaagauccaggacucccugagcuccaccgccagcgcgcucgggaagcugcaggacguggucaaccagaacgcccaggcccugaacacgcucgugaagcagcuguccagcaacuucggcgccaucuccagcgugcugaacgacauccucucccgccuggacccgcccgaggccgaggugcagaucgaccggcugaucaccgggcgccuccagagccugcagaccuacgugacccagcagcugauccgggcggccgagauccgcgccagcgccaaccucgccgcgaccaagauguccgagugcguccugggccagagcaagcggguggacuucugcggcaagggguaccaccugauguccuucccccagagcgccccgcacggcguggucuuccuccacgugacguacguccccgcccaggagaagaacuucaccaccgcccccgcgaucugccacgacgggaaggcccacuucccccgcgagggcguguucguguccaacgggacccacugguucgucacgcagcggaacuucuacgagccgcagaucaucaccaccgacaacaccuucgugagcggcaacugcgacguggucaucggcaucgugaacaacacgguguacgacccccugcagcccgagcuggacuccuucaaggaggagcucgacaaguacuucaagaaccacaccagccccgacgucgaccugggggacaucuccggcaucaacgccagcguggugaacauccagaaggagaucgaccgccugaacgaggucgccaagaaccucaacgagucccugaucgaccugcaggagcucgggaaguacgagcaguacaucaaguggccgugguacaucuggcugggcuucaucgccggccugaucgcgaucgugauggugaccaucaugcucugcugcaugaccagcugcugcuccugccugaaggggugcugcagcugcggcuccugcugcaaguucgacgaggacgacagcgagcccguccugaagggggugaagcuccacuacacgugauaauaggcuggagccucgguggccuagcuucuugccccuugggccuccccccagccccuccuccccuuccugcacccguacccccguggucuuugaauaaagucugagugggcggcaaaaaaaaaaaaaaaaaaaaaaaaaaaaaaaaaaaaaaaaaaaaaaaaaaaaaaaaaaaaaaaaaaaaaaaaaaaaaaaaaaaaaaaaaaaaaaaaaaaa

SEQ ID NO: 26171 - RNA, 4086 nt, Artificial Sequence
  SARS-CoV-2/Wuhan/WIV05/2019__EPI_ISL_402128 spike protein mRNA gc (1-1273)(K986P_V987P_K986P_V987P_L18F_D80A_D215G_L242del_A243del_ L244del_R246I_K417N_E484K_N501Y_D614G_A701V)
gggaaauaagagagaaaagaagaguaagaagaaauauaagaccccggcgccgccaccauguucguguuccugguccuccugccccuggugagcucccagugcgugaacuucaccacccgcacgcagcugccgcccgccuacaccaacagcuucacccggggcgucuacuaccccgacaagguguuccgcuccagcgugcugcacuccacccaggaccucuuccugcccuucuucagcaacgucacgugguuccacgccauccacguguccgggaccaacggcaccaagcgguucgccaacccggugcugcccuucaacgacggggucuacuucgcgagcaccgagaaguccaacaucauccgcggcuggaucuucgggacgacccucgacagcaagacccagucccugcugaucgugaacaacgccaccaacguggucaucaaggugugcgaguuccaguucugcaacgaccccuuccucggcguguacuaccacaagaacaacaagagcuggauggaguccgaguuccgggucuacagcuccgccaacaacugcacguucgaguacgugagccagcccuuccugauggaccuggagggcaagcaggggaacuucaagaaccuccgcgaguucguguucaagaacaucgacggcuacuucaagaucuacuccaagcacaccccgaucaaccugguccggggccugccccagggguucagcgcccucgagccccugguggaccugcccaucggcaucaacaucacccgcuuccagacccuccacaucuccuaccucacgccgggggacagcagcuccggcuggaccgcgggcgccgccgccuacuacgugggguaccugcagccccgcaccuuccugcucaaguacaacgagaacggcaccaucacggacgcggucgacugcgcccuggacccccugagcgagaccaagugcacccucaaguccuucaccguggagaaggggaucuaccagacgagcaacuuccgggugcagcccaccgaguccaucguccgcuucccgaacaucaccaaccugugccccuucggcgagguguucaacgccacccgguucgccagcgucuacgccuggaaccgcaagcggaucuccaacugcguggcggacuacagcgugcuguacaacuccgccagcuucuccacguucaagugcuacggcgucagccccaccaagcucaacgaccugugcuucaccaacguguacgccgacuccuucgugauccgcggggacgagguccggcagaucgcccccggccagaccgggaacaucgccgacuacaacuacaagcugccggacgacuucacgggcugcgugaucgcguggaacagcaacaaccucgacuccaaggucgggggcaacuacaacuaccuguaccgccuguuccgcaagagcaaccucaagcccuucgagcgggacaucuccaccgagaucuaccaggccggcagcacccccugcaacggggugaagggcuucaacugcuacuucccccugcaguccuacggguuccagccgaccuacggcgugggguaccagcccuaccggguggucgugcugagcuucgagcuccugcacgcccccgccacggugugcggccccaagaaguccaccaaccuggucaagaacaagugcgugaacuucaacuucaacggccucaccgggaccggcgugcugaccgagagcaacaagaaguuccugccguuccagcaguucgggcgcgacaucgccgacacgaccgacgcgguccgcgacccccagacccuggagauccucgacaucacccccugcagcuucggcgggguguccgugaucacgccgggcaccaacaccagcaaccaggucgccgugcuguaccagggcgugaacugcaccgagguccccguggccauccacgccgaccagcugacgcccaccuggcggguguacuccaccggcagcaacgucuuccagacccgcgccgggugccucaucggcgcggagcacgugaacaacuccuacgagugcgacauccccaucggggccggcaucugcgccagcuaccagacgcagaccaacuccccgcggcgcgcccggagcguggcgucccagagcaucaucgccuacaccaugucccugggcguggagaacagcgucgccuacuccaacaacagcaucgccauccccaccaacuucacgaucuccgugaccaccgagauccugcccgugagcaugaccaagacgagcgucgacugcaccauguacaucugcggggacuccaccgagugcagcaaccuccugcugcaguacggcuccuucugcacccagcucaaccgcgcgcugacggggaucgccguggagcaggacaagaacacccaggagguguucgcccaggucaagcagaucuacaagacgcccccgaucaaggacuucggcggguucaacuucagccagauccugcccgaccccuccaagcccagcaagcgguccuucaucgaggaccuccuguucaacaaggugacccuggccgacgccggcuucaucaagcaguacggcgacugccucggggacaucgcggcccgcgaccugaucugcgcccagaaguucaacggccugaccgugcucccgccccugcugaccgacgagaugaucgcccaguacaccagcgcccuccuggcggggaccaucacguccggcuggaccuucggggccggcgccgcccugcagauccccuucgcgaugcagauggccuaccgguucaacggcaucggggucacccagaacgugcucuacgagaaccagaagcugaucgccaaccaguucaacagcgccaucggcaagauccaggacucccugagcuccaccgccagcgcgcucgggaagcugcaggacguggucaaccagaacgcccaggcccugaacacgcucgugaagcagcuguccagcaacuucggcgccaucuccagcgugcugaacgacauccucucccgccuggacccgcccgaggccgaggugcagaucgaccggcugaucaccgggcgccuccagagccugcagaccuacgugacccagcagcugauccgggcggccgagauccgcgccagcgccaaccucgccgcgaccaagauguccgagugcguccugggccagagcaagcggguggacuucugcggcaagggguaccaccugauguccuucccccagagcgccccgcacggcguggucuuccuccacgugacguacguccccgcccaggagaagaacuucaccaccgcccccgcgaucugccacgacgggaaggcccacuucccccgcgagggcguguucguguccaacgggacccacugguucgucacgcagcggaacuucuacgagccgcagaucaucaccaccgacaacaccuucgugagcggcaacugcgacguggucaucggcaucgugaacaacacgguguacgacccccugcagcccgagcuggacuccuucaaggaggagcucgacaaguacuucaagaaccacaccagccccgacgucgaccugggggacaucuccggcaucaacgccagcguggugaacauccagaaggagaucgaccgccugaacgaggucgccaagaaccucaacgagucccugaucgaccugcaggagcucgggaaguacgagcaguacaucaaguggccgugguacaucuggcugggcuucaucgccggccugaucgcgaucgugauggugaccaucaugcucugcugcaugaccagcugcugcuccugccugaaggggugcugcagcugcggcuccugcugcaaguucgacgaggacgacagcgagcccguccugaagggggugaagcuccacuacacgugauaauaggcuggagccucgguggccuagcuucuugccccuugggccuccccccagccccuccuccccuuccugcacccguacccccguggucuuugaauaaagucugagugggcggcaaaaaaaaaaaaaaaaaaaaaaaaaaaaaaaaaaaaaaaaaaaaaaaaaaaaaaaaaaaaaaaaaaaaaaaaaaaaaaaaaaaaaaaaaaaaaaaaaaaa

SEQ ID NO: 26172 - RNA, 4095 nt, Artificial Sequence
  SARS-CoV-2/Wuhan/WIV05/2019__EPI_ISL_402128 spike protein mRNA gc (1-1273)(K986P_V987P_K986P_V987P_E484K_D614G)
gggaaauaagagagaaaagaagaguaagaagaaauauaagaccccggcgccgccaccauguucguguuccugguccuccugccccuggugagcucccagugcgugaaccucaccacccgcacgcagcugccgcccgccuacaccaacagcuucacccggggcgucuacuaccccgacaagguguuccgcuccagcgugcugcacuccacccaggaccucuuccugcccuucuucagcaacgucacgugguuccacgccauccacguguccgggaccaacggcaccaagcgguucgacaacccggugcugcccuucaacgacggggucuacuucgcgagcaccgagaaguccaacaucauccgcggcuggaucuucgggacgacccucgacagcaagacccagucccugcugaucgugaacaacgccaccaacguggucaucaaggugugcgaguuccaguucugcaacgaccccuuccucggcguguacuaccacaagaacaacaagagcuggauggaguccgaguuccgggucuacagcuccgccaacaacugcacguucgaguacgugagccagcccuuccugauggaccuggagggcaagcaggggaacuucaagaaccuccgcgaguucguguucaagaacaucgacggcuacuucaagaucuacuccaagcacaccccgaucaaccugguccgggaccugccccagggguucagcgcccucgagccccugguggaccugcccaucggcaucaacaucacccgcuuccagacccuccuggcccugcaccgguccuaccucacgccgggggacagcagcuccggcuggaccgcgggcgccgccgccuacuacgugggguaccugcagccccgcaccuuccugcucaaguacaacgagaacggcaccaucacggacgcggucgacugcgcccuggacccccugagcgagaccaagugcacccucaaguccuucaccguggagaaggggaucuaccagacgagcaacuuccgggugcagcccaccgaguccaucguccgcuucccgaacaucaccaaccugugccccuucggcgagguguucaacgccacccgguucgccagcgucuacgccuggaaccgcaagcggaucuccaacugcguggcggacuacagcgugcuguacaacuccgccagcuucuccacguucaagugcuacggcgucagccccaccaagcucaacgaccugugcuucaccaacguguacgccgacuccuucgugauccgcggggacgagguccggcagaucgcccccggccagaccgggaagaucgccgacuacaacuacaagcugccggacgacuucacgggcugcgugaucgcguggaacagcaacaaccucgacuccaaggucgggggcaacuacaacuaccuguaccgccuguuccgcaagagcaaccucaagcccuucgagcgggacaucuccaccgagaucuaccaggccggcagcacccccugcaacggggugaagggcuucaacugcuacuucccccugcaguccuacggguuccagccgaccaacggcgugggguaccagcccuaccggguggucgugcugagcuucgagcuccugcacgcccccgccacggugugcggccccaagaaguccaccaaccuggucaagaacaagugcgugaacuucaacuucaacggccucaccgggaccggcgugcugaccgagagcaacaagaaguuccugccguuccagcaguucgggcgcgacaucgccgacacgaccgacgcgguccgcgacccccagacccuggagauccucgacaucacccccugcagcuucggcgggguguccgugaucacgccgggcaccaacaccagcaaccaggucgccgugcuguaccagggcgugaacugcaccgagguccccguggccauccacgccgaccagcugacgcccaccuggcggguguacuccaccggcagcaacgucuuccagacccgcgccgggugccucaucggcgcggagcacgugaacaacuccuacgagugcgacauccccaucggggccggcaucugcgccagcuaccagacgcagaccaacuccccgcggcgcgcccggagcguggcgucccagagcaucaucgccuacaccaugucccugggcgccgagaacagcgucgccuacuccaacaacagcaucgccauccccaccaacuucacgaucuccgugaccaccgagauccugcccgugagcaugaccaagacgagcgucgacugcaccauguacaucugcggggacuccaccgagugcagcaaccuccugcugcaguacggcuccuucugcacccagcucaaccgcgcgcugacggggaucgccguggagcaggacaagaacacccaggagguguucgcccaggucaagcagaucuacaagacgcccccgaucaaggacuucggcggguucaacuucagccagauccugcccgaccccuccaagcccagcaagcgguccuucaucgaggaccuccuguucaacaaggugacccuggccgacgccggcuucaucaagcaguacggcgacugccucggggacaucgcggcccgcgaccugaucugcgcccagaaguucaacggccugaccgugcucccgccccugcugaccgacgagaugaucgcccaguacaccagcgcccuccuggcggggaccaucacguccggcuggaccuucggggccggcgccgcccugcagauccccuucgcgaugcagauggccuaccgguucaacggcaucggggucacccagaacgugcucuacgagaaccagaagcugaucgccaaccaguucaacagcgccaucggcaagauccaggacucccugagcuccaccgccagcgcgcucgggaagcugcaggacguggucaaccagaacgcccaggcccugaacacgcucgugaagcagcuguccagcaacuucggcgccaucuccagcgugcugaacgacauccucucccgccuggacccgcccgaggccgaggugcagaucgaccggcugaucaccgggcgccuccagagccugcagaccuacgugacccagcagcugauccgggcggccgagauccgcgccagcgccaaccucgccgcgaccaagauguccgagugcguccugggccagagcaagcggguggacuucugcggcaagggguaccaccugauguccuucccccagagcgccccgcacggcguggucuuccuccacgugacguacguccccgcccaggagaagaacuucaccaccgcccccgcgaucugccacgacgggaaggcccacuucccccgcgagggcguguucguguccaacgggacccacugguucgucacgcagcggaacuucuacgagccgcagaucaucaccaccgacaacaccuucgugagcggcaacugcgacguggucaucggcaucgugaacaacacgguguacgacccccugcagcccgagcuggacuccuucaaggaggagcucgacaaguacuucaagaaccacaccagccccgacgucgaccugggggacaucuccggcaucaacgccagcguggugaacauccagaaggagaucgaccgccugaacgaggucgccaagaaccucaacgagucccugaucgaccugcaggagcucgggaaguacgagcaguacaucaaguggccgugguacaucuggcugggcuucaucgccggccugaucgcgaucgugauggugaccaucaugcucugcugcaugaccagcugcugcuccugccugaaggggugcugcagcugcggcuccugcugcaaguucgacgaggacgacagcgagcccguccugaagggggugaagcuccacuacacgugauaauaggcuggagccucgguggccuagcuucuugccccuugggccuccccccagccccuccuccccuuccugcacccguacccccguggucuuugaauaaagucugagugggcggcaaaaaaaaaaaaaaaaaaaaaaaaaaaaaaaaaaaaaaaaaaaaaaaaaaaaaaaaaaaaaaaaaaaaaaaaaaaaaaaaaaaaaaaaaaaaaaaaaaaa

SEQ ID NO: 26173 - RNA, 4095 nt, Artificial Sequence
  SARS-CoV-2/Wuhan/WIV05/2019__EPI_ISL_402128 spike protein mRNA gc (1-1273)(K986P_V987P_K986P_V987P_L18F_T20N_P26S_D138Y_R190S_K417T _E484K_N501Y_D614G_H655Y_T1027I)
gggaaauaagagagaaaagaagaguaagaagaaauauaagaccccggcgccgccaccauguucguguuccugguccuccugccccuggugagcucccagugcgugaacuucaccaaccgcacgcagcugccgagcgccuacaccaacagcuucacccggggcgucuacuaccccgacaagguguuccgcuccagcgugcugcacuccacccaggaccucuuccugcccuucuucagcaacgucacgugguuccacgccauccacguguccgggaccaacggcaccaagcgguucgacaacccggugcugcccuucaacgacggggucuacuucgcgagcaccgagaaguccaacaucauccgcggcuggaucuucgggacgacccucgacagcaagacccagucccugcugaucgugaacaacgccaccaacguggucaucaaggugugcgaguuccaguucugcaacuaccccuuccucggcguguacuaccacaagaacaacaagagcuggauggaguccgaguuccgggucuacagcuccgccaacaacugcacguucgaguacgugagccagcccuuccugauggaccuggagggcaagcaggggaacuucaagaaccucagcgaguucguguucaagaacaucgacggcuacuucaagaucuacuccaagcacaccccgaucaaccugguccgggaccugccccagggguucagcgcccucgagccccugguggaccugcccaucggcaucaacaucacccgcuuccagacccuccuggcccugcaccgguccuaccucacgccgggggacagcagcuccggcuggaccgcgggcgccgccgccuacuacgugggguaccugcagccccgcaccuuccugcucaaguacaacgagaacggcaccaucacggacgcggucgacugcgcccuggacccccugagcgagaccaagugcacccucaaguccuucaccguggagaaggggaucuaccagacgagcaacuuccgggugcagcccaccgaguccaucguccgcuucccgaacaucaccaaccugugccccuucggcgagguguucaacgccacccgguucgccagcgucuacgccuggaaccgcaagcggaucuccaacugcguggcggacuacagcgugcuguacaacuccgccagcuucuccacguucaagugcuacggcgucagccccaccaagcucaacgaccugugcuucaccaacguguacgccgacuccuucgugauccgcggggacgagguccggcagaucgcccccggccagaccgggaccaucgccgacuacaacuacaagcugccggacgacuucacgggcugcgugaucgcguggaacagcaacaaccucgacuccaaggucgggggcaacuacaacuaccuguaccgccuguuccgcaagagcaaccucaagcccuucgagcgggacaucuccaccgagaucuaccaggccggcagcacccccugcaacggggugaagggcuucaacugcuacuucccccugcaguccuacggguuccagccgaccuacggcgugggguaccagcccuaccggguggucgugcugagcuucgagcuccugcacgcccccgccacggugugcggccccaagaaguccaccaaccuggucaagaacaagugcgugaacuucaacuucaacggccucaccgggaccggcgugcugaccgagagcaacaagaaguuccugccguuccagcaguucgggcgcgacaucgccgacacgaccgacgcgguccgcgacccccagacccuggagauccucgacaucacccccugcagcuucggcgggguguccgugaucacgccgggcaccaacaccagcaaccaggucgccgugcuguaccagggcgugaacugcaccgagguccccguggccauccacgccgaccagcugacgcccaccuggcggguguacuccaccggcagcaacgucuuccagacccgcgccgggugccucaucggcgcggaguacgugaacaacuccuacgagugcgacauccccaucggggccggcaucugcgccagcuaccagacgcagaccaacuccccgcggcgcgcccggagcguggcgucccagagcaucaucgccuacaccaugucccugggcgccgagaacagcgucgccuacuccaacaacagcaucgccauccccaccaacuucacgaucuccgugaccaccgagauccugcccgugagcaugaccaagacgagcgucgacugcaccauguacaucugcggggacuccaccgagugcagcaaccuccugcugcaguacggcuccuucugcacccagcucaaccgcgcgcugacggggaucgccguggagcaggacaagaacacccaggagguguucgcccaggucaagcagaucuacaagacgcccccgaucaaggacuucggcggguucaacuucagccagauccugcccgaccccuccaagcccagcaagcgguccuucaucgaggaccuccuguucaacaaggugacccuggccgacgccggcuucaucaagcaguacggcgacugccucggggacaucgcggcccgcgaccugaucugcgcccagaaguucaacggccugaccgugcucccgccccugcugaccgacgagaugaucgcccaguacaccagcgcccuccuggcggggaccaucacguccggcuggaccuucggggccggcgccgcccugcagauccccuucgcgaugcagauggccuaccgguucaacggcaucggggucacccagaacgugcucuacgagaaccagaagcugaucgccaaccaguucaacagcgccaucggcaagauccaggacucccugagcuccaccgccagcgcgcucgggaagcugcaggacguggucaaccagaacgcccaggcccugaacacgcucgugaagcagcuguccagcaacuucggcgccaucuccagcgugcugaacgacauccucucccgccuggacccgcccgaggccgaggugcagaucgaccggcugaucaccgggcgccuccagagccugcagaccuacgugacccagcagcugauccgggcggccgagauccgcgccagcgccaaccucgccgcgaucaagauguccgagugcguccugggccagagcaagcggguggacuucugcggcaagggguaccaccugauguccuucccccagagcgccccgcacggcguggucuuccuccacgugacguacguccccgcccaggagaagaacuucaccaccgcccccgcgaucugccacgacgggaaggcccacuucccccgcgagggcguguucguguccaacgggacccacugguucgucacgcagcggaacuucuacgagccgcagaucaucaccaccgacaacaccuucgugagcggcaacugcgacguggucaucggcaucgugaacaacacgguguacgacccccugcagcccgagcuggacuccuucaaggaggagcucgacaaguacuucaagaaccacaccagccccgacgucgaccugggggacaucuccggcaucaacgccagcguggugaacauccagaaggagaucgaccgccugaacgaggucgccaagaaccucaacgagucccugaucgaccugcaggagcucgggaaguacgagcaguacaucaaguggccgugguacaucuggcugggcuucaucgccggccugaucgcgaucgugauggugaccaucaugcucugcugcaugaccagcugcugcuccugccugaaggggugcugcagcugcggcuccugcugcaaguucgacgaggacgacagcgagcccguccugaagggggugaagcuccacuacacgugauaauaggcuggagccucgguggccuagcuucuugccccuugggccuccccccagccccuccuccccuuccugcacccguacccccguggucuuugaauaaagucugagugggcggcaaaaaaaaaaaaaaaaaaaaaaaaaaaaaaaaaaaaaaaaaaaaaaaaaaaaaaaaaaaaaaaaaaaaaaaaaaaaaaaaaaaaaaaaaaaaaaaaaaaa

SEQ ID NO: 26174 - RNA, 4095 nt, Artificial Sequence
  SARS-CoV-2/Wuhan/WIV05/2019__EPI_ISL_402128 spike protein mRNA gc (1-1273)(K986P_V987P_K986P_V987P_S13I_W152C_L452R_D614G)
gggaaauaagagagaaaagaagaguaagaagaaauauaagaccccggcgccgccaccauguucguguuccugguccuccugccccuggugagcauccagugcgugaaccucaccacccgcacgcagcugccgcccgccuacaccaacagcuucacccggggcgucuacuaccccgacaagguguuccgcuccagcgugcugcacuccacccaggaccucuuccugcccuucuucagcaacgucacgugguuccacgccauccacguguccgggaccaacggcaccaagcgguucgacaacccggugcugcccuucaacgacggggucuacuucgcgagcaccgagaaguccaacaucauccgcggcuggaucuucgggacgacccucgacagcaagacccagucccugcugaucgugaacaacgccaccaacguggucaucaaggugugcgaguuccaguucugcaacgaccccuuccucggcguguacuaccacaagaacaacaagagcugcauggaguccgaguuccgggucuacagcuccgccaacaacugcacguucgaguacgugagccagcccuuccugauggaccuggagggcaagcaggggaacuucaagaaccuccgcgaguucguguucaagaacaucgacggcuacuucaagaucuacuccaagcacaccccgaucaaccugguccgggaccugccccagggguucagcgcccucgagccccugguggaccugcccaucggcaucaacaucacccgcuuccagacccuccuggcccugcaccgguccuaccucacgccgggggacagcagcuccggcuggaccgcgggcgccgccgccuacuacgugggguaccugcagccccgcaccuuccugcucaaguacaacgagaacggcaccaucacggacgcggucgacugcgcccuggacccccugagcgagaccaagugcacccucaaguccuucaccguggagaaggggaucuaccagacgagcaacuuccgggugcagcccaccgaguccaucguccgcuucccgaacaucaccaaccugugccccuucggcgagguguucaacgccacccgguucgccagcgucuacgccuggaaccgcaagcggaucuccaacugcguggcggacuacagcgugcuguacaacuccgccagcuucuccacguucaagugcuacggcgucagccccaccaagcucaacgaccugugcuucaccaacguguacgccgacuccuucgugauccgcggggacgagguccggcagaucgcccccggccagaccgggaagaucgccgacuacaacuacaagcugccggacgacuucacgggcugcgugaucgcguggaacagcaacaaccucgacuccaaggucgggggcaacuacaacuaccgcuaccgccuguuccgcaagagcaaccucaagcccuucgagcgggacaucuccaccgagaucuaccaggccggcagcacccccugcaacgggguggagggcuucaacugcuacuucccccugcaguccuacggguuccagccgaccaacggcgugggguaccagcccuaccggguggucgugcugagcuucgagcuccugcacgcccccgccacggugugcggccccaagaaguccaccaaccuggucaagaacaagugcgugaacuucaacuucaacggccucaccgggaccggcgugcugaccgagagcaacaagaaguuccugccguuccagcaguucgggcgcgacaucgccgacacgaccgacgcgguccgcgacccccagacccuggagauccucgacaucacccccugcagcuucggcgggguguccgugaucacgccgggcaccaacaccagcaaccaggucgccgugcuguaccagggcgugaacugcaccgagguccccguggccauccacgccgaccagcugacgcccaccuggcggguguacuccaccggcagcaacgucuuccagacccgcgccgggugccucaucggcgcggagcacgugaacaacuccuacgagugcgacauccccaucggggccggcaucugcgccagcuaccagacgcagaccaacuccccgcggcgcgcccggagcguggcgucccagagcaucaucgccuacaccaugucccugggcgccgagaacagcgucgccuacuccaacaacagcaucgccauccccaccaacuucacgaucuccgugaccaccgagauccugcccgugagcaugaccaagacgagcgucgacugcaccauguacaucugcggggacuccaccgagugcagcaaccuccugcugcaguacggcuccuucugcacccagcucaaccgcgcgcugacggggaucgccguggagcaggacaagaacacccaggagguguucgcccaggucaagcagaucuacaagacgcccccgaucaaggacuucggcggguucaacuucagccagauccugcccgaccccuccaagcccagcaagcgguccuucaucgaggaccuccuguucaacaaggugacccuggccgacgccggcuucaucaagcaguacggcgacugccucggggacaucgcggcccgcgaccugaucugcgcccagaaguucaacggccugaccgugcucccgccccugcugaccgacgagaugaucgcccaguacaccagcgcccuccuggcggggaccaucacguccggcuggaccuucggggccggcgccgcccugcagauccccuucgcgaugcagauggccuaccgguucaacggcaucggggucacccagaacgugcucuacgagaaccagaagcugaucgccaaccaguucaacagcgccaucggcaagauccaggacucccugagcuccaccgccagcgcgcucgggaagcugcaggacguggucaaccagaacgcccaggcccugaacacgcucgugaagcagcuguccagcaacuucggcgccaucuccagcgugcugaacgacauccucucccgccuggacccgcccgaggccgaggugcagaucgaccggcugaucaccgggcgccuccagagccugcagaccuacgugacccagcagcugauccgggcggccgagauccgcgccagcgccaaccucgccgcgaccaagauguccgagugcguccugggccagagcaagcggguggacuucugcggcaagggguaccaccugauguccuucccccagagcgccccgcacggcguggucuuccuccacgugacguacguccccgcccaggagaagaacuucaccaccgcccccgcgaucugccacgacgggaaggcccacuucccccgcgagggcguguucguguccaacgggacccacugguucgucacgcagcggaacuucuacgagccgcagaucaucaccaccgacaacaccuucgugagcggcaacugcgacguggucaucggcaucgugaacaacacgguguacgacccccugcagcccgagcuggacuccuucaaggaggagcucgacaaguacuucaagaaccacaccagccccgacgucgaccugggggacaucuccggcaucaacgccagcguggugaacauccagaaggagaucgaccgccugaacgaggucgccaagaaccucaacgagucccugaucgaccugcaggagcucgggaaguacgagcaguacaucaaguggccgugguacaucuggcugggcuucaucgccggccugaucgcgaucgugauggugaccaucaugcucugcugcaugaccagcugcugcuccugccugaaggggugcugcagcugcggcuccugcugcaaguucgacgaggacgacagcgagcccguccugaagggggugaagcuccacuacacgugauaauaggcuggagccucgguggccuagcuucuugccccuugggccuccccccagccccuccuccccuuccugcacccguacccccguggucuuugaauaaagucugagugggcggcaaaaaaaaaaaaaaaaaaaaaaaaaaaaaaaaaaaaaaaaaaaaaaaaaaaaaaaaaaaaaaaaaaaaaaaaaaaaaaaaaaaaaaaaaaaaaaaaaaaa

SEQ ID NO: 26175 - RNA, 4095 nt, Artificial Sequence
  SARS-CoV-2/Wuhan/WIV05/2019__EPI_ISL_402128 spike protein mRNA gc (1-1273)(K986P_V987P)
gggaaauaagagagaaaagaagaguaagaagaaauauaagaccccggcgccgccaccauguucguguuccugguccuccugccccuggugagcucccagugcgugaaccucaccacccgcacgcagcugccgcccgccuacaccaacagcuucacccggggcgucuacuaccccgacaagguguuccgcuccagcgugcugcacuccacccaggaccucuuccugcccuucuucagcaacgucacgugguuccacgccauccacguguccgggaccaacggcaccaagcgguucgacaacccggugcugcccuucaacgacggggucuacuucgcgagcaccgagaaguccaacaucauccgcggcuggaucuucgggacgacccucgacagcaagacccagucccugcugaucgugaacaacgccaccaacguggucaucaaggugugcgaguuccaguucugcaacgaccccuuccucggcguguacuaccacaagaacaacaagagcuggauggaguccgaguuccgggucuacagcuccgccaacaacugcacguucgaguacgugagccagcccuuccugauggaccuggagggcaagcaggggaacuucaagaaccuccgcgaguucguguucaagaacaucgacggcuacuucaagaucuacuccaagcacaccccgaucaaccugguccgggaccugccccagggguucagcgcccucgagccccugguggaccugcccaucggcaucaacaucacccgcuuccagacccuccuggcccugcaccgguccuaccucacgccgggggacagcagcuccggcuggaccgcgggcgccgccgccuacuacgugggguaccugcagccccgcaccuuccugcucaaguacaacgagaacggcaccaucacggacgcggucgacugcgcccuggacccccugagcgagaccaagugcacccucaaguccuucaccguggagaaggggaucuaccagacgagcaacuuccgggugcagcccaccgaguccaucguccgcuucccgaacaucaccaaccugugccccuucggcgagguguucaacgccacccgguucgccagcgucuacgccuggaaccgcaagcggaucuccaacugcguggcggacuacagcgugcuguacaacuccgccagcuucuccacguucaagugcuacggcgucagccccaccaagcucaacgaccugugcuucaccaacguguacgccgacuccuucgugauccgcggggacgagguccggcagaucgcccccggccagaccgggaagaucgccgacuacaacuacaagcugccggacgacuucacgggcugcgugaucgcguggaacagcaacaaccucgacuccaaggucgggggcaacuacaacuaccuguaccgccuguuccgcaagagcaaccucaagcccuucgagcgggacaucuccaccgagaucuaccaggccggcagcacccccugcaacgggguggagggcuucaacugcuacuucccccugcaguccuacggguuccagccgaccaacggcgugggguaccagcccuaccggguggucgugcugagcuucgagcuccugcacgcccccgccacggugugcggccccaagaaguccaccaaccuggucaagaacaagugcgugaacuucaacuucaacggccucaccgggaccggcgugcugaccgagagcaacaagaaguuccugccguuccagcaguucgggcgcgacaucgccgacacgaccgacgcgguccgcgacccccagacccuggagauccucgacaucacccccugcagcuucggcgggguguccgugaucacgccgggcaccaacaccagcaaccaggucgccgugcuguaccaggacgugaacugcaccgagguccccguggccauccacgccgaccagcugacgcccaccuggcggguguacuccaccggcagcaacgucuuccagacccgcgccgggugccucaucggcgcggagcacgugaacaacuccuacgagugcgacauccccaucggggccggcaucugcgccagcuaccagacgcagaccaacuccccgcggcgcgcccggagcguggcgucccagagcaucaucgccuacaccaugucccugggcgccgagaacagcgucgccuacuccaacaacagcaucgccauccccaccaacuucacgaucuccgugaccaccgagauccugcccgugagcaugaccaagacgagcgucgacugcaccauguacaucugcggggacuccaccgagugcagcaaccuccugcugcaguacggcuccuucugcacccagcucaaccgcgcgcugacggggaucgccguggagcaggacaagaacacccaggagguguucgcccaggucaagcagaucuacaagacgcccccgaucaaggacuucggcggguucaacuucagccagauccugcccgaccccuccaagcccagcaagcgguccuucaucgaggaccuccuguucaacaaggugacccuggccgacgccggcuucaucaagcaguacggcgacugccucggggacaucgcggcccgcgaccugaucugcgcccagaaguucaacggccugaccgugcucccgccccugcugaccgacgagaugaucgcccaguacaccagcgcccuccuggcggggaccaucacguccggcuggaccuucggggccggcgccgcccugcagauccccuucgcgaugcagauggccuaccgguucaacggcaucggggucacccagaacgugcucuacgagaaccagaagcugaucgccaaccaguucaacagcgccaucggcaagauccaggacucccugagcuccaccgccagcgcgcucgggaagcugcaggacguggucaaccagaacgcccaggcccugaacacgcucgugaagcagcuguccagcaacuucggcgccaucuccagcgugcugaacgacauccucucccgccuggacccgcccgaggccgagguccagaucgaccggcugaucaccgggcgccuccagagccugcagaccuacgugacccagcagcugauccgggcggccgagauccgcgccagcgccaaccucgccgcgaccaagauguccgagugcgugcugggccagagcaagcgggucgacuucugcggcaagggguaccaccugauguccuucccccagagcgcgccccacggcgugguguuccuccacgucacguacgugcccgcccaggagaagaacuucaccaccgccccggccaucugccacgacgggaaggcccacuucccccgcgagggcgucuucguguccaacgggacccacugguucgugacgcagcggaacuucuacgagccccagaucaucaccaccgacaacaccuucgucagcggcaacugcgacguggugaucggcaucgucaacaacacgguguacgacccccugcagccggagcuggacuccuucaaggaggagcucgacaaguacuucaagaaccacaccagccccgacguggaccugggggacaucuccggcaucaacgccagcgucgugaacauccagaaggagaucgaccgccugaacgagguggccaagaaccucaacgagucccugaucgaccugcaggagcucgggaaguacgagcaguacaucaaguggcccugguacaucuggcugggcuucaucgccggccugaucgcgaucgucauggugaccaucaugcucugcugcaugaccagcugcugcuccugccugaaggggugcugcagcugcggcuccugcugcaaguucgacgaggacgacagcgagccggugcugaagggggucaagcuccacuacacgugauaauaggcuggagccucgguggccuagcuucuugccccuugggccuccccccagccccuccuccccuuccugcacccguacccccguggucuuugaauaaagucugagugggcggcaaaaaaaaaaaaaaaaaaaaaaaaaaaaaaaaaaaaaaaaaaaaaaaaaaaaaaaaaaaaaaaaaaaaaaaaaaaaaaaaaaaaaaaaaaaaaaaaaaaa

SEQ ID NO: 26176 - RNA, 4095 nt, Artificial Sequence
  SARS-CoV-2/Wuhan/WIV05/2019__EPI_ISL_402128 spike protein mRNA gc (1-1273)(K986P_V987P_ D614G)
gggaaauaagagagaaaagaagaguaagaagaaauauaagaccccggcgccgccaccauguucguguuccugguccuccugccccuggugagcucccagugcgugaaccucaccacccgcacgcagcugccgcccgccuacaccaacagcuucacccggggcgucuacuaccccgacaagguguuccgcuccagcgugcugcacuccacccaggaccucuuccugcccuucuucagcaacgucacgugguuccacgccauccacguguccgggaccaacggcaccaagcgguucgacaacccggugcugcccuucaacgacggggucuacuucgcgagcaccgagaaguccaacaucauccgcggcuggaucuucgggacgacccucgacagcaagacccagucccugcugaucgugaacaacgccaccaacguggucaucaaggugugcgaguuccaguucugcaacgaccccuuccucggcguguacuaccacaagaacaacaagagcuggauggaguccgaguuccgggucuacagcuccgccaacaacugcacguucgaguacgugagccagcccuuccugauggaccuggagggcaagcaggggaacuucaagaaccuccgcgaguucguguucaagaacaucgacggcuacuucaagaucuacuccaagcacaccccgaucaaccugguccgggaccugccccagggguucagcgcccucgagccccugguggaccugcccaucggcaucaacaucacccgcuuccagacccuccuggcccugcaccgguccuaccucacgccgggggacagcagcuccggcuggaccgcgggcgccgccgccuacuacgugggguaccugcagccccgcaccuuccugcucaaguacaacgagaacggcaccaucacggacgcggucgacugcgcccuggacccccugagcgagaccaagugcacccucaaguccuucaccguggagaaggggaucuaccagacgagcaacuuccgggugcagcccaccgaguccaucguccgcuucccgaacaucaccaaccugugccccuucggcgagguguucaacgccacccgguucgccagcgucuacgccuggaaccgcaagcggaucuccaacugcguggcggacuacagcgugcuguacaacuccgccagcuucuccacguucaagugcuacggcgucagccccaccaagcucaacgaccugugcuucaccaacguguacgccgacuccuucgugauccgcggggacgagguccggcagaucgcccccggccagaccgggaagaucgccgacuacaacuacaagcugccggacgacuucacgggcugcgugaucgcguggaacagcaacaaccucgacuccaaggucgggggcaacuacaacuaccuguaccgccuguuccgcaagagcaaccucaagcccuucgagcgggacaucuccaccgagaucuaccaggccggcagcacccccugcaacgggguggagggcuucaacugcuacuucccccugcaguccuacggguuccagccgaccaacggcgugggguaccagcccuaccggguggucgugcugagcuucgagcuccugcacgcccccgccacggugugcggccccaagaaguccaccaaccuggucaagaacaagugcgugaacuucaacuucaacggccucaccgggaccggcgugcugaccgagagcaacaagaaguuccugccguuccagcaguucgggcgcgacaucgccgacacgaccgacgcgguccgcgacccccagacccuggagauccucgacaucacccccugcagcuucggcgggguguccgugaucacgccgggcaccaacaccagcaaccaggucgccgugcuguaccagggcgugaacugcaccgagguccccguggccauccacgccgaccagcugacgcccaccuggcggguguacuccaccgggagcaacgucuuccagacccgcgccggcugccucaucggggcggagcacgugaacaacuccuacgagugcgacauccccaucggcgccggcaucugcgccagcuaccagacgcagaccaacuccccgcggcgcgcccggagcguggcgucccagagcaucaucgccuacaccaugucccugggggccgagaacagcgucgccuacuccaacaacagcaucgccauccccaccaacuucacgaucuccgugaccaccgagauccugcccgugagcaugaccaagacgagcgucgacugcaccauguacaucugcggcgacuccaccgagugcagcaaccuccugcugcaguacggguccuucugcacccagcucaaccgcgcgcugacgggcaucgccguggagcaggacaagaacacccaggagguguucgcccaggucaagcagaucuacaagacgcccccgaucaaggacuucgggggcuucaacuucagccagauccugcccgaccccuccaagcccagcaagcgguccuucaucgaggaccuccuguucaacaaggugacccuggccgacgccggcuucaucaagcaguacggggacugccucggcgacaucgcggcccgcgaccugaucugcgcccagaaguucaacgggcugaccgugcucccgccccugcugaccgacgagaugaucgcccaguacaccagcgcccuccuggcgggcaccaucacguccggguggaccuucggcgccggcgccgcccugcagauccccuucgcgaugcagauggccuaccgguucaacgggaucggcgucacccagaacgugcucuacgagaaccagaagcugaucgccaaccaguucaacagcgccaucgggaagauccaggacucccugagcuccaccgccagcgcgcucggcaagcugcaggacguggucaaccagaacgcccaggcccugaacacgcucgugaagcagcuguccagcaacuucggggccaucuccagcgugcugaacgacauccucucccgccuggacccgcccgaggccgagguccagaucgaccggcugaucaccggccgccuccagagccugcagaccuacgugacccagcagcugauccgggcggccgagauccgcgccagcgccaaccucgccgcgaccaagauguccgagugcgugcugggccagagcaagcgggucgacuucugcgggaagggcuaccaccugauguccuucccccagagcgcgccccacggggugguguuccuccacgucacguacgugcccgcccaggagaagaacuucaccaccgccccggccaucugccacgacggcaaggcccacuucccccgcgagggggucuucguguccaacggcacccacugguucgugacgcagcggaacuucuacgagccccagaucaucaccaccgacaacaccuucgucagcggcaacugcgacguggugaucgggaucgucaacaacacgguguacgacccccugcagccggagcuggacuccuucaaggaggagcucgacaaguacuucaagaaccacaccagccccgacguggaccugggcgacaucuccgggaucaacgccagcgucgugaacauccagaaggagaucgaccgccugaacgagguggccaagaaccucaacgagucccugaucgaccugcaggagcucggcaaguacgagcaguacaucaaguggcccugguacaucuggcugggcuucaucgccgggcugaucgcgaucgucauggugaccaucaugcucugcugcaugaccagcugcugcuccugccugaagggcugcugcagcugcggguccugcugcaaguucgacgaggacgacagcgagccggugcugaagggcgucaagcuccacuacacgugauaauaggcuggagccucgguggccuagcuucuugccccuugggccuccccccagccccuccuccccuuccugcacccguacccccguggucuuugaauaaagucugagugggcggcaaaaaaaaaaaaaaaaaaaaaaaaaaaaaaaaaaaaaaaaaaaaaaaaaaaaaaaaaaaaaaaaaaaaaaaaaaaaaaaaaaaaaaaaaaaaaaaaaaaa

SEQ ID NO: 26177 - RNA, 4095 nt, Artificial Sequence
  SARS-CoV-2/Wuhan/WIV05/2019__EPI_ISL_402128 spike protein mRNA gc (1-1273)(K986P_V987P_A222V_D614G)
gggaaauaagagagaaaagaagaguaagaagaaauauaagaccccggcgccgccaccauguucguguuccugguccuccugccccuggugagcucccagugcgugaaccucaccacccgcacgcagcugccgcccgccuacaccaacagcuucacccggggcgucuacuaccccgacaagguguuccgcuccagcgugcugcacuccacccaggaccucuuccugcccuucuucagcaacgucacgugguuccacgccauccacguguccgggaccaacggcaccaagcgguucgacaacccggugcugcccuucaacgacggggucuacuucgcgagcaccgagaaguccaacaucauccgcggcuggaucuucgggacgacccucgacagcaagacccagucccugcugaucgugaacaacgccaccaacguggucaucaaggugugcgaguuccaguucugcaacgaccccuuccucggcguguacuaccacaagaacaacaagagcuggauggaguccgaguuccgggucuacagcuccgccaacaacugcacguucgaguacgugagccagcccuuccugauggaccuggagggcaagcaggggaacuucaagaaccuccgcgaguucguguucaagaacaucgacggcuacuucaagaucuacuccaagcacaccccgaucaaccugguccgggaccugccccagggguucagcgugcucgagccccugguggaccugcccaucggcaucaacaucacccgcuuccagacccuccuggcccugcaccgguccuaccucacgccgggggacagcagcuccggcuggaccgccggcgcggccgccuacuacgucggguaccugcagccccgcaccuuccugcucaaguacaacgagaacggcaccaucacggacgccguggacugcgcgcuggacccccugagcgagaccaagugcacccucaaguccuucaccguggagaaggggaucuaccagacgagcaacuuccggguccagcccaccgaguccaucgugcgcuucccgaacaucaccaaccugugccccuucggcgaggucuucaacgccacccgguucgccagcguguacgccuggaaccgcaagcggaucuccaacugcguggccgacuacagcguccuguacaacuccgcgagcuucuccacguucaagugcuacggcgugagccccaccaagcucaacgaccugugcuucaccaacguguacgccgacuccuucgucauccgcggggacgaggugcggcagaucgcccccggccagaccgggaagaucgccgacuacaacuacaagcugccggacgacuucacgggcugcgugaucgccuggaacagcaacaaccucgacuccaaggucgggggcaacuacaacuaccuguaccgccuguuccgcaagagcaaccucaagcccuucgagcgggacaucuccaccgagaucuaccaggcgggcagcacccccugcaacgggguggagggcuucaacugcuacuucccccugcaguccuacggguuccagccgaccaacggcgugggguaccagcccuaccgggucguggugcugagcuucgagcuccugcacgcccccgccacggucugcggccccaagaaguccaccaaccuggugaagaacaagugcgugaacuucaacuucaacggccucaccgggaccggcguccugaccgagagcaacaagaaguuccugccguuccagcaguucgggcgcgacaucgccgacacgaccgacgccgugcgcgacccccagacccuggagauccucgacaucacccccugcagcuucggcgggguguccgucaucacgccgggcaccaacaccagcaaccagguggcggugcuguaccagggcgucaacugcaccgaggugcccguggccauccacgccgaccagcugacgcccaccuggcgggucuacuccaccgggagcaacguguuccagacccgcgccggcugccucaucggggccgagcacgugaacaacuccuacgagugcgacauccccaucggcgcgggcaucugcgccagcuaccagacgcagaccaacuccccgcggcgcgcccggagcgucgccucccagagcaucaucgcguacaccaugucccugggggccgagaacagcguggccuacuccaacaacagcaucgccauccccaccaacuucacgaucuccgugaccaccgagauccugcccgucagcaugaccaagacgagcguggacugcaccauguacaucugcggcgacuccaccgagugcagcaaccuccugcugcaguacggguccuucugcacccagcucaaccgcgcccugacgggcaucgcgguggagcaggacaagaacacccaggaggucuucgcccaggugaagcagaucuacaagacgcccccgaucaaggacuucgggggcuucaacuucagccagauccugcccgaccccuccaagcccagcaagcgguccuucaucgaggaccuccuguucaacaaggugacccuggccgacgccggcuucaucaagcaguacggggacugccucggcgacaucgccgcgcgcgaccugaucugcgcccagaaguucaacgggcugaccguccucccgccccugcugaccgacgagaugaucgcccaguacaccagcgcccuccuggccggcaccaucacguccggguggaccuucggcgcgggcgccgcccugcagauccccuucgccaugcagauggcguaccgguucaacgggaucggcgugacccagaacgugcucuacgagaaccagaagcugaucgccaaccaguucaacagcgccaucgggaagauccaggacucccugagcuccaccgccagcgcccucggcaagcugcaggacgucgugaaccagaacgcgcaggcccugaacacgcucgugaagcagcuguccagcaacuucggggccaucuccagcguccugaacgacauccucucccgccuggacccgcccgaggccgaggugcagaucgaccggcugaucaccggccgccuccagagccugcagaccuacgugacccagcagcugauccgggccgcggagauccgcgccagcgccaaccucgccgccaccaagauguccgagugcguccugggccagagcaagcggguggacuucugcgggaagggcuaccaccugauguccuucccccagagcgcgccccacgggguggucuuccuccacgugacguacguccccgcccaggagaagaacuucaccaccgccccggccaucugccacgacggcaaggcgcacuucccccgcgaggggguguucguguccaacggcacccacugguucgucacgcagcggaacuucuacgagccccagaucaucaccaccgacaacaccuucgugagcggcaacugcgacguggucaucgggaucgugaacaacacgguguacgacccccugcagccggagcuggacuccuucaaggaggagcucgacaaguacuucaagaaccacaccagccccgacgucgaccugggcgacaucuccgggaucaacgccagcguggugaacauccagaaggagaucgaccgccugaacgaggucgccaagaaccucaacgagucccugaucgaccugcaggagcucggcaaguacgagcaguacaucaaguggcccugguacaucuggcugggcuucaucgccgggcugaucgccaucgugauggugaccaucaugcucugcugcaugaccagcugcugcuccugccugaagggcugcugcagcugcggguccugcugcaaguucgacgaggacgacagcgagccgguccugaagggcgugaagcuccacuacacgugauaauaggcuggagccucgguggccuagcuucuugccccuugggccuccccccagccccuccuccccuuccugcacccguacccccguggucuuugaauaaagucugagugggcggcaaaaaaaaaaaaaaaaaaaaaaaaaaaaaaaaaaaaaaaaaaaaaaaaaaaaaaaaaaaaaaaaaaaaaaaaaaaaaaaaaaaaaaaaaaaaaaaaaaaa

SEQ ID NO: 26178 - RNA, 4095 nt, Artificial Sequence
  SARS-CoV-2/Wuhan/WIV05/2019__EPI_ISL_402128 spike protein mRNA gc (1-1273)(K986P_V987P_N439K_D614G)
gggaaauaagagagaaaagaagaguaagaagaaauauaagaccccggcgccgccaccauguucguguuccugguccuccugccccuggugagcucccagugcgugaaccucaccacccgcacgcagcugccgcccgccuacaccaacagcuucacccggggcgucuacuaccccgacaagguguuccgcuccagcgugcugcacuccacccaggaccucuuccugcccuucuucagcaacgucacgugguuccacgccauccacguguccgggaccaacggcaccaagcgguucgacaacccggugcugcccuucaacgacggggucuacuucgcgagcaccgagaaguccaacaucauccgcggcuggaucuucgggacgacccucgacagcaagacccagucccugcugaucgugaacaacgccaccaacguggucaucaaggugugcgaguuccaguucugcaacgaccccuuccucggcguguacuaccacaagaacaacaagagcuggauggaguccgaguuccgggucuacagcuccgccaacaacugcacguucgaguacgugagccagcccuuccugauggaccuggagggcaagcaggggaacuucaagaaccuccgcgaguucguguucaagaacaucgacggcuacuucaagaucuacuccaagcacaccccgaucaaccugguccgggaccugccccagggguucagcgcccucgagccccugguggaccugcccaucggcaucaacaucacccgcuuccagacccuccuggcccugcaccgguccuaccucacgccgggggacagcagcuccggcuggaccgcgggcgccgccgccuacuacgugggguaccugcagccccgcaccuuccugcucaaguacaacgagaacggcaccaucacggacgcggucgacugcgcccuggacccccugagcgagaccaagugcacccucaaguccuucaccguggagaaggggaucuaccagacgagcaacuuccgggugcagcccaccgaguccaucguccgcuucccgaacaucaccaaccugugccccuucggcgagguguucaacgccacccgguucgccagcgucuacgccuggaaccgcaagcggaucuccaacugcguggcggacuacagcgugcuguacaacuccgccagcuucuccacguucaagugcuacggcgucagccccaccaagcucaacgaccugugcuucaccaacguguacgccgacuccuucgugauccgcggggacgagguccggcagaucgcccccggccagaccgggaagaucgccgacuacaacuacaagcugccggacgacuucacgggcugcgugaucgcguggaacagcaagaaccucgacuccaaggucgggggcaacuacaacuaccuguaccgccuguuccgcaagagcaaccucaagcccuucgagcgggacaucuccaccgagaucuaccaggccggcagcacccccugcaacgggguggagggcuucaacugcuacuucccccugcaguccuacggguuccagccgaccaacggcgugggguaccagcccuaccggguggucgugcugagcuucgagcuccugcacgcccccgccacggugugcggccccaagaaguccaccaaccuggucaagaacaagugcgugaacuucaacuucaacggccucaccgggaccggcgugcugaccgagagcaacaagaaguuccugccguuccagcaguucgggcgcgacaucgccgacacgaccgacgcgguccgcgacccccagacccuggagauccucgacaucacccccugcagcuucggcgggguguccgugaucacgccgggcaccaacaccagcaaccaggucgccgugcuguaccagggcgugaacugcaccgagguccccguggccauccacgccgaccagcugacgcccaccuggcggguguacuccaccgggagcaacgucuuccagacccgcgccggcugccucaucggggcggagcacgugaacaacuccuacgagugcgacauccccaucggcgccggcaucugcgccagcuaccagacgcagaccaacuccccgcggcgcgcccggagcguggcgucccagagcaucaucgccuacaccaugucccugggggccgagaacagcgucgccuacuccaacaacagcaucgccauccccaccaacuucacgaucuccgugaccaccgagauccugcccgugagcaugaccaagacgagcgucgacugcaccauguacaucugcggcgacuccaccgagugcagcaaccuccugcugcaguacggguccuucugcacccagcucaaccgcgcgcugacgggcaucgccguggagcaggacaagaacacccaggagguguucgcccaggucaagcagaucuacaagacgcccccgaucaaggacuucgggggcuucaacuucagccagauccugcccgaccccuccaagcccagcaagcgguccuucaucgaggaccuccuguucaacaaggugacccuggccgacgccggcuucaucaagcaguacggggacugccucggcgacaucgcggcccgcgaccugaucugcgcccagaaguucaacgggcugaccgugcucccgccccugcugaccgacgagaugaucgcccaguacaccagcgcccuccuggcgggcaccaucacguccggguggaccuucggcgccggcgccgcccugcagauccccuucgcgaugcagauggccuaccgguucaacgggaucggcgucacccagaacgugcucuacgagaaccagaagcugaucgccaaccaguucaacagcgccaucgggaagauccaggacucccugagcuccaccgccagcgcgcucggcaagcugcaggacguggucaaccagaacgcccaggcccugaacacgcucgugaagcagcuguccagcaacuucggggccaucuccagcgugcugaacgacauccucucccgccuggacccgcccgaggccgagguccagaucgaccggcugaucaccggccgccuccagagccugcagaccuacgugacccagcagcugauccgggcggccgagauccgcgccagcgccaaccucgccgcgaccaagauguccgagugcgugcugggccagagcaagcgggucgacuucugcgggaagggcuaccaccugauguccuucccccagagcgcgccccacggggugguguuccuccacgucacguacgugcccgcccaggagaagaacuucaccaccgccccggccaucugccacgacggcaaggcccacuucccccgcgagggggucuucguguccaacggcacccacugguucgugacgcagcggaacuucuacgagccccagaucaucaccaccgacaacaccuucgucagcggcaacugcgacguggugaucgggaucgucaacaacacgguguacgacccccugcagccggagcuggacuccuucaaggaggagcucgacaaguacuucaagaaccacaccagccccgacguggaccugggcgacaucuccgggaucaacgccagcgucgugaacauccagaaggagaucgaccgccugaacgagguggccaagaaccucaacgagucccugaucgaccugcaggagcucggcaaguacgagcaguacaucaaguggcccugguacaucuggcugggcuucaucgccgggcugaucgcgaucgucauggugaccaucaugcucugcugcaugaccagcugcugcuccugccugaagggcugcugcagcugcggguccugcugcaaguucgacgaggacgacagcgagccggugcugaagggcgucaagcuccacuacacgugauaauaggcuggagccucgguggccuagcuucuugccccuugggccuccccccagccccuccuccccuuccugcacccguacccccguggucuuugaauaaagucugagugggcggcaaaaaaaaaaaaaaaaaaaaaaaaaaaaaaaaaaaaaaaaaaaaaaaaaaaaaaaaaaaaaaaaaaaaaaaaaaaaaaaaaaaaaaaaaaaaaaaaaaaa

SEQ ID NO: 26179 - RNA, 4095 nt, Artificial Sequence
  SARS-CoV-2/Wuhan/WIV05/2019__EPI_ISL_402128 spike protein mRNA gc (1-1273)(K986P_V987P_S477N_D614G)
gggaaauaagagagaaaagaagaguaagaagaaauauaagaccccggcgccgccaccauguucguguuccugguccuccugccccuggugagcucccagugcgugaaccucaccacccgcacgcagcugccgcccgccuacaccaacagcuucacccggggcgucuacuaccccgacaagguguuccgcuccagcgugcugcacuccacccaggaccucuuccugcccuucuucagcaacgucacgugguuccacgccauccacguguccgggaccaacggcaccaagcgguucgacaacccggugcugcccuucaacgacggggucuacuucgcgagcaccgagaaguccaacaucauccgcggcuggaucuucgggacgacccucgacagcaagacccagucccugcugaucgugaacaacgccaccaacguggucaucaaggugugcgaguuccaguucugcaacgaccccuuccucggcguguacuaccacaagaacaacaagagcuggauggaguccgaguuccgggucuacagcuccgccaacaacugcacguucgaguacgugagccagcccuuccugauggaccuggagggcaagcaggggaacuucaagaaccuccgcgaguucguguucaagaacaucgacggcuacuucaagaucuacuccaagcacaccccgaucaaccugguccgggaccugccccagggguucagcgcccucgagccccugguggaccugcccaucggcaucaacaucacccgcuuccagacccuccuggcccugcaccgguccuaccucacgccgggggacagcagcuccggcuggaccgcgggcgccgccgccuacuacgugggguaccugcagccccgcaccuuccugcucaaguacaacgagaacggcaccaucacggacgcggucgacugcgcccuggacccccugagcgagaccaagugcacccucaaguccuucaccguggagaaggggaucuaccagacgagcaacuuccgggugcagcccaccgaguccaucguccgcuucccgaacaucaccaaccugugccccuucggcgagguguucaacgccacccgguucgccagcgucuacgccuggaaccgcaagcggaucuccaacugcguggcggacuacagcgugcuguacaacuccgccagcuucuccacguucaagugcuacggcgucagccccaccaagcucaacgaccugugcuucaccaacguguacgccgacuccuucgugauccgcggggacgagguccggcagaucgcccccggccagaccgggaagaucgccgacuacaacuacaagcugccggacgacuucacgggcugcgugaucgcguggaacagcaacaaccucgacuccaaggucgggggcaacuacaacuaccuguaccgccuguuccgcaagagcaaccucaagcccuucgagcgggacaucuccaccgagaucuaccaggccggcaacacccccugcaacgggguggagggcuucaacugcuacuucccccugcagagcuacggguuccagccgaccaacggcgugggguaccagcccuaccggguggucgugcuguccuucgagcuccugcacgcccccgccacggugugcggccccaagaaguccaccaaccuggucaagaacaagugcgugaacuucaacuucaacggccucaccgggaccggcgugcugaccgagagcaacaagaaguuccugccguuccagcaguucgggcgcgacaucgccgacacgaccgacgcgguccgcgacccccagacccuggagauccucgacaucacccccugcagcuucggcggggugagcgugaucacgccgggcaccaacaccuccaaccaggucgccgugcuguaccagggcgugaacugcaccgagguccccguggccauccacgccgaccagcugacgcccaccuggcggguguacagcaccggguccaacgucuuccagacccgcgccggcugccucaucggggcggagcacgugaacaacagcuacgagugcgacauccccaucggcgccggcaucugcgccuccuaccagacgcagaccaacagcccgcggcgcgcccgguccguggcgagccaguccaucaucgccuacaccaugagccugggggccgagaacuccgucgccuacagcaacaacuccaucgccauccccaccaacuucacgaucagcgugaccaccgagauccugcccguguccaugaccaagacgagcgucgacugcaccauguacaucugcggcgacagcaccgagugcuccaaccuccugcugcaguacgggagcuucugcacccagcucaaccgcgcgcugacgggcaucgccguggagcaggacaagaacacccaggagguguucgcccaggucaagcagaucuacaagacgcccccgaucaaggacuucgggggcuucaacuucucccagauccugcccgaccccagcaagcccuccaagcggagcuucaucgaggaccuccuguucaacaaggugacccuggccgacgccggcuucaucaagcaguacggggacugccucggcgacaucgcggcccgcgaccugaucugcgcccagaaguucaacgggcugaccgugcucccgccccugcugaccgacgagaugaucgcccaguacaccuccgcccuccuggcgggcaccaucacgagcggguggaccuucggcgccggcgccgcccugcagauccccuucgcgaugcagauggccuaccgguucaacgggaucggcgucacccagaacgugcucuacgagaaccagaagcugaucgccaaccaguucaacuccgccaucgggaagauccaggacagccuguccagcaccgccuccgcgcucggcaagcugcaggacguggucaaccagaacgcccaggcccugaacacgcucgugaagcagcugagcuccaacuucggggccaucagcuccgugcugaacgacauccucagccgccuggacccgcccgaggccgagguccagaucgaccggcugaucaccggccgccuccagucccugcagaccuacgugacccagcagcugauccgggcggccgagauccgcgccagcgccaaccucgccgcgaccaagaugagcgagugcgugcugggccaguccaagcgggucgacuucugcgggaagggcuaccaccugaugagcuucccccaguccgcgccccacggggugguguuccuccacgucacguacgugcccgcccaggagaagaacuucaccaccgccccggccaucugccacgacggcaaggcccacuucccccgcgagggggucuucgugagcaacggcacccacugguucgugacgcagcggaacuucuacgagccccagaucaucaccaccgacaacaccuucgucuccggcaacugcgacguggugaucgggaucgucaacaacacgguguacgacccccugcagccggagcuggacagcuucaaggaggagcucgacaaguacuucaagaaccacaccucccccgacguggaccugggcgacaucagcgggaucaacgccuccgucgugaacauccagaaggagaucgaccgccugaacgagguggccaagaaccucaacgagagccugaucgaccugcaggagcucggcaaguacgagcaguacaucaaguggcccugguacaucuggcugggcuucaucgccgggcugaucgcgaucgucauggugaccaucaugcucugcugcaugaccuccugcugcagcugccugaagggcugcugcuccugcgggagcugcugcaaguucgacgaggacgacuccgagccggugcugaagggcgucaagcuccacuacacgugauaauaggcuggagccucgguggccuagcuucuugccccuugggccuccccccagccccuccuccccuuccugcacccguacccccguggucuuugaauaaagucugagugggcggcaaaaaaaaaaaaaaaaaaaaaaaaaaaaaaaaaaaaaaaaaaaaaaaaaaaaaaaaaaaaaaaaaaaaaaaaaaaaaaaaaaaaaaaaaaaaaaaaaaaa

SEQ ID NO: 26180 - RNA, 4095 nt, Artificial Sequence
  SARS-CoV-2/Wuhan/WIV05/2019__EPI_ISL_402128 spike protein mRNA gc (1-1273)(K986P_V987P_N501Y_D614G)
gggaaauaagagagaaaagaagaguaagaagaaauauaagaccccggcgccgccaccauguucguguuccugguccuccugccccuggugagcucccagugcgugaaccucaccacccgcacgcagcugccgcccgccuacaccaacagcuucacccggggcgucuacuaccccgacaagguguuccgcuccagcgugcugcacuccacccaggaccucuuccugcccuucuucagcaacgucacgugguuccacgccauccacguguccgggaccaacggcaccaagcgguucgacaacccggugcugcccuucaacgacggggucuacuucgcgagcaccgagaaguccaacaucauccgcggcuggaucuucgggacgacccucgacagcaagacccagucccugcugaucgugaacaacgccaccaacguggucaucaaggugugcgaguuccaguucugcaacgaccccuuccucggcguguacuaccacaagaacaacaagagcuggauggaguccgaguuccgggucuacagcuccgccaacaacugcacguucgaguacgugagccagcccuuccugauggaccuggagggcaagcaggggaacuucaagaaccuccgcgaguucguguucaagaacaucgacggcuacuucaagaucuacuccaagcacaccccgaucaaccugguccgggaccugccccagggguucagcgcccucgagccccugguggaccugcccaucggcaucaacaucacccgcuuccagacccuccuggcccugcaccgguccuaccucacgccgggggacagcagcuccggcuggaccgcgggcgccgccgccuacuacgugggguaccugcagccccgcaccuuccugcucaaguacaacgagaacggcaccaucacggacgcggucgacugcgcccuggacccccugagcgagaccaagugcacccucaaguccuucaccguggagaaggggaucuaccagacgagcaacuuccgggugcagcccaccgaguccaucguccgcuucccgaacaucaccaaccugugccccuucggcgagguguucaacgccacccgguucgccagcgucuacgccuggaaccgcaagcggaucuccaacugcguggcggacuacagcgugcuguacaacuccgccagcuucuccacguucaagugcuacggcgucagccccaccaagcucaacgaccugugcuucaccaacguguacgccgacuccuucgugauccgcggggacgagguccggcagaucgcccccggccagaccgggaagaucgccgacuacaacuacaagcugccggacgacuucacgggcugcgugaucgcguggaacagcaacaaccucgacuccaaggucgggggcaacuacaacuaccuguaccgccuguuccgcaagagcaaccucaagcccuucgagcgggacaucuccaccgagaucuaccaggccggcagcacccccugcaacgggguggagggcuucaacugcuacuucccccugcaguccuacggguuccagccgaccuacggcgugggguaccagcccuaccggguggucgugcugagcuucgagcuccugcacgcccccgccacggugugcggccccaagaaguccaccaaccuggucaagaacaagugcgugaacuucaacuucaacggccucaccgggaccggcgugcugaccgagagcaacaagaaguuccugccguuccagcaguucgggcgcgacaucgccgacacgaccgacgcgguccgcgacccccagacccuggagauccucgacaucacccccugcagcuucggcgggguguccgugaucacgccgggcaccaacaccagcaaccaggucgccgugcuguaccagggcgugaacugcaccgagguccccguggccauccacgccgaccagcugacgcccaccuggcggguguacuccaccgggagcaacgucuuccagacccgcgccggcugccucaucggggcggagcacgugaacaacuccuacgagugcgacauccccaucggcgccggcaucugcgccagcuaccagacgcagaccaacuccccgcggcgcgcccggagcguggcgucccagagcaucaucgccuacaccaugucccugggggccgagaacagcgucgccuacuccaacaacagcaucgccauccccaccaacuucacgaucuccgugaccaccgagauccugcccgugagcaugaccaagacgagcgucgacugcaccauguacaucugcggcgacuccaccgagugcagcaaccuccugcugcaguacggguccuucugcacccagcucaaccgcgcgcugacgggcaucgccguggagcaggacaagaacacccaggagguguucgcccaggucaagcagaucuacaagacgcccccgaucaaggacuucgggggcuucaacuucagccagauccugcccgaccccuccaagcccagcaagcgguccuucaucgaggaccuccuguucaacaaggugacccuggccgacgccggcuucaucaagcaguacggggacugccucggcgacaucgcggcccgcgaccugaucugcgcccagaaguucaacgggcugaccgugcucccgccccugcugaccgacgagaugaucgcccaguacaccagcgcccuccuggcgggcaccaucacguccggguggaccuucggcgccggcgccgcccugcagauccccuucgcgaugcagauggccuaccgguucaacgggaucggcgucacccagaacgugcucuacgagaaccagaagcugaucgccaaccaguucaacagcgccaucgggaagauccaggacucccugagcuccaccgccagcgcgcucggcaagcugcaggacguggucaaccagaacgcccaggcccugaacacgcucgugaagcagcuguccagcaacuucggggccaucuccagcgugcugaacgacauccucucccgccuggacccgcccgaggccgagguccagaucgaccggcugaucaccggccgccuccagagccugcagaccuacgugacccagcagcugauccgggcggccgagauccgcgccagcgccaaccucgccgcgaccaagauguccgagugcgugcugggccagagcaagcgggucgacuucugcgggaagggcuaccaccugauguccuucccccagagcgcgccccacggggugguguuccuccacgucacguacgugcccgcccaggagaagaacuucaccaccgccccggccaucugccacgacggcaaggcccacuucccccgcgagggggucuucguguccaacggcacccacugguucgugacgcagcggaacuucuacgagccccagaucaucaccaccgacaacaccuucgucagcggcaacugcgacguggugaucgggaucgucaacaacacgguguacgacccccugcagccggagcuggacuccuucaaggaggagcucgacaaguacuucaagaaccacaccagccccgacguggaccugggcgacaucuccgggaucaacgccagcgucgugaacauccagaaggagaucgaccgccugaacgagguggccaagaaccucaacgagucccugaucgaccugcaggagcucggcaaguacgagcaguacaucaaguggcccugguacaucuggcugggcuucaucgccgggcugaucgcgaucgucauggugaccaucaugcucugcugcaugaccagcugcugcuccugccugaagggcugcugcagcugcggguccugcugcaaguucgacgaggacgacagcgagccggugcugaagggcgucaagcuccacuacacgugauaauaggcuggagccucgguggccuagcuucuugccccuugggccuccccccagccccuccuccccuuccugcacccguacccccguggucuuugaauaaagucugagugggcggcaaaaaaaaaaaaaaaaaaaaaaaaaaaaaaaaaaaaaaaaaaaaaaaaaaaaaaaaaaaaaaaaaaaaaaaaaaaaaaaaaaaaaaaaaaaaaaaaaaaa

SEQ ID NO: 26181 - RNA, 4089 nt, Artificial Sequence
  SARS-CoV-2/Wuhan/WIV05/2019__EPI_ISL_402128 spike protein mRNA gc (1-1273)(K986P_V987P_H69del_V70del_D614G)
gggaaauaagagagaaaagaagaguaagaagaaauauaagaccccggcgccgccaccauguucguguuccugguccuccugccccuggugagcucccagugcgugaaccucaccacccgcacgcagcugccgcccgccuacaccaacagcuucacccggggcgucuacuaccccgacaagguguuccgcuccagcgugcugcacuccacccaggaccucuuccugcccuucuucagcaacgucacgugguuccacgccaucuccgggaccaacggcaccaagcgguucgacaacccggugcugcccuucaacgacgggguguacuucgcgagcaccgagaaguccaacaucauccgcggcuggaucuucgggacgacccucgacagcaagacccagucccugcugaucgucaacaacgccaccaacguggugaucaaggucugcgaguuccaguucugcaacgaccccuuccucggcguguacuaccacaagaacaacaagagcuggauggaguccgaguuccggguguacagcuccgccaacaacugcacguucgaguacgucagccagcccuuccugauggaccuggagggcaagcaggggaacuucaagaaccuccgcgaguucguguucaagaacaucgacggcuacuucaagaucuacuccaagcacaccccgaucaaccuggugcgggaccugccccagggguucagcgcccucgagccccuggucgaccugcccaucggcaucaacaucacccgcuuccagacccuccuggcccugcaccgguccuaccucacgccgggggacagcagcuccggcuggaccgcgggcgccgccgccuacuacgugggguaccugcagccccgcaccuuccugcucaaguacaacgagaacggcaccaucacggacgcgguggacugcgcccuggacccccugagcgagaccaagugcacccucaaguccuucaccgucgagaaggggaucuaccagacgagcaacuuccgggugcagcccaccgaguccaucgugcgcuucccgaacaucaccaaccugugccccuucggcgaggucuucaacgccacccgguucgccagcguguacgccuggaaccgcaagcggaucuccaacugcgucgcggacuacagcgugcuguacaacuccgccagcuucuccacguucaagugcuacggcgugagccccaccaagcucaacgaccugugcuucaccaacgucuacgccgacuccuucgugauccgcggggacgaggugcggcagaucgcccccggccagaccgggaagaucgccgacuacaacuacaagcugccggacgacuucacgggcugcgucaucgcguggaacagcaacaaccucgacuccaaggucgggggcaacuacaacuaccuguaccgccuguuccgcaagagcaaccucaagcccuucgagcgggacaucuccaccgagaucuaccaggccggcagcacccccugcaacgggguggagggcuucaacugcuacuucccccugcaguccuacggguuccagccgaccaacggcgugggguaccagcccuaccggguggugguccugagcuucgagcuccugcacgcccccgccacggugugcggccccaagaaguccaccaaccuggugaagaacaagugcgucaacuucaacuucaacggccucaccgggaccggcgugcugaccgagagcaacaagaaguuccugccguuccagcaguucgggcgcgacaucgccgacacgaccgacgcggugcgcgacccccagacccuggagauccucgacaucacccccugcagcuucggcggggucuccgugaucacgccgggcaccaacaccagcaaccagguggccguccuguaccagggcgugaacugcaccgaggugcccgucgccauccacgccgaccagcugacgcccaccuggcggguguacuccaccgggagcaacguguuccagacccgcgccggcugccucaucggggcggagcacgucaacaacuccuacgagugcgacauccccaucggcgccggcaucugcgccagcuaccagacgcagaccaacuccccgcggcgcgcccggagcguggcgucccagagcaucaucgccuacaccaugucccugggggccgagaacagcguggccuacuccaacaacagcaucgccauccccaccaacuucacgaucuccgucaccaccgagauccugcccgugagcaugaccaagacgagcguggacugcaccauguacaucugcggcgacuccaccgagugcagcaaccuccugcugcaguacggguccuucugcacccagcucaaccgcgcgcugacgggcaucgccgucgagcaggacaagaacacccaggagguguucgcccaggugaagcagaucuacaagacgcccccgaucaaggacuucgggggcuucaacuucagccagauccugcccgaccccuccaagcccagcaagcgguccuucaucgaggaccuccuguucaacaaggucacccuggccgacgccggcuucaucaagcaguacggggacugccucggcgacaucgcggcccgcgaccugaucugcgcccagaaguucaacgggcugaccgugcucccgccccugcugaccgacgagaugaucgcccaguacaccagcgcccuccuggcgggcaccaucacguccggguggaccuucggcgccggcgccgcccugcagauccccuucgcgaugcagauggccuaccgguucaacgggaucggcgugacccagaacguccucuacgagaaccagaagcugaucgccaaccaguucaacagcgccaucgggaagauccaggacucccugagcuccaccgccagcgcgcucggcaagcugcaggacguggugaaccagaacgcccaggcccugaacacgcucgucaagcagcuguccagcaacuucggggccaucuccagcgugcugaacgacauccucucccgccuggacccgcccgaggccgaggugcagaucgaccggcugaucaccggccgccuccagagccugcagaccuacgucacccagcagcugauccgggcggccgagauccgcgccagcgccaaccucgccgcgaccaagauguccgagugcgugcugggccagagcaagcggguggacuucugcgggaagggcuaccaccugauguccuucccccagagcgcgccccacggggucguguuccuccacgugacguacguccccgcccaggagaagaacuucaccaccgccccggccaucugccacgacggcaaggcccacuucccccgcgaggggguguucgucuccaacggcacccacugguucgugacgcagcggaacuucuacgagccccagaucaucaccaccgacaacaccuucgugagcggcaacugcgacgucgugaucgggaucgugaacaacacggucuacgacccccugcagccggagcuggacuccuucaaggaggagcucgacaaguacuucaagaaccacaccagccccgacguggaccugggcgacaucuccgggaucaacgccagcguggucaacauccagaaggagaucgaccgccugaacgagguggccaagaaccucaacgagucccugaucgaccugcaggagcucggcaaguacgagcaguacaucaaguggcccugguacaucuggcugggcuucaucgccgggcugaucgcgaucgugauggucaccaucaugcucugcugcaugaccagcugcugcuccugccugaagggcugcugcagcugcggguccugcugcaaguucgacgaggacgacagcgagccggugcugaagggcgugaagcuccacuacacgugauaauaggcuggagccucgguggccuagcuucuugccccuugggccuccccccagccccuccuccccuuccugcacccguacccccguggucuuugaauaaagucugagugggcggcaaaaaaaaaaaaaaaaaaaaaaaaaaaaaaaaaaaaaaaaaaaaaaaaaaaaaaaaaaaaaaaaaaaaaaaaaaaaaaaaaaaaaaaaaaaaaaaaaaaa

SEQ ID NO: 26182 - RNA, 4095 nt, Artificial Sequence
  SARS-CoV-2/Wuhan/WIV05/2019__EPI_ISL_402128 spike protein mRNA gc (1-1273)(K986P_V987P_Y453F_D614G)
gggaaauaagagagaaaagaagaguaagaagaaauauaagaccccggcgccgccaccauguucguguuccugguccuccugccccuggugagcucccagugcgugaaccucaccacccgcacgcagcugccgcccgccuacaccaacagcuucacccggggcgucuacuaccccgacaagguguuccgcuccagcgugcugcacuccacccaggaccucuuccugcccuucuucagcaacgucacgugguuccacgccauccacguguccgggaccaacggcaccaagcgguucgacaacccggugcugcccuucaacgacggggucuacuucgcgagcaccgagaaguccaacaucauccgcggcuggaucuucgggacgacccucgacagcaagacccagucccugcugaucgugaacaacgccaccaacguggucaucaaggugugcgaguuccaguucugcaacgaccccuuccucggcguguacuaccacaagaacaacaagagcuggauggaguccgaguuccgggucuacagcuccgccaacaacugcacguucgaguacgugagccagcccuuccugauggaccuggagggcaagcaggggaacuucaagaaccuccgcgaguucguguucaagaacaucgacggcuacuucaagaucuacuccaagcacaccccgaucaaccugguccgggaccugccccagggguucagcgcccucgagccccugguggaccugcccaucggcaucaacaucacccgcuuccagacccuccuggcccugcaccgguccuaccucacgccgggggacagcagcuccggcuggaccgcgggcgccgccgccuacuacgugggguaccugcagccccgcaccuuccugcucaaguacaacgagaacggcaccaucacggacgcggucgacugcgcccuggacccccugagcgagaccaagugcacccucaaguccuucaccguggagaaggggaucuaccagacgagcaacuuccgggugcagcccaccgaguccaucguccgcuucccgaacaucaccaaccugugccccuucggcgagguguucaacgccacccgguucgccagcgucuacgccuggaaccgcaagcggaucuccaacugcguggcggacuacagcgugcuguacaacuccgccagcuucuccacguucaagugcuacggcgucagccccaccaagcucaacgaccugugcuucaccaacguguacgccgacuccuucgugauccgcggggacgagguccggcagaucgcccccggccagaccgggaagaucgccgacuacaacuacaagcugccggacgacuucacgggcugcgugaucgcguggaacagcaacaaccucgacuccaaggucgggggcaacuacaacuaccuguuccgccuguuccgcaagagcaaccucaagcccuucgagcgggacaucuccaccgagaucuaccaggccggcagcacccccugcaacgggguggagggcuucaacugcuacuucccccugcaguccuacggguuccagccgaccaacggcgugggguaccagcccuaccggguggucgugcugagcuucgagcuccugcacgcccccgccacggugugcggccccaagaaguccaccaaccuggucaagaacaagugcgugaacuucaacuucaacggccucaccgggaccggcgugcugaccgagagcaacaagaaguuccugccguuccagcaguucgggcgcgacaucgccgacacgaccgacgcgguccgcgacccccagacccuggagauccucgacaucacccccugcagcuucggcgggguguccgugaucacgccgggcaccaacaccagcaaccaggucgccgugcuguaccagggcgugaacugcaccgagguccccguggccauccacgccgaccagcugacgcccaccuggcggguguacuccaccgggagcaacgucuuccagacccgcgccggcugccucaucggggcggagcacgugaacaacuccuacgagugcgacauccccaucggcgccggcaucugcgccagcuaccagacgcagaccaacuccccgcggcgcgcccggagcguggcgucccagagcaucaucgccuacaccaugucccugggggccgagaacagcgucgccuacuccaacaacagcaucgccauccccaccaacuucacgaucuccgugaccaccgagauccugcccgugagcaugaccaagacgagcgucgacugcaccauguacaucugcggcgacuccaccgagugcagcaaccuccugcugcaguacggguccuucugcacccagcucaaccgcgcgcugacgggcaucgccguggagcaggacaagaacacccaggagguguucgcccaggucaagcagaucuacaagacgcccccgaucaaggacuucgggggcuucaacuucagccagauccugcccgaccccuccaagcccagcaagcgguccuucaucgaggaccuccuguucaacaaggugacccuggccgacgccggcuucaucaagcaguacggggacugccucggcgacaucgcggcccgcgaccugaucugcgcccagaaguucaacgggcugaccgugcucccgccccugcugaccgacgagaugaucgcccaguacaccagcgcccuccuggcgggcaccaucacguccggguggaccuucggcgccggcgccgcccugcagauccccuucgcgaugcagauggccuaccgguucaacgggaucggcgucacccagaacgugcucuacgagaaccagaagcugaucgccaaccaguucaacagcgccaucgggaagauccaggacucccugagcuccaccgccagcgcgcucggcaagcugcaggacguggucaaccagaacgcccaggcccugaacacgcucgugaagcagcuguccagcaacuucggggccaucuccagcgugcugaacgacauccucucccgccuggacccgcccgaggccgagguccagaucgaccggcugaucaccggccgccuccagagccugcagaccuacgugacccagcagcugauccgggcggccgagauccgcgccagcgccaaccucgccgcgaccaagauguccgagugcgugcugggccagagcaagcgggucgacuucugcgggaagggcuaccaccugauguccuucccccagagcgcgccccacggggugguguuccuccacgucacguacgugcccgcccaggagaagaacuucaccaccgccccggccaucugccacgacggcaaggcccacuucccccgcgagggggucuucguguccaacggcacccacugguucgugacgcagcggaacuucuacgagccccagaucaucaccaccgacaacaccuucgucagcggcaacugcgacguggugaucgggaucgucaacaacacgguguacgacccccugcagccggagcuggacuccuucaaggaggagcucgacaaguacuucaagaaccacaccagccccgacguggaccugggcgacaucuccgggaucaacgccagcgucgugaacauccagaaggagaucgaccgccugaacgagguggccaagaaccucaacgagucccugaucgaccugcaggagcucggcaaguacgagcaguacaucaaguggcccugguacaucuggcugggcuucaucgccgggcugaucgcgaucgucauggugaccaucaugcucugcugcaugaccagcugcugcuccugccugaagggcugcugcagcugcggguccugcugcaaguucgacgaggacgacagcgagccggugcugaagggcgucaagcuccacuacacgugauaauaggcuggagccucgguggccuagcuucuugccccuugggccuccccccagccccuccuccccuuccugcacccguacccccguggucuuugaauaaagucugagugggcggcaaaaaaaaaaaaaaaaaaaaaaaaaaaaaaaaaaaaaaaaaaaaaaaaaaaaaaaaaaaaaaaaaaaaaaaaaaaaaaaaaaaaaaaaaaaaaaaaaaaa

SEQ ID NO: 26183 - RNA, 4095 nt, Artificial Sequence
  SARS-CoV-2/Wuhan/WIV05/2019__EPI_ISL_402128 spike protein mRNA gc (1-1273)(K986P_V987P_D614G_I692V)
gggaaauaagagagaaaagaagaguaagaagaaauauaagaccccggcgccgccaccauguucguguuccugguccuccugccccuggugagcucccagugcgugaaccucaccacccgcacgcagcugccgcccgccuacaccaacagcuucacccggggcgucuacuaccccgacaagguguuccgcuccagcgugcugcacuccacccaggaccucuuccugcccuucuucagcaacgucacgugguuccacgccauccacguguccgggaccaacggcaccaagcgguucgacaacccggugcugcccuucaacgacggggucuacuucgcgagcaccgagaaguccaacaucauccgcggcuggaucuucgggacgacccucgacagcaagacccagucccugcugaucgugaacaacgccaccaacguggucaucaaggugugcgaguuccaguucugcaacgaccccuuccucggcguguacuaccacaagaacaacaagagcuggauggaguccgaguuccgggucuacagcuccgccaacaacugcacguucgaguacgugagccagcccuuccugauggaccuggagggcaagcaggggaacuucaagaaccuccgcgaguucguguucaagaacaucgacggcuacuucaagaucuacuccaagcacaccccgaucaaccugguccgggaccugccccagggguucagcgcccucgagccccugguggaccugcccaucggcaucaacaucacccgcuuccagacccuccuggcccugcaccgguccuaccucacgccgggggacagcagcuccggcuggaccgcgggcgccgccgccuacuacgugggguaccugcagccccgcaccuuccugcucaaguacaacgagaacggcaccaucacggacgcggucgacugcgcccuggacccccugagcgagaccaagugcacccucaaguccuucaccguggagaaggggaucuaccagacgagcaacuuccgggugcagcccaccgaguccaucguccgcuucccgaacaucaccaaccugugccccuucggcgagguguucaacgccacccgguucgccagcgucuacgccuggaaccgcaagcggaucuccaacugcguggcggacuacagcgugcuguacaacuccgccagcuucuccacguucaagugcuacggcgucagccccaccaagcucaacgaccugugcuucaccaacguguacgccgacuccuucgugauccgcggggacgagguccggcagaucgcccccggccagaccgggaagaucgccgacuacaacuacaagcugccggacgacuucacgggcugcgugaucgcguggaacagcaacaaccucgacuccaaggucgggggcaacuacaacuaccuguaccgccuguuccgcaagagcaaccucaagcccuucgagcgggacaucuccaccgagaucuaccaggccggcagcacccccugcaacgggguggagggcuucaacugcuacuucccccugcaguccuacggguuccagccgaccaacggcgugggguaccagcccuaccggguggucgugcugagcuucgagcuccugcacgcccccgccacggugugcggccccaagaaguccaccaaccuggucaagaacaagugcgugaacuucaacuucaacggccucaccgggaccggcgugcugaccgagagcaacaagaaguuccugccguuccagcaguucgggcgcgacaucgccgacacgaccgacgcgguccgcgacccccagacccuggagauccucgacaucacccccugcagcuucggcgggguguccgugaucacgccgggcaccaacaccagcaaccaggucgccgugcuguaccagggcgugaacugcaccgagguccccguggccauccacgccgaccagcugacgcccaccuggcggguguacuccaccgggagcaacgucuuccagacccgcgccggcugccucaucggggcggagcacgugaacaacuccuacgagugcgacauccccaucggcgccggcaucugcgccagcuaccagacgcagaccaacuccccgcggcgcgcccggagcguggcgucccagagcgucaucgccuacaccaugucccugggggccgagaacagcguggccuacuccaacaacagcaucgccauccccaccaacuucacgaucuccgugaccaccgagauccugcccgucagcaugaccaagacgagcguggacugcaccauguacaucugcggcgacuccaccgagugcagcaaccuccugcugcaguacggguccuucugcacccagcucaaccgcgcgcugacgggcaucgccguggagcaggacaagaacacccaggaggucuucgcccaggugaagcagaucuacaagacgcccccgaucaaggacuucgggggcuucaacuucagccagauccugcccgaccccuccaagcccagcaagcgguccuucaucgaggaccuccuguucaacaaggugacccuggccgacgccggcuucaucaagcaguacggggacugccucggcgacaucgcggcccgcgaccugaucugcgcccagaaguucaacgggcugaccguccucccgccccugcugaccgacgagaugaucgcccaguacaccagcgcccuccuggcgggcaccaucacguccggguggaccuucggcgccggcgccgcccugcagauccccuucgcgaugcagauggccuaccgguucaacgggaucggcgugacccagaacgugcucuacgagaaccagaagcugaucgccaaccaguucaacagcgccaucgggaagauccaggacucccugagcuccaccgccagcgcgcucggcaagcugcaggacgucgugaaccagaacgcccaggcccugaacacgcucgugaagcagcuguccagcaacuucggggccaucuccagcguccugaacgacauccucucccgccuggacccgcccgaggccgaggugcagaucgaccggcugaucaccggccgccuccagagccugcagaccuacgugacccagcagcugauccgggcggccgagauccgcgccagcgccaaccucgccgcgaccaagauguccgagugcguccugggccagagcaagcggguggacuucugcgggaagggcuaccaccugauguccuucccccagagcgcgccccacgggguggucuuccuccacgugacguacguccccgcccaggagaagaacuucaccaccgccccggccaucugccacgacggcaaggcccacuucccccgcgaggggguguucguguccaacggcacccacugguucgucacgcagcggaacuucuacgagccccagaucaucaccaccgacaacaccuucgugagcggcaacugcgacguggucaucgggaucgugaacaacacgguguacgacccccugcagccggagcuggacuccuucaaggaggagcucgacaaguacuucaagaaccacaccagccccgacgucgaccugggcgacaucuccgggaucaacgccagcguggugaacauccagaaggagaucgaccgccugaacgaggucgccaagaaccucaacgagucccugaucgaccugcaggagcucggcaaguacgagcaguacaucaaguggcccugguacaucuggcugggcuucaucgccgggcugaucgcgaucgugauggugaccaucaugcucugcugcaugaccagcugcugcuccugccugaagggcugcugcagcugcggguccugcugcaaguucgacgaggacgacagcgagccgguccugaagggcgugaagcuccacuacacgugauaauaggcuggagccucgguggccuagcuucuugccccuugggccuccccccagccccuccuccccuuccugcacccguacccccguggucuuugaauaaagucugagugggcggcaaaaaaaaaaaaaaaaaaaaaaaaaaaaaaaaaaaaaaaaaaaaaaaaaaaaaaaaaaaaaaaaaaaaaaaaaaaaaaaaaaaaaaaaaaaaaaaaaaaa

SEQ ID NO: 26184 - RNA, 4095 nt, Artificial Sequence
  SARS-CoV-2/Wuhan/WIV05/2019__EPI_ISL_402128 spike protein mRNA gc (1-1273)(K986P_V987P_D614G_M1229I)
gggaaauaagagagaaaagaagaguaagaagaaauauaagaccccggcgccgccaccauguucguguuccugguccuccugccccuggugagcucccagugcgugaaccucaccacccgcacgcagcugccgcccgccuacaccaacagcuucacccggggcgucuacuaccccgacaagguguuccgcuccagcgugcugcacuccacccaggaccucuuccugcccuucuucagcaacgucacgugguuccacgccauccacguguccgggaccaacggcaccaagcgguucgacaacccggugcugcccuucaacgacggggucuacuucgcgagcaccgagaaguccaacaucauccgcggcuggaucuucgggacgacccucgacagcaagacccagucccugcugaucgugaacaacgccaccaacguggucaucaaggugugcgaguuccaguucugcaacgaccccuuccucggcguguacuaccacaagaacaacaagagcuggauggaguccgaguuccgggucuacagcuccgccaacaacugcacguucgaguacgugagccagcccuuccugauggaccuggagggcaagcaggggaacuucaagaaccuccgcgaguucguguucaagaacaucgacggcuacuucaagaucuacuccaagcacaccccgaucaaccugguccgggaccugccccagggguucagcgcccucgagccccugguggaccugcccaucggcaucaacaucacccgcuuccagacccuccuggcccugcaccgguccuaccucacgccgggggacagcagcuccggcuggaccgcgggcgccgccgccuacuacgugggguaccugcagccccgcaccuuccugcucaaguacaacgagaacggcaccaucacggacgcggucgacugcgcccuggacccccugagcgagaccaagugcacccucaaguccuucaccguggagaaggggaucuaccagacgagcaacuuccgggugcagcccaccgaguccaucguccgcuucccgaacaucaccaaccugugccccuucggcgagguguucaacgccacccgguucgccagcgucuacgccuggaaccgcaagcggaucuccaacugcguggcggacuacagcgugcuguacaacuccgccagcuucuccacguucaagugcuacggcgucagccccaccaagcucaacgaccugugcuucaccaacguguacgccgacuccuucgugauccgcggggacgagguccggcagaucgcccccggccagaccgggaagaucgccgacuacaacuacaagcugccggacgacuucacgggcugcgugaucgcguggaacagcaacaaccucgacuccaaggucgggggcaacuacaacuaccuguaccgccuguuccgcaagagcaaccucaagcccuucgagcgggacaucuccaccgagaucuaccaggccggcagcacccccugcaacgggguggagggcuucaacugcuacuucccccugcaguccuacggguuccagccgaccaacggcgugggguaccagcccuaccggguggucgugcugagcuucgagcuccugcacgcccccgccacggugugcggccccaagaaguccaccaaccuggucaagaacaagugcgugaacuucaacuucaacggccucaccgggaccggcgugcugaccgagagcaacaagaaguuccugccguuccagcaguucgggcgcgacaucgccgacacgaccgacgcgguccgcgacccccagacccuggagauccucgacaucacccccugcagcuucggcgggguguccgugaucacgccgggcaccaacaccagcaaccaggucgccgugcuguaccagggcgugaacugcaccgagguccccguggccauccacgccgaccagcugacgcccaccuggcggguguacuccaccgggagcaacgucuuccagacccgcgccggcugccucaucggggcggagcacgugaacaacuccuacgagugcgacauccccaucggcgccggcaucugcgccagcuaccagacgcagaccaacuccccgcggcgcgcccggagcguggcgucccagagcaucaucgccuacaccaugucccugggggccgagaacagcgucgccuacuccaacaacagcaucgccauccccaccaacuucacgaucuccgugaccaccgagauccugcccgugagcaugaccaagacgagcgucgacugcaccauguacaucugcggcgacuccaccgagugcagcaaccuccugcugcaguacggguccuucugcacccagcucaaccgcgcgcugacgggcaucgccguggagcaggacaagaacacccaggagguguucgcccaggucaagcagaucuacaagacgcccccgaucaaggacuucgggggcuucaacuucagccagauccugcccgaccccuccaagcccagcaagcgguccuucaucgaggaccuccuguucaacaaggugacccuggccgacgccggcuucaucaagcaguacggggacugccucggcgacaucgcggcccgcgaccugaucugcgcccagaaguucaacgggcugaccgugcucccgccccugcugaccgacgagaugaucgcccaguacaccagcgcccuccuggcgggcaccaucacguccggguggaccuucggcgccggcgccgcccugcagauccccuucgcgaugcagauggccuaccgguucaacgggaucggcgucacccagaacgugcucuacgagaaccagaagcugaucgccaaccaguucaacagcgccaucgggaagauccaggacucccugagcuccaccgccagcgcgcucggcaagcugcaggacguggucaaccagaacgcccaggcccugaacacgcucgugaagcagcuguccagcaacuucggggccaucuccagcgugcugaacgacauccucucccgccuggacccgcccgaggccgagguccagaucgaccggcugaucaccggccgccuccagagccugcagaccuacgugacccagcagcugauccgggcggccgagauccgcgccagcgccaaccucgccgcgaccaagauguccgagugcgugcugggccagagcaagcgggucgacuucugcgggaagggcuaccaccugauguccuucccccagagcgcgccccacggggugguguuccuccacgucacguacgugcccgcccaggagaagaacuucaccaccgccccggccaucugccacgacggcaaggcccacuucccccgcgagggggucuucguguccaacggcacccacugguucgugacgcagcggaacuucuacgagccccagaucaucaccaccgacaacaccuucgucagcggcaacugcgacguggugaucgggaucgucaacaacacgguguacgacccccugcagccggagcuggacuccuucaaggaggagcucgacaaguacuucaagaaccacaccagccccgacguggaccugggcgacaucuccgggaucaacgccagcgucgugaacauccagaaggagaucgaccgccugaacgagguggccaagaaccucaacgagucccugaucgaccugcaggagcucggcaaguacgagcaguacaucaaguggcccugguacaucuggcugggcuucaucgccgggcugaucgcgaucgucaucgugaccaucaugcucugcugcaugaccagcugcugcuccugccugaagggcugcugcagcugcggguccugcugcaaguucgacgaggacgacagcgagccggugcugaagggcgucaagcuccacuacacgugauaauaggcuggagccucgguggccuagcuucuugccccuugggccuccccccagccccuccuccccuuccugcacccguacccccguggucuuugaauaaagucugagugggcggcaaaaaaaaaaaaaaaaaaaaaaaaaaaaaaaaaaaaaaaaaaaaaaaaaaaaaaaaaaaaaaaaaaaaaaaaaaaaaaaaaaaaaaaaaaaaaaaaaaaa

SEQ ID NO: 26185 - RNA, 4089 nt, Artificial Sequence
  SARS-CoV-2/Wuhan/WIV05/2019__EPI_ISL_402128 spike protein mRNA gc (1-1273)(K986P_V987P_H69del_V70del_A222V_Y453F_S477N_D614G_I692V)
gggaaauaagagagaaaagaagaguaagaagaaauauaagaccccggcgccgccaccauguucguguuccugguccuccugccccuggugagcucccagugcgugaaccucaccacccgcacgcagcugccgcccgccuacaccaacagcuucacccggggcgucuacuaccccgacaagguguuccgcuccagcgugcugcacuccacccaggaccucuuccugcccuucuucagcaacgucacgugguuccacgccaucuccgggaccaacggcaccaagcgguucgacaacccggugcugcccuucaacgacgggguguacuucgcgagcaccgagaaguccaacaucauccgcggcuggaucuucgggacgacccucgacagcaagacccagucccugcugaucgucaacaacgccaccaacguggugaucaaggucugcgaguuccaguucugcaacgaccccuuccucggcguguacuaccacaagaacaacaagagcuggauggaguccgaguuccggguguacagcuccgccaacaacugcacguucgaguacgucagccagcccuuccugauggaccuggagggcaagcaggggaacuucaagaaccuccgcgaguucguguucaagaacaucgacggcuacuucaagaucuacuccaagcacaccccgaucaaccuggugcgggaccugccccagggguucagcguccucgagccccugguggaccugcccaucggcaucaacaucacccgcuuccagacccuccuggcccugcaccgguccuaccucacgccgggggacagcagcuccggcuggaccgccggcgcggccgccuacuacgugggguaccugcagccccgcaccuuccugcucaaguacaacgagaacggcaccaucacggacgccgucgacugcgcgcuggacccccugagcgagaccaagugcacccucaaguccuucaccguggagaaggggaucuaccagacgagcaacuuccgggugcagcccaccgaguccaucguccgcuucccgaacaucaccaaccugugccccuucggcgagguguucaacgccacccgguucgccagcgucuacgccuggaaccgcaagcggaucuccaacugcguggccgacuacagcgugcuguacaacuccgcgagcuucuccacguucaagugcuacggcgucagccccaccaagcucaacgaccugugcuucaccaacguguacgccgacuccuucgugauccgcggggacgagguccggcagaucgcccccggccagaccgggaagaucgccgacuacaacuacaagcugccggacgacuucacgggcugcgugaucgccuggaacagcaacaaccucgacuccaaggucgggggcaacuacaacuaccuguuccgccuguuccgcaagagcaaccucaagcccuucgagcgggacaucuccaccgagaucuaccaggcgggcaacacccccugcaacgggguggagggcuucaacugcuacuucccccugcagagcuacggguuccagccgaccaacggcgugggguaccagcccuaccggguggucgugcuguccuucgagcuccugcacgcccccgccacggugugcggccccaagaaguccaccaaccuggucaagaacaagugcgugaacuucaacuucaacggccucaccgggaccggcgugcugaccgagagcaacaagaaguuccugccguuccagcaguucgggcgcgacaucgccgacacgaccgacgccguccgcgacccccagacccuggagauccucgacaucacccccugcagcuucggcggggugagcgugaucacgccgggcaccaacaccuccaaccaggucgcggugcuguaccagggcgugaacugcaccgagguccccguggccauccacgccgaccagcugacgcccaccuggcggguguacagcaccggguccaacgucuuccagacccgcgccggcugccucaucggggccgagcacgugaacaacagcuacgagugcgacauccccaucggcgcgggcaucugcgccuccuaccagacgcagaccaacagcccgcggcgcgcccgguccguggccagccaguccgucaucgcguacaccaugagccugggggccgagaacuccguggccuacagcaacaacuccaucgccauccccaccaacuucacgaucagcgugaccaccgagauccugcccgucuccaugaccaagacgagcguggacugcaccauguacaucugcggcgacagcaccgagugcuccaaccuccugcugcaguacgggagcuucugcacccagcucaaccgcgcccugacgggcaucgcgguggagcaggacaagaacacccaggaggucuucgcccaggugaagcagaucuacaagacgcccccgaucaaggacuucgggggcuucaacuucucccagauccugcccgaccccagcaagcccuccaagcggagcuucaucgaggaccuccuguucaacaaggugacccuggccgacgccggcuucaucaagcaguacggggacugccucggcgacaucgccgcgcgcgaccugaucugcgcccagaaguucaacgggcugaccguccucccgccccugcugaccgacgagaugaucgcccaguacaccuccgcccuccuggccggcaccaucacgagcggguggaccuucggcgcgggcgccgcccugcagauccccuucgccaugcagauggcguaccgguucaacgggaucggcgugacccagaacgugcucuacgagaaccagaagcugaucgccaaccaguucaacuccgccaucgggaagauccaggacagccuguccagcaccgccuccgcccucggcaagcugcaggacgucgugaaccagaacgcgcaggcccugaacacgcucgugaagcagcugagcuccaacuucggggccaucagcuccguccugaacgacauccucagccgccuggacccgcccgaggccgaggugcagaucgaccggcugaucaccggccgccuccagucccugcagaccuacgugacccagcagcugauccgggccgcggagauccgcgccagcgccaaccucgccgccaccaagaugagcgagugcguccugggccaguccaagcggguggacuucugcgggaagggcuaccaccugaugagcuucccccaguccgcgccccacgggguggucuuccuccacgugacguacguccccgcccaggagaagaacuucaccaccgccccggccaucugccacgacggcaaggcgcacuucccccgcgaggggguguucgugagcaacggcacccacugguucgucacgcagcggaacuucuacgagccccagaucaucaccaccgacaacaccuucguguccggcaacugcgacguggucaucgggaucgugaacaacacgguguacgacccccugcagccggagcuggacagcuucaaggaggagcucgacaaguacuucaagaaccacaccucccccgacgucgaccugggcgacaucagcgggaucaacgccuccguggugaacauccagaaggagaucgaccgccugaacgaggucgccaagaaccucaacgagagccugaucgaccugcaggagcucggcaaguacgagcaguacaucaaguggcccugguacaucuggcugggcuucaucgccgggcugaucgccaucgugauggugaccaucaugcucugcugcaugaccuccugcugcagcugccugaagggcugcugcuccugcgggagcugcugcaaguucgacgaggacgacuccgagccgguccugaagggcgugaagcuccacuacacgugauaauaggcuggagccucgguggccuagcuucuugccccuugggccuccccccagccccuccuccccuuccugcacccguacccccguggucuuugaauaaagucugagugggcggcaaaaaaaaaaaaaaaaaaaaaaaaaaaaaaaaaaaaaaaaaaaaaaaaaaaaaaaaaaaaaaaaaaaaaaaaaaaaaaaaaaaaaaaaaaaaaaaaaaaa

SEQ ID NO: 26186 - RNA, 4089 nt, Artificial Sequence
  SARS-CoV-2/Wuhan/WIV05/2019__EPI_ISL_402128 spike protein mRNA gc (1-1273)(K986P_V987P_H69del_V70del_Y453F_D614G_I692V_M1229I)
gggaaauaagagagaaaagaagaguaagaagaaauauaagaccccggcgccgccaccauguucguguuccugguccuccugccccuggugagcucccagugcgugaaccucaccacccgcacgcagcugccgcccgccuacaccaacagcuucacccggggcgucuacuaccccgacaagguguuccgcuccagcgugcugcacuccacccaggaccucuuccugcccuucuucagcaacgucacgugguuccacgccaucuccgggaccaacggcaccaagcgguucgacaacccggugcugcccuucaacgacgggguguacuucgcgagcaccgagaaguccaacaucauccgcggcuggaucuucgggacgacccucgacagcaagacccagucccugcugaucgucaacaacgccaccaacguggugaucaaggucugcgaguuccaguucugcaacgaccccuuccucggcguguacuaccacaagaacaacaagagcuggauggaguccgaguuccggguguacagcuccgccaacaacugcacguucgaguacgucagccagcccuuccugauggaccuggagggcaagcaggggaacuucaagaaccuccgcgaguucguguucaagaacaucgacggcuacuucaagaucuacuccaagcacaccccgaucaaccuggugcgggaccugccccagggguucagcgcccucgagccccuggucgaccugcccaucggcaucaacaucacccgcuuccagacccuccuggcccugcaccgguccuaccucacgccgggggacagcagcuccggcuggaccgcgggcgccgccgccuacuacgugggguaccugcagccccgcaccuuccugcucaaguacaacgagaacggcaccaucacggacgcgguggacugcgcccuggacccccugagcgagaccaagugcacccucaaguccuucaccgucgagaaggggaucuaccagacgagcaacuuccgggugcagcccaccgaguccaucgugcgcuucccgaacaucaccaaccugugccccuucggcgaggucuucaacgccacccgguucgccagcguguacgccuggaaccgcaagcggaucuccaacugcgucgcggacuacagcgugcuguacaacuccgccagcuucuccacguucaagugcuacggcgugagccccaccaagcucaacgaccugugcuucaccaacgucuacgccgacuccuucgugauccgcggggacgaggugcggcagaucgcccccggccagaccgggaagaucgccgacuacaacuacaagcugccggacgacuucacgggcugcgucaucgcguggaacagcaacaaccucgacuccaaggucgggggcaacuacaacuaccuguuccgccuguuccgcaagagcaaccucaagcccuucgagcgggacaucuccaccgagaucuaccaggccggcagcacccccugcaacgggguggagggcuucaacugcuacuucccccugcaguccuacggguuccagccgaccaacggcgugggguaccagcccuaccggguggugguccugagcuucgagcuccugcacgcccccgccacggugugcggccccaagaaguccaccaaccuggugaagaacaagugcgucaacuucaacuucaacggccucaccgggaccggcgugcugaccgagagcaacaagaaguuccugccguuccagcaguucgggcgcgacaucgccgacacgaccgacgcggugcgcgacccccagacccuggagauccucgacaucacccccugcagcuucggcggggucuccgugaucacgccgggcaccaacaccagcaaccagguggccguccuguaccagggcgugaacugcaccgaggugcccgucgccauccacgccgaccagcugacgcccaccuggcggguguacuccaccgggagcaacguguuccagacccgcgccggcugccucaucggggcggagcacgucaacaacuccuacgagugcgacauccccaucggcgccggcaucugcgccagcuaccagacgcagaccaacuccccgcggcgcgcccggagcguggcgucccagagcgugaucgccuacaccaugucccugggggccgagaacagcgucgccuacuccaacaacagcaucgccauccccaccaacuucacgaucuccgugaccaccgagauccugcccgugagcaugaccaagacgagcgucgacugcaccauguacaucugcggcgacuccaccgagugcagcaaccuccugcugcaguacggguccuucugcacccagcucaaccgcgcgcugacgggcaucgccguggagcaggacaagaacacccaggagguguucgcccaggucaagcagaucuacaagacgcccccgaucaaggacuucgggggcuucaacuucagccagauccugcccgaccccuccaagcccagcaagcgguccuucaucgaggaccuccuguucaacaaggugacccuggccgacgccggcuucaucaagcaguacggggacugccucggcgacaucgcggcccgcgaccugaucugcgcccagaaguucaacgggcugaccgugcucccgccccugcugaccgacgagaugaucgcccaguacaccagcgcccuccuggcgggcaccaucacguccggguggaccuucggcgccggcgccgcccugcagauccccuucgcgaugcagauggccuaccgguucaacgggaucggcgucacccagaacgugcucuacgagaaccagaagcugaucgccaaccaguucaacagcgccaucgggaagauccaggacucccugagcuccaccgccagcgcgcucggcaagcugcaggacguggucaaccagaacgcccaggcccugaacacgcucgugaagcagcuguccagcaacuucggggccaucuccagcgugcugaacgacauccucucccgccuggacccgcccgaggccgagguccagaucgaccggcugaucaccggccgccuccagagccugcagaccuacgugacccagcagcugauccgggcggccgagauccgcgccagcgccaaccucgccgcgaccaagauguccgagugcgugcugggccagagcaagcgggucgacuucugcgggaagggcuaccaccugauguccuucccccagagcgcgccccacggggugguguuccuccacgucacguacgugcccgcccaggagaagaacuucaccaccgccccggccaucugccacgacggcaaggcccacuucccccgcgagggggucuucguguccaacggcacccacugguucgugacgcagcggaacuucuacgagccccagaucaucaccaccgacaacaccuucgucagcggcaacugcgacguggugaucgggaucgucaacaacacgguguacgacccccugcagccggagcuggacuccuucaaggaggagcucgacaaguacuucaagaaccacaccagccccgacguggaccugggcgacaucuccgggaucaacgccagcgucgugaacauccagaaggagaucgaccgccugaacgagguggccaagaaccucaacgagucccugaucgaccugcaggagcucggcaaguacgagcaguacaucaaguggcccugguacaucuggcugggcuucaucgccgggcugaucgcgaucgucaucgugaccaucaugcucugcugcaugaccagcugcugcuccugccugaagggcugcugcagcugcggguccugcugcaaguucgacgaggacgacagcgagccggugcugaagggcgucaagcuccacuacacgugauaauaggcuggagccucgguggccuagcuucuugccccuugggccuccccccagccccuccuccccuuccugcacccguacccccguggucuuugaauaaagucugagugggcggcaaaaaaaaaaaaaaaaaaaaaaaaaaaaaaaaaaaaaaaaaaaaaaaaaaaaaaaaaaaaaaaaaaaaaaaaaaaaaaaaaaaaaaaaaaaaaaaaaaaa

SEQ ID NO: 26187 - RNA, 4086 nt, Artificial Sequence
  SARS-CoV-2/Wuhan/WIV05/2019__EPI_ISL_402128 spike protein mRNA gc (1-1273)(K986P_V987P_K986P_V987P_H69del_V70del_Y144del_N501Y_A570 D_D614G_P681H_T716I_S982A_D1118H)
gggaaauaagagagaaaagaagaguaagaagaaauauaagaccccggcgccgccaccauguucguguuccugguccuccugccccuggugagcucccagugcgugaaccucaccacccgcacgcagcugccgcccgccuacaccaacagcuucacccggggcgucuacuaccccgacaagguguuccgcuccagcgugcugcacuccacccaggaccucuuccugcccuucuucagcaacgucacgugguuccacgccaucuccgggaccaacggcaccaagcgguucgacaacccggugcugcccuucaacgacgggguguacuucgcgagcaccgagaaguccaacaucauccgcggcuggaucuucgggacgacccucgacagcaagacccagucccugcugaucgucaacaacgccaccaacguggugaucaaggucugcgaguuccaguucugcaacgaccccuuccucggcguguaccacaagaacaacaagagcuggauggaguccgaguuccggguguacagcuccgccaacaacugcacguucgaguacgucagccagcccuuccugauggaccuggagggcaagcaggggaacuucaagaaccuccgcgaguucguguucaagaacaucgacggcuacuucaagaucuacuccaagcacaccccgaucaaccuggugcgggaccugccccagggguucagcgcccucgagccccuggucgaccugcccaucggcaucaacaucacccgcuuccagacccuccuggcccugcaccgguccuaccucacgccgggggacagcagcuccggcuggaccgcgggcgccgccgccuacuacgugggguaccugcagccccgcaccuuccugcucaaguacaacgagaacggcaccaucacggacgcgguggacugcgcccuggacccccugagcgagaccaagugcacccucaaguccuucaccgucgagaaggggaucuaccagacgagcaacuuccgggugcagcccaccgaguccaucgugcgcuucccgaacaucaccaaccugugccccuucggcgaggucuucaacgccacccgguucgccagcguguacgccuggaaccgcaagcggaucuccaacugcgucgcggacuacagcgugcuguacaacuccgccagcuucuccacguucaagugcuacggcgugagccccaccaagcucaacgaccugugcuucaccaacgucuacgccgacuccuucgugauccgcggggacgaggugcggcagaucgcccccggccagaccgggaagaucgccgacuacaacuacaagcugccggacgacuucacgggcugcgucaucgcguggaacagcaacaaccucgacuccaaggucgggggcaacuacaacuaccuguaccgccuguuccgcaagagcaaccucaagcccuucgagcgggacaucuccaccgagaucuaccaggccggcagcacccccugcaacgggguggagggcuucaacugcuacuucccccugcaguccuacggguuccagccgaccuacggcgugggguaccagcccuaccggguggugguccugagcuucgagcuccugcacgcccccgccacggugugcggccccaagaaguccaccaaccuggugaagaacaagugcgucaacuucaacuucaacggccucaccgggaccggcgugcugaccgagagcaacaagaaguuccugccguuccagcaguucgggcgcgacaucgacgacacgaccgacgccgugcgcgacccccagacccuggagauccucgacaucacccccugcagcuucggcggggucuccgugaucacgccgggcaccaacaccagcaaccagguggcgguccuguaccagggcgugaacugcaccgaggugcccgucgccauccacgccgaccagcugacgcccaccuggcggguguacuccaccgggagcaacguguuccagacccgcgccggcugccucaucggggccgagcacgucaacaacuccuacgagugcgacauccccaucggcgcgggcaucugcgccagcuaccagacgcagaccaacucccaccggcgcgcccggagcguggccucccagagcaucaucgcguacaccaugucccugggggccgagaacagcguggccuacuccaacaacagcaucgccaucccgaucaacuucaccaucuccgucacgaccgagauccugcccgugagcaugaccaagaccagcguggacugcacgauguacaucugcggcgacuccaccgagugcagcaaccuccugcugcaguacggguccuucugcacccagcucaaccgcgcccugaccggcaucgcggucgagcaggacaagaacacgcaggagguguucgcccaggugaagcagaucuacaagaccccgcccaucaaggacuucgggggcuucaacuucagccagauccugcccgaccccuccaagcccagcaagcgguccuucaucgaggaccuccuguucaacaaggucacccuggccgacgccggcuucaucaagcaguacggggacugccucggcgacaucgccgcgcgcgaccugaucugcgcccagaaguucaacgggcugaccgugcugcccccgcuccugacggacgagaugaucgcccaguacaccagcgcccuccuggccggcaccaucaccuccggguggacguucggcgcgggcgccgcccugcagauccccuucgccaugcagauggcguaccgguucaacgggaucggcgugacccagaacguccucuacgagaaccagaagcugaucgccaaccaguucaacagcgccaucgggaagauccaggacucccugagcuccaccgccagcgcccucggcaagcugcaggacguggugaaccagaacgcgcaggcccugaacacccucgucaagcagcuguccagcaacuucggggccaucuccagcgugcugaacgacauccucgcccgccuggacccgcccgaggccgaggugcagaucgaccggcugaucacgggccgccuccagucccugcagaccuacgucacccagcagcugauccgggcggccgagauccgcgccagcgccaaccucgccgcgaccaagaugagcgagugcgugcugggccaguccaagcggguggacuucugcgggaagggcuaccaccugaugagcuucccccaguccgcgccccacggggucguguuccuccacgugaccuacguccccgcccaggagaagaacuucacgaccgcccccgccaucugccacgacggcaaggcccacuucccgcgcgaggggguguucgucagcaacggcacccacugguucgugacccagcggaacuucuacgagccccagaucaucacgacccacaacaccuucguguccggcaacugcgacgucgugaucgggaucgugaacaacaccgucuacgacccccugcagcccgagcuggacagcuucaaggaggagcucgacaaguacuucaagaaccacacguccccggacguggaccugggcgacaucagcgggaucaacgccuccguggucaacauccagaaggagaucgaccgccugaacgagguggccaagaaccucaacgagagccugaucgaccugcaggagcucggcaaguacgagcaguacaucaaguggcccugguacaucuggcugggcuucaucgccgggcugaucgcgaucgugauggucaccaucaugcucugcugcaugaccuccugcugcagcugccugaagggcugcugcuccugcgggagcugcugcaaguucgacgaggacgacuccgagcccgugcugaagggcgugaagcuccacuacaccugauaauaggcuggagccucgguggccuagcuucuugccccuugggccuccccccagccccuccuccccuuccugcacccguacccccguggucuuugaauaaagucugagugggcggcaaaaaaaaaaaaaaaaaaaaaaaaaaaaaaaaaaaaaaaaaaaaaaaaaaaaaaaaaaaaaaaaaaaaaaaaaaaaaaaaaaaaaaaaaaaaaaaaaaaa

SEQ ID NO: 26188 - RNA, 4095 nt, Artificial Sequence
  SARS-CoV-2/Wuhan/WIV05/2019__EPI_ISL_402128 spike protein mRNA gc (1-1273)(K986P_V987P_K986P_V987P_K417N_E484K_N501Y_D614G)
gggaaauaagagagaaaagaagaguaagaagaaauauaagaccccggcgccgccaccauguucguguuccugguccuccugccccuggugagcucccagugcgugaaccucaccacccgcacgcagcugccgcccgccuacaccaacagcuucacccggggcgucuacuaccccgacaagguguuccgcuccagcgugcugcacuccacccaggaccucuuccugcccuucuucagcaacgucacgugguuccacgccauccacguguccgggaccaacggcaccaagcgguucgacaacccggugcugcccuucaacgacggggucuacuucgcgagcaccgagaaguccaacaucauccgcggcuggaucuucgggacgacccucgacagcaagacccagucccugcugaucgugaacaacgccaccaacguggucaucaaggugugcgaguuccaguucugcaacgaccccuuccucggcguguacuaccacaagaacaacaagagcuggauggaguccgaguuccgggucuacagcuccgccaacaacugcacguucgaguacgugagccagcccuuccugauggaccuggagggcaagcaggggaacuucaagaaccuccgcgaguucguguucaagaacaucgacggcuacuucaagaucuacuccaagcacaccccgaucaaccugguccgggaccugccccagggguucagcgcccucgagccccugguggaccugcccaucggcaucaacaucacccgcuuccagacccuccuggcccugcaccgguccuaccucacgccgggggacagcagcuccggcuggaccgcgggcgccgccgccuacuacgugggguaccugcagccccgcaccuuccugcucaaguacaacgagaacggcaccaucacggacgcggucgacugcgcccuggacccccugagcgagaccaagugcacccucaaguccuucaccguggagaaggggaucuaccagacgagcaacuuccgggugcagcccaccgaguccaucguccgcuucccgaacaucaccaaccugugccccuucggcgagguguucaacgccacccgguucgccagcgucuacgccuggaaccgcaagcggaucuccaacugcguggcggacuacagcgugcuguacaacuccgccagcuucuccacguucaagugcuacggcgucagccccaccaagcucaacgaccugugcuucaccaacguguacgccgacuccuucgugauccgcggggacgagguccggcagaucgcccccggccagaccgggaacaucgccgacuacaacuacaagcugccggacgacuucacgggcugcgugaucgcguggaacagcaacaaccucgacuccaaggucgggggcaacuacaacuaccuguaccgccuguuccgcaagagcaaccucaagcccuucgagcgggacaucuccaccgagaucuaccaggccggcagcacccccugcaacggggugaagggcuucaacugcuacuucccccugcaguccuacggguuccagccgaccuacggcgugggguaccagcccuaccggguggucgugcugagcuucgagcuccugcacgcccccgccacggugugcggccccaagaaguccaccaaccuggucaagaacaagugcgugaacuucaacuucaacggccucaccgggaccggcgugcugaccgagagcaacaagaaguuccugccguuccagcaguucgggcgcgacaucgccgacacgaccgacgcgguccgcgacccccagacccuggagauccucgacaucacccccugcagcuucggcgggguguccgugaucacgccgggcaccaacaccagcaaccaggucgccgugcuguaccagggcgugaacugcaccgagguccccguggccauccacgccgaccagcugacgcccaccuggcggguguacuccaccgggagcaacgucuuccagacccgcgccggcugccucaucggggcggagcacgugaacaacuccuacgagugcgacauccccaucggcgccggcaucugcgccagcuaccagacgcagaccaacuccccgcggcgcgcccggagcguggcgucccagagcaucaucgccuacaccaugucccugggggccgagaacagcgucgccuacuccaacaacagcaucgccauccccaccaacuucacgaucuccgugaccaccgagauccugcccgugagcaugaccaagacgagcgucgacugcaccauguacaucugcggcgacuccaccgagugcagcaaccuccugcugcaguacggguccuucugcacccagcucaaccgcgcgcugacgggcaucgccguggagcaggacaagaacacccaggagguguucgcccaggucaagcagaucuacaagacgcccccgaucaaggacuucgggggcuucaacuucagccagauccugcccgaccccuccaagcccagcaagcgguccuucaucgaggaccuccuguucaacaaggugacccuggccgacgccggcuucaucaagcaguacggggacugccucggcgacaucgcggcccgcgaccugaucugcgcccagaaguucaacgggcugaccgugcucccgccccugcugaccgacgagaugaucgcccaguacaccagcgcccuccuggcgggcaccaucacguccggguggaccuucggcgccggcgccgcccugcagauccccuucgcgaugcagauggccuaccgguucaacgggaucggcgucacccagaacgugcucuacgagaaccagaagcugaucgccaaccaguucaacagcgccaucgggaagauccaggacucccugagcuccaccgccagcgcgcucggcaagcugcaggacguggucaaccagaacgcccaggcccugaacacgcucgugaagcagcuguccagcaacuucggggccaucuccagcgugcugaacgacauccucucccgccuggacccgcccgaggccgagguccagaucgaccggcugaucaccggccgccuccagagccugcagaccuacgugacccagcagcugauccgggcggccgagauccgcgccagcgccaaccucgccgcgaccaagauguccgagugcgugcugggccagagcaagcgggucgacuucugcgggaagggcuaccaccugauguccuucccccagagcgcgccccacggggugguguuccuccacgucacguacgugcccgcccaggagaagaacuucaccaccgccccggccaucugccacgacggcaaggcccacuucccccgcgagggggucuucguguccaacggcacccacugguucgugacgcagcggaacuucuacgagccccagaucaucaccaccgacaacaccuucgucagcggcaacugcgacguggugaucgggaucgucaacaacacgguguacgacccccugcagccggagcuggacuccuucaaggaggagcucgacaaguacuucaagaaccacaccagccccgacguggaccugggcgacaucuccgggaucaacgccagcgucgugaacauccagaaggagaucgaccgccugaacgagguggccaagaaccucaacgagucccugaucgaccugcaggagcucggcaaguacgagcaguacaucaaguggcccugguacaucuggcugggcuucaucgccgggcugaucgcgaucgucauggugaccaucaugcucugcugcaugaccagcugcugcuccugccugaagggcugcugcagcugcggguccugcugcaaguucgacgaggacgacagcgagccggugcugaagggcgucaagcuccacuacacgugauaauaggcuggagccucgguggccuagcuucuugccccuugggccuccccccagccccuccuccccuuccugcacccguacccccguggucuuugaauaaagucugagugggcggcaaaaaaaaaaaaaaaaaaaaaaaaaaaaaaaaaaaaaaaaaaaaaaaaaaaaaaaaaaaaaaaaaaaaaaaaaaaaaaaaaaaaaaaaaaaaaaaaaaaa

SEQ ID NO: 26189 - RNA, 4086 nt, Artificial Sequence
  SARS-CoV-2/Wuhan/WIV05/2019__EPI_ISL_402128 spike protein mRNA gc (1-1273)(K986P_V987P_K986P_V987P_L18F_D80A_D215G_L242del_A243del_ L244del_R246I_K417N_E484K_N501Y_D614G_A701V)
gggaaauaagagagaaaagaagaguaagaagaaauauaagaccccggcgccgccaccauguucguguuccugguccuccugccccuggugagcucccagugcgugaacuucaccacccgcacgcagcucccgcccgccuacaccaacagcuucacccggggcgucuacuaccccgacaagguguuccgcuccagcgugcugcacuccacccaggaccuguuccuccccuucuucagcaacgucacgugguuccacgccauccacguguccgggaccaacggcaccaagcgguucgcgaacccggugcugcccuucaacgacggggucuacuucgccagcaccgagaaguccaacaucauccgcggcuggaucuucgggacgacccuggacagcaagacccagucccuccugaucgugaacaacgccaccaacguggucaucaaggugugcgaguuccaguucugcaacgaccccuuccugggcguguacuaccacaagaacaacaagagcuggauggaguccgaguuccgggucuacagcuccgccaacaacugcacguucgaguacgugagccagcccuuccucauggaccuggagggcaagcaggggaacuucaagaaccugcgcgaguucguguucaagaacaucgacggcuacuucaagaucuacuccaagcacaccccgaucaaccucguccgggggcugccccagggcuucagcgcccuggagccccucguggaccugcccaucgggaucaacaucacccgcuuccagacccugcacaucuccuaccucacgccgggcgacagcagcuccggcuggaccgcgggggccgccgccuacuacgugggcuaccugcagccccggaccuuccugcucaaguacaacgagaacgggaccaucacggacgcggucgacugcgcccuggacccccugagcgagaccaagugcacccucaaguccuucaccguggagaagggcaucuaccagacgagcaacuuccgcgugcagcccaccgaguccaucguccgguucccgaacaucaccaaccugugccccuucggcgagguguucaacgccacccgcuucgccagcgucuacgccuggaaccggaagcgcaucuccaacugcguggcggacuacagcgugcuguacaacuccgccagcuucuccacguucaagugcuacggggucagccccaccaagcucaacgaccugugcuucaccaacguguacgccgacuccuucgugauccggggcgacgagguccgccagaucgcccccgggcagaccggcaacaucgccgacuacaacuacaagcugccggacgacuucacggggugcgugaucgcguggaacagcaacaaccucgacuccaaggugggcggcaacuacaacuaccuguaccggcuguuccgcaagagcaaccucaagcccuucgagcgggacaucuccaccgagaucuaccaggccgggagcacccccugcaacggcgucaagggguucaacugcuacuucccccugcaguccuacggcuuccagccgaccuacggggugggcuaccagcccuaccgcguggucgugcugagcuucgagcuccugcacgcccccgccacggugugcggccccaagaaguccaccaaccuggucaagaacaagugcgugaacuucaacuucaacgggcucaccggcaccggggugcugaccgagagcaacaagaaguuccugccguuccagcaguucggccgggacaucgccgacacgaccgacgcgguccgcgacccccagacccucgagauccuggacaucacccccugcagcuucgggggcguguccgugaucacgccgggcaccaacaccagcaaccaggucgccgugcuguaccagggggugaacugcaccgagguccccguggccauccacgccgaccagcugacgcccaccuggcgcguguacuccaccggcagcaacgucuuccagacccgggccgggugccucaucggcgcggagcacgugaacaacuccuacgagugcgacauccccaucggcgccgggaucugcgccagcuaccagacgcagaccaacuccccgcgccgggcccgcagcguggcgucccagagcaucaucgccuacaccaugucccugggcgucgagaacagcguggccuacuccaacaacagcaucgccauccccaccaacuucacgaucuccgugaccaccgagauccugcccgucagcaugaccaagacgagcguggacugcaccauguacaucugcggggacuccaccgagugcagcaaccuccugcugcaguacggcuccuucugcacccagcucaaccgggcccugacggggaucgcgguggagcaggacaagaacacccaggaggucuucgcccaggugaagcagaucuacaagacgcccccgaucaaggacuucggcggcuucaacuucagccagauccugcccgaccccuccaagcccagcaagcgcuccuucaucgaggaccuccuguucaacaaggugacccuggccgacgccggguucaucaagcaguacggcgacugccucggggacaucgccgcgcgggaccugaucugcgcccagaaguucaacggccugaccguccucccgccccugcugaccgacgagaugaucgcccaguacaccagcgcccuccuggccgggaccaucacguccggcuggaccuucggcgcgggggccgcccugcagauccccuucgccaugcagauggcguaccgcuucaacggcaucggggugacccagaacgugcucuacgagaaccagaagcugaucgccaaccaguucaacagcgccaucggcaagauccaggacucccugagcuccaccgccagcgcccucgggaagcugcaggacgucgugaaccagaacgcgcaggcccugaacacgcucgugaagcagcuguccagcaacuucggcgccaucuccagcguccugaacgacauccucucccggcuggacccgcccgaggccgaggugcagaucgaccgccugaucaccggccggcuccagagccugcagaccuacgugacccagcagcugauccgcgccgcggagauccgggccagcgccaaccucgccgccaccaagauguccgagugcguccuggggcagagcaagcgcguggacuucugcggcaagggguaccaccugauguccuucccccagagcgcgccccacggcguggucuuccuccacgugacguacguccccgcccaggagaagaacuucaccaccgccccggccaucugccacgacgggaaggcgcacuucccccgggagggcguguucguguccaacggcacccacugguucgucacgcagcgcaacuucuacgagccccagaucaucaccaccgacaacaccuucgugagcgggaacugcgacguggucaucggcaucgugaacaacacgguguacgacccccugcagccggagcuggacuccuucaaggaggagcucgacaaguacuucaagaaccacaccagccccgacgucgaccugggggacaucuccggcaucaacgccagcguggugaacauccagaaggagaucgaccggcugaacgaggucgccaagaaccucaacgagucccugaucgaccugcaggagcucggcaaguacgagcaguacaucaaguggcccugguacaucuggcugggguucaucgccggccugaucgccaucgugauggugaccaucaugcucugcugcaugaccagcugcugcuccugccugaaggggugcugcagcugcggcuccugcugcaaguucgacgaggacgacagcgagccgguccugaagggggugaagcuccacuacacgugauaauaggcuggagccucgguggccuagcuucuugccccuugggccuccccccagccccuccuccccuuccugcacccguacccccguggucuuugaauaaagucugagugggcggcaaaaaaaaaaaaaaaaaaaaaaaaaaaaaaaaaaaaaaaaaaaaaaaaaaaaaaaaaaaaaaaaaaaaaaaaaaaaaaaaaaaaaaaaaaaaaaaaaaaa

SEQ ID NO: 26190 - RNA, 4095 nt, Artificial Sequence
  SARS-CoV-2/Wuhan/WIV05/2019__EPI_ISL_402128 spike protein mRNA gc (1-1273)(K986P_V987P_K986P_V987P_E484K_D614G)
gggaaauaagagagaaaagaagaguaagaagaaauauaagaccccggcgccgccaccauguucguguuccugguccuccugccccuggugagcucccagugcgugaaccucaccacccgcacgcagcugccgcccgccuacaccaacagcuucacccggggcgucuacuaccccgacaagguguuccgcuccagcgugcugcacuccacccaggaccucuuccugcccuucuucagcaacgucacgugguuccacgccauccacguguccgggaccaacggcaccaagcgguucgacaacccggugcugcccuucaacgacggggucuacuucgcgagcaccgagaaguccaacaucauccgcggcuggaucuucgggacgacccucgacagcaagacccagucccugcugaucgugaacaacgccaccaacguggucaucaaggugugcgaguuccaguucugcaacgaccccuuccucggcguguacuaccacaagaacaacaagagcuggauggaguccgaguuccgggucuacagcuccgccaacaacugcacguucgaguacgugagccagcccuuccugauggaccuggagggcaagcaggggaacuucaagaaccuccgcgaguucguguucaagaacaucgacggcuacuucaagaucuacuccaagcacaccccgaucaaccugguccgggaccugccccagggguucagcgcccucgagccccugguggaccugcccaucggcaucaacaucacccgcuuccagacccuccuggcccugcaccgguccuaccucacgccgggggacagcagcuccggcuggaccgcgggcgccgccgccuacuacgugggguaccugcagccccgcaccuuccugcucaaguacaacgagaacggcaccaucacggacgcggucgacugcgcccuggacccccugagcgagaccaagugcacccucaaguccuucaccguggagaaggggaucuaccagacgagcaacuuccgggugcagcccaccgaguccaucguccgcuucccgaacaucaccaaccugugccccuucggcgagguguucaacgccacccgguucgccagcgucuacgccuggaaccgcaagcggaucuccaacugcguggcggacuacagcgugcuguacaacuccgccagcuucuccacguucaagugcuacggcgucagccccaccaagcucaacgaccugugcuucaccaacguguacgccgacuccuucgugauccgcggggacgagguccggcagaucgcccccggccagaccgggaagaucgccgacuacaacuacaagcugccggacgacuucacgggcugcgugaucgcguggaacagcaacaaccucgacuccaaggucgggggcaacuacaacuaccuguaccgccuguuccgcaagagcaaccucaagcccuucgagcgggacaucuccaccgagaucuaccaggccggcagcacccccugcaacggggugaagggcuucaacugcuacuucccccugcaguccuacggguuccagccgaccaacggcgugggguaccagcccuaccggguggucgugcugagcuucgagcuccugcacgcccccgccacggugugcggccccaagaaguccaccaaccuggucaagaacaagugcgugaacuucaacuucaacggccucaccgggaccggcgugcugaccgagagcaacaagaaguuccugccguuccagcaguucgggcgcgacaucgccgacacgaccgacgcgguccgcgacccccagacccuggagauccucgacaucacccccugcagcuucggcgggguguccgugaucacgccgggcaccaacaccagcaaccaggucgccgugcuguaccagggcgugaacugcaccgagguccccguggccauccacgccgaccagcugacgcccaccuggcggguguacuccaccgggagcaacgucuuccagacccgcgccggcugccucaucggggcggagcacgugaacaacuccuacgagugcgacauccccaucggcgccggcaucugcgccagcuaccagacgcagaccaacuccccgcggcgcgcccggagcguggcgucccagagcaucaucgccuacaccaugucccugggggccgagaacagcgucgccuacuccaacaacagcaucgccauccccaccaacuucacgaucuccgugaccaccgagauccugcccgugagcaugaccaagacgagcgucgacugcaccauguacaucugcggcgacuccaccgagugcagcaaccuccugcugcaguacggguccuucugcacccagcucaaccgcgcgcugacgggcaucgccguggagcaggacaagaacacccaggagguguucgcccaggucaagcagaucuacaagacgcccccgaucaaggacuucgggggcuucaacuucagccagauccugcccgaccccuccaagcccagcaagcgguccuucaucgaggaccuccuguucaacaaggugacccuggccgacgccggcuucaucaagcaguacggggacugccucggcgacaucgcggcccgcgaccugaucugcgcccagaaguucaacgggcugaccgugcucccgccccugcugaccgacgagaugaucgcccaguacaccagcgcccuccuggcgggcaccaucacguccggguggaccuucggcgccggcgccgcccugcagauccccuucgcgaugcagauggccuaccgguucaacgggaucggcgucacccagaacgugcucuacgagaaccagaagcugaucgccaaccaguucaacagcgccaucgggaagauccaggacucccugagcuccaccgccagcgcgcucggcaagcugcaggacguggucaaccagaacgcccaggcccugaacacgcucgugaagcagcuguccagcaacuucggggccaucuccagcgugcugaacgacauccucucccgccuggacccgcccgaggccgagguccagaucgaccggcugaucaccggccgccuccagagccugcagaccuacgugacccagcagcugauccgggcggccgagauccgcgccagcgccaaccucgccgcgaccaagauguccgagugcgugcugggccagagcaagcgggucgacuucugcgggaagggcuaccaccugauguccuucccccagagcgcgccccacggggugguguuccuccacgucacguacgugcccgcccaggagaagaacuucaccaccgccccggccaucugccacgacggcaaggcccacuucccccgcgagggggucuucguguccaacggcacccacugguucgugacgcagcggaacuucuacgagccccagaucaucaccaccgacaacaccuucgucagcggcaacugcgacguggugaucgggaucgucaacaacacgguguacgacccccugcagccggagcuggacuccuucaaggaggagcucgacaaguacuucaagaaccacaccagccccgacguggaccugggcgacaucuccgggaucaacgccagcgucgugaacauccagaaggagaucgaccgccugaacgagguggccaagaaccucaacgagucccugaucgaccugcaggagcucggcaaguacgagcaguacaucaaguggcccugguacaucuggcugggcuucaucgccgggcugaucgcgaucgucauggugaccaucaugcucugcugcaugaccagcugcugcuccugccugaagggcugcugcagcugcggguccugcugcaaguucgacgaggacgacagcgagccggugcugaagggcgucaagcuccacuacacgugauaauaggcuggagccucgguggccuagcuucuugccccuugggccuccccccagccccuccuccccuuccugcacccguacccccguggucuuugaauaaagucugagugggcggcaaaaaaaaaaaaaaaaaaaaaaaaaaaaaaaaaaaaaaaaaaaaaaaaaaaaaaaaaaaaaaaaaaaaaaaaaaaaaaaaaaaaaaaaaaaaaaaaaaaa

SEQ ID NO: 26191 - RNA, 4095 nt, Artificial Sequence
  SARS-CoV-2/Wuhan/WIV05/2019__EPI_ISL_402128 spike protein mRNA gc (1-1273)(K986P_V987P_K986P_V987P_L18F_T20N_P26S_D138Y_R190S_K417T _E484K_N501Y_D614G_H655Y_T1027I)
gggaaauaagagagaaaagaagaguaagaagaaauauaagaccccggcgccgccaccauguucguguuccugguccuccugccccuggugagcucccagugcgugaacuucaccaaccgcacccagcucccgagcgccuacacgaacuccuucacccggggcgucuacuaccccgacaagguguuccgcagcuccgugcugcacagcacccaggaccuguuccuccccuucuucuccaacgucaccugguuccacgccauccacgugagcgggacgaacggcaccaagcgguucgacaaccccgugcugccguucaacgacggggucuacuucgcguccaccgagaaguccaacaucauccgcggcuggaucuucgggaccacgcuggacuccaagacccagagccuccugaucgugaacaacgccaccaacguggucaucaaggugugcgaguuccaguucugcaacuaccccuuccugggcguguacuaccacaagaacaacaaguccuggauggagagcgaguuccgggucuacuccagcgccaacaacugcaccuucgaguacgugucccagcccuuccucauggaccuggagggcaagcaggggaacuucaagaaccugagcgaguucguguucaagaacaucgacggcuacuucaagaucuacuccaagcacacgcccaucaaccucguccgcgaccugccgcagggguucagcgcccuggagccccucguggaccugcccaucggcaucaacaucacccgguuccagacccugcucgcccugcaccgcagcuaccugacccccggggacuccagcuccggcuggacggcgggcgccgccgccuacuacgugggguaccuccagccgcggaccuuccugcugaaguacaacgagaacggcaccaucaccgacgcggucgacugcgcccucgacccccugagcgagacgaagugcacccugaaguccuucaccguggagaaggggaucuaccagaccagcaacuuccgcgugcagcccacggaguccaucguccgguuccccaacaucaccaaccucugcccguucggcgagguguucaacgccacccgcuucgccagcgucuacgccuggaaccggaagcgcaucuccaacugcguggcggacuacagcgugcuguacaacuccgccagcuucuccaccuucaagugcuacggcgucagccccacgaagcugaacgaccucugcuucaccaacguguacgccgacuccuucgugauccgcggggacgagguccggcagaucgcccccggccagaccgggaccaucgccgacuacaacuacaagcugcccgacgacuucacgggcugcgugaucgcguggaacagcaacaaccuggacuccaaggucgggggcaacuacaacuaccucuaccggcuguuccgcaagagcaaccugaagccguucgagcgggacaucuccaccgagaucuaccaggccggcagcacccccugcaacggggugaagggcuucaacugcuacuucccccuccagagcuacggguuccagcccaccuacggcgugggguaccagccguaccgcguggucgugcuguccuucgagcugcuccacgcccccgccacggugugcggccccaagaaguccaccaaccuggucaagaacaagugcgugaacuucaacuucaacggccugaccgggaccggcgugcucaccgagagcaacaagaaguuccugcccuuccagcaguucgggcgggacaucgccgacacgaccgacgcgguccgcgacccgcagacccuggagauccuggacaucacccccugcagcuucggcgggguguccgugaucacgcccggcaccaacaccagcaaccaggucgccgugcucuaccagggcgugaacugcaccgaggucccgguggccauccacgccgaccagcugacgcccaccuggcgcguguacuccaccgggagcaacgucuuccagacccgggccggcugccugaucggggcggaguacgugaacaacuccuacgagugcgacauccccaucggcgccggcaucugcgccagcuaccagacgcagaccaacagcccccgccgggcccgcagcguggcgucccagagcaucaucgccuacaccaugucccucggggccgagaacagcgucgccuacuccaacaacagcaucgccaucccgaccaacuucacgaucagcgugaccaccgagauccugcccguguccaugaccaagacgagcgucgacugcaccauguacaucugcggcgacuccaccgagugcagcaaccugcuccugcaguacggguccuucugcacccagcugaaccgggcgcucacgggcaucgccguggagcaggacaagaacacccaggagguguucgcccaggucaagcagaucuacaagaccccgcccaucaaggacuucgggggcuucaacuucagccagauccugcccgaccccuccaagcccagcaagcgcuccuucaucgaggaccuccuguucaacaaggugacccuggccgacgccggcuucaucaagcaguacggggacugccugggcgacaucgcggcccgggaccucaucugcgcccagaaguucaacgggcugacggugcugcccccgcuccugaccgacgagaugaucgcccaguacaccagcgcccugcucgcgggcaccaucacguccggguggaccuucggcgccggcgccgcccugcagauccccuucgcgaugcagauggccuaccgcuucaacgggaucggcgucacccagaacgugcuguacgagaaccagaagcucaucgccaaccaguucaacagcgccaucgggaagauccaggacucccugagcuccaccgccagcgcgcugggcaagcuccaggacguggucaaccagaacgcccaggcccugaacacgcuggugaagcagcucuccagcaacuucggggccaucuccagcgugcugaacgacauccugagccggcucgacccgcccgaggccgagguccagaucgaccgccugaucaccggccggcugcagucccuccagaccuacgugacccagcagcugauccgcgcggccgagauccgggccagcgccaaccuggccgcgaucaagauguccgagugcgugcucggccagagcaagcgcgucgacuucugcgggaagggcuaccaccugauguccuucccccagagcgcgccccacggggugguguuccugcacgucaccuacgugcccgcccaggagaagaacuucacgaccgcccccgccaucugccacgacggcaaggcccacuucccgcgggagggggucuucguguccaacggcacccacugguucgugacccagcgcaacuucuacgagccccagaucaucacgaccgacaacaccuucgucagcggcaacugcgacguggugaucgggaucgucaacaacaccguguacgacccccuccagcccgagcuggacuccuucaaggaggagcuggacaaguacuucaagaaccacacgagcccggacguggaccucggcgacaucuccgggaucaacgccagcgucgugaacauccagaaggagaucgaccggcugaacgagguggccaagaaccugaacgagucccucaucgaccugcaggagcugggcaaguacgagcaguacaucaaguggcccugguacaucuggcucggcuucaucgccgggcugaucgcgaucgucauggugaccaucaugcugugcugcaugaccagcugcugcuccugccucaagggcugcugcagcugcggguccugcugcaaguucgacgaggacgacagcgagcccgugcugaagggcgucaagcugcacuacaccugauaauaggcuggagccucgguggccuagcuucuugccccuugggccuccccccagccccuccuccccuuccugcacccguacccccguggucuuugaauaaagucugagugggcggcaaaaaaaaaaaaaaaaaaaaaaaaaaaaaaaaaaaaaaaaaaaaaaaaaaaaaaaaaaaaaaaaaaaaaaaaaaaaaaaaaaaaaaaaaaaaaaaaaaaa

SEQ ID NO: 26192 - RNA, 4095 nt, Artificial Sequence
  SARS-CoV-2/Wuhan/WIV05/2019__EPI_ISL_402128 spike protein mRNA gc (1-1273)(K986P_V987P_K986P_V987P_S13I_W152C_L452R_D614G)
gggaaauaagagagaaaagaagaguaagaagaaauauaagaccccggcgccgccaccauguucguguuccugguccuccugccccuggugagcauccagugcgugaaccucaccacccgcacgcagcugccgcccgccuacaccaacuccuucacccggggcgucuacuaccccgacaagguguuccgcagcuccgugcugcacagcacccaggaccucuuccugcccuucuucuccaacgucacgugguuccacgccauccacgugagcgggaccaacggcaccaagcgguucgacaacccggugcugcccuucaacgacggggucuacuucgcguccaccgagaaguccaacaucauccgcggcuggaucuucgggacgacccucgacagcaagacccagagccugcugaucgugaacaacgccaccaacguggucaucaaggugugcgaguuccaguucugcaacgaccccuuccucggcguguacuaccacaagaacaacaaguccugcauggagagcgaguuccgggucuacuccagcgccaacaacugcacguucgaguacgugucccagcccuuccugauggaccuggagggcaagcaggggaacuucaagaaccuccgcgaguucguguucaagaacaucgacggcuacuucaagaucuacagcaagcacaccccgaucaaccugguccgggaccugccccagggguucuccgcccucgagccccugguggaccugcccaucggcaucaacaucacccgcuuccagacccuccuggcccugcaccggagcuaccucacgccgggggacuccagcagcggcuggaccgcgggcgccgccgccuacuacgugggguaccugcagccccgcaccuuccugcucaaguacaacgagaacggcaccaucacggacgcggucgacugcgcccuggacccccuguccgagaccaagugcacccucaagagcuucaccguggagaaggggaucuaccagacguccaacuuccgggugcagcccaccgagagcaucguccgcuucccgaacaucaccaaccugugccccuucggcgagguguucaacgccacccgguucgccuccgucuacgccuggaaccgcaagcggaucagcaacugcguggcggacuacuccgugcuguacaacagcgccuccuucagcacguucaagugcuacggcgucucccccaccaagcucaacgaccugugcuucaccaacguguacgccgacagcuucgugauccgcggggacgagguccggcagaucgcccccggccagaccgggaagaucgccgacuacaacuacaagcugccggacgacuucacgggcugcgugaucgcguggaacuccaacaaccucgacagcaaggucgggggcaacuacaacuaccgcuaccggcuguuccgcaaguccaaccugaagcccuucgagcgggacaucagcaccgagaucuaccaggccggcuccacccccugcaacgggguggagggcuucaacugcuacuucccccuccagagcuacggguuccagccgaccaacggcgugggguaccagcccuaccgcguggucgugcuguccuucgagcugcuccacgcccccgccacggugugcggccccaagaaguccaccaaccuggucaagaacaagugcgugaacuucaacuucaacggccugaccgggaccggcgugcucaccgagagcaacaagaaguuccugccguuccagcaguucgggcgcgacaucgccgacacgaccgacgcgguccgggacccccagacccuggagauccuggacaucacccccugcagcuucggcggggugagcgugaucacgccgggcaccaacaccuccaaccaggucgccgugcucuaccagggcgugaacugcaccgagguccccguggccauccacgccgaccagcugacgcccaccuggcgcguguacagcaccggguccaacgucuuccagacccgggccggcugccugaucggggcggagcacgugaacaacagcuacgagugcgacauccccaucggcgccggcaucugcgccuccuaccagacgcagaccaacagcccgcgccgggcccgcuccguggcgagccaguccaucaucgccuacaccaugagccucggggccgagaacuccgucgccuacagcaacaacuccaucgccauccccaccaacuucacgaucagcgugaccaccgagauccugcccguguccaugaccaagacgagcgucgacugcaccauguacaucugcggcgacagcaccgagugcuccaaccugcuccugcaguacgggagcuucugcacccagcugaaccgggcgcucacgggcaucgccguggagcaggacaagaacacccaggagguguucgcccaggucaagcagaucuacaagacgcccccgaucaaggacuucgggggcuucaacuucucccagauccugcccgaccccagcaagcccuccaagcgcagcuucaucgaggaccuccuguucaacaaggugacccuggccgacgccggcuucaucaagcaguacggggacugccugggcgacaucgcggcccgggaccucaucugcgcccagaaguucaacgggcugaccgugcugccgccccuccugaccgacgagaugaucgcccaguacaccuccgcccugcucgcgggcaccaucacgagcggguggaccuucggcgccggcgccgcccugcagauccccuucgcgaugcagauggccuaccgcuucaacgggaucggcgucacccagaacgugcuguacgagaaccagaagcucaucgccaaccaguucaacuccgccaucgggaagauccaggacagccuguccagcaccgccuccgcgcugggcaagcuccaggacguggucaaccagaacgcccaggcccugaacacgcuggugaagcagcucagcuccaacuucggggccaucagcuccgugcugaacgacauccugagccggcucgacccgcccgaggccgagguccagaucgaccgccugaucaccggccggcugcagucccuccagaccuacgugacccagcagcugauccgcgcggccgagauccgggccagcgccaaccuggccgcgaccaagaugagcgagugcgugcucggccaguccaagcgcgucgacuucugcgggaagggcuaccaccugaugagcuucccccaguccgcgccccacggggugguguuccugcacgucacguacgugcccgcccaggagaagaacuucaccaccgccccggccaucugccacgacggcaaggcccacuucccccgggagggggucuucgugagcaacggcacccacugguucgugacgcagcgcaacuucuacgagccccagaucaucaccaccgacaacaccuucgucuccggcaacugcgacguggugaucgggaucgucaacaacacgguguacgacccccuccagccggagcuggacagcuucaaggaggagcuggacaaguacuucaagaaccacaccucccccgacguggaccucggcgacaucagcgggaucaacgccuccgucgugaacauccagaaggagaucgaccggcugaacgagguggccaagaaccugaacgagagccucaucgaccugcaggagcugggcaaguacgagcaguacaucaaguggcccugguacaucuggcucggcuucaucgccgggcugaucgcgaucgucauggugaccaucaugcugugcugcaugaccuccugcugcagcugccucaagggcugcugcuccugcgggagcugcugcaaguucgacgaggacgacuccgagccggugcugaagggcgucaagcugcacuacacgugauaauaggcuggagccucgguggccuagcuucuugccccuugggccuccccccagccccuccuccccuuccugcacccguacccccguggucuuugaauaaagucugagugggcggcaaaaaaaaaaaaaaaaaaaaaaaaaaaaaaaaaaaaaaaaaaaaaaaaaaaaaaaaaaaaaaaaaaaaaaaaaaaaaaaaaaaaaaaaaaaaaaaaaaaa

SEQ ID NO: 26193 - RNA, 4095 nt, Artificial Sequence
  SARS-CoV-2/Wuhan/WIV05/2019__EPI_ISL_402128 spike protein mRNA gc (1-1273)(K986P_V987P)
gggaaauaagagagaaaagaagaguaagaagaaauauaagaccccggcgccgccaccauguucguguuccuggugcugcugccccuggugagcagccagugcgugaaccugaccacccggacccagcugccaccagccuacaccaacagcuucacccggggcgucuacuaccccgacaagguguuccggagcagcguccugcacagcacccaggaccuguuccugcccuucuucagcaacgugaccugguuccacgccauccacgugagcggcaccaacggcaccaagcgguucgacaaccccgugcugcccuucaacgacggcguguacuucgccagcaccgagaagagcaacaucauccggggcuggaucuucggcaccacccuggacagcaagacccagagccugcugaucgugaauaacgccaccaacguggugaucaaggugugcgaguuccaguucugcaacgaccccuuccugggcguguacuaccacaagaacaacaagagcuggauggagagcgaguuccggguguacagcagcgccaacaacugcaccuucgaguacgugagccagcccuuccugauggaccuggagggcaagcagggcaacuucaagaaccugcgggaguucguguucaagaacaucgacggcuacuucaagaucuacagcaagcacaccccaaucaaccuggugcgggaucugccccagggcuucucagcccuggagccccugguggaccugcccaucggcaucaacaucacccgguuccagacccugcuggcccugcaccggagcuaccugaccccaggcgacagcagcagcggguggacagcaggcgcggcugcuuacuacgugggcuaccugcagccccggaccuuccugcugaaguacaacgagaacggcaccaucaccgacgccguggacugcgcccuggacccucugagcgagaccaagugcacccugaagagcuucaccguggagaagggcaucuaccagaccagcaacuuccgggugcagcccaccgagagcaucgugcgguuccccaacaucaccaaccugugccccuucggcgagguguucaacgccacccgguucgccagcguguacgccuggaaccggaagcggaucagcaacugcguggccgacuacagcgugcuguacaacagcgccagcuucagcaccuucaagugcuacggcgugagccccaccaagcugaacgaccugugcuucaccaacguguacgccgacagcuucgugauccguggcgacgaggugcggcagaucgcacccggccagacaggcaagaucgccgacuacaacuacaagcugcccgacgacuucaccggcugcgugaucgccuggaacagcaacaaccucgacagcaaggugggcggcaacuacaacuaccuguaccggcuguuccggaagagcaaccugaagcccuucgagcgggacaucagcaccgagaucuaccaagccggcuccaccccuugcaacggcguggagggcuucaacugcuacuucccucugcagagcuacggcuuccagcccaccaacggcgugggcuaccagcccuaccgggugguggugcugagcuucgagcugcugcacgccccagccaccguguguggccccaagaagagcaccaaccuggugaagaacaagugcgugaacuucaacuucaacggccuuaccggcaccggcgugcugaccgagagcaacaagaaauuccugcccuuucagcaguucggccgggacaucgccgacaccaccgacgcugugcgggauccccagacccuggagauccuggacaucaccccuugcagcuucggcggcgugagcgugaucaccccaggcaccaacaccagcaaccagguggccgugcuguaccaggacgugaacugcaccgaggugcccguggccauccacgccgaccagcugacacccaccuggcgggucuacagcaccggcagcaacguguuccagacccgggccgguugccugaucggcgccgagcacgugaacaacagcuacgagugcgacauccccaucggcgccggcaucugugccagcuaccagacccagaccaauucaccccggagggcaaggagcguggccagccagagcaucaucgccuacaccaugagccugggcgccgagaacagcguggccuacagcaacaacagcaucgccauccccaccaacuucaccaucagcgugaccaccgagauucugcccgugagcaugaccaagaccagcguggacugcaccauguacaucugcggcgacagcaccgagugcagcaaccugcugcugcaguacggcagcuucugcacccagcugaaccgggcccugaccggcaucgccguggagcaggacaagaacacccaggagguguucgcccaggugaagcagaucuacaagaccccucccaucaaggacuucggcggcuucaacuucagccagauccugcccgaccccagcaagcccagcaagcggagcuucaucgaggaccugcuguucaacaaggugacccuagccgacgccggcuucaucaagcaguacggcgacugccucggcgacauagccgcccgggaccugaucugcgcccagaaguucaacggccugaccgugcugccuccccugcugaccgacgagaugaucgcccaguacaccagcgcccuguuagccggaaccaucaccagcggcuggacuuucggcgcuggagccgcucugcagauccccuucgccaugcagauggccuaccgguucaacggcaucggcgugacccagaacgugcuguacgagaaccagaagcugaucgccaaccaguucaacagcgccaucggcaagauccaggacagccugagcagcaccgcuagcgcccugggcaagcugcaggacguggugaaccagaacgcccaggcccugaacacccuggugaagcagcugagcagcaacuucggcgccaucagcagcgugcugaacgacauccugagccggcuggacccucccgaggccgaggugcagaucgaccggcugaucacuggccggcugcagagccugcagaccuacgugacccagcagcugauccgggccgccgagauucgggccagcgccaaccuggccgccaccaagaugagcgagugcgugcugggccagagcaagcggguggacuucugcggcaagggcuaccaccugaugagcuuuccccagagcgcaccccacggagugguguuccugcacgugaccuacgugcccgcccaggagaagaacuucaccaccgccccagccaucugccacgacggcaaggcccacuuuccccgggagggcguguucgugagcaacggcacccacugguucgugacccagcggaacuucuacgagccccagaucaucaccaccgacaacaccuucgugagcggcaacugcgacguggugaucggcaucgugaacaacaccguguacgauccccugcagcccgagcuggacagcuucaaggaggagcuggacaaguacuucaagaaucacaccagccccgacguggaccugggcgacaucagcggcaucaacgccagcguggugaacauccagaaggagaucgaucggcugaacgagguggccaagaaccugaacgagagccugaucgaccugcaggagcugggcaaguacgagcaguacaucaaguggcccugguacaucuggcugggcuucaucgccggccugaucgccaucgugauggugaccaucaugcugugcugcaugaccagcugcugcagcugccugaagggcuguugcagcugcggcagcugcugcaaguucgacgaggacgacagcgagcccgugcugaagggcgugaagcugcacuacaccugauaauaggcuggagccucgguggccuagcuucuugccccuugggccuccccccagccccuccuccccuuccugcacccguacccccguggucuuugaauaaagucugagugggcggcaaaaaaaaaaaaaaaaaaaaaaaaaaaaaaaaaaaaaaaaaaaaaaaaaaaaaaaaaaaaaaaaaaaaaaaaaaaaaaaaaaaaaaaaaaaaaaaaaaaa

SEQ ID NO: 26194 - RNA, 4095 nt, Artificial Sequence
  SARS-CoV-2/Wuhan/WIV05/2019__EPI_ISL_402128 spike protein mRNA gc (1-1273)(K986P_V987P_ D614G)
gggaaauaagagagaaaagaagaguaagaagaaauauaagaccccggcgccgccaccauguucguguuccuggugcugcugccccuggugagcagccagugcgugaaccugaccacccggacccagcugccaccagccuacaccaacagcuucacccggggcgucuacuaccccgacaagguguuccggagcagcguccugcacagcacccaggaccuguuccugcccuucuucagcaacgugaccugguuccacgccauccacgugagcggcaccaacggcaccaagcgguucgacaaccccgugcugcccuucaacgacggcguguacuucgccagcaccgagaagagcaacaucauccggggcuggaucuucggcaccacccuggacagcaagacccagagccugcugaucgugaauaacgccaccaacguggugaucaaggugugcgaguuccaguucugcaacgaccccuuccugggcguguacuaccacaagaacaacaagagcuggauggagagcgaguuccggguguacagcagcgccaacaacugcaccuucgaguacgugagccagcccuuccugauggaccuggagggcaagcagggcaacuucaagaaccugcgggaguucguguucaagaacaucgacggcuacuucaagaucuacagcaagcacaccccaaucaaccuggugcgggaucugccccagggcuucucagcccuggagccccugguggaccugcccaucggcaucaacaucacccgguuccagacccugcuggcccugcaccggagcuaccugaccccaggcgacagcagcagcggguggacagcaggcgcggcugcuuacuacgugggcuaccugcagccccggaccuuccugcugaaguacaacgagaacggcaccaucaccgacgccguggacugcgcccuggacccucugagcgagaccaagugcacccugaagagcuucaccguggagaagggcaucuaccagaccagcaacuuccgggugcagcccaccgagagcaucgugcgguuccccaacaucaccaaccugugccccuucggcgagguguucaacgccacccgguucgccagcguguacgccuggaaccggaagcggaucagcaacugcguggccgacuacagcgugcuguacaacagcgccagcuucagcaccuucaagugcuacggcgugagccccaccaagcugaacgaccugugcuucaccaacguguacgccgacagcuucgugauccguggcgacgaggugcggcagaucgcacccggccagacaggcaagaucgccgacuacaacuacaagcugcccgacgacuucaccggcugcgugaucgccuggaacagcaacaaccucgacagcaaggugggcggcaacuacaacuaccuguaccggcuguuccggaagagcaaccugaagcccuucgagcgggacaucagcaccgagaucuaccaagccggcuccaccccuugcaacggcguggagggcuucaacugcuacuucccucugcagagcuacggcuuccagcccaccaacggcgugggcuaccagcccuaccgggugguggugcugagcuucgagcugcugcacgccccagccaccguguguggccccaagaagagcaccaaccuggugaagaacaagugcgugaacuucaacuucaacggccuuaccggcaccggcgugcugaccgagagcaacaagaaauuccugcccuuucagcaguucggccgggacaucgccgacaccaccgacgcugugcgggauccccagacccuggagauccuggacaucaccccuugcagcuucggcggcgugagcgugaucaccccaggcaccaacaccagcaaccagguggccgugcuguaccagggcgugaacugcaccgaggugcccguggccauccacgccgaccagcugacacccaccuggcgggucuacagcaccggcagcaacguguuccagacccgggccgguugccugaucggcgccgagcacgugaacaacagcuacgagugcgacauccccaucggcgccggcaucugugccagcuaccagacccagaccaauucaccccggagggcaaggagcguggccagccagagcaucaucgccuacaccaugagccugggcgccgagaacagcguggccuacagcaacaacagcaucgccauccccaccaacuucaccaucagcgugaccaccgagauucugcccgugagcaugaccaagaccagcguggacugcaccauguacaucugcggcgacagcaccgagugcagcaaccugcugcugcaguacggcagcuucugcacccagcugaaccgggcccugaccggcaucgccguggagcaggacaagaacacccaggagguguucgcccaggugaagcagaucuacaagaccccucccaucaaggacuucggcggcuucaacuucagccagauccugcccgaccccagcaagcccagcaagcggagcuucaucgaggaccugcuguucaacaaggugacccuagccgacgccggcuucaucaagcaguacggcgacugccucggcgacauagccgcccgggaccugaucugcgcccagaaguucaacggccugaccgugcugccuccccugcugaccgacgagaugaucgcccaguacaccagcgcccuguuagccggaaccaucaccagcggcuggacuuucggcgcuggagccgcucugcagauccccuucgccaugcagauggccuaccgguucaacggcaucggcgugacccagaacgugcuguacgagaaccagaagcugaucgccaaccaguucaacagcgccaucggcaagauccaggacagccugagcagcaccgcuagcgcccugggcaagcugcaggacguggugaaccagaacgcccaggcccugaacacccuggugaagcagcugagcagcaacuucggcgccaucagcagcgugcugaacgacauccugagccggcuggacccucccgaggccgaggugcagaucgaccggcugaucacuggccggcugcagagccugcagaccuacgugacccagcagcugauccgggccgccgagauucgggccagcgccaaccuggccgccaccaagaugagcgagugcgugcugggccagagcaagcggguggacuucugcggcaagggcuaccaccugaugagcuuuccccagagcgcaccccacggagugguguuccugcacgugaccuacgugcccgcccaggagaagaacuucaccaccgccccagccaucugccacgacggcaaggcccacuuuccccgggagggcguguucgugagcaacggcacccacugguucgugacccagcggaacuucuacgagccccagaucaucaccaccgacaacaccuucgugagcggcaacugcgacguggugaucggcaucgugaacaacaccguguacgauccccugcagcccgagcuggacagcuucaaggaggagcuggacaaguacuucaagaaucacaccagccccgacguggaccugggcgacaucagcggcaucaacgccagcguggugaacauccagaaggagaucgaucggcugaacgagguggccaagaaccugaacgagagccugaucgaccugcaggagcugggcaaguacgagcaguacaucaaguggcccugguacaucuggcugggcuucaucgccggccugaucgccaucgugauggugaccaucaugcugugcugcaugaccagcugcugcagcugccugaagggcuguugcagcugcggcagcugcugcaaguucgacgaggacgacagcgagcccgugcugaagggcgugaagcugcacuacaccugauaauaggcuggagccucgguggccuagcuucuugccccuugggccuccccccagccccuccuccccuuccugcacccguacccccguggucuuugaauaaagucugagugggcggcaaaaaaaaaaaaaaaaaaaaaaaaaaaaaaaaaaaaaaaaaaaaaaaaaaaaaaaaaaaaaaaaaaaaaaaaaaaaaaaaaaaaaaaaaaaaaaaaaaaa

SEQ ID NO: 26195 - RNA, 4095 nt, Artificial Sequence
  SARS-CoV-2/Wuhan/WIV05/2019__EPI_ISL_402128 spike protein mRNA gc (1-1273)(K986P_V987P_A222V_D614G)
gggaaauaagagagaaaagaagaguaagaagaaauauaagaccccggcgccgccaccauguucguguuccuggugcugcugccccuggugagcagccagugcgugaaccugaccacccggacccagcugccaccagccuacaccaacagcuucacccggggcgucuacuaccccgacaagguguuccggagcagcguccugcacagcacccaggaccuguuccugcccuucuucagcaacgugaccugguuccacgccauccacgugagcggcaccaacggcaccaagcgguucgacaaccccgugcugcccuucaacgacggcguguacuucgccagcaccgagaagagcaacaucauccggggcuggaucuucggcaccacccuggacagcaagacccagagccugcugaucgugaauaacgccaccaacguggugaucaaggugugcgaguuccaguucugcaacgaccccuuccugggcguguacuaccacaagaacaacaagagcuggauggagagcgaguuccggguguacagcagcgccaacaacugcaccuucgaguacgugagccagcccuuccugauggaccuggagggcaagcagggcaacuucaagaaccugcgggaguucguguucaagaacaucgacggcuacuucaagaucuacagcaagcacaccccaaucaaccuggugcgggaucugccccagggcuucucagugcuggagccccugguggaccugcccaucggcaucaacaucacccgguuccagacccugcuggcccugcaccggagcuaccugaccccaggcgacagcagcagcggguggacagcaggcgcggcugcuuacuacgugggcuaccugcagccccggaccuuccugcugaaguacaacgagaacggcaccaucaccgacgccguggacugcgcccuggacccucugagcgagaccaagugcacccugaagagcuucaccguggagaagggcaucuaccagaccagcaacuuccgggugcagcccaccgagagcaucgugcgguuccccaacaucaccaaccugugccccuucggcgagguguucaacgccacccgguucgccagcguguacgccuggaaccggaagcggaucagcaacugcguggccgacuacagcgugcuguacaacagcgccagcuucagcaccuucaagugcuacggcgugagccccaccaagcugaacgaccugugcuucaccaacguguacgccgacagcuucgugauccguggcgacgaggugcggcagaucgcacccggccagacaggcaagaucgccgacuacaacuacaagcugcccgacgacuucaccggcugcgugaucgccuggaacagcaacaaccucgacagcaaggugggcggcaacuacaacuaccuguaccggcuguuccggaagagcaaccugaagcccuucgagcgggacaucagcaccgagaucuaccaagccggcuccaccccuugcaacggcguggagggcuucaacugcuacuucccucugcagagcuacggcuuccagcccaccaacggcgugggcuaccagcccuaccgggugguggugcugagcuucgagcugcugcacgccccagccaccguguguggccccaagaagagcaccaaccuggugaagaacaagugcgugaacuucaacuucaacggccuuaccggcaccggcgugcugaccgagagcaacaagaaauuccugcccuuucagcaguucggccgggacaucgccgacaccaccgacgcugugcgggauccccagacccuggagauccuggacaucaccccuugcagcuucggcggcgugagcgugaucaccccaggcaccaacaccagcaaccagguggccgugcuguaccagggcgugaacugcaccgaggugcccguggccauccacgccgaccagcugacacccaccuggcgggucuacagcaccggcagcaacguguuccagacccgggccgguugccugaucggcgccgagcacgugaacaacagcuacgagugcgacauccccaucggcgccggcaucugugccagcuaccagacccagaccaauucaccccggagggcaaggagcguggccagccagagcaucaucgccuacaccaugagccugggcgccgagaacagcguggccuacagcaacaacagcaucgccauccccaccaacuucaccaucagcgugaccaccgagauucugcccgugagcaugaccaagaccagcguggacugcaccauguacaucugcggcgacagcaccgagugcagcaaccugcugcugcaguacggcagcuucugcacccagcugaaccgggcccugaccggcaucgccguggagcaggacaagaacacccaggagguguucgcccaggugaagcagaucuacaagaccccucccaucaaggacuucggcggcuucaacuucagccagauccugcccgaccccagcaagcccagcaagcggagcuucaucgaggaccugcuguucaacaaggugacccuagccgacgccggcuucaucaagcaguacggcgacugccucggcgacauagccgcccgggaccugaucugcgcccagaaguucaacggccugaccgugcugccuccccugcugaccgacgagaugaucgcccaguacaccagcgcccuguuagccggaaccaucaccagcggcuggacuuucggcgcuggagccgcucugcagauccccuucgccaugcagauggccuaccgguucaacggcaucggcgugacccagaacgugcuguacgagaaccagaagcugaucgccaaccaguucaacagcgccaucggcaagauccaggacagccugagcagcaccgcuagcgcccugggcaagcugcaggacguggugaaccagaacgcccaggcccugaacacccuggugaagcagcugagcagcaacuucggcgccaucagcagcgugcugaacgacauccugagccggcuggacccucccgaggccgaggugcagaucgaccggcugaucacuggccggcugcagagccugcagaccuacgugacccagcagcugauccgggccgccgagauucgggccagcgccaaccuggccgccaccaagaugagcgagugcgugcugggccagagcaagcggguggacuucugcggcaagggcuaccaccugaugagcuuuccccagagcgcaccccacggagugguguuccugcacgugaccuacgugcccgcccaggagaagaacuucaccaccgccccagccaucugccacgacggcaaggcccacuuuccccgggagggcguguucgugagcaacggcacccacugguucgugacccagcggaacuucuacgagccccagaucaucaccaccgacaacaccuucgugagcggcaacugcgacguggugaucggcaucgugaacaacaccguguacgauccccugcagcccgagcuggacagcuucaaggaggagcuggacaaguacuucaagaaucacaccagccccgacguggaccugggcgacaucagcggcaucaacgccagcguggugaacauccagaaggagaucgaucggcugaacgagguggccaagaaccugaacgagagccugaucgaccugcaggagcugggcaaguacgagcaguacaucaaguggcccugguacaucuggcugggcuucaucgccggccugaucgccaucgugauggugaccaucaugcugugcugcaugaccagcugcugcagcugccugaagggcuguugcagcugcggcagcugcugcaaguucgacgaggacgacagcgagcccgugcugaagggcgugaagcugcacuacaccugauaauaggcuggagccucgguggccuagcuucuugccccuugggccuccccccagccccuccuccccuuccugcacccguacccccguggucuuugaauaaagucugagugggcggcaaaaaaaaaaaaaaaaaaaaaaaaaaaaaaaaaaaaaaaaaaaaaaaaaaaaaaaaaaaaaaaaaaaaaaaaaaaaaaaaaaaaaaaaaaaaaaaaaaaa

SEQ ID NO: 26196 - RNA, 4095 nt, Artificial Sequence
  SARS-CoV-2/Wuhan/WIV05/2019__EPI_ISL_402128 spike protein mRNA gc (1-1273)(K986P_V987P_N439K_D614G)
gggaaauaagagagaaaagaagaguaagaagaaauauaagaccccggcgccgccaccauguucguguuccuggugcugcugccccuggugagcagccagugcgugaaccugaccacccggacccagcugccaccagccuacaccaacagcuucacccggggcgucuacuaccccgacaagguguuccggagcagcguccugcacagcacccaggaccuguuccugcccuucuucagcaacgugaccugguuccacgccauccacgugagcggcaccaacggcaccaagcgguucgacaaccccgugcugcccuucaacgacggcguguacuucgccagcaccgagaagagcaacaucauccggggcuggaucuucggcaccacccuggacagcaagacccagagccugcugaucgugaauaacgccaccaacguggugaucaaggugugcgaguuccaguucugcaacgaccccuuccugggcguguacuaccacaagaacaacaagagcuggauggagagcgaguuccggguguacagcagcgccaacaacugcaccuucgaguacgugagccagcccuuccugauggaccuggagggcaagcagggcaacuucaagaaccugcgggaguucguguucaagaacaucgacggcuacuucaagaucuacagcaagcacaccccaaucaaccuggugcgggaucugccccagggcuucucagcccuggagccccugguggaccugcccaucggcaucaacaucacccgguuccagacccugcuggcccugcaccggagcuaccugaccccaggcgacagcagcagcggguggacagcaggcgcggcugcuuacuacgugggcuaccugcagccccggaccuuccugcugaaguacaacgagaacggcaccaucaccgacgccguggacugcgcccuggacccucugagcgagaccaagugcacccugaagagcuucaccguggagaagggcaucuaccagaccagcaacuuccgggugcagcccaccgagagcaucgugcgguuccccaacaucaccaaccugugccccuucggcgagguguucaacgccacccgguucgccagcguguacgccuggaaccggaagcggaucagcaacugcguggccgacuacagcgugcuguacaacagcgccagcuucagcaccuucaagugcuacggcgugagccccaccaagcugaacgaccugugcuucaccaacguguacgccgacagcuucgugauccguggcgacgaggugcggcagaucgcacccggccagacaggcaagaucgccgacuacaacuacaagcugcccgacgacuucaccggcugcgugaucgccuggaacagcaagaaccucgacagcaaggugggcggcaacuacaacuaccuguaccggcuguuccggaagagcaaccugaagcccuucgagcgggacaucagcaccgagaucuaccaagccggcuccaccccuugcaacggcguggagggcuucaacugcuacuucccucugcagagcuacggcuuccagcccaccaacggcgugggcuaccagcccuaccgggugguggugcugagcuucgagcugcugcacgccccagccaccguguguggccccaagaagagcaccaaccuggugaagaacaagugcgugaacuucaacuucaacggccuuaccggcaccggcgugcugaccgagagcaacaagaaauuccugcccuuucagcaguucggccgggacaucgccgacaccaccgacgcugugcgggauccccagacccuggagauccuggacaucaccccuugcagcuucggcggcgugagcgugaucaccccaggcaccaacaccagcaaccagguggccgugcuguaccagggcgugaacugcaccgaggugcccguggccauccacgccgaccagcugacacccaccuggcgggucuacagcaccggcagcaacguguuccagacccgggccgguugccugaucggcgccgagcacgugaacaacagcuacgagugcgacauccccaucggcgccggcaucugugccagcuaccagacccagaccaauucaccccggagggcaaggagcguggccagccagagcaucaucgccuacaccaugagccugggcgccgagaacagcguggccuacagcaacaacagcaucgccauccccaccaacuucaccaucagcgugaccaccgagauucugcccgugagcaugaccaagaccagcguggacugcaccauguacaucugcggcgacagcaccgagugcagcaaccugcugcugcaguacggcagcuucugcacccagcugaaccgggcccugaccggcaucgccguggagcaggacaagaacacccaggagguguucgcccaggugaagcagaucuacaagaccccucccaucaaggacuucggcggcuucaacuucagccagauccugcccgaccccagcaagcccagcaagcggagcuucaucgaggaccugcuguucaacaaggugacccuagccgacgccggcuucaucaagcaguacggcgacugccucggcgacauagccgcccgggaccugaucugcgcccagaaguucaacggccugaccgugcugccuccccugcugaccgacgagaugaucgcccaguacaccagcgcccuguuagccggaaccaucaccagcggcuggacuuucggcgcuggagccgcucugcagauccccuucgccaugcagauggccuaccgguucaacggcaucggcgugacccagaacgugcuguacgagaaccagaagcugaucgccaaccaguucaacagcgccaucggcaagauccaggacagccugagcagcaccgcuagcgcccugggcaagcugcaggacguggugaaccagaacgcccaggcccugaacacccuggugaagcagcugagcagcaacuucggcgccaucagcagcgugcugaacgacauccugagccggcuggacccucccgaggccgaggugcagaucgaccggcugaucacuggccggcugcagagccugcagaccuacgugacccagcagcugauccgggccgccgagauucgggccagcgccaaccuggccgccaccaagaugagcgagugcgugcugggccagagcaagcggguggacuucugcggcaagggcuaccaccugaugagcuuuccccagagcgcaccccacggagugguguuccugcacgugaccuacgugcccgcccaggagaagaacuucaccaccgccccagccaucugccacgacggcaaggcccacuuuccccgggagggcguguucgugagcaacggcacccacugguucgugacccagcggaacuucuacgagccccagaucaucaccaccgacaacaccuucgugagcggcaacugcgacguggugaucggcaucgugaacaacaccguguacgauccccugcagcccgagcuggacagcuucaaggaggagcuggacaaguacuucaagaaucacaccagccccgacguggaccugggcgacaucagcggcaucaacgccagcguggugaacauccagaaggagaucgaucggcugaacgagguggccaagaaccugaacgagagccugaucgaccugcaggagcugggcaaguacgagcaguacaucaaguggcccugguacaucuggcugggcuucaucgccggccugaucgccaucgugauggugaccaucaugcugugcugcaugaccagcugcugcagcugccugaagggcuguugcagcugcggcagcugcugcaaguucgacgaggacgacagcgagcccgugcugaagggcgugaagcugcacuacaccugauaauaggcuggagccucgguggccuagcuucuugccccuugggccuccccccagccccuccuccccuuccugcacccguacccccguggucuuugaauaaagucugagugggcggcaaaaaaaaaaaaaaaaaaaaaaaaaaaaaaaaaaaaaaaaaaaaaaaaaaaaaaaaaaaaaaaaaaaaaaaaaaaaaaaaaaaaaaaaaaaaaaaaaaaa

SEQ ID NO: 26197 - RNA, 4095 nt, Artificial Sequence
  SARS-CoV-2/Wuhan/WIV05/2019__EPI_ISL_402128 spike protein mRNA gc (1-1273)(K986P_V987P_S477N_D614G)
gggaaauaagagagaaaagaagaguaagaagaaauauaagaccccggcgccgccaccauguucguguuccuggugcugcugccccuggugagcagccagugcgugaaccugaccacccggacccagcugccaccagccuacaccaacagcuucacccggggcgucuacuaccccgacaagguguuccggagcagcguccugcacagcacccaggaccuguuccugcccuucuucagcaacgugaccugguuccacgccauccacgugagcggcaccaacggcaccaagcgguucgacaaccccgugcugcccuucaacgacggcguguacuucgccagcaccgagaagagcaacaucauccggggcuggaucuucggcaccacccuggacagcaagacccagagccugcugaucgugaauaacgccaccaacguggugaucaaggugugcgaguuccaguucugcaacgaccccuuccugggcguguacuaccacaagaacaacaagagcuggauggagagcgaguuccggguguacagcagcgccaacaacugcaccuucgaguacgugagccagcccuuccugauggaccuggagggcaagcagggcaacuucaagaaccugcgggaguucguguucaagaacaucgacggcuacuucaagaucuacagcaagcacaccccaaucaaccuggugcgggaucugccccagggcuucucagcccuggagccccugguggaccugcccaucggcaucaacaucacccgguuccagacccugcuggcccugcaccggagcuaccugaccccaggcgacagcagcagcggguggacagcaggcgcggcugcuuacuacgugggcuaccugcagccccggaccuuccugcugaaguacaacgagaacggcaccaucaccgacgccguggacugcgcccuggacccucugagcgagaccaagugcacccugaagagcuucaccguggagaagggcaucuaccagaccagcaacuuccgggugcagcccaccgagagcaucgugcgguuccccaacaucaccaaccugugccccuucggcgagguguucaacgccacccgguucgccagcguguacgccuggaaccggaagcggaucagcaacugcguggccgacuacagcgugcuguacaacagcgccagcuucagcaccuucaagugcuacggcgugagccccaccaagcugaacgaccugugcuucaccaacguguacgccgacagcuucgugauccguggcgacgaggugcggcagaucgcacccggccagacaggcaagaucgccgacuacaacuacaagcugcccgacgacuucaccggcugcgugaucgccuggaacagcaacaaccucgacagcaaggugggcggcaacuacaacuaccuguaccggcuguuccggaagagcaaccugaagcccuucgagcgggacaucagcaccgagaucuaccaagccggcaacaccccuugcaacggcguggagggcuucaacugcuacuucccucugcagagcuacggcuuccagcccaccaacggcgugggcuaccagcccuaccgggugguggugcugagcuucgagcugcugcacgccccagccaccguguguggccccaagaagagcaccaaccuggugaagaacaagugcgugaacuucaacuucaacggccuuaccggcaccggcgugcugaccgagagcaacaagaaauuccugcccuuucagcaguucggccgggacaucgccgacaccaccgacgcugugcgggauccccagacccuggagauccuggacaucaccccuugcagcuucggcggcgugagcgugaucaccccaggcaccaacaccagcaaccagguggccgugcuguaccagggcgugaacugcaccgaggugcccguggccauccacgccgaccagcugacacccaccuggcgggucuacagcaccggcagcaacguguuccagacccgggccgguugccugaucggcgccgagcacgugaacaacagcuacgagugcgacauccccaucggcgccggcaucugugccagcuaccagacccagaccaauucaccccggagggcaaggagcguggccagccagagcaucaucgccuacaccaugagccugggcgccgagaacagcguggccuacagcaacaacagcaucgccauccccaccaacuucaccaucagcgugaccaccgagauucugcccgugagcaugaccaagaccagcguggacugcaccauguacaucugcggcgacagcaccgagugcagcaaccugcugcugcaguacggcagcuucugcacccagcugaaccgggcccugaccggcaucgccguggagcaggacaagaacacccaggagguguucgcccaggugaagcagaucuacaagaccccucccaucaaggacuucggcggcuucaacuucagccagauccugcccgaccccagcaagcccagcaagcggagcuucaucgaggaccugcuguucaacaaggugacccuagccgacgccggcuucaucaagcaguacggcgacugccucggcgacauagccgcccgggaccugaucugcgcccagaaguucaacggccugaccgugcugccuccccugcugaccgacgagaugaucgcccaguacaccagcgcccuguuagccggaaccaucaccagcggcuggacuuucggcgcuggagccgcucugcagauccccuucgccaugcagauggccuaccgguucaacggcaucggcgugacccagaacgugcuguacgagaaccagaagcugaucgccaaccaguucaacagcgccaucggcaagauccaggacagccugagcagcaccgcuagcgcccugggcaagcugcaggacguggugaaccagaacgcccaggcccugaacacccuggugaagcagcugagcagcaacuucggcgccaucagcagcgugcugaacgacauccugagccggcuggacccucccgaggccgaggugcagaucgaccggcugaucacuggccggcugcagagccugcagaccuacgugacccagcagcugauccgggccgccgagauucgggccagcgccaaccuggccgccaccaagaugagcgagugcgugcugggccagagcaagcggguggacuucugcggcaagggcuaccaccugaugagcuuuccccagagcgcaccccacggagugguguuccugcacgugaccuacgugcccgcccaggagaagaacuucaccaccgccccagccaucugccacgacggcaaggcccacuuuccccgggagggcguguucgugagcaacggcacccacugguucgugacccagcggaacuucuacgagccccagaucaucaccaccgacaacaccuucgugagcggcaacugcgacguggugaucggcaucgugaacaacaccguguacgauccccugcagcccgagcuggacagcuucaaggaggagcuggacaaguacuucaagaaucacaccagccccgacguggaccugggcgacaucagcggcaucaacgccagcguggugaacauccagaaggagaucgaucggcugaacgagguggccaagaaccugaacgagagccugaucgaccugcaggagcugggcaaguacgagcaguacaucaaguggcccugguacaucuggcugggcuucaucgccggccugaucgccaucgugauggugaccaucaugcugugcugcaugaccagcugcugcagcugccugaagggcuguugcagcugcggcagcugcugcaaguucgacgaggacgacagcgagcccgugcugaagggcgugaagcugcacuacaccugauaauaggcuggagccucgguggccuagcuucuugccccuugggccuccccccagccccuccuccccuuccugcacccguacccccguggucuuugaauaaagucugagugggcggcaaaaaaaaaaaaaaaaaaaaaaaaaaaaaaaaaaaaaaaaaaaaaaaaaaaaaaaaaaaaaaaaaaaaaaaaaaaaaaaaaaaaaaaaaaaaaaaaaaaa

SEQ ID NO: 26198 - RNA, 4095 nt, Artificial Sequence
  SARS-CoV-2/Wuhan/WIV05/2019__EPI_ISL_402128 spike protein mRNA gc (1-1273)(K986P_V987P_N501Y_D614G)
gggaaauaagagagaaaagaagaguaagaagaaauauaagaccccggcgccgccaccauguucguguuccuggugcugcugccccuggugagcagccagugcgugaaccugaccacccggacccagcugccaccagccuacaccaacagcuucacccggggcgucuacuaccccgacaagguguuccggagcagcguccugcacagcacccaggaccuguuccugcccuucuucagcaacgugaccugguuccacgccauccacgugagcggcaccaacggcaccaagcgguucgacaaccccgugcugcccuucaacgacggcguguacuucgccagcaccgagaagagcaacaucauccggggcuggaucuucggcaccacccuggacagcaagacccagagccugcugaucgugaauaacgccaccaacguggugaucaaggugugcgaguuccaguucugcaacgaccccuuccugggcguguacuaccacaagaacaacaagagcuggauggagagcgaguuccggguguacagcagcgccaacaacugcaccuucgaguacgugagccagcccuuccugauggaccuggagggcaagcagggcaacuucaagaaccugcgggaguucguguucaagaacaucgacggcuacuucaagaucuacagcaagcacaccccaaucaaccuggugcgggaucugccccagggcuucucagcccuggagccccugguggaccugcccaucggcaucaacaucacccgguuccagacccugcuggcccugcaccggagcuaccugaccccaggcgacagcagcagcggguggacagcaggcgcggcugcuuacuacgugggcuaccugcagccccggaccuuccugcugaaguacaacgagaacggcaccaucaccgacgccguggacugcgcccuggacccucugagcgagaccaagugcacccugaagagcuucaccguggagaagggcaucuaccagaccagcaacuuccgggugcagcccaccgagagcaucgugcgguuccccaacaucaccaaccugugccccuucggcgagguguucaacgccacccgguucgccagcguguacgccuggaaccggaagcggaucagcaacugcguggccgacuacagcgugcuguacaacagcgccagcuucagcaccuucaagugcuacggcgugagccccaccaagcugaacgaccugugcuucaccaacguguacgccgacagcuucgugauccguggcgacgaggugcggcagaucgcacccggccagacaggcaagaucgccgacuacaacuacaagcugcccgacgacuucaccggcugcgugaucgccuggaacagcaacaaccucgacagcaaggugggcggcaacuacaacuaccuguaccggcuguuccggaagagcaaccugaagcccuucgagcgggacaucagcaccgagaucuaccaagccggcuccaccccuugcaacggcguggagggcuucaacugcuacuucccucugcagagcuacggcuuccagcccaccuacggcgugggcuaccagcccuaccgggugguggugcugagcuucgagcugcugcacgccccagccaccguguguggccccaagaagagcaccaaccuggugaagaacaagugcgugaacuucaacuucaacggccuuaccggcaccggcgugcugaccgagagcaacaagaaauuccugcccuuucagcaguucggccgggacaucgccgacaccaccgacgcugugcgggauccccagacccuggagauccuggacaucaccccuugcagcuucggcggcgugagcgugaucaccccaggcaccaacaccagcaaccagguggccgugcuguaccagggcgugaacugcaccgaggugcccguggccauccacgccgaccagcugacacccaccuggcgggucuacagcaccggcagcaacguguuccagacccgggccgguugccugaucggcgccgagcacgugaacaacagcuacgagugcgacauccccaucggcgccggcaucugugccagcuaccagacccagaccaauucaccccggagggcaaggagcguggccagccagagcaucaucgccuacaccaugagccugggcgccgagaacagcguggccuacagcaacaacagcaucgccauccccaccaacuucaccaucagcgugaccaccgagauucugcccgugagcaugaccaagaccagcguggacugcaccauguacaucugcggcgacagcaccgagugcagcaaccugcugcugcaguacggcagcuucugcacccagcugaaccgggcccugaccggcaucgccguggagcaggacaagaacacccaggagguguucgcccaggugaagcagaucuacaagaccccucccaucaaggacuucggcggcuucaacuucagccagauccugcccgaccccagcaagcccagcaagcggagcuucaucgaggaccugcuguucaacaaggugacccuagccgacgccggcuucaucaagcaguacggcgacugccucggcgacauagccgcccgggaccugaucugcgcccagaaguucaacggccugaccgugcugccuccccugcugaccgacgagaugaucgcccaguacaccagcgcccuguuagccggaaccaucaccagcggcuggacuuucggcgcuggagccgcucugcagauccccuucgccaugcagauggccuaccgguucaacggcaucggcgugacccagaacgugcuguacgagaaccagaagcugaucgccaaccaguucaacagcgccaucggcaagauccaggacagccugagcagcaccgcuagcgcccugggcaagcugcaggacguggugaaccagaacgcccaggcccugaacacccuggugaagcagcugagcagcaacuucggcgccaucagcagcgugcugaacgacauccugagccggcuggacccucccgaggccgaggugcagaucgaccggcugaucacuggccggcugcagagccugcagaccuacgugacccagcagcugauccgggccgccgagauucgggccagcgccaaccuggccgccaccaagaugagcgagugcgugcugggccagagcaagcggguggacuucugcggcaagggcuaccaccugaugagcuuuccccagagcgcaccccacggagugguguuccugcacgugaccuacgugcccgcccaggagaagaacuucaccaccgccccagccaucugccacgacggcaaggcccacuuuccccgggagggcguguucgugagcaacggcacccacugguucgugacccagcggaacuucuacgagccccagaucaucaccaccgacaacaccuucgugagcggcaacugcgacguggugaucggcaucgugaacaacaccguguacgauccccugcagcccgagcuggacagcuucaaggaggagcuggacaaguacuucaagaaucacaccagccccgacguggaccugggcgacaucagcggcaucaacgccagcguggugaacauccagaaggagaucgaucggcugaacgagguggccaagaaccugaacgagagccugaucgaccugcaggagcugggcaaguacgagcaguacaucaaguggcccugguacaucuggcugggcuucaucgccggccugaucgccaucgugauggugaccaucaugcugugcugcaugaccagcugcugcagcugccugaagggcuguugcagcugcggcagcugcugcaaguucgacgaggacgacagcgagcccgugcugaagggcgugaagcugcacuacaccugauaauaggcuggagccucgguggccuagcuucuugccccuugggccuccccccagccccuccuccccuuccugcacccguacccccguggucuuugaauaaagucugagugggcggcaaaaaaaaaaaaaaaaaaaaaaaaaaaaaaaaaaaaaaaaaaaaaaaaaaaaaaaaaaaaaaaaaaaaaaaaaaaaaaaaaaaaaaaaaaaaaaaaaaaa

SEQ ID NO: 26199 - RNA, 4089 nt, Artificial Sequence
  SARS-CoV-2/Wuhan/WIV05/2019__EPI_ISL_402128 spike protein mRNA gc (1-1273)(K986P_V987P_H69del_V70del_D614G)
gggaaauaagagagaaaagaagaguaagaagaaauauaagaccccggcgccgccaccauguucguguuccuggugcugcugccccuggugagcagccagugcgugaaccugaccacccggacccagcugccaccagccuacaccaacagcuucacccggggcgucuacuaccccgacaagguguuccggagcagcguccugcacagcacccaggaccuguuccugcccuucuucagcaacgugaccugguuccacgccaucagcggcaccaacggcaccaagcgguucgacaaccccgugcugcccuucaacgacggcguguacuucgccagcaccgagaagagcaacaucauccggggcuggaucuucggcaccacccuggacagcaagacccagagccugcugaucgugaauaacgccaccaacguggugaucaaggugugcgaguuccaguucugcaacgaccccuuccugggcguguacuaccacaagaacaacaagagcuggauggagagcgaguuccggguguacagcagcgccaacaacugcaccuucgaguacgugagccagcccuuccugauggaccuggagggcaagcagggcaacuucaagaaccugcgggaguucguguucaagaacaucgacggcuacuucaagaucuacagcaagcacaccccaaucaaccuggugcgggaucugccccagggcuucucagcccuggagccccugguggaccugcccaucggcaucaacaucacccgguuccagacccugcuggcccugcaccggagcuaccugaccccaggcgacagcagcagcggguggacagcaggcgcggcugcuuacuacgugggcuaccugcagccccggaccuuccugcugaaguacaacgagaacggcaccaucaccgacgccguggacugcgcccuggacccucugagcgagaccaagugcacccugaagagcuucaccguggagaagggcaucuaccagaccagcaacuuccgggugcagcccaccgagagcaucgugcgguuccccaacaucaccaaccugugccccuucggcgagguguucaacgccacccgguucgccagcguguacgccuggaaccggaagcggaucagcaacugcguggccgacuacagcgugcuguacaacagcgccagcuucagcaccuucaagugcuacggcgugagccccaccaagcugaacgaccugugcuucaccaacguguacgccgacagcuucgugauccguggcgacgaggugcggcagaucgcacccggccagacaggcaagaucgccgacuacaacuacaagcugcccgacgacuucaccggcugcgugaucgccuggaacagcaacaaccucgacagcaaggugggcggcaacuacaacuaccuguaccggcuguuccggaagagcaaccugaagcccuucgagcgggacaucagcaccgagaucuaccaagccggcuccaccccuugcaacggcguggagggcuucaacugcuacuucccucugcagagcuacggcuuccagcccaccaacggcgugggcuaccagcccuaccgggugguggugcugagcuucgagcugcugcacgccccagccaccguguguggccccaagaagagcaccaaccuggugaagaacaagugcgugaacuucaacuucaacggccuuaccggcaccggcgugcugaccgagagcaacaagaaauuccugcccuuucagcaguucggccgggacaucgccgacaccaccgacgcugugcgggauccccagacccuggagauccuggacaucaccccuugcagcuucggcggcgugagcgugaucaccccaggcaccaacaccagcaaccagguggccgugcuguaccagggcgugaacugcaccgaggugcccguggccauccacgccgaccagcugacacccaccuggcgggucuacagcaccggcagcaacguguuccagacccgggccgguugccugaucggcgccgagcacgugaacaacagcuacgagugcgacauccccaucggcgccggcaucugugccagcuaccagacccagaccaauucaccccggagggcaaggagcguggccagccagagcaucaucgccuacaccaugagccugggcgccgagaacagcguggccuacagcaacaacagcaucgccauccccaccaacuucaccaucagcgugaccaccgagauucugcccgugagcaugaccaagaccagcguggacugcaccauguacaucugcggcgacagcaccgagugcagcaaccugcugcugcaguacggcagcuucugcacccagcugaaccgggcccugaccggcaucgccguggagcaggacaagaacacccaggagguguucgcccaggugaagcagaucuacaagaccccucccaucaaggacuucggcggcuucaacuucagccagauccugcccgaccccagcaagcccagcaagcggagcuucaucgaggaccugcuguucaacaaggugacccuagccgacgccggcuucaucaagcaguacggcgacugccucggcgacauagccgcccgggaccugaucugcgcccagaaguucaacggccugaccgugcugccuccccugcugaccgacgagaugaucgcccaguacaccagcgcccuguuagccggaaccaucaccagcggcuggacuuucggcgcuggagccgcucugcagauccccuucgccaugcagauggccuaccgguucaacggcaucggcgugacccagaacgugcuguacgagaaccagaagcugaucgccaaccaguucaacagcgccaucggcaagauccaggacagccugagcagcaccgcuagcgcccugggcaagcugcaggacguggugaaccagaacgcccaggcccugaacacccuggugaagcagcugagcagcaacuucggcgccaucagcagcgugcugaacgacauccugagccggcuggacccucccgaggccgaggugcagaucgaccggcugaucacuggccggcugcagagccugcagaccuacgugacccagcagcugauccgggccgccgagauucgggccagcgccaaccuggccgccaccaagaugagcgagugcgugcugggccagagcaagcggguggacuucugcggcaagggcuaccaccugaugagcuuuccccagagcgcaccccacggagugguguuccugcacgugaccuacgugcccgcccaggagaagaacuucaccaccgccccagccaucugccacgacggcaaggcccacuuuccccgggagggcguguucgugagcaacggcacccacugguucgugacccagcggaacuucuacgagccccagaucaucaccaccgacaacaccuucgugagcggcaacugcgacguggugaucggcaucgugaacaacaccguguacgauccccugcagcccgagcuggacagcuucaaggaggagcuggacaaguacuucaagaaucacaccagccccgacguggaccugggcgacaucagcggcaucaacgccagcguggugaacauccagaaggagaucgaucggcugaacgagguggccaagaaccugaacgagagccugaucgaccugcaggagcugggcaaguacgagcaguacaucaaguggcccugguacaucuggcugggcuucaucgccggccugaucgccaucgugauggugaccaucaugcugugcugcaugaccagcugcugcagcugccugaagggcuguugcagcugcggcagcugcugcaaguucgacgaggacgacagcgagcccgugcugaagggcgugaagcugcacuacaccugauaauaggcuggagccucgguggccuagcuucuugccccuugggccuccccccagccccuccuccccuuccugcacccguacccccguggucuuugaauaaagucugagugggcggcaaaaaaaaaaaaaaaaaaaaaaaaaaaaaaaaaaaaaaaaaaaaaaaaaaaaaaaaaaaaaaaaaaaaaaaaaaaaaaaaaaaaaaaaaaaaaaaaaaaa

SEQ ID NO: 26200 - RNA, 4095 nt, Artificial Sequence
  SARS-CoV-2/Wuhan/WIV05/2019__EPI_ISL_402128 spike protein mRNA gc (1-1273)(K986P_V987P_Y453F_D614G)
gggaaauaagagagaaaagaagaguaagaagaaauauaagaccccggcgccgccaccauguucguguuccuggugcugcugccccuggugagcagccagugcgugaaccugaccacccggacccagcugccaccagccuacaccaacagcuucacccggggcgucuacuaccccgacaagguguuccggagcagcguccugcacagcacccaggaccuguuccugcccuucuucagcaacgugaccugguuccacgccauccacgugagcggcaccaacggcaccaagcgguucgacaaccccgugcugcccuucaacgacggcguguacuucgccagcaccgagaagagcaacaucauccggggcuggaucuucggcaccacccuggacagcaagacccagagccugcugaucgugaauaacgccaccaacguggugaucaaggugugcgaguuccaguucugcaacgaccccuuccugggcguguacuaccacaagaacaacaagagcuggauggagagcgaguuccggguguacagcagcgccaacaacugcaccuucgaguacgugagccagcccuuccugauggaccuggagggcaagcagggcaacuucaagaaccugcgggaguucguguucaagaacaucgacggcuacuucaagaucuacagcaagcacaccccaaucaaccuggugcgggaucugccccagggcuucucagcccuggagccccugguggaccugcccaucggcaucaacaucacccgguuccagacccugcuggcccugcaccggagcuaccugaccccaggcgacagcagcagcggguggacagcaggcgcggcugcuuacuacgugggcuaccugcagccccggaccuuccugcugaaguacaacgagaacggcaccaucaccgacgccguggacugcgcccuggacccucugagcgagaccaagugcacccugaagagcuucaccguggagaagggcaucuaccagaccagcaacuuccgggugcagcccaccgagagcaucgugcgguuccccaacaucaccaaccugugccccuucggcgagguguucaacgccacccgguucgccagcguguacgccuggaaccggaagcggaucagcaacugcguggccgacuacagcgugcuguacaacagcgccagcuucagcaccuucaagugcuacggcgugagccccaccaagcugaacgaccugugcuucaccaacguguacgccgacagcuucgugauccguggcgacgaggugcggcagaucgcacccggccagacaggcaagaucgccgacuacaacuacaagcugcccgacgacuucaccggcugcgugaucgccuggaacagcaacaaccucgacagcaaggugggcggcaacuacaacuaccuguuccggcuguuccggaagagcaaccugaagcccuucgagcgggacaucagcaccgagaucuaccaagccggcuccaccccuugcaacggcguggagggcuucaacugcuacuucccucugcagagcuacggcuuccagcccaccaacggcgugggcuaccagcccuaccgggugguggugcugagcuucgagcugcugcacgccccagccaccguguguggccccaagaagagcaccaaccuggugaagaacaagugcgugaacuucaacuucaacggccuuaccggcaccggcgugcugaccgagagcaacaagaaauuccugcccuuucagcaguucggccgggacaucgccgacaccaccgacgcugugcgggauccccagacccuggagauccuggacaucaccccuugcagcuucggcggcgugagcgugaucaccccaggcaccaacaccagcaaccagguggccgugcuguaccagggcgugaacugcaccgaggugcccguggccauccacgccgaccagcugacacccaccuggcgggucuacagcaccggcagcaacguguuccagacccgggccgguugccugaucggcgccgagcacgugaacaacagcuacgagugcgacauccccaucggcgccggcaucugugccagcuaccagacccagaccaauucaccccggagggcaaggagcguggccagccagagcaucaucgccuacaccaugagccugggcgccgagaacagcguggccuacagcaacaacagcaucgccauccccaccaacuucaccaucagcgugaccaccgagauucugcccgugagcaugaccaagaccagcguggacugcaccauguacaucugcggcgacagcaccgagugcagcaaccugcugcugcaguacggcagcuucugcacccagcugaaccgggcccugaccggcaucgccguggagcaggacaagaacacccaggagguguucgcccaggugaagcagaucuacaagaccccucccaucaaggacuucggcggcuucaacuucagccagauccugcccgaccccagcaagcccagcaagcggagcuucaucgaggaccugcuguucaacaaggugacccuagccgacgccggcuucaucaagcaguacggcgacugccucggcgacauagccgcccgggaccugaucugcgcccagaaguucaacggccugaccgugcugccuccccugcugaccgacgagaugaucgcccaguacaccagcgcccuguuagccggaaccaucaccagcggcuggacuuucggcgcuggagccgcucugcagauccccuucgccaugcagauggccuaccgguucaacggcaucggcgugacccagaacgugcuguacgagaaccagaagcugaucgccaaccaguucaacagcgccaucggcaagauccaggacagccugagcagcaccgcuagcgcccugggcaagcugcaggacguggugaaccagaacgcccaggcccugaacacccuggugaagcagcugagcagcaacuucggcgccaucagcagcgugcugaacgacauccugagccggcuggacccucccgaggccgaggugcagaucgaccggcugaucacuggccggcugcagagccugcagaccuacgugacccagcagcugauccgggccgccgagauucgggccagcgccaaccuggccgccaccaagaugagcgagugcgugcugggccagagcaagcggguggacuucugcggcaagggcuaccaccugaugagcuuuccccagagcgcaccccacggagugguguuccugcacgugaccuacgugcccgcccaggagaagaacuucaccaccgccccagccaucugccacgacggcaaggcccacuuuccccgggagggcguguucgugagcaacggcacccacugguucgugacccagcggaacuucuacgagccccagaucaucaccaccgacaacaccuucgugagcggcaacugcgacguggugaucggcaucgugaacaacaccguguacgauccccugcagcccgagcuggacagcuucaaggaggagcuggacaaguacuucaagaaucacaccagccccgacguggaccugggcgacaucagcggcaucaacgccagcguggugaacauccagaaggagaucgaucggcugaacgagguggccaagaaccugaacgagagccugaucgaccugcaggagcugggcaaguacgagcaguacaucaaguggcccugguacaucuggcugggcuucaucgccggccugaucgccaucgugauggugaccaucaugcugugcugcaugaccagcugcugcagcugccugaagggcuguugcagcugcggcagcugcugcaaguucgacgaggacgacagcgagcccgugcugaagggcgugaagcugcacuacaccugauaauaggcuggagccucgguggccuagcuucuugccccuugggccuccccccagccccuccuccccuuccugcacccguacccccguggucuuugaauaaagucugagugggcggcaaaaaaaaaaaaaaaaaaaaaaaaaaaaaaaaaaaaaaaaaaaaaaaaaaaaaaaaaaaaaaaaaaaaaaaaaaaaaaaaaaaaaaaaaaaaaaaaaaaa

SEQ ID NO: 26201 - RNA, 4095 nt, Artificial Sequence
  SARS-CoV-2/Wuhan/WIV05/2019__EPI_ISL_402128 spike protein mRNA gc (1-1273)(K986P_V987P_D614G_I692V)
gggaaauaagagagaaaagaagaguaagaagaaauauaagaccccggcgccgccaccauguucguguuccuggugcugcugccccuggugagcagccagugcgugaaccugaccacccggacccagcugccaccagccuacaccaacagcuucacccggggcgucuacuaccccgacaagguguuccggagcagcguccugcacagcacccaggaccuguuccugcccuucuucagcaacgugaccugguuccacgccauccacgugagcggcaccaacggcaccaagcgguucgacaaccccgugcugcccuucaacgacggcguguacuucgccagcaccgagaagagcaacaucauccggggcuggaucuucggcaccacccuggacagcaagacccagagccugcugaucgugaauaacgccaccaacguggugaucaaggugugcgaguuccaguucugcaacgaccccuuccugggcguguacuaccacaagaacaacaagagcuggauggagagcgaguuccggguguacagcagcgccaacaacugcaccuucgaguacgugagccagcccuuccugauggaccuggagggcaagcagggcaacuucaagaaccugcgggaguucguguucaagaacaucgacggcuacuucaagaucuacagcaagcacaccccaaucaaccuggugcgggaucugccccagggcuucucagcccuggagccccugguggaccugcccaucggcaucaacaucacccgguuccagacccugcuggcccugcaccggagcuaccugaccccaggcgacagcagcagcggguggacagcaggcgcggcugcuuacuacgugggcuaccugcagccccggaccuuccugcugaaguacaacgagaacggcaccaucaccgacgccguggacugcgcccuggacccucugagcgagaccaagugcacccugaagagcuucaccguggagaagggcaucuaccagaccagcaacuuccgggugcagcccaccgagagcaucgugcgguuccccaacaucaccaaccugugccccuucggcgagguguucaacgccacccgguucgccagcguguacgccuggaaccggaagcggaucagcaacugcguggccgacuacagcgugcuguacaacagcgccagcuucagcaccuucaagugcuacggcgugagccccaccaagcugaacgaccugugcuucaccaacguguacgccgacagcuucgugauccguggcgacgaggugcggcagaucgcacccggccagacaggcaagaucgccgacuacaacuacaagcugcccgacgacuucaccggcugcgugaucgccuggaacagcaacaaccucgacagcaaggugggcggcaacuacaacuaccuguaccggcuguuccggaagagcaaccugaagcccuucgagcgggacaucagcaccgagaucuaccaagccggcuccaccccuugcaacggcguggagggcuucaacugcuacuucccucugcagagcuacggcuuccagcccaccaacggcgugggcuaccagcccuaccgggugguggugcugagcuucgagcugcugcacgccccagccaccguguguggccccaagaagagcaccaaccuggugaagaacaagugcgugaacuucaacuucaacggccuuaccggcaccggcgugcugaccgagagcaacaagaaauuccugcccuuucagcaguucggccgggacaucgccgacaccaccgacgcugugcgggauccccagacccuggagauccuggacaucaccccuugcagcuucggcggcgugagcgugaucaccccaggcaccaacaccagcaaccagguggccgugcuguaccagggcgugaacugcaccgaggugcccguggccauccacgccgaccagcugacacccaccuggcgggucuacagcaccggcagcaacguguuccagacccgggccgguugccugaucggcgccgagcacgugaacaacagcuacgagugcgacauccccaucggcgccggcaucugugccagcuaccagacccagaccaauucaccccggagggcaaggagcguggccagccagagcgugaucgccuacaccaugagccugggcgccgagaacagcguggccuacagcaacaacagcaucgccauccccaccaacuucaccaucagcgugaccaccgagauucugcccgugagcaugaccaagaccagcguggacugcaccauguacaucugcggcgacagcaccgagugcagcaaccugcugcugcaguacggcagcuucugcacccagcugaaccgggcccugaccggcaucgccguggagcaggacaagaacacccaggagguguucgcccaggugaagcagaucuacaagaccccucccaucaaggacuucggcggcuucaacuucagccagauccugcccgaccccagcaagcccagcaagcggagcuucaucgaggaccugcuguucaacaaggugacccuagccgacgccggcuucaucaagcaguacggcgacugccucggcgacauagccgcccgggaccugaucugcgcccagaaguucaacggccugaccgugcugccuccccugcugaccgacgagaugaucgcccaguacaccagcgcccuguuagccggaaccaucaccagcggcuggacuuucggcgcuggagccgcucugcagauccccuucgccaugcagauggccuaccgguucaacggcaucggcgugacccagaacgugcuguacgagaaccagaagcugaucgccaaccaguucaacagcgccaucggcaagauccaggacagccugagcagcaccgcuagcgcccugggcaagcugcaggacguggugaaccagaacgcccaggcccugaacacccuggugaagcagcugagcagcaacuucggcgccaucagcagcgugcugaacgacauccugagccggcuggacccucccgaggccgaggugcagaucgaccggcugaucacuggccggcugcagagccugcagaccuacgugacccagcagcugauccgggccgccgagauucgggccagcgccaaccuggccgccaccaagaugagcgagugcgugcugggccagagcaagcggguggacuucugcggcaagggcuaccaccugaugagcuuuccccagagcgcaccccacggagugguguuccugcacgugaccuacgugcccgcccaggagaagaacuucaccaccgccccagccaucugccacgacggcaaggcccacuuuccccgggagggcguguucgugagcaacggcacccacugguucgugacccagcggaacuucuacgagccccagaucaucaccaccgacaacaccuucgugagcggcaacugcgacguggugaucggcaucgugaacaacaccguguacgauccccugcagcccgagcuggacagcuucaaggaggagcuggacaaguacuucaagaaucacaccagccccgacguggaccugggcgacaucagcggcaucaacgccagcguggugaacauccagaaggagaucgaucggcugaacgagguggccaagaaccugaacgagagccugaucgaccugcaggagcugggcaaguacgagcaguacaucaaguggcccugguacaucuggcugggcuucaucgccggccugaucgccaucgugauggugaccaucaugcugugcugcaugaccagcugcugcagcugccugaagggcuguugcagcugcggcagcugcugcaaguucgacgaggacgacagcgagcccgugcugaagggcgugaagcugcacuacaccugauaauaggcuggagccucgguggccuagcuucuugccccuugggccuccccccagccccuccuccccuuccugcacccguacccccguggucuuugaauaaagucugagugggcggcaaaaaaaaaaaaaaaaaaaaaaaaaaaaaaaaaaaaaaaaaaaaaaaaaaaaaaaaaaaaaaaaaaaaaaaaaaaaaaaaaaaaaaaaaaaaaaaaaaaa

SEQ ID NO: 26202 - RNA, 4095 nt, Artificial Sequence
  SARS-CoV-2/Wuhan/WIV05/2019__EPI_ISL_402128 spike protein mRNA gc (1-1273)(K986P_V987P_D614G_M1229I)
gggaaauaagagagaaaagaagaguaagaagaaauauaagaccccggcgccgccaccauguucguguuccuggugcugcugccccuggugagcagccagugcgugaaccugaccacccggacccagcugccaccagccuacaccaacagcuucacccggggcgucuacuaccccgacaagguguuccggagcagcguccugcacagcacccaggaccuguuccugcccuucuucagcaacgugaccugguuccacgccauccacgugagcggcaccaacggcaccaagcgguucgacaaccccgugcugcccuucaacgacggcguguacuucgccagcaccgagaagagcaacaucauccggggcuggaucuucggcaccacccuggacagcaagacccagagccugcugaucgugaauaacgccaccaacguggugaucaaggugugcgaguuccaguucugcaacgaccccuuccugggcguguacuaccacaagaacaacaagagcuggauggagagcgaguuccggguguacagcagcgccaacaacugcaccuucgaguacgugagccagcccuuccugauggaccuggagggcaagcagggcaacuucaagaaccugcgggaguucguguucaagaacaucgacggcuacuucaagaucuacagcaagcacaccccaaucaaccuggugcgggaucugccccagggcuucucagcccuggagccccugguggaccugcccaucggcaucaacaucacccgguuccagacccugcuggcccugcaccggagcuaccugaccccaggcgacagcagcagcggguggacagcaggcgcggcugcuuacuacgugggcuaccugcagccccggaccuuccugcugaaguacaacgagaacggcaccaucaccgacgccguggacugcgcccuggacccucugagcgagaccaagugcacccugaagagcuucaccguggagaagggcaucuaccagaccagcaacuuccgggugcagcccaccgagagcaucgugcgguuccccaacaucaccaaccugugccccuucggcgagguguucaacgccacccgguucgccagcguguacgccuggaaccggaagcggaucagcaacugcguggccgacuacagcgugcuguacaacagcgccagcuucagcaccuucaagugcuacggcgugagccccaccaagcugaacgaccugugcuucaccaacguguacgccgacagcuucgugauccguggcgacgaggugcggcagaucgcacccggccagacaggcaagaucgccgacuacaacuacaagcugcccgacgacuucaccggcugcgugaucgccuggaacagcaacaaccucgacagcaaggugggcggcaacuacaacuaccuguaccggcuguuccggaagagcaaccugaagcccuucgagcgggacaucagcaccgagaucuaccaagccggcuccaccccuugcaacggcguggagggcuucaacugcuacuucccucugcagagcuacggcuuccagcccaccaacggcgugggcuaccagcccuaccgggugguggugcugagcuucgagcugcugcacgccccagccaccguguguggccccaagaagagcaccaaccuggugaagaacaagugcgugaacuucaacuucaacggccuuaccggcaccggcgugcugaccgagagcaacaagaaauuccugcccuuucagcaguucggccgggacaucgccgacaccaccgacgcugugcgggauccccagacccuggagauccuggacaucaccccuugcagcuucggcggcgugagcgugaucaccccaggcaccaacaccagcaaccagguggccgugcuguaccagggcgugaacugcaccgaggugcccguggccauccacgccgaccagcugacacccaccuggcgggucuacagcaccggcagcaacguguuccagacccgggccgguugccugaucggcgccgagcacgugaacaacagcuacgagugcgacauccccaucggcgccggcaucugugccagcuaccagacccagaccaauucaccccggagggcaaggagcguggccagccagagcaucaucgccuacaccaugagccugggcgccgagaacagcguggccuacagcaacaacagcaucgccauccccaccaacuucaccaucagcgugaccaccgagauucugcccgugagcaugaccaagaccagcguggacugcaccauguacaucugcggcgacagcaccgagugcagcaaccugcugcugcaguacggcagcuucugcacccagcugaaccgggcccugaccggcaucgccguggagcaggacaagaacacccaggagguguucgcccaggugaagcagaucuacaagaccccucccaucaaggacuucggcggcuucaacuucagccagauccugcccgaccccagcaagcccagcaagcggagcuucaucgaggaccugcuguucaacaaggugacccuagccgacgccggcuucaucaagcaguacggcgacugccucggcgacauagccgcccgggaccugaucugcgcccagaaguucaacggccugaccgugcugccuccccugcugaccgacgagaugaucgcccaguacaccagcgcccuguuagccggaaccaucaccagcggcuggacuuucggcgcuggagccgcucugcagauccccuucgccaugcagauggccuaccgguucaacggcaucggcgugacccagaacgugcuguacgagaaccagaagcugaucgccaaccaguucaacagcgccaucggcaagauccaggacagccugagcagcaccgcuagcgcccugggcaagcugcaggacguggugaaccagaacgcccaggcccugaacacccuggugaagcagcugagcagcaacuucggcgccaucagcagcgugcugaacgacauccugagccggcuggacccucccgaggccgaggugcagaucgaccggcugaucacuggccggcugcagagccugcagaccuacgugacccagcagcugauccgggccgccgagauucgggccagcgccaaccuggccgccaccaagaugagcgagugcgugcugggccagagcaagcggguggacuucugcggcaagggcuaccaccugaugagcuuuccccagagcgcaccccacggagugguguuccugcacgugaccuacgugcccgcccaggagaagaacuucaccaccgccccagccaucugccacgacggcaaggcccacuuuccccgggagggcguguucgugagcaacggcacccacugguucgugacccagcggaacuucuacgagccccagaucaucaccaccgacaacaccuucgugagcggcaacugcgacguggugaucggcaucgugaacaacaccguguacgauccccugcagcccgagcuggacagcuucaaggaggagcuggacaaguacuucaagaaucacaccagccccgacguggaccugggcgacaucagcggcaucaacgccagcguggugaacauccagaaggagaucgaucggcugaacgagguggccaagaaccugaacgagagccugaucgaccugcaggagcugggcaaguacgagcaguacaucaaguggcccugguacaucuggcugggcuucaucgccggccugaucgccaucgugaucgugaccaucaugcugugcugcaugaccagcugcugcagcugccugaagggcuguugcagcugcggcagcugcugcaaguucgacgaggacgacagcgagcccgugcugaagggcgugaagcugcacuacaccugauaauaggcuggagccucgguggccuagcuucuugccccuugggccuccccccagccccuccuccccuuccugcacccguacccccguggucuuugaauaaagucugagugggcggcaaaaaaaaaaaaaaaaaaaaaaaaaaaaaaaaaaaaaaaaaaaaaaaaaaaaaaaaaaaaaaaaaaaaaaaaaaaaaaaaaaaaaaaaaaaaaaaaaaaa

SEQ ID NO: 26203 - RNA, 4089 nt, Artificial Sequence
  SARS-CoV-2/Wuhan/WIV05/2019__EPI_ISL_402128 spike protein mRNA gc (1-1273)(K986P_V987P_H69del_V70del_A222V_Y453F_S477N_D614G_I692V)
gggaaauaagagagaaaagaagaguaagaagaaauauaagaccccggcgccgccaccauguucguguuccuggugcugcugccccuggugagcagccagugcgugaaccugaccacccggacccagcugccaccagccuacaccaacagcuucacccggggcgucuacuaccccgacaagguguuccggagcagcguccugcacagcacccaggaccuguuccugcccuucuucagcaacgugaccugguuccacgccaucagcggcaccaacggcaccaagcgguucgacaaccccgugcugcccuucaacgacggcguguacuucgccagcaccgagaagagcaacaucauccggggcuggaucuucggcaccacccuggacagcaagacccagagccugcugaucgugaauaacgccaccaacguggugaucaaggugugcgaguuccaguucugcaacgaccccuuccugggcguguacuaccacaagaacaacaagagcuggauggagagcgaguuccggguguacagcagcgccaacaacugcaccuucgaguacgugagccagcccuuccugauggaccuggagggcaagcagggcaacuucaagaaccugcgggaguucguguucaagaacaucgacggcuacuucaagaucuacagcaagcacaccccaaucaaccuggugcgggaucugccccagggcuucucagugcuggagccccugguggaccugcccaucggcaucaacaucacccgguuccagacccugcuggcccugcaccggagcuaccugaccccaggcgacagcagcagcggguggacagcaggcgcggcugcuuacuacgugggcuaccugcagccccggaccuuccugcugaaguacaacgagaacggcaccaucaccgacgccguggacugcgcccuggacccucugagcgagaccaagugcacccugaagagcuucaccguggagaagggcaucuaccagaccagcaacuuccgggugcagcccaccgagagcaucgugcgguuccccaacaucaccaaccugugccccuucggcgagguguucaacgccacccgguucgccagcguguacgccuggaaccggaagcggaucagcaacugcguggccgacuacagcgugcuguacaacagcgccagcuucagcaccuucaagugcuacggcgugagccccaccaagcugaacgaccugugcuucaccaacguguacgccgacagcuucgugauccguggcgacgaggugcggcagaucgcacccggccagacaggcaagaucgccgacuacaacuacaagcugcccgacgacuucaccggcugcgugaucgccuggaacagcaacaaccucgacagcaaggugggcggcaacuacaacuaccuguuccggcuguuccggaagagcaaccugaagcccuucgagcgggacaucagcaccgagaucuaccaagccggcaacaccccuugcaacggcguggagggcuucaacugcuacuucccucugcagagcuacggcuuccagcccaccaacggcgugggcuaccagcccuaccgggugguggugcugagcuucgagcugcugcacgccccagccaccguguguggccccaagaagagcaccaaccuggugaagaacaagugcgugaacuucaacuucaacggccuuaccggcaccggcgugcugaccgagagcaacaagaaauuccugcccuuucagcaguucggccgggacaucgccgacaccaccgacgcugugcgggauccccagacccuggagauccuggacaucaccccuugcagcuucggcggcgugagcgugaucaccccaggcaccaacaccagcaaccagguggccgugcuguaccagggcgugaacugcaccgaggugcccguggccauccacgccgaccagcugacacccaccuggcgggucuacagcaccggcagcaacguguuccagacccgggccgguugccugaucggcgccgagcacgugaacaacagcuacgagugcgacauccccaucggcgccggcaucugugccagcuaccagacccagaccaauucaccccggagggcaaggagcguggccagccagagcgugaucgccuacaccaugagccugggcgccgagaacagcguggccuacagcaacaacagcaucgccauccccaccaacuucaccaucagcgugaccaccgagauucugcccgugagcaugaccaagaccagcguggacugcaccauguacaucugcggcgacagcaccgagugcagcaaccugcugcugcaguacggcagcuucugcacccagcugaaccgggcccugaccggcaucgccguggagcaggacaagaacacccaggagguguucgcccaggugaagcagaucuacaagaccccucccaucaaggacuucggcggcuucaacuucagccagauccugcccgaccccagcaagcccagcaagcggagcuucaucgaggaccugcuguucaacaaggugacccuagccgacgccggcuucaucaagcaguacggcgacugccucggcgacauagccgcccgggaccugaucugcgcccagaaguucaacggccugaccgugcugccuccccugcugaccgacgagaugaucgcccaguacaccagcgcccuguuagccggaaccaucaccagcggcuggacuuucggcgcuggagccgcucugcagauccccuucgccaugcagauggccuaccgguucaacggcaucggcgugacccagaacgugcuguacgagaaccagaagcugaucgccaaccaguucaacagcgccaucggcaagauccaggacagccugagcagcaccgcuagcgcccugggcaagcugcaggacguggugaaccagaacgcccaggcccugaacacccuggugaagcagcugagcagcaacuucggcgccaucagcagcgugcugaacgacauccugagccggcuggacccucccgaggccgaggugcagaucgaccggcugaucacuggccggcugcagagccugcagaccuacgugacccagcagcugauccgggccgccgagauucgggccagcgccaaccuggccgccaccaagaugagcgagugcgugcugggccagagcaagcggguggacuucugcggcaagggcuaccaccugaugagcuuuccccagagcgcaccccacggagugguguuccugcacgugaccuacgugcccgcccaggagaagaacuucaccaccgccccagccaucugccacgacggcaaggcccacuuuccccgggagggcguguucgugagcaacggcacccacugguucgugacccagcggaacuucuacgagccccagaucaucaccaccgacaacaccuucgugagcggcaacugcgacguggugaucggcaucgugaacaacaccguguacgauccccugcagcccgagcuggacagcuucaaggaggagcuggacaaguacuucaagaaucacaccagccccgacguggaccugggcgacaucagcggcaucaacgccagcguggugaacauccagaaggagaucgaucggcugaacgagguggccaagaaccugaacgagagccugaucgaccugcaggagcugggcaaguacgagcaguacaucaaguggcccugguacaucuggcugggcuucaucgccggccugaucgccaucgugauggugaccaucaugcugugcugcaugaccagcugcugcagcugccugaagggcuguugcagcugcggcagcugcugcaaguucgacgaggacgacagcgagcccgugcugaagggcgugaagcugcacuacaccugauaauaggcuggagccucgguggccuagcuucuugccccuugggccuccccccagccccuccuccccuuccugcacccguacccccguggucuuugaauaaagucugagugggcggcaaaaaaaaaaaaaaaaaaaaaaaaaaaaaaaaaaaaaaaaaaaaaaaaaaaaaaaaaaaaaaaaaaaaaaaaaaaaaaaaaaaaaaaaaaaaaaaaaaaa

SEQ ID NO: 26204 - RNA, 4089 nt, Artificial Sequence
  SARS-CoV-2/Wuhan/WIV05/2019__EPI_ISL_402128 spike protein mRNA gc (1-1273)(K986P_V987P_H69del_V70del_Y453F_D614G_I692V_M1229I)
gggaaauaagagagaaaagaagaguaagaagaaauauaagaccccggcgccgccaccauguucguguuccuggugcugcugccccuggugagcagccagugcgugaaccugaccacccggacccagcugccaccagccuacaccaacagcuucacccggggcgucuacuaccccgacaagguguuccggagcagcguccugcacagcacccaggaccuguuccugcccuucuucagcaacgugaccugguuccacgccaucagcggcaccaacggcaccaagcgguucgacaaccccgugcugcccuucaacgacggcguguacuucgccagcaccgagaagagcaacaucauccggggcuggaucuucggcaccacccuggacagcaagacccagagccugcugaucgugaauaacgccaccaacguggugaucaaggugugcgaguuccaguucugcaacgaccccuuccugggcguguacuaccacaagaacaacaagagcuggauggagagcgaguuccggguguacagcagcgccaacaacugcaccuucgaguacgugagccagcccuuccugauggaccuggagggcaagcagggcaacuucaagaaccugcgggaguucguguucaagaacaucgacggcuacuucaagaucuacagcaagcacaccccaaucaaccuggugcgggaucugccccagggcuucucagcccuggagccccugguggaccugcccaucggcaucaacaucacccgguuccagacccugcuggcccugcaccggagcuaccugaccccaggcgacagcagcagcggguggacagcaggcgcggcugcuuacuacgugggcuaccugcagccccggaccuuccugcugaaguacaacgagaacggcaccaucaccgacgccguggacugcgcccuggacccucugagcgagaccaagugcacccugaagagcuucaccguggagaagggcaucuaccagaccagcaacuuccgggugcagcccaccgagagcaucgugcgguuccccaacaucaccaaccugugccccuucggcgagguguucaacgccacccgguucgccagcguguacgccuggaaccggaagcggaucagcaacugcguggccgacuacagcgugcuguacaacagcgccagcuucagcaccuucaagugcuacggcgugagccccaccaagcugaacgaccugugcuucaccaacguguacgccgacagcuucgugauccguggcgacgaggugcggcagaucgcacccggccagacaggcaagaucgccgacuacaacuacaagcugcccgacgacuucaccggcugcgugaucgccuggaacagcaacaaccucgacagcaaggugggcggcaacuacaacuaccuguuccggcuguuccggaagagcaaccugaagcccuucgagcgggacaucagcaccgagaucuaccaagccggcuccaccccuugcaacggcguggagggcuucaacugcuacuucccucugcagagcuacggcuuccagcccaccaacggcgugggcuaccagcccuaccgggugguggugcugagcuucgagcugcugcacgccccagccaccguguguggccccaagaagagcaccaaccuggugaagaacaagugcgugaacuucaacuucaacggccuuaccggcaccggcgugcugaccgagagcaacaagaaauuccugcccuuucagcaguucggccgggacaucgccgacaccaccgacgcugugcgggauccccagacccuggagauccuggacaucaccccuugcagcuucggcggcgugagcgugaucaccccaggcaccaacaccagcaaccagguggccgugcuguaccagggcgugaacugcaccgaggugcccguggccauccacgccgaccagcugacacccaccuggcgggucuacagcaccggcagcaacguguuccagacccgggccgguugccugaucggcgccgagcacgugaacaacagcuacgagugcgacauccccaucggcgccggcaucugugccagcuaccagacccagaccaauucaccccggagggcaaggagcguggccagccagagcgugaucgccuacaccaugagccugggcgccgagaacagcguggccuacagcaacaacagcaucgccauccccaccaacuucaccaucagcgugaccaccgagauucugcccgugagcaugaccaagaccagcguggacugcaccauguacaucugcggcgacagcaccgagugcagcaaccugcugcugcaguacggcagcuucugcacccagcugaaccgggcccugaccggcaucgccguggagcaggacaagaacacccaggagguguucgcccaggugaagcagaucuacaagaccccucccaucaaggacuucggcggcuucaacuucagccagauccugcccgaccccagcaagcccagcaagcggagcuucaucgaggaccugcuguucaacaaggugacccuagccgacgccggcuucaucaagcaguacggcgacugccucggcgacauagccgcccgggaccugaucugcgcccagaaguucaacggccugaccgugcugccuccccugcugaccgacgagaugaucgcccaguacaccagcgcccuguuagccggaaccaucaccagcggcuggacuuucggcgcuggagccgcucugcagauccccuucgccaugcagauggccuaccgguucaacggcaucggcgugacccagaacgugcuguacgagaaccagaagcugaucgccaaccaguucaacagcgccaucggcaagauccaggacagccugagcagcaccgcuagcgcccugggcaagcugcaggacguggugaaccagaacgcccaggcccugaacacccuggugaagcagcugagcagcaacuucggcgccaucagcagcgugcugaacgacauccugagccggcuggacccucccgaggccgaggugcagaucgaccggcugaucacuggccggcugcagagccugcagaccuacgugacccagcagcugauccgggccgccgagauucgggccagcgccaaccuggccgccaccaagaugagcgagugcgugcugggccagagcaagcggguggacuucugcggcaagggcuaccaccugaugagcuuuccccagagcgcaccccacggagugguguuccugcacgugaccuacgugcccgcccaggagaagaacuucaccaccgccccagccaucugccacgacggcaaggcccacuuuccccgggagggcguguucgugagcaacggcacccacugguucgugacccagcggaacuucuacgagccccagaucaucaccaccgacaacaccuucgugagcggcaacugcgacguggugaucggcaucgugaacaacaccguguacgauccccugcagcccgagcuggacagcuucaaggaggagcuggacaaguacuucaagaaucacaccagccccgacguggaccugggcgacaucagcggcaucaacgccagcguggugaacauccagaaggagaucgaucggcugaacgagguggccaagaaccugaacgagagccugaucgaccugcaggagcugggcaaguacgagcaguacaucaaguggcccugguacaucuggcugggcuucaucgccggccugaucgccaucgugaucgugaccaucaugcugugcugcaugaccagcugcugcagcugccugaagggcuguugcagcugcggcagcugcugcaaguucgacgaggacgacagcgagcccgugcugaagggcgugaagcugcacuacaccugauaauaggcuggagccucgguggccuagcuucuugccccuugggccuccccccagccccuccuccccuuccugcacccguacccccguggucuuugaauaaagucugagugggcggcaaaaaaaaaaaaaaaaaaaaaaaaaaaaaaaaaaaaaaaaaaaaaaaaaaaaaaaaaaaaaaaaaaaaaaaaaaaaaaaaaaaaaaaaaaaaaaaaaaaa

SEQ ID NO: 26205 - RNA, 4086 nt, Artificial Sequence
  SARS-CoV-2/Wuhan/WIV05/2019__EPI_ISL_402128 spike protein mRNA gc (1-1273)(K986P_V987P_K986P_V987P_H69del_V70del_Y144del_N501Y_A570 D_D614G_P681H_T716I_S982A_D1118H)
gggaaauaagagagaaaagaagaguaagaagaaauauaagaccccggcgccgccaccauguucguguuccuggugcugcugccccuggugagcagccagugcgugaaccugaccacccggacccagcugccaccagccuacaccaacagcuucacccggggcgucuacuaccccgacaagguguuccggagcagcguccugcacagcacccaggaccuguuccugcccuucuucagcaacgugaccugguuccacgccaucagcggcaccaacggcaccaagcgguucgacaaccccgugcugcccuucaacgacggcguguacuucgccagcaccgagaagagcaacaucauccggggcuggaucuucggcaccacccuggacagcaagacccagagccugcugaucgugaauaacgccaccaacguggugaucaaggugugcgaguuccaguucugcaacgaccccuuccugggcguguaccacaagaacaacaagagcuggauggagagcgaguuccggguguacagcagcgccaacaacugcaccuucgaguacgugagccagcccuuccugauggaccuggagggcaagcagggcaacuucaagaaccugcgggaguucguguucaagaacaucgacggcuacuucaagaucuacagcaagcacaccccaaucaaccuggugcgggaucugccccagggcuucucagcccuggagccccugguggaccugcccaucggcaucaacaucacccgguuccagacccugcuggcccugcaccggagcuaccugaccccaggcgacagcagcagcggguggacagcaggcgcggcugcuuacuacgugggcuaccugcagccccggaccuuccugcugaaguacaacgagaacggcaccaucaccgacgccguggacugcgcccuggacccucugagcgagaccaagugcacccugaagagcuucaccguggagaagggcaucuaccagaccagcaacuuccgggugcagcccaccgagagcaucgugcgguuccccaacaucaccaaccugugccccuucggcgagguguucaacgccacccgguucgccagcguguacgccuggaaccggaagcggaucagcaacugcguggccgacuacagcgugcuguacaacagcgccagcuucagcaccuucaagugcuacggcgugagccccaccaagcugaacgaccugugcuucaccaacguguacgccgacagcuucgugauccguggcgacgaggugcggcagaucgcacccggccagacaggcaagaucgccgacuacaacuacaagcugcccgacgacuucaccggcugcgugaucgccuggaacagcaacaaccucgacagcaaggugggcggcaacuacaacuaccuguaccggcuguuccggaagagcaaccugaagcccuucgagcgggacaucagcaccgagaucuaccaagccggcuccaccccuugcaacggcguggagggcuucaacugcuacuucccucugcagagcuacggcuuccagcccaccuacggcgugggcuaccagcccuaccgggugguggugcugagcuucgagcugcugcacgccccagccaccguguguggccccaagaagagcaccaaccuggugaagaacaagugcgugaacuucaacuucaacggccuuaccggcaccggcgugcugaccgagagcaacaagaaauuccugcccuuucagcaguucggccgggacaucgacgacaccaccgacgcugugcgggauccccagacccuggagauccuggacaucaccccuugcagcuucggcggcgugagcgugaucaccccaggcaccaacaccagcaaccagguggccgugcuguaccagggcgugaacugcaccgaggugcccguggccauccacgccgaccagcugacacccaccuggcgggucuacagcaccggcagcaacguguuccagacccgggccgguugccugaucggcgccgagcacgugaacaacagcuacgagugcgacauccccaucggcgccggcaucugugccagcuaccagacccagaccaauucacaccggagggcaaggagcguggccagccagagcaucaucgccuacaccaugagccugggcgccgagaacagcguggccuacagcaacaacagcaucgccauccccaucaacuucaccaucagcgugaccaccgagauucugcccgugagcaugaccaagaccagcguggacugcaccauguacaucugcggcgacagcaccgagugcagcaaccugcugcugcaguacggcagcuucugcacccagcugaaccgggcccugaccggcaucgccguggagcaggacaagaacacccaggagguguucgcccaggugaagcagaucuacaagaccccucccaucaaggacuucggcggcuucaacuucagccagauccugcccgaccccagcaagcccagcaagcggagcuucaucgaggaccugcuguucaacaaggugacccuagccgacgccggcuucaucaagcaguacggcgacugccucggcgacauagccgcccgggaccugaucugcgcccagaaguucaacggccugaccgugcugccuccccugcugaccgacgagaugaucgcccaguacaccagcgcccuguuagccggaaccaucaccagcggcuggacuuucggcgcuggagccgcucugcagauccccuucgccaugcagauggccuaccgguucaacggcaucggcgugacccagaacgugcuguacgagaaccagaagcugaucgccaaccaguucaacagcgccaucggcaagauccaggacagccugagcagcaccgcuagcgcccugggcaagcugcaggacguggugaaccagaacgcccaggcccugaacacccuggugaagcagcugagcagcaacuucggcgccaucagcagcgugcugaacgacauccuggcccggcuggacccucccgaggccgaggugcagaucgaccggcugaucacuggccggcugcagagccugcagaccuacgugacccagcagcugauccgggccgccgagauucgggccagcgccaaccuggccgccaccaagaugagcgagugcgugcugggccagagcaagcggguggacuucugcggcaagggcuaccaccugaugagcuuuccccagagcgcaccccacggagugguguuccugcacgugaccuacgugcccgcccaggagaagaacuucaccaccgccccagccaucugccacgacggcaaggcccacuuuccccgggagggcguguucgugagcaacggcacccacugguucgugacccagcggaacuucuacgagccccagaucaucaccacccacaacaccuucgugagcggcaacugcgacguggugaucggcaucgugaacaacaccguguacgauccccugcagcccgagcuggacagcuucaaggaggagcuggacaaguacuucaagaaucacaccagccccgacguggaccugggcgacaucagcggcaucaacgccagcguggugaacauccagaaggagaucgaucggcugaacgagguggccaagaaccugaacgagagccugaucgaccugcaggagcugggcaaguacgagcaguacaucaaguggcccugguacaucuggcugggcuucaucgccggccugaucgccaucgugauggugaccaucaugcugugcugcaugaccagcugcugcagcugccugaagggcuguugcagcugcggcagcugcugcaaguucgacgaggacgacagcgagcccgugcugaagggcgugaagcugcacuacaccugauaauaggcuggagccucgguggccuagcuucuugccccuugggccuccccccagccccuccuccccuuccugcacccguacccccguggucuuugaauaaagucugagugggcggcaaaaaaaaaaaaaaaaaaaaaaaaaaaaaaaaaaaaaaaaaaaaaaaaaaaaaaaaaaaaaaaaaaaaaaaaaaaaaaaaaaaaaaaaaaaaaaaaaaaa

SEQ ID NO: 26206 - RNA, 4095 nt, Artificial Sequence
  SARS-CoV-2/Wuhan/WIV05/2019__EPI_ISL_402128 spike protein mRNA gc (1-1273)(K986P_V987P_K986P_V987P_K417N_E484K_N501Y_D614G)
gggaaauaagagagaaaagaagaguaagaagaaauauaagaccccggcgccgccaccauguucguguuccuggugcugcugccccuggugagcagccagugcgugaaccugaccacccggacccagcugccaccagccuacaccaacagcuucacccggggcgucuacuaccccgacaagguguuccggagcagcguccugcacagcacccaggaccuguuccugcccuucuucagcaacgugaccugguuccacgccauccacgugagcggcaccaacggcaccaagcgguucgacaaccccgugcugcccuucaacgacggcguguacuucgccagcaccgagaagagcaacaucauccggggcuggaucuucggcaccacccuggacagcaagacccagagccugcugaucgugaauaacgccaccaacguggugaucaaggugugcgaguuccaguucugcaacgaccccuuccugggcguguacuaccacaagaacaacaagagcuggauggagagcgaguuccggguguacagcagcgccaacaacugcaccuucgaguacgugagccagcccuuccugauggaccuggagggcaagcagggcaacuucaagaaccugcgggaguucguguucaagaacaucgacggcuacuucaagaucuacagcaagcacaccccaaucaaccuggugcgggaucugccccagggcuucucagcccuggagccccugguggaccugcccaucggcaucaacaucacccgguuccagacccugcuggcccugcaccggagcuaccugaccccaggcgacagcagcagcggguggacagcaggcgcggcugcuuacuacgugggcuaccugcagccccggaccuuccugcugaaguacaacgagaacggcaccaucaccgacgccguggacugcgcccuggacccucugagcgagaccaagugcacccugaagagcuucaccguggagaagggcaucuaccagaccagcaacuuccgggugcagcccaccgagagcaucgugcgguuccccaacaucaccaaccugugccccuucggcgagguguucaacgccacccgguucgccagcguguacgccuggaaccggaagcggaucagcaacugcguggccgacuacagcgugcuguacaacagcgccagcuucagcaccuucaagugcuacggcgugagccccaccaagcugaacgaccugugcuucaccaacguguacgccgacagcuucgugauccguggcgacgaggugcggcagaucgcacccggccagacaggcaacaucgccgacuacaacuacaagcugcccgacgacuucaccggcugcgugaucgccuggaacagcaacaaccucgacagcaaggugggcggcaacuacaacuaccuguaccggcuguuccggaagagcaaccugaagcccuucgagcgggacaucagcaccgagaucuaccaagccggcuccaccccuugcaacggcgugaagggcuucaacugcuacuucccucugcagagcuacggcuuccagcccaccuacggcgugggcuaccagcccuaccgggugguggugcugagcuucgagcugcugcacgccccagccaccguguguggccccaagaagagcaccaaccuggugaagaacaagugcgugaacuucaacuucaacggccuuaccggcaccggcgugcugaccgagagcaacaagaaauuccugcccuuucagcaguucggccgggacaucgccgacaccaccgacgcugugcgggauccccagacccuggagauccuggacaucaccccuugcagcuucggcggcgugagcgugaucaccccaggcaccaacaccagcaaccagguggccgugcuguaccagggcgugaacugcaccgaggugcccguggccauccacgccgaccagcugacacccaccuggcgggucuacagcaccggcagcaacguguuccagacccgggccgguugccugaucggcgccgagcacgugaacaacagcuacgagugcgacauccccaucggcgccggcaucugugccagcuaccagacccagaccaauucaccccggagggcaaggagcguggccagccagagcaucaucgccuacaccaugagccugggcgccgagaacagcguggccuacagcaacaacagcaucgccauccccaccaacuucaccaucagcgugaccaccgagauucugcccgugagcaugaccaagaccagcguggacugcaccauguacaucugcggcgacagcaccgagugcagcaaccugcugcugcaguacggcagcuucugcacccagcugaaccgggcccugaccggcaucgccguggagcaggacaagaacacccaggagguguucgcccaggugaagcagaucuacaagaccccucccaucaaggacuucggcggcuucaacuucagccagauccugcccgaccccagcaagcccagcaagcggagcuucaucgaggaccugcuguucaacaaggugacccuagccgacgccggcuucaucaagcaguacggcgacugccucggcgacauagccgcccgggaccugaucugcgcccagaaguucaacggccugaccgugcugccuccccugcugaccgacgagaugaucgcccaguacaccagcgcccuguuagccggaaccaucaccagcggcuggacuuucggcgcuggagccgcucugcagauccccuucgccaugcagauggccuaccgguucaacggcaucggcgugacccagaacgugcuguacgagaaccagaagcugaucgccaaccaguucaacagcgccaucggcaagauccaggacagccugagcagcaccgcuagcgcccugggcaagcugcaggacguggugaaccagaacgcccaggcccugaacacccuggugaagcagcugagcagcaacuucggcgccaucagcagcgugcugaacgacauccugagccggcuggacccucccgaggccgaggugcagaucgaccggcugaucacuggccggcugcagagccugcagaccuacgugacccagcagcugauccgggccgccgagauucgggccagcgccaaccuggccgccaccaagaugagcgagugcgugcugggccagagcaagcggguggacuucugcggcaagggcuaccaccugaugagcuuuccccagagcgcaccccacggagugguguuccugcacgugaccuacgugcccgcccaggagaagaacuucaccaccgccccagccaucugccacgacggcaaggcccacuuuccccgggagggcguguucgugagcaacggcacccacugguucgugacccagcggaacuucuacgagccccagaucaucaccaccgacaacaccuucgugagcggcaacugcgacguggugaucggcaucgugaacaacaccguguacgauccccugcagcccgagcuggacagcuucaaggaggagcuggacaaguacuucaagaaucacaccagccccgacguggaccugggcgacaucagcggcaucaacgccagcguggugaacauccagaaggagaucgaucggcugaacgagguggccaagaaccugaacgagagccugaucgaccugcaggagcugggcaaguacgagcaguacaucaaguggcccugguacaucuggcugggcuucaucgccggccugaucgccaucgugauggugaccaucaugcugugcugcaugaccagcugcugcagcugccugaagggcuguugcagcugcggcagcugcugcaaguucgacgaggacgacagcgagcccgugcugaagggcgugaagcugcacuacaccugauaauaggcuggagccucgguggccuagcuucuugccccuugggccuccccccagccccuccuccccuuccugcacccguacccccguggucuuugaauaaagucugagugggcggcaaaaaaaaaaaaaaaaaaaaaaaaaaaaaaaaaaaaaaaaaaaaaaaaaaaaaaaaaaaaaaaaaaaaaaaaaaaaaaaaaaaaaaaaaaaaaaaaaaaa

SEQ ID NO: 26207 - RNA, 4086 nt, Artificial Sequence
  SARS-CoV-2/Wuhan/WIV05/2019__EPI_ISL_402128 spike protein mRNA gc (1-1273)(K986P_V987P_K986P_V987P_L18F_D80A_D215G_L242del_A243del_ L244del_R246I_K417N_E484K_N501Y_D614G_A701V)
gggaaauaagagagaaaagaagaguaagaagaaauauaagaccccggcgccgccaccauguucguguuccuggugcugcugccccuggugagcagccagugcgugaacuucaccacccggacccagcugccaccagccuacaccaacagcuucacccggggcgucuacuaccccgacaagguguuccggagcagcguccugcacagcacccaggaccuguuccugcccuucuucagcaacgugaccugguuccacgccauccacgugagcggcaccaacggcaccaagcgguucgccaaccccgugcugcccuucaacgacggcguguacuucgccagcaccgagaagagcaacaucauccggggcuggaucuucggcaccacccuggacagcaagacccagagccugcugaucgugaauaacgccaccaacguggugaucaaggugugcgaguuccaguucugcaacgaccccuuccugggcguguacuaccacaagaacaacaagagcuggauggagagcgaguuccggguguacagcagcgccaacaacugcaccuucgaguacgugagccagcccuuccugauggaccuggagggcaagcagggcaacuucaagaaccugcgggaguucguguucaagaacaucgacggcuacuucaagaucuacagcaagcacaccccaaucaaccuggugcggggccugccccagggcuucucagcccuggagccccugguggaccugcccaucggcaucaacaucacccgguuccagacccugcacaucagcuaccugaccccaggcgacagcagcagcggguggacagcaggcgcggcugcuuacuacgugggcuaccugcagccccggaccuuccugcugaaguacaacgagaacggcaccaucaccgacgccguggacugcgcccuggacccucugagcgagaccaagugcacccugaagagcuucaccguggagaagggcaucuaccagaccagcaacuuccgggugcagcccaccgagagcaucgugcgguuccccaacaucaccaaccugugccccuucggcgagguguucaacgccacccgguucgccagcguguacgccuggaaccggaagcggaucagcaacugcguggccgacuacagcgugcuguacaacagcgccagcuucagcaccuucaagugcuacggcgugagccccaccaagcugaacgaccugugcuucaccaacguguacgccgacagcuucgugauccguggcgacgaggugcggcagaucgcacccggccagacaggcaacaucgccgacuacaacuacaagcugcccgacgacuucaccggcugcgugaucgccuggaacagcaacaaccucgacagcaaggugggcggcaacuacaacuaccuguaccggcuguuccggaagagcaaccugaagcccuucgagcgggacaucagcaccgagaucuaccaagccggcuccaccccuugcaacggcgugaagggcuucaacugcuacuucccucugcagagcuacggcuuccagcccaccuacggcgugggcuaccagcccuaccgggugguggugcugagcuucgagcugcugcacgccccagccaccguguguggccccaagaagagcaccaaccuggugaagaacaagugcgugaacuucaacuucaacggccuuaccggcaccggcgugcugaccgagagcaacaagaaauuccugcccuuucagcaguucggccgggacaucgccgacaccaccgacgcugugcgggauccccagacccuggagauccuggacaucaccccuugcagcuucggcggcgugagcgugaucaccccaggcaccaacaccagcaaccagguggccgugcuguaccagggcgugaacugcaccgaggugcccguggccauccacgccgaccagcugacacccaccuggcgggucuacagcaccggcagcaacguguuccagacccgggccgguugccugaucggcgccgagcacgugaacaacagcuacgagugcgacauccccaucggcgccggcaucugugccagcuaccagacccagaccaauucaccccggagggcaaggagcguggccagccagagcaucaucgccuacaccaugagccugggcguggagaacagcguggccuacagcaacaacagcaucgccauccccaccaacuucaccaucagcgugaccaccgagauucugcccgugagcaugaccaagaccagcguggacugcaccauguacaucugcggcgacagcaccgagugcagcaaccugcugcugcaguacggcagcuucugcacccagcugaaccgggcccugaccggcaucgccguggagcaggacaagaacacccaggagguguucgcccaggugaagcagaucuacaagaccccucccaucaaggacuucggcggcuucaacuucagccagauccugcccgaccccagcaagcccagcaagcggagcuucaucgaggaccugcuguucaacaaggugacccuagccgacgccggcuucaucaagcaguacggcgacugccucggcgacauagccgcccgggaccugaucugcgcccagaaguucaacggccugaccgugcugccuccccugcugaccgacgagaugaucgcccaguacaccagcgcccuguuagccggaaccaucaccagcggcuggacuuucggcgcuggagccgcucugcagauccccuucgccaugcagauggccuaccgguucaacggcaucggcgugacccagaacgugcuguacgagaaccagaagcugaucgccaaccaguucaacagcgccaucggcaagauccaggacagccugagcagcaccgcuagcgcccugggcaagcugcaggacguggugaaccagaacgcccaggcccugaacacccuggugaagcagcugagcagcaacuucggcgccaucagcagcgugcugaacgacauccugagccggcuggacccucccgaggccgaggugcagaucgaccggcugaucacuggccggcugcagagccugcagaccuacgugacccagcagcugauccgggccgccgagauucgggccagcgccaaccuggccgccaccaagaugagcgagugcgugcugggccagagcaagcggguggacuucugcggcaagggcuaccaccugaugagcuuuccccagagcgcaccccacggagugguguuccugcacgugaccuacgugcccgcccaggagaagaacuucaccaccgccccagccaucugccacgacggcaaggcccacuuuccccgggagggcguguucgugagcaacggcacccacugguucgugacccagcggaacuucuacgagccccagaucaucaccaccgacaacaccuucgugagcggcaacugcgacguggugaucggcaucgugaacaacaccguguacgauccccugcagcccgagcuggacagcuucaaggaggagcuggacaaguacuucaagaaucacaccagccccgacguggaccugggcgacaucagcggcaucaacgccagcguggugaacauccagaaggagaucgaucggcugaacgagguggccaagaaccugaacgagagccugaucgaccugcaggagcugggcaaguacgagcaguacaucaaguggcccugguacaucuggcugggcuucaucgccggccugaucgccaucgugauggugaccaucaugcugugcugcaugaccagcugcugcagcugccugaagggcuguugcagcugcggcagcugcugcaaguucgacgaggacgacagcgagcccgugcugaagggcgugaagcugcacuacaccugauaauaggcuggagccucgguggccuagcuucuugccccuugggccuccccccagccccuccuccccuuccugcacccguacccccguggucuuugaauaaagucugagugggcggcaaaaaaaaaaaaaaaaaaaaaaaaaaaaaaaaaaaaaaaaaaaaaaaaaaaaaaaaaaaaaaaaaaaaaaaaaaaaaaaaaaaaaaaaaaaaaaaaaaaa

SEQ ID NO: 26208 - RNA, 4095 nt, Artificial Sequence
  SARS-CoV-2/Wuhan/WIV05/2019__EPI_ISL_402128 spike protein mRNA gc (1-1273)(K986P_V987P_K986P_V987P_E484K_D614G)
gggaaauaagagagaaaagaagaguaagaagaaauauaagaccccggcgccgccaccauguucguguuccuggugcugcugccccuggugagcagccagugcgugaaccugaccacccggacccagcugccaccagccuacaccaacagcuucacccggggcgucuacuaccccgacaagguguuccggagcagcguccugcacagcacccaggaccuguuccugcccuucuucagcaacgugaccugguuccacgccauccacgugagcggcaccaacggcaccaagcgguucgacaaccccgugcugcccuucaacgacggcguguacuucgccagcaccgagaagagcaacaucauccggggcuggaucuucggcaccacccuggacagcaagacccagagccugcugaucgugaauaacgccaccaacguggugaucaaggugugcgaguuccaguucugcaacgaccccuuccugggcguguacuaccacaagaacaacaagagcuggauggagagcgaguuccggguguacagcagcgccaacaacugcaccuucgaguacgugagccagcccuuccugauggaccuggagggcaagcagggcaacuucaagaaccugcgggaguucguguucaagaacaucgacggcuacuucaagaucuacagcaagcacaccccaaucaaccuggugcgggaucugccccagggcuucucagcccuggagccccugguggaccugcccaucggcaucaacaucacccgguuccagacccugcuggcccugcaccggagcuaccugaccccaggcgacagcagcagcggguggacagcaggcgcggcugcuuacuacgugggcuaccugcagccccggaccuuccugcugaaguacaacgagaacggcaccaucaccgacgccguggacugcgcccuggacccucugagcgagaccaagugcacccugaagagcuucaccguggagaagggcaucuaccagaccagcaacuuccgggugcagcccaccgagagcaucgugcgguuccccaacaucaccaaccugugccccuucggcgagguguucaacgccacccgguucgccagcguguacgccuggaaccggaagcggaucagcaacugcguggccgacuacagcgugcuguacaacagcgccagcuucagcaccuucaagugcuacggcgugagccccaccaagcugaacgaccugugcuucaccaacguguacgccgacagcuucgugauccguggcgacgaggugcggcagaucgcacccggccagacaggcaagaucgccgacuacaacuacaagcugcccgacgacuucaccggcugcgugaucgccuggaacagcaacaaccucgacagcaaggugggcggcaacuacaacuaccuguaccggcuguuccggaagagcaaccugaagcccuucgagcgggacaucagcaccgagaucuaccaagccggcuccaccccuugcaacggcgugaagggcuucaacugcuacuucccucugcagagcuacggcuuccagcccaccaacggcgugggcuaccagcccuaccgggugguggugcugagcuucgagcugcugcacgccccagccaccguguguggccccaagaagagcaccaaccuggugaagaacaagugcgugaacuucaacuucaacggccuuaccggcaccggcgugcugaccgagagcaacaagaaauuccugcccuuucagcaguucggccgggacaucgccgacaccaccgacgcugugcgggauccccagacccuggagauccuggacaucaccccuugcagcuucggcggcgugagcgugaucaccccaggcaccaacaccagcaaccagguggccgugcuguaccagggcgugaacugcaccgaggugcccguggccauccacgccgaccagcugacacccaccuggcgggucuacagcaccggcagcaacguguuccagacccgggccgguugccugaucggcgccgagcacgugaacaacagcuacgagugcgacauccccaucggcgccggcaucugugccagcuaccagacccagaccaauucaccccggagggcaaggagcguggccagccagagcaucaucgccuacaccaugagccugggcgccgagaacagcguggccuacagcaacaacagcaucgccauccccaccaacuucaccaucagcgugaccaccgagauucugcccgugagcaugaccaagaccagcguggacugcaccauguacaucugcggcgacagcaccgagugcagcaaccugcugcugcaguacggcagcuucugcacccagcugaaccgggcccugaccggcaucgccguggagcaggacaagaacacccaggagguguucgcccaggugaagcagaucuacaagaccccucccaucaaggacuucggcggcuucaacuucagccagauccugcccgaccccagcaagcccagcaagcggagcuucaucgaggaccugcuguucaacaaggugacccuagccgacgccggcuucaucaagcaguacggcgacugccucggcgacauagccgcccgggaccugaucugcgcccagaaguucaacggccugaccgugcugccuccccugcugaccgacgagaugaucgcccaguacaccagcgcccuguuagccggaaccaucaccagcggcuggacuuucggcgcuggagccgcucugcagauccccuucgccaugcagauggccuaccgguucaacggcaucggcgugacccagaacgugcuguacgagaaccagaagcugaucgccaaccaguucaacagcgccaucggcaagauccaggacagccugagcagcaccgcuagcgcccugggcaagcugcaggacguggugaaccagaacgcccaggcccugaacacccuggugaagcagcugagcagcaacuucggcgccaucagcagcgugcugaacgacauccugagccggcuggacccucccgaggccgaggugcagaucgaccggcugaucacuggccggcugcagagccugcagaccuacgugacccagcagcugauccgggccgccgagauucgggccagcgccaaccuggccgccaccaagaugagcgagugcgugcugggccagagcaagcggguggacuucugcggcaagggcuaccaccugaugagcuuuccccagagcgcaccccacggagugguguuccugcacgugaccuacgugcccgcccaggagaagaacuucaccaccgccccagccaucugccacgacggcaaggcccacuuuccccgggagggcguguucgugagcaacggcacccacugguucgugacccagcggaacuucuacgagccccagaucaucaccaccgacaacaccuucgugagcggcaacugcgacguggugaucggcaucgugaacaacaccguguacgauccccugcagcccgagcuggacagcuucaaggaggagcuggacaaguacuucaagaaucacaccagccccgacguggaccugggcgacaucagcggcaucaacgccagcguggugaacauccagaaggagaucgaucggcugaacgagguggccaagaaccugaacgagagccugaucgaccugcaggagcugggcaaguacgagcaguacaucaaguggcccugguacaucuggcugggcuucaucgccggccugaucgccaucgugauggugaccaucaugcugugcugcaugaccagcugcugcagcugccugaagggcuguugcagcugcggcagcugcugcaaguucgacgaggacgacagcgagcccgugcugaagggcgugaagcugcacuacaccugauaauaggcuggagccucgguggccuagcuucuugccccuugggccuccccccagccccuccuccccuuccugcacccguacccccguggucuuugaauaaagucugagugggcggcaaaaaaaaaaaaaaaaaaaaaaaaaaaaaaaaaaaaaaaaaaaaaaaaaaaaaaaaaaaaaaaaaaaaaaaaaaaaaaaaaaaaaaaaaaaaaaaaaaaa

SEQ ID NO: 26209 - RNA, 4095 nt, Artificial Sequence
  SARS-CoV-2/Wuhan/WIV05/2019__EPI_ISL_402128 spike protein mRNA gc (1-1273)(K986P_V987P_K986P_V987P_L18F_T20N_P26S_D138Y_R190S_K417T _E484K_N501Y_D614G_H655Y_T1027I)
gggaaauaagagagaaaagaagaguaagaagaaauauaagaccccggcgccgccaccauguucguguuccuggugcugcugccccuggugagcagccagugcgugaacuucaccaaccggacccagcugccaagcgccuacaccaacagcuucacccggggcgucuacuaccccgacaagguguuccggagcagcguccugcacagcacccaggaccuguuccugcccuucuucagcaacgugaccugguuccacgccauccacgugagcggcaccaacggcaccaagcgguucgacaaccccgugcugcccuucaacgacggcguguacuucgccagcaccgagaagagcaacaucauccggggcuggaucuucggcaccacccuggacagcaagacccagagccugcugaucgugaauaacgccaccaacguggugaucaaggugugcgaguuccaguucugcaacuaccccuuccugggcguguacuaccacaagaacaacaagagcuggauggagagcgaguuccggguguacagcagcgccaacaacugcaccuucgaguacgugagccagcccuuccugauggaccuggagggcaagcagggcaacuucaagaaccugagcgaguucguguucaagaacaucgacggcuacuucaagaucuacagcaagcacaccccaaucaaccuggugcgggaucugccccagggcuucucagcccuggagccccugguggaccugcccaucggcaucaacaucacccgguuccagacccugcuggcccugcaccggagcuaccugaccccaggcgacagcagcagcggguggacagcaggcgcggcugcuuacuacgugggcuaccugcagccccggaccuuccugcugaaguacaacgagaacggcaccaucaccgacgccguggacugcgcccuggacccucugagcgagaccaagugcacccugaagagcuucaccguggagaagggcaucuaccagaccagcaacuuccgggugcagcccaccgagagcaucgugcgguuccccaacaucaccaaccugugccccuucggcgagguguucaacgccacccgguucgccagcguguacgccuggaaccggaagcggaucagcaacugcguggccgacuacagcgugcuguacaacagcgccagcuucagcaccuucaagugcuacggcgugagccccaccaagcugaacgaccugugcuucaccaacguguacgccgacagcuucgugauccguggcgacgaggugcggcagaucgcacccggccagacaggcaccaucgccgacuacaacuacaagcugcccgacgacuucaccggcugcgugaucgccuggaacagcaacaaccucgacagcaaggugggcggcaacuacaacuaccuguaccggcuguuccggaagagcaaccugaagcccuucgagcgggacaucagcaccgagaucuaccaagccggcuccaccccuugcaacggcgugaagggcuucaacugcuacuucccucugcagagcuacggcuuccagcccaccuacggcgugggcuaccagcccuaccgggugguggugcugagcuucgagcugcugcacgccccagccaccguguguggccccaagaagagcaccaaccuggugaagaacaagugcgugaacuucaacuucaacggccuuaccggcaccggcgugcugaccgagagcaacaagaaauuccugcccuuucagcaguucggccgggacaucgccgacaccaccgacgcugugcgggauccccagacccuggagauccuggacaucaccccuugcagcuucggcggcgugagcgugaucaccccaggcaccaacaccagcaaccagguggccgugcuguaccagggcgugaacugcaccgaggugcccguggccauccacgccgaccagcugacacccaccuggcgggucuacagcaccggcagcaacguguuccagacccgggccgguugccugaucggcgccgaguacgugaacaacagcuacgagugcgacauccccaucggcgccggcaucugugccagcuaccagacccagaccaauucaccccggagggcaaggagcguggccagccagagcaucaucgccuacaccaugagccugggcgccgagaacagcguggccuacagcaacaacagcaucgccauccccaccaacuucaccaucagcgugaccaccgagauucugcccgugagcaugaccaagaccagcguggacugcaccauguacaucugcggcgacagcaccgagugcagcaaccugcugcugcaguacggcagcuucugcacccagcugaaccgggcccugaccggcaucgccguggagcaggacaagaacacccaggagguguucgcccaggugaagcagaucuacaagaccccucccaucaaggacuucggcggcuucaacuucagccagauccugcccgaccccagcaagcccagcaagcggagcuucaucgaggaccugcuguucaacaaggugacccuagccgacgccggcuucaucaagcaguacggcgacugccucggcgacauagccgcccgggaccugaucugcgcccagaaguucaacggccugaccgugcugccuccccugcugaccgacgagaugaucgcccaguacaccagcgcccuguuagccggaaccaucaccagcggcuggacuuucggcgcuggagccgcucugcagauccccuucgccaugcagauggccuaccgguucaacggcaucggcgugacccagaacgugcuguacgagaaccagaagcugaucgccaaccaguucaacagcgccaucggcaagauccaggacagccugagcagcaccgcuagcgcccugggcaagcugcaggacguggugaaccagaacgcccaggcccugaacacccuggugaagcagcugagcagcaacuucggcgccaucagcagcgugcugaacgacauccugagccggcuggacccucccgaggccgaggugcagaucgaccggcugaucacuggccggcugcagagccugcagaccuacgugacccagcagcugauccgggccgccgagauucgggccagcgccaaccuggccgccaucaagaugagcgagugcgugcugggccagagcaagcggguggacuucugcggcaagggcuaccaccugaugagcuuuccccagagcgcaccccacggagugguguuccugcacgugaccuacgugcccgcccaggagaagaacuucaccaccgccccagccaucugccacgacggcaaggcccacuuuccccgggagggcguguucgugagcaacggcacccacugguucgugacccagcggaacuucuacgagccccagaucaucaccaccgacaacaccuucgugagcggcaacugcgacguggugaucggcaucgugaacaacaccguguacgauccccugcagcccgagcuggacagcuucaaggaggagcuggacaaguacuucaagaaucacaccagccccgacguggaccugggcgacaucagcggcaucaacgccagcguggugaacauccagaaggagaucgaucggcugaacgagguggccaagaaccugaacgagagccugaucgaccugcaggagcugggcaaguacgagcaguacaucaaguggcccugguacaucuggcugggcuucaucgccggccugaucgccaucgugauggugaccaucaugcugugcugcaugaccagcugcugcagcugccugaagggcuguugcagcugcggcagcugcugcaaguucgacgaggacgacagcgagcccgugcugaagggcgugaagcugcacuacaccugauaauaggcuggagccucgguggccuagcuucuugccccuugggccuccccccagccccuccuccccuuccugcacccguacccccguggucuuugaauaaagucugagugggcggcaaaaaaaaaaaaaaaaaaaaaaaaaaaaaaaaaaaaaaaaaaaaaaaaaaaaaaaaaaaaaaaaaaaaaaaaaaaaaaaaaaaaaaaaaaaaaaaaaaaa

SEQ ID NO: 26210 - RNA, 4095 nt, Artificial Sequence
  SARS-CoV-2/Wuhan/WIV05/2019__EPI_ISL_402128 spike protein mRNA gc (1-1273)(K986P_V987P_K986P_V987P_S13I_W152C_L452R_D614G)
gggaaauaagagagaaaagaagaguaagaagaaauauaagaccccggcgccgccaccauguucguguuccuggugcugcugccccuggugagcauccagugcgugaaccugaccacccggacccagcugccaccagccuacaccaacagcuucacccggggcgucuacuaccccgacaagguguuccggagcagcguccugcacagcacccaggaccuguuccugcccuucuucagcaacgugaccugguuccacgccauccacgugagcggcaccaacggcaccaagcgguucgacaaccccgugcugcccuucaacgacggcguguacuucgccagcaccgagaagagcaacaucauccggggcuggaucuucggcaccacccuggacagcaagacccagagccugcugaucgugaauaacgccaccaacguggugaucaaggugugcgaguuccaguucugcaacgaccccuuccugggcguguacuaccacaagaacaacaagagcugcauggagagcgaguuccggguguacagcagcgccaacaacugcaccuucgaguacgugagccagcccuuccugauggaccuggagggcaagcagggcaacuucaagaaccugcgggaguucguguucaagaacaucgacggcuacuucaagaucuacagcaagcacaccccaaucaaccuggugcgggaucugccccagggcuucucagcccuggagccccugguggaccugcccaucggcaucaacaucacccgguuccagacccugcuggcccugcaccggagcuaccugaccccaggcgacagcagcagcggguggacagcaggcgcggcugcuuacuacgugggcuaccugcagccccggaccuuccugcugaaguacaacgagaacggcaccaucaccgacgccguggacugcgcccuggacccucugagcgagaccaagugcacccugaagagcuucaccguggagaagggcaucuaccagaccagcaacuuccgggugcagcccaccgagagcaucgugcgguuccccaacaucaccaaccugugccccuucggcgagguguucaacgccacccgguucgccagcguguacgccuggaaccggaagcggaucagcaacugcguggccgacuacagcgugcuguacaacagcgccagcuucagcaccuucaagugcuacggcgugagccccaccaagcugaacgaccugugcuucaccaacguguacgccgacagcuucgugauccguggcgacgaggugcggcagaucgcacccggccagacaggcaagaucgccgacuacaacuacaagcugcccgacgacuucaccggcugcgugaucgccuggaacagcaacaaccucgacagcaaggugggcggcaacuacaacuaccgcuaccggcuguuccggaagagcaaccugaagcccuucgagcgggacaucagcaccgagaucuaccaagccggcuccaccccuugcaacggcguggagggcuucaacugcuacuucccucugcagagcuacggcuuccagcccaccaacggcgugggcuaccagcccuaccgggugguggugcugagcuucgagcugcugcacgccccagccaccguguguggccccaagaagagcaccaaccuggugaagaacaagugcgugaacuucaacuucaacggccuuaccggcaccggcgugcugaccgagagcaacaagaaauuccugcccuuucagcaguucggccgggacaucgccgacaccaccgacgcugugcgggauccccagacccuggagauccuggacaucaccccuugcagcuucggcggcgugagcgugaucaccccaggcaccaacaccagcaaccagguggccgugcuguaccagggcgugaacugcaccgaggugcccguggccauccacgccgaccagcugacacccaccuggcgggucuacagcaccggcagcaacguguuccagacccgggccgguugccugaucggcgccgagcacgugaacaacagcuacgagugcgacauccccaucggcgccggcaucugugccagcuaccagacccagaccaauucaccccggagggcaaggagcguggccagccagagcaucaucgccuacaccaugagccugggcgccgagaacagcguggccuacagcaacaacagcaucgccauccccaccaacuucaccaucagcgugaccaccgagauucugcccgugagcaugaccaagaccagcguggacugcaccauguacaucugcggcgacagcaccgagugcagcaaccugcugcugcaguacggcagcuucugcacccagcugaaccgggcccugaccggcaucgccguggagcaggacaagaacacccaggagguguucgcccaggugaagcagaucuacaagaccccucccaucaaggacuucggcggcuucaacuucagccagauccugcccgaccccagcaagcccagcaagcggagcuucaucgaggaccugcuguucaacaaggugacccuagccgacgccggcuucaucaagcaguacggcgacugccucggcgacauagccgcccgggaccugaucugcgcccagaaguucaacggccugaccgugcugccuccccugcugaccgacgagaugaucgcccaguacaccagcgcccuguuagccggaaccaucaccagcggcuggacuuucggcgcuggagccgcucugcagauccccuucgccaugcagauggccuaccgguucaacggcaucggcgugacccagaacgugcuguacgagaaccagaagcugaucgccaaccaguucaacagcgccaucggcaagauccaggacagccugagcagcaccgcuagcgcccugggcaagcugcaggacguggugaaccagaacgcccaggcccugaacacccuggugaagcagcugagcagcaacuucggcgccaucagcagcgugcugaacgacauccugagccggcuggacccucccgaggccgaggugcagaucgaccggcugaucacuggccggcugcagagccugcagaccuacgugacccagcagcugauccgggccgccgagauucgggccagcgccaaccuggccgccaccaagaugagcgagugcgugcugggccagagcaagcggguggacuucugcggcaagggcuaccaccugaugagcuuuccccagagcgcaccccacggagugguguuccugcacgugaccuacgugcccgcccaggagaagaacuucaccaccgccccagccaucugccacgacggcaaggcccacuuuccccgggagggcguguucgugagcaacggcacccacugguucgugacccagcggaacuucuacgagccccagaucaucaccaccgacaacaccuucgugagcggcaacugcgacguggugaucggcaucgugaacaacaccguguacgauccccugcagcccgagcuggacagcuucaaggaggagcuggacaaguacuucaagaaucacaccagccccgacguggaccugggcgacaucagcggcaucaacgccagcguggugaacauccagaaggagaucgaucggcugaacgagguggccaagaaccugaacgagagccugaucgaccugcaggagcugggcaaguacgagcaguacaucaaguggcccugguacaucuggcugggcuucaucgccggccugaucgccaucgugauggugaccaucaugcugugcugcaugaccagcugcugcagcugccugaagggcuguugcagcugcggcagcugcugcaaguucgacgaggacgacagcgagcccgugcugaagggcgugaagcugcacuacaccugauaauaggcuggagccucgguggccuagcuucuugccccuugggccuccccccagccccuccuccccuuccugcacccguacccccguggucuuugaauaaagucugagugggcggcaaaaaaaaaaaaaaaaaaaaaaaaaaaaaaaaaaaaaaaaaaaaaaaaaaaaaaaaaaaaaaaaaaaaaaaaaaaaaaaaaaaaaaaaaaaaaaaaaaaa

SEQ ID NO: 26211 - RNA, 4095 nt, Artificial Sequence
  SARS-CoV-2/Wuhan/WIV05/2019__EPI_ISL_402128 spike protein mRNA gc (1-1273)(K986P_V987P)
gggaaauaagagagaaaagaagaguaagaagaaauauaagaccccggcgccgccaccauguucguguuccuggugcugcugccccuggugagcagccagugcgugaaccugaccacccggacccagcugcccccugccuacaccaacagcuucacccggggcguguacuaccccgacaagguguuccggagcagcgugcugcacagcacccaggaccuguuccugcccuucuucagcaacgugaccugguuccacgccauccacgugagcggcaccaacggcaccaagcgguucgacaacccagugcugcccuucaacgacggcguguacuucgccagcaccgagaagucaaacaucauccggggcuggaucuucggcaccacccuggacagcaagacacagagccugcugaucgugaacaacgccaccaacguggugaucaaggugugcgaguuucaguucugcaacgaccccuuccugggcguguacuaccacaagaacaacaagagcuggauggagagcgaguuccgggucuacagcagcgcuaacaauugcaccuucgaguacgugagccagcccuuccugauggaccucgagggcaagcagggcaacuucaagaaccugcgggaguucguguucaagaacaucgauggcuacuucaagaucuacagcaagcacacccccaucaaccuggugcgggaccugccccagggauucagcgcccuggagccucugguggaccugcccaucggcaucaacaucaccagguuccagacccugcuggcccugcaccggagcuaccugacccccggcgacagcagcagcggcuggaccgccggcgccgccgcauacuacgugggcuaccugcagccacggaccuuccugcugaaguacaacgagaacggcaccaucaccgacgccguggacugcgcccuggacccccugagcgagaccaagugcacccuaaagagcuucaccguggagaagggcaucuaccagaccagcaacuuccgggugcagcccacugagagcaucgugcgguuccccaacauuaccaaccugugucccuucggcgagguguucaacgccacccgguucgccagcguguacgccuggaaccggaagcggaucagcaacugcguggccgacuacagcgugcuguacaacagcgccagcuucagcaccuucaagugcuacggcgugagcccuaccaagcugaacgaccugugcuucaccaacguguacgcugacagcuucgugauccggggcgacgaggugcggcagaucgcccccggccagaccggcaagaucgccgacuacaacuacaagcugcccgacgacuucaccggcugcgugaucgccuggaacagcaacaaccuggacagcaaggugggcggcaacuacaacuaccuguaccggcuguuccguaagagcaaccugaagccauucgagcgggacaucagcaccgagaucuaccaggccggcagcacccccugcaacgguguggagggcuuuaacugcuacuucccccugcagagcuacggcuuccagcccaccaacggcgugggcuaccagcccuaccgggugguggugcugagcuucgagcugcugcacgcccccgccaccgugugcggcccuaaaaagagcaccaaccuggugaagaacaagugcgugaacuucaauuucaacggccugaccggcaccggcgugcugaccgagagcaacaagaaguuccugcccuuccagcaguucggccgggauaucgccgacaccaccgacgcagugcgggacccccagacccuggagauccuggacaucaccccaugcagcuucggcggcgugagcgucaucacccccggcacaaacaccagcaaccagguggccgugcuguaccaggacgugaacugcaccgaggugcccguggccauccacgccgaccagcugacccccaccuggcggguguacagcaccggaagcaacguguuccagacccgggccggcugccugaucggcgccgagcacgugaacaacuccuacgagugcgacauccccaucggcgcuggcaucugcgccagcuaccagacccagaccaacagcccccggcgggcccggagcguggccagccagagcaucaucgccuacaccaugagcuuaggcgccgagaacagcguggccuacagcaacaacagcaucgcgaucccuaccaacuucaccaucagcgugaccaccgagauacugcccgugagcaugaccaagaccagcguggacuguaccauguacaucugcggcgacagcaccgagugcagcaaccugcugcugcaguacggcagcuucugcacccagcugaaccgggcccugaccggcaucgccguggagcaggacaagaacacccaagagguguucgcccaggugaagcagaucuacaagacucccccaaucaaggacuucggcggcuucaacuucagccagauccugcccgaccccagcaagcccagcaagcggagcuucaucgaggaccugcuguucaacaaggugacccuggccgacgccggcuucaucaagcaguacggcgauugccugggcgacaucgccgcucgggaccugaucugcgcccagaaguucaacgggcugaccgugcugcccccucugcugaccgacgagaugaucgcccaguacaccagcgcccugcuugccggcaccaucaccagcggcuggaccuucggcgccggcgcagcccugcagauccccuucgccaugcagauggccuaccgguucaacggcaucggcgugacccagaacgugcuguacgagaaccagaagcugaucgccaaccaguucaacagcgccaucggcaagauccaggacagccugagcagcaccgccagcgcccugggcaagcugcaggacguggugaaccagaacgcucaggcccugaacacccuggugaagcagcugagcagcaacuucggcgccaucagcucagugcugaaugacauccugagcaggcuggaucccccagaggccgaggugcagaucgaccggcugaucaccggccggcugcagagccugcagaccuacgugacccagcagcugauccgggccgccgagauccgggccagcgccaaccuggcagccaccaagaugagcgagugcgugcugggccagagcaagcggguggacuuuugcggcaagggcuaccaccugaugagcuucccccagagcgcuccccacggcgugguguuccuccacgugacauacguccccgcccaggagaagaacuucaccaccgcccccgccauuugccacgacggcaaggcccacuucccccgggagggcguguucgugagcaacggaacccacugguucgugacccagcggaacuucuacgagccucagaucaucaccaccgacaacaccuucgugagcggcaacugcgacguggugaucggcaucgugaacaacaccguguacgacccccugcagcccgagcuggacagcuucaaggaggagcuggacaaguacuucaagaaccacaccagcccagacguggaccugggcgacaucagcggcaucaacgccagcguggugaacauccagaaggagaucgaccggcugaacgagguggccaagaaccugaacgagagccugaucgaccugcaggagcugggcaaguacgagcaguacaucaaguggcccugguacaucuggcugggcuucaucgccggccugaucgccaucgugauggugaccaucaugcugugcugcaugaccagcugcuguagcugccugaagggcugcugcagcugcggcagcugcugcaaguucgacgaggacgacagcgagcccgugcugaagggcgugaagcugcacuacaccugauaauaggcuggagccucgguggccuagcuucuugccccuugggccuccccccagccccuccuccccuuccugcacccguacccccguggucuuugaauaaagucugagugggcggcaaaaaaaaaaaaaaaaaaaaaaaaaaaaaaaaaaaaaaaaaaaaaaaaaaaaaaaaaaaaaaaaaaaaaaaaaaaaaaaaaaaaaaaaaaaaaaaaaaaa

SEQ ID NO: 26212 - RNA, 4095 nt, Artificial Sequence
  SARS-CoV-2/Wuhan/WIV05/2019__EPI_ISL_402128 spike protein mRNA gc (1-1273)(K986P_V987P_ D614G)
gggaaauaagagagaaaagaagaguaagaagaaauauaagaccccggcgccgccaccauguucguguuccuggugcugcugccccuggugagcagccagugcgugaaccugaccacccggacccagcugcccccugccuacaccaacagcuucacccggggcguguacuaccccgacaagguguuccggagcagcgugcugcacagcacccaggaccuguuccugcccuucuucagcaacgugaccugguuccacgccauccacgugagcggcaccaacggcaccaagcgguucgacaacccagugcugcccuucaacgacggcguguacuucgccagcaccgagaagucaaacaucauccggggcuggaucuucggcaccacccuggacagcaagacacagagccugcugaucgugaacaacgccaccaacguggugaucaaggugugcgaguuucaguucugcaacgaccccuuccugggcguguacuaccacaagaacaacaagagcuggauggagagcgaguuccgggucuacagcagcgcuaacaauugcaccuucgaguacgugagccagcccuuccugauggaccucgagggcaagcagggcaacuucaagaaccugcgggaguucguguucaagaacaucgauggcuacuucaagaucuacagcaagcacacccccaucaaccuggugcgggaccugccccagggauucagcgcccuggagccucugguggaccugcccaucggcaucaacaucaccagguuccagacccugcuggcccugcaccggagcuaccugacccccggcgacagcagcagcggcuggaccgccggcgccgccgcauacuacgugggcuaccugcagccacggaccuuccugcugaaguacaacgagaacggcaccaucaccgacgccguggacugcgcccuggacccccugagcgagaccaagugcacccuaaagagcuucaccguggagaagggcaucuaccagaccagcaacuuccgggugcagcccacugagagcaucgugcgguuccccaacauuaccaaccugugucccuucggcgagguguucaacgccacccgguucgccagcguguacgccuggaaccggaagcggaucagcaacugcguggccgacuacagcgugcuguacaacagcgccagcuucagcaccuucaagugcuacggcgugagcccuaccaagcugaacgaccugugcuucaccaacguguacgcugacagcuucgugauccggggcgacgaggugcggcagaucgcccccggccagaccggcaagaucgccgacuacaacuacaagcugcccgacgacuucaccggcugcgugaucgccuggaacagcaacaaccuggacagcaaggugggcggcaacuacaacuaccuguaccggcuguuccguaagagcaaccugaagccauucgagcgggacaucagcaccgagaucuaccaggccggcagcacccccugcaacgguguggagggcuuuaacugcuacuucccccugcagagcuacggcuuccagcccaccaacggcgugggcuaccagcccuaccgggugguggugcugagcuucgagcugcugcacgcccccgccaccgugugcggcccuaaaaagagcaccaaccuggugaagaacaagugcgugaacuucaauuucaacggccugaccggcaccggcgugcugaccgagagcaacaagaaguuccugcccuuccagcaguucggccgggauaucgccgacaccaccgacgcagugcgggacccccagacccuggagauccuggacaucaccccaugcagcuucggcggcgugagcgucaucacccccggcacaaacaccagcaaccagguggccgugcuguaccagggagugaacugcaccgaggugcccguggccauccacgccgaccagcugacccccaccuggcggguguacagcaccggcagcaacguguuccagacccgggccggcugccugaucggcgccgagcacgugaacaacuccuacgagugcgacauccccaucggcgcuggcaucugcgccagcuaccagacccagaccaacagcccccggcgggcccggagcguggccagccagagcaucaucgccuacaccaugagcuuaggcgccgagaacagcguggccuacagcaacaacagcaucgcgaucccuaccaacuucaccaucagcgugaccaccgagauacugcccgugagcaugaccaagaccagcguggacuguaccauguacaucugcggcgacagcaccgagugcagcaaccugcugcugcaguacggcagcuucugcacccagcugaaccgggcccugaccggcaucgccguggagcaggacaagaacacccaagagguguucgcccaggugaagcagaucuacaagacucccccaaucaaggacuucggcggcuucaacuucagccagauccugcccgaccccagcaagcccagcaagcggagcuucaucgaggaccugcuguucaacaaggugacccuggccgacgccggcuucaucaagcaguacggcgacugccugggggauaucgccgcucgggaccugaucugcgcccagaaguucaacggccugaccgugcugcccccucugcugaccgacgagaugaucgcccaguacaccagcgcccugcuugccggcaccaucaccagcggcuggaccuucggcgccggcgcagcccugcagauccccuucgccaugcagauggccuaccgguucaacggcaucggcgugacccagaacgugcuguacgagaaccagaagcugaucgccaaccaguucaacagcgccaucggcaagauccaggacagccugagcagcaccgccagcgcccugggcaagcugcaggacguggugaaccagaacgcucaggcccugaacacccuggugaagcagcugagcagcaacuucggcgccaucagcucagugcugaaugacauccugagcaggcuggaucccccagaggccgaggugcagaucgaccggcugaucaccggccggcugcagagccugcagaccuacgugacccagcagcugauccgggccgccgagauccgggccagcgccaaccuggcagccaccaagaugagcgagugcgugcugggccagagcaagcggguggacuuuugcggcaagggcuaccaccugaugagcuucccccagagcgcuccccacggcgugguguuccuccacgugacauacguccccgcccaggagaagaacuucaccaccgcccccgccauuugccacgacggcaaggcccacuucccccgggagggaguguucgugagcaacggcacccacugguucgugacccagcggaacuucuacgagccucagaucaucaccaccgacaacaccuucgugagcggcaacugcgacguggugaucggcaucgugaacaacaccguguacgacccccugcagcccgagcuggacagcuucaaggaggagcuggacaaguacuucaagaaccacaccagcccagacguggaccugggcgacaucagcggcaucaacgccagcguggugaacauccagaaggagaucgaccggcugaacgagguggccaagaaccugaacgagagccugaucgaccugcaggagcugggcaaguacgagcaguacaucaaguggcccugguacaucuggcugggcuucaucgccggccugaucgccaucgugauggugaccaucaugcugugcugcaugaccagcugcuguagcugccugaagggcugcugcagcugcggcagcugcugcaaguucgacgaggacgacagcgagcccgugcugaagggcgugaagcugcacuacaccugauaauaggcuggagccucgguggccuagcuucuugccccuugggccuccccccagccccuccuccccuuccugcacccguacccccguggucuuugaauaaagucugagugggcggcaaaaaaaaaaaaaaaaaaaaaaaaaaaaaaaaaaaaaaaaaaaaaaaaaaaaaaaaaaaaaaaaaaaaaaaaaaaaaaaaaaaaaaaaaaaaaaaaaaaa

SEQ ID NO: 26213 - RNA, 4095 nt, Artificial Sequence
  SARS-CoV-2/Wuhan/WIV05/2019__EPI_ISL_402128 spike protein mRNA gc (1-1273)(K986P_V987P_A222V_D614G)
gggaaauaagagagaaaagaagaguaagaagaaauauaagaccccggcgccgccaccauguucguguuccuggugcugcugccccuggugagcagccagugcgugaaccugaccacccggacccagcugcccccugccuacaccaacagcuucacccggggcguguacuaccccgacaagguguuccggagcagcgugcugcacagcacccaggaccuguuccugcccuucuucagcaacgugaccugguuccacgccauccacgugagcggcaccaacggcaccaagcgguucgacaacccagugcugcccuucaacgacggcguguacuucgccagcaccgagaagucaaacaucauccggggcuggaucuucggcaccacccuggacagcaagacacagagccugcugaucgugaacaacgccaccaacguggugaucaaggugugcgaguuucaguucugcaacgaccccuuccugggcguguacuaccacaagaacaacaagagcuggauggagagcgaguuccgggucuacagcagcgcuaacaauugcaccuucgaguacgugagccagcccuuccugauggaccucgagggcaagcagggcaacuucaagaaccugcgggaguucguguucaagaacaucgauggcuacuucaagaucuacagcaagcacacccccaucaaccuggugcgggaccugccccagggauucagcgugcuggagccucugguggaccugcccaucggcaucaacaucaccagguuccagacccugcuggcccugcaccggagcuaccugacccccggcgacagcagcagcggcuggaccgccggcgccgccgccuacuacgugggcuaccugcagccacggaccuuccugcugaaguacaacgagaacggcaccaucaccgacgcaguggacugcgcccuggacccccugagcgagaccaagugcacccuaaagagcuucaccguggagaagggcaucuaccagaccagcaacuuccgggugcagcccacugagagcaucgugcgguuccccaacauuaccaaccugugucccuucggcgagguguucaacgccacccgguucgccagcguguacgccuggaaccggaagcggaucagcaacugcguggccgacuacagcgugcuguacaacagcgccagcuucagcaccuucaagugcuacggcgugagcccuaccaagcugaacgaccugugcuucaccaacguguacgccgacagcuucgugauccggggcgacgaggugcggcagaucgcucccggccagaccggcaagaucgccgacuacaacuacaagcugcccgacgacuucaccggcugcgugaucgccuggaacagcaacaaccuggacagcaaggugggcggcaacuacaacuaccuguaccggcuguuccguaagagcaaccugaagccauucgagcgggacaucagcaccgagaucuaccaggccggcagcacccccugcaacgguguggagggcuuuaacugcuacuucccccugcagagcuacggcuuccagcccaccaacggcgugggcuaccagcccuaccgggugguggugcugagcuucgagcugcugcacgcccccgccaccgugugcggcccuaaaaagagcaccaaccuggugaagaacaagugcgugaacuucaauuucaacggccugaccggcaccggcgugcugaccgagagcaacaagaaguuccugcccuuccagcaguucggccgggauaucgccgacaccaccgacgccgugcgggacccccagacccuggagauccuggacaucaccccaugcagcuucggcggcgucagcgugaucacccccggcacaaacaccagcaaccagguggcagugcuguaccagggagugaacugcaccgaggugcccguggccauccacgccgaccagcugacccccaccuggcggguguacagcaccggcagcaacguguuccagacccgggccggcugccugaucggcgccgagcacgugaacaacuccuacgagugcgacauccccaucggcgccggcaucugcgcuagcuaccagacccagaccaacagcccccggcgggcccggagcguggccagccagagcaucaucgccuacaccaugagcuuaggcgccgagaacagcguggccuacagcaacaacagcaucgccaucccuaccaacuucaccaucagcgugaccaccgagauacugcccgugagcaugaccaagaccagcguggacuguaccauguacaucugcggcgacagcaccgagugcagcaaccugcugcugcaguacggcagcuucugcacccagcugaaccgggcgcugaccggcaucgccguggagcaggacaagaacacccaagagguguucgcccaggugaagcagaucuacaagacucccccaaucaaggacuucggcggcuucaacuucagccagauccugcccgaccccagcaagcccagcaagcggagcuucaucgaggaccugcuguucaacaaggugacccuggccgacgccggcuucaucaagcaguacggcgacugccugggggauaucgccgcccgggaccugaucugcgcucagaaguucaacggccugaccgugcugcccccucugcugaccgacgagaugaucgcccaguacaccagcgcccugcuugccggcaccaucaccagcggcuggaccuucggcgccggcgccgcacugcagauccccuucgccaugcagauggccuaccgguucaacggcaucggcgugacccagaacgugcuguacgagaaccagaagcugaucgccaaccaguucaacagcgccaucggcaagauccaggacagccugagcagcaccgccagcgcccugggcaagcugcaggacguggugaaccagaacgcccaggcucugaacacccuggugaagcagcugagcagcaacuucggcgccaucagcucagugcugaaugacauccugagcaggcuggaucccccagaggccgaggugcagaucgaccggcugaucaccggccggcugcagagccugcagaccuacgugacccagcagcugauccgggccgccgagauccgggccagcgccaaccuggccgcaaccaagaugagcgagugcgugcugggccagagcaagcggguggacuuuugcggcaagggcuaccaccugaugagcuucccccagagcgcuccccacggcgugguguuccuccacgucacauacgugcccgcccaggagaagaacuucaccaccgcccccgccauuugccacgacggcaaggcccacuucccccgggagggaguguucgugagcaacggcacccacugguucgugacccagcggaacuucuacgagccucagaucaucaccaccgacaacaccuucgugagcggcaacugcgacguggugaucggcaucgugaacaacaccguguacgacccccugcagcccgagcuggacagcuucaaggaggagcuggacaaguacuucaagaaccacaccagcccagacguggaccugggcgacaucagcggcaucaacgccagcguggugaacauccagaaggagaucgaccggcugaacgagguggccaagaaccugaacgagagccugaucgaccugcaggagcugggcaaguacgagcaguacaucaaguggcccugguacaucuggcugggcuucaucgccggccugaucgccaucgugauggugaccaucaugcugugcugcaugaccagcugcuguagcugccugaagggcugcugcagcugcggcagcugcugcaaguucgacgaggacgacagcgagcccgugcugaagggcgugaagcugcacuacaccugauaauaggcuggagccucgguggccuagcuucuugccccuugggccuccccccagccccuccuccccuuccugcacccguacccccguggucuuugaauaaagucugagugggcggcaaaaaaaaaaaaaaaaaaaaaaaaaaaaaaaaaaaaaaaaaaaaaaaaaaaaaaaaaaaaaaaaaaaaaaaaaaaaaaaaaaaaaaaaaaaaaaaaaaaa

SEQ ID NO: 26214 - RNA, 4095 nt, Artificial Sequence
  SARS-CoV-2/Wuhan/WIV05/2019__EPI_ISL_402128 spike protein mRNA gc (1-1273)(K986P_V987P_N439K_D614G)
gggaaauaagagagaaaagaagaguaagaagaaauauaagaccccggcgccgccaccauguucguguuccuggugcugcugccccuggugagcagccagugcgugaaccugaccacccggacccagcugcccccugccuacaccaacagcuucacccggggcguguacuaccccgacaagguguuccggagcagcgugcugcacagcacccaggaccuguuccugcccuucuucagcaacgugaccugguuccacgccauccacgugagcggcaccaacggcaccaagcgguucgacaacccagugcugcccuucaacgacggcguguacuucgccagcaccgagaagucaaacaucauccggggcuggaucuucggcaccacccuggacagcaagacacagagccugcugaucgugaacaacgccaccaacguggugaucaaggugugcgaguuucaguucugcaacgaccccuuccugggcguguacuaccacaagaacaacaagagcuggauggagagcgaguuccgggucuacagcagcgcuaacaauugcaccuucgaguacgugagccagcccuuccugauggaccucgagggcaagcagggcaacuucaagaaccugcgggaguucguguucaagaacaucgauggcuacuucaagaucuacagcaagcacacccccaucaaccuggugcgggaccugccccagggauucagcgcccuggagccucugguggaccugcccaucggcaucaacaucaccagguuccagacccugcuggcccugcaccggagcuaccugacccccggcgacagcagcagcggcuggaccgccggcgccgccgcauacuacgugggcuaccugcagccacggaccuuccugcugaaguacaacgagaacggcaccaucaccgacgccguggacugcgcccuggacccccugagcgagaccaagugcacccuaaagagcuucaccguggagaagggcaucuaccagaccagcaacuuccgggugcagcccacugagagcaucgugcgguuccccaacauuaccaaccugugucccuucggcgagguguucaacgccacccgguucgccagcguguacgccuggaaccggaagcggaucagcaacugcguggccgacuacagcgugcuguacaacagcgccagcuucagcaccuucaagugcuacggcgugagcccuaccaagcugaacgaccugugcuucaccaacguguacgcugacagcuucgugauccggggcgacgaggugcggcagaucgcccccggccagaccggcaagaucgccgacuacaacuacaagcugcccgacgacuucaccggcugcgugaucgccuggaacagcaagaaccuggacagcaaggugggcggcaacuacaacuaccuguaccggcuguuccguaagagcaaccugaagccauucgagcgggacaucagcaccgagaucuaccaggccggcagcacccccugcaacgguguggagggcuuuaacugcuacuucccccugcagagcuacggcuuccagcccaccaacggcgugggcuaccagcccuaccgggugguggugcugagcuucgagcugcugcacgcccccgccaccgugugcggcccuaaaaagagcaccaaccuggugaagaacaagugcgugaacuucaacuucaauggccugaccggcaccggcgugcugaccgagagcaacaagaaguuccugcccuuccagcaguucggccgggauaucgccgacaccaccgacgcagugcgggacccccagacccuggagauccuggacaucaccccaugcagcuucggcggcgugagcgucaucacccccggcacaaacaccagcaaccagguggccgugcuguaccagggagugaacugcaccgaggugcccguggccauccacgccgaccagcugacccccaccuggcggguguacagcaccggcagcaacguguuccagacccgggccggcugccugaucggcgccgagcacgugaacaacuccuacgagugcgacauccccaucggcgcuggcaucugcgccagcuaccagacccagaccaacagcccccggcgggcccggagcguggccagccagagcaucaucgccuacaccaugagcuuaggcgccgagaacagcguggccuacagcaacaacagcaucgcgaucccuaccaacuucaccaucagcgugaccaccgagauacugcccgugagcaugaccaagaccagcguggacuguaccauguacaucugcggcgacagcaccgagugcagcaaccugcugcugcaguacggcagcuucugcacccagcugaaccgggcccugaccggcaucgccguggagcaggacaagaacacccaagagguguucgcccaggugaagcagaucuacaagacucccccaaucaaggacuucggcggcuucaacuucagccagauccugcccgaccccagcaagcccagcaagcggagcuucaucgaggaccugcuguucaacaaggugacccuggccgacgccggcuucaucaagcaguacggcgacugccugggggauaucgccgcucgggaccugaucugcgcccagaaguucaacggccugaccgugcugcccccucugcugaccgacgagaugaucgcccaguacaccagcgcccugcuugccggcaccaucaccagcggcuggaccuucggcgccggcgcagcccugcagauccccuucgccaugcagauggccuaccgguucaacggcaucggcgugacccagaacgugcuguacgagaaccagaagcugaucgccaaccaguucaacagcgccaucggcaagauccaggacagccugagcagcaccgccagcgcccugggcaagcugcaggacguggugaaccagaacgcucaggcccugaacacccuggugaagcagcugagcagcaacuucggcgccaucagcucagugcugaacgacauccugagcaggcuggaucccccagaggccgaggugcagaucgaccggcugaucaccggccggcugcagagccugcagaccuacgugacccagcagcugauccgggccgccgagauccgggccagcgccaaucuggcagccaccaagaugagcgagugcgugcugggccagagcaagcggguggacuuuugcggcaagggcuaccaccugaugagcuucccccagagcgcuccccacggcgugguguuccuccacgugacauacguccccgcccaggagaagaacuucaccaccgcccccgccauuugccacgacggcaaggcccacuucccccgggagggaguguucgugagcaacggcacccacugguucgugacccagcggaacuucuacgagccucagaucaucaccaccgacaacaccuucgugagcggcaacugcgacguggugaucggcaucgugaacaacaccguguacgacccccugcagcccgagcuggacagcuucaaggaggagcuggacaaguacuucaagaaccacaccagcccagacguggaccugggcgacaucagcggcaucaacgccagcguggugaacauccagaaggagaucgaccggcugaacgagguggccaagaaccugaacgagagccugaucgaccugcaggagcugggcaaguacgagcaguacaucaaguggcccugguacaucuggcugggcuucaucgccggccugaucgccaucgugauggugaccaucaugcugugcugcaugaccagcugcuguagcugccugaagggcugcugcagcugcggcagcugcugcaaguucgacgaggacgacagcgagcccgugcugaagggcgugaagcugcacuacaccugauaauaggcuggagccucgguggccuagcuucuugccccuugggccuccccccagccccuccuccccuuccugcacccguacccccguggucuuugaauaaagucugagugggcggcaaaaaaaaaaaaaaaaaaaaaaaaaaaaaaaaaaaaaaaaaaaaaaaaaaaaaaaaaaaaaaaaaaaaaaaaaaaaaaaaaaaaaaaaaaaaaaaaaaaa

SEQ ID NO: 26215 - RNA, 4095 nt, Artificial Sequence
  SARS-CoV-2/Wuhan/WIV05/2019__EPI_ISL_402128 spike protein mRNA gc (1-1273)(K986P_V987P_S477N_D614G)
gggaaauaagagagaaaagaagaguaagaagaaauauaagaccccggcgccgccaccauguucguguuccuggugcugcugccccuggugagcagccagugcgugaaccugaccacccggacccagcugcccccugccuacaccaacagcuucacccggggcguguacuaccccgacaagguguuccggagcagcgugcugcacagcacccaggaccuguuccugcccuucuucagcaacgugaccugguuccacgccauccacgugagcggcaccaacggcaccaagcgguucgacaacccagugcugcccuucaacgacggcguguacuucgccagcaccgagaagucaaacaucauccggggcuggaucuucggcaccacccuggacagcaagacacagagccugcugaucgugaacaacgccaccaacguggugaucaaggugugcgaguuucaguucugcaacgaccccuuccugggcguguacuaccacaagaacaacaagagcuggauggagagcgaguuccgggucuacagcagcgcuaacaauugcaccuucgaguacgugagccagcccuuccugauggaccucgagggcaagcagggcaacuucaagaaccugcgggaguucguguucaagaacaucgauggcuacuucaagaucuacagcaagcacacccccaucaaccuggugcgggaccugccccagggauucagcgcccuggagccucugguggaccugcccaucggcaucaacaucaccagguuccagacccugcuggcccugcaccggagcuaccugacccccggcgacagcagcagcggcuggaccgccggcgccgccgcauacuacgugggcuaccugcagccacggaccuuccugcugaaguacaacgagaacggcaccaucaccgacgccguggacugcgcccuggacccccugagcgagaccaagugcacccuaaagagcuucaccguggagaagggcaucuaccagaccagcaacuuccgggugcagcccacugagagcaucgugcgguuccccaacauuaccaaccugugucccuucggcgagguguucaacgccacccgguucgccagcguguacgccuggaaccggaagcggaucagcaacugcguggccgacuacagcgugcuguacaacagcgccagcuucagcaccuucaagugcuacggcgugagcccuaccaagcugaacgaccugugcuucaccaacguguacgcugacagcuucgugauccggggcgacgaggugcggcagaucgcccccggccagaccggcaagaucgccgacuacaacuacaagcugcccgacgacuucaccggcugcgugaucgccuggaacagcaacaaccuggacagcaaggugggcggcaacuacaacuaccuguaccggcuguuccguaagagcaaccugaagccauucgagcgggacaucagcaccgagaucuaccaggccggcaacacccccugcaacgguguggagggcuuuaacugcuacuucccccugcagagcuacggcuuccagcccaccaacggcgugggcuaccagcccuaccgggugguggugcugagcuucgagcugcugcacgcccccgccaccgugugcggcccuaaaaagagcaccaaccuggugaagaacaagugcgugaauuucaacuucaacggccugaccggcaccggcgugcugaccgagagcaacaagaaguuccugcccuuccagcaguucggccgggauaucgccgacaccaccgacgcagugcgggacccccagacccuggagauccuggacaucaccccaugcagcuucggcggcgugagcgucaucacccccggcacaaacaccagcaaccagguggccgugcuguaccagggagugaacugcaccgaggugcccguggccauccacgccgaccagcugacccccaccuggcggguguacagcaccggcagcaacguguuccagacccgggccggcugccugaucggcgccgagcacgugaacaacagcuacgagugcgacauccccaucggcgcuggcaucugcgccuccuaccagacccagaccaacagcccccggcgggcccggagcguggccagccagagcaucaucgccuacaccaugagcuuaggcgccgagaacagcguggccuacagcaacaacagcaucgcgaucccuaccaacuucaccaucagcgugaccaccgagauacugcccgugagcaugaccaagaccagcguggacuguaccauguacaucugcggcgacagcaccgagugcagcaaccugcugcugcaguacggcagcuucugcacccagcugaaccgggcccugaccggcaucgccguggagcaggacaagaacacccaagagguguucgcccaggugaagcagaucuacaagacucccccaaucaaggacuucggcggcuucaacuucagccagauccugcccgaccccagcaagcccagcaagcggagcuucaucgaggaccugcuguucaacaaggugacccuggccgacgccggcuucaucaagcaguacggcgacugccugggggauaucgccgcucgggaccugaucugcgcccagaaguucaacggccugaccgugcugcccccucugcugaccgacgagaugaucgcccaguacaccagcgcccugcuugccggcaccaucaccagcggcuggaccuucggcgccggcgcagcccugcagauccccuucgccaugcagauggccuaccgguucaacggcaucggcgugacccagaacgugcuguacgagaaccagaagcugaucgccaaccaguucaacagcgccaucggcaagauccaggacagccugagcagcaccgccagcgcccugggcaagcugcaggacguggugaaccagaacgcucaggcccugaacacccuggugaagcagcugagcagcaauuucggcgccaucagcagcgugcugaacgacauccugucaaggcuggaucccccagaggccgaggugcagaucgaccggcugaucaccggccggcugcagagccugcagaccuacgugacccagcagcugauccgggccgccgagauccgggccagcgccaaccuggcagccaccaagaugagcgagugcgugcugggccagagcaagcggguggacuuuugcggcaagggcuaccaccugaugagcuucccccagagcgcuccccacggcgugguguuccuccacgugacauacguccccgcccaggagaagaacuucaccaccgcccccgccauuugccacgacggcaaggcccacuucccccgggagggaguguucgugagcaacggcacccacugguucgugacccagcggaacuucuacgagccucagaucaucaccaccgacaacaccuucgugagcggcaacugcgacguggugaucggcaucgugaacaacaccguguacgacccccugcagcccgagcuggacagcuucaaggaggagcuggacaaguacuucaagaaccacaccagcccagacguggaccugggcgacaucagcggcaucaacgccagcguggugaacauccagaaggagaucgaccggcugaacgagguggccaagaaccugaacgagagccugaucgaccugcaggagcugggcaaguacgagcaguacaucaaguggcccugguacaucuggcugggcuucaucgccggccugaucgccaucgugauggugaccaucaugcugugcugcaugaccagcugcuguagcugccugaagggcugcugcagcugcggcagcugcugcaaguucgacgaggacgacagcgagcccgugcugaagggcgugaagcugcacuacaccugauaauaggcuggagccucgguggccuagcuucuugccccuugggccuccccccagccccuccuccccuuccugcacccguacccccguggucuuugaauaaagucugagugggcggcaaaaaaaaaaaaaaaaaaaaaaaaaaaaaaaaaaaaaaaaaaaaaaaaaaaaaaaaaaaaaaaaaaaaaaaaaaaaaaaaaaaaaaaaaaaaaaaaaaaa

SEQ ID NO: 26216 - RNA, 4095 nt, Artificial Sequence
  SARS-CoV-2/Wuhan/WIV05/2019__EPI_ISL_402128 spike protein mRNA gc (1-1273)(K986P_V987P_N501Y_D614G)
gggaaauaagagagaaaagaagaguaagaagaaauauaagaccccggcgccgccaccauguucguguuccuggugcugcugccccuggugagcagccagugcgugaaccugaccacccggacccagcugcccccugccuacaccaacagcuucacccggggcguguacuaccccgacaagguguuccggagcagcgugcugcacagcacccaggaccuguuccugcccuucuucagcaacgugaccugguuccacgccauccacgugagcggcaccaacggcaccaagcgguucgacaacccagugcugcccuucaacgacggcguguacuucgccagcaccgagaagucaaacaucauccggggcuggaucuucggcaccacccuggacagcaagacacagagccugcugaucgugaacaacgccaccaacguggugaucaaggugugcgaguuucaguucugcaacgaccccuuccugggcguguacuaccacaagaacaacaagagcuggauggagagcgaguuccgggucuacagcagcgcuaacaauugcaccuucgaguacgugagccagcccuuccugauggaccucgagggcaagcagggcaacuucaagaaccugcgggaguucguguucaagaacaucgauggcuacuucaagaucuacagcaagcacacccccaucaaccuggugcgggaccugccccagggauucagcgcccuggagccucugguggaccugcccaucggcaucaacaucaccagguuccagacccugcuggcccugcaccggagcuaccugacccccggcgacagcagcagcggcuggaccgccggcgccgccgcauacuacgugggcuaccugcagccacggaccuuccugcugaaguacaacgagaacggcaccaucaccgacgccguggacugcgcccuggacccccugagcgagaccaagugcacccuaaagagcuucaccguggagaagggcaucuaccagaccagcaacuuccgggugcagcccacugagagcaucgugcgguuccccaacauuaccaaccugugucccuucggcgagguguucaacgccacccgguucgccagcguguacgccuggaaccggaagcggaucagcaacugcguggccgacuacagcgugcuguacaacagcgccagcuucagcaccuucaagugcuacggcgugagcccuaccaagcugaacgaccugugcuucaccaacguguacgcugacagcuucgugauccggggcgacgaggugcggcagaucgcccccggccagaccggcaagaucgccgacuacaacuacaagcugcccgacgacuucaccggcugcgugaucgccuggaacagcaacaaccuggacagcaaggugggcggcaacuacaacuaccuguaccggcuguuccguaagagcaaccugaagccauucgagcgggacaucagcaccgagaucuaccaggccggcagcacccccugcaacgguguggagggcuuuaacugcuacuucccccugcagagcuacggcuuccagcccaccuacggcgugggcuaccagcccuaccgggugguggugcugagcuucgagcugcugcacgcccccgccaccgugugcggcccuaaaaagagcaccaaccuggugaagaacaagugcgugaacuucaacuucaauggccugaccggcaccggcgugcugaccgagagcaacaagaaguuccugcccuuccagcaguucggccgggauaucgccgacaccaccgacgcagugcgggacccccagacccuggagauccuggacaucaccccaugcagcuucggcggcgugagcgucaucacccccggcacaaacaccagcaaccagguggccgugcuguaccagggagugaacugcaccgaggugcccguggccauccacgccgaccagcugacccccaccuggcggguguacagcaccggcagcaacguguuccagacccgggccggcugccugaucggcgccgagcacgugaacaacuccuacgagugcgacauccccaucggcgcuggcaucugcgccagcuaccagacccagaccaacagcccccggcgggcccggagcguggccagccagagcaucaucgccuacaccaugagcuuaggcgccgagaacagcguggccuacagcaacaacagcaucgcgaucccuaccaacuucaccaucagcgugaccaccgagauacugcccgugagcaugaccaagaccagcguggacuguaccauguacaucugcggcgacagcaccgagugcagcaaccugcugcugcaguacggcagcuucugcacccagcugaaccgggcccugaccggcaucgccguggagcaggacaagaacacccaagagguguucgcccaggugaagcagaucuacaagacucccccaaucaaggacuucggcggcuucaacuucagccagauccugcccgaccccagcaagcccagcaagcggagcuucaucgaggaccugcuguucaacaaggugacccuggccgacgccggcuucaucaagcaguacggcgacugccugggggauaucgccgcucgggaccugaucugcgcccagaaguucaacggccugaccgugcugcccccucugcugaccgacgagaugaucgcccaguacaccagcgcccugcuugccggcaccaucaccagcggcuggaccuucggcgccggcgcagcccugcagauccccuucgccaugcagauggccuaccgguucaacggcaucggcgugacccagaacgugcuguacgagaaccagaagcugaucgccaaccaguucaacagcgccaucggcaagauccaggacagccugagcagcaccgccagcgcccugggcaagcugcaggacguggugaaccagaacgcucaggcccugaacacccuggugaagcagcugagcagcaacuucggcgccaucagcucagugcugaacgacauccugagcaggcuggaucccccagaggccgaggugcagaucgaccggcugaucaccggccggcugcagagccugcagaccuacgugacccagcagcugauccgggccgccgagauccgggccagcgccaaucuggcagccaccaagaugagcgagugcgugcugggccagagcaagcggguggacuuuugcggcaagggcuaccaccugaugagcuucccccagagcgcuccccacggcgugguguuccuccacgugacauacguccccgcccaggagaagaacuucaccaccgcccccgccauuugccacgacggcaaggcccacuucccccgggagggaguguucgugagcaacggcacccacugguucgugacccagcggaacuucuacgagccucagaucaucaccaccgacaacaccuucgugagcggcaacugcgacguggugaucggcaucgugaacaacaccguguacgacccccugcagcccgagcuggacagcuucaaggaggagcuggacaaguacuucaagaaccacaccagcccagacguggaccugggcgacaucagcggcaucaacgccagcguggugaacauccagaaggagaucgaccggcugaacgagguggccaagaaccugaacgagagccugaucgaccugcaggagcugggcaaguacgagcaguacaucaaguggcccugguacaucuggcugggcuucaucgccggccugaucgccaucgugauggugaccaucaugcugugcugcaugaccagcugcuguagcugccugaagggcugcugcagcugcggcagcugcugcaaguucgacgaggacgacagcgagcccgugcugaagggcgugaagcugcacuacaccugauaauaggcuggagccucgguggccuagcuucuugccccuugggccuccccccagccccuccuccccuuccugcacccguacccccguggucuuugaauaaagucugagugggcggcaaaaaaaaaaaaaaaaaaaaaaaaaaaaaaaaaaaaaaaaaaaaaaaaaaaaaaaaaaaaaaaaaaaaaaaaaaaaaaaaaaaaaaaaaaaaaaaaaaaa

SEQ ID NO: 26217 - RNA, 4089 nt, Artificial Sequence
  SARS-CoV-2/Wuhan/WIV05/2019__EPI_ISL_402128 spike protein mRNA gc (1-1273)(K986P_V987P_H69del_V70del_D614G)
gggaaauaagagagaaaagaagaguaagaagaaauauaagaccccggcgccgccaccauguucguguuccuggugcugcugccccuggugagcagccagugcgugaaccugaccacccggacccagcugcccccugccuacaccaacagcuucacccggggcguguacuaccccgacaagguguuccggagcagcgugcugcacagcacccaggaccuguuccugcccuucuucagcaacgugaccugguuccacgccaucagcggcaccaacggcaccaagcgguucgacaacccagugcugcccuucaacgacggcguguacuucgccagcaccgagaagucaaacaucauccggggcuggaucuucggcaccacccuggacagcaagacacagagccugcugaucgugaacaacgccaccaacguggugaucaaggugugcgaguuucaguucugcaacgaccccuuccugggcguguacuaccacaagaacaacaagagcuggauggagagcgaguuccggguguacagcagcgcuaacaauugcaccuucgaguacgucagccagcccuuccugauggaccucgagggcaagcagggcaacuucaagaaccugcgggaguucguguucaagaacaucgauggcuacuucaagaucuacagcaagcacacccccaucaaccuggugcgggaccugccccagggauucagcgcccuggagccucugguggaccugcccaucggcaucaacaucaccagguuccagacccugcuggcccugcaccggagcuaccugacccccggcgacagcagcagcggcuggaccgccggcgccgccgcauacuacgugggcuaccugcagccacggaccuuccugcugaaguacaacgagaacggcaccaucaccgacgccguggacugcgcccuggacccccugagcgagaccaagugcacccuaaagagcuucaccguggagaagggcaucuaccagaccagcaacuuccgggugcagcccacugagagcaucgugcgguuccccaacauuaccaaccugugucccuucggcgagguguucaacgccacccgguucgccagcguguacgccuggaaccggaagcggaucagcaacugcguggccgacuacagcgugcuguacaacagcgccagcuucagcaccuucaagugcuacggcgugagcccuaccaagcugaacgaccugugcuucaccaacguguacgcugacagcuucgugauccggggcgacgaggugcggcagaucgcccccggccagaccggcaagaucgccgacuacaacuacaagcugcccgacgacuucaccggcugcgugaucgccuggaacagcaacaaccuggacagcaaggugggcggcaacuacaacuaccuguaccggcuguuccguaagagcaaccugaagccauucgagcgggacaucagcaccgagaucuaccaggccggcagcacccccugcaacgguguggagggcuuuaacugcuacuucccccugcagagcuacggcuuccagcccaccaacggcgugggcuaccagcccuaccgggugguggugcugagcuucgagcugcugcacgcccccgccaccgugugcggcccuaaaaagagcaccaaccuggugaagaacaagugcgugaacuucaauuucaacggccugaccggcaccggcgugcugaccgagagcaacaagaaguuccugcccuuccagcaguucggccgggauaucgccgacaccaccgacgcagugcgggacccccagacccuggagauccuggacaucaccccaugcagcuucggcggcgugagcgugaucacccccggcacaaacaccagcaaccaggucgccgugcuguaccagggagugaacugcaccgaggugcccguggccauccacgccgaccagcugacccccaccuggcggguguacagcaccggcagcaacguguuccagacccgggccggcugccugaucggcgccgagcacgugaacaacuccuacgagugcgacauccccaucggcgcuggcaucugcgccagcuaccagacccagaccaacagcccccggcgggcccggagcguggccagccagagcaucaucgccuacaccaugagcuuaggcgccgagaacagcguggccuacagcaacaacagcaucgcgaucccuaccaacuucaccaucagcgugaccaccgagauacugcccgugagcaugaccaagaccagcguggacuguaccauguacaucugcggcgacagcaccgagugcagcaaccugcugcugcaguacggcagcuucugcacccagcugaaccgggcccugaccggcaucgccguggagcaggacaagaacacccaagagguguucgcccaggugaagcagaucuacaagacucccccaaucaaggacuucggcggcuucaacuucagccagauccugcccgaccccagcaagcccagcaagcggagcuucaucgaggaccugcuguucaacaaggugacccuggccgacgccggcuucaucaagcaguacggcgacugccugggggauaucgccgcucgggaccugaucugcgcccagaaguucaacggccugaccgugcugcccccucugcugaccgacgagaugaucgcccaguacaccagcgcccugcuugccggcaccaucaccagcggcuggaccuucggcgccggcgcagcccugcagauccccuucgccaugcagauggccuaccgguucaacggcaucggcgugacccagaacgugcuguacgagaaccagaagcugaucgccaaccaguucaacagcgccaucggcaagauccaggacagccugagcagcaccgccagcgcccugggcaagcugcaggacguggugaaccagaacgcucaggcccugaacacccuggugaagcagcugagcagcaacuucggcgccaucagcucagugcugaaugacauccugagcaggcuggaucccccagaggccgaggugcagaucgaccggcugaucaccggccggcugcagagccugcagaccuacgugacccagcagcugauccgggccgccgagauccgggccagcgccaaccuggcagccaccaagaugagcgagugcgugcugggccagagcaagcggguggacuuuugcggcaagggcuaccaccugaugagcuucccccagagcgcuccccacggcgugguguuccuccacgugacauacgugcccgcccaggagaagaacuucaccaccgcccccgccauuugccacgacggcaaggcccacuucccccgggagggagucuucgugagcaacggcacccacugguucgugacccagcggaacuucuacgagccucagaucaucaccaccgacaacaccuucgugagcggcaacugcgacguggugaucggcaucgugaacaacaccguguacgacccccugcagcccgagcuggacagcuucaaggaggagcuggacaaguacuucaagaaccacaccagcccagacguggaccugggcgacaucagcggcaucaacgccagcguggugaacauccagaaggagaucgaccggcugaacgagguggccaagaaccugaacgagagccugaucgaccugcaggagcugggcaaguacgagcaguacaucaaguggcccugguacaucuggcugggcuucaucgccggccugaucgccaucgugauggugaccaucaugcugugcugcaugaccagcugcuguagcugccugaagggcugcugcagcugcggcagcugcugcaaguucgacgaggacgacagcgagcccgugcugaagggcgugaagcugcacuacaccugauaauaggcuggagccucgguggccuagcuucuugccccuugggccuccccccagccccuccuccccuuccugcacccguacccccguggucuuugaauaaagucugagugggcggcaaaaaaaaaaaaaaaaaaaaaaaaaaaaaaaaaaaaaaaaaaaaaaaaaaaaaaaaaaaaaaaaaaaaaaaaaaaaaaaaaaaaaaaaaaaaaaaaaaaa

SEQ ID NO: 26218 - RNA, 4095 nt, Artificial Sequence
  SARS-CoV-2/Wuhan/WIV05/2019__EPI_ISL_402128 spike protein mRNA gc (1-1273)(K986P_V987P_Y453F_D614G)
gggaaauaagagagaaaagaagaguaagaagaaauauaagaccccggcgccgccaccauguucguguuccuggugcugcugccccuggugagcagccagugcgugaaccugaccacccggacccagcugcccccugccuacaccaacagcuucacccggggcguguacuaccccgacaagguguuccggagcagcgugcugcacagcacccaggaccuguuccugcccuucuucagcaacgugaccugguuccacgccauccacgugagcggcaccaacggcaccaagcgguucgacaacccagugcugcccuucaacgacggcguguacuucgccagcaccgagaagucaaacaucauccggggcuggaucuucggcaccacccuggacagcaagacacagagccugcugaucgugaacaacgccaccaacguggugaucaaggugugcgaguuucaguucugcaacgaccccuuccugggcguguacuaccacaagaacaacaagagcuggauggagagcgaguuccgggucuacagcagcgcuaacaauugcaccuucgaguacgugagccagcccuuccugauggaccucgagggcaagcagggcaacuucaagaaccugcgggaguucguguucaagaacaucgauggcuacuucaagaucuacagcaagcacacccccaucaaccuggugcgggaccugccccagggauucagcgcccuggagccucugguggaccugcccaucggcaucaacaucaccagguuccagacccugcuggcccugcaccggagcuaccugacccccggcgacagcagcagcggcuggaccgccggcgccgccgcauacuacgugggcuaccugcagccacggaccuuccugcugaaguacaacgagaacggcaccaucaccgacgccguggacugcgcccuggacccccugagcgagaccaagugcacccuaaagagcuucaccguggagaagggcaucuaccagaccagcaacuuccgggugcagcccacugagagcaucgugcgguuccccaacauuaccaaccugugucccuucggcgagguguucaacgccacccgguucgccagcguguacgccuggaaccggaagcggaucagcaacugcguggccgacuacagcgugcuguacaacagcgccagcuucagcaccuucaagugcuacggcgugagcccuaccaagcugaacgaccugugcuucaccaacguguacgcugacagcuucgugauccggggcgacgaggugcggcagaucgcccccggccagaccggcaagaucgccgacuacaacuacaagcugcccgacgacuucaccggcugcgugaucgccuggaacagcaacaaccuggacagcaaggugggcggcaacuacaacuaccuguuccggcuguuccguaagagcaaccugaagccauuugagcgggacaucagcaccgagaucuaccaggccggcagcacccccugcaacgguguggagggcuucaacugcuacuucccccugcagagcuacggcuuccagcccaccaacggcgugggcuaccagcccuaccgggugguggugcugagcuucgagcugcugcacgcccccgccaccgugugcggcccuaaaaagagcaccaaccuggugaagaacaagugcgugaacuucaauuucaacggccugaccggcaccggcgugcugaccgagagcaacaagaaguuccugcccuuccagcaguucggccgggauaucgccgacaccaccgacgcagugcgggacccccagacccuggagauccuggacaucaccccaugcagcuucggcggcgugagcgucaucacccccggcacaaacaccagcaaccagguggccgugcuguaccagggagugaacugcaccgaggugcccguggccauccacgccgaccagcugacccccaccuggcggguguacagcaccggcagcaacguguuccagacccgggccggcugccugaucggcgccgagcacgugaacaacuccuacgagugcgacauccccaucggcgcuggcaucugcgccagcuaccagacccagaccaacagcccccggcgggcccggagcguggccagccagagcaucaucgccuacaccaugagcuuaggcgccgagaacagcguggccuacagcaacaacagcaucgcgaucccuaccaacuucaccaucagcgugaccaccgagauacugcccgugagcaugaccaagaccagcguggacuguaccauguacaucugcggcgacagcaccgagugcagcaaccugcugcugcaguacggcagcuucugcacccagcugaaccgggcccugaccggcaucgccguggagcaggacaagaacacccaagagguguucgcccaggugaagcagaucuacaagacucccccaaucaaggacuucggcggcuucaacuucagccagauccugcccgaccccagcaagcccagcaagcggagcuucaucgaggaccugcuguucaacaaggugacccuggccgacgccggcuucaucaagcaguacggcgacugccugggggauaucgccgcucgggaccugaucugcgcccagaaguucaacggccugaccgugcugcccccucugcugaccgacgagaugaucgcccaguacaccagcgcccugcuugccggcaccaucaccagcggcuggaccuucggcgccggcgcagcccugcagauccccuucgccaugcagauggccuaccgguucaacggcaucggcgugacccagaacgugcuguacgagaaccagaagcugaucgccaaccaguucaacagcgccaucggcaagauccaggacagccugagcagcaccgccagcgcccugggcaagcugcaggacguggugaaccagaacgcucaggcccugaacacccuggugaagcagcugagcagcaacuuuggcgccaucagcucagugcugaaugacauccugagcaggcuggaucccccagaggccgaggugcagaucgaccggcugaucaccggccggcugcagagccugcagaccuacgugacccagcagcugauccgggccgccgagauccgggccagcgccaaccuggcagccaccaagaugagcgagugcgugcugggccagagcaagcggguggacuucugcggcaagggcuaccaccugaugagcuucccccagagcgcuccccacggcgugguguuccuccacgugacauacguccccgcccaggagaagaacuucaccaccgcccccgccauuugccacgacggcaaggcccacuucccccgggagggaguguucgugagcaacggcacccacugguucgugacccagcggaacuucuacgagccucagaucaucaccaccgacaacaccuucgugagcggcaacugcgacguggugaucggcaucgugaacaacaccguguacgacccccugcagcccgagcuggacagcuucaaggaggagcuggacaaguacuucaagaaccacaccagcccagacguggaccugggcgacaucagcggcaucaacgccagcguggugaacauccagaaggagaucgaccggcugaacgagguggccaagaaccugaacgagagccugaucgaccugcaggagcugggcaaguacgagcaguacaucaaguggcccugguacaucuggcugggcuucaucgccggccugaucgccaucgugauggugaccaucaugcugugcugcaugaccagcugcuguagcugccugaagggcugcugcagcugcggcagcugcugcaaguucgacgaggacgacagcgagcccgugcugaagggcgugaagcugcacuacaccugauaauaggcuggagccucgguggccuagcuucuugccccuugggccuccccccagccccuccuccccuuccugcacccguacccccguggucuuugaauaaagucugagugggcggcaaaaaaaaaaaaaaaaaaaaaaaaaaaaaaaaaaaaaaaaaaaaaaaaaaaaaaaaaaaaaaaaaaaaaaaaaaaaaaaaaaaaaaaaaaaaaaaaaaaa

SEQ ID NO: 26219 - RNA, 4095 nt, Artificial Sequence
  SARS-CoV-2/Wuhan/WIV05/2019__EPI_ISL_402128 spike protein mRNA gc (1-1273)(K986P_V987P_D614G_I692V)
gggaaauaagagagaaaagaagaguaagaagaaauauaagaccccggcgccgccaccauguucguguuccuggugcugcugccccuggugagcagccagugcgugaaccugaccacccggacccagcugcccccugccuacaccaacagcuucacccggggcguguacuaccccgacaagguguuccggagcagcgugcugcacagcacccaggaccuguuccugcccuucuucagcaacgugaccugguuccacgccauccacgugagcggcaccaacggcaccaagcgguucgacaacccagugcugcccuucaacgacggcguguacuucgccagcaccgagaagucaaacaucauccggggcuggaucuucggcaccacccuggacagcaagacacagagccugcugaucgugaacaacgccaccaacguggugaucaaggugugcgaguuucaguucugcaacgaccccuuccugggcguguacuaccacaagaacaacaagagcuggauggagagcgaguuccgggucuacagcagcgcuaacaauugcaccuucgaguacgugagccagcccuuccugauggaccucgagggcaagcagggcaacuucaagaaccugcgggaguucguguucaagaacaucgauggcuacuucaagaucuacagcaagcacacccccaucaaccuggugcgggaccugccccagggauucagcgcccuggagccucugguggaccugcccaucggcaucaacaucaccagguuccagacccugcuggcccugcaccggagcuaccugacccccggcgacagcagcagcggcuggaccgccggcgccgccgcauacuacgugggcuaccugcagccacggaccuuccugcugaaguacaacgagaacggcaccaucaccgacgccguggacugcgcccuggacccccugagcgagaccaagugcacccuaaagagcuucaccguggagaagggcaucuaccagaccagcaacuuccgggugcagcccacugagagcaucgugcgguuccccaacauuaccaaccugugucccuucggcgagguguucaacgccacccgguucgccagcguguacgccuggaaccggaagcggaucagcaacugcguggccgacuacagcgugcuguacaacagcgccagcuucagcaccuucaagugcuacggcgugagcccuaccaagcugaacgaccugugcuucaccaacguguacgcugacagcuucgugauccggggcgacgaggugcggcagaucgcccccggccagaccggcaagaucgccgacuacaacuacaagcugcccgacgacuucaccggcugcgugaucgccuggaacagcaacaaccuggacagcaaggugggcggcaacuacaacuaccuguaccggcuguuccguaagagcaaccugaagccauucgagcgggacaucagcaccgagaucuaccaggccggcagcacccccugcaacgguguggagggcuuuaacugcuacuucccccugcagagcuacggcuuccagcccaccaacggcgugggcuaccagcccuaccgggugguggugcugagcuucgagcugcugcacgcccccgccaccgugugcggcccuaaaaagagcaccaaccuggugaagaacaagugcgugaacuucaauuucaacggccugaccggcaccggcgugcugaccgagagcaacaagaaguuccugcccuuccagcaguucggccgggauaucgccgacaccaccgacgcagugcgggacccccagacccuggagauccuggacaucaccccaugcagcuucggcggcgugagcgucaucacccccggcacaaacaccagcaaccagguggccgugcuguaccagggagugaacugcaccgaggugcccguggccauccacgccgaccagcugacccccaccuggcggguguacagcaccggcagcaacguguuccagacccgggccggcugccugaucggcgccgagcacgugaacaacuccuacgagugcgacauccccaucggcgcuggcaucugcgccagcuaccagacccagaccaacagcccccggcgggcccggagcguggccagccagagcgugaucgccuacaccaugagcuuaggcgccgagaacagcguggccuacagcaacaacagcaucgcgaucccuaccaacuucaccaucagcgugaccaccgagauccugcccgugagcaugaccaagaccagcguggacuguaccauguacauaugcggcgacagcaccgagugcagcaaccugcugcugcaguacggcagcuucugcacccagcugaaccgggcccugaccggcaucgccguggagcaggacaagaacacccaagagguguucgcccaggugaagcagaucuacaagacucccccaaucaaggacuucggcggcuucaacuucagccagauccugcccgaccccagcaagcccagcaagcggagcuucaucgaggaccugcuguucaacaaggugacccuggccgacgccggcuucaucaagcaguacggcgacugccugggggauaucgccgcucgggaccugaucugcgcccagaaguucaacggccugaccgugcugcccccucugcugaccgacgagaugaucgcccaguacaccagcgcccugcuugccggcaccaucaccagcggcuggaccuucggcgccggcgcagcccugcagauccccuucgccaugcagauggccuaccgguucaacggcaucggcgugacccagaacgugcuguacgagaaccagaagcugaucgccaaccaguucaacagcgccaucggcaagauccaggacagccugagcagcaccgccagcgcccugggcaagcugcaggacguggugaaccagaacgcucaggcccugaacacccuggugaagcagcugagcagcaacuucggcgccaucagcucagugcugaaugacauccugagcaggcuggaucccccagaggccgaggugcagaucgaccggcugaucaccggccggcugcagagccugcagaccuacgugacccagcagcugauccgggccgccgagauccgggccagcgccaaccuggcagccaccaagaugagcgagugcgugcugggccagagcaagcggguggacuuuugcggcaagggcuaccaccugaugagcuucccccagagcgcuccccacggcgugguguuccuccacgucacauacgugcccgcccaggagaagaacuucaccaccgcccccgccaucugccacgacggcaaggcccacuucccccgggagggaguguucgugagcaacggcacccacugguucgugacccagcggaacuucuacgagccucagauuaucaccaccgacaacaccuucgugagcggcaacugcgacguggugaucggcaucgugaacaacaccguguacgacccccugcagcccgagcuggacagcuucaaggaggagcuggacaaguacuucaagaaccacaccagcccagacguggaccugggcgacaucagcggcaucaacgccagcguggugaacauccagaaggagaucgaccggcugaacgagguggccaagaaccugaacgagagccugaucgaccugcaggagcugggcaaguacgagcaguacaucaaguggcccugguacaucuggcugggcuucaucgccggccugaucgccaucgugauggugaccaucaugcugugcugcaugaccagcugcuguagcugccugaagggcugcugcagcugcggcagcugcugcaaguucgacgaggacgacagcgagcccgugcugaagggcgugaagcugcacuacaccugauaauaggcuggagccucgguggccuagcuucuugccccuugggccuccccccagccccuccuccccuuccugcacccguacccccguggucuuugaauaaagucugagugggcggcaaaaaaaaaaaaaaaaaaaaaaaaaaaaaaaaaaaaaaaaaaaaaaaaaaaaaaaaaaaaaaaaaaaaaaaaaaaaaaaaaaaaaaaaaaaaaaaaaaaa

SEQ ID NO: 26220 - RNA, 4095 nt, Artificial Sequence
  SARS-CoV-2/Wuhan/WIV05/2019__EPI_ISL_402128 spike protein mRNA gc (1-1273)(K986P_V987P_D614G_M1229I)
gggaaauaagagagaaaagaagaguaagaagaaauauaagaccccggcgccgccaccauguucguguuccuggugcugcugccccuggugagcagccagugcgugaaccugaccacccggacccagcugcccccugccuacaccaacagcuucacccggggcguguacuaccccgacaagguguuccggagcagcgugcugcacagcacccaggaccuguuccugcccuucuucagcaacgugaccugguuccacgccauccacgugagcggcaccaacggcaccaagcgguucgacaacccagugcugcccuucaacgacggcguguacuucgccagcaccgagaagucaaacaucauccggggcuggaucuucggcaccacccuggacagcaagacacagagccugcugaucgugaacaacgccaccaacguggugaucaaggugugcgaguuucaguucugcaacgaccccuuccugggcguguacuaccacaagaacaacaagagcuggauggagagcgaguuccgggucuacagcagcgcuaacaauugcaccuucgaguacgugagccagcccuuccugauggaccucgagggcaagcagggcaacuucaagaaccugcgggaguucguguucaagaacaucgauggcuacuucaagaucuacagcaagcacacccccaucaaccuggugcgggaccugccccagggauucagcgcccuggagccucugguggaccugcccaucggcaucaacaucaccagguuccagacccugcuggcccugcaccggagcuaccugacccccggcgacagcagcagcggcuggaccgccggcgccgccgcauacuacgugggcuaccugcagccacggaccuuccugcugaaguacaacgagaacggcaccaucaccgacgccguggacugcgcccuggacccccugagcgagaccaagugcacccuaaagagcuucaccguggagaagggcaucuaccagaccagcaacuuccgggugcagcccacugagagcaucgugcgguuccccaacauuaccaaccugugucccuucggcgagguguucaacgccacccgguucgccagcguguacgccuggaaccggaagcggaucagcaacugcguggccgacuacagcgugcuguacaacagcgccagcuucagcaccuucaagugcuacggcgugagcccuaccaagcugaacgaccugugcuucaccaacguguacgcugacagcuucgugauccggggcgacgaggugcggcagaucgcccccggccagaccggcaagaucgccgacuacaacuacaagcugcccgacgacuucaccggcugcgugaucgccuggaacagcaacaaccuggacagcaaggugggcggcaacuacaacuaccuguaccggcuguuccguaagagcaaccugaagccauucgagcgggacaucagcaccgagaucuaccaggccggcagcacccccugcaacgguguggagggcuuuaacugcuacuucccccugcagagcuacggcuuccagcccaccaacggcgugggcuaccagcccuaccgggugguggugcugagcuucgagcugcugcacgcccccgccaccgugugcggcccuaaaaagagcaccaaccuggugaagaacaagugcgugaacuucaauuucaacggccugaccggcaccggcgugcugaccgagagcaacaagaaguuccugcccuuccagcaguucggccgggauaucgccgacaccaccgacgcagugcgggacccccagacccuggagauccuggacaucaccccaugcagcuucggcggcgugagcgucaucacccccggcacaaacaccagcaaccagguggccgugcuguaccagggagugaacugcaccgaggugcccguggccauccacgccgaccagcugacccccaccuggcggguguacagcaccggcagcaacguguuccagacccgggccggcugccugaucggcgccgagcacgugaacaacuccuacgagugcgacauccccaucggcgcuggcaucugcgccagcuaccagacccagaccaacagcccccggcgggcccggagcguggccagccagagcaucaucgccuacaccaugagcuuaggcgccgagaacagcguggccuacagcaacaacagcaucgcgaucccuaccaacuucaccaucagcgugaccaccgagauacugcccgugagcaugaccaagaccagcguggacuguaccauguacaucugcggcgacagcaccgagugcagcaaccugcugcugcaguacggcagcuucugcacccagcugaaccgggcccugaccggcaucgccguggagcaggacaagaacacccaagagguguucgcccaggugaagcagaucuacaagacucccccaaucaaggacuucggcggcuucaacuucagccagauccugcccgaccccagcaagcccagcaagcggagcuucaucgaggaccugcuguucaacaaggugacccuggccgacgccggcuucaucaagcaguacggcgacugccugggggauaucgccgcucgggaccugaucugcgcccagaaguucaacggccugaccgugcugcccccucugcugaccgacgagaugaucgcccaguacaccagcgcccugcuugccggcaccaucaccagcggcuggaccuucggcgccggcgcagcccugcagauccccuucgccaugcagauggccuaccgguucaacggcaucggcgugacccagaacgugcuguacgagaaccagaagcugaucgccaaccaguucaacagcgccaucggcaagauccaggacagccugagcagcaccgccagcgcccugggcaagcugcaggacguggugaaccagaacgcucaggcccugaacacccuggugaagcagcugagcagcaacuucggcgccaucagcucagugcugaaugacauccugagcaggcuggaucccccagaggccgaggugcagaucgaccggcugaucaccggccggcugcagagccugcagaccuacgugacccagcagcugauccgggccgccgagauccgggccagcgccaaccuggcagccaccaagaugagcgagugcgugcugggccagagcaagcggguggacuuuugcggcaagggcuaccaccugaugagcuucccccagagcgcuccccacggcgugguguuccuccacgugacauacguccccgcccaggagaagaacuucaccaccgcccccgccauuugccacgacggcaaggcccacuucccccgggagggaguguucgugagcaacggcacccacugguucgugacccagcggaacuucuacgagccucagaucaucaccaccgacaacaccuucgugagcggcaacugcgacguggugaucggcaucgugaacaacaccguguacgacccccugcagcccgagcuggacagcuucaaggaggagcuggacaaguacuucaagaaccacaccagcccagacguggaccugggcgacaucagcggcaucaacgccagcguggugaacauccagaaggagaucgaccggcugaacgagguggccaagaaccugaacgagagccugaucgaccugcaggagcugggcaaguacgagcaguacaucaaguggcccugguacaucuggcugggcuucaucgccggccugaucgccaucgugaucgugaccaucaugcugugcugcaugaccagcugcuguagcugccugaagggcugcugcagcugcggcagcugcugcaaguucgacgaggacgacagcgagcccgugcugaagggcgugaagcugcacuacaccugauaauaggcuggagccucgguggccuagcuucuugccccuugggccuccccccagccccuccuccccuuccugcacccguacccccguggucuuugaauaaagucugagugggcggcaaaaaaaaaaaaaaaaaaaaaaaaaaaaaaaaaaaaaaaaaaaaaaaaaaaaaaaaaaaaaaaaaaaaaaaaaaaaaaaaaaaaaaaaaaaaaaaaaaaa

SEQ ID NO: 26221 - RNA, 4089 nt, Artificial Sequence
  SARS-CoV-2/Wuhan/WIV05/2019__EPI_ISL_402128 spike protein mRNA gc (1-1273)(K986P_V987P_H69del_V70del_A222V_Y453F_S477N_D614G_I692V)
gggaaauaagagagaaaagaagaguaagaagaaauauaagaccccggcgccgccaccauguucguguuccuggugcugcugccccuggugagcagccagugcgugaaccugaccacccggacccagcugcccccugccuacaccaacagcuucacccggggcguguacuaccccgacaagguguuccggagcagcgugcugcacagcacccaggaccuguuccugcccuucuucagcaacgugaccugguuccacgccaucagcggcaccaacggcaccaagcgguucgacaacccagugcugcccuucaacgacggcguguacuucgccagcaccgagaagucaaacaucauccggggcuggaucuucggcaccacccuggacagcaagacacagagccugcugaucgugaacaacgccaccaacguggugaucaaggugugcgaguuucaguucugcaacgaccccuuccugggcguguacuaccacaagaacaacaagagcuggauggagagcgaguuccggguguacagcagcgcuaacaauugcaccuucgaguacgucagccagcccuuccugauggaccucgagggcaagcagggcaacuucaagaaccugcgggaguucguguucaagaacaucgauggcuacuucaagaucuacagcaagcacacccccaucaaccuggugcgggaccugccccagggauucagcgugcuggagccucugguggaccugcccaucggcaucaacaucaccagguuccagacccugcuggcccugcaccggagcuaccugacccccggcgacagcagcagcggcuggaccgccggcgccgccgccuacuacgugggcuaccugcagccacggaccuuccugcugaaguacaacgagaacggcaccaucaccgacgcaguggacugcgcccuggacccccugagcgagaccaagugcacccuaaagagcuucaccguggagaagggcaucuaccagaccagcaacuuccgggugcagcccacugagagcaucgugcgguuccccaacauuaccaaccugugucccuucggcgagguguucaacgccacccgguucgccagcguguacgccuggaaccggaagcggaucagcaacugcguggccgacuacagcgugcuguacaacagcgccagcuucagcaccuucaagugcuacggcgugagcccuaccaagcugaacgaccugugcuucaccaacguguacgccgacagcuucgugauccggggcgacgaggugcggcagaucgcucccggccagaccggcaagaucgccgacuacaacuacaagcugcccgacgacuucaccggcugcgugaucgccuggaacagcaacaaccuggacagcaaggugggcggcaacuacaacuaccuguuccggcuguuccguaagagcaaccugaagccauuugagcgggacaucagcaccgagaucuaccaggccggcaacacccccugcaacgguguggagggcuucaacugcuacuucccccugcagagcuacggcuuccagcccaccaacggcgugggcuaccagcccuaccgggugguggugcugagcuucgagcugcugcacgcccccgccaccgugugcggcccuaaaaagagcaccaaccuggugaagaacaagugcgugaauuucaacuucaacggccugaccggcaccggcgugcugaccgagagcaacaagaaguuccugcccuuccagcaguucggccgggauaucgccgacaccaccgacgccgugcgggacccccagacccuggagauccuggacaucaccccaugcagcuucggcggcgugagcgucaucacccccggcacaaacaccagcaaccagguggcagugcuguaccagggagugaacugcaccgaggugcccguggccauccacgccgaccagcugacccccaccuggcggguguacagcaccggcagcaacguguuccagacccgggccggcugccugaucggcgccgagcacgugaacaacagcuacgagugcgacauccccaucggcgccggcaucugcgcuuccuaccagacccagaccaacagcccccggcgggcccggagcguggccagccagagcgugaucgccuacaccaugagcuuaggcgccgagaacagcguggccuacagcaacaacagcaucgccaucccuaccaacuucaccaucagcgugaccaccgagauccugcccgugagcaugaccaagaccagcguggacuguaccauguacauaugcggcgacagcaccgagugcagcaaccugcugcugcaguacggcagcuucugcacccagcugaaccgggcgcugaccggcaucgccguggagcaggacaagaacacccaagagguguucgcccaggugaagcagaucuacaagacucccccaaucaaggacuucggcggcuucaacuucagccagauccugcccgaccccagcaagcccagcaagcggagcuucaucgaggaccugcuguucaacaaggugacccuggccgacgccggcuucaucaagcaguacggcgacugccugggggauaucgccgcccgggaccugaucugcgcucagaaguucaacggccugaccgugcugcccccucugcugaccgacgagaugaucgcccaguacaccagcgcccugcuugccggcaccaucaccagcggcuggaccuucggcgccggcgccgcacugcagauccccuucgccaugcagauggccuaccgguucaacggcaucggcgugacccagaacgugcuguacgagaaccagaagcugaucgccaaccaguucaacagcgccaucggcaagauccaggacagccugagcagcaccgccagcgcccugggcaagcugcaggacguggugaaccagaacgcccaggcucugaacacccuggugaagcagcugagcagcaauuuuggcgccaucagcagcgugcugaacgacauccugucaaggcuggaucccccagaggccgaggugcagaucgaccggcugaucaccggccggcugcagagccugcagaccuacgugacccagcagcugauccgggccgccgagauccgggccagcgccaaccuggccgcaaccaagaugagcgagugcgugcugggccagagcaagcggguggacuucugcggcaagggcuaccaccugaugagcuucccccagagcgcuccccacggcgugguguuccuccacgucacauacgugcccgcccaggagaagaacuucaccaccgcccccgccaucugccacgacggcaaggcccacuucccccgggagggaguguucgugagcaacggcacccacugguucgugacccagcggaacuucuacgagccucagauuaucaccaccgacaacaccuucgugagcggcaacugcgacguggugaucggcaucgugaacaacaccguguacgacccccugcagcccgagcuggacagcuucaaggaggagcuggacaaguacuucaagaaccacaccagcccagacguggaccugggcgacaucagcggcaucaacgccagcguggugaacauccagaaggagaucgaccggcugaacgagguggccaagaaccugaacgagagccugaucgaccugcaggagcugggcaaguacgagcaguacaucaaguggcccugguacaucuggcugggcuucaucgccggccugaucgccaucgugauggugaccaucaugcugugcugcaugaccagcugcuguagcugccugaagggcugcugcagcugcggcagcugcugcaaguucgacgaggacgacagcgagcccgugcugaagggcgugaagcugcacuacaccugauaauaggcuggagccucgguggccuagcuucuugccccuugggccuccccccagccccuccuccccuuccugcacccguacccccguggucuuugaauaaagucugagugggcggcaaaaaaaaaaaaaaaaaaaaaaaaaaaaaaaaaaaaaaaaaaaaaaaaaaaaaaaaaaaaaaaaaaaaaaaaaaaaaaaaaaaaaaaaaaaaaaaaaaaa

SEQ ID NO: 26222 - RNA, 4089 nt, Artificial Sequence
  SARS-CoV-2/Wuhan/WIV05/2019__EPI_ISL_402128 spike protein mRNA gc (1-1273)(K986P_V987P_H69del_V70del_Y453F_D614G_I692V_M1229I)
gggaaauaagagagaaaagaagaguaagaagaaauauaagaccccggcgccgccaccauguucguguuccuggugcugcugccccuggugagcagccagugcgugaaccugaccacccggacccagcugcccccugccuacaccaacagcuucacccggggcguguacuaccccgacaagguguuccggagcagcgugcugcacagcacccaggaccuguuccugcccuucuucagcaacgugaccugguuccacgccaucagcggcaccaacggcaccaagcgguucgacaacccagugcugcccuucaacgacggcguguacuucgccagcaccgagaagucaaacaucauccggggcuggaucuucggcaccacccuggacagcaagacacagagccugcugaucgugaacaacgccaccaacguggugaucaaggugugcgaguuucaguucugcaacgaccccuuccugggcguguacuaccacaagaacaacaagagcuggauggagagcgaguuccggguguacagcagcgcuaacaauugcaccuucgaguacgucagccagcccuuccugauggaccucgagggcaagcagggcaacuucaagaaccugcgggaguucguguucaagaacaucgauggcuacuucaagaucuacagcaagcacacccccaucaaccuggugcgggaccugccccagggauucagcgcccuggagccucugguggaccugcccaucggcaucaacaucaccagguuccagacccugcuggcccugcaccggagcuaccugacccccggcgacagcagcagcggcuggaccgccggcgccgccgcauacuacgugggcuaccugcagccacggaccuuccugcugaaguacaacgagaacggcaccaucaccgacgccguggacugcgcccuggacccccugagcgagaccaagugcacccuaaagagcuucaccguggagaagggcaucuaccagaccagcaacuuccgggugcagcccacugagagcaucgugcgguuccccaacauuaccaaccugugucccuucggcgagguguucaacgccacccgguucgccagcguguacgccuggaaccggaagcggaucagcaacugcguggccgacuacagcgugcuguacaacagcgccagcuucagcaccuucaagugcuacggcgugagcccuaccaagcugaacgaccugugcuucaccaacguguacgcugacagcuucgugauccggggcgacgaggugcggcagaucgcccccggccagaccggcaagaucgccgacuacaacuacaagcugcccgacgacuucaccggcugcgugaucgccuggaacagcaacaaccuggacagcaaggugggcggcaacuacaacuaccuguuccggcuguuccguaagagcaaccugaagccauuugagcgggacaucagcaccgagaucuaccaggccggcagcacccccugcaacgguguggagggcuucaacugcuacuucccccugcagagcuacggcuuccagcccaccaacggcgugggcuaccagcccuaccgggugguggugcugagcuucgagcugcugcacgcccccgccaccgugugcggcccuaaaaagagcaccaaccuggugaagaacaagugcgugaacuucaauuucaacggccugaccggcaccggcgugcugaccgagagcaacaagaaguuccugcccuuccagcaguucggccgggauaucgccgacaccaccgacgcagugcgggacccccagacccuggagauccuggacaucaccccaugcagcuucggcggcgugagcgugaucacccccggcacaaacaccagcaaccaggucgccgugcuguaccagggagugaacugcaccgaggugcccguggccauccacgccgaccagcugacccccaccuggcggguguacagcaccggcagcaacguguuccagacccgggccggcugccugaucggcgccgagcacgugaacaacuccuacgagugcgacauccccaucggcgcuggcaucugcgccagcuaccagacccagaccaacagcccccggcgggcccggagcguggccagccagagcgugaucgccuacaccaugagcuuaggcgccgagaacagcguggccuacagcaacaacagcaucgcgaucccuaccaacuucaccaucagcgugaccaccgagauccugcccgugagcaugaccaagaccagcguggacuguaccauguacauaugcggcgacagcaccgagugcagcaaccugcugcugcaguacggcagcuucugcacccagcugaaccgggcccugaccggcaucgccguggagcaggacaagaacacccaagagguguucgcccaggugaagcagaucuacaagacucccccaaucaaggacuucggcggcuucaacuucagccagauccugcccgaccccagcaagcccagcaagcggagcuucaucgaggaccugcuguucaacaaggugacccuggccgacgccggcuucaucaagcaguacggcgacugccugggggauaucgccgcucgggaccugaucugcgcccagaaguucaacggccugaccgugcugcccccucugcugaccgacgagaugaucgcccaguacaccagcgcccugcuugccggcaccaucaccagcggcuggaccuucggcgccggcgcagcccugcagauccccuucgccaugcagauggccuaccgguucaacggcaucggcgugacccagaacgugcuguacgagaaccagaagcugaucgccaaccaguucaacagcgccaucggcaagauccaggacagccugagcagcaccgccagcgcccugggcaagcugcaggacguggugaaccagaacgcucaggcccugaacacccuggugaagcagcugagcagcaacuuuggcgccaucagcucagugcugaaugacauccugagcaggcuggaucccccagaggccgaggugcagaucgaccggcugaucaccggccggcugcagagccugcagaccuacgugacccagcagcugauccgggccgccgagauccgggccagcgccaaccuggcagccaccaagaugagcgagugcgugcugggccagagcaagcggguggacuucugcggcaagggcuaccaccugaugagcuucccccagagcgcuccccacggcgugguguuccuccacgugacauacguccccgcccaggagaagaacuucaccaccgcccccgccaucugccacgacggcaaggcccacuucccccgggagggaguguucgugagcaacggcacccacugguucgugacccagcggaacuucuacgagccucagauuaucaccaccgacaacaccuucgugagcggcaacugcgacguggugaucggcaucgugaacaacaccguguacgacccccugcagcccgagcuggacagcuucaaggaggagcuggacaaguacuucaagaaccacaccagcccagacguggaccugggcgacaucagcggcaucaacgccagcguggugaacauccagaaggagaucgaccggcugaacgagguggccaagaaccugaacgagagccugaucgaccugcaggagcugggcaaguacgagcaguacaucaaguggcccugguacaucuggcugggcuucaucgccggccugaucgccaucgugaucgugaccaucaugcugugcugcaugaccagcugcuguagcugccugaagggcugcugcagcugcggcagcugcugcaaguucgacgaggacgacagcgagcccgugcugaagggcgugaagcugcacuacaccugauaauaggcuggagccucgguggccuagcuucuugccccuugggccuccccccagccccuccuccccuuccugcacccguacccccguggucuuugaauaaagucugagugggcggcaaaaaaaaaaaaaaaaaaaaaaaaaaaaaaaaaaaaaaaaaaaaaaaaaaaaaaaaaaaaaaaaaaaaaaaaaaaaaaaaaaaaaaaaaaaaaaaaaaaa

SEQ ID NO: 26223 - RNA, 4086 nt, Artificial Sequence
  SARS-CoV-2/Wuhan/WIV05/2019__EPI_ISL_402128 spike protein mRNA gc (1-1273)(K986P_V987P_K986P_V987P_H69del_V70del_Y144del_N501Y_A570 D_D614G_P681H_T716I_S982A_D1118H)
gggaaauaagagagaaaagaagaguaagaagaaauauaagaccccggcgccgccaccauguucguguuccuggugcugcugccccuggugagcagccagugcgugaaccugaccacccggacccagcugcccccugccuacaccaacagcuucacccggggcguguacuaccccgacaagguguuccggagcagcgugcugcacagcacccaggaccuguuccugcccuucuucagcaacgugaccugguuccacgccaucagcggcaccaacggcaccaagcgguucgacaacccagugcugcccuucaacgacggcguguacuucgccagcaccgagaagucaaacaucauccggggcuggaucuucggcaccacccuggacagcaagacacagagccugcugaucgugaacaacgccaccaacguggugaucaaggugugcgaguuucaguucugcaacgaccccuuccugggcguguaccacaagaacaacaagagcuggauggagagcgaguuccggguguacagcagcgcuaacaauugcaccuucgaguacgucagccagcccuuccugauggaccucgagggcaagcagggcaacuucaagaaccugcgggaguucguguucaagaacaucgauggcuacuucaagaucuacagcaagcacacccccaucaaccuggugcgggaccugccccagggauucagcgcccuggagccucugguggaccugcccaucggcaucaacaucaccagguuccagacccugcuggcccugcaccggagcuaccugacccccggcgacagcagcagcggcuggaccgccggcgccgccgcauacuacgugggcuaccugcagccacggaccuuccugcugaaguacaacgagaacggcaccaucaccgacgccguggacugcgcccuggacccccugagcgagaccaagugcacccuaaagagcuucaccguggagaagggcaucuaccagaccagcaacuuccgggugcagcccacugagagcaucgugcgguuccccaacauuaccaaccugugucccuucggcgagguguucaacgccacccgguucgccagcguguacgccuggaaccggaagcggaucagcaacugcguggccgacuacagcgugcuguacaacagcgccagcuucagcaccuucaagugcuacggcgugagcccuaccaagcugaacgaccugugcuucaccaacguguacgcugacagcuucgugauccggggcgacgaggugcggcagaucgcccccggccagaccggcaagaucgccgacuacaacuacaagcugcccgacgacuucaccggcugcgugaucgccuggaacagcaacaaccuggacagcaaggugggcggcaacuacaacuaccuguaccggcuguuccguaagagcaaccugaagccauucgagcgggacaucagcaccgagaucuaccaggccggcagcacccccugcaacgguguggagggcuuuaacugcuacuucccccugcagagcuacggcuuccagcccaccuacggcgugggcuaccagcccuaccgggugguggugcugagcuucgagcugcugcacgcccccgccaccgugugcggcccuaaaaagagcaccaaccuggugaagaacaagugcgugaacuucaacuucaauggccugaccggcaccggcgugcugaccgagagcaacaagaaguuccugcccuuccagcaguucggccgggauaucgacgacaccaccgacgccgugcgggacccccagacccuggagauccuggacaucaccccaugcagcuucggcggcgugagcgugaucacccccggcacaaacaccagcaaccaggucgcagugcuguaccagggagugaacugcaccgaggugcccguggccauccacgccgaccagcugacccccaccuggcggguguacagcaccggcagcaacguguuccagacccgggccggcugccugaucggcgccgagcacgugaacaacuccuacgagugcgacauccccaucggcgccggcaucugcgcuagcuaccagacccagaccaacagccaccggcgggcccggagcguggccagccagagcaucaucgccuacaccaugagcuuaggcgccgagaacagcguggccuacagcaacaacagcaucgccauccccaucaacuucaccauaagcgugaccaccgagauccugccugugagcaugaccaagaccagcguggacuguaccauguacaucugcggcgacagcaccgagugcagcaaccugcugcugcaguacggcagcuucugcacccagcugaaccgggcgcugaccggcaucgccguggagcaggacaagaacacccaagagguguucgcccaggugaagcagaucuacaagaccccacccaucaaggacuucggcggcuucaacuucagccagauccugcccgaccccagcaagcccagcaagcggagcuucaucgaggaccugcuguucaacaaggugacucuggccgacgccggcuucaucaagcaguacggcgauugccugggggacaucgccgcccgggaccugaucugcgcucagaaguucaacggccugaccgugcugccuccccugcugaccgacgagaugaucgcccaguacaccagcgcccugcuugccggcaccaucaccagcggcuggaccuucggcgccggcgccgcacugcagauccccuucgccaugcagauggccuaccgguucaacggcaucggcgugacccagaacgugcuguacgagaaccagaagcugaucgccaaccaguucaacagcgccaucggcaagauccaggacagccugagcagcaccgccagcgcccugggcaagcugcaggacguggugaaccagaacgcccaggcucugaacacccuggugaagcagcugagcagcaacuucggcgccaucagcucagugcugaacgacauccuggccaggcuggacccacccgaggccgaggugcagaucgaccggcugaucaccggccggcugcagagccugcagaccuacgugacccagcagcugauccgggccgccgagauucgggccagcgccaaucuggcagccaccaagaugagcgagugcgugcugggccagagcaagcggguggacuuuugcggcaagggcuaccaccugaugagcuucccccagagcgcuccccacggcgugguguuccuccacgugaccuacgugcccgcccaggagaagaacuucacaaccgcccccgccaucugccacgacggcaaggcccacuucccccgggagggagucuucgugagcaacggcacccacugguucgugacccagcggaacuucuacgagccccagaucaucaccacccacaacaccuucgugagcggcaacugcgacguggugaucggcaucgugaacaacaccguguacgacccucugcagcccgagcuggacagcuucaaggaggagcuggacaaguacuucaagaaccacaccagccccgacguggaucugggcgacaucagcggcaucaacgccagcguggugaacauccagaaggagaucgaccggcugaacgagguggccaagaaccugaacgagagccugaucgaccugcaggagcugggcaaguacgagcaguacaucaaguggccaugguacaucuggcugggcuucaucgccggccugaucgccaucgugauggugaccaucaugcugugcugcaugaccagcugcuguagcugccugaagggcugcugcagcugcggcagcugcugcaaguucgacgaggacgacagcgagcccgugcugaagggcgugaagcugcacuacaccugauaauaggcuggagccucgguggccuagcuucuugccccuugggccuccccccagccccuccuccccuuccugcacccguacccccguggucuuugaauaaagucugagugggcggcaaaaaaaaaaaaaaaaaaaaaaaaaaaaaaaaaaaaaaaaaaaaaaaaaaaaaaaaaaaaaaaaaaaaaaaaaaaaaaaaaaaaaaaaaaaaaaaaaaaa

SEQ ID NO: 26224 - RNA, 4095 nt, Artificial Sequence
  SARS-CoV-2/Wuhan/WIV05/2019__EPI_ISL_402128 spike protein mRNA gc (1-1273)(K986P_V987P_K986P_V987P_K417N_E484K_N501Y_D614G)
gggaaauaagagagaaaagaagaguaagaagaaauauaagaccccggcgccgccaccauguucguguuccuggugcugcugccccuggugagcagccagugcgugaaccugaccacccggacccagcugcccccugccuacaccaacagcuucacccggggcguguacuaccccgacaagguguuccggagcagcgugcugcacagcacccaggaccuguuccugcccuucuucagcaacgugaccugguuccacgccauccacgugagcggcaccaacggcaccaagcgguucgacaacccagugcugcccuucaacgacggcguguacuucgccagcaccgagaagucaaacaucauccggggcuggaucuucggcaccacccuggacagcaagacacagagccugcugaucgugaacaacgccaccaacguggugaucaaggugugcgaguuucaguucugcaacgaccccuuccugggcguguacuaccacaagaacaacaagagcuggauggagagcgaguuccgggucuacagcagcgcuaacaauugcaccuucgaguacgugagccagcccuuccugauggaccucgagggcaagcagggcaacuucaagaaccugcgggaguucguguucaagaacaucgauggcuacuucaagaucuacagcaagcacacccccaucaaccuggugcgggaccugccccagggauucagcgcccuggagccucugguggaccugcccaucggcaucaacaucaccagguuccagacccugcuggcccugcaccggagcuaccugacccccggcgacagcagcagcggcuggaccgccggcgccgccgcauacuacgugggcuaccugcagccacggaccuuccugcugaaguacaacgagaacggcaccaucaccgacgccguggacugcgcccuggacccccugagcgagaccaagugcacccuaaagagcuucaccguggagaagggcaucuaccagaccagcaacuuccgggugcagcccacugagagcaucgugcgguuccccaacauuaccaaccugugucccuucggcgagguguucaacgccacccgguucgccagcguguacgccuggaaccggaagcggaucagcaacugcguggccgacuacagcgugcuguacaacagcgccagcuucagcaccuucaagugcuacggcgugagcccuaccaagcugaacgaccugugcuucaccaacguguacgcugacagcuucgugauccggggcgacgaggugcggcagaucgcccccggccagaccggcaacaucgccgacuacaacuacaagcugcccgacgacuucaccggcugcgugaucgccuggaacagcaacaaccuggacagcaaggugggcggcaacuacaacuaccuguaccggcuguuccguaagagcaaccugaagccauucgagcgggacaucagcaccgagaucuaccaggccggcagcacccccugcaacggugugaagggcuuuaacugcuacuucccccugcagagcuacggcuuccagcccaccuacggcgugggcuaccagcccuaccgggugguggugcugagcuucgagcugcugcacgcccccgccaccgugugcggcccuaaaaagagcaccaaccuggugaagaacaagugcgugaacuucaauuucaacggccugaccggcaccggcgugcugaccgagagcaacaagaaguuccugcccuuccagcaguucggccgggauaucgccgacaccaccgacgcagugcgggacccccagacccuggagauccuggacaucaccccaugcagcuucggcggcgugagcgucaucacccccggcacaaacaccagcaaccagguggccgugcuguaccagggagugaacugcaccgaggugcccguggccauccacgccgaccagcugacccccaccuggcggguguacagcaccggcagcaacguguuccagacccgggccggcugccugaucggcgccgagcacgugaacaacuccuacgagugcgacauccccaucggcgcuggcaucugcgccagcuaccagacccagaccaacagcccccggcgggcccggagcguggccagccagagcaucaucgccuacaccaugagcuuaggcgccgagaacagcguggccuacagcaacaacagcaucgcgaucccuaccaacuucaccaucagcgugaccaccgagauacugcccgugagcaugaccaagaccagcguggacuguaccauguacaucugcggcgacagcaccgagugcagcaaccugcugcugcaguacggcagcuucugcacccagcugaaccgggcccugaccggcaucgccguggagcaggacaagaacacccaagagguguucgcccaggugaagcagaucuacaagacucccccaaucaaggacuucggcggcuucaacuucagccagauccugcccgaccccagcaagcccagcaagcggagcuucaucgaggaccugcuguucaacaaggugacccuggccgacgccggcuucaucaagcaguacggcgacugccugggggauaucgccgcucgggaccugaucugcgcccagaaguucaacggccugaccgugcugcccccucugcugaccgacgagaugaucgcccaguacaccagcgcccugcuugccggcaccaucaccagcggcuggaccuucggcgccggcgcagcccugcagauccccuucgccaugcagauggccuaccgguucaacggcaucggcgugacccagaacgugcuguacgagaaccagaagcugaucgccaaccaguucaacagcgccaucggcaagauccaggacagccugagcagcaccgccagcgcccugggcaagcugcaggacguggugaaccagaacgcucaggcccugaacacccuggugaagcagcugagcagcaacuucggcgccaucagcucagugcugaaugacauccugagcaggcuggaucccccagaggccgaggugcagaucgaccggcugaucaccggccggcugcagagccugcagaccuacgugacccagcagcugauccgggccgccgagauccgggccagcgccaaccuggcagccaccaagaugagcgagugcgugcugggccagagcaagcggguggacuuuugcggcaagggcuaccaccugaugagcuucccccagagcgcuccccacggcgugguguuccuccacgugacauacguccccgcccaggagaagaacuucaccaccgcccccgccauuugccacgacggcaaggcccacuucccccgggagggaguguucgugagcaacggcacccacugguucgugacccagcggaacuucuacgagccucagaucaucaccaccgacaacaccuucgugagcggcaacugcgacguggugaucggcaucgugaacaacaccguguacgacccccugcagcccgagcuggacagcuucaaggaggagcuggacaaguacuucaagaaccacaccagcccagacguggaccugggcgacaucagcggcaucaacgccagcguggugaacauccagaaggagaucgaccggcugaacgagguggccaagaaccugaacgagagccugaucgaccugcaggagcugggcaaguacgagcaguacaucaaguggcccugguacaucuggcugggcuucaucgccggccugaucgccaucgugauggugaccaucaugcugugcugcaugaccagcugcuguagcugccugaagggcugcugcagcugcggcagcugcugcaaguucgacgaggacgacagcgagcccgugcugaagggcgugaagcugcacuacaccugauaauaggcuggagccucgguggccuagcuucuugccccuugggccuccccccagccccuccuccccuuccugcacccguacccccguggucuuugaauaaagucugagugggcggcaaaaaaaaaaaaaaaaaaaaaaaaaaaaaaaaaaaaaaaaaaaaaaaaaaaaaaaaaaaaaaaaaaaaaaaaaaaaaaaaaaaaaaaaaaaaaaaaaaaa

SEQ ID NO: 26225 - RNA, 4086 nt, Artificial Sequence
  SARS-CoV-2/Wuhan/WIV05/2019__EPI_ISL_402128 spike protein mRNA gc (1-1273)(K986P_V987P_K986P_V987P_L18F_D80A_D215G_L242del_A243del_ L244del_R246I_K417N_E484K_N501Y_D614G_A701V)
gggaaauaagagagaaaagaagaguaagaagaaauauaagaccccggcgccgccaccauguucguguuccuggugcugcugccccuggugagcagccagugcgugaacuucaccacccggacccagcugcccccugccuacaccaacagcuucacccggggcguguacuaccccgacaagguguuccggagcagcgugcugcacagcacccaggaccuguuccugcccuucuucagcaacgugaccugguuccacgccauccacgugagcggcaccaacggcaccaagcgguucgccaacccagugcugcccuucaacgacggcguguacuucgccagcaccgagaagucaaacaucauccggggcuggaucuuuggcaccacccuggacagcaagacacagagccugcugaucgugaacaacgcuaccaacguggugaucaaggugugcgaguuccaguucugcaacgaccccuuccugggcguguacuaccacaagaacaacaagagcuggauggagagcgaguuccgggucuacagcagcgccaacaauugcaccuucgaguacgugagccagcccuuccugauggaccuggagggcaagcagggcaacuucaagaaccuccgggaguucguguucaagaacaucgacggcuacuucaagaucuacagcaagcacacccccaucaaccuggugcggggacugccccagggcuucagcgcccuggagccucugguggaucugcccaucggcaucaacaucaccagguuccagacccugcacaucagcuaccugacccccggcgacagcagcagcggcuggaccgccggcgccgccgcauacuacgugggcuaccugcagccacggaccuuccugcugaaguacaacgagaacggcaccaucaccgacgccguggacugcgcccuggacccccugagcgagaccaagugcacccuuaagagcuucaccguggagaagggcaucuaccagaccagcaacuuccgggugcagcccacugagagcauugugcgguuccccaacaucaccaaccugugucccuucggcgagguguucaacgccacccgguucgccagcguguacgccuggaaccggaagcggaucagcaacugcguggccgacuacagcgugcuguacaacagcgccagcuucagcaccuucaagugcuacggcgugagcccuaccaagcugaacgaccugugcuucaccaacguguacgcugacagcuucgugauccggggcgacgaggugcggcagaucgcccccggccagaccggcaacaucgccgacuacaacuacaagcugcccgacgacuucaccggcugcgugaucgccuggaacagcaacaaccuggacagcaaggugggcggcaacuacaacuaccuguaccggcuauuccguaagagcaaccugaagccauuugagcgggacaucagcaccgagaucuaccaggccgguagcacccccugcaacggcgugaagggcuucaacugcuacuucccccugcagagcuacggcuuccagcccaccuacggcgugggcuaccagcccuaccgggugguggugcugagcuucgagcugcugcacgcccccgccaccgugugcggcccuaaaaagagcaccaaccuggugaagaacaagugcgugaacuucaauuucaacggccugaccggcaccggcgugcugaccgagagcaacaagaaguuccugcccuuccagcaguucggccgggacaucgccgacaccaccgaugcagugcgggacccccagacccuggagauccuggacaucaccccaugcagcuucggcggcgugagcgucaucacccccggaacaaacaccagcaaccagguggccgugcuguaccagggcgugaacugcaccgaggugcccguggccauccacgccgaccagcugacccccaccuggcggguguacagcaccggcagcaacguguuccagacccgggccggcugccugaucggcgccgagcacgugaacaacuccuacgagugcgacauccccaucggcgcuggcaucugcgccagcuaccagacccagaccaacagcccccggcgggcccggagcguggccagccagagcaucaucgccuacaccaugagccugggcguggagaacagcguggccuacagcaacaacagcaucgccaucccuaccaacuucaccauaagcgugaccaccgagauccugcccgugagcaugaccaagaccagcguggacuguaccauguacaucugcggcgacagcaccgagugcagcaaccuguuacugcaguacggcagcuucugcacccagcugaaccgggcgcugaccggcaucgccguggagcaggacaagaacacccaagagguguucgcccaggugaagcagaucuacaagacucccccaaucaaggacuucggcggcuucaacuucagccagauccugcccgaccccagcaagcccagcaagcggagcuucaucgaggaccugcuguucaacaaggugacccuggccgacgccggcuucaucaagcaguacggggacugccugggcgacaucgccgcccgggaccugaucugcgcucagaaguucaacggccugaccgugcugcccccucugcugaccgaugagaugaucgcccaguacaccagcgcccugcuggccggcaccaucaccagcggcuggaccuucggcgccggcgccgcacugcagauccccuucgccaugcagauggccuaccgguucaacggcaucggcgugacccagaacgugcuguacgagaaccagaagcugaucgccaaccaguucaacagcgccaucggcaagauccaggacagccugagcagcaccgccagcgcccugggcaagcugcaggacguggugaaccagaacgcccaggcucugaacacccuggugaagcagcugagcagcaacuuuggcgccaucagcucagugcugaaugacauccugagccggcuggaucccccagaggccgaggugcagaucgacaggcugaucaccggccggcugcagagccugcagaccuacgugacccagcagcugauccgggccgccgagauucgggccagcgccaaccuggccgcaaccaagaugagcgagugcgugcugggccagagcaagcggguggacuucugcggcaagggcuaccaccugaugagcuucccccagagcgcuccccacggcgugguguuccugcacgucacauacgugcccgcccaggagaagaacuucaccaccgcccccgccaucugccacgacggaaaggcccacuucccccgggagggcguguucgugagcaacggcacccacugguucgugacccagcggaacuucuacgagccucagaucaucaccaccgacaacaccuucgugagcggcaacugcgacguggugaucggcaucgugaacaacaccguguacgacccccugcagcccgagcuggacagcuucaaggaggagcucgacaaguacuucaagaaccacaccagcccagacguggaccugggcgacaucagcggcaucaacgccagcguggugaacauccagaaggagaucgaccggcugaacgagguggccaagaaccugaacgagagccugaucgaccugcaggagcugggcaaguacgagcaguacaucaaguggcccugguacaucuggcugggcuucaucgccggccugaucgccaucgugauggugaccaucaugcugugcugcaugaccagcugcuguagcugccugaagggcugcugcagcugcggcagcugcugcaaguucgacgaggacgacagcgagcccgugcugaagggcgugaagcugcacuacaccugauaauaggcuggagccucgguggccuagcuucuugccccuugggccuccccccagccccuccuccccuuccugcacccguacccccguggucuuugaauaaagucugagugggcggcaaaaaaaaaaaaaaaaaaaaaaaaaaaaaaaaaaaaaaaaaaaaaaaaaaaaaaaaaaaaaaaaaaaaaaaaaaaaaaaaaaaaaaaaaaaaaaaaaaaa

SEQ ID NO: 26226 - RNA, 4095 nt, Artificial Sequence
  SARS-CoV-2/Wuhan/WIV05/2019__EPI_ISL_402128 spike protein mRNA gc (1-1273)(K986P_V987P_K986P_V987P_E484K_D614G)
gggaaauaagagagaaaagaagaguaagaagaaauauaagaccccggcgccgccaccauguucguguuccuggugcugcugccccuggugagcagccagugcgugaaccugaccacccggacccagcugcccccugccuacaccaacagcuucacccggggcguguacuaccccgacaagguguuccggagcagcgugcugcacagcacccaggaccuguuccugcccuucuucagcaacgugaccugguuccacgccauccacgugagcggcaccaacggcaccaagcgguucgacaacccagugcugcccuucaacgacggcguguacuucgccagcaccgagaagucaaacaucauccggggcuggaucuucggcaccacccuggacagcaagacacagagccugcugaucgugaacaacgccaccaacguggugaucaaggugugcgaguuucaguucugcaacgaccccuuccugggcguguacuaccacaagaacaacaagagcuggauggagagcgaguuccgggucuacagcagcgcuaacaauugcaccuucgaguacgugagccagcccuuccugauggaccucgagggcaagcagggcaacuucaagaaccugcgggaguucguguucaagaacaucgauggcuacuucaagaucuacagcaagcacacccccaucaaccuggugcgggaccugccccagggauucagcgcccuggagccucugguggaccugcccaucggcaucaacaucaccagguuccagacccugcuggcccugcaccggagcuaccugacccccggcgacagcagcagcggcuggaccgccggcgccgccgcauacuacgugggcuaccugcagccacggaccuuccugcugaaguacaacgagaacggcaccaucaccgacgccguggacugcgcccuggacccccugagcgagaccaagugcacccuaaagagcuucaccguggagaagggcaucuaccagaccagcaacuuccgggugcagcccacugagagcaucgugcgguuccccaacauuaccaaccugugucccuucggcgagguguucaacgccacccgguucgccagcguguacgccuggaaccggaagcggaucagcaacugcguggccgacuacagcgugcuguacaacagcgccagcuucagcaccuucaagugcuacggcgugagcccuaccaagcugaacgaccugugcuucaccaacguguacgcugacagcuucgugauccggggcgacgaggugcggcagaucgcccccggccagaccggcaagaucgccgacuacaacuacaagcugcccgacgacuucaccggcugcgugaucgccuggaacagcaacaaccuggacagcaaggugggcggcaacuacaacuaccuguaccggcuguuccguaagagcaaccugaagccauucgagcgggacaucagcaccgagaucuaccaggccggcagcacccccugcaacggugugaagggcuuuaacugcuacuucccccugcagagcuacggcuuccagcccaccaacggcgugggcuaccagcccuaccgggugguggugcugagcuucgagcugcugcacgcccccgccaccgugugcggcccuaaaaagagcaccaaccuggugaagaacaagugcgugaacuucaauuucaacggccugaccggcaccggcgugcugaccgagagcaacaagaaguuccugcccuuccagcaguucggccgggauaucgccgacaccaccgacgcagugcgggacccccagacccuggagauccuggacaucaccccaugcagcuucggcggcgugagcgucaucacccccggcacaaacaccagcaaccagguggccgugcuguaccagggagugaacugcaccgaggugcccguggccauccacgccgaccagcugacccccaccuggcggguguacagcaccggcagcaacguguuccagacccgggccggcugccugaucggcgccgagcacgugaacaacuccuacgagugcgacauccccaucggcgcuggcaucugcgccagcuaccagacccagaccaacagcccccggcgggcccggagcguggccagccagagcaucaucgccuacaccaugagcuuaggcgccgagaacagcguggccuacagcaacaacagcaucgcgaucccuaccaacuucaccaucagcgugaccaccgagauacugcccgugagcaugaccaagaccagcguggacuguaccauguacaucugcggcgacagcaccgagugcagcaaccugcugcugcaguacggcagcuucugcacccagcugaaccgggcccugaccggcaucgccguggagcaggacaagaacacccaagagguguucgcccaggugaagcagaucuacaagacucccccaaucaaggacuucggcggcuucaacuucagccagauccugcccgaccccagcaagcccagcaagcggagcuucaucgaggaccugcuguucaacaaggugacccuggccgacgccggcuucaucaagcaguacggcgacugccugggggauaucgccgcucgggaccugaucugcgcccagaaguucaacggccugaccgugcugcccccucugcugaccgacgagaugaucgcccaguacaccagcgcccugcuugccggcaccaucaccagcggcuggaccuucggcgccggcgcagcccugcagauccccuucgccaugcagauggccuaccgguucaacggcaucggcgugacccagaacgugcuguacgagaaccagaagcugaucgccaaccaguucaacagcgccaucggcaagauccaggacagccugagcagcaccgccagcgcccugggcaagcugcaggacguggugaaccagaacgcucaggcccugaacacccuggugaagcagcugagcagcaacuucggcgccaucagcucagugcugaaugacauccugagcaggcuggaucccccagaggccgaggugcagaucgaccggcugaucaccggccggcugcagagccugcagaccuacgugacccagcagcugauccgggccgccgagauccgggccagcgccaaccuggcagccaccaagaugagcgagugcgugcugggccagagcaagcggguggacuuuugcggcaagggcuaccaccugaugagcuucccccagagcgcuccccacggcgugguguuccuccacgugacauacguccccgcccaggagaagaacuucaccaccgcccccgccauuugccacgacggcaaggcccacuucccccgggagggaguguucgugagcaacggcacccacugguucgugacccagcggaacuucuacgagccucagaucaucaccaccgacaacaccuucgugagcggcaacugcgacguggugaucggcaucgugaacaacaccguguacgacccccugcagcccgagcuggacagcuucaaggaggagcuggacaaguacuucaagaaccacaccagcccagacguggaccugggcgacaucagcggcaucaacgccagcguggugaacauccagaaggagaucgaccggcugaacgagguggccaagaaccugaacgagagccugaucgaccugcaggagcugggcaaguacgagcaguacaucaaguggcccugguacaucuggcugggcuucaucgccggccugaucgccaucgugauggugaccaucaugcugugcugcaugaccagcugcuguagcugccugaagggcugcugcagcugcggcagcugcugcaaguucgacgaggacgacagcgagcccgugcugaagggcgugaagcugcacuacaccugauaauaggcuggagccucgguggccuagcuucuugccccuugggccuccccccagccccuccuccccuuccugcacccguacccccguggucuuugaauaaagucugagugggcggcaaaaaaaaaaaaaaaaaaaaaaaaaaaaaaaaaaaaaaaaaaaaaaaaaaaaaaaaaaaaaaaaaaaaaaaaaaaaaaaaaaaaaaaaaaaaaaaaaaaa

SEQ ID NO: 26227 - RNA, 4095 nt, Artificial Sequence
  SARS-CoV-2/Wuhan/WIV05/2019__EPI_ISL_402128 spike protein mRNA gc (1-1273)(K986P_V987P_K986P_V987P_L18F_T20N_P26S_D138Y_R190S_K417T _E484K_N501Y_D614G_H655Y_T1027I)
gggaaauaagagagaaaagaagaguaagaagaaauauaagaccccggcgccgccaccauguucguguuccuggugcugcugccccuggugagcagccagugcgugaacuucaccaaccggacccagcugcccagcgccuacaccaacagcuucacccggggcguguacuacccugacaagguguuccggagcagcgugcugcacagcacccaggaccuguuccugcccuucuucagcaacgugaccugguuccacgccauccacgugagcggcaccaacggcaccaagcgguucgacaaccccgugcugccauucaacgacggcguguacuucgccagcaccgagaagucaaacaucauccggggcuggaucuuuggcaccacccuggacagcaagacccagagccugcugaucgugaacaacgccacaaacguggugaucaaggugugcgaguuccaguucugcaacuaccccuuccugggcguguacuaccacaagaacaacaagagcuggauggagagcgaguuccgggucuacagcagcgcuaauaacugcaccuucgaguacgugagccagcccuuccugauggaccuggagggcaagcagggcaacuucaagaaccucagcgaguucguguucaagaacaucgacggcuacuucaagaucuacagcaagcacacccccaucaaccuggugcgggaucugccccagggauucagcgcccuggagccccugguggaccugccuaucggcaucaacaucacccgguuccagacccugcuggcccugcacaggagcuaccugacccccggcgacagcagcagcggcuggaccgccggcgccgccgcauacuacgugggcuaccugcagccccggaccuuccugcugaaguacaacgagaacggcaccaucaccgacgccguggacugcgcccuggacccacugagcgagaccaagugcacccuaaagagcuucaccguggagaagggcaucuaccagaccagcaacuuccgggugcagcccaccgagagcaucgugcgguuccccaacauuacuaaccugugucccuucggcgagguguucaacgccacccgguucgccagcguguacgccuggaaccggaagcggaucagcaacugcguggccgacuacagcgugcuguacaacagcgccagcuucagcaccuucaagugcuacggcgugagccccaccaagcugaacgaccugugcuucaccaacguguacgcugacagcuucgugauccggggcgacgaggugcggcagaucgccccuggccagaccggcaccaucgccgacuacaacuacaagcugcccgacgacuucaccggcugcgugaucgccuggaacagcaacaaccuggacagcaaggugggcggcaacuacaacuaccuguaccggcuguuccguaagagcaaccugaagcccuuugagcgggacaucagcaccgagaucuaccaggccggcagcaccccaugcaacggugugaagggcuucaacugcuacuucccccugcagagcuacggcuuccagcccaccuacggcgugggcuaccagcccuaccgggugguggugcugagcuucgagcugcugcacgcccccgccaccgugugcggccccaaaaagagcaccaaccuggugaagaacaagugcgugaacuucaauuucaacggccugaccggcaccggcgugcugaccgagagcaacaagaaguuccugccuuuccagcaguucggccgggacaucgccgauaccaccgacgcagugcgggacccccagacccuggagauccuggacaucacccccugcagcuucggcggcgugagcgucaucaccccaggcacaaacaccagcaaccagguggccgugcuguaccagggagugaacugcaccgaggugcccguggccauccacgccgaccagcugacccccaccuggcggguguacuccaccggcagcaacguguuccagacccgggccggcugccugaucggcgccgaguacgugaacaacagcuacgagugcgacauccccaucggcgcuggcaucugcgccagcuaccagacccagaccaacagcccccggcgggcccggagcguggccagccagagcaucaucgccuacaccaugagccugggcgccgagaacagcguggccuacagcaacaacagcaucgcgauccccaccaacuucaccaucagcgugaccaccgagauauuaccugugagcaugaccaagaccagcguggacuguaccauguacaucugcggcgacagcaccgagugcagcaaccugcugcugcaguacggcagcuucugcacccagcugaaccgggcccugaccggcaucgccguggagcaggacaagaacacccaagagguguucgcccaggugaagcagaucuacaagacuccacccaucaaggacuucggcggcuucaacuucagccagauccugcccgaccccagcaagcccagcaagcggagcuucaucgaggaccugcuguucaacaaggugacccuggccgacgccggcuucaucaagcaguacggcgacugccugggggacaucgccgcucgggaucugaucugcgcccagaaguucaacggccugaccgugcugccuccccugcugaccgacgagaugaucgcccaguacaccagcgcccugcuggccggcaccaucaccagcggcuggaccuucggcgccggcgcagcccuucagauccccuucgccaugcagauggccuaccgguucaacggcaucggcgugacccagaacgugcuguacgagaaccagaagcugaucgccaaccaguucaacagcgccaucggcaagauccaggacagccugagcagcaccgccagcgcccugggcaagcugcaggacguggugaaccagaacgcucaggcccugaacacccuggugaagcagcugagcucaaacuuuggcgccaucagcagcgugcugaaugacauccugagccggcuggacccacccgaggccgaggugcagaucgacaggcugaucaccggccggcugcagagccugcagaccuacgugacccagcagcugauccgggccgccgagauccgggccagcgccaaccuggcagccauuaagaugagcgagugcgugcugggccagagcaagcggguggacuucugcggcaagggcuaccaccugaugagcuucccccagagcgcuccccacggcgugguguuccugcacgugaccuacguccccgcccaggagaagaacuucacaaccgcccccgccaucugccacgacggcaaggcccacuucccccgggagggaguguucgugagcaacggcacccacugguucgugacccagcggaacuucuacgagccccagaucaucaccaccgacaacaccuucgugagcggcaacugcgacguggugaucggcaucgugaacaacaccguguacgacccucuccagcccgagcuggacagcuucaaggaggagcuggacaaguacuucaagaaccacaccagccccgacguggaccugggcgauaucagcggcaucaacgccagcguggugaacauccagaaggagaucgaccggcugaacgagguggccaagaaccugaacgagagccugaucgaccugcaggagcugggcaaguacgagcaguacaucaaguggccaugguacaucuggcugggcuucaucgccggccugaucgccaucgugauggugaccaucaugcugugcugcaugaccagcugcuguagcugccugaagggcugcugcagcugcggcagcugcugcaaguucgacgaggacgacagcgagcccgugcugaagggcgugaagcugcacuacaccugauaauaggcuggagccucgguggccuagcuucuugccccuugggccuccccccagccccuccuccccuuccugcacccguacccccguggucuuugaauaaagucugagugggcggcaaaaaaaaaaaaaaaaaaaaaaaaaaaaaaaaaaaaaaaaaaaaaaaaaaaaaaaaaaaaaaaaaaaaaaaaaaaaaaaaaaaaaaaaaaaaaaaaaaaa

SEQ ID NO: 26228 - RNA, 4095 nt, Artificial Sequence
  SARS-CoV-2/Wuhan/WIV05/2019__EPI_ISL_402128 spike protein mRNA gc (1-1273)(K986P_V987P_K986P_V987P_S13I_W152C_L452R_D614G)
gggaaauaagagagaaaagaagaguaagaagaaauauaagaccccggcgccgccaccauguucguguuccuggugcugcugccccuggugagcauccagugcgugaaccugaccacccggacccagcugcccccugccuacaccaacagcuucacccggggcguguacuaccccgacaagguguuccggagcagcgugcugcacagcacccaggaccuguuccugcccuucuucagcaacgugaccugguuccacgccauccacgugagcggcaccaacggcaccaagcgguucgacaacccagugcugcccuucaacgacggcguguacuucgccagcaccgagaagucaaacaucauccggggcuggaucuucggcaccacccuggacagcaagacacagagccugcugaucgugaacaacgccaccaacguggugaucaaggugugcgaguuucaguucugcaacgaccccuuccugggcguguacuaccacaagaacaacaagagcugcauggagagcgaguuccgggucuacagcagcgcuaacaauugcaccuucgaguacgugagccagcccuuccugauggaccucgagggcaagcagggcaacuucaagaaccugcgggaguucguguucaagaacaucgauggcuacuucaagaucuacagcaagcacacccccaucaaccuggugcgggaccugccccagggauucagcgcccuggagccucugguggaccugcccaucggcaucaacaucaccagguuccagacccugcuggcccugcaccggagcuaccugacccccggcgacagcagcagcggcuggaccgccggcgccgccgcauacuacgugggcuaccugcagccacggaccuuccugcugaaguacaacgagaacggcaccaucaccgacgccguggacugcgcccuggacccccugagcgagaccaaguguacccuaaagagcuucaccguggagaagggcaucuaccagaccagcaacuuccgggugcagcccacugagagcauugugcgguuccccaacaucaccaaccugugccccuucggcgagguguucaacgccacccgguucgccagcguguacgccuggaaccggaagcggaucagcaacugcguggccgacuacagcgugcuguacaacagcgccagcuucagcaccuucaagugcuacggcgugagcccuaccaagcugaacgaccugugcuucaccaacguguacgcugacagcuucgugauccggggcgacgaggugcggcagaucgcccccggccagaccggcaagaucgccgacuacaacuacaagcugcccgacgacuucaccggcugcgugaucgccuggaacagcaacaaccuggacagcaaggugggcggcaacuacaacuaccgguaccggcuguuccguaagagcaaccugaagccauucgagcgggacaucagcaccgagaucuaccaggccggcagcacccccugcaacgguguggagggcuuuaacugcuacuucccccugcagagcuacggcuuccagcccaccaacggcgugggcuaccagcccuaccgggugguggugcugagcuucgagcugcugcacgcccccgccaccgugugcggcccuaaaaagagcaccaaccuggugaagaacaagugcgugaacuucaauuucaacggccugaccggcaccggcgugcugaccgagagcaacaagaaguuccugcccuuccagcaguucggccgggauaucgccgacaccaccgacgcagugcgggacccccagacccuggagauccuggacaucaccccaugcagcuucggcggcgugagcgucaucacccccggcacaaacaccagcaaccagguggccgugcuguaccagggagugaacugcaccgaggugcccguggccauccacgccgaccagcugacccccaccuggcggguguacagcaccggcagcaacguguuccagacccgggccggcugccugaucggcgccgagcacgugaacaacagcuacgagugcgacauccccaucggcgcuggcaucugugccuccuaccagacccagaccaacagcccccggcgggcccggagcguggccagccagagcaucaucgccuacaccaugagccugggcgccgagaacagcguggccuacagcaacaacagcaucgcgaucccuaccaacuucaccauaagcgugaccaccgagaucuuacccgugagcaugaccaagaccagcguggacugcaccauguacaucugcggcgacagcaccgagugcagcaaccugcugcugcaguacggcagcuucugcacccagcugaaccgggcccugaccggcaucgccguggagcaggacaagaacacccaagagguguucgcccaggugaagcagaucuacaagacucccccaaucaaggacuucggcggcuucaacuucagccagauccugcccgaccccagcaagcccagcaagcggagcuucaucgaggaccugcuguucaacaaggugacccuggccgacgccggcuucaucaagcaguacggcgacugccugggggauaucgccgcucgggaccugaucugcgcccagaaguucaacggccugaccgugcugcccccucugcugaccgacgagaugaucgcccaguacaccagcgcccugcuggccggcaccaucaccagcggcuggaccuucggcgccggcgcagcccuucagauccccuucgccaugcagauggccuacagguucaacggcaucggcgugacccagaacgugcuguacgagaaccagaagcugaucgccaaccaguucaacagcgccaucggcaagauccaggacagccugagcagcaccgccagcgcccugggcaagcugcaggacguggugaaccagaacgcucaggcccugaacacccuggugaagcagcugagcagcaacuucggcgccaucagcagcgugcugaaugacauccugucacggcuggaucccccagaggccgaggugcagaucgaccggcugaucaccggccggcugcagagccugcagaccuacgugacccagcagcugauccgggccgccgagauucgggccagcgccaaccuggcagccaccaagaugagcgagugcgugcugggccagagcaagcggguggacuuuugcggcaagggcuaccaccugaugagcuucccccagagcgcuccccacggcgugguguuccugcacgugacauacguccccgcccaggagaagaacuucaccaccgcccccgccaucugccacgacggcaaggcccacuucccccgggagggaguguucgugagcaacggcacccacugguucgugacccagcggaacuucuacgagccucagaucaucaccaccgacaacaccuucgugagcggcaacugcgacguggugaucggcaucgugaacaacaccguguacgacccccuccagcccgagcuggacagcuucaaggaggagcuggacaaguacuucaagaaccacaccagcccagacguggaccugggcgacaucagcggcaucaacgccagcguggugaacauccagaaggagaucgaccggcugaacgagguggccaagaaccugaacgagagccugaucgaccugcaggagcugggcaaguacgagcaguacaucaaguggcccugguacaucuggcugggcuucaucgccggccugaucgccaucgugauggugaccaucaugcugugcugcaugaccagcuguugcagcugccugaagggcugcugcagcugcggcagcugcugcaaguucgacgaggacgacagcgagcccgugcugaagggcgugaagcugcacuacaccugauaauaggcuggagccucgguggccuagcuucuugccccuugggccuccccccagccccuccuccccuuccugcacccguacccccguggucuuugaauaaagucugagugggcggcaaaaaaaaaaaaaaaaaaaaaaaaaaaaaaaaaaaaaaaaaaaaaaaaaaaaaaaaaaaaaaaaaaaaaaaaaaaaaaaaaaaaaaaaaaaaaaaaaaaa

SEQ ID NO: 26229 - RNA, 4095 nt, Artificial Sequence
  SARS-CoV-2/Wuhan/WIV05/2019__EPI_ISL_402128 spike protein mRNA gc mod (1-1273)(K986P_V987P)
gggaaauaagagagaaaagaagaguaagaagaaauauaagaccccggcgccgccaccauguucguguuucuggugcugcugccccugguguccagccagugugugaaccugaccaccagaacacagcugccuccagccuacaccaacagcuucaccagaggcguguacuaccccgacaagguguucagauccagcgugcugcacucuacccaggaccuguuccugccuuucuucagcaacgugaccugguuccacgccauccacguguccggcaccaauggcaccaagagauucgacaaccccgugcugcccuucaacgacgggguguacuuugccagcaccgagaaguccaacaucaucagaggcuggaucuucggcaccacacuggacagcaagacccagagccugcugaucgugaacaacgccaccaacguggucaucaaagugugcgaguuccaguucugcaacgaccccuuccugggcgucuacuaccacaagaacaacaagagcuggauggaaagcgaguuccggguguacagcagcgccaacaacugcaccuucgaguacgugucccagccuuuccugauggaccuggaaggcaagcagggcaacuucaagaaccugcgcgaguucguguucaagaacaucgacggcuacuucaaaaucuacagcaagcacaccccuaucaaccucgugcgggaucugccucagggcuucucugcucuggaaccccugguggaucugcccaucggcaucaacaucacccgguuucagacacugcuggcccugcacagaagcuaccugacaccuggcgauagcagcagcggauggacagcuggugccgccgcuuacuaugugggcuaccugcagccuagaaccuuccugcugaaguacaacgagaacggcaccaucaccgacgccguggauugugcucuggauccucugagcgagacaaagugcacccugaaguccuucaccguggaaaagggcaucuaccagaccagcaacuuccgggugcagcccaccgaauccaucgugcgguuccccaauaucaccaaucugugccccuucggcgagguguucaaugccaccagauucgccucuguguacgccuggaaccggaagcggaucagcaauugcguggccgacuacuccgugcuguacaacuccgccagcuucagcaccuucaagugcuacggcguguccccuaccaagcugaacgaccugugcuucacaaacguguacgccgacagcuucgugauccggggagaugaagugcggcagauugccccuggacagacaggcaagaucgccgacuacaacuacaagcugcccgacgacuucaccggcugugugauugccuggaacagcaacaaccuggacuccaaagucggcggcaacuacaauuaccuguaccggcuguuccggaaguccaaucugaagcccuucgagcgggacaucagcaccgaaaucuaucaggccggcagcaccccuugcaacggcguggaaggcuucaacugcuacuucccacugcaguccuacggcuuucagcccacaaauggcgugggcuaucagcccuacagagugguggugcugagcuucgaacugcugcaugcuccugccacagugugcggcccuaagaaaagcaccaaucucgugaagaacaaaugcgugaacuucaacuucaacggccugaccggcaccggcgugcugacagagagcaacaagaaguuccugccauuccagcaguuuggccgggauaucgccgauaccacagacgccguuagagauccccagacacuggaaauccuggacaucaccccaugcagcuucggcggagugucugugaucaccccuggcaccaacaccagcaaucagguggcagugcuguaccaggacgugaacuguaccgaagugcccguggccauucacgccgaucagcugacaccuacauggcggguguacuccaccggcagcaauguguuucagaccagagccggcugucugaucggagccgagcacgugaacaauagcuacgagugcgacauccccaucggcgcuggcaucugugccagcuaccagacacagacaaacagccccagacgggcuagaagcguggccagccagagcaucauugccuacacaaugucucugggcgccgagaacagcguggccuacuccaacaacucuaucgcuauccccaccaacuucaccaucagcgugaccaccgagauccugccuguguccaugaccaagaccagcguggacugcaccauguacaucugcggcgauuccaccgagugcuccaaccugcugcugcaguacggcagcuucugcacccagcugaauagagcccugacagggaucgccguggaacaggacaagaacacccaagagguguucgcccaagugaagcaaaucuacaagaccccuccuaucaaggacuucggcggcuucaauuucagccagauucugcccgauccuagcaagcccagcaagcggagcuucaucgaggaccugcuguucaacaaagugacacuggccgacgccggcuucaucaagcaguauggcgauugucugggcgacauugccgccagggaucugauuugcgcccagaaguuuaacggacugacagugcugccuccucugcugaccgaugagaugaucgcccaguacacaucugcccugcuggccggcacaaucacaagcggcuggacauuuggagcuggcgccgcucugcagauccccuuugcuaugcagauggccuaccgguucaacggcaucggagugacccagaaugugcuguacgagaaccagaagcugaucgccaaccaguucaacagcgccaucggcaagauccaggacagccugagcagcacagcaagcgcccugggaaagcugcaggacguggucaaccagaaugcccaggcacugaacacccuggucaagcagcuguccuccaacuucggcgccaucagcucugugcugaacgauauccugagcagacuggacccuccugaggccgaggugcagaucgacagacugaucacaggcagacugcagagccuccagacauacgugacccagcagcugaucagagccgccgagauuagagccucugccaaucuggccgccaccaagaugucugagugugugcugggccagagcaagagaguggacuuuugcggcaagggcuaccaccugaugagcuucccucagucugccccucacggcgugguguuucugcacgugacauaugugcccgcucaagagaagaauuucaccaccgcuccagccaucugccacgacggcaaagcccacuuuccuagagaaggcguguucguguccaacggcacccauugguucgugacacagcggaacuucuacgagccccagaucaucaccaccgacaacaccuucgugucuggcaacugcgacguugugaucggcauugugaacaauaccguguacgacccucugcagcccgagcuggacagcuucaaagaggaacuggacaaguacuuuaagaaccacacaagccccgacguggaccugggcgauaucagcggaaucaaugccagcgucgugaacauccagaaagagaucgaccggcugaacgagguggccaagaaucugaacgagagccugaucgaccugcaagaacuggggaaguacgagcaguacaucaaguggcccugguacaucuggcugggcuuuaucgccggacugauugccaucgugauggucacaaucaugcuguguugcaugaccagcugcuguagcugccugaagggcuguuguagcuguggcagcugcugcaaguucgacgaggacgauucugagcccgugcugaagggcgugaaacugcacuacaccugauaauaggcuggagccucgguggccuagcuucuugccccuugggccuccccccagccccuccuccccuuccugcacccguacccccguggucuuugaauaaagucugagugggcggcaaaaaaaaaaaaaaaaaaaaaaaaaaaaaaaaaaaaaaaaaaaaaaaaaaaaaaaaaaaaaaaaaaaaaaaaaaaaaaaaaaaaaaaaaaaaaaaaaaaa
